United States Patent Application Publication US 2022/0213167 A1 - sequence listing, part 20

SEQ ID NO: 415230 - protein, 17 aa, Homo sapiens
  CDR3 for beta chain variable domain of TCR clone 207615 (TRBV28, TRBJ2-5)
CASSTPEGDALQETQYF

SEQ ID NO: 415231 - protein, 16 aa, Homo sapiens
  CDR3 for alpha chain variable domain of TCR clone 207616 (TRAV4, TRAJ9)
CLVGYPNRPGGFKTIF

SEQ ID NO: 415232 - protein, 13 aa, Homo sapiens
  CDR3 for beta chain variable domain of TCR clone 207616 (TRBV5-5, TRBJ1-2)
CASSFWRGEDYAF

SEQ ID NO: 415233 - protein, 15 aa, Homo sapiens
  CDR3 for alpha chain variable domain of TCR clone 207617 (TRAV21, TRAJ24)
CAARSSTDSWGKLQF

SEQ ID NO: 415234 - protein, 17 aa, Homo sapiens
  CDR3 for beta chain variable domain of TCR clone 207617 (TRBV13, TRBJ2-3)
CASSLSRVAVGRNTQYF

SEQ ID NO: 415235 - protein, 11 aa, Homo sapiens
  CDR3 for alpha chain variable domain of TCR clone 207618 (TRAV4, TRAJ31)
CLVGDNARLMF

SEQ ID NO: 415236 - protein, 14 aa, Homo sapiens
  CDR3 for beta chain variable domain of TCR clone 207618 (TRBV4-1, TRBJ2-2)
CASSQAVNTGGLFF

SEQ ID NO: 415237 - protein, 16 aa, Homo sapiens
  CDR3 for alpha chain variable domain of TCR clone 207619 (TRAV23/DV6, TRAJ9)
CAASIGGNTGGFKTIF

SEQ ID NO: 415238 - protein, 17 aa, Homo sapiens
  CDR3 for beta chain variable domain of TCR clone 207619 (TRBV28, TRBJ2-7)
CASSPLRGRRWKGGQYF

SEQ ID NO: 415239 - protein, 12 aa, Homo sapiens
  CDR3 for alpha chain variable domain of TCR clone 207620 (TRAV12-2, TRAJ10)
CGVTGGGNKLTF

SEQ ID NO: 415240 - protein, 14 aa, Homo sapiens
  CDR3 for beta chain variable domain of TCR clone 207620 (TRBV27, TRBJ2-7)
CASATGTERREQYF

SEQ ID NO: 415241 - protein, 14 aa, Homo sapiens
  CDR3 for alpha chain variable domain of TCR clone 207621 (TRAV17, TRAJ57)
CATDPQGGSEKLVF

SEQ ID NO: 415242 - protein, 12 aa, Homo sapiens
  CDR3 for beta chain variable domain of TCR clone 207621 (TRBV14, TRBJ2-7)
CASSRLKGEQYF

SEQ ID NO: 415243 - protein, 15 aa, Homo sapiens
  CDR3 for alpha chain variable domain of TCR clone 207622 (TRAV23/DV6, TRAJ30)
CAASSQESRDDKIIF

SEQ ID NO: 415244 - protein, 17 aa, Homo sapiens
  CDR3 for beta chain variable domain of TCR clone 207622 (TRBV4-3, TRBJ2-1)
CASSQFSSGRASGEQLC

SEQ ID NO: 415245 - protein, 13 aa, Homo sapiens
  CDR3 for alpha chain variable domain of TCR clone 207623 (TRAV35, TRAJ58)
CAGLETSGSRLTF

SEQ ID NO: 415246 - protein, 15 aa, Homo sapiens
  CDR3 for beta chain variable domain of TCR clone 207623 (TRBV20-1, TRBJ2-1)
CSARFSAGGLNGQFF

SEQ ID NO: 415247 - protein, 15 aa, Homo sapiens
  CDR3 for alpha chain variable domain of TCR clone 207624 (TRAV26-1, TRAJ29)
CIVRVEGSGNTPLVF

SEQ ID NO: 415248 - protein, 14 aa, Homo sapiens
  CDR3 for beta chain variable domain of TCR clone 207624 (TRBV13, TRBJ2-5)
CASSRRLAEETQYF

SEQ ID NO: 415249 - protein, 11 aa, Homo sapiens
  CDR3 for alpha chain variable domain of TCR clone 207625 (TRAV1-2, TRAJ20)
CAVANDYKLSF

SEQ ID NO: 415250 - protein, 18 aa, Homo sapiens
  CDR3 for beta chain variable domain of TCR clone 207625 (TRBV20-1, TRBJ2-6)
CSAGTTPTHGSGANGLTF

SEQ ID NO: 415251 - protein, 15 aa, Homo sapiens
  CDR3 for alpha chain variable domain of TCR clone 207626 (TRAV8-3, TRAJ45)
CAPSYSGGGADVLTF

SEQ ID NO: 415252 - protein, 13 aa, Homo sapiens
  CDR3 for beta chain variable domain of TCR clone 207626 (TRBV10-3, TRBJ2-7)
CASKLAVNYEQYF

SEQ ID NO: 415253 - protein, 12 aa, Homo sapiens
  CDR3 for alpha chain variable domain of TCR clone 207627 (TRAV13-2, TRAJ8)
CAPWLGFQKLLF

SEQ ID NO: 415254 - protein, 22 aa, Homo sapiens
  CDR3 for beta chain variable domain of TCR clone 207627 (TRBV29-1, TRBJ2-5)
TVSNMSPEDSSIYLCSAGTQYF

SEQ ID NO: 415255 - protein, 12 aa, Homo sapiens
  CDR3 for alpha chain variable domain of TCR clone 207628 (TRAV23/DV6, TRAJ53)
CAAGGSNYKLTF

SEQ ID NO: 415256 - protein, 11 aa, Homo sapiens
  CDR3 for beta chain variable domain of TCR clone 207628 (TRBV2, TRBJ1-1)
CASREGTEAFF

SEQ ID NO: 415257 - protein, 13 aa, Homo sapiens
  CDR3 for alpha chain variable domain of TCR clone 207629 (TRAV1-2, TRAJ12)
CAVSMDSSYKLIF

SEQ ID NO: 415258 - protein, 14 aa, Homo sapiens
  CDR3 for beta chain variable domain of TCR clone 207629 (TRBV19, TRBJ2-1)
CASISGRDYNEQFF

SEQ ID NO: 415259 - protein, 14 aa, Homo sapiens
  CDR3 for alpha chain variable domain of TCR clone 207630 (TRAV12-2, TRAJ40)
CAVKIPSGTYKCIF

SEQ ID NO: 415260 - protein, 14 aa, Homo sapiens
  CDR3 for beta chain variable domain of TCR clone 207630 (TRBV20-1, TRBJ1-1)
CSAQTRIGGTEDFF

SEQ ID NO: 415261 - protein, 10 aa, Homo sapiens
  CDR3 for alpha chain variable domain of TCR clone 207631 (TRAV12-2, TRAJ22)
CAVNETQLTF

SEQ ID NO: 415262 - protein, 13 aa, Homo sapiens
  CDR3 for beta chain variable domain of TCR clone 207631 (TRBV7-9, TRBJ1-2)
CASSLKQNYGYTF

SEQ ID NO: 415263 - protein, 17 aa, Homo sapiens
  CDR3 for alpha chain variable domain of TCR clone 207632 (TRAV3, TRAJ6)
CAVSRRTDTGGSYIPTF

SEQ ID NO: 415264 - protein, 18 aa, Homo sapiens
  CDR3 for beta chain variable domain of TCR clone 207632 (TRBV7-2, TRBJ2-3)
FASSLETSRGRKADTQYF

SEQ ID NO: 415265 - protein, 13 aa, Homo sapiens
  CDR3 for alpha chain variable domain of TCR clone 207633 (TRAV22, TRAJ29)
CAVGGSGNTPLVF

SEQ ID NO: 415266 - protein, 18 aa, Homo sapiens
  CDR3 for beta chain variable domain of TCR clone 207633 (TRBV10-3, TRBJ2-3)
CAISASRVGPMRGDTQYF

SEQ ID NO: 415267 - protein, 14 aa, Homo sapiens
  CDR3 for alpha chain variable domain of TCR clone 207634 (TRAV8-4, TRAJ13)
CAVTLSGGDQKVTF

SEQ ID NO: 415268 - protein, 14 aa, Homo sapiens
  CDR3 for beta chain variable domain of TCR clone 207634 (TRBV7-2, TRBJ1-2)
CASSQAGSTYGYTF

SEQ ID NO: 415269 - protein, 12 aa, Homo sapiens
  CDR3 for alpha chain variable domain of TCR clone 207635 (TRAV12-3, TRAJ17)
CAMTLTGNKLTF

SEQ ID NO: 415270 - protein, 17 aa, Homo sapiens
  CDR3 for beta chain variable domain of TCR clone 207635 (TRBV11-2, TRBJ2-1)
CASSFYPPGVEYNEQFF

SEQ ID NO: 415271 - protein, 13 aa, Homo sapiens
  CDR3 for alpha chain variable domain of TCR clone 207636 (TRAV36/DV7, TRAJ21)
CAVEAYNFNKFYF

SEQ ID NO: 415272 - protein, 14 aa, Homo sapiens
  CDR3 for beta chain variable domain of TCR clone 207636 (TRBV20-1, TRBJ2-1)
CSAQIGGSANEQFF

SEQ ID NO: 415273 - protein, 14 aa, Homo sapiens
  CDR3 for alpha chain variable domain of TCR clone 207637 (TRAV17, TRAJ35)
CATDKPGFGNVLHC

SEQ ID NO: 415274 - protein, 15 aa, Homo sapiens
  CDR3 for beta chain variable domain of TCR clone 207637 (TRBV28, TRBJ2-5)
CASSSGRVIQETQYF

SEQ ID NO: 415275 - protein, 14 aa, Homo sapiens
  CDR3 for alpha chain variable domain of TCR clone 207638 (TRAV21, TRAJ37)
CAVKGSSNTGKLIL

SEQ ID NO: 415276 - protein, 14 aa, Homo sapiens
  CDR3 for beta chain variable domain of TCR clone 207638 (TRBV7-2, TRBJ2-1)
CASSRGGARNEQFF

SEQ ID NO: 415277 - protein, 14 aa, Homo sapiens
  CDR3 for alpha chain variable domain of TCR clone 207639 (TRAV17, TRAJ35)
CATDRPGVGNVLHC

SEQ ID NO: 415278 - protein, 18 aa, Homo sapiens
  CDR3 for beta chain variable domain of TCR clone 207639 (TRBV11-3, TRBJ2-2)
CASSTRPGAKTTNTGELF

SEQ ID NO: 415279 - protein, 14 aa, Homo sapiens
  CDR3 for alpha chain variable domain of TCR clone 207640 (TRAV1-2, TRAJ16)
CAVNRFSDGQKLLF

SEQ ID NO: 415280 - protein, 14 aa, Homo sapiens
  CDR3 for beta chain variable domain of TCR clone 207640 (TRBV6-3, TRBJ2-2)
CASTYAPDTGELFF

SEQ ID NO: 415281 - protein, 15 aa, Homo sapiens
  CDR3 for alpha chain variable domain of TCR clone 207641 (TRAV2, TRAJ11)
CAVGGRNSGYSTLAF

SEQ ID NO: 415282 - protein, 12 aa, Homo sapiens
  CDR3 for beta chain variable domain of TCR clone 207641 (TRBV28, TRBJ2-7)
CASSFSSYEQYF

SEQ ID NO: 415283 - protein, 10 aa, Homo sapiens
  CDR3 for alpha chain variable domain of TCR clone 207642 (TRAV30, TRAJ16)
CGTGGKKLLF

SEQ ID NO: 415284 - protein, 14 aa, Homo sapiens
  CDR3 for beta chain variable domain of TCR clone 207642 (TRBV6-1, TRBJ1-2)
CASSTGWPPTGYTF

SEQ ID NO: 415285 - protein, 11 aa, Homo sapiens
  CDR3 for alpha chain variable domain of TCR clone 207643 (TRAV17, TRAJ9)
WATTGGVKTIF

SEQ ID NO: 415286 - protein, 14 aa, Homo sapiens
  CDR3 for beta chain variable domain of TCR clone 207643 (TRBV7-9, TRBJ2-2)
CASSGLADTGELFF

SEQ ID NO: 415287 - protein, 14 aa, Homo sapiens
  CDR3 for alpha chain variable domain of TCR clone 207644 (TRAV2, TRAJ9)
CAVEDRSGGFKTIF

SEQ ID NO: 415288 - protein, 15 aa, Homo sapiens
  CDR3 for beta chain variable domain of TCR clone 207644 (TRBV19, TRBJ2-1)
CASSSPGVPLDVQFF

SEQ ID NO: 415289 - protein, 14 aa, Homo sapiens
  CDR3 for alpha chain variable domain of TCR clone 207645 (TRAV26-1, TRAJ6)
CIVSPVGGSYIPTF

SEQ ID NO: 415290 - protein, 11 aa, Homo sapiens
  CDR3 for beta chain variable domain of TCR clone 207645 (TRBV11-2, TRBJ2-2)
CASSLPGELFF

SEQ ID NO: 415291 - protein, 13 aa, Homo sapiens
  CDR3 for alpha chain variable domain of TCR clone 207646 (TRAV2, TRAJ15)
CAVASQAGTALIF

SEQ ID NO: 415292 - protein, 16 aa, Homo sapiens
  CDR3 for beta chain variable domain of TCR clone 207646 (TRBV7-3, TRBJ2-1)
CASSLSPGGGAKEQFF

SEQ ID NO: 415293 - protein, 14 aa, Homo sapiens
  CDR3 for alpha chain variable domain of TCR clone 207647 (TRAV3, TRAJ21)
CAVESQANFNKFYF

SEQ ID NO: 415294 - protein, 16 aa, Homo sapiens
  CDR3 for beta chain variable domain of TCR clone 207647 (TRBV20-1, TRBJ1-4)
CSAPGQGLLTNEKLFF

SEQ ID NO: 415295 - protein, 16 aa, Homo sapiens
  CDR3 for alpha chain variable domain of TCR clone 207648 (TRAV26-2, TRAJ57)
CILRDVGSGRSEKLVF

SEQ ID NO: 415296 - protein, 13 aa, Homo sapiens
  CDR3 for beta chain variable domain of TCR clone 207648 (TRBV18, TRBJ2-3)
CASSPGVTDTQYF

SEQ ID NO: 415297 - protein, 12 aa, Homo sapiens
  CDR3 for alpha chain variable domain of TCR clone 207649 (TRAV21, TRAJ31)
CVLAVNNARLMF

SEQ ID NO: 415298 - protein, 16 aa, Homo sapiens
  CDR3 for beta chain variable domain of TCR clone 207649 (TRBV27, TRBJ2-5)
CASSFGPGGTKETQYF

SEQ ID NO: 415299 - protein, 13 aa, Homo sapiens
  CDR3 for alpha chain variable domain of TCR clone 207650 (TRAV3, TRAJ21)
CAVREPDFNNFYF

SEQ ID NO: 415300 - protein, 12 aa, Homo sapiens
  CDR3 for beta chain variable domain of TCR clone 207650 (TRBV12-4, TRBJ1-3)
CASSFSGNTIYF

SEQ ID NO: 415301 - protein, 14 aa, Homo sapiens
  CDR3 for alpha chain variable domain of TCR clone 207651 (TRAV35, TRAJ50)
CAGHRKTSYDKVIF

SEQ ID NO: 415302 - protein, 12 aa, Homo sapiens
  CDR3 for beta chain variable domain of TCR clone 207651 (TRBV7-7, TRBJ2-3)
CQQLKSRRYAGF

SEQ ID NO: 415303 - protein, 14 aa, Homo sapiens
  CDR3 for alpha chain variable domain of TCR clone 207652 (TRAV20, TRAJ17)
CDVRREAAGNKLTF

SEQ ID NO: 415304 - protein, 13 aa, Homo sapiens
  CDR3 for beta chain variable domain of TCR clone 207652 (TRBV23-1, TRBJ2-1)
CASNRETYNEQFF

SEQ ID NO: 415305 - protein, 15 aa, Homo sapiens
  CDR3 for alpha chain variable domain of TCR clone 207653 (TRAV4, TRAJ36)
CLVGDRQTGANNLFF

SEQ ID NO: 415306 - protein, 13 aa, Homo sapiens
  CDR3 for beta chain variable domain of TCR clone 207653 (TRBV4-2, TRBJ1-1)
CASSQAGNTEAFF

SEQ ID NO: 415307 - protein, 18 aa, Homo sapiens
  CDR3 for alpha chain variable domain of TCR clone 207654 (TRAV16, TRAJ52)
CALSGVDAGGTSYGKMTF

SEQ ID NO: 415308 - protein, 15 aa, Homo sapiens
  CDR3 for beta chain variable domain of TCR clone 207654 (TRBV11-3, TRBJ2-3)
CASSAGTVVTNTQYF

SEQ ID NO: 415309 - protein, 12 aa, Homo sapiens
  CDR3 for alpha chain variable domain of TCR clone 207655 (TRAV30, TRAJ43)
CGTEERGNDMRF

SEQ ID NO: 415310 - protein, 19 aa, Homo sapiens
  CDR3 for beta chain variable domain of TCR clone 207655 (TRBV7-8, TRBJ2-1)
CASSLTSGRARGSYNEQFF

SEQ ID NO: 415311 - protein, 10 aa, Homo sapiens
  CDR3 for alpha chain variable domain of TCR clone 207656 (TRAV35, TRAJ48)
CAGTNIKLTF

SEQ ID NO: 415312 - protein, 14 aa, Homo sapiens
  CDR3 for beta chain variable domain of TCR clone 207656 (TRBV7-2, TRBJ2-7)
CASRSQGAAYEQYF

SEQ ID NO: 415313 - protein, 12 aa, Homo sapiens
  CDR3 for alpha chain variable domain of TCR clone 207657 (TRAV20, TRAJ39)
CAVGNAGNMLTF

SEQ ID NO: 415314 - protein, 14 aa, Homo sapiens
  CDR3 for beta chain variable domain of TCR clone 207657 (TRBV7-8, TRBJ2-3)
CASSFPDGQDTQYF

SEQ ID NO: 415315 - protein, 14 aa, Homo sapiens
  CDR3 for alpha chain variable domain of TCR clone 207658 (TRAV12-2, TRAJ9)
CAVNMEGGGFKTIF

SEQ ID NO: 415316 - protein, 15 aa, Homo sapiens
  CDR3 for beta chain variable domain of TCR clone 207658 (TRBV7-3, TRBJ2-1)
CASSPTGGGEVEQFF

SEQ ID NO: 415317 - protein, 16 aa, Homo sapiens
  CDR3 for alpha chain variable domain of TCR clone 207659 (TRAV20, TRAJ10)
CAVLRGLTGGGNKLTF

SEQ ID NO: 415318 - protein, 14 aa, Homo sapiens
  CDR3 for beta chain variable domain of TCR clone 207659 (TRBV19, TRBJ2-7)
CASSMGQGAIEQYF

SEQ ID NO: 415319 - protein, 14 aa, Homo sapiens
  CDR3 for alpha chain variable domain of TCR clone 207660 (TRAV1-2, TRAJ8)
CAVREDSGFQKLVF

SEQ ID NO: 415320 - protein, 13 aa, Homo sapiens
  CDR3 for beta chain variable domain of TCR clone 207660 (TRBV7-9, TRBJ2-7)
CASSFAGAYEQYF

SEQ ID NO: 415321 - protein, 12 aa, Homo sapiens
  CDR3 for alpha chain variable domain of TCR clone 207661 (TRAV35, TRAJ22)
CWSFWFSRQLTF

SEQ ID NO: 415322 - protein, 16 aa, Homo sapiens
  CDR3 for beta chain variable domain of TCR clone 207661 (TRBV7-9, TRBJ2-1)
CASSLVLTGQGNEQFF

SEQ ID NO: 415323 - protein, 10 aa, Homo sapiens
  CDR3 for alpha chain variable domain of TCR clone 207662 (TRAV12-3, TRAJ49)
CAMSGNQFYF

SEQ ID NO: 415324 - protein, 12 aa, Homo sapiens
  CDR3 for beta chain variable domain of TCR clone 207662 (TRBV11-2, TRBJ2-2)
CASSLPTGELFF

SEQ ID NO: 415325 - protein, 12 aa, Homo sapiens
  CDR3 for alpha chain variable domain of TCR clone 207663 (TRAV21, TRAJ13)
PGPSGGYQKVTF

SEQ ID NO: 415326 - protein, 15 aa, Homo sapiens
  CDR3 for beta chain variable domain of TCR clone 207663 (TRBV7-2, TRBJ2-7)
CASSLVSSGSYEQYF

SEQ ID NO: 415327 - protein, 12 aa, Homo sapiens
  CDR3 for alpha chain variable domain of TCR clone 207664 (TRAV12-1, TRAJ34)
CVVAGATDKLIF

SEQ ID NO: 415328 - protein, 12 aa, Homo sapiens
  CDR3 for beta chain variable domain of TCR clone 207664 (TRBV12-4, TRBJ1-2)
CASSFIWLHLRF

SEQ ID NO: 415329 - protein, 14 aa, Homo sapiens
  CDR3 for alpha chain variable domain of TCR clone 207665 (TRAV1-2, TRAJ8)
CAVREDTGFQKLGF

SEQ ID NO: 415330 - protein, 13 aa, Homo sapiens
  CDR3 for beta chain variable domain of TCR clone 207665 (TRBV10-3, TRBJ1-2)
CAISERDSYGYTF

SEQ ID NO: 415331 - protein, 15 aa, Homo sapiens
  CDR3 for alpha chain variable domain of TCR clone 207666 (TRAV12-1, TRAJ44)
CVADLPTGTASKLTF

SEQ ID NO: 415332 - protein, 16 aa, Homo sapiens
  CDR3 for beta chain variable domain of TCR clone 207666 (TRBV19, TRBJ1-2)
CASSIGSNRDGYGYTF

SEQ ID NO: 415333 - protein, 15 aa, Homo sapiens
  CDR3 for alpha chain variable domain of TCR clone 207667 (TRAV8-3, TRAJ45)
CASSYSGGGADGLTF

SEQ ID NO: 415334 - protein, 12 aa, Homo sapiens
  CDR3 for beta chain variable domain of TCR clone 207667 (TRBV19, TRBJ1-5)
CASSIAQQPQHF

SEQ ID NO: 415335 - protein, 14 aa, Homo sapiens
  CDR3 for alpha chain variable domain of TCR clone 207668 (TRAV35, TRAJ33)
CAGSSQDSNYQLIW

SEQ ID NO: 415336 - protein, 15 aa, Homo sapiens
  CDR3 for beta chain variable domain of TCR clone 207668 (TRBV29-1, TRBJ2-7)
CSVEFFDRGSYEKYF

SEQ ID NO: 415337 - protein, 11 aa, Homo sapiens
  CDR3 for alpha chain variable domain of TCR clone 207669 (TRAV13-2, TRAJ20)
CADSNDYKLSF

SEQ ID NO: 415338 - protein, 12 aa, Homo sapiens
  CDR3 for beta chain variable domain of TCR clone 207669 (TRBV5-1, TRBJ2-3)
CASSVAADTQYF

SEQ ID NO: 415339 - protein, 11 aa, Homo sapiens
  CDR3 for alpha chain variable domain of TCR clone 207670 (TRAV1-2, TRAJ20)
CALANDYKLSF

SEQ ID NO: 415340 - protein, 16 aa, Homo sapiens
  CDR3 for beta chain variable domain of TCR clone 207670 (TRBV4-3, TRBJ1-6)
CASSQDPGVYNSPLHF

SEQ ID NO: 415341 - protein, 16 aa, Homo sapiens
  CDR3 for alpha chain variable domain of TCR clone 207671 (TRAV14/DV4, TRAJ54)
CAMREGRIQGAQKLGF

SEQ ID NO: 415342 - protein, 11 aa, Homo sapiens
  CDR3 for beta chain variable domain of TCR clone 207671 (TRBV5-6, TRBJ2-5)
CASSLERTQYF

SEQ ID NO: 415343 - protein, 15 aa, Homo sapiens
  CDR3 for alpha chain variable domain of TCR clone 207672 (TRAV38-2/DV8, TRAJ48)
CAYRSRGFGNEKLTF

SEQ ID NO: 415344 - protein, 16 aa, Homo sapiens
  CDR3 for beta chain variable domain of TCR clone 207672 (TRBV28, TRBJ2-7)
CASSPWVAAGDLSQYF

SEQ ID NO: 415345 - protein, 13 aa, Homo sapiens
  CDR3 for alpha chain variable domain of TCR clone 207673 (TRAV2, TRAJ15)
CAVASQAGTALIF

SEQ ID NO: 415346 - protein, 13 aa, Homo sapiens
  CDR3 for beta chain variable domain of TCR clone 207673 (TRBV20-1, TRBJ2-2)
CSALSGGAGELFF

SEQ ID NO: 415347 - protein, 15 aa, Homo sapiens
  CDR3 for alpha chain variable domain of TCR clone 207674 (TRAV17, TRAJ57)
CATRPSQGGSEKLVF

SEQ ID NO: 415348 - protein, 18 aa, Homo sapiens
  CDR3 for beta chain variable domain of TCR clone 207674 (TRBV7-9, TRBJ2-7)
CASSLTTSGSRTWYEQYF

SEQ ID NO: 415349 - protein, 18 aa, Homo sapiens
  CDR3 for alpha chain variable domain of TCR clone 207675 (TRAV21, TRAJ52)
CAVRPSPAGGTSYGKLPF

SEQ ID NO: 415350 - protein, 19 aa, Homo sapiens
  CDR3 for beta chain variable domain of TCR clone 207675 (TRBV7-2, TRBJ2-3)
CASSFLSRSWGGGTDTQYF

SEQ ID NO: 415351 - protein, 16 aa, Homo sapiens
  CDR3 for alpha chain variable domain of TCR clone 207676 (TRAV16, TRAJ52)
CALSAAGGTSYGKLTF

SEQ ID NO: 415352 - protein, 15 aa, Homo sapiens
  CDR3 for beta chain variable domain of TCR clone 207676 (TRBV7-2, TRBJ2-2)
CASSPTGANTGELFF

SEQ ID NO: 415353 - protein, 15 aa, Homo sapiens
  CDR3 for alpha chain variable domain of TCR clone 207677 (TRAV26-1, TRAJ42)
CIVRVKGGSQGDLIF

SEQ ID NO: 415354 - protein, 14 aa, Homo sapiens
  CDR3 for beta chain variable domain of TCR clone 207677 (TRBV19, TRBJ2-2)
CATTGHANTGELFF

SEQ ID NO: 415355 - protein, 16 aa, Homo sapiens
  CDR3 for alpha chain variable domain of TCR clone 207678 (TRAV30, TRAJ24)
CGTEIVDAYSWGKFQL

SEQ ID NO: 415356 - protein, 14 aa, Homo sapiens
  CDR3 for beta chain variable domain of TCR clone 207678 (TRBV12-5, TRBJ2-5)
CASGSRTHQETQYF

SEQ ID NO: 415357 - protein, 15 aa, Homo sapiens
  CDR3 for alpha chain variable domain of TCR clone 207679 (TRAV13-1, TRAJ17)
CAASIERAAGNKLTF

SEQ ID NO: 415358 - protein, 14 aa, Homo sapiens
  CDR3 for beta chain variable domain of TCR clone 207679 (TRBV20-1, TRBJ2-7)
CSAPELAGVGEQYF

SEQ ID NO: 415359 - protein, 14 aa, Homo sapiens
  CDR3 for alpha chain variable domain of TCR clone 207680 (TRAV38-1, TRAJ29)
CAFITPSGNTPLVF

SEQ ID NO: 415360 - protein, 14 aa, Homo sapiens
  CDR3 for beta chain variable domain of TCR clone 207680 (TRBV12-4, TRBJ2-5)
CASSFGASGGTQYF

SEQ ID NO: 415361 - protein, 14 aa, Homo sapiens
  CDR3 for alpha chain variable domain of TCR clone 207681 (TRAV12-3, TRAJ10)
SHLPLTGGGNKLTF

SEQ ID NO: 415362 - protein, 14 aa, Homo sapiens
  CDR3 for beta chain variable domain of TCR clone 207681 (TRBV19, TRBJ2-1)
CDSPTFVLSGEQFF

SEQ ID NO: 415363 - protein, 14 aa, Homo sapiens
  CDR3 for alpha chain variable domain of TCR clone 207682 (TRAV1-2, TRAJ16)
CAFNRFSDGQKLLF

SEQ ID NO: 415364 - protein, 12 aa, Homo sapiens
  CDR3 for beta chain variable domain of TCR clone 207682 (TRBV11-2, TRBJ2-2)
CVSSLGGGELFF

SEQ ID NO: 415365 - protein, 18 aa, Homo sapiens
  CDR3 for alpha chain variable domain of TCR clone 207683 (TRAV1-2, TRAJ18)
CAVRDMGDRGSTLGRLDF

SEQ ID NO: 415366 - protein, 14 aa, Homo sapiens
  CDR3 for beta chain variable domain of TCR clone 207683 (TRBV7-6, TRBJ2-3)
CASSLGTVTDTQYF

SEQ ID NO: 415367 - protein, 13 aa, Homo sapiens
  CDR3 for alpha chain variable domain of TCR clone 207684 (TRAV12-3, TRAJ33)
CSMSVNSNYQLIW

SEQ ID NO: 415368 - protein, 12 aa, Homo sapiens
  CDR3 for beta chain variable domain of TCR clone 207684 (TRBV12-4, TRBJ1-2)
CASSFIWLHLRF

SEQ ID NO: 415369 - protein, 15 aa, Homo sapiens
  CDR3 for alpha chain variable domain of TCR clone 207685 (TRAV12-1, TRAJ11)
CVVNYGKVRIQHPHL

SEQ ID NO: 415370 - protein, 16 aa, Homo sapiens
  CDR3 for beta chain variable domain of TCR clone 207685 (TRBV7-2, TRBJ2-1)
CASSLRWGRENNEQFF

SEQ ID NO: 415371 - protein, 12 aa, Homo sapiens
  CDR3 for alpha chain variable domain of TCR clone 207686 (TRAV13-1, TRAJ42)
SVLRGSQGNLIF

SEQ ID NO: 415372 - protein, 13 aa, Homo sapiens
  CDR3 for beta chain variable domain of TCR clone 207686 (TRBV2, TRBJ1-4)
CASSELGVGKLFF

SEQ ID NO: 415373 - protein, 14 aa, Homo sapiens
  CDR3 for alpha chain variable domain of TCR clone 207687 (TRAV17, TRAJ57)
CATDPQGGSEKLVF

SEQ ID NO: 415374 - protein, 11 aa, Homo sapiens
  CDR3 for beta chain variable domain of TCR clone 207687 (TRBV13, TRBJ2-2)
CASSPRTGEHT

SEQ ID NO: 415375 - protein, 12 aa, Homo sapiens
  CDR3 for alpha chain variable domain of TCR clone 207688 (TRAV21, TRAJ11)
CAATSGYSTLTF

SEQ ID NO: 415376 - protein, 16 aa, Homo sapiens
  CDR3 for beta chain variable domain of TCR clone 207688 (TRBV28, TRBJ2-2)
CASSLEGGSNTGELFL

SEQ ID NO: 415377 - protein, 13 aa, Homo sapiens
  CDR3 for alpha chain variable domain of TCR clone 207689 (TRAV12-3, TRAJ7)
CAMSASGNNRLAF

SEQ ID NO: 415378 - protein, 14 aa, Homo sapiens
  CDR3 for beta chain variable domain of TCR clone 207689 (TRBV28, TRBJ2-3)
CASSFVQGTDTQYF

SEQ ID NO: 415379 - protein, 14 aa, Homo sapiens
  CDR3 for alpha chain variable domain of TCR clone 207690 (TRAV20, TRAJ42)
CAVQAGGSQGNLIF

SEQ ID NO: 415380 - protein, 14 aa, Homo sapiens
  CDR3 for beta chain variable domain of TCR clone 207690 (TRBV28, TRBJ1-2)
CASRIQGANFGYTF

SEQ ID NO: 415381 - protein, 14 aa, Homo sapiens
  CDR3 for alpha chain variable domain of TCR clone 207691 (TRAV23/DV6, TRAJ58)
CAAAKETSGSRLTF

SEQ ID NO: 415382 - protein, 13 aa, Homo sapiens
  CDR3 for beta chain variable domain of TCR clone 207691 (TRBV10-3, TRBJ2-1)
CAISEFSGREQFF

SEQ ID NO: 415383 - protein, 13 aa, Homo sapiens
  CDR3 for alpha chain variable domain of TCR clone 207692 (TRAV8-3, TRAJ43)
CAVGPDNNNDMRF

SEQ ID NO: 415384 - protein, 14 aa, Homo sapiens
  CDR3 for beta chain variable domain of TCR clone 207692 (TRBV19, TRBJ2-1)
CASPTVVLSGGQFF

SEQ ID NO: 415385 - protein, 13 aa, Homo sapiens
  CDR3 for alpha chain variable domain of TCR clone 207693 (TRAV8-3, TRAJ43)
CAVGPDNNNDIRF

SEQ ID NO: 415386 - protein, 14 aa, Homo sapiens
  CDR3 for beta chain variable domain of TCR clone 207693 (TRBV19, TRBJ2-1)
CASPTFVLGGEQFF

SEQ ID NO: 415387 - protein, 12 aa, Homo sapiens
  CDR3 for alpha chain variable domain of TCR clone 207694 (TRAV23/DV6, TRAJ17)
CTRGSCRQQANF

SEQ ID NO: 415388 - protein, 14 aa, Homo sapiens
  CDR3 for beta chain variable domain of TCR clone 207694 (TRBV7-2, TRBJ1-2)
CASSRTGSTYGYTF

SEQ ID NO: 415389 - protein, 14 aa, Homo sapiens
  CDR3 for alpha chain variable domain of TCR clone 207695 (TRAV12-1, TRAJ23)
CVVSVYNQGGKLIF

SEQ ID NO: 415390 - protein, 14 aa, Homo sapiens
  CDR3 for beta chain variable domain of TCR clone 207695 (TRBV9, TRBJ2-1)
CASSVDPRGKEQFF

SEQ ID NO: 415391 - protein, 13 aa, Homo sapiens
  CDR3 for alpha chain variable domain of TCR clone 207696 (TRAV17, TRAJ5)
CAPMDTGRRALTF

SEQ ID NO: 415392 - protein, 20 aa, Homo sapiens
  CDR3 for beta chain variable domain of TCR clone 207696 (TRBV6-1, TRBJ2-5)
CASSETLDRERRPSTSGQAR

SEQ ID NO: 415393 - protein, 15 aa, Homo sapiens
  CDR3 for alpha chain variable domain of TCR clone 207697 (TRAV17, TRAJ6)
CATDLLSGGSYIPTF

SEQ ID NO: 415394 - protein, 16 aa, Homo sapiens
  CDR3 for beta chain variable domain of TCR clone 207697 (TRBV4-1, TRBJ2-7)
CASSQDPTGYSYEQYF

SEQ ID NO: 415395 - protein, 13 aa, Homo sapiens
  CDR3 for alpha chain variable domain of TCR clone 207698 (TRAV2, TRAJ16)
CAVERSDGQKLLF

SEQ ID NO: 415396 - protein, 15 aa, Homo sapiens
  CDR3 for beta chain variable domain of TCR clone 207698 (TRBV20-1, TRBJ2-5)
CSAIKGQGSQETQHF

SEQ ID NO: 415397 - protein, 13 aa, Homo sapiens
  CDR3 for alpha chain variable domain of TCR clone 207699 (TRAV12-3, TRAJ9)
CAMRNTGGFNTIF

SEQ ID NO: 415398 - protein, 14 aa, Homo sapiens
  CDR3 for beta chain variable domain of TCR clone 207699 (TRBV11-2, TRBJ2-7)
CASSSAGEGYEQYF

SEQ ID NO: 415399 - protein, 16 aa, Homo sapiens
  CDR3 for alpha chain variable domain of TCR clone 207700 (TRAV3, TRAJ10)
CAVRDMRAGGGNKLTF

SEQ ID NO: 415400 - protein, 15 aa, Homo sapiens
  CDR3 for beta chain variable domain of TCR clone 207700 (TRBV7-9, TRBJ2-7)
CISVSEAPPMNEQYF

SEQ ID NO: 415401 - protein, 14 aa, Homo sapiens
  CDR3 for alpha chain variable domain of TCR clone 207701 (TRAV16, TRAJ37)
CDLDISGNTGKLIF

SEQ ID NO: 415402 - protein, 13 aa, Homo sapiens
  CDR3 for beta chain variable domain of TCR clone 207701 (TRBV12-4, TRBJ1-1)
CASSPGTGFEAFF

SEQ ID NO: 415403 - protein, 12 aa, Homo sapiens
  CDR3 for alpha chain variable domain of TCR clone 207702 (TRAV25, TRAJ11)
CAGASGYSTLTF

SEQ ID NO: 415404 - protein, 13 aa, Homo sapiens
  CDR3 for beta chain variable domain of TCR clone 207702 (TRBV7-9, TRBJ2-2)
CASSLDPTGELFF

SEQ ID NO: 415405 - protein, 14 aa, Homo sapiens
  CDR3 for alpha chain variable domain of TCR clone 207703 (TRAV17, TRAJ45)
CATASGGGADGLTF

SEQ ID NO: 415406 - protein, 11 aa, Homo sapiens
  CDR3 for beta chain variable domain of TCR clone 207703 (TRBV19, TRBJ2-7)
CASGNSYEQYF

SEQ ID NO: 415407 - protein, 13 aa, Homo sapiens
  CDR3 for alpha chain variable domain of TCR clone 207704 (TRAV12-1, TRAJ40)
CVVPTSGTYKYIF

SEQ ID NO: 415408 - protein, 17 aa, Homo sapiens
  CDR3 for beta chain variable domain of TCR clone 207704 (TRBV7-8, TRBJ2-6)
CASSAGTGGAGANVLTF

SEQ ID NO: 415409 - protein, 15 aa, Homo sapiens
  CDR3 for alpha chain variable domain of TCR clone 207705 (TRAV34, TRAJ38)
CGADFTPGDNRKLIW

SEQ ID NO: 415410 - protein, 16 aa, Homo sapiens
  CDR3 for beta chain variable domain of TCR clone 207705 (TRBV6-1, TRBJ2-3)
CASSEVIGQGTDTQYF

SEQ ID NO: 415411 - protein, 17 aa, Homo sapiens
  CDR3 for alpha chain variable domain of TCR clone 207706 (TRAV14/DV4, TRAJ28)
CAMREVSSGAGCYQRTF

SEQ ID NO: 415412 - protein, 15 aa, Homo sapiens
  CDR3 for beta chain variable domain of TCR clone 207706 (TRBV11-2, TRBJ1-6)
CASTLRETGNSPLHF

SEQ ID NO: 415413 - protein, 13 aa, Homo sapiens
  CDR3 for alpha chain variable domain of TCR clone 207707 (TRAV16, TRAJ10)
CAPAREEETNTPL

SEQ ID NO: 415414 - protein, 12 aa, Homo sapiens
  CDR3 for beta chain variable domain of TCR clone 207707 (TRBV2, TRBJ1-1)
YCRWTVNTKAFF

SEQ ID NO: 415415 - protein, 11 aa, Homo sapiens
  CDR3 for alpha chain variable domain of TCR clone 207708 (TRAV2, TRAJ33)
CAVDSNYQLIC

SEQ ID NO: 415416 - protein, 15 aa, Homo sapiens
  CDR3 for beta chain variable domain of TCR clone 207708 (TRBV11-2, TRBJ2-1)
CASSLGTSGLNEQFF

SEQ ID NO: 415417 - protein, 15 aa, Homo sapiens
  CDR3 for alpha chain variable domain of TCR clone 207709 (TRAV8-3, TRAJ45)
CASSYSGGGADGLTF

SEQ ID NO: 415418 - protein, 16 aa, Homo sapiens
  CDR3 for beta chain variable domain of TCR clone 207709 (TRBV11-2, TRBJ2-3)
CASSSRTSGGAGTQYF

SEQ ID NO: 415419 - protein, 13 aa, Homo sapiens
  CDR3 for alpha chain variable domain of TCR clone 207710 (TRAV13-2, TRAJ13)
CAERPGGYQKVTF

SEQ ID NO: 415420 - protein, 16 aa, Homo sapiens
  CDR3 for beta chain variable domain of TCR clone 207710 (TRBV27, TRBJ2-2)
CASSSSGVSNTGELFF

SEQ ID NO: 415421 - protein, 15 aa, Homo sapiens
  CDR3 for alpha chain variable domain of TCR clone 207711 (TRAV8-1, TRAJ34)
CAVNSRTYNTDKLIF

SEQ ID NO: 415422 - protein, 15 aa, Homo sapiens
  CDR3 for beta chain variable domain of TCR clone 207711 (TRBV7-2, TRBJ2-5)
CASSAARSLTETQYF

SEQ ID NO: 415423 - protein, 12 aa, Homo sapiens
  CDR3 for alpha chain variable domain of TCR clone 207712 (TRAV1-1, TRAJ24)
CAVRGSWGKFQF

SEQ ID NO: 415424 - protein, 16 aa, Homo sapiens
  CDR3 for beta chain variable domain of TCR clone 207712 (TRBV27, TRBJ2-5)
CASSSQTRGFQETQYF

SEQ ID NO: 415425 - protein, 10 aa, Homo sapiens
  CDR3 for alpha chain variable domain of TCR clone 207713 (TRAV23/DV6, TRAJ57)
CAAGSTLSQG

SEQ ID NO: 415426 - protein, 13 aa, Homo sapiens
  CDR3 for beta chain variable domain of TCR clone 207713 (TRBV25-1, TRBJ1-1)
CQHPPGGNTEAFF

SEQ ID NO: 415427 - protein, 12 aa, Homo sapiens
  CDR3 for alpha chain variable domain of TCR clone 207714 (TRAV3, TRAJ31)
CAVRDGIARLMF

SEQ ID NO: 415428 - protein, 18 aa, Homo sapiens
  CDR3 for beta chain variable domain of TCR clone 207714 (TRBV7-2, TRBJ2-3)
CASSLKREGSGITDTQYF

SEQ ID NO: 415429 - protein, 12 aa, Homo sapiens
  CDR3 for alpha chain variable domain of TCR clone 207715 (TRAV13-2, TRAJ23)
CAERHRGGKLSS

SEQ ID NO: 415430 - protein, 18 aa, Homo sapiens
  CDR3 for beta chain variable domain of TCR clone 207715 (TRBV11-2, TRBJ2-3)
CASSLGGASRGAPNTQYF

SEQ ID NO: 415431 - protein, 12 aa, Homo sapiens
  CDR3 for alpha chain variable domain of TCR clone 207716 (TRAV12-2, TRAJ7)
CAVMRGNNRLAF

SEQ ID NO: 415432 - protein, 14 aa, Homo sapiens
  CDR3 for beta chain variable domain of TCR clone 207716 (TRBV7-2, TRBJ2-7)
CASSPKTSFYEQYF

SEQ ID NO: 415433 - protein, 16 aa, Homo sapiens
  CDR3 for alpha chain variable domain of TCR clone 207717 (TRAV23/DV6, TRAJ34)
CAASGALSYNTDKLIF

SEQ ID NO: 415434 - protein, 15 aa, Homo sapiens
  CDR3 for beta chain variable domain of TCR clone 207717 (TRBV10-3, TRBJ1-2)
CAISESTSRGYGDTF

SEQ ID NO: 415435 - protein, 14 aa, Homo sapiens
  CDR3 for alpha chain variable domain of TCR clone 207718 (TRAV36/DV7, TRAJ40)
CAVETTSGTYKYIF

SEQ ID NO: 415436 - protein, 13 aa, Homo sapiens
  CDR3 for beta chain variable domain of TCR clone 207718 (TRBV29-1, TRBJ2-1)
CSVEGGGVNEQFF

SEQ ID NO: 415437 - protein, 14 aa, Homo sapiens
  CDR3 for alpha chain variable domain of TCR clone 207719 (TRAV1-2, TRAJ8)
CAVKEDTGFQKLVF

SEQ ID NO: 415438 - protein, 13 aa, Homo sapiens
  CDR3 for beta chain variable domain of TCR clone 207719 (TRBV15, TRBJ2-7)
CATSTTGHYEQYF

SEQ ID NO: 415439 - protein, 10 aa, Homo sapiens
  CDR3 for alpha chain variable domain of TCR clone 207720 (TRAV1-2, TRAJ20)
CALTDYKLSF

SEQ ID NO: 415440 - protein, 11 aa, Homo sapiens
  CDR3 for beta chain variable domain of TCR clone 207720 (TRBV29-1, TRBJ2-5)
CSEDRTGTQYF

SEQ ID NO: 415441 - protein, 14 aa, Homo sapiens
  CDR3 for alpha chain variable domain of TCR clone 207721 (TRAV26-1, TRAJ21)
CIAHTTSTNFTLDL

SEQ ID NO: 415442 - protein, 16 aa, Homo sapiens
  CDR3 for beta chain variable domain of TCR clone 207721 (TRBV4-2, TRBJ2-3)
CASSQELAGDTDTQYF

SEQ ID NO: 415443 - protein, 19 aa, Homo sapiens
  CDR3 for alpha chain variable domain of TCR clone 207722 (TRAV2, TRAJ20)
ILQVREADDAVYRDCKLSF

SEQ ID NO: 415444 - protein, 12 aa, Homo sapiens
  CDR3 for beta chain variable domain of TCR clone 207722 (TRBV11-2, TRBJ2-2)
CASSLGGGELFF

SEQ ID NO: 415445 - protein, 12 aa, Homo sapiens
  CDR3 for alpha chain variable domain of TCR clone 207723 (TRAV21, TRAJ33)
CAVQDSNYQLIW

SEQ ID NO: 415446 - protein, 15 aa, Homo sapiens
  CDR3 for beta chain variable domain of TCR clone 207723 (TRBV3-1, TRBJ2-1)
CASSTGDTNYNEQFF

SEQ ID NO: 415447 - protein, 13 aa, Homo sapiens
  CDR3 for alpha chain variable domain of TCR clone 207724 (TRAV36/DV7, TRAJ37)
CAVFSSNTGKLIF

SEQ ID NO: 415448 - protein, 16 aa, Homo sapiens
  CDR3 for beta chain variable domain of TCR clone 207724 (TRBV6-5, TRBJ2-7)
CASSTRTSGAPYEQYL

SEQ ID NO: 415449 - protein, 16 aa, Homo sapiens
  CDR3 for alpha chain variable domain of TCR clone 207725 (TRAV3, TRAJ21)
CALRDIERGNFNKFYF

SEQ ID NO: 415450 - protein, 13 aa, Homo sapiens
  CDR3 for beta chain variable domain of TCR clone 207725 (TRBV27, TRBJ2-7)
CASNLTTGYEQYF

SEQ ID NO: 415451 - protein, 15 aa, Homo sapiens
  CDR3 for alpha chain variable domain of TCR clone 207726 (TRAV21, TRAJ24)
CAARSSTDSWGKLQF

SEQ ID NO: 415452 - protein, 12 aa, Homo sapiens
  CDR3 for beta chain variable domain of TCR clone 207726 (TRBV11-2, TRBJ2-5)
CSSSTGEETQYF

SEQ ID NO: 415453 - protein, 12 aa, Homo sapiens
  CDR3 for alpha chain variable domain of TCR clone 207727 (TRAV13-2, TRAJ23)
CAERHRGGKLIF

SEQ ID NO: 415454 - protein, 16 aa, Homo sapiens
  CDR3 for beta chain variable domain of TCR clone 207727 (TRBV7-2, TRBJ2-3)
CASSLVALYSTDTQYF

SEQ ID NO: 415455 - protein, 18 aa, Homo sapiens
  CDR3 for alpha chain variable domain of TCR clone 207728 (TRAV12-3, TRAJ52)
CAMSVGGAGGTSYGKLTF

SEQ ID NO: 415456 - protein, 15 aa, Homo sapiens
  CDR3 for beta chain variable domain of TCR clone 207728 (TRBV27, TRBJ2-5)
CASSLYPRGGETQYF

SEQ ID NO: 415457 - protein, 18 aa, Homo sapiens
  CDR3 for alpha chain variable domain of TCR clone 207729 (TRAV21, TRAJ53)
CAVKGGENSGGSNYKLTF

SEQ ID NO: 415458 - protein, 14 aa, Homo sapiens
  CDR3 for beta chain variable domain of TCR clone 207729 (TRBV7-8, TRBJ2-7)
CASSPRDRVYEQYF

SEQ ID NO: 415459 - protein, 14 aa, Homo sapiens
  CDR3 for alpha chain variable domain of TCR clone 207730 (TRAV22, TRAJ6)
CAGVGPGGSYISTF

SEQ ID NO: 415460 - protein, 11 aa, Homo sapiens
  CDR3 for beta chain variable domain of TCR clone 207730 (TRBV20-1, TRBJ2-1)
CSLSSGSEQFF

SEQ ID NO: 415461 - protein, 17 aa, Homo sapiens
  CDR3 for alpha chain variable domain of TCR clone 207731 (TRAV12-2, TRAJ52)
CAVNPYAGGTSYGKLTF

SEQ ID NO: 415462 - protein, 16 aa, Homo sapiens
  CDR3 for beta chain variable domain of TCR clone 207731 (TRBV5-5, TRBJ2-2)
YASSGRREGATGELFF

SEQ ID NO: 415463 - protein, 15 aa, Homo sapiens
  CDR3 for alpha chain variable domain of TCR clone 207732 (TRAV12-1, TRAJ36)
CVVNEHQTGENNLFF

SEQ ID NO: 415464 - protein, 12 aa, Homo sapiens
  CDR3 for beta chain variable domain of TCR clone 207732 (TRBV29-1, TRBJ2-3)
CSVTGGADTQYF

SEQ ID NO: 415465 - protein, 12 aa, Homo sapiens
  CDR3 for alpha chain variable domain of TCR clone 207733 (TRAV12-1, TRAJ40)
FVVYSGTYKYIF

SEQ ID NO: 415466 - protein, 18 aa, Homo sapiens
  CDR3 for beta chain variable domain of TCR clone 207733 (TRBV11-2, TRBJ2-3)
CASSFGGASRGAPNTQYF

SEQ ID NO: 415467 - protein, 16 aa, Homo sapiens
  CDR3 for alpha chain variable domain of TCR clone 207734 (TRAV30, TRAJ24)
CGTEIVDADSWGKFRF

SEQ ID NO: 415468 - protein, 16 aa, Homo sapiens
  CDR3 for beta chain variable domain of TCR clone 207734 (TRBV12-4, TRBJ1-5)
CASSRPVGGSNQPQHF

SEQ ID NO: 415469 - protein, 12 aa, Homo sapiens
  CDR3 for alpha chain variable domain of TCR clone 207735 (TRAV9-2, TRAJ40)
CALTSGTYKYIF

SEQ ID NO: 415470 - protein, 11 aa, Homo sapiens
  CDR3 for beta chain variable domain of TCR clone 207735 (TRBV11-2, TRBJ2-2)
CASSLPGELFF

SEQ ID NO: 415471 - protein, 17 aa, Homo sapiens
  CDR3 for alpha chain variable domain of TCR clone 207736 (TRAV9-2, TRAJ45)
CALSGYYSGGGADGLTF

SEQ ID NO: 415472 - protein, 14 aa, Homo sapiens
  CDR3 for beta chain variable domain of TCR clone 207736 (TRBV24-1, TRBJ1-1)
CATSIPRGDTEAFF

SEQ ID NO: 415473 - protein, 13 aa, Homo sapiens
  CDR3 for alpha chain variable domain of TCR clone 207737 (TRAV30, TRAJ24)
CGTVTDSWGKLQF

SEQ ID NO: 415474 - protein, 14 aa, Homo sapiens
  CDR3 for beta chain variable domain of TCR clone 207737 (TRBV6-3, TRBJ2-2)
CASTYTPDTGKLFF

SEQ ID NO: 415475 - protein, 13 aa, Homo sapiens
  CDR3 for alpha chain variable domain of TCR clone 207738 (TRAV23/DV6, TRAJ22)
CAPYSGSARQLTF

SEQ ID NO: 415476 - protein, 15 aa, Homo sapiens
  CDR3 for beta chain variable domain of TCR clone 207738 (TRBV11-2, TRBJ1-6)
CASSLDPWAVSPLRF

SEQ ID NO: 415477 - protein, 12 aa, Homo sapiens
  CDR3 for alpha chain variable domain of TCR clone 207739 (TRAV17, TRAJ54)
CATPQGAQKLVF

SEQ ID NO: 415478 - protein, 15 aa, Homo sapiens
  CDR3 for beta chain variable domain of TCR clone 207739 (TRBV3-1, TRBJ2-5)
CASSANLGGPETQYF

SEQ ID NO: 415479 - protein, 15 aa, Homo sapiens
  CDR3 for alpha chain variable domain of TCR clone 207740 (TRAV26-2, TRAJ13)
CILRDLSGGYQKVTF

SEQ ID NO: 415480 - protein, 11 aa, Homo sapiens
  CDR3 for beta chain variable domain of TCR clone 207740 (TRBV7-9, TRBJ2-5)
CASSLSTTQYF

SEQ ID NO: 415481 - protein, 16 aa, Homo sapiens
  CDR3 for alpha chain variable domain of TCR clone 207741 (TRAV3, TRAJ10)
CAVRDGRAGGGNKLTF

SEQ ID NO: 415482 - protein, 13 aa, Homo sapiens
  CDR3 for beta chain variable domain of TCR clone 207741 (TRBV6-1, TRBJ1-1)
CASSRQGNTEAFF

SEQ ID NO: 415483 - protein, 13 aa, Homo sapiens
  CDR3 for alpha chain variable domain of TCR clone 207742 (TRAV12-1, TRAJ9)
CVVLNTGGFKTIF

SEQ ID NO: 415484 - protein, 13 aa, Homo sapiens
  CDR3 for beta chain variable domain of TCR clone 207742 (TRBV20-1, TRBJ1-1)
FSARGGGNTEAFF

SEQ ID NO: 415485 - protein, 14 aa, Homo sapiens
  CDR3 for alpha chain variable domain of TCR clone 207743 (TRAV12-2, TRAJ6)
CAVMTFGRGTSLIV

SEQ ID NO: 415486 - protein, 13 aa, Homo sapiens
  CDR3 for beta chain variable domain of TCR clone 207743 (TRBV5-1, TRBJ1-2)
CASSIDRPEGYTF

SEQ ID NO: 415487 - protein, 13 aa, Homo sapiens
  CDR3 for alpha chain variable domain of TCR clone 207744 (TRAV12-3, TRAJ54)
CAMSVQGAQKLVF

SEQ ID NO: 415488 - protein, 14 aa, Homo sapiens
  CDR3 for beta chain variable domain of TCR clone 207744 (TRBV7-2, TRBJ2-5)
CASSPRGSSETQYF

SEQ ID NO: 415489 - protein, 13 aa, Homo sapiens
  CDR3 for alpha chain variable domain of TCR clone 207745 (TRAV3, TRAJ20)
CAVRDTGDYKLSF

SEQ ID NO: 415490 - protein, 12 aa, Homo sapiens
  CDR3 for beta chain variable domain of TCR clone 207745 (TRBV29-1, TRBJ2-3)
CIVTGGADTQYF

SEQ ID NO: 415491 - protein, 12 aa, Homo sapiens
  CDR3 for alpha chain variable domain of TCR clone 207746 (TRAV12-3, TRAJ17)
CAMTLTGTKLTF

SEQ ID NO: 415492 - protein, 13 aa, Homo sapiens
  CDR3 for beta chain variable domain of TCR clone 207746 (TRBV7-9, TRBJ1-2)
CASSLKQNYGYTF

SEQ ID NO: 415493 - protein, 14 aa, Homo sapiens
  CDR3 for alpha chain variable domain of TCR clone 207747 (TRAV16, TRAJ54)
CALSLIEGAQKLVF

SEQ ID NO: 415494 - protein, 17 aa, Homo sapiens
  CDR3 for beta chain variable domain of TCR clone 207747 (TRBV11-2, TRBJ2-4)
CASSSVGPGGHRNIQYF

SEQ ID NO: 415495 - protein, 14 aa, Homo sapiens
  CDR3 for alpha chain variable domain of TCR clone 207748 (TRAV12-3, TRAJ57)
CATSAWGGSEKLVF

SEQ ID NO: 415496 - protein, 16 aa, Homo sapiens
  CDR3 for beta chain variable domain of TCR clone 207748 (TRBV7-3, TRBJ2-2)
CASSLKRGTLSGELFF

SEQ ID NO: 415497 - protein, 15 aa, Homo sapiens
  CDR3 for alpha chain variable domain of TCR clone 207749 (TRAV12-2, TRAJ48)
CAAQLSNFGNEKLTF

SEQ ID NO: 415498 - protein, 14 aa, Homo sapiens
  CDR3 for beta chain variable domain of TCR clone 207749 (TRBV7-3, TRBJ2-2)
CASSSGGYTGELFF

SEQ ID NO: 415499 - protein, 14 aa, Homo sapiens
  CDR3 for alpha chain variable domain of TCR clone 207750 (TRAV38-1, TRAJ45)
CAYYSGGGADGLTF

SEQ ID NO: 415500 - protein, 14 aa, Homo sapiens
  CDR3 for beta chain variable domain of TCR clone 207750 (TRBV4-1, TRBJ2-3)
CASSQDWSTDTQYF

SEQ ID NO: 415501 - protein, 12 aa, Homo sapiens
  CDR3 for alpha chain variable domain of TCR clone 207751 (TRAV21, TRAJ33)
CAKMDSNYQLIW

SEQ ID NO: 415502 - protein, 22 aa, Homo sapiens
  CDR3 for beta chain variable domain of TCR clone 207751 (TRBV19, TRBJ2-1)
CASSVRDRVTGTSGRIYNEQFF

SEQ ID NO: 415503 - protein, 13 aa, Homo sapiens
  CDR3 for alpha chain variable domain of TCR clone 207752 (TRAV26-1, TRAJ39)
CIVRVVAGNMPTF

SEQ ID NO: 415504 - protein, 14 aa, Homo sapiens
  CDR3 for beta chain variable domain of TCR clone 207752 (TRBV20-1, TRBJ2-5)
CSARRQGIRETQYF

SEQ ID NO: 415505 - protein, 22 aa, Homo sapiens
  CDR3 for alpha chain variable domain of TCR clone 207753 (TRAV12-2, TRAJ53)
SPVIQPPTSVPPILSSNYKLTF

SEQ ID NO: 415506 - protein, 13 aa, Homo sapiens
  CDR3 for beta chain variable domain of TCR clone 207753 (TRBV7-7, TRBJ2-3)
CASSLSCADTQYF

SEQ ID NO: 415507 - protein, 16 aa, Homo sapiens
  CDR3 for alpha chain variable domain of TCR clone 207754 (TRAV30, TRAJ24)
CGTEIVDADSWGKFQF

SEQ ID NO: 415508 - protein, 15 aa, Homo sapiens
  CDR3 for beta chain variable domain of TCR clone 207754 (TRBV12-4, TRBJ2-2)
CDSSPNDSGTGELFF

SEQ ID NO: 415509 - protein, 14 aa, Homo sapiens
  CDR3 for alpha chain variable domain of TCR clone 207755 (TRAV25, TRAJ52)
CAGEGGTSYGKLTF

SEQ ID NO: 415510 - protein, 15 aa, Homo sapiens
  CDR3 for beta chain variable domain of TCR clone 207755 (TRBV6-3, TRBJ2-7)
CASSSPGTVFYEQYF

SEQ ID NO: 415511 - protein, 16 aa, Homo sapiens
  CDR3 for alpha chain variable domain of TCR clone 207756 (TRAV27, TRAJ13)
CAGAKSDSGGCQKVTF

SEQ ID NO: 415512 - protein, 14 aa, Homo sapiens
  CDR3 for beta chain variable domain of TCR clone 207756 (TRBV5-5, TRBJ1-5)
CASSGQGVDQPQHF

SEQ ID NO: 415513 - protein, 14 aa, Homo sapiens
  CDR3 for alpha chain variable domain of TCR clone 207757 (TRAV16, TRAJ42)
CALLAGGSKGNLIF

SEQ ID NO: 415514 - protein, 15 aa, Homo sapiens
  CDR3 for beta chain variable domain of TCR clone 207757 (TRBV2, TRBJ2-7)
CASSEGLARSYEQYF

SEQ ID NO: 415515 - protein, 12 aa, Homo sapiens
  CDR3 for alpha chain variable domain of TCR clone 207758 (TRAV21, TRAJ41)
CAVESSGYALNF

SEQ ID NO: 415516 - protein, 15 aa, Homo sapiens
  CDR3 for beta chain variable domain of TCR clone 207758 (TRBV28, TRBJ2-1)
CASSIIAGGRSEQFL

SEQ ID NO: 415517 - protein, 13 aa, Homo sapiens
  CDR3 for alpha chain variable domain of TCR clone 207759 (TRAV12-2, TRAJ18)
CAVRGSTLGRLYF

SEQ ID NO: 415518 - protein, 16 aa, Homo sapiens
  CDR3 for beta chain variable domain of TCR clone 207759 (TRBV27, TRBJ2-2)
CASSFRGLVRTGELFF

SEQ ID NO: 415519 - protein, 13 aa, Homo sapiens
  CDR3 for alpha chain variable domain of TCR clone 207760 (TRAV17, TRAJ34)
CATDLYNTHKLIF

SEQ ID NO: 415520 - protein, 12 aa, Homo sapiens
  CDR3 for beta chain variable domain of TCR clone 207760 (TRBV11-2, TRBJ2-2)
CASSLGGGELFF

SEQ ID NO: 415521 - protein, 13 aa, Homo sapiens
  CDR3 for alpha chain variable domain of TCR clone 207761 (TRAV2, TRAJ47)
CAVDREYGNKLVF

SEQ ID NO: 415522 - protein, 12 aa, Homo sapiens
  CDR3 for beta chain variable domain of TCR clone 207761 (TRBV6-3, TRBJ2-7)
CASSLTTYEQYF

SEQ ID NO: 415523 - protein, 14 aa, Homo sapiens
  CDR3 for alpha chain variable domain of TCR clone 207762 (TRAV1-1, TRAJ12)
CAVRDQDSSYKLSF

SEQ ID NO: 415524 - protein, 15 aa, Homo sapiens
  CDR3 for beta chain variable domain of TCR clone 207762 (TRBV5-1, TRBJ2-5)
CASSRTGTSGETQYF

SEQ ID NO: 415525 - protein, 16 aa, Homo sapiens
  CDR3 for alpha chain variable domain of TCR clone 207763 (TRAV3, TRAJ37)
CAVRPHGSGNTGKLIF

SEQ ID NO: 415526 - protein, 17 aa, Homo sapiens
  CDR3 for beta chain variable domain of TCR clone 207763 (TRBV5-1, TRBJ2-5)
CASSPVALGQNQETQYS

SEQ ID NO: 415527 - protein, 14 aa, Homo sapiens
  CDR3 for alpha chain variable domain of TCR clone 207764 (TRAV12-2, TRAJ40)
CAVKIPSGTYKYIF

SEQ ID NO: 415528 - protein, 16 aa, Homo sapiens
  CDR3 for beta chain variable domain of TCR clone 207764 (TRBV12-4, TRBJ1-5)
CASSRPVGGSNQPQHF

SEQ ID NO: 415529 - protein, 13 aa, Homo sapiens
  CDR3 for alpha chain variable domain of TCR clone 207765 (TRAV12-1, TRAJ20)
CVGQRFNDYKLSF

SEQ ID NO: 415530 - protein, 14 aa, Homo sapiens
  CDR3 for beta chain variable domain of TCR clone 207765 (TRBV6-3, TRBJ1-5)
CASRYSRFAQPQHF

SEQ ID NO: 415531 - protein, 12 aa, Homo sapiens
  CDR3 for alpha chain variable domain of TCR clone 207766 (TRAV36/DV7, TRAJ54)
CAVVRGAQKLVF

SEQ ID NO: 415532 - protein, 14 aa, Homo sapiens
  CDR3 for beta chain variable domain of TCR clone 207766 (TRBV7-3, TRBJ1-1)
CASSLKGGNTEAFR

SEQ ID NO: 415533 - protein, 14 aa, Homo sapiens
  CDR3 for alpha chain variable domain of TCR clone 207767 (TRAV26-1, TRAJ38)
FIADNAGNNRKLIW

SEQ ID NO: 415534 - protein, 13 aa, Homo sapiens
  CDR3 for beta chain variable domain of TCR clone 207767 (TRBV6-5, TRBJ1-1)
CASRPVTGSRTFF

SEQ ID NO: 415535 - protein, 14 aa, Homo sapiens
  CDR3 for alpha chain variable domain of TCR clone 207768 (TRAV8-3, TRAJ3)
CAVVPRSSASKLIF

SEQ ID NO: 415536 - protein, 16 aa, Homo sapiens
  CDR3 for beta chain variable domain of TCR clone 207768 (TRBV4-1, TRBJ2-3)
CASSQLTSGGGDTQYF

SEQ ID NO: 415537 - protein, 14 aa, Homo sapiens
  CDR3 for alpha chain variable domain of TCR clone 207769 (TRAV13-1, TRAJ40)
CAASMTSGTYKYIC

SEQ ID NO: 415538 - protein, 15 aa, Homo sapiens
  CDR3 for beta chain variable domain of TCR clone 207769 (TRBV7-3, TRBJ2-1)
CASSPTGGGEVEQFF

SEQ ID NO: 415539 - protein, 14 aa, Homo sapiens
  CDR3 for alpha chain variable domain of TCR clone 207770 (TRAV27, TRAJ22)
CAGVSVLGKRQLTF

SEQ ID NO: 415540 - protein, 17 aa, Homo sapiens
  CDR3 for beta chain variable domain of TCR clone 207770 (TRBV14, TRBJ2-1)
FASSQDRRVTSYNEQFF

SEQ ID NO: 415541 - protein, 13 aa, Homo sapiens
  CDR3 for alpha chain variable domain of TCR clone 207771 (TRAV16, TRAJ33)
CSISMDSNYQLIW

SEQ ID NO: 415542 - protein, 14 aa, Homo sapiens
  CDR3 for beta chain variable domain of TCR clone 207771 (TRBV4-2, TRBJ2-1)
CASGLDRAYNEQFF

SEQ ID NO: 415543 - protein, 17 aa, Homo sapiens
  CDR3 for alpha chain variable domain of TCR clone 207772 (TRAV12-2, TRAJ52)
CAVNPYAGGTSYGKLTF

SEQ ID NO: 415544 - protein, 13 aa, Homo sapiens
  CDR3 for beta chain variable domain of TCR clone 207772 (TRBV7-3, TRBJ2-1)
CVSSPVAYNEQFF

SEQ ID NO: 415545 - protein, 15 aa, Homo sapiens
  CDR3 for alpha chain variable domain of TCR clone 207773 (TRAV21, TRAJ37)
CAGRPTLSNTGKLIF

SEQ ID NO: 415546 - protein, 17 aa, Homo sapiens
  CDR3 for beta chain variable domain of TCR clone 207773 (TRBV28, TRBJ2-2)
CASSSYSYRGNTGELFF

SEQ ID NO: 415547 - protein, 11 aa, Homo sapiens
  CDR3 for alpha chain variable domain of TCR clone 207774 (TRAV3, TRAJ32)
CAVREGIMVVL

SEQ ID NO: 415548 - protein, 17 aa, Homo sapiens
  CDR3 for beta chain variable domain of TCR clone 207774 (TRBV13, TRBJ2-3)
CASSLSRVAGGRNTQYF

SEQ ID NO: 415549 - protein, 16 aa, Homo sapiens
  CDR3 for alpha chain variable domain of TCR clone 207775 (TRAV26-1, TRAJ38)
CIVRVELGGNNRKPIW

SEQ ID NO: 415550 - protein, 14 aa, Homo sapiens
  CDR3 for beta chain variable domain of TCR clone 207775 (TRBV5-1, TRBJ2-3)
CASSPGLAADTQYF

SEQ ID NO: 415551 - protein, 16 aa, Homo sapiens
  CDR3 for alpha chain variable domain of TCR clone 207776 (TRAV14/DV4, TRAJ53)
CAMREGGGGRNYKLTF

SEQ ID NO: 415552 - protein, 15 aa, Homo sapiens
  CDR3 for beta chain variable domain of TCR clone 207776 (TRBV7-3, TRBJ2-1)
CASSLSSGSFDEQFF

SEQ ID NO: 415553 - protein, 13 aa, Homo sapiens
  CDR3 for alpha chain variable domain of TCR clone 207777 (TRAV21, TRAJ3)
CCEPYSSASKIIF

SEQ ID NO: 415554 - protein, 16 aa, Homo sapiens
  CDR3 for beta chain variable domain of TCR clone 207777 (TRBV4-1, TRBJ2-1)
CASSQARQGWINEQFF

SEQ ID NO: 415555 - protein, 15 aa, Homo sapiens
  CDR3 for alpha chain variable domain of TCR clone 207778 (TRAV23/DV6, TRAJ44)
CAAAFNTGTASKLTF

SEQ ID NO: 415556 - protein, 12 aa, Homo sapiens
  CDR3 for beta chain variable domain of TCR clone 207778 (TRBV20-1, TRBJ1-5)
CSARAPDQPQHF

SEQ ID NO: 415557 - protein, 15 aa, Homo sapiens
  CDR3 for alpha chain variable domain of TCR clone 207779 (TRAV17, TRAJ57)
CATGPSQGGSEKLVF

SEQ ID NO: 415558 - protein, 17 aa, Homo sapiens
  CDR3 for beta chain variable domain of TCR clone 207779 (TRBV20-1, TRBJ2-1)
CSASSSGLAGSYTEQFF

SEQ ID NO: 415559 - protein, 17 aa, Homo sapiens
  CDR3 for alpha chain variable domain of TCR clone 207780 (TRAV26-1, TRAJ11)
CIVRVGPSNSGYSTLTF

SEQ ID NO: 415560 - protein, 17 aa, Homo sapiens
  CDR3 for beta chain variable domain of TCR clone 207780 (TRBV9, TRBJ2-1)
CASSPRLGLVGYNEQFF

SEQ ID NO: 415561 - protein, 13 aa, Homo sapiens
  CDR3 for alpha chain variable domain of TCR clone 207781 (TRAV12-3, TRAJ53)
CAMRGGSNYKRTF

SEQ ID NO: 415562 - protein, 12 aa, Homo sapiens
  CDR3 for beta chain variable domain of TCR clone 207781 (TRBV11-2, TRBJ2-1)
CASSPGNNEQFF

SEQ ID NO: 415563 - protein, 13 aa, Homo sapiens
  CDR3 for alpha chain variable domain of TCR clone 207782 (TRAV13-2, TRAJ53)
CAENMGSNYKLTF

SEQ ID NO: 415564 - protein, 14 aa, Homo sapiens
  CDR3 for beta chain variable domain of TCR clone 207782 (TRBV12-4, TRBJ1-4)
CASRMTGRSEKLFF

SEQ ID NO: 415565 - protein, 12 aa, Homo sapiens
  CDR3 for alpha chain variable domain of TCR clone 207783 (TRAV12-3, TRAJ17)
CAMTLTGNKLTF

SEQ ID NO: 415566 - protein, 16 aa, Homo sapiens
  CDR3 for beta chain variable domain of TCR clone 207783 (TRBV4-3, TRBJ2-3)
CASSLGLAGEGDTQYF

SEQ ID NO: 415567 - protein, 14 aa, Homo sapiens
  CDR3 for alpha chain variable domain of TCR clone 207784 (TRAV29/DV5, TRAJ45)
CAASFRGGADGLTF

SEQ ID NO: 415568 - protein, 13 aa, Homo sapiens
  CDR3 for beta chain variable domain of TCR clone 207784 (TRBV7-2, TRBJ2-7)
CASSSPSGSEQYF

SEQ ID NO: 415569 - protein, 13 aa, Homo sapiens
  CDR3 for alpha chain variable domain of TCR clone 207785 (TRAV26-1, TRAJ29)
RIVRRSGNTPLVF

SEQ ID NO: 415570 - protein, 13 aa, Homo sapiens
  CDR3 for beta chain variable domain of TCR clone 207785 (TRBV9, TRBJ2-1)
CASSPSGGNEQFF

SEQ ID NO: 415571 - protein, 13 aa, Homo sapiens
  CDR3 for alpha chain variable domain of TCR clone 207786 (TRAV27, TRAJ42)
CAGARGRQGNLIF

SEQ ID NO: 415572 - protein, 15 aa, Homo sapiens
  CDR3 for beta chain variable domain of TCR clone 207786 (TRBV10-3, TRBJ2-2)
CAIRTDREDTGELFF

SEQ ID NO: 415573 - protein, 12 aa, Homo sapiens
  CDR3 for alpha chain variable domain of TCR clone 207787 (TRAV3, TRAJ20)
CAVRDGDYKLSF

SEQ ID NO: 415574 - protein, 15 aa, Homo sapiens
  CDR3 for beta chain variable domain of TCR clone 207787 (TRBV7-8, TRBJ1-5)
CASSLTRDTNQPQHF

SEQ ID NO: 415575 - protein, 17 aa, Homo sapiens
  CDR3 for alpha chain variable domain of TCR clone 207788 (TRAV3, TRAJ6)
CAVRDGPRAGGSYIPTI

SEQ ID NO: 415576 - protein, 15 aa, Homo sapiens
  CDR3 for beta chain variable domain of TCR clone 207788 (TRBV20-1, TRBJ1-1)
CSASWDRFLNTEAFF

SEQ ID NO: 415577 - protein, 18 aa, Homo sapiens
  CDR3 for alpha chain variable domain of TCR clone 207789 (TRAV13-1, TRAJ52)
CAASKRSAGGTSYGKLTF

SEQ ID NO: 415578 - protein, 15 aa, Homo sapiens
  CDR3 for beta chain variable domain of TCR clone 207789 (TRBV20-1, TRBJ2-7)
CSARAPGTITYEQYF

SEQ ID NO: 415579 - protein, 14 aa, Homo sapiens
  CDR3 for alpha chain variable domain of TCR clone 207790 (TRAV8-4, TRAJ9)
CAVTCNTGGFKTIF

SEQ ID NO: 415580 - protein, 15 aa, Homo sapiens
  CDR3 for beta chain variable domain of TCR clone 207790 (TRBV7-9, TRBJ2-2)
CASSPETGAGGELFF

SEQ ID NO: 415581 - protein, 15 aa, Homo sapiens
  CDR3 for alpha chain variable domain of TCR clone 207791 (TRAV21, TRAJ18)
CAVRDRGSTLGRLYF

SEQ ID NO: 415582 - protein, 14 aa, Homo sapiens
  CDR3 for beta chain variable domain of TCR clone 207791 (TRBV4-1, TRBJ2-3)
CASSQDWSTDTQYF

SEQ ID NO: 415583 - protein, 11 aa, Homo sapiens
  CDR3 for alpha chain variable domain of TCR clone 207792 (TRAV8-4, TRAJ52)
AGGTSYGNLTF

SEQ ID NO: 415584 - protein, 13 aa, Homo sapiens
  CDR3 for beta chain variable domain of TCR clone 207792 (TRBV28, TRBJ2-2)
CASIGGLGGELFF

SEQ ID NO: 415585 - protein, 16 aa, Homo sapiens
  CDR3 for alpha chain variable domain of TCR clone 207793 (TRAV30, TRAJ24)
CGTEIVDADSWGKFQF

SEQ ID NO: 415586 - protein, 17 aa, Homo sapiens
  CDR3 for beta chain variable domain of TCR clone 207793 (TRBV20-1, TRBJ2-1)
GSASSSGLAGSYNEQFF

SEQ ID NO: 415587 - protein, 14 aa, Homo sapiens
  CDR3 for alpha chain variable domain of TCR clone 207794 (TRAV12-1, TRAJ17)
CVVNYKAAGNKLTF

SEQ ID NO: 415588 - protein, 17 aa, Homo sapiens
  CDR3 for beta chain variable domain of TCR clone 207794 (TRBV20-1, TRBJ2-1)
CSASSSGLAGGYNEQFF

SEQ ID NO: 415589 - protein, 12 aa, Homo sapiens
  CDR3 for alpha chain variable domain of TCR clone 207795 (TRAV27, TRAJ35)
CAGADFGDVLHC

SEQ ID NO: 415590 - protein, 15 aa, Homo sapiens
  CDR3 for beta chain variable domain of TCR clone 207795 (TRBV20-1, TRBJ2-7)
CSARDRVSGMDEQYF

SEQ ID NO: 415591 - protein, 15 aa, Homo sapiens
  CDR3 for alpha chain variable domain of TCR clone 207796 (TRAV3, TRAJ20)
CAVRDIKLSDHKLSF

SEQ ID NO: 415592 - protein, 15 aa, Homo sapiens
  CDR3 for beta chain variable domain of TCR clone 207796 (TRBV7-9, TRBJ1-6)
CASSSPGRGNSPRHF

SEQ ID NO: 415593 - protein, 15 aa, Homo sapiens
  CDR3 for alpha chain variable domain of TCR clone 207797 (TRAV27, TRAJ38)
CAACRNAGNNRKLIW

SEQ ID NO: 415594 - protein, 17 aa, Homo sapiens
  CDR3 for beta chain variable domain of TCR clone 207797 (TRBV20-1, TRBJ2-2)
CSASGSGQGGLTGELFF

SEQ ID NO: 415595 - protein, 15 aa, Homo sapiens
  CDR3 for alpha chain variable domain of TCR clone 207798 (TRAV8-6, TRAJ11)
CAVDFMNSGYSTLTF

SEQ ID NO: 415596 - protein, 17 aa, Homo sapiens
  CDR3 for beta chain variable domain of TCR clone 207798 (TRBV3-1, TRBJ2-5)
CASSNWGGTSGQETQYF

SEQ ID NO: 415597 - protein, 14 aa, Homo sapiens
  CDR3 for alpha chain variable domain of TCR clone 207799 (TRAV26-1, TRAJ24)
CIVRRVGGWGKFQF

SEQ ID NO: 415598 - protein, 11 aa, Homo sapiens
  CDR3 for beta chain variable domain of TCR clone 207799 (TRBV12-4, TRBJ2-3)
CASTATDTQYF

SEQ ID NO: 415599 - protein, 12 aa, Homo sapiens
  CDR3 for alpha chain variable domain of TCR clone 207800 (TRAV12-1, TRAJ6)
CVVSERSYIHTF

SEQ ID NO: 415600 - protein, 21 aa, Homo sapiens
  CDR3 for beta chain variable domain of TCR clone 207800 (TRBV7-3, TRBJ2-1)
GGTQPCISVPAAYGLAGAQFF

SEQ ID NO: 415601 - protein, 14 aa, Homo sapiens
  CDR3 for alpha chain variable domain of TCR clone 207801 (TRAV38-2/DV8, TRAJ30)
CAYRSADRADKIIF

SEQ ID NO: 415602 - protein, 16 aa, Homo sapiens
  CDR3 for beta chain variable domain of TCR clone 207801 (TRBV15, TRBJ1-3)
CATSSPIGFSGNTIYF

SEQ ID NO: 415603 - protein, 14 aa, Homo sapiens
  CDR3 for alpha chain variable domain of TCR clone 207802 (TRAV23/DV6, TRAJ13)
CAASETGGYQKVTF

SEQ ID NO: 415604 - protein, 16 aa, Homo sapiens
  CDR3 for beta chain variable domain of TCR clone 207802 (TRBV12-4, TRBJ2-5)
CASSPTSGRAEGTQYF

SEQ ID NO: 415605 - protein, 14 aa, Homo sapiens
  CDR3 for alpha chain variable domain of TCR clone 207803 (TRAV12-3, TRAJ10)
SHLPLTGGGNKLTF

SEQ ID NO: 415606 - protein, 17 aa, Homo sapiens
  CDR3 for beta chain variable domain of TCR clone 207803 (TRBV13, TRBJ2-3)
CASSLSRVAGGMNTQYF

SEQ ID NO: 415607 - protein, 20 aa, Homo sapiens
  CDR3 for alpha chain variable domain of TCR clone 207804 (TRAV25, TRAJ33)
TATQTTDVGTSRGSNDQLIW

SEQ ID NO: 415608 - protein, 14 aa, Homo sapiens
  CDR3 for beta chain variable domain of TCR clone 207804 (TRBV7-2, TRBJ2-5)
CASSTGGELKTQYF

SEQ ID NO: 415609 - protein, 22 aa, Homo sapiens
  CDR3 for alpha chain variable domain of TCR clone 207805 (TRAV13-1, TRAJ9)
CAASALLEASKLSLEQEQDYLL

SEQ ID NO: 415610 - protein, 16 aa, Homo sapiens
  CDR3 for beta chain variable domain of TCR clone 207805 (TRBV7-8, TRBJ2-4)
CASSAERTLAKNIQYF

SEQ ID NO: 415611 - protein, 12 aa, Homo sapiens
  CDR3 for alpha chain variable domain of TCR clone 207806 (TRAV12-3, TRAJ20)
CAMVRGDYKLSF

SEQ ID NO: 415612 - protein, 14 aa, Homo sapiens
  CDR3 for beta chain variable domain of TCR clone 207806 (TRBV5-5, TRBJ1-5)
CASSGQGVDQPQYF

SEQ ID NO: 415613 - protein, 14 aa, Homo sapiens
  CDR3 for alpha chain variable domain of TCR clone 207807 (TRAV1-2, TRAJ16)
CAVNRFSDGQKLLF

SEQ ID NO: 415614 - protein, 14 aa, Homo sapiens
  CDR3 for beta chain variable domain of TCR clone 207807 (TRBV10-3, TRBJ1-2)
CAISAGGRVDGYTF

SEQ ID NO: 415615 - protein, 14 aa, Homo sapiens
  CDR3 for alpha chain variable domain of TCR clone 207808 (TRAV12-3, TRAJ9)
CAMSPNTGGFKTIF

SEQ ID NO: 415616 - protein, 15 aa, Homo sapiens
  CDR3 for beta chain variable domain of TCR clone 207808 (TRBV20-1, TRBJ1-1)
CSARSAATSNTEAFF

SEQ ID NO: 415617 - protein, 16 aa, Homo sapiens
  CDR3 for alpha chain variable domain of TCR clone 207809 (TRAV8-4, TRAJ18)
CAVTANGGSTLGRLYF

SEQ ID NO: 415618 - protein, 14 aa, Homo sapiens
  CDR3 for beta chain variable domain of TCR clone 207809 (TRBV12-4, TRBJ1-2)
CASSSAGHTYGYTF

SEQ ID NO: 415619 - protein, 15 aa, Homo sapiens
  CDR3 for alpha chain variable domain of TCR clone 207810 (TRAV8-3, TRAJ27)
CAVGPSKTNASKSTF

SEQ ID NO: 415620 - protein, 14 aa, Homo sapiens
  CDR3 for beta chain variable domain of TCR clone 207810 (TRBV11-2, TRBJ2-3)
CASSRLARTDTEYF

SEQ ID NO: 415621 - protein, 19 aa, Homo sapiens
  CDR3 for alpha chain variable domain of TCR clone 207811 (TRAV21, TRAJ20)
SLVTQPPTSALPNDYKLSF

SEQ ID NO: 415622 - protein, 14 aa, Homo sapiens
  CDR3 for beta chain variable domain of TCR clone 207811 (TRBV7-2, TRBJ1-3)
CASSRLRSGNTIYF

SEQ ID NO: 415623 - protein, 13 aa, Homo sapiens
  CDR3 for alpha chain variable domain of TCR clone 207812 (TRAV29/DV5, TRAJ29)
CAASAAGNTPLVF

SEQ ID NO: 415624 - protein, 16 aa, Homo sapiens
  CDR3 for beta chain variable domain of TCR clone 207812 (TRBV6-1, TRBJ2-5)
CASSDTLDRGAETQYF

SEQ ID NO: 415625 - protein, 15 aa, Homo sapiens
  CDR3 for alpha chain variable domain of TCR clone 207813 (TRAV12-1, TRAJ44)
CVVDTPQGTASKLTF

SEQ ID NO: 415626 - protein, 16 aa, Homo sapiens
  CDR3 for beta chain variable domain of TCR clone 207813 (TRBV11-3, TRBJ2-7)
CASSPHGAGGPYEQYF

SEQ ID NO: 415627 - protein, 15 aa, Homo sapiens
  CDR3 for alpha chain variable domain of TCR clone 207814 (TRAV26-1, TRAJ3)
CIVRSGYSSASKIIF

SEQ ID NO: 415628 - protein, 14 aa, Homo sapiens
  CDR3 for beta chain variable domain of TCR clone 207814 (TRBV7-6, TRBJ2-3)
CASSVAGGTDTQYF

SEQ ID NO: 415629 - protein, 12 aa, Homo sapiens
  CDR3 for alpha chain variable domain of TCR clone 207815 (TRAV17, TRAJ12)
CATLRSSYKLIF

SEQ ID NO: 415630 - protein, 16 aa, Homo sapiens
  CDR3 for beta chain variable domain of TCR clone 207815 (TRBV11-3, TRBJ2-5)
CASSSVVAGSTETQYF

SEQ ID NO: 415631 - protein, 16 aa, Homo sapiens
  CDR3 for alpha chain variable domain of TCR clone 207816 (TRAV12-3, TRAJ53)
CAMSPGSGGSNYKLTF

SEQ ID NO: 415632 - protein, 16 aa, Homo sapiens
  CDR3 for beta chain variable domain of TCR clone 207816 (TRBV24-1, TRBJ2-3)
CATSDSGTGATDTQYF

SEQ ID NO: 415633 - protein, 16 aa, Homo sapiens
  CDR3 for alpha chain variable domain of TCR clone 207817 (TRAV8-4, TRAJ44)
CAVSASLTGTASKLPF

SEQ ID NO: 415634 - protein, 11 aa, Homo sapiens
  CDR3 for beta chain variable domain of TCR clone 207817 (TRBV7-9, TRBJ2-5)
CASSLGETQYF

SEQ ID NO: 415635 - protein, 13 aa, Homo sapiens
  CDR3 for alpha chain variable domain of TCR clone 207818 (TRAV1-2, TRAJ9)
CAALNTGGFKTIF

SEQ ID NO: 415636 - protein, 17 aa, Homo sapiens
  CDR3 for beta chain variable domain of TCR clone 207818 (TRBV13, TRBJ2-3)
CASSISRVAGGRNTQYF

SEQ ID NO: 415637 - protein, 15 aa, Homo sapiens
  CDR3 for alpha chain variable domain of TCR clone 207819 (TRAV21, TRAJ24)
CAARSSTDCWGKLQF

SEQ ID NO: 415638 - protein, 13 aa, Homo sapiens
  CDR3 for beta chain variable domain of TCR clone 207819 (TRBV11-2, TRBJ2-5)
CASSSTGEETQYF

SEQ ID NO: 415639 - protein, 16 aa, Homo sapiens
  CDR3 for alpha chain variable domain of TCR clone 207820 (TRAV38-1, TRAJ37)
CAFKGDGSSNTGKLIF

SEQ ID NO: 415640 - protein, 13 aa, Homo sapiens
  CDR3 for beta chain variable domain of TCR clone 207820 (TRBV12-4, TRBJ2-5)
CASSVFRRETQYV

SEQ ID NO: 415641 - protein, 14 aa, Homo sapiens
  CDR3 for alpha chain variable domain of TCR clone 207821 (TRAV10, TRAJ9)
CVVSANTGGFKTIF

SEQ ID NO: 415642 - protein, 15 aa, Homo sapiens
  CDR3 for beta chain variable domain of TCR clone 207821 (TRBV5-5, TRBJ1-5)
CASSSTPGSNQPQHF

SEQ ID NO: 415643 - protein, 15 aa, Homo sapiens
  CDR3 for alpha chain variable domain of TCR clone 207822 (TRAV14/DV4, TRAJ33)
CAMREGRDSNYQLIW

SEQ ID NO: 415644 - protein, 13 aa, Homo sapiens
  CDR3 for beta chain variable domain of TCR clone 207822 (TRBV7-6, TRBJ1-2)
CASSLEADYGYTF

SEQ ID NO: 415645 - protein, 12 aa, Homo sapiens
  CDR3 for alpha chain variable domain of TCR clone 207823 (TRAV20, TRAJ49)
CAVRGPSNQFYF

SEQ ID NO: 415646 - protein, 15 aa, Homo sapiens
  CDR3 for beta chain variable domain of TCR clone 207823 (TRBV29-1, TRBJ2-1)
CSVGRHALFYNEQFF

SEQ ID NO: 415647 - protein, 16 aa, Homo sapiens
  CDR3 for alpha chain variable domain of TCR clone 207824 (TRAV12-3, TRAJ53)
CAMSPGSGGSHYKLTL

SEQ ID NO: 415648 - protein, 11 aa, Homo sapiens
  CDR3 for beta chain variable domain of TCR clone 207824 (TRBV29-1, TRBJ2-5)
CSEDRPGTQYF

SEQ ID NO: 415649 - protein, 14 aa, Homo sapiens
  CDR3 for alpha chain variable domain of TCR clone 207825 (TRAV3, TRAJ34)
CAVRDINNTDKLTF

SEQ ID NO: 415650 - protein, 13 aa, Homo sapiens
  CDR3 for beta chain variable domain of TCR clone 207825 (TRBV20-1, TRBJ1-1)
CSARGGGNTEAFF

SEQ ID NO: 415651 - protein, 16 aa, Homo sapiens
  CDR3 for alpha chain variable domain of TCR clone 207826 (TRAV3, TRAJ32)
CCARRNYGGATNKLIF

SEQ ID NO: 415652 - protein, 13 aa, Homo sapiens
  CDR3 for beta chain variable domain of TCR clone 207826 (TRBV2, TRBJ1-1)
CASSEGGNTEAFF

SEQ ID NO: 415653 - protein, 11 aa, Homo sapiens
  CDR3 for alpha chain variable domain of TCR clone 207827 (TRAV1-2, TRAJ31)
CAVNNNARLMF

SEQ ID NO: 415654 - protein, 15 aa, Homo sapiens
  CDR3 for beta chain variable domain of TCR clone 207827 (TRBV28, TRBJ2-1)
CASSIIAGSRSEQFS

SEQ ID NO: 415655 - protein, 13 aa, Homo sapiens
  CDR3 for alpha chain variable domain of TCR clone 207828 (TRAV12-3, TRAJ5)
CAMRPTGRRALTF

SEQ ID NO: 415656 - protein, 16 aa, Homo sapiens
  CDR3 for beta chain variable domain of TCR clone 207828 (TRBV29-1, TRBJ2-7)
CSVEDAEDGTAYEQYF

SEQ ID NO: 415657 - protein, 14 aa, Homo sapiens
  CDR3 for alpha chain variable domain of TCR clone 207829 (TRAV8-1, TRAJ5)
CAVRTDTGRRALTF

SEQ ID NO: 415658 - protein, 12 aa, Homo sapiens
  CDR3 for beta chain variable domain of TCR clone 207829 (TRBV11-2, TRBJ2-1)
CASSPGHNEQFF

SEQ ID NO: 415659 - protein, 13 aa, Homo sapiens
  CDR3 for alpha chain variable domain of TCR clone 207830 (TRAV8-6, TRAJ40)
CAVSVTGTYKYIF

SEQ ID NO: 415660 - protein, 14 aa, Homo sapiens
  CDR3 for beta chain variable domain of TCR clone 207830 (TRBV25-1, TRBJ1-1)
CASTHLGGNAEAFF

SEQ ID NO: 415661 - protein, 13 aa, Homo sapiens
  CDR3 for alpha chain variable domain of TCR clone 207831 (TRAV12-2, TRAJ12)
CAVNGDSSYKLIF

SEQ ID NO: 415662 - protein, 15 aa, Homo sapiens
  CDR3 for beta chain variable domain of TCR clone 207831 (TRBV7-8, TRBJ2-1)
CASSPSVTIYNEQFF

SEQ ID NO: 415663 - protein, 15 aa, Homo sapiens
  CDR3 for alpha chain variable domain of TCR clone 207832 (TRAV1-2, TRAJ35)
CAVRDRGGFGNVLHC

SEQ ID NO: 415664 - protein, 14 aa, Homo sapiens
  CDR3 for beta chain variable domain of TCR clone 207832 (TRBV28, TRBJ1-4)
CASSRTVGNEKLFF

SEQ ID NO: 415665 - protein, 11 aa, Homo sapiens
  CDR3 for alpha chain variable domain of TCR clone 207833 (TRAV35, TRAJ30)
CAGPGDDKIIF

SEQ ID NO: 415666 - protein, 14 aa, Homo sapiens
  CDR3 for beta chain variable domain of TCR clone 207833 (TRBV7-6, TRBJ1-6)
CASSQAGGGSPLHF

SEQ ID NO: 415667 - protein, 14 aa, Homo sapiens
  CDR3 for alpha chain variable domain of TCR clone 207834 (TRAV1-2, TRAJ16)
CAVNRFSDGQKLLF

SEQ ID NO: 415668 - protein, 15 aa, Homo sapiens
  CDR3 for beta chain variable domain of TCR clone 207834 (TRBV4-2, TRBJ1-1)
RASSQQGAGDTEAFF

SEQ ID NO: 415669 - protein, 11 aa, Homo sapiens
  CDR3 for alpha chain variable domain of TCR clone 207835 (TRAV2, TRAJ13)
CASGGYQKVTF

SEQ ID NO: 415670 - protein, 12 aa, Homo sapiens
  CDR3 for beta chain variable domain of TCR clone 207835 (TRBV5-7, TRBJ1-1)
WASSLGRGKAFF

SEQ ID NO: 415671 - protein, 11 aa, Homo sapiens
  CDR3 for alpha chain variable domain of TCR clone 207836 (TRAV12-1, TRAJ21)
CVVYNFNKFYF

SEQ ID NO: 415672 - protein, 13 aa, Homo sapiens
  CDR3 for beta chain variable domain of TCR clone 207836 (TRBV4-1, TRBJ2-5)
CASSLTRGETQYF

SEQ ID NO: 415673 - protein, 16 aa, Homo sapiens
  CDR3 for alpha chain variable domain of TCR clone 207837 (TRAV30, TRAJ24)
CGTEIVDADSWGKFQF

SEQ ID NO: 415674 - protein, 17 aa, Homo sapiens
  CDR3 for beta chain variable domain of TCR clone 207837 (TRBV20-1, TRBJ2-1)
CSAPPRLAGTIYNEQFF

SEQ ID NO: 415675 - protein, 14 aa, Homo sapiens
  CDR3 for alpha chain variable domain of TCR clone 207838 (TRAV35, TRAJ22)
CAGLRPGSARQLTF

SEQ ID NO: 415676 - protein, 17 aa, Homo sapiens
  CDR3 for beta chain variable domain of TCR clone 207838 (TRBV15, TRBJ1-4)
CATSRCGTGDPNEKLFF

SEQ ID NO: 415677 - protein, 13 aa, Homo sapiens
  CDR3 for alpha chain variable domain of TCR clone 207839 (TRAV21, TRAJ37)
CAVSSGNTGKLIF

SEQ ID NO: 415678 - protein, 17 aa, Homo sapiens
  CDR3 for beta chain variable domain of TCR clone 207839 (TRBV5-1, TRBJ2-5)
CASSLLGLAANQETQYY

SEQ ID NO: 415679 - protein, 16 aa, Homo sapiens
  CDR3 for alpha chain variable domain of TCR clone 207840 (TRAV13-1, TRAJ18)
CAASRMRGSTLARLYF

SEQ ID NO: 415680 - protein, 15 aa, Homo sapiens
  CDR3 for beta chain variable domain of TCR clone 207840 (TRBV29-1, TRBJ2-1)
CSVGRHALFYNEQFF

SEQ ID NO: 415681 - protein, 10 aa, Homo sapiens
  CDR3 for alpha chain variable domain of TCR clone 207841 (TRAV30, TRAJ48)
CGIGNEKLTF

SEQ ID NO: 415682 - protein, 15 aa, Homo sapiens
  CDR3 for beta chain variable domain of TCR clone 207841 (TRBV11-2, TRBJ1-2)
CASSLEGVQRNGYTF

SEQ ID NO: 415683 - protein, 15 aa, Homo sapiens
  CDR3 for alpha chain variable domain of TCR clone 207842 (TRAV8-3, TRAJ23)
CAVGDRYNQGGKLIF

SEQ ID NO: 415684 - protein, 15 aa, Homo sapiens
  CDR3 for beta chain variable domain of TCR clone 207842 (TRBV19, TRBJ1-1)
CASTSGQIQNTEAFF

SEQ ID NO: 415685 - protein, 16 aa, Homo sapiens
  CDR3 for alpha chain variable domain of TCR clone 207843 (TRAV22, TRAJ45)
CAVERGKRGGADGFTF

SEQ ID NO: 415686 - protein, 13 aa, Homo sapiens
  CDR3 for beta chain variable domain of TCR clone 207843 (TRBV27, TRBJ1-1)
CASSLSSGAEAFF

SEQ ID NO: 415687 - protein, 14 aa, Homo sapiens
  CDR3 for alpha chain variable domain of TCR clone 207844 (TRAV12-2, TRAJ24)
CAVTPADSWGKLQF

SEQ ID NO: 415688 - protein, 16 aa, Homo sapiens
  CDR3 for beta chain variable domain of TCR clone 207844 (TRBV7-3, TRBJ2-1)
CASSLEGYRSYNEQFF

SEQ ID NO: 415689 - protein, 12 aa, Homo sapiens
  CDR3 for alpha chain variable domain of TCR clone 207845 (TRAV1-1, TRAJ20)
CALREDDYKLSF

SEQ ID NO: 415690 - protein, 18 aa, Homo sapiens
  CDR3 for beta chain variable domain of TCR clone 207845 (TRBV20-1, TRBJ2-3)
CSASGLAGGPGTTDTQYF

SEQ ID NO: 415691 - protein, 15 aa, Homo sapiens
  CDR3 for alpha chain variable domain of TCR clone 207846 (TRAV8-3, TRAJ15)
CAVGVCQPGRNCSDL

SEQ ID NO: 415692 - protein, 12 aa, Homo sapiens
  CDR3 for beta chain variable domain of TCR clone 207846 (TRBV6-3, TRBJ2-7)
CASSEPGFEQYF

SEQ ID NO: 415693 - protein, 15 aa, Homo sapiens
  CDR3 for alpha chain variable domain of TCR clone 207847 (TRAV13-1, TRAJ32)
CAASIYGGATNKLIF

SEQ ID NO: 415694 - protein, 12 aa, Homo sapiens
  CDR3 for beta chain variable domain of TCR clone 207847 (TRBV7-6, TRBJ2-3)
CASSTGTDTRYF

SEQ ID NO: 415695 - protein, 14 aa, Homo sapiens
  CDR3 for alpha chain variable domain of TCR clone 207848 (TRAV26-1, TRAJ45)
CIVRVVGGADGLTF

SEQ ID NO: 415696 - protein, 16 aa, Homo sapiens
  CDR3 for beta chain variable domain of TCR clone 207848 (TRBV7-9, TRBJ1-1)
CASSLTQVRSNTEAFF

SEQ ID NO: 415697 - protein, 14 aa, Homo sapiens
  CDR3 for alpha chain variable domain of TCR clone 207849 (TRAV27, TRAJ15)
CAGFDNQAGTALIF

SEQ ID NO: 415698 - protein, 11 aa, Homo sapiens
  CDR3 for beta chain variable domain of TCR clone 207849 (TRBV29-1, TRBJ1-1)
FSVEVGTRTFF

SEQ ID NO: 415699 - protein, 16 aa, Homo sapiens
  CDR3 for alpha chain variable domain of TCR clone 207850 (TRAV12-1, TRAJ22)
CVVNLFLDRSARQLTF

SEQ ID NO: 415700 - protein, 16 aa, Homo sapiens
  CDR3 for beta chain variable domain of TCR clone 207850 (TRBV7-9, TRBJ2-1)
CASSDVAGGSYNEQFF

SEQ ID NO: 415701 - protein, 16 aa, Homo sapiens
  CDR3 for alpha chain variable domain of TCR clone 207851 (TRAV3, TRAJ10)
CAVRDMRAGGGNKLTF

SEQ ID NO: 415702 - protein, 14 aa, Homo sapiens
  CDR3 for beta chain variable domain of TCR clone 207851 (TRBV25-1, TRBJ1-1)
CASTHRGGNTEAFF

SEQ ID NO: 415703 - protein, 13 aa, Homo sapiens
  CDR3 for alpha chain variable domain of TCR clone 207852 (TRAV27, TRAJ16)
CAGACSDGQKLLF

SEQ ID NO: 415704 - protein, 15 aa, Homo sapiens
  CDR3 for beta chain variable domain of TCR clone 207852 (TRBV6-1, TRBJ2-3)
CASTTLAGHTDTQYF

SEQ ID NO: 415705 - protein, 15 aa, Homo sapiens
  CDR3 for alpha chain variable domain of TCR clone 207853 (TRAV12-3, TRAJ6)
FAMSATTGGSYIPTF

SEQ ID NO: 415706 - protein, 13 aa, Homo sapiens
  CDR3 for beta chain variable domain of TCR clone 207853 (TRBV7-9, TRBJ1-2)
CASSLKQNYGYTF

SEQ ID NO: 415707 - protein, 14 aa, Homo sapiens
  CDR3 for alpha chain variable domain of TCR clone 207854 (TRAV8-4, TRAJ54)
CTVSEVLGAQKLVF

SEQ ID NO: 415708 - protein, 13 aa, Homo sapiens
  CDR3 for beta chain variable domain of TCR clone 207854 (TRBV27, TRBJ2-7)
CASSFVSSYEQYF

SEQ ID NO: 415709 - protein, 12 aa, Homo sapiens
  CDR3 for alpha chain variable domain of TCR clone 207855 (TRAV17, TRAJ30)
CATDARDDKIIF

SEQ ID NO: 415710 - protein, 16 aa, Homo sapiens
  CDR3 for beta chain variable domain of TCR clone 207855 (TRBV5-7, TRBJ2-7)
CASSPTSGRELDEEYF

SEQ ID NO: 415711 - protein, 13 aa, Homo sapiens
  CDR3 for alpha chain variable domain of TCR clone 207856 (TRAV21, TRAJ20)
CAVGLRVDYKLSF

SEQ ID NO: 415712 - protein, 13 aa, Homo sapiens
  CDR3 for beta chain variable domain of TCR clone 207856 (TRBV6-3, TRBJ2-5)
CARRGPAEETQYF

SEQ ID NO: 415713 - protein, 15 aa, Homo sapiens
  CDR3 for alpha chain variable domain of TCR clone 207857 (TRAV23/DV6, TRAJ42)
CAARGYGGSQGNLIF

SEQ ID NO: 415714 - protein, 13 aa, Homo sapiens
  CDR3 for beta chain variable domain of TCR clone 207857 (TRBV7-2, TRBJ1-5)
CASSTQGSQTQHF

SEQ ID NO: 415715 - protein, 14 aa, Homo sapiens
  CDR3 for alpha chain variable domain of TCR clone 207858 (TRAV1-2, TRAJ16)
CAVNRFSDGQKLLF

SEQ ID NO: 415716 - protein, 13 aa, Homo sapiens
  CDR3 for beta chain variable domain of TCR clone 207858 (TRBV11-1, TRBJ2-1)
CASRTLGVGEQFF

SEQ ID NO: 415717 - protein, 16 aa, Homo sapiens
  CDR3 for alpha chain variable domain of TCR clone 207859 (TRAV16, TRAJ4)
CALSRMFSGGYNKLIF

SEQ ID NO: 415718 - protein, 16 aa, Homo sapiens
  CDR3 for beta chain variable domain of TCR clone 207859 (TRBV24-1, TRBJ2-3)
CATSDPGTGATATQYF

SEQ ID NO: 415719 - protein, 12 aa, Homo sapiens
  CDR3 for alpha chain variable domain of TCR clone 207860 (TRAV17, TRAJ57)
CATDGGSEKLVF

SEQ ID NO: 415720 - protein, 13 aa, Homo sapiens
  CDR3 for beta chain variable domain of TCR clone 207860 (TRBV7-9, TRBJ2-7)
CTSSFAGAYEQYF

SEQ ID NO: 415721 - protein, 13 aa, Homo sapiens
  CDR3 for alpha chain variable domain of TCR clone 207861 (TRAV12-2, TRAJ52)
CAVGGTSYGKLTL

SEQ ID NO: 415722 - protein, 14 aa, Homo sapiens
  CDR3 for beta chain variable domain of TCR clone 207861 (TRBV19, TRBJ2-1)
CASPTFVLSGEQFF

SEQ ID NO: 415723 - protein, 13 aa, Homo sapiens
  CDR3 for alpha chain variable domain of TCR clone 207862 (TRAV20, TRAJ20)
CAVRWVRDYKLSF

SEQ ID NO: 415724 - protein, 14 aa, Homo sapiens
  CDR3 for beta chain variable domain of TCR clone 207862 (TRBV19, TRBJ2-2)
CASTVTANTGQLFF

SEQ ID NO: 415725 - protein, 11 aa, Homo sapiens
  CDR3 for alpha chain variable domain of TCR clone 207863 (TRAV16, TRAJ33)
CDLHSNYPLIW

SEQ ID NO: 415726 - protein, 15 aa, Homo sapiens
  CDR3 for beta chain variable domain of TCR clone 207863 (TRBV4-1, TRBJ2-7)
CASSQQGQGFDEQYF

SEQ ID NO: 415727 - protein, 14 aa, Homo sapiens
  CDR3 for alpha chain variable domain of TCR clone 207864 (TRAV12-2, TRAJ13)
CAVPRSGGYQKVTF

SEQ ID NO: 415728 - protein, 15 aa, Homo sapiens
  CDR3 for beta chain variable domain of TCR clone 207864 (TRBV7-2, TRBJ2-7)
CASSSRTGVPYEQYF

SEQ ID NO: 415729 - protein, 13 aa, Homo sapiens
  CDR3 for alpha chain variable domain of TCR clone 207865 (TRAV26-1, TRAJ33)
CIVRVEGNYQLIW

SEQ ID NO: 415730 - protein, 14 aa, Homo sapiens
  CDR3 for beta chain variable domain of TCR clone 207865 (TRBV7-3, TRBJ1-1)
CASSLKGGNTEAFF

SEQ ID NO: 415731 - protein, 18 aa, Homo sapiens
  CDR3 for alpha chain variable domain of TCR clone 207866 (TRAV13-1, TRAJ52)
CAAKNPNSGGTSYGKLTF

SEQ ID NO: 415732 - protein, 15 aa, Homo sapiens
  CDR3 for beta chain variable domain of TCR clone 207866 (TRBV28, TRBJ2-5)
CASSSGRTIQETQYF

SEQ ID NO: 415733 - protein, 16 aa, Homo sapiens
  CDR3 for alpha chain variable domain of TCR clone 207867 (TRAV3, TRAJ37)
CAVRPHGSGNTGRLIF

SEQ ID NO: 415734 - protein, 16 aa, Homo sapiens
  CDR3 for beta chain variable domain of TCR clone 207867 (TRBV9, TRBJ1-2)
CASSVEEKVSPDGYTF

SEQ ID NO: 415735 - protein, 22 aa, Homo sapiens
  CDR3 for alpha chain variable domain of TCR clone 207868 (TRAV1-1, TRAJ11)
CLLLLRCERLELMNSGYSTLTF

SEQ ID NO: 415736 - protein, 16 aa, Homo sapiens
  CDR3 for beta chain variable domain of TCR clone 207868 (TRBV19, TRBJ2-1)
CASSKAGPSSYNEQFF

SEQ ID NO: 415737 - protein, 13 aa, Homo sapiens
  CDR3 for alpha chain variable domain of TCR clone 207869 (TRAV27, TRAJ42)
CAGALGSQGNLIF

SEQ ID NO: 415738 - protein, 15 aa, Homo sapiens
  CDR3 for beta chain variable domain of TCR clone 207869 (TRBV10-3, TRBJ2-2)
CAIRTDREDTGELFF

SEQ ID NO: 415739 - protein, 14 aa, Homo sapiens
  CDR3 for alpha chain variable domain of TCR clone 207870 (TRAV3, TRAJ34)
CAVRAPGNTEKLIF

SEQ ID NO: 415740 - protein, 17 aa, Homo sapiens
  CDR3 for beta chain variable domain of TCR clone 207870 (TRBV20-1, TRBJ2-7)
CSAAPGLARGISYEQYF

SEQ ID NO: 415741 - protein, 11 aa, Homo sapiens
  CDR3 for alpha chain variable domain of TCR clone 207871 (TRAV12-1, TRAJ3)
CVVSSASKIIF

SEQ ID NO: 415742 - protein, 14 aa, Homo sapiens
  CDR3 for beta chain variable domain of TCR clone 207871 (TRBV7-8, TRBJ2-7)
CASSLGRASYEQYF

SEQ ID NO: 415743 - protein, 14 aa, Homo sapiens
  CDR3 for alpha chain variable domain of TCR clone 207872 (TRAV26-1, TRAJ38)
CIADNAGNNRKLIW

SEQ ID NO: 415744 - protein, 15 aa, Homo sapiens
  CDR3 for beta chain variable domain of TCR clone 207872 (TRBV7-9, TRBJ1-4)
CASSRTGGFNEKLFF

SEQ ID NO: 415745 - protein, 15 aa, Homo sapiens
  CDR3 for alpha chain variable domain of TCR clone 207873 (TRAV29/DV5, TRAJ29)
CAASERSSGNTPLVF

SEQ ID NO: 415746 - protein, 14 aa, Homo sapiens
  CDR3 for beta chain variable domain of TCR clone 207873 (TRBV25-1, TRBJ1-1)
CASTHLGGNTEAFF

SEQ ID NO: 415747 - protein, 12 aa, Homo sapiens
  CDR3 for alpha chain variable domain of TCR clone 207874 (TRAV38-1, TRAJ32)
CAPLGATNKPIF

SEQ ID NO: 415748 - protein, 14 aa, Homo sapiens
  CDR3 for beta chain variable domain of TCR clone 207874 (TRBV29-1, TRBJ2-5)
CSVETSGSGETRYF

SEQ ID NO: 415749 - protein, 12 aa, Homo sapiens
  CDR3 for alpha chain variable domain of TCR clone 207875 (TRAV1-1, TRAJ39)
CAVPVVGNMFTF

SEQ ID NO: 415750 - protein, 15 aa, Homo sapiens
  CDR3 for beta chain variable domain of TCR clone 207875 (TRBV19, TRBJ1-6)
CASSTQGAVGSPLHF

SEQ ID NO: 415751 - protein, 14 aa, Homo sapiens
  CDR3 for alpha chain variable domain of TCR clone 207876 (TRAV1-2, TRAJ16)
CAVNRVSDGQKLRF

SEQ ID NO: 415752 - protein, 14 aa, Homo sapiens
  CDR3 for beta chain variable domain of TCR clone 207876 (TRBV13, TRBJ2-5)
CASSLGRGQETQYF

SEQ ID NO: 415753 - protein, 13 aa, Homo sapiens
  CDR3 for alpha chain variable domain of TCR clone 207877 (TRAV17, TRAJ5)
CALLGTGRRALTF

SEQ ID NO: 415754 - protein, 14 aa, Homo sapiens
  CDR3 for beta chain variable domain of TCR clone 207877 (TRBV12-5, TRBJ2-5)
CASGSRTHQETQYF

SEQ ID NO: 415755 - protein, 15 aa, Homo sapiens
  CDR3 for alpha chain variable domain of TCR clone 207878 (TRAV27, TRAJ38)
CAARRNAGNNRKLIW

SEQ ID NO: 415756 - protein, 11 aa, Homo sapiens
  CDR3 for beta chain variable domain of TCR clone 207878 (TRBV12-4, TRBJ2-2)
YASSSAGELFF

SEQ ID NO: 415757 - protein, 13 aa, Homo sapiens
  CDR3 for alpha chain variable domain of TCR clone 207879 (TRAV12-2, TRAJ24)
CAVSTDSWWKLQF

SEQ ID NO: 415758 - protein, 13 aa, Homo sapiens
  CDR3 for beta chain variable domain of TCR clone 207879 (TRBV7-6, TRBJ2-2)
CASSQENTGELFF

SEQ ID NO: 415759 - protein, 12 aa, Homo sapiens
  CDR3 for alpha chain variable domain of TCR clone 207880 (TRAV12-2, TRAJ30)
CAGTNRDDKIIF

SEQ ID NO: 415760 - protein, 17 aa, Homo sapiens
  CDR3 for beta chain variable domain of TCR clone 207880 (TRBV11-2, TRBJ2-1)
CASSLSPPGVEYNEQFF

SEQ ID NO: 415761 - protein, 15 aa, Homo sapiens
  CDR3 for alpha chain variable domain of TCR clone 207881 (TRAV35, TRAJ52)
CAGPRGGTSYGKLTF

SEQ ID NO: 415762 - protein, 14 aa, Homo sapiens
  CDR3 for beta chain variable domain of TCR clone 207881 (TRBV20-1, TRBJ2-7)
CSAWTARGSYEQYF

SEQ ID NO: 415763 - protein, 16 aa, Homo sapiens
  CDR3 for alpha chain variable domain of TCR clone 207882 (TRAV30, TRAJ24)
CGTEIVDADSWGEFQF

SEQ ID NO: 415764 - protein, 16 aa, Homo sapiens
  CDR3 for beta chain variable domain of TCR clone 207882 (TRBV2, TRBJ1-3)
CASSGGAGRSGNTIYF

SEQ ID NO: 415765 - protein, 12 aa, Homo sapiens
  CDR3 for alpha chain variable domain of TCR clone 207883 (TRAV2, TRAJ37)
CAVTMNTGKLIF

SEQ ID NO: 415766 - protein, 15 aa, Homo sapiens
  CDR3 for beta chain variable domain of TCR clone 207883 (TRBV5-1, TRBJ2-5)
CASSFGGPHQETQYF

SEQ ID NO: 415767 - protein, 13 aa, Homo sapiens
  CDR3 for alpha chain variable domain of TCR clone 207884 (TRAV8-3, TRAJ34)
CAVGGGNTDKLIF

SEQ ID NO: 415768 - protein, 16 aa, Homo sapiens
  CDR3 for beta chain variable domain of TCR clone 207884 (TRBV15, TRBJ1-2)
CATSRGPRTGGGGYTF

SEQ ID NO: 415769 - protein, 14 aa, Homo sapiens
  CDR3 for alpha chain variable domain of TCR clone 207885 (TRAV1-2, TRAJ6)
CAVRSSGGSYIPTF

SEQ ID NO: 415770 - protein, 16 aa, Homo sapiens
  CDR3 for beta chain variable domain of TCR clone 207885 (TRBV7-3, TRBJ2-2)
CASNLKRGTLSGELFF

SEQ ID NO: 415771 - protein, 10 aa, Homo sapiens
  CDR3 for alpha chain variable domain of TCR clone 207886 (TRAV8-2, TRAJ29)
CTGGNTSLVF

SEQ ID NO: 415772 - protein, 13 aa, Homo sapiens
  CDR3 for beta chain variable domain of TCR clone 207886 (TRBV20-1, TRBJ1-1)
CSARGGGNTEAFF

SEQ ID NO: 415773 - protein, 16 aa, Homo sapiens
  CDR3 for alpha chain variable domain of TCR clone 207887 (TRAV8-3, TRAJ44)
CAVGTLMTGTASKLTF

SEQ ID NO: 415774 - protein, 16 aa, Homo sapiens
  CDR3 for beta chain variable domain of TCR clone 207887 (TRBV4-1, TRBJ2-3)
CASSHSTSGAGDTQYF

SEQ ID NO: 415775 - protein, 12 aa, Homo sapiens
  CDR3 for alpha chain variable domain of TCR clone 207888 (TRAV27, TRAJ35)
CAGADFGNVLHC

SEQ ID NO: 415776 - protein, 16 aa, Homo sapiens
  CDR3 for beta chain variable domain of TCR clone 207888 (TRBV6-1, TRBJ2-1)
CASILRPGSSYNEQFF

SEQ ID NO: 415777 - protein, 16 aa, Homo sapiens
  CDR3 for alpha chain variable domain of TCR clone 207889 (TRAV16, TRAJ52)
CALSGVVGTSYGKLTF

SEQ ID NO: 415778 - protein, 14 aa, Homo sapiens
  CDR3 for beta chain variable domain of TCR clone 207889 (TRBV19, TRBJ1-2)
CASSIQGQAYGYTF

SEQ ID NO: 415779 - protein, 14 aa, Homo sapiens
  CDR3 for alpha chain variable domain of TCR clone 207890 (TRAV1-2, TRAJ6)
CAVSLSGGSYIPTF

SEQ ID NO: 415780 - protein, 17 aa, Homo sapiens
  CDR3 for beta chain variable domain of TCR clone 207890 (TRBV9, TRBJ1-6)
CASSVAGTGDSPLHLGT

SEQ ID NO: 415781 - protein, 12 aa, Homo sapiens
  CDR3 for alpha chain variable domain of TCR clone 207891 (TRAV12-3, TRAJ17)
CAMTLTGNTLTF

SEQ ID NO: 415782 - protein, 11 aa, Homo sapiens
  CDR3 for beta chain variable domain of TCR clone 207891 (TRBV11-2, TRBJ1-1)
CASSINTEAFF

SEQ ID NO: 415783 - protein, 14 aa, Homo sapiens
  CDR3 for alpha chain variable domain of TCR clone 207892 (TRAV13-1, TRAJ24)
CAASPADSWGKFQF

SEQ ID NO: 415784 - protein, 19 aa, Homo sapiens
  CDR3 for beta chain variable domain of TCR clone 207892 (TRBV7-3, TRBJ1-2)
CASSFPQGNDGELWLHLRF

SEQ ID NO: 415785 - protein, 14 aa, Homo sapiens
  CDR3 for alpha chain variable domain of TCR clone 207893 (TRAV1-1, TRAJ27)
CAVIYNTNAGKSTF

SEQ ID NO: 415786 - protein, 16 aa, Homo sapiens
  CDR3 for beta chain variable domain of TCR clone 207893 (TRBV2, TRBJ2-5)
CASSETQGVGEETQYF

SEQ ID NO: 415787 - protein, 16 aa, Homo sapiens
  CDR3 for alpha chain variable domain of TCR clone 207894 (TRAV26-1, TRAJ45)
CIVEKYSGGGADGLTF

SEQ ID NO: 415788 - protein, 15 aa, Homo sapiens
  CDR3 for beta chain variable domain of TCR clone 207894 (TRBV9, TRBJ1-6)
CASSVAGTGDSPLHF

SEQ ID NO: 415789 - protein, 17 aa, Homo sapiens
  CDR3 for alpha chain variable domain of TCR clone 207895 (TRAV12-3, TRAJ6)
CAMSARGGAGGSYIPTF

SEQ ID NO: 415790 - protein, 13 aa, Homo sapiens
  CDR3 for beta chain variable domain of TCR clone 207895 (TRBV12-4, TRBJ2-5)
CASRKRGKGTQYF

SEQ ID NO: 415791 - protein, 14 aa, Homo sapiens
  CDR3 for alpha chain variable domain of TCR clone 207896 (TRAV20, TRAJ20)
CAVRRGYNNYKLSF

SEQ ID NO: 415792 - protein, 13 aa, Homo sapiens
  CDR3 for beta chain variable domain of TCR clone 207896 (TRBV19, TRBJ2-5)
CASSETAPETQYF

SEQ ID NO: 415793 - protein, 13 aa, Homo sapiens
  CDR3 for alpha chain variable domain of TCR clone 207897 (TRAV17, TRAJ22)
FAGRRGSARQLTF

SEQ ID NO: 415794 - protein, 14 aa, Homo sapiens
  CDR3 for beta chain variable domain of TCR clone 207897 (TRBV19, TRBJ1-1)
CASSITGWETEAFF

SEQ ID NO: 415795 - protein, 15 aa, Homo sapiens
  CDR3 for alpha chain variable domain of TCR clone 207898 (TRAV17, TRAJ57)
CATGPSQGGSEKLVF

SEQ ID NO: 415796 - protein, 15 aa, Homo sapiens
  CDR3 for beta chain variable domain of TCR clone 207898 (TRBV5-1, TRBJ2-7)
CASSLGDFTTYEQYF

SEQ ID NO: 415797 - protein, 11 aa, Homo sapiens
  CDR3 for alpha chain variable domain of TCR clone 207899 (TRAV1-1, TRAJ5)
FAVRVRRALTF

SEQ ID NO: 415798 - protein, 14 aa, Homo sapiens
  CDR3 for beta chain variable domain of TCR clone 207899 (TRBV12-5, TRBJ2-5)
CASGSRTHQETQYF

SEQ ID NO: 415799 - protein, 11 aa, Homo sapiens
  CDR3 for alpha chain variable domain of TCR clone 207900 (TRAV13-1, TRAJ31)
CAPRDRLMFGY

SEQ ID NO: 415800 - protein, 12 aa, Homo sapiens
  CDR3 for beta chain variable domain of TCR clone 207900 (TRBV7-9, TRBJ2-7)
CASSLEGYEQYF

SEQ ID NO: 415801 - protein, 15 aa, Homo sapiens
  CDR3 for alpha chain variable domain of TCR clone 207901 (TRAV21, TRAJ53)
CATLNSGGSNYKLTF

SEQ ID NO: 415802 - protein, 12 aa, Homo sapiens
  CDR3 for beta chain variable domain of TCR clone 207901 (TRBV12-4, TRBJ1-3)
CASSFSGNTIYF

SEQ ID NO: 415803 - protein, 13 aa, Homo sapiens
  CDR3 for alpha chain variable domain of TCR clone 207902 (TRAV23/DV6, TRAJ22)
CAPWGGSARQLTL

SEQ ID NO: 415804 - protein, 14 aa, Homo sapiens
  CDR3 for beta chain variable domain of TCR clone 207902 (TRBV18, TRBJ2-7)
CASSPTSGGYEQYF

SEQ ID NO: 415805 - protein, 11 aa, Homo sapiens
  CDR3 for alpha chain variable domain of TCR clone 207903 (TRAV12-2, TRAJ29)
CAVTLRSPLVF

SEQ ID NO: 415806 - protein, 16 aa, Homo sapiens
  CDR3 for beta chain variable domain of TCR clone 207903 (TRBV19, TRBJ1-5)
CASSIDRGGPRQPQYF

SEQ ID NO: 415807 - protein, 14 aa, Homo sapiens
  CDR3 for alpha chain variable domain of TCR clone 207904 (TRAV2, TRAJ37)
CAVDFTSNTGKLIF

SEQ ID NO: 415808 - protein, 13 aa, Homo sapiens
  CDR3 for beta chain variable domain of TCR clone 207904 (TRBV6-1, TRBJ1-1)
CASSRQGNTEAFF

SEQ ID NO: 415809 - protein, 16 aa, Homo sapiens
  CDR3 for alpha chain variable domain of TCR clone 207905 (TRAV3, TRAJ18)
CAVRDGRGSTLGRLYF

SEQ ID NO: 415810 - protein, 14 aa, Homo sapiens
  CDR3 for beta chain variable domain of TCR clone 207905 (TRBV15, TRBJ2-5)
CATSIGGLGETQYF

SEQ ID NO: 415811 - protein, 14 aa, Homo sapiens
  CDR3 for alpha chain variable domain of TCR clone 207906 (TRAV12-2, TRAJ5)
CAVNRSTGRRALTF

SEQ ID NO: 415812 - protein, 12 aa, Homo sapiens
  CDR3 for beta chain variable domain of TCR clone 207906 (TRBV19, TRBJ1-5)
CASSKAQQPQHF

SEQ ID NO: 415813 - protein, 13 aa, Homo sapiens
  CDR3 for alpha chain variable domain of TCR clone 207907 (TRAV2, TRAJ9)
CAVESTGGFKTIF

SEQ ID NO: 415814 - protein, 15 aa, Homo sapiens
  CDR3 for beta chain variable domain of TCR clone 207907 (TRBV10-3, TRBJ2-1)
CAITFGGGTDNKQFF

SEQ ID NO: 415815 - protein, 13 aa, Homo sapiens
  CDR3 for alpha chain variable domain of TCR clone 207908 (TRAV17, TRAJ26)
CATVDNYGQNFVF

SEQ ID NO: 415816 - protein, 14 aa, Homo sapiens
  CDR3 for beta chain variable domain of TCR clone 207908 (TRBV6-1, TRBJ1-3)
CASVQGGGGNTIYF

SEQ ID NO: 415817 - protein, 15 aa, Homo sapiens
  CDR3 for alpha chain variable domain of TCR clone 207909 (TRAV12-1, TRAJ41)
CVVNSRAGSGYELNF

SEQ ID NO: 415818 - protein, 18 aa, Homo sapiens
  CDR3 for beta chain variable domain of TCR clone 207909 (TRBV4-1, TRBJ1-5)
CASSQDPRGQGLNQPQHF

SEQ ID NO: 415819 - protein, 15 aa, Homo sapiens
  CDR3 for alpha chain variable domain of TCR clone 207910 (TRAV1-2, TRAJ18)
CAWEGRGSTLGRLYF

SEQ ID NO: 415820 - protein, 13 aa, Homo sapiens
  CDR3 for beta chain variable domain of TCR clone 207910 (TRBV7-3, TRBJ1-1)
CASSQDWGAEAFF

SEQ ID NO: 415821 - protein, 15 aa, Homo sapiens
  CDR3 for alpha chain variable domain of TCR clone 207911 (TRAV13-2, TRAJ50)
CAEEPLKTSYDKVIF

SEQ ID NO: 415822 - protein, 16 aa, Homo sapiens
  CDR3 for beta chain variable domain of TCR clone 207911 (TRBV12-4, TRBJ1-5)
CASSRPVGGSNQPQHF

SEQ ID NO: 415823 - protein, 12 aa, Homo sapiens
  CDR3 for alpha chain variable domain of TCR clone 207912 (TRAV2, TRAJ10)
CASTGGGNKLTF

SEQ ID NO: 415824 - protein, 15 aa, Homo sapiens
  CDR3 for beta chain variable domain of TCR clone 207912 (TRBV7-9, TRBJ1-4)
CASSARTGGNEKLFF

SEQ ID NO: 415825 - protein, 14 aa, Homo sapiens
  CDR3 for alpha chain variable domain of TCR clone 207913 (TRAV13-1, TRAJ35)
CAASKGGFGNVLHC

SEQ ID NO: 415826 - protein, 16 aa, Homo sapiens
  CDR3 for beta chain variable domain of TCR clone 207913 (TRBV7-9, TRBJ2-5)
CASSFSGTSGRETQYF

SEQ ID NO: 415827 - protein, 15 aa, Homo sapiens
  CDR3 for alpha chain variable domain of TCR clone 207914 (TRAV23/DV6, TRAJ18)
CAARYRGSTPGRLYF

SEQ ID NO: 415828 - protein, 13 aa, Homo sapiens
  CDR3 for beta chain variable domain of TCR clone 207914 (TRBV7-2, TRBJ2-7)
CASSSPSGSVQYF

SEQ ID NO: 415829 - protein, 14 aa, Homo sapiens
  CDR3 for alpha chain variable domain of TCR clone 207915 (TRAV1-2, TRAJ8)
CAVREDTGFQKLVI

SEQ ID NO: 415830 - protein, 15 aa, Homo sapiens
  CDR3 for beta chain variable domain of TCR clone 207915 (TRBV19, TRBJ2-1)
CASSTGTSSYNEQFF

SEQ ID NO: 415831 - protein, 12 aa, Homo sapiens
  CDR3 for alpha chain variable domain of TCR clone 207916 (TRAV30, TRAJ43)
CGTEERGNDMRF

SEQ ID NO: 415832 - protein, 17 aa, Homo sapiens
  CDR3 for beta chain variable domain of TCR clone 207916 (TRBV4-3, TRBJ2-1)
CASSQFSSGRASGEQFF

SEQ ID NO: 415833 - protein, 18 aa, Homo sapiens
  CDR3 for alpha chain variable domain of TCR clone 207917 (TRAV12-2, )
CAVEDIQNPDPAMYQLRD

SEQ ID NO: 415834 - protein, 17 aa, Homo sapiens
  CDR3 for beta chain variable domain of TCR clone 207917 (TRBV11-2, TRBJ2-1)
CASSLYPPGVEYNEQFF

SEQ ID NO: 415835 - protein, 12 aa, Homo sapiens
  CDR3 for alpha chain variable domain of TCR clone 207918 (TRAV8-3, TRAJ27)
CVVGAEAGKSTF

SEQ ID NO: 415836 - protein, 14 aa, Homo sapiens
  CDR3 for beta chain variable domain of TCR clone 207918 (TRBV2, TRBJ2-1)
CASRLIVGHDEQFF

SEQ ID NO: 415837 - protein, 13 aa, Homo sapiens
  CDR3 for alpha chain variable domain of TCR clone 207919 (TRAV23/DV6, TRAJ34)
CAAIENKTDKLIF

SEQ ID NO: 415838 - protein, 13 aa, Homo sapiens
  CDR3 for beta chain variable domain of TCR clone 207919 (TRBV29-1, TRBJ2-7)
CSVGPSGGYEQYF

SEQ ID NO: 415839 - protein, 17 aa, Homo sapiens
  CDR3 for alpha chain variable domain of TCR clone 207920 (TRAV13-1, TRAJ28)
CAASPPYSGAGSYHLTF

SEQ ID NO: 415840 - protein, 15 aa, Homo sapiens
  CDR3 for beta chain variable domain of TCR clone 207920 (TRBV6-3, TRBJ2-2)
CASSFLATLTGELFF

SEQ ID NO: 415841 - protein, 22 aa, Homo sapiens
  CDR3 for alpha chain variable domain of TCR clone 207921 (TRAV26-1, TRAJ30)
CIVRVRTEMTRSSLEKGHDFIF

SEQ ID NO: 415842 - protein, 18 aa, Homo sapiens
  CDR3 for beta chain variable domain of TCR clone 207921 (TRBV4-1, TRBJ1-5)
CASSQDPRGQGLNQPRHF

SEQ ID NO: 415843 - protein, 12 aa, Homo sapiens
  CDR3 for alpha chain variable domain of TCR clone 207922 (TRAV25, TRAJ17)
CAGEAAGNKLTF

SEQ ID NO: 415844 - protein, 17 aa, Homo sapiens
  CDR3 for beta chain variable domain of TCR clone 207922 (TRBV7-3, TRBJ2-3)
CASSLMKRMRGADTQYF

SEQ ID NO: 415845 - protein, 13 aa, Homo sapiens
  CDR3 for alpha chain variable domain of TCR clone 207923 (TRAV12-1, TRAJ6)
CVVFPGGSYIPTF

SEQ ID NO: 415846 - protein, 15 aa, Homo sapiens
  CDR3 for beta chain variable domain of TCR clone 207923 (TRBV6-5, TRBJ2-1)
CASSYDAGAGNEQFF

SEQ ID NO: 415847 - protein, 13 aa, Homo sapiens
  CDR3 for alpha chain variable domain of TCR clone 207924 (TRAV13-2, TRAJ40)
CAEFTSGTYKYIF

SEQ ID NO: 415848 - protein, 16 aa, Homo sapiens
  CDR3 for beta chain variable domain of TCR clone 207924 (TRBV24-1, TRBJ2-3)
CATSGYRDRDTDTQYF

SEQ ID NO: 415849 - protein, 11 aa, Homo sapiens
  CDR3 for alpha chain variable domain of TCR clone 207925 (TRAV27, TRAJ20)
CAGADDYKLSF

SEQ ID NO: 415850 - protein, 15 aa, Homo sapiens
  CDR3 for beta chain variable domain of TCR clone 207925 (TRBV7-2, TRBJ1-2)
CASSLVSGGDYGYTF

SEQ ID NO: 415851 - protein, 11 aa, Homo sapiens
  CDR3 for alpha chain variable domain of TCR clone 207926 (TRAV3, TRAJ21)
CAVGNFNKFYF

SEQ ID NO: 415852 - protein, 14 aa, Homo sapiens
  CDR3 for beta chain variable domain of TCR clone 207926 (TRBV15, TRBJ2-4)
CATEGGQGANIQYF

SEQ ID NO: 415853 - protein, 14 aa, Homo sapiens
  CDR3 for alpha chain variable domain of TCR clone 207927 (TRAV12-2, TRAJ33)
CAVKRARSNYQLIW

SEQ ID NO: 415854 - protein, 14 aa, Homo sapiens
  CDR3 for beta chain variable domain of TCR clone 207927 (TRBV13, TRBJ2-7)
CASSLKGASYKQYF

SEQ ID NO: 415855 - protein, 14 aa, Homo sapiens
  CDR3 for alpha chain variable domain of TCR clone 207928 (TRAV13-1, TRAJ44)
CAAKATGTASKLTF

SEQ ID NO: 415856 - protein, 15 aa, Homo sapiens
  CDR3 for beta chain variable domain of TCR clone 207928 (TRBV10-3, TRBJ2-1)
CAISDVQDRAYAQFF

SEQ ID NO: 415857 - protein, 14 aa, Homo sapiens
  CDR3 for alpha chain variable domain of TCR clone 207929 (TRAV26-1, TRAJ52)
CIPAGGTSYGKLTF

SEQ ID NO: 415858 - protein, 14 aa, Homo sapiens
  CDR3 for beta chain variable domain of TCR clone 207929 (TRBV25-1, TRBJ1-1)
CASTHLGGNTEAFF

SEQ ID NO: 415859 - protein, 14 aa, Homo sapiens
  CDR3 for alpha chain variable domain of TCR clone 207930 (TRAV17, TRAJ45)
CATDARGGADGLTF

SEQ ID NO: 415860 - protein, 11 aa, Homo sapiens
  CDR3 for beta chain variable domain of TCR clone 207930 (TRBV28, TRBJ2-5)
CAPGNQETQYF

SEQ ID NO: 415861 - protein, 16 aa, Homo sapiens
  CDR3 for alpha chain variable domain of TCR clone 207931 (TRAV30, TRAJ24)
CGTEIVDADSWGKFQF

SEQ ID NO: 415862 - protein, 13 aa, Homo sapiens
  CDR3 for beta chain variable domain of TCR clone 207931 (TRBV11-3, TRBJ2-3)
CASSHDTKDTQYF

SEQ ID NO: 415863 - protein, 13 aa, Homo sapiens
  CDR3 for alpha chain variable domain of TCR clone 207932 (TRAV2, TRAJ15)
CAVYGPGRNCSDL

SEQ ID NO: 415864 - protein, 13 aa, Homo sapiens
  CDR3 for beta chain variable domain of TCR clone 207932 (TRBV27, TRBJ2-1)
CASRTLGVGEQFF

SEQ ID NO: 415865 - protein, 11 aa, Homo sapiens
  CDR3 for alpha chain variable domain of TCR clone 207933 (TRAV2, TRAJ33)
CAVESNYQLIW

SEQ ID NO: 415866 - protein, 13 aa, Homo sapiens
  CDR3 for beta chain variable domain of TCR clone 207933 (TRBV7-7, TRBJ1-1)
CASSLGANTEAFF

SEQ ID NO: 415867 - protein, 17 aa, Homo sapiens
  CDR3 for alpha chain variable domain of TCR clone 207934 (TRAV12-2, TRAJ52)
CAVNPYAGGTSYGKLTF

SEQ ID NO: 415868 - protein, 17 aa, Homo sapiens
  CDR3 for beta chain variable domain of TCR clone 207934 (TRBV20-1, TRBJ2-1)
CSASSSGLAGSYNEQFF

SEQ ID NO: 415869 - protein, 15 aa, Homo sapiens
  CDR3 for alpha chain variable domain of TCR clone 207935 (TRAV12-1, TRAJ44)
CVVFVNTGTACKLTF

SEQ ID NO: 415870 - protein, 16 aa, Homo sapiens
  CDR3 for beta chain variable domain of TCR clone 207935 (TRBV20-1, TRBJ2-5)
CSPGGTSGGYMETQYF

SEQ ID NO: 415871 - protein, 14 aa, Homo sapiens
  CDR3 for alpha chain variable domain of TCR clone 207936 (TRAV17, TRAJ57)
CATDPQGGPEKLVF

SEQ ID NO: 415872 - protein, 17 aa, Homo sapiens
  CDR3 for beta chain variable domain of TCR clone 207936 (TRBV5-1, TRBJ2-2)
CASSLAGLSGGTGELFF

SEQ ID NO: 415873 - protein, 14 aa, Homo sapiens
  CDR3 for alpha chain variable domain of TCR clone 207937 (TRAV12-3, TRAJ42)
CAMNYGGSQGNLIF

SEQ ID NO: 415874 - protein, 15 aa, Homo sapiens
  CDR3 for beta chain variable domain of TCR clone 207937 (TRBV5-7, TRBJ1-5)
CASSYGRLWDQPQHF

SEQ ID NO: 415875 - protein, 11 aa, Homo sapiens
  CDR3 for alpha chain variable domain of TCR clone 207938 (TRAV3, TRAJ21)
CAVGNFNKFYF

SEQ ID NO: 415876 - protein, 14 aa, Homo sapiens
  CDR3 for beta chain variable domain of TCR clone 207938 (TRBV25-1, TRBJ1-1)
CASTHLRGNTEAFF

SEQ ID NO: 415877 - protein, 11 aa, Homo sapiens
  CDR3 for alpha chain variable domain of TCR clone 207939 (TRAV12-3, TRAJ43)
CAMSVSNDMRF

SEQ ID NO: 415878 - protein, 15 aa, Homo sapiens
  CDR3 for beta chain variable domain of TCR clone 207939 (TRBV15, TRBJ1-3)
CATSRDRGPGNTIYF

SEQ ID NO: 415879 - protein, 15 aa, Homo sapiens
  CDR3 for alpha chain variable domain of TCR clone 207940 (TRAV26-1, TRAJ29)
CIVRVEGSGNTPLVF

SEQ ID NO: 415880 - protein, 17 aa, Homo sapiens
  CDR3 for beta chain variable domain of TCR clone 207940 (TRBV5-1, TRBJ2-5)
CASSLLGLAANQETQYF

SEQ ID NO: 415881 - protein, 16 aa, Homo sapiens
  CDR3 for alpha chain variable domain of TCR clone 207941 (TRAV3, TRAJ21)
CAVRDIERVKFNKFNF

SEQ ID NO: 415882 - protein, 16 aa, Homo sapiens
  CDR3 for beta chain variable domain of TCR clone 207941 (TRBV12-4, TRBJ1-5)
CASSRPVGVSNQTQHF

SEQ ID NO: 415883 - protein, 15 aa, Homo sapiens
  CDR3 for alpha chain variable domain of TCR clone 207942 (TRAV21, TRAJ53)
CATLNSGSSNYKLTF

SEQ ID NO: 415884 - protein, 14 aa, Homo sapiens
  CDR3 for beta chain variable domain of TCR clone 207942 (TRBV11-2, TRBJ1-1)
CASSLEGVGTEALF

SEQ ID NO: 415885 - protein, 18 aa, Homo sapiens
  CDR3 for alpha chain variable domain of TCR clone 207943 (TRAV21, TRAJ52)
CAVRPSPAGGTSSGKLTF

SEQ ID NO: 415886 - protein, 17 aa, Homo sapiens
  CDR3 for beta chain variable domain of TCR clone 207943 (TRBV13, TRBJ2-3)
CASGLSRVAGGRNTQYF

SEQ ID NO: 415887 - protein, 18 aa, Homo sapiens
  CDR3 for alpha chain variable domain of TCR clone 207944 (TRAV9-2, TRAJ52)
CALSRHNAGGTSYGKLTF

SEQ ID NO: 415888 - protein, 15 aa, Homo sapiens
  CDR3 for beta chain variable domain of TCR clone 207944 (TRBV5-1, TRBJ2-1)
CANSPPRAPYNEQFF

SEQ ID NO: 415889 - protein, 17 aa, Homo sapiens
  CDR3 for alpha chain variable domain of TCR clone 207945 (TRAV26-1, TRAJ53)
CIVRVDDSGGSNYKLTF

SEQ ID NO: 415890 - protein, 16 aa, Homo sapiens
  CDR3 for beta chain variable domain of TCR clone 207945 (TRBV15, TRBJ1-2)
CATSRGPRTGGGGYTF

SEQ ID NO: 415891 - protein, 14 aa, Homo sapiens
  CDR3 for alpha chain variable domain of TCR clone 207946 (TRAV2, TRAJ20)
CAVEDGTNDYKLSF

SEQ ID NO: 415892 - protein, 13 aa, Homo sapiens
  CDR3 for beta chain variable domain of TCR clone 207946 (TRBV7-2, TRBJ1-1)
CASSRNTNNEAFF

SEQ ID NO: 415893 - protein, 13 aa, Homo sapiens
  CDR3 for alpha chain variable domain of TCR clone 207947 (TRAV13-1, TRAJ17)
CAANKAAGNKLTF

SEQ ID NO: 415894 - protein, 16 aa, Homo sapiens
  CDR3 for beta chain variable domain of TCR clone 207947 (TRBV12-5, TRBJ2-5)
CASGPRTSGNQETQYL

SEQ ID NO: 415895 - protein, 14 aa, Homo sapiens
  CDR3 for alpha chain variable domain of TCR clone 207948 (TRAV23/DV6, TRAJ40)
CAASLTSGTYKYIF

SEQ ID NO: 415896 - protein, 14 aa, Homo sapiens
  CDR3 for beta chain variable domain of TCR clone 207948 (TRBV5-1, TRBJ2-3)
CASSRGQGGGTQYF

SEQ ID NO: 415897 - protein, 13 aa, Homo sapiens
  CDR3 for alpha chain variable domain of TCR clone 207949 (TRAV12-2, TRAJ42)
CAVKRGSQGNLIF

SEQ ID NO: 415898 - protein, 13 aa, Homo sapiens
  CDR3 for beta chain variable domain of TCR clone 207949 (TRBV7-9, TRBJ2-7)
CASSFAGAYEQYF

SEQ ID NO: 415899 - protein, 10 aa, Homo sapiens
  CDR3 for alpha chain variable domain of TCR clone 207950 (TRAV13-1, TRAJ7)
LIGGTTDSLL

SEQ ID NO: 415900 - protein, 15 aa, Homo sapiens
  CDR3 for beta chain variable domain of TCR clone 207950 (TRBV11-3, TRBJ2-3)
CASLKDGREGDTQYF

SEQ ID NO: 415901 - protein, 16 aa, Homo sapiens
  CDR3 for alpha chain variable domain of TCR clone 207951 (TRAV21, TRAJ52)
CAVTNAGGTSYGKLSF

SEQ ID NO: 415902 - protein, 13 aa, Homo sapiens
  CDR3 for beta chain variable domain of TCR clone 207951 (TRBV20-1, TRBJ2-3)
CSARLAGTDTQYF

SEQ ID NO: 415903 - protein, 13 aa, Homo sapiens
  CDR3 for alpha chain variable domain of TCR clone 207952 (TRAV9-2, TRAJ49)
CALRPSTGNQFYF

SEQ ID NO: 415904 - protein, 15 aa, Homo sapiens
  CDR3 for beta chain variable domain of TCR clone 207952 (TRBV5-1, TRBJ2-1)
CASSPPRAPYNEQFF

SEQ ID NO: 415905 - protein, 14 aa, Homo sapiens
  CDR3 for alpha chain variable domain of TCR clone 207953 (TRAV26-1, TRAJ38)
CIADNAGNNRRLIW

SEQ ID NO: 415906 - protein, 13 aa, Homo sapiens
  CDR3 for beta chain variable domain of TCR clone 207953 (TRBV20-1, TRBJ1-1)
CSARGGGNTEDFF

SEQ ID NO: 415907 - protein, 14 aa, Homo sapiens
  CDR3 for alpha chain variable domain of TCR clone 207954 (TRAV35, TRAJ53)
CAGRRGGSNYKLTF

SEQ ID NO: 415908 - protein, 14 aa, Homo sapiens
  CDR3 for beta chain variable domain of TCR clone 207954 (TRBV7-9, TRBJ1-1)
CASSPQGSNTESFL

SEQ ID NO: 415909 - protein, 14 aa, Homo sapiens
  CDR3 for alpha chain variable domain of TCR clone 207955 (TRAV1-2, TRAJ8)
CAVREDTGFQKLVF

SEQ ID NO: 415910 - protein, 15 aa, Homo sapiens
  CDR3 for beta chain variable domain of TCR clone 207955 (TRBV15, TRBJ2-7)
CATSSGTTTTYEQYF

SEQ ID NO: 415911 - protein, 15 aa, Homo sapiens
  CDR3 for alpha chain variable domain of TCR clone 207956 (TRAV23/DV6, TRAJ44)
CAARLLTGTVSKLTF

SEQ ID NO: 415912 - protein, 15 aa, Homo sapiens
  CDR3 for beta chain variable domain of TCR clone 207956 (TRBV12-4, TRBJ1-5)
CASTLNRVSNQPQHF

SEQ ID NO: 415913 - protein, 13 aa, Homo sapiens
  CDR3 for alpha chain variable domain of TCR clone 207957 (TRAV20, TRAJ31)
CAVQAWNNARLMF

SEQ ID NO: 415914 - protein, 12 aa, Homo sapiens
  CDR3 for beta chain variable domain of TCR clone 207957 (TRBV2, TRBJ2-1)
CAYGPPGNEQFF

SEQ ID NO: 415915 - protein, 13 aa, Homo sapiens
  CDR3 for alpha chain variable domain of TCR clone 207958 (TRAV21, TRAJ37)
CAVSSGNTGKLIF

SEQ ID NO: 415916 - protein, 12 aa, Homo sapiens
  CDR3 for beta chain variable domain of TCR clone 207958 (TRBV6-5, TRBJ1-2)
CASTDPGYGYTF

SEQ ID NO: 415917 - protein, 15 aa, Homo sapiens
  CDR3 for alpha chain variable domain of TCR clone 207959 (TRAV26-1, TRAJ17)
CTIAFLKAAGNKLTF

SEQ ID NO: 415918 - protein, 16 aa, Homo sapiens
  CDR3 for beta chain variable domain of TCR clone 207959 (TRBV28, TRBJ1-4)
CASSSRTGAANEKLFF

SEQ ID NO: 415919 - protein, 14 aa, Homo sapiens
  CDR3 for alpha chain variable domain of TCR clone 207960 (TRAV1-2, TRAJ8)
CAVREDTGFQKLVF

SEQ ID NO: 415920 - protein, 14 aa, Homo sapiens
  CDR3 for beta chain variable domain of TCR clone 207960 (TRBV12-4, TRBJ1-1)
CASSLRTGGTEAFF

SEQ ID NO: 415921 - protein, 11 aa, Homo sapiens
  CDR3 for alpha chain variable domain of TCR clone 207961 (TRAV3, TRAJ21)
CAVGNFNKFYF

SEQ ID NO: 415922 - protein, 12 aa, Homo sapiens
  CDR3 for beta chain variable domain of TCR clone 207961 (TRBV12-4, TRBJ2-1)
CASSLVRVEQFF

SEQ ID NO: 415923 - protein, 14 aa, Homo sapiens
  CDR3 for alpha chain variable domain of TCR clone 207962 (TRAV12-2, TRAJ4)
CAEDLSAGYNKLIL

SEQ ID NO: 415924 - protein, 13 aa, Homo sapiens
  CDR3 for beta chain variable domain of TCR clone 207962 (TRBV7-9, TRBJ1-2)
CASSLKQNYGYTF

SEQ ID NO: 415925 - protein, 16 aa, Homo sapiens
  CDR3 for alpha chain variable domain of TCR clone 207963 (TRAV21, TRAJ37)
CAVRPRGSSNTSKLIF

SEQ ID NO: 415926 - protein, 16 aa, Homo sapiens
  CDR3 for beta chain variable domain of TCR clone 207963 (TRBV7-8, TRBJ2-5)
CASSFGGQPAQETQYF

SEQ ID NO: 415927 - protein, 14 aa, Homo sapiens
  CDR3 for alpha chain variable domain of TCR clone 207964 (TRAV12-2, TRAJ40)
CAVKIPSGTYKYIF

SEQ ID NO: 415928 - protein, 19 aa, Homo sapiens
  CDR3 for beta chain variable domain of TCR clone 207964 (TRBV7-9, TRBJ2-1)
CASSHNRGALLRSYNEQFF

SEQ ID NO: 415929 - protein, 14 aa, Homo sapiens
  CDR3 for alpha chain variable domain of TCR clone 207965 (TRAV9-2, TRAJ39)
CALYIYNAGNMLTF

SEQ ID NO: 415930 - protein, 13 aa, Homo sapiens
  CDR3 for beta chain variable domain of TCR clone 207965 (TRBV7-7, TRBJ1-1)
CASSLGANTEAFF

SEQ ID NO: 415931 - protein, 16 aa, Homo sapiens
  CDR3 for alpha chain variable domain of TCR clone 207966 (TRAV3, TRAJ37)
CAVRPHGPGNTGKLIF

SEQ ID NO: 415932 - protein, 12 aa, Homo sapiens
  CDR3 for beta chain variable domain of TCR clone 207966 (TRBV29-1, TRBJ2-3)
CSVTGGADTQYF

SEQ ID NO: 415933 - protein, 17 aa, Homo sapiens
  CDR3 for alpha chain variable domain of TCR clone 207967 (TRAV3, TRAJ6)
CAVRDGPRAGGSYIPTF

SEQ ID NO: 415934 - protein, 13 aa, Homo sapiens
  CDR3 for beta chain variable domain of TCR clone 207967 (TRBV5-7, TRBJ2-6)
CASTSSGANVLTF

SEQ ID NO: 415935 - protein, 12 aa, Homo sapiens
  CDR3 for alpha chain variable domain of TCR clone 207968 (TRAV13-1, TRAJ21)
CAAKEGFNNFYF

SEQ ID NO: 415936 - protein, 20 aa, Homo sapiens
  CDR3 for beta chain variable domain of TCR clone 207968 (TRBV7-8, TRBJ2-2)
CASSHLFPGPTIHITGEPFF

SEQ ID NO: 415937 - protein, 18 aa, Homo sapiens
  CDR3 for alpha chain variable domain of TCR clone 207969 (TRAV26-1, TRAJ23)
CIVRVGLEVWNQGGKLIF

SEQ ID NO: 415938 - protein, 20 aa, Homo sapiens
  CDR3 for beta chain variable domain of TCR clone 207969 (TRBV28, TRBJ2-1)
CASTPIGRSPGLAGGNEQFF

SEQ ID NO: 415939 - protein, 15 aa, Homo sapiens
  CDR3 for alpha chain variable domain of TCR clone 207970 (TRAV3, TRAJ22)
CAVRDRGGSARQLTF

SEQ ID NO: 415940 - protein, 10 aa, Homo sapiens
  CDR3 for beta chain variable domain of TCR clone 207970 (TRBV12-4, TRBJ2-3)
CQTATDTQYF

SEQ ID NO: 415941 - protein, 14 aa, Homo sapiens
  CDR3 for alpha chain variable domain of TCR clone 207971 (TRAV1-2, TRAJ16)
CAVNRVSDGQKLLF

SEQ ID NO: 415942 - protein, 15 aa, Homo sapiens
  CDR3 for beta chain variable domain of TCR clone 207971 (TRBV20-1, TRBJ2-5)
CSAEGTGGLQETQYF

SEQ ID NO: 415943 - protein, 12 aa, Homo sapiens
  CDR3 for alpha chain variable domain of TCR clone 207972 (TRAV17, TRAJ12)
CATLRSSYKLIF

SEQ ID NO: 415944 - protein, 16 aa, Homo sapiens
  CDR3 for beta chain variable domain of TCR clone 207972 (TRBV7-2, TRBJ2-7)
CASSRPGTGLVHEQYF

SEQ ID NO: 415945 - protein, 16 aa, Homo sapiens
  CDR3 for alpha chain variable domain of TCR clone 207973 (TRAV38-1, TRAJ32)
CAFMKGGGGATNKLIF

SEQ ID NO: 415946 - protein, 13 aa, Homo sapiens
  CDR3 for beta chain variable domain of TCR clone 207973 (TRBV20-1, TRBJ2-5)
CSAREAFEETQYF

SEQ ID NO: 415947 - protein, 15 aa, Homo sapiens
  CDR3 for alpha chain variable domain of TCR clone 207974 (TRAV4, TRAJ39)
CLVGPNNNAGNMLTF

SEQ ID NO: 415948 - protein, 16 aa, Homo sapiens
  CDR3 for beta chain variable domain of TCR clone 207974 (TRBV27, TRBJ2-2)
CASSVRGLVRTGELFF

SEQ ID NO: 415949 - protein, 16 aa, Homo sapiens
  CDR3 for alpha chain variable domain of TCR clone 207975 (TRAV12-3, TRAJ53)
CAMSPGSGGSNYRLTL

SEQ ID NO: 415950 - protein, 11 aa, Homo sapiens
  CDR3 for beta chain variable domain of TCR clone 207975 (TRBV29-1, TRBJ2-5)
CSEDRTGTQYF

SEQ ID NO: 415951 - protein, 15 aa, Homo sapiens
  CDR3 for alpha chain variable domain of TCR clone 207976 (TRAV21, TRAJ40)
CAVRPQTSGTYKYIF

SEQ ID NO: 415952 - protein, 13 aa, Homo sapiens
  CDR3 for beta chain variable domain of TCR clone 207976 (TRBV7-2, TRBJ2-2)
CASSSVRAGELVF

SEQ ID NO: 415953 - protein, 14 aa, Homo sapiens
  CDR3 for alpha chain variable domain of TCR clone 207977 (TRAV12-2, TRAJ44)
CAVNPAGTASKLTF

SEQ ID NO: 415954 - protein, 14 aa, Homo sapiens
  CDR3 for beta chain variable domain of TCR clone 207977 (TRBV7-2, TRBJ1-1)
CASSFLTGTTEAFF

SEQ ID NO: 415955 - protein, 11 aa, Homo sapiens
  CDR3 for alpha chain variable domain of TCR clone 207978 (TRAV4, TRAJ31)
CLVGDNARLMF

SEQ ID NO: 415956 - protein, 14 aa, Homo sapiens
  CDR3 for beta chain variable domain of TCR clone 207978 (TRBV7-2, TRBJ1-1)
CASSFLTGTTEAFF

SEQ ID NO: 415957 - protein, 12 aa, Homo sapiens
  CDR3 for alpha chain variable domain of TCR clone 207979 (TRAV20, TRAJ39)
CAVRNAGNMLTF

SEQ ID NO: 415958 - protein, 16 aa, Homo sapiens
  CDR3 for beta chain variable domain of TCR clone 207979 (TRBV15, TRBJ1-2)
CATSRGPRTGGGGYTF

SEQ ID NO: 415959 - protein, 10 aa, Homo sapiens
  CDR3 for alpha chain variable domain of TCR clone 207980 (TRAV1-2, TRAJ31)
CAFFRCQTHV

SEQ ID NO: 415960 - protein, 13 aa, Homo sapiens
  CDR3 for beta chain variable domain of TCR clone 207980 (TRBV7-9, TRBJ1-2)
RASSLKQNYGYTF

SEQ ID NO: 415961 - protein, 15 aa, Homo sapiens
  CDR3 for alpha chain variable domain of TCR clone 207981 (TRAV2, TRAJ4)
CCGGSVSGGYNKLIF

SEQ ID NO: 415962 - protein, 13 aa, Homo sapiens
  CDR3 for beta chain variable domain of TCR clone 207981 (TRBV7-7, TRBJ2-5)
CASSRSGQETQYF

SEQ ID NO: 415963 - protein, 14 aa, Homo sapiens
  CDR3 for alpha chain variable domain of TCR clone 207982 (TRAV12-1, TRAJ8)
CVVNSNTGFQKLVF

SEQ ID NO: 415964 - protein, 16 aa, Homo sapiens
  CDR3 for beta chain variable domain of TCR clone 207982 (TRBV20-1, TRBJ2-6)
CSARDDRVGLTGALFF

SEQ ID NO: 415965 - protein, 12 aa, Homo sapiens
  CDR3 for alpha chain variable domain of TCR clone 207983 (TRAV13-1, TRAJ39)
CAASNAGNMLIF

SEQ ID NO: 415966 - protein, 16 aa, Homo sapiens
  CDR3 for beta chain variable domain of TCR clone 207983 (TRBV7-7, TRBJ2-1)
CASSLASGTSYNEQFF

SEQ ID NO: 415967 - protein, 14 aa, Homo sapiens
  CDR3 for alpha chain variable domain of TCR clone 207984 (TRAV12-2, TRAJ13)
CDVKKTGGYQKVTF

SEQ ID NO: 415968 - protein, 23 aa, Homo sapiens
  CDR3 for beta chain variable domain of TCR clone 207984 (TRBV4-2, TRBJ2-3)
CASSQDPPRASSISGGRGDTQYF

SEQ ID NO: 415969 - protein, 10 aa, Homo sapiens
  CDR3 for alpha chain variable domain of TCR clone 207985 (TRAV38-2/DV8, TRAJ40)
CSSGTYKYIF

SEQ ID NO: 415970 - protein, 16 aa, Homo sapiens
  CDR3 for beta chain variable domain of TCR clone 207985 (TRBV4-1, TRBJ1-2)
CASSQDAGQVLYGYTF

SEQ ID NO: 415971 - protein, 15 aa, Homo sapiens
  CDR3 for alpha chain variable domain of TCR clone 207986 (TRAV4, TRAJ28)
CLYAYSGAGSYQLTF

SEQ ID NO: 415972 - protein, 15 aa, Homo sapiens
  CDR3 for beta chain variable domain of TCR clone 207986 (TRBV6-3, TRBJ2-7)
CASSYDEGSSYEQYF

SEQ ID NO: 415973 - protein, 15 aa, Homo sapiens
  CDR3 for alpha chain variable domain of TCR clone 207987 (TRAV17, TRAJ57)
CATGPSQGGSEKLVF

SEQ ID NO: 415974 - protein, 15 aa, Homo sapiens
  CDR3 for beta chain variable domain of TCR clone 207987 (TRBV9, TRBJ2-1)
CAGRLAGSSHNEQFF

SEQ ID NO: 415975 - protein, 14 aa, Homo sapiens
  CDR3 for alpha chain variable domain of TCR clone 207988 (TRAV13-1, TRAJ40)
CVASMTSGTYKYIF

SEQ ID NO: 415976 - protein, 15 aa, Homo sapiens
  CDR3 for beta chain variable domain of TCR clone 207988 (TRBV7-3, TRBJ2-1)
CASSPTGGGEVEQFF

SEQ ID NO: 415977 - protein, 14 aa, Homo sapiens
  CDR3 for alpha chain variable domain of TCR clone 207989 (TRAV12-2, TRAJ17)
CAVLFKAAGTKLTF

SEQ ID NO: 415978 - protein, 14 aa, Homo sapiens
  CDR3 for beta chain variable domain of TCR clone 207989 (TRBV19, TRBJ2-1)
CASPTFVLSGEQFF

SEQ ID NO: 415979 - protein, 13 aa, Homo sapiens
  CDR3 for alpha chain variable domain of TCR clone 207990 (TRAV25, TRAJ20)
CAPKTPSDYKLSF

SEQ ID NO: 415980 - protein, 12 aa, Homo sapiens
  CDR3 for beta chain variable domain of TCR clone 207990 (TRBV11-2, TRBJ2-2)
CASSLPTGELFF

SEQ ID NO: 415981 - protein, 14 aa, Homo sapiens
  CDR3 for alpha chain variable domain of TCR clone 207991 (TRAV17, TRAJ5)
CATVALTGRRALTF

SEQ ID NO: 415982 - protein, 14 aa, Homo sapiens
  CDR3 for beta chain variable domain of TCR clone 207991 (TRBV28, TRBJ2-7)
CASRPYGMAYEQYF

SEQ ID NO: 415983 - protein, 14 aa, Homo sapiens
  CDR3 for alpha chain variable domain of TCR clone 207992 (TRAV12-2, TRAJ17)
CAVLFKAAGNKLTF

SEQ ID NO: 415984 - protein, 14 aa, Homo sapiens
  CDR3 for beta chain variable domain of TCR clone 207992 (TRBV20-1, TRBJ2-3)
CSARGGTSRDTQYF

SEQ ID NO: 415985 - protein, 16 aa, Homo sapiens
  CDR3 for alpha chain variable domain of TCR clone 207993 (TRAV16, TRAJ37)
CSKWPDGSSNTGKLIF

SEQ ID NO: 415986 - protein, 13 aa, Homo sapiens
  CDR3 for beta chain variable domain of TCR clone 207993 (TRBV7-2, TRBJ2-2)
CASSLAVTGEPFF

SEQ ID NO: 415987 - protein, 14 aa, Homo sapiens
  CDR3 for alpha chain variable domain of TCR clone 207994 (TRAV23/DV6, TRAJ40)
CAASYYSGTYKYIF

SEQ ID NO: 415988 - protein, 16 aa, Homo sapiens
  CDR3 for beta chain variable domain of TCR clone 207994 (TRBV23-1, TRBJ2-7)
CASKHDGAAVLRAGHQ

SEQ ID NO: 415989 - protein, 18 aa, Homo sapiens
  CDR3 for alpha chain variable domain of TCR clone 207995 (TRAV29/DV5, TRAJ52)
CAAGFRGAGVTIYGKLTF

SEQ ID NO: 415990 - protein, 16 aa, Homo sapiens
  CDR3 for beta chain variable domain of TCR clone 207995 (TRBV7-3, TRBJ2-2)
CASSLKRGTLSGELFF

SEQ ID NO: 415991 - protein, 11 aa, Homo sapiens
  CDR3 for alpha chain variable domain of TCR clone 207996 (TRAV2, TRAJ21)
CAVFNFNKFYF

SEQ ID NO: 415992 - protein, 11 aa, Homo sapiens
  CDR3 for beta chain variable domain of TCR clone 207996 (TRBV11-2, TRBJ2-2)
CASSLPGELFF

SEQ ID NO: 415993 - protein, 16 aa, Homo sapiens
  CDR3 for alpha chain variable domain of TCR clone 207997 (TRAV3, TRAJ37)
CAVRPHGSGNTGKIIF

SEQ ID NO: 415994 - protein, 16 aa, Homo sapiens
  CDR3 for beta chain variable domain of TCR clone 207997 (TRBV20-1, TRBJ1-4)
CSAPGQGLLTNEKLFF

SEQ ID NO: 415995 - protein, 14 aa, Homo sapiens
  CDR3 for alpha chain variable domain of TCR clone 207998 (TRAV21, TRAJ24)
CCSSSTDSWGKLQF

SEQ ID NO: 415996 - protein, 14 aa, Homo sapiens
  CDR3 for beta chain variable domain of TCR clone 207998 (TRBV11-2, TRBJ2-5)
CASSRTGGIETQYF

SEQ ID NO: 415997 - protein, 15 aa, Homo sapiens
  CDR3 for alpha chain variable domain of TCR clone 207999 (TRAV17, TRAJ16)
CATALRFSDGQKLLF

SEQ ID NO: 415998 - protein, 15 aa, Homo sapiens
  CDR3 for beta chain variable domain of TCR clone 207999 (TRBV20-1, TRBJ1-1)
CSASRGVTGNTEAFF

SEQ ID NO: 415999 - protein, 17 aa, Homo sapiens
  CDR3 for alpha chain variable domain of TCR clone 208000 (TRAV3, TRAJ6)
CAMRDGPRAGGSYIPTF

SEQ ID NO: 416000 - protein, 15 aa, Homo sapiens
  CDR3 for beta chain variable domain of TCR clone 208000 (TRBV20-1, TRBJ1-1)
CSASWDRFLNTEAFF

SEQ ID NO: 416001 - protein, 15 aa, Homo sapiens
  CDR3 for alpha chain variable domain of TCR clone 208001 (TRAV8-2, TRAJ15)
CVVTMGNQAGTALIF

SEQ ID NO: 416002 - protein, 15 aa, Homo sapiens
  CDR3 for beta chain variable domain of TCR clone 208001 (TRBV20-1, TRBJ2-7)
CSARVPAAYFYEQYF

SEQ ID NO: 416003 - protein, 13 aa, Homo sapiens
  CDR3 for alpha chain variable domain of TCR clone 208002 (TRAV13-1, TRAJ21)
CAASIYNFNKFYF

SEQ ID NO: 416004 - protein, 15 aa, Homo sapiens
  CDR3 for beta chain variable domain of TCR clone 208002 (TRBV7-2, TRBJ2-7)
CASSLDPAQGQEQYF

SEQ ID NO: 416005 - protein, 18 aa, Homo sapiens
  CDR3 for alpha chain variable domain of TCR clone 208003 (TRAV26-1, TRAJ52)
CIVRVAGAGGTSYGKLTF

SEQ ID NO: 416006 - protein, 13 aa, Homo sapiens
  CDR3 for beta chain variable domain of TCR clone 208003 (TRBV7-8, TRBJ1-2)
CASSAQSYYRYTF

SEQ ID NO: 416007 - protein, 14 aa, Homo sapiens
  CDR3 for alpha chain variable domain of TCR clone 208004 (TRAV12-3, TRAJ57)
CAMSAWGGSEKLVF

SEQ ID NO: 416008 - protein, 15 aa, Homo sapiens
  CDR3 for beta chain variable domain of TCR clone 208004 (TRBV25-1, TRBJ2-5)
CASSRMEGRGETQYF

SEQ ID NO: 416009 - protein, 13 aa, Homo sapiens
  CDR3 for alpha chain variable domain of TCR clone 208005 (TRAV21, TRAJ27)
CAARPGNAGKSTF

SEQ ID NO: 416010 - protein, 15 aa, Homo sapiens
  CDR3 for beta chain variable domain of TCR clone 208005 (TRBV9, TRBJ1-6)
CASSVAGTGDSPLDF

SEQ ID NO: 416011 - protein, 21 aa, Homo sapiens
  CDR3 for alpha chain variable domain of TCR clone 208006 (TRAV36/DV7, TRAJ39)
TATQTGDSAIYLPNAGNMLTF

SEQ ID NO: 416012 - protein, 15 aa, Homo sapiens
  CDR3 for beta chain variable domain of TCR clone 208006 (TRBV28, TRBJ2-5)
CASSPPWSYQETQYF

SEQ ID NO: 416013 - protein, 15 aa, Homo sapiens
  CDR3 for alpha chain variable domain of TCR clone 208007 (TRAV3, TRAJ22)
CAVRDRGGSARQLTF

SEQ ID NO: 416014 - protein, 15 aa, Homo sapiens
  CDR3 for beta chain variable domain of TCR clone 208007 (TRBV19, TRBJ2-5)
CASSIVRTSQETQYF

SEQ ID NO: 416015 - protein, 13 aa, Homo sapiens
  CDR3 for alpha chain variable domain of TCR clone 208008 (TRAV12-3, TRAJ40)
CAMSDSGTYKYIF

SEQ ID NO: 416016 - protein, 22 aa, Homo sapiens
  CDR3 for beta chain variable domain of TCR clone 208008 (TRBV14, TRBJ1-5)
CASSQDGVNPYLPPIGNQPQHF

SEQ ID NO: 416017 - protein, 12 aa, Homo sapiens
  CDR3 for alpha chain variable domain of TCR clone 208009 (TRAV26-2, TRAJ21)
CILKGNFNKFYF

SEQ ID NO: 416018 - protein, 15 aa, Homo sapiens
  CDR3 for beta chain variable domain of TCR clone 208009 (TRBV19, TRBJ1-1)
CASTSGQIQNTEAFF

SEQ ID NO: 416019 - protein, 11 aa, Homo sapiens
  CDR3 for alpha chain variable domain of TCR clone 208010 (TRAV12-2, TRAJ49)
CALQGGNQFYF

SEQ ID NO: 416020 - protein, 12 aa, Homo sapiens
  CDR3 for beta chain variable domain of TCR clone 208010 (TRBV2, TRBJ2-1)
CAYGPPGNEQFF

SEQ ID NO: 416021 - protein, 12 aa, Homo sapiens
  CDR3 for alpha chain variable domain of TCR clone 208011 (TRAV12-2, TRAJ47)
CAVAEYGNKLVF

SEQ ID NO: 416022 - protein, 16 aa, Homo sapiens
  CDR3 for beta chain variable domain of TCR clone 208011 (TRBV28, TRBJ2-7)
CASSSGTSGRGYEQYF

SEQ ID NO: 416023 - protein, 14 aa, Homo sapiens
  CDR3 for alpha chain variable domain of TCR clone 208012 (TRAV9-2, TRAJ6)
CALSDPGGSYIPTF

SEQ ID NO: 416024 - protein, 13 aa, Homo sapiens
  CDR3 for beta chain variable domain of TCR clone 208012 (TRBV7-9, TRBJ2-1)
CASSLDVGNEQFF

SEQ ID NO: 416025 - protein, 11 aa, Homo sapiens
  CDR3 for alpha chain variable domain of TCR clone 208013 (TRAV6, TRAJ23)
CSSNQGGKLIF

SEQ ID NO: 416026 - protein, 16 aa, Homo sapiens
  CDR3 for beta chain variable domain of TCR clone 208013 (TRBV5-4, TRBJ2-3)
CASQQPGAGGADTQYF

SEQ ID NO: 416027 - protein, 11 aa, Homo sapiens
  CDR3 for alpha chain variable domain of TCR clone 208014 (TRAV12-3, TRAJ20)
CNVRGDYKLSF

SEQ ID NO: 416028 - protein, 14 aa, Homo sapiens
  CDR3 for beta chain variable domain of TCR clone 208014 (TRBV5-5, TRBJ1-5)
CASSGQGVDQPQHF

SEQ ID NO: 416029 - protein, 11 aa, Homo sapiens
  CDR3 for alpha chain variable domain of TCR clone 208015 (TRAV2, TRAJ21)
CAVFNFNKFYF

SEQ ID NO: 416030 - protein, 14 aa, Homo sapiens
  CDR3 for beta chain variable domain of TCR clone 208015 (TRBV15, TRBJ2-3)
CATRNGTSTDTQYF

SEQ ID NO: 416031 - protein, 16 aa, Homo sapiens
  CDR3 for alpha chain variable domain of TCR clone 208016 (TRAV30, TRAJ24)
CGTEIGDADSWGKFQF

SEQ ID NO: 416032 - protein, 13 aa, Homo sapiens
  CDR3 for beta chain variable domain of TCR clone 208016 (TRBV4-1, TRBJ2-2)
CASSQENTGELFF

SEQ ID NO: 416033 - protein, 15 aa, Homo sapiens
  CDR3 for alpha chain variable domain of TCR clone 208017 (TRAV8-3, TRAJ27)
CAVGPSKTNTGKSTF

SEQ ID NO: 416034 - protein, 15 aa, Homo sapiens
  CDR3 for beta chain variable domain of TCR clone 208017 (TRBV5-1, TRBJ2-1)
CASKGLAGVYNEQFF

SEQ ID NO: 416035 - protein, 14 aa, Homo sapiens
  CDR3 for alpha chain variable domain of TCR clone 208018 (TRAV1-1, TRAJ35)
CAVRSIGFGNVLHC

SEQ ID NO: 416036 - protein, 14 aa, Homo sapiens
  CDR3 for beta chain variable domain of TCR clone 208018 (TRBV19, TRBJ2-1)
CASPTVVLSGEQFF

SEQ ID NO: 416037 - protein, 15 aa, Homo sapiens
  CDR3 for alpha chain variable domain of TCR clone 208019 (TRAV17, TRAJ57)
CATGPSQGGSEKLVF

SEQ ID NO: 416038 - protein, 12 aa, Homo sapiens
  CDR3 for beta chain variable domain of TCR clone 208019 (TRBV11-2, TRBJ2-2)
CDSSLGGGELFF

SEQ ID NO: 416039 - protein, 20 aa, Homo sapiens
  CDR3 for alpha chain variable domain of TCR clone 208020 (TRAV14/DV4, TRAJ22)
CAMREGPFSISSGSARQLTF

SEQ ID NO: 416040 - protein, 13 aa, Homo sapiens
  CDR3 for beta chain variable domain of TCR clone 208020 (TRBV4-2, TRBJ2-3)
CASRQDWQHTQYF

SEQ ID NO: 416041 - protein, 14 aa, Homo sapiens
  CDR3 for alpha chain variable domain of TCR clone 208021 (TRAV1-2, TRAJ16)
CAVNRFSDGQKLLF

SEQ ID NO: 416042 - protein, 17 aa, Homo sapiens
  CDR3 for beta chain variable domain of TCR clone 208021 (TRBV28, TRBJ2-5)
CASSRQGELAGAETQYF

SEQ ID NO: 416043 - protein, 14 aa, Homo sapiens
  CDR3 for alpha chain variable domain of TCR clone 208022 (TRAV25, TRAJ39)
CGRSNNNAGNMLTF

SEQ ID NO: 416044 - protein, 13 aa, Homo sapiens
  CDR3 for beta chain variable domain of TCR clone 208022 (TRBV7-2, TRBJ2-2)
CASSLAVTGELFF

SEQ ID NO: 416045 - protein, 19 aa, Homo sapiens
  CDR3 for alpha chain variable domain of TCR clone 208023 (TRAV2, TRAJ20)
IPQVREADAAVYRDCKLSF

SEQ ID NO: 416046 - protein, 13 aa, Homo sapiens
  CDR3 for beta chain variable domain of TCR clone 208023 (TRBV15, TRBJ1-6)
CATSGGLNSPLHF

SEQ ID NO: 416047 - protein, 13 aa, Homo sapiens
  CDR3 for alpha chain variable domain of TCR clone 208024 (TRAV17, TRAJ5)
CAPMDTGRRALTF

SEQ ID NO: 416048 - protein, 16 aa, Homo sapiens
  CDR3 for beta chain variable domain of TCR clone 208024 (TRBV5-1, TRBJ2-2)
CASSLWDTTNTGELFF

SEQ ID NO: 416049 - protein, 13 aa, Homo sapiens
  CDR3 for alpha chain variable domain of TCR clone 208025 (TRAV23/DV6, TRAJ58)
CAASAIGGSRLTF

SEQ ID NO: 416050 - protein, 15 aa, Homo sapiens
  CDR3 for beta chain variable domain of TCR clone 208025 (TRBV19, TRBJ1-1)
CASTSGQIQNTEAFF

SEQ ID NO: 416051 - protein, 13 aa, Homo sapiens
  CDR3 for alpha chain variable domain of TCR clone 208026 (TRAV13-1, TRAJ11)
CAASKEGYSTLTF

SEQ ID NO: 416052 - protein, 21 aa, Homo sapiens
  CDR3 for beta chain variable domain of TCR clone 208026 (TRBV23-1, TRBJ2-5)
CASAPPGQGPGGDPVLRARHA

SEQ ID NO: 416053 - protein, 14 aa, Homo sapiens
  CDR3 for alpha chain variable domain of TCR clone 208027 (TRAV17, TRAJ57)
CATDPQGGSEKLVF

SEQ ID NO: 416054 - protein, 13 aa, Homo sapiens
  CDR3 for beta chain variable domain of TCR clone 208027 (TRBV27, TRBJ1-1)
CASSLSIGAEAFF

SEQ ID NO: 416055 - protein, 14 aa, Homo sapiens
  CDR3 for alpha chain variable domain of TCR clone 208028 (TRAV35, TRAJ42)
CAGRYGGSQGNLIF

SEQ ID NO: 416056 - protein, 15 aa, Homo sapiens
  CDR3 for beta chain variable domain of TCR clone 208028 (TRBV7-9, TRBJ2-1)
CASSLGSGRANEQFF

SEQ ID NO: 416057 - protein, 12 aa, Homo sapiens
  CDR3 for alpha chain variable domain of TCR clone 208029 (TRAV3, TRAJ7)
CADLLWEQQTRF

SEQ ID NO: 416058 - protein, 13 aa, Homo sapiens
  CDR3 for beta chain variable domain of TCR clone 208029 (TRBV7-3, TRBJ2-5)
RASSCRGGETQYF

SEQ ID NO: 416059 - protein, 16 aa, Homo sapiens
  CDR3 for alpha chain variable domain of TCR clone 208030 (TRAV26-2, TRAJ52)
CTRGPAGGTSYGKLTF

SEQ ID NO: 416060 - protein, 15 aa, Homo sapiens
  CDR3 for beta chain variable domain of TCR clone 208030 (TRBV20-1, TRBJ1-1)
CSASRGVTGNTEAFF

SEQ ID NO: 416061 - protein, 13 aa, Homo sapiens
  CDR3 for alpha chain variable domain of TCR clone 208031 (TRAV26-1, TRAJ30)
CIVRVESNDKIIF

SEQ ID NO: 416062 - protein, 17 aa, Homo sapiens
  CDR3 for beta chain variable domain of TCR clone 208031 (TRBV13, TRBJ2-3)
WASSLSRVAGGRNTQYF

SEQ ID NO: 416063 - protein, 14 aa, Homo sapiens
  CDR3 for alpha chain variable domain of TCR clone 208032 (TRAV8-6, TRAJ29)
CAVSRASGNTPLFF

SEQ ID NO: 416064 - protein, 14 aa, Homo sapiens
  CDR3 for beta chain variable domain of TCR clone 208032 (TRBV19, TRBJ1-5)
ISVPVVRGAISQHF

SEQ ID NO: 416065 - protein, 14 aa, Homo sapiens
  CDR3 for alpha chain variable domain of TCR clone 208033 (TRAV13-1, TRAJ20)
CASRPGSNDYKLSF

SEQ ID NO: 416066 - protein, 15 aa, Homo sapiens
  CDR3 for beta chain variable domain of TCR clone 208033 (TRBV4-1, TRBJ2-7)
CASSQQGQGFDEQYF

SEQ ID NO: 416067 - protein, 16 aa, Homo sapiens
  CDR3 for alpha chain variable domain of TCR clone 208034 (TRAV1-1, TRAJ29)
CAVRATRNSGNTPLVF

SEQ ID NO: 416068 - protein, 16 aa, Homo sapiens
  CDR3 for beta chain variable domain of TCR clone 208034 (TRBV27, TRBJ1-1)
CASSSRGRTGYTEAFF

SEQ ID NO: 416069 - protein, 14 aa, Homo sapiens
  CDR3 for alpha chain variable domain of TCR clone 208035 (TRAV2, TRAJ9)
CAVEDRSGGFKTIV

SEQ ID NO: 416070 - protein, 14 aa, Homo sapiens
  CDR3 for beta chain variable domain of TCR clone 208035 (TRBV3-1, TRBJ2-5)
CASSQGPDQETQYF

SEQ ID NO: 416071 - protein, 19 aa, Homo sapiens
  CDR3 for alpha chain variable domain of TCR clone 208036 (TRAV26-1, TRAJ28)
CIVRVAHAYSGAGSYQITF

SEQ ID NO: 416072 - protein, 17 aa, Homo sapiens
  CDR3 for beta chain variable domain of TCR clone 208036 (TRBV4-1, TRBJ1-4)
CASSQERPRGVEEKLFF

SEQ ID NO: 416073 - protein, 13 aa, Homo sapiens
  CDR3 for alpha chain variable domain of TCR clone 208037 (TRAV17, TRAJ5)
CALRGTGRRALTI

SEQ ID NO: 416074 - protein, 14 aa, Homo sapiens
  CDR3 for beta chain variable domain of TCR clone 208037 (TRBV7-2, TRBJ1-2)
CASSQTGSTYGYTF

SEQ ID NO: 416075 - protein, 12 aa, Homo sapiens
  CDR3 for alpha chain variable domain of TCR clone 208038 (TRAV17, TRAJ4)
CAVSGGYNKQIF

SEQ ID NO: 416076 - protein, 13 aa, Homo sapiens
  CDR3 for beta chain variable domain of TCR clone 208038 (TRBV6-1, TRBJ1-1)
CASSEGWGTEAFF

SEQ ID NO: 416077 - protein, 13 aa, Homo sapiens
  CDR3 for alpha chain variable domain of TCR clone 208039 (TRAV26-1, TRAJ33)
YIVPMDSNYQLIW

SEQ ID NO: 416078 - protein, 14 aa, Homo sapiens
  CDR3 for beta chain variable domain of TCR clone 208039 (TRBV7-3, TRBJ1-1)
CASSLGTGYTEAFF

SEQ ID NO: 416079 - protein, 14 aa, Homo sapiens
  CDR3 for alpha chain variable domain of TCR clone 208040 (TRAV8-3, TRAJ44)
CAVGLTGTASKLNF

SEQ ID NO: 416080 - protein, 12 aa, Homo sapiens
  CDR3 for beta chain variable domain of TCR clone 208040 (TRBV7-3, TRBJ2-1)
CASSLGFNEQFF

SEQ ID NO: 416081 - protein, 13 aa, Homo sapiens
  CDR3 for alpha chain variable domain of TCR clone 208041 (TRAV12-1, TRAJ6)
CVVFPGGSYIPTF

SEQ ID NO: 416082 - protein, 15 aa, Homo sapiens
  CDR3 for beta chain variable domain of TCR clone 208041 (TRBV7-2, TRBJ2-7)
CASSLVSSGSYEQYF

SEQ ID NO: 416083 - protein, 13 aa, Homo sapiens
  CDR3 for alpha chain variable domain of TCR clone 208042 (TRAV35, TRAJ53)
CTGQESSNYKLTF

SEQ ID NO: 416084 - protein, 11 aa, Homo sapiens
  CDR3 for beta chain variable domain of TCR clone 208042 (TRBV29-1, TRBJ2-5)
CSEDRTGTQCF

SEQ ID NO: 416085 - protein, 14 aa, Homo sapiens
  CDR3 for alpha chain variable domain of TCR clone 208043 (TRAV35, TRAJ10)
CAGILTGGGNKITF

SEQ ID NO: 416086 - protein, 16 aa, Homo sapiens
  CDR3 for beta chain variable domain of TCR clone 208043 (TRBV12-5, TRBJ2-5)
CASGPRTSGNQETQYF

SEQ ID NO: 416087 - protein, 15 aa, Homo sapiens
  CDR3 for alpha chain variable domain of TCR clone 208044 (TRAV14/DV4, TRAJ10)
CAMRELTGGGNNLTF

SEQ ID NO: 416088 - protein, 18 aa, Homo sapiens
  CDR3 for beta chain variable domain of TCR clone 208044 (TRBV7-9, TRBJ2-7)
CASSLTTSGSKTWYEQYF

SEQ ID NO: 416089 - protein, 14 aa, Homo sapiens
  CDR3 for alpha chain variable domain of TCR clone 208045 (TRAV12-2, TRAJ5)
CAVNRSTGRRALTF

SEQ ID NO: 416090 - protein, 14 aa, Homo sapiens
  CDR3 for beta chain variable domain of TCR clone 208045 (TRBV10-3, TRBJ1-6)
CAISVDGDESPLHF

SEQ ID NO: 416091 - protein, 14 aa, Homo sapiens
  CDR3 for alpha chain variable domain of TCR clone 208046 (TRAV8-3, TRAJ23)
CAVIIDNQGGKLIF

SEQ ID NO: 416092 - protein, 15 aa, Homo sapiens
  CDR3 for beta chain variable domain of TCR clone 208046 (TRBV18, TRBJ2-1)
CASSPPSASYNEQFF

SEQ ID NO: 416093 - protein, 17 aa, Homo sapiens
  CDR3 for alpha chain variable domain of TCR clone 208047 (TRAV20, TRAJ42)
CAVQTWGYGGSQGNLIF

SEQ ID NO: 416094 - protein, 16 aa, Homo sapiens
  CDR3 for beta chain variable domain of TCR clone 208047 (TRBV29-1, TRBJ2-5)
CSAEGLAGDYQETQYF

SEQ ID NO: 416095 - protein, 15 aa, Homo sapiens
  CDR3 for alpha chain variable domain of TCR clone 208048 (TRAV8-3, TRAJ6)
CAVGEDRGGSYIPTF

SEQ ID NO: 416096 - protein, 16 aa, Homo sapiens
  CDR3 for beta chain variable domain of TCR clone 208048 (TRBV12-5, TRBJ2-5)
CASGPRTSGNQETQYF

SEQ ID NO: 416097 - protein, 13 aa, Homo sapiens
  CDR3 for alpha chain variable domain of TCR clone 208049 (TRAV27, TRAJ53)
CAPSGGSNYKLTF

SEQ ID NO: 416098 - protein, 15 aa, Homo sapiens
  CDR3 for beta chain variable domain of TCR clone 208049 (TRBV6-1, TRBJ2-3)
CASSGNWNGGGRQYF

SEQ ID NO: 416099 - protein, 14 aa, Homo sapiens
  CDR3 for alpha chain variable domain of TCR clone 208050 (TRAV1-1, TRAJ27)
CAVIYNTNAGKSTF

SEQ ID NO: 416100 - protein, 12 aa, Homo sapiens
  CDR3 for beta chain variable domain of TCR clone 208050 (TRBV2, TRBJ2-7)
CASTYRTDEQYF

SEQ ID NO: 416101 - protein, 11 aa, Homo sapiens
  CDR3 for alpha chain variable domain of TCR clone 208051 (TRAV25, TRAJ47)
CAGLYGNKLVF

SEQ ID NO: 416102 - protein, 14 aa, Homo sapiens
  CDR3 for beta chain variable domain of TCR clone 208051 (TRBV19, TRBJ2-1)
CASKEGVQVNEQFC

SEQ ID NO: 416103 - protein, 16 aa, Homo sapiens
  CDR3 for alpha chain variable domain of TCR clone 208052 (TRAV22, TRAJ45)
CAVERGKRGGADGLTF

SEQ ID NO: 416104 - protein, 11 aa, Homo sapiens
  CDR3 for beta chain variable domain of TCR clone 208052 (TRBV29-1, TRBJ2-5)
CGEDRTGTQYF

SEQ ID NO: 416105 - protein, 14 aa, Homo sapiens
  CDR3 for alpha chain variable domain of TCR clone 208053 (TRAV26-1, TRAJ40)
CIVRLLSGTYKYIF

SEQ ID NO: 416106 - protein, 14 aa, Homo sapiens
  CDR3 for beta chain variable domain of TCR clone 208053 (TRBV19, TRBJ2-7)
CASSMGQGAIEQYF

SEQ ID NO: 416107 - protein, 14 aa, Homo sapiens
  CDR3 for alpha chain variable domain of TCR clone 208054 (TRAV17, TRAJ31)
CATVLRNNNARLMF

SEQ ID NO: 416108 - protein, 13 aa, Homo sapiens
  CDR3 for beta chain variable domain of TCR clone 208054 (TRBV12-4, TRBJ1-5)
CASSPDGAQPQHF

SEQ ID NO: 416109 - protein, 17 aa, Homo sapiens
  CDR3 for alpha chain variable domain of TCR clone 208055 (TRAV3, TRAJ28)
CAVREAYSGAGSYQLTF

SEQ ID NO: 416110 - protein, 18 aa, Homo sapiens
  CDR3 for beta chain variable domain of TCR clone 208055 (TRBV27, TRBJ2-1)
CASGNRAVGAGSKNERFF

SEQ ID NO: 416111 - protein, 12 aa, Homo sapiens
  CDR3 for alpha chain variable domain of TCR clone 208056 (TRAV17, TRAJ12)
CATLRSSYILIF

SEQ ID NO: 416112 - protein, 14 aa, Homo sapiens
  CDR3 for beta chain variable domain of TCR clone 208056 (TRBV18, TRBJ2-7)
CASSPRGGAYEQYF

SEQ ID NO: 416113 - protein, 16 aa, Homo sapiens
  CDR3 for alpha chain variable domain of TCR clone 208057 (TRAV3, TRAJ37)
CSGRGKGSGNTGKLIF

SEQ ID NO: 416114 - protein, 13 aa, Homo sapiens
  CDR3 for beta chain variable domain of TCR clone 208057 (TRBV14, TRBJ2-7)
CASSQDRRYEQYF

SEQ ID NO: 416115 - protein, 14 aa, Homo sapiens
  CDR3 for alpha chain variable domain of TCR clone 208058 (TRAV2, TRAJ37)
CAVDFTSNTGKLIF

SEQ ID NO: 416116 - protein, 14 aa, Homo sapiens
  CDR3 for beta chain variable domain of TCR clone 208058 (TRBV13, TRBJ2-5)
CASSLGPRGETQYF

SEQ ID NO: 416117 - protein, 11 aa, Homo sapiens
  CDR3 for alpha chain variable domain of TCR clone 208059 (TRAV12-1, TRAJ35)
SGEGFGNVLHC

SEQ ID NO: 416118 - protein, 15 aa, Homo sapiens
  CDR3 for beta chain variable domain of TCR clone 208059 (TRBV7-2, TRBJ2-1)
CASSSGLAGGNEQFF

SEQ ID NO: 416119 - protein, 15 aa, Homo sapiens
  CDR3 for alpha chain variable domain of TCR clone 208060 (TRAV12-2, TRAJ53)
CAVNGGGGSNYKLTF

SEQ ID NO: 416120 - protein, 17 aa, Homo sapiens
  CDR3 for beta chain variable domain of TCR clone 208060 (TRBV7-3, TRBJ2-3)
RASSLMKRMRGADTQYS

SEQ ID NO: 416121 - protein, 16 aa, Homo sapiens
  CDR3 for alpha chain variable domain of TCR clone 208061 (TRAV29/DV5, TRAJ36)
CAASAHYQSGANNPFF

SEQ ID NO: 416122 - protein, 16 aa, Homo sapiens
  CDR3 for beta chain variable domain of TCR clone 208061 (TRBV4-2, TRBJ2-3)
CASSQELAGDTDTQYF

SEQ ID NO: 416123 - protein, 16 aa, Homo sapiens
  CDR3 for alpha chain variable domain of TCR clone 208062 (TRAV16, TRAJ4)
CTLSRMFSGGYNKLIF

SEQ ID NO: 416124 - protein, 16 aa, Homo sapiens
  CDR3 for beta chain variable domain of TCR clone 208062 (TRBV24-1, TRBJ2-3)
CATSDPGTGATDTQYF

SEQ ID NO: 416125 - protein, 14 aa, Homo sapiens
  CDR3 for alpha chain variable domain of TCR clone 208063 (TRAV20, TRAJ29)
CAVQESFRKHTSCL

SEQ ID NO: 416126 - protein, 14 aa, Homo sapiens
  CDR3 for beta chain variable domain of TCR clone 208063 (TRBV19, TRBJ2-1)
CASGKSTQYNEQFF

SEQ ID NO: 416127 - protein, 13 aa, Homo sapiens
  CDR3 for alpha chain variable domain of TCR clone 208064 (TRAV27, TRAJ6)
CAGGTRGGYIPTF

SEQ ID NO: 416128 - protein, 14 aa, Homo sapiens
  CDR3 for beta chain variable domain of TCR clone 208064 (TRBV28, TRBJ1-5)
CASSGQALYQPQHF

SEQ ID NO: 416129 - protein, 13 aa, Homo sapiens
  CDR3 for alpha chain variable domain of TCR clone 208065 (TRAV2, TRAJ9)
CAVSGTGGFKTIF

SEQ ID NO: 416130 - protein, 16 aa, Homo sapiens
  CDR3 for beta chain variable domain of TCR clone 208065 (TRBV4-1, TRBJ1-1)
CASSSMSERPNTEAFF

SEQ ID NO: 416131 - protein, 14 aa, Homo sapiens
  CDR3 for alpha chain variable domain of TCR clone 208066 (TRAV25, TRAJ27)
CAGEHLTNAGKSTF

SEQ ID NO: 416132 - protein, 13 aa, Homo sapiens
  CDR3 for beta chain variable domain of TCR clone 208066 (TRBV7-6, TRBJ2-3)
CASSLRSDNTQYF

SEQ ID NO: 416133 - protein, 12 aa, Homo sapiens
  CDR3 for alpha chain variable domain of TCR clone 208067 (TRAV13-2, TRAJ23)
CAERHRGGKLIF

SEQ ID NO: 416134 - protein, 15 aa, Homo sapiens
  CDR3 for beta chain variable domain of TCR clone 208067 (TRBV19, TRBJ2-1)
CASSMGSGTGRQQFF

SEQ ID NO: 416135 - protein, 13 aa, Homo sapiens
  CDR3 for alpha chain variable domain of TCR clone 208068 (TRAV35, TRAJ36)
CAGPRIGANNLFF

SEQ ID NO: 416136 - protein, 11 aa, Homo sapiens
  CDR3 for beta chain variable domain of TCR clone 208068 (TRBV29-1, TRBJ2-5)
CSEDRTGTQYF

SEQ ID NO: 416137 - protein, 15 aa, Homo sapiens
  CDR3 for alpha chain variable domain of TCR clone 208069 (TRAV14/DV4, TRAJ12)
CAMREERDSSYKLIF

SEQ ID NO: 416138 - protein, 14 aa, Homo sapiens
  CDR3 for beta chain variable domain of TCR clone 208069 (TRBV7-2, TRBJ2-7)
CASSPKTSFYEQYF

SEQ ID NO: 416139 - protein, 11 aa, Homo sapiens
  CDR3 for alpha chain variable domain of TCR clone 208070 (TRAV12-3, TRAJ43)
CAMSVSNDMRF

SEQ ID NO: 416140 - protein, 12 aa, Homo sapiens
  CDR3 for beta chain variable domain of TCR clone 208070 (TRBV20-1, TRBJ1-1)
QCSTWGGTEAFV

SEQ ID NO: 416141 - protein, 16 aa, Homo sapiens
  CDR3 for alpha chain variable domain of TCR clone 208071 (TRAV8-4, TRAJ27)
CAVKEGGFTNAGKSTF

SEQ ID NO: 416142 - protein, 13 aa, Homo sapiens
  CDR3 for beta chain variable domain of TCR clone 208071 (TRBV7-9, TRBJ1-2)
CSSSLKQNYGYTF

SEQ ID NO: 416143 - protein, 12 aa, Homo sapiens
  CDR3 for alpha chain variable domain of TCR clone 208072 (TRAV12-3, TRAJ40)
CAMSSGTYKYIF

SEQ ID NO: 416144 - protein, 13 aa, Homo sapiens
  CDR3 for beta chain variable domain of TCR clone 208072 (TRBV28, TRBJ2-7)
CASKAGGVYEQYF

SEQ ID NO: 416145 - protein, 15 aa, Homo sapiens
  CDR3 for alpha chain variable domain of TCR clone 208073 (TRAV17, TRAJ56)
CATEPFIGANSKLTF

SEQ ID NO: 416146 - protein, 15 aa, Homo sapiens
  CDR3 for beta chain variable domain of TCR clone 208073 (TRBV28, TRBJ1-5)
CASSRTGGYVQPQHF

SEQ ID NO: 416147 - protein, 13 aa, Homo sapiens
  CDR3 for alpha chain variable domain of TCR clone 208074 (TRAV27, TRAJ58)
CAGAETSGSRLTF

SEQ ID NO: 416148 - protein, 14 aa, Homo sapiens
  CDR3 for beta chain variable domain of TCR clone 208074 (TRBV19, TRBJ2-5)
CASSMTGQQETQYF

SEQ ID NO: 416149 - protein, 16 aa, Homo sapiens
  CDR3 for alpha chain variable domain of TCR clone 208075 (TRAV3, TRAJ37)
CAVRGKGSGNTGKLIF

SEQ ID NO: 416150 - protein, 14 aa, Homo sapiens
  CDR3 for beta chain variable domain of TCR clone 208075 (TRBV7-2, TRBJ2-5)
CASSPRGSSETQYF

SEQ ID NO: 416151 - protein, 15 aa, Homo sapiens
  CDR3 for alpha chain variable domain of TCR clone 208076 (TRAV2, TRAJ9)
CAVDDRGTGGFKTIF

SEQ ID NO: 416152 - protein, 16 aa, Homo sapiens
  CDR3 for beta chain variable domain of TCR clone 208076 (TRBV24-1, TRBJ2-3)
CAASDPGTGATDTQYF

SEQ ID NO: 416153 - protein, 18 aa, Homo sapiens
  CDR3 for alpha chain variable domain of TCR clone 208077 (TRAV13-1, TRAJ52)
CAASKRSAGGTSYGKLPF

SEQ ID NO: 416154 - protein, 12 aa, Homo sapiens
  CDR3 for beta chain variable domain of TCR clone 208077 (TRBV12-4, TRBJ1-2)
CQQLRQGKGYTF

SEQ ID NO: 416155 - protein, 12 aa, Homo sapiens
  CDR3 for alpha chain variable domain of TCR clone 208078 (TRAV12-3, TRAJ17)
CAMTLTGNKLTF

SEQ ID NO: 416156 - protein, 15 aa, Homo sapiens
  CDR3 for beta chain variable domain of TCR clone 208078 (TRBV20-1, TRBJ2-7)
CSARDRVSGMDQQCF

SEQ ID NO: 416157 - protein, 14 aa, Homo sapiens
  CDR3 for alpha chain variable domain of TCR clone 208079 (TRAV12-1, TRAJ30)
CVVNIGGRDDKIIF

SEQ ID NO: 416158 - protein, 15 aa, Homo sapiens
  CDR3 for beta chain variable domain of TCR clone 208079 (TRBV28, TRBJ2-7)
CASKKPSGRAYEQYF

SEQ ID NO: 416159 - protein, 12 aa, Homo sapiens
  CDR3 for alpha chain variable domain of TCR clone 208080 (TRAV12-3, TRAJ17)
CAMTLTGNKLTF

SEQ ID NO: 416160 - protein, 21 aa, Homo sapiens
  CDR3 for beta chain variable domain of TCR clone 208080 (TRBV6-5, TRBJ1-3)
CASSYWEKIAQGMSSGNTMYF

SEQ ID NO: 416161 - protein, 15 aa, Homo sapiens
  CDR3 for alpha chain variable domain of TCR clone 208081 (TRAV12-3, TRAJ27)
CAMRAYNTNAGKSTF

SEQ ID NO: 416162 - protein, 17 aa, Homo sapiens
  CDR3 for beta chain variable domain of TCR clone 208081 (TRBV7-8, TRBJ2-6)
CASSAGTGGAGANVLTF

SEQ ID NO: 416163 - protein, 12 aa, Homo sapiens
  CDR3 for alpha chain variable domain of TCR clone 208082 (TRAV12-3, TRAJ17)
CAMTHTGNKITF

SEQ ID NO: 416164 - protein, 15 aa, Homo sapiens
  CDR3 for beta chain variable domain of TCR clone 208082 (TRBV20-1, TRBJ2-7)
CSARDRVSGMDEQYF

SEQ ID NO: 416165 - protein, 15 aa, Homo sapiens
  CDR3 for alpha chain variable domain of TCR clone 208083 (TRAV3, TRAJ20)
CAVRDIQLCDYKLSF

SEQ ID NO: 416166 - protein, 15 aa, Homo sapiens
  CDR3 for beta chain variable domain of TCR clone 208083 (TRBV7-9, TRBJ1-6)
CASSSPGRGNSPLHF

SEQ ID NO: 416167 - protein, 13 aa, Homo sapiens
  CDR3 for alpha chain variable domain of TCR clone 208084 (TRAV38-1, TRAJ42)
CARWGGSQGNLIF

SEQ ID NO: 416168 - protein, 17 aa, Homo sapiens
  CDR3 for beta chain variable domain of TCR clone 208084 (TRBV20-1, TRBJ2-1)
CSAREPLAGVWDNEQFF

SEQ ID NO: 416169 - protein, 14 aa, Homo sapiens
  CDR3 for alpha chain variable domain of TCR clone 208085 (TRAV4, TRAJ9)
CLVGSGTGGFKTIF

SEQ ID NO: 416170 - protein, 14 aa, Homo sapiens
  CDR3 for beta chain variable domain of TCR clone 208085 (TRBV7-2, TRBJ2-7)
CASSLYPGRYEQYF

SEQ ID NO: 416171 - protein, 13 aa, Homo sapiens
  CDR3 for alpha chain variable domain of TCR clone 208086 (TRAV25, TRAJ47)
CAGHREYGNKLVF

SEQ ID NO: 416172 - protein, 17 aa, Homo sapiens
  CDR3 for beta chain variable domain of TCR clone 208086 (TRBV7-8, TRBJ2-5)
CASSLASGWRFQETQYF

SEQ ID NO: 416173 - protein, 21 aa, Homo sapiens
  CDR3 for alpha chain variable domain of TCR clone 208087 (TRAV26-1, TRAJ38)
CNADNAGNNHIQNPDPAVYQL

SEQ ID NO: 416174 - protein, 13 aa, Homo sapiens
  CDR3 for beta chain variable domain of TCR clone 208087 (TRBV20-1, TRBJ1-1)
CSARGGGNTEAFF

SEQ ID NO: 416175 - protein, 11 aa, Homo sapiens
  CDR3 for alpha chain variable domain of TCR clone 208088 (TRAV21, TRAJ34)
CTVTNTDKLIF

SEQ ID NO: 416176 - protein, 14 aa, Homo sapiens
  CDR3 for beta chain variable domain of TCR clone 208088 (TRBV12-4, TRBJ2-1)
CASSLGQGASEQFF

SEQ ID NO: 416177 - protein, 11 aa, Homo sapiens
  CDR3 for alpha chain variable domain of TCR clone 208089 (TRAV12-3, TRAJ43)
CAMSVSNDMRF

SEQ ID NO: 416178 - protein, 16 aa, Homo sapiens
  CDR3 for beta chain variable domain of TCR clone 208089 (TRBV7-3, TRBJ2-3)
CQQLFTSSLNTDTQYF

SEQ ID NO: 416179 - protein, 13 aa, Homo sapiens
  CDR3 for alpha chain variable domain of TCR clone 208090 (TRAV17, TRAJ22)
CAGRRGSARQLTF

SEQ ID NO: 416180 - protein, 16 aa, Homo sapiens
  CDR3 for beta chain variable domain of TCR clone 208090 (TRBV7-3, TRBJ2-2)
CASSLKRGTLSGELFF

SEQ ID NO: 416181 - protein, 10 aa, Homo sapiens
  CDR3 for alpha chain variable domain of TCR clone 208091 (TRAV12-3, TRAJ52)
CAMSRTNAVV

SEQ ID NO: 416182 - protein, 17 aa, Homo sapiens
  CDR3 for beta chain variable domain of TCR clone 208091 (TRBV7-3, TRBJ2-3)
CASSLMKRMRGADTQYF

SEQ ID NO: 416183 - protein, 14 aa, Homo sapiens
  CDR3 for alpha chain variable domain of TCR clone 208092 (TRAV8-4, TRAJ13)
VAVTLSGGYHKVTF

SEQ ID NO: 416184 - protein, 14 aa, Homo sapiens
  CDR3 for beta chain variable domain of TCR clone 208092 (TRBV7-2, TRBJ1-2)
CASSQTGSTYGYTF

SEQ ID NO: 416185 - protein, 12 aa, Homo sapiens
  CDR3 for alpha chain variable domain of TCR clone 208093 (TRAV13-1, TRAJ48)
CAAHFGNEKLTF

SEQ ID NO: 416186 - protein, 13 aa, Homo sapiens
  CDR3 for beta chain variable domain of TCR clone 208093 (TRBV7-3, TRBJ1-1)
CASSQDWGAEAFF

SEQ ID NO: 416187 - protein, 23 aa, Homo sapiens
  CDR3 for alpha chain variable domain of TCR clone 208094 (TRAV26-1, TRAJ38)
CIADNAGNNHIQNPDPAVYQLRD

SEQ ID NO: 416188 - protein, 13 aa, Homo sapiens
  CDR3 for beta chain variable domain of TCR clone 208094 (TRBV10-3, TRBJ2-7)
RASKLAVNYEQYF

SEQ ID NO: 416189 - protein, 11 aa, Homo sapiens
  CDR3 for alpha chain variable domain of TCR clone 208095 (TRAV2, TRAJ33)
CAVDSNYQLIW

SEQ ID NO: 416190 - protein, 20 aa, Homo sapiens
  CDR3 for beta chain variable domain of TCR clone 208095 (TRBV19, TRBJ2-1)
CASSISRTVTSTRLNNEQFF

SEQ ID NO: 416191 - protein, 11 aa, Homo sapiens
  CDR3 for alpha chain variable domain of TCR clone 208096 (TRAV8-3, TRAJ49)
CAVTTGNQFYF

SEQ ID NO: 416192 - protein, 12 aa, Homo sapiens
  CDR3 for beta chain variable domain of TCR clone 208096 (TRBV11-2, TRBJ2-7)
CASSPPADEQYF

SEQ ID NO: 416193 - protein, 13 aa, Homo sapiens
  CDR3 for alpha chain variable domain of TCR clone 208097 (TRAV17, TRAJ21)
CSTDGNNFNKFYF

SEQ ID NO: 416194 - protein, 12 aa, Homo sapiens
  CDR3 for beta chain variable domain of TCR clone 208097 (TRBV20-1, TRBJ1-1)
CSARGGNTEAFF

SEQ ID NO: 416195 - protein, 13 aa, Homo sapiens
  CDR3 for alpha chain variable domain of TCR clone 208098 (TRAV17, TRAJ22)
CAHHSGSARQLTF

SEQ ID NO: 416196 - protein, 16 aa, Homo sapiens
  CDR3 for beta chain variable domain of TCR clone 208098 (TRBV4-1, TRBJ1-2)
CASSQDAGQVLYGYTV

SEQ ID NO: 416197 - protein, 14 aa, Homo sapiens
  CDR3 for alpha chain variable domain of TCR clone 208099 (TRAV16, TRAJ4)
CALHSSGGYNKLIF

SEQ ID NO: 416198 - protein, 15 aa, Homo sapiens
  CDR3 for beta chain variable domain of TCR clone 208099 (TRBV7-2, TRBJ2-7)
CASSTRLAGVDEQYF

SEQ ID NO: 416199 - protein, 13 aa, Homo sapiens
  CDR3 for alpha chain variable domain of TCR clone 208100 (TRAV3, TRAJ3)
CAVRDMGKQCFQD

SEQ ID NO: 416200 - protein, 14 aa, Homo sapiens
  CDR3 for beta chain variable domain of TCR clone 208100 (TRBV11-2, TRBJ2-1)
CASSLEVANNEQFF

SEQ ID NO: 416201 - protein, 14 aa, Homo sapiens
  CDR3 for alpha chain variable domain of TCR clone 208101 (TRAV12-3, TRAJ9)
CAMGPNTGGFKTIF

SEQ ID NO: 416202 - protein, 12 aa, Homo sapiens
  CDR3 for beta chain variable domain of TCR clone 208101 (TRBV19, TRBJ1-5)
CASSIAQQHQHF

SEQ ID NO: 416203 - protein, 15 aa, Homo sapiens
  CDR3 for alpha chain variable domain of TCR clone 208102 (TRAV17, TRAJ57)
CATGPSQGGSEKLVF

SEQ ID NO: 416204 - protein, 16 aa, Homo sapiens
  CDR3 for beta chain variable domain of TCR clone 208102 (TRBV7-7, TRBJ2-1)
CASSLASGTSYNEQFF

SEQ ID NO: 416205 - protein, 12 aa, Homo sapiens
  CDR3 for alpha chain variable domain of TCR clone 208103 (TRAV12-3, TRAJ20)
CAMVRGDYKLSF

SEQ ID NO: 416206 - protein, 15 aa, Homo sapiens
  CDR3 for beta chain variable domain of TCR clone 208103 (TRBV2, TRBJ2-2)
CASSRQGPNTGELFF

SEQ ID NO: 416207 - protein, 14 aa, Homo sapiens
  CDR3 for alpha chain variable domain of TCR clone 208104 (TRAV1-1, TRAJ23)
CAVSIYNQGGKLVF

SEQ ID NO: 416208 - protein, 20 aa, Homo sapiens
  CDR3 for beta chain variable domain of TCR clone 208104 (TRBV6-4, TRBJ2-7)
CASSDSSVSGQVPTSYEQYF

SEQ ID NO: 416209 - protein, 17 aa, Homo sapiens
  CDR3 for alpha chain variable domain of TCR clone 208105 (TRAV26-1, TRAJ10)
CLVSFRGLTGGGNKLTF

SEQ ID NO: 416210 - protein, 13 aa, Homo sapiens
  CDR3 for beta chain variable domain of TCR clone 208105 (TRBV20-1, TRBJ2-3)
CSASRQAADTQYF

SEQ ID NO: 416211 - protein, 21 aa, Homo sapiens
  CDR3 for alpha chain variable domain of TCR clone 208106 (TRAV9-2, )
CALIQIGDIQNHDPAVYQLRD

SEQ ID NO: 416212 - protein, 13 aa, Homo sapiens
  CDR3 for beta chain variable domain of TCR clone 208106 (TRBV28, TRBJ2-5)
CASSFAGGETQYF

SEQ ID NO: 416213 - protein, 14 aa, Homo sapiens
  CDR3 for alpha chain variable domain of TCR clone 208107 (TRAV35, TRAJ22)
CAGLRPGSARQLTF

SEQ ID NO: 416214 - protein, 15 aa, Homo sapiens
  CDR3 for beta chain variable domain of TCR clone 208107 (TRBV12-4, TRBJ2-5)
CPSSPPTGLQETQYF

SEQ ID NO: 416215 - protein, 12 aa, Homo sapiens
  CDR3 for alpha chain variable domain of TCR clone 208108 (TRAV2, TRAJ9)
CAVGAGGFKTIF

SEQ ID NO: 416216 - protein, 13 aa, Homo sapiens
  CDR3 for beta chain variable domain of TCR clone 208108 (TRBV20-1, TRBJ1-6)
CSAPLGVGSPLHF

SEQ ID NO: 416217 - protein, 14 aa, Homo sapiens
  CDR3 for alpha chain variable domain of TCR clone 208109 (TRAV1-2, TRAJ16)
CAVNRFSDGQKLLF

SEQ ID NO: 416218 - protein, 12 aa, Homo sapiens
  CDR3 for beta chain variable domain of TCR clone 208109 (TRBV28, TRBJ2-6)
CAIQAGTNVPTF

SEQ ID NO: 416219 - protein, 16 aa, Homo sapiens
  CDR3 for alpha chain variable domain of TCR clone 208110 (TRAV8-3, TRAJ52)
CAVQPAGGTSYGKLTF

SEQ ID NO: 416220 - protein, 15 aa, Homo sapiens
  CDR3 for beta chain variable domain of TCR clone 208110 (TRBV11-2, TRBJ2-7)
CASSLAGGVPTEQYF

SEQ ID NO: 416221 - protein, 18 aa, Homo sapiens
  CDR3 for alpha chain variable domain of TCR clone 208111 (TRAV3, TRAJ32)
CAVRDIRGYGGATNKLIF

SEQ ID NO: 416222 - protein, 15 aa, Homo sapiens
  CDR3 for beta chain variable domain of TCR clone 208111 (TRBV12-4, TRBJ2-2)
CASSLGVRHTGELFV

SEQ ID NO: 416223 - protein, 15 aa, Homo sapiens
  CDR3 for alpha chain variable domain of TCR clone 208112 (TRAV21, TRAJ53)
CATLNSGGSNYKLTF

SEQ ID NO: 416224 - protein, 14 aa, Homo sapiens
  CDR3 for beta chain variable domain of TCR clone 208112 (TRBV7-3, TRBJ2-7)
CQQLVDRSSYEQYF

SEQ ID NO: 416225 - protein, 16 aa, Homo sapiens
  CDR3 for alpha chain variable domain of TCR clone 208113 (TRAV26-1, TRAJ56)
CIVRVAETGANSKLTF

SEQ ID NO: 416226 - protein, 13 aa, Homo sapiens
  CDR3 for beta chain variable domain of TCR clone 208113 (TRBV18, TRBJ2-1)
CASGLASNNEQFF

SEQ ID NO: 416227 - protein, 12 aa, Homo sapiens
  CDR3 for alpha chain variable domain of TCR clone 208114 (TRAV13-2, TRAJ31)
CAESYNSARLMF

SEQ ID NO: 416228 - protein, 13 aa, Homo sapiens
  CDR3 for beta chain variable domain of TCR clone 208114 (TRBV24-1, TRBJ1-3)
CATMADSGNTIYF

SEQ ID NO: 416229 - protein, 16 aa, Homo sapiens
  CDR3 for alpha chain variable domain of TCR clone 208115 (TRAV14/DV4, TRAJ53)
CALREGGGGSNYKLTF

SEQ ID NO: 416230 - protein, 19 aa, Homo sapiens
  CDR3 for beta chain variable domain of TCR clone 208115 (TRBV28, TRBJ2-4)
CASSFQPGGPAHSKNIQYF

SEQ ID NO: 416231 - protein, 12 aa, Homo sapiens
  CDR3 for alpha chain variable domain of TCR clone 208116 (TRAV13-2, TRAJ23)
CAERHRGGKLIF

SEQ ID NO: 416232 - protein, 13 aa, Homo sapiens
  CDR3 for beta chain variable domain of TCR clone 208116 (TRBV7-9, TRBJ2-3)
CARSPGSTDTQYF

SEQ ID NO: 416233 - protein, 14 aa, Homo sapiens
  CDR3 for alpha chain variable domain of TCR clone 208117 (TRAV26-1, TRAJ39)
CIVRGSRAGNMLTF

SEQ ID NO: 416234 - protein, 14 aa, Homo sapiens
  CDR3 for beta chain variable domain of TCR clone 208117 (TRBV7-6, TRBJ2-3)
CASSLGTVTDTQYF

SEQ ID NO: 416235 - protein, 12 aa, Homo sapiens
  CDR3 for alpha chain variable domain of TCR clone 208118 (TRAV12-2, TRAJ10)
WGVMGGGNKLTF

SEQ ID NO: 416236 - protein, 14 aa, Homo sapiens
  CDR3 for beta chain variable domain of TCR clone 208118 (TRBV27, TRBJ2-7)
CASATGTERREQYF

SEQ ID NO: 416237 - protein, 14 aa, Homo sapiens
  CDR3 for alpha chain variable domain of TCR clone 208119 (TRAV12-1, TRAJ10)
CGEQTHGRRKQLTF

SEQ ID NO: 416238 - protein, 17 aa, Homo sapiens
  CDR3 for beta chain variable domain of TCR clone 208119 (TRBV5-1, TRBJ1-6)
CASSPSLQGSDNSPLHF

SEQ ID NO: 416239 - protein, 14 aa, Homo sapiens
  CDR3 for alpha chain variable domain of TCR clone 208120 (TRAV12-2, TRAJ17)
CAVLFKAAGNKLTF

SEQ ID NO: 416240 - protein, 16 aa, Homo sapiens
  CDR3 for beta chain variable domain of TCR clone 208120 (TRBV9, TRBJ2-1)
CASSVGGGGNYNEQFF

SEQ ID NO: 416241 - protein, 22 aa, Homo sapiens
  CDR3 for alpha chain variable domain of TCR clone 208121 (TRAV12-1, TRAJ30)
CVVNIGGEMARSSLEKGHDFIF

SEQ ID NO: 416242 - protein, 14 aa, Homo sapiens
  CDR3 for beta chain variable domain of TCR clone 208121 (TRBV7-6, TRBJ2-3)
CASSLGTVTDTQYF

SEQ ID NO: 416243 - protein, 15 aa, Homo sapiens
  CDR3 for alpha chain variable domain of TCR clone 208122 (TRAV12-2, TRAJ53)
CAVNGGGGSNYKLTF

SEQ ID NO: 416244 - protein, 12 aa, Homo sapiens
  CDR3 for beta chain variable domain of TCR clone 208122 (TRBV3-1, TRBJ1-1)
CQSPGVITEAFF

SEQ ID NO: 416245 - protein, 14 aa, Homo sapiens
  CDR3 for alpha chain variable domain of TCR clone 208123 (TRAV25, TRAJ42)
CAGNYGGSEGNLIF

SEQ ID NO: 416246 - protein, 15 aa, Homo sapiens
  CDR3 for beta chain variable domain of TCR clone 208123 (TRBV6-1, TRBJ2-6)
CASTGSRSGANVLTF

SEQ ID NO: 416247 - protein, 14 aa, Homo sapiens
  CDR3 for alpha chain variable domain of TCR clone 208124 (TRAV2, TRAJ9)
CAVEDWSGGFKTIF

SEQ ID NO: 416248 - protein, 17 aa, Homo sapiens
  CDR3 for beta chain variable domain of TCR clone 208124 (TRBV11-2, TRBJ2-1)
CASSLYPPGVEYNEQFF

SEQ ID NO: 416249 - protein, 14 aa, Homo sapiens
  CDR3 for alpha chain variable domain of TCR clone 208125 (TRAV38-1, TRAJ40)
CVLRPTSGTYKYIF

SEQ ID NO: 416250 - protein, 15 aa, Homo sapiens
  CDR3 for beta chain variable domain of TCR clone 208125 (TRBV20-1, TRBJ2-7)
RSARDRVSGMDEQYF

SEQ ID NO: 416251 - protein, 16 aa, Homo sapiens
  CDR3 for alpha chain variable domain of TCR clone 208126 (TRAV35, TRAJ28)
CAGQKYSGAGSYQLTF

SEQ ID NO: 416252 - protein, 13 aa, Homo sapiens
  CDR3 for beta chain variable domain of TCR clone 208126 (TRBV19, TRBJ1-2)
CSSSQGQVYGYTF

SEQ ID NO: 416253 - protein, 16 aa, Homo sapiens
  CDR3 for alpha chain variable domain of TCR clone 208127 (TRAV3, TRAJ37)
CAVRPHGSCNTGTLIF

SEQ ID NO: 416254 - protein, 16 aa, Homo sapiens
  CDR3 for beta chain variable domain of TCR clone 208127 (TRBV9, TRBJ1-2)
CASSVEEKVSPYGYTF

SEQ ID NO: 416255 - protein, 16 aa, Homo sapiens
  CDR3 for alpha chain variable domain of TCR clone 208128 (TRAV35, TRAJ28)
CAGQKYFGAGSYQLTF

SEQ ID NO: 416256 - protein, 13 aa, Homo sapiens
  CDR3 for beta chain variable domain of TCR clone 208128 (TRBV19, TRBJ1-2)
CASSQGQVYGYTF

SEQ ID NO: 416257 - protein, 11 aa, Homo sapiens
  CDR3 for alpha chain variable domain of TCR clone 208129 (TRAV20, TRAJ23)
CACNQGGKLIL

SEQ ID NO: 416258 - protein, 16 aa, Homo sapiens
  CDR3 for beta chain variable domain of TCR clone 208129 (TRBV7-8, TRBJ2-5)
CASSFGGQPAQETQYF

SEQ ID NO: 416259 - protein, 15 aa, Homo sapiens
  CDR3 for alpha chain variable domain of TCR clone 208130 (TRAV26-1, TRAJ27)
CIVRVSTPMQANQPL

SEQ ID NO: 416260 - protein, 13 aa, Homo sapiens
  CDR3 for beta chain variable domain of TCR clone 208130 (TRBV20-1, TRBJ2-7)
CSATHTSGYEQFF

SEQ ID NO: 416261 - protein, 16 aa, Homo sapiens
  CDR3 for alpha chain variable domain of TCR clone 208131 (TRAV21, TRAJ17)
CAVRPGEEAAGYKLTF

SEQ ID NO: 416262 - protein, 16 aa, Homo sapiens
  CDR3 for beta chain variable domain of TCR clone 208131 (TRBV2, TRBJ2-7)
CASSEPWTGPSYEQYF

SEQ ID NO: 416263 - protein, 11 aa, Homo sapiens
  CDR3 for alpha chain variable domain of TCR clone 208132 (TRAV35, TRAJ30)
CAGPGDDKIIF

SEQ ID NO: 416264 - protein, 14 aa, Homo sapiens
  CDR3 for beta chain variable domain of TCR clone 208132 (TRBV7-9, TRBJ2-2)
CASSFDRGTGELFF

SEQ ID NO: 416265 - protein, 14 aa, Homo sapiens
  CDR3 for alpha chain variable domain of TCR clone 208133 (TRAV12-2, TRAJ13)
CAVKKTGGYQKVTF

SEQ ID NO: 416266 - protein, 15 aa, Homo sapiens
  CDR3 for beta chain variable domain of TCR clone 208133 (TRBV5-1, TRBJ2-1)
CASSPPRAPTMSSSS

SEQ ID NO: 416267 - protein, 13 aa, Homo sapiens
  CDR3 for alpha chain variable domain of TCR clone 208134 (TRAV16, TRAJ31)
CALSAHNNARLMF

SEQ ID NO: 416268 - protein, 14 aa, Homo sapiens
  CDR3 for beta chain variable domain of TCR clone 208134 (TRBV12-5, TRBJ2-5)
CASGSRTHQETQYF

SEQ ID NO: 416269 - protein, 16 aa, Homo sapiens
  CDR3 for alpha chain variable domain of TCR clone 208135 (TRAV13-1, TRAJ45)
CAASWESGGGADGVTF

SEQ ID NO: 416270 - protein, 14 aa, Homo sapiens
  CDR3 for beta chain variable domain of TCR clone 208135 (TRBV12-4, TRBJ1-3)
CASGQTVSGNTIYF

SEQ ID NO: 416271 - protein, 18 aa, Homo sapiens
  CDR3 for alpha chain variable domain of TCR clone 208136 (TRAV21, TRAJ52)
CAVRPSPAGGTIYGKLTF

SEQ ID NO: 416272 - protein, 16 aa, Homo sapiens
  CDR3 for beta chain variable domain of TCR clone 208136 (TRBV19, TRBJ2-2)
CASRSPGTGATGELFF

SEQ ID NO: 416273 - protein, 13 aa, Homo sapiens
  CDR3 for alpha chain variable domain of TCR clone 208137 (TRAV1-2, TRAJ9)
CAALNTGGFKTIF

SEQ ID NO: 416274 - protein, 12 aa, Homo sapiens
  CDR3 for beta chain variable domain of TCR clone 208137 (TRBV11-2, TRBJ2-4)
CASSSASGSEYF

SEQ ID NO: 416275 - protein, 16 aa, Homo sapiens
  CDR3 for alpha chain variable domain of TCR clone 208138 (TRAV4, TRAJ22)
CLVGDLYSGSARQLTF

SEQ ID NO: 416276 - protein, 16 aa, Homo sapiens
  CDR3 for beta chain variable domain of TCR clone 208138 (TRBV7-9, TRBJ2-3)
CASSSWREVGTDTQYF

SEQ ID NO: 416277 - protein, 16 aa, Homo sapiens
  CDR3 for alpha chain variable domain of TCR clone 208139 (TRAV12-1, TRAJ12)
CVVNTLLMDSSYKLFF

SEQ ID NO: 416278 - protein, 13 aa, Homo sapiens
  CDR3 for beta chain variable domain of TCR clone 208139 (TRBV11-2, TRBJ2-1)
CASSSEAYNEQFF

SEQ ID NO: 416279 - protein, 12 aa, Homo sapiens
  CDR3 for alpha chain variable domain of TCR clone 208140 (TRAV1-1, TRAJ30)
CAGRGRDDKIIF

SEQ ID NO: 416280 - protein, 13 aa, Homo sapiens
  CDR3 for beta chain variable domain of TCR clone 208140 (TRBV11-3, TRBJ2-7)
CASSLDKLYEQYF

SEQ ID NO: 416281 - protein, 14 aa, Homo sapiens
  CDR3 for alpha chain variable domain of TCR clone 208141 (TRAV17, TRAJ15)
CATGPNRAGTALIF

SEQ ID NO: 416282 - protein, 15 aa, Homo sapiens
  CDR3 for beta chain variable domain of TCR clone 208141 (TRBV11-2, TRBJ2-2)
CASSSDRVNAGELFF

SEQ ID NO: 416283 - protein, 14 aa, Homo sapiens
  CDR3 for alpha chain variable domain of TCR clone 208142 (TRAV26-1, TRAJ38)
FIADNAGNNRKLIW

SEQ ID NO: 416284 - protein, 13 aa, Homo sapiens
  CDR3 for beta chain variable domain of TCR clone 208142 (TRBV20-1, TRBJ1-1)
CSARGGGNTVAFF

SEQ ID NO: 416285 - protein, 18 aa, Homo sapiens
  CDR3 for alpha chain variable domain of TCR clone 208143 (TRAV26-1, TRAJ52)
CIVRVEGAGGTSYGKLQF

SEQ ID NO: 416286 - protein, 13 aa, Homo sapiens
  CDR3 for beta chain variable domain of TCR clone 208143 (TRBV7-3, TRBJ1-2)
CASSLKRGYGYTF

SEQ ID NO: 416287 - protein, 14 aa, Homo sapiens
  CDR3 for alpha chain variable domain of TCR clone 208144 (TRAV12-2, TRAJ17)
CAVLFKSAGNKLTF

SEQ ID NO: 416288 - protein, 14 aa, Homo sapiens
  CDR3 for beta chain variable domain of TCR clone 208144 (TRBV7-8, TRBJ2-5)
CASSATGGQETQYF

SEQ ID NO: 416289 - protein, 14 aa, Homo sapiens
  CDR3 for alpha chain variable domain of TCR clone 208145 (TRAV1-2, TRAJ8)
CAVREDTGFQKLVC

SEQ ID NO: 416290 - protein, 14 aa, Homo sapiens
  CDR3 for beta chain variable domain of TCR clone 208145 (TRBV29-1, TRBJ1-4)
CSVTGTGGNEKLFF

SEQ ID NO: 416291 - protein, 17 aa, Homo sapiens
  CDR3 for alpha chain variable domain of TCR clone 208146 (TRAV3, TRAJ6)
CAVRDGPRAGGSYIPTF

SEQ ID NO: 416292 - protein, 17 aa, Homo sapiens
  CDR3 for beta chain variable domain of TCR clone 208146 (TRBV5-1, TRBJ2-5)
CASSPVALGQNQETQYF

SEQ ID NO: 416293 - protein, 15 aa, Homo sapiens
  CDR3 for alpha chain variable domain of TCR clone 208147 (TRAV8-6, TRAJ6)
CAVSGESGGSYIPTS

SEQ ID NO: 416294 - protein, 14 aa, Homo sapiens
  CDR3 for beta chain variable domain of TCR clone 208147 (TRBV7-9, TRBJ2-1)
CAGSSMVGFGEQFF

SEQ ID NO: 416295 - protein, 15 aa, Homo sapiens
  CDR3 for alpha chain variable domain of TCR clone 208148 (TRAV21, TRAJ56)
CAVTKDTGANSKLTF

SEQ ID NO: 416296 - protein, 14 aa, Homo sapiens
  CDR3 for beta chain variable domain of TCR clone 208148 (TRBV20-1, TRBJ2-3)
CSARVRGSTDTQYF

SEQ ID NO: 416297 - protein, 11 aa, Homo sapiens
  CDR3 for alpha chain variable domain of TCR clone 208149 (TRAV21, TRAJ34)
CAHYNTDKLIF

SEQ ID NO: 416298 - protein, 13 aa, Homo sapiens
  CDR3 for beta chain variable domain of TCR clone 208149 (TRBV7-6, TRBJ1-2)
CGSSVVADYGYTF

SEQ ID NO: 416299 - protein, 13 aa, Homo sapiens
  CDR3 for alpha chain variable domain of TCR clone 208150 (TRAV8-3, TRAJ4)
WVFYSGGYNKLMF

SEQ ID NO: 416300 - protein, 16 aa, Homo sapiens
  CDR3 for beta chain variable domain of TCR clone 208150 (TRBV7-8, TRBJ2-3)
CASSTEGQRGTDTQYF

SEQ ID NO: 416301 - protein, 14 aa, Homo sapiens
  CDR3 for alpha chain variable domain of TCR clone 208151 (TRAV2, TRAJ22)
CAVEVKRAARQLTF

SEQ ID NO: 416302 - protein, 13 aa, Homo sapiens
  CDR3 for beta chain variable domain of TCR clone 208151 (TRBV19, TRBJ2-2)
CQYSGLLWWELFF

SEQ ID NO: 416303 - protein, 14 aa, Homo sapiens
  CDR3 for alpha chain variable domain of TCR clone 208152 (TRAV24, TRAJ42)
CAQNYGGSQGNLIF

SEQ ID NO: 416304 - protein, 15 aa, Homo sapiens
  CDR3 for beta chain variable domain of TCR clone 208152 (TRBV19, TRBJ1-5)
CASSIPGGAAQPQHF

SEQ ID NO: 416305 - protein, 14 aa, Homo sapiens
  CDR3 for alpha chain variable domain of TCR clone 208153 (TRAV35, TRAJ50)
CAGHRKTSYDKVIF

SEQ ID NO: 416306 - protein, 13 aa, Homo sapiens
  CDR3 for beta chain variable domain of TCR clone 208153 (TRBV12-4, TRBJ2-7)
CASSPTETYEQYF

SEQ ID NO: 416307 - protein, 13 aa, Homo sapiens
  CDR3 for alpha chain variable domain of TCR clone 208154 (TRAV12-3, TRAJ6)
CAMIPGGSYIPTF

SEQ ID NO: 416308 - protein, 16 aa, Homo sapiens
  CDR3 for beta chain variable domain of TCR clone 208154 (TRBV7-2, TRBJ2-5)
CQQPRQGRKSRETQYF

SEQ ID NO: 416309 - protein, 16 aa, Homo sapiens
  CDR3 for alpha chain variable domain of TCR clone 208155 (TRAV3, TRAJ37)
CAVRPHGSGNTGKLIF

SEQ ID NO: 416310 - protein, 18 aa, Homo sapiens
  CDR3 for beta chain variable domain of TCR clone 208155 (TRBV4-1, TRBJ2-1)
CASSLVGGELAGFNEQFF

SEQ ID NO: 416311 - protein, 11 aa, Homo sapiens
  CDR3 for alpha chain variable domain of TCR clone 208156 (TRAV12-1, TRAJ21)
CVVNNFNKFYF

SEQ ID NO: 416312 - protein, 11 aa, Homo sapiens
  CDR3 for beta chain variable domain of TCR clone 208156 (TRBV10-3, TRBJ2-7)
CAISERLEQYF

SEQ ID NO: 416313 - protein, 11 aa, Homo sapiens
  CDR3 for alpha chain variable domain of TCR clone 208157 (TRAV3, TRAJ21)
CAVGNFNKFYF

SEQ ID NO: 416314 - protein, 12 aa, Homo sapiens
  CDR3 for beta chain variable domain of TCR clone 208157 (TRBV12-4, TRBJ2-5)
CASGDYEETQYF

SEQ ID NO: 416315 - protein, 17 aa, Homo sapiens
  CDR3 for alpha chain variable domain of TCR clone 208158 (TRAV38-1, TRAJ45)
CAFMKHYMGGGADGLPF

SEQ ID NO: 416316 - protein, 19 aa, Homo sapiens
  CDR3 for beta chain variable domain of TCR clone 208158 (TRBV6-1, TRBJ2-5)
CASSEQGLAGGLYQETQYF

SEQ ID NO: 416317 - protein, 12 aa, Homo sapiens
  CDR3 for alpha chain variable domain of TCR clone 208159 (TRAV22, TRAJ22)
CAPGGSARQLTF

SEQ ID NO: 416318 - protein, 18 aa, Homo sapiens
  CDR3 for beta chain variable domain of TCR clone 208159 (TRBV12-4, TRBJ2-2)
CASSLVAGTRGRTGELFF

SEQ ID NO: 416319 - protein, 14 aa, Homo sapiens
  CDR3 for alpha chain variable domain of TCR clone 208160 (TRAV12-3, TRAJ22)
CAMSLFGSASQLTF

SEQ ID NO: 416320 - protein, 11 aa, Homo sapiens
  CDR3 for beta chain variable domain of TCR clone 208160 (TRBV12-4, TRBJ2-2)
CASSAAGELFF

SEQ ID NO: 416321 - protein, 11 aa, Homo sapiens
  CDR3 for alpha chain variable domain of TCR clone 208161 (TRAV1-1, TRAJ23)
CAVRQGGKLIF

SEQ ID NO: 416322 - protein, 16 aa, Homo sapiens
  CDR3 for beta chain variable domain of TCR clone 208161 (TRBV20-1, TRBJ2-3)
CSAVRDRGPIADTQYF

SEQ ID NO: 416323 - protein, 10 aa, Homo sapiens
  CDR3 for alpha chain variable domain of TCR clone 208162 (TRAV2, TRAJ34)
CAVVNDKLIF

SEQ ID NO: 416324 - protein, 13 aa, Homo sapiens
  CDR3 for beta chain variable domain of TCR clone 208162 (TRBV14, TRBJ2-7)
CASSQDRRYEQYF

SEQ ID NO: 416325 - protein, 14 aa, Homo sapiens
  CDR3 for alpha chain variable domain of TCR clone 208163 (TRAV13-1, TRAJ13)
CGASRGGGYQKVTF

SEQ ID NO: 416326 - protein, 14 aa, Homo sapiens
  CDR3 for beta chain variable domain of TCR clone 208163 (TRBV5-1, TRBJ2-7)
CASSATGGYDEQYF

SEQ ID NO: 416327 - protein, 13 aa, Homo sapiens
  CDR3 for alpha chain variable domain of TCR clone 208164 (TRAV4, TRAJ34)
CLVGDYNTDKLIF

SEQ ID NO: 416328 - protein, 23 aa, Homo sapiens
  CDR3 for beta chain variable domain of TCR clone 208164 (TRBV4-2, TRBJ2-3)
CTSSQDPPRASSISGGRGDTQYF

SEQ ID NO: 416329 - protein, 13 aa, Homo sapiens
  CDR3 for alpha chain variable domain of TCR clone 208165 (TRAV12-3, TRAJ7)
CAMTPYGNNRLAF

SEQ ID NO: 416330 - protein, 16 aa, Homo sapiens
  CDR3 for beta chain variable domain of TCR clone 208165 (TRBV20-1, TRBJ1-4)
SAVLDLTGELNEKLFF

SEQ ID NO: 416331 - protein, 16 aa, Homo sapiens
  CDR3 for alpha chain variable domain of TCR clone 208166 (TRAV14/DV4, TRAJ20)
CAMREGRSRDDYKRSF

SEQ ID NO: 416332 - protein, 19 aa, Homo sapiens
  CDR3 for beta chain variable domain of TCR clone 208166 (TRBV25-1, TRBJ2-2)
CAILVYRVDRGRKTGELFF

SEQ ID NO: 416333 - protein, 14 aa, Homo sapiens
  CDR3 for alpha chain variable domain of TCR clone 208167 (TRAV38-2/DV8, TRAJ58)
CAYRSAPSGSRLTF

SEQ ID NO: 416334 - protein, 15 aa, Homo sapiens
  CDR3 for beta chain variable domain of TCR clone 208167 (TRBV20-1, TRBJ2-1)
CSASSAGSSYNEQFF

SEQ ID NO: 416335 - protein, 15 aa, Homo sapiens
  CDR3 for alpha chain variable domain of TCR clone 208168 (TRAV5, TRAJ33)
CAEAPAMDSNYQLIW

SEQ ID NO: 416336 - protein, 15 aa, Homo sapiens
  CDR3 for beta chain variable domain of TCR clone 208168 (TRBV2, TRBJ2-1)
CASSETGGNYNEQFF

SEQ ID NO: 416337 - protein, 18 aa, Homo sapiens
  CDR3 for alpha chain variable domain of TCR clone 208169 (TRAV21, TRAJ52)
CAVRPSPAGGTSYGKLTF

SEQ ID NO: 416338 - protein, 17 aa, Homo sapiens
  CDR3 for beta chain variable domain of TCR clone 208169 (TRBV19, TRBJ2-2)
CASSIGTGGANTGELFF

SEQ ID NO: 416339 - protein, 16 aa, Homo sapiens
  CDR3 for alpha chain variable domain of TCR clone 208170 (TRAV12-2, TRAJ50)
CAVGTATKTSYDKVIF

SEQ ID NO: 416340 - protein, 16 aa, Homo sapiens
  CDR3 for beta chain variable domain of TCR clone 208170 (TRBV12-5, TRBJ2-5)
CASGPRTSGNQETQYF

SEQ ID NO: 416341 - protein, 15 aa, Homo sapiens
  CDR3 for alpha chain variable domain of TCR clone 208171 (TRAV12-1, TRAJ44)
CVADLPTGTASKLTF

SEQ ID NO: 416342 - protein, 16 aa, Homo sapiens
  CDR3 for beta chain variable domain of TCR clone 208171 (TRBV20-1, TRBJ2-1)
CSALTWTSGSYNEQFF

SEQ ID NO: 416343 - protein, 11 aa, Homo sapiens
  CDR3 for alpha chain variable domain of TCR clone 208172 (TRAV13-1, TRAJ6)
CATLGSYIPTF

SEQ ID NO: 416344 - protein, 12 aa, Homo sapiens
  CDR3 for beta chain variable domain of TCR clone 208172 (TRBV11-2, TRBJ2-1)
CASSPVNNEQFF

SEQ ID NO: 416345 - protein, 12 aa, Homo sapiens
  CDR3 for alpha chain variable domain of TCR clone 208173 (TRAV9-2, TRAJ20)
CALSEGDYKLSF

SEQ ID NO: 416346 - protein, 13 aa, Homo sapiens
  CDR3 for beta chain variable domain of TCR clone 208173 (TRBV11-2, TRBJ1-6)
CASSVAGVSPLHF

SEQ ID NO: 416347 - protein, 15 aa, Homo sapiens
  CDR3 for alpha chain variable domain of TCR clone 208174 (TRAV23/DV6, TRAJ18)
CAARYRGSTLGRLYF

SEQ ID NO: 416348 - protein, 15 aa, Homo sapiens
  CDR3 for beta chain variable domain of TCR clone 208174 (TRBV7-2, TRBJ1-5)
CASSQGHQPNQPQHF

SEQ ID NO: 416349 - protein, 14 aa, Homo sapiens
  CDR3 for alpha chain variable domain of TCR clone 208175 (TRAV13-2, TRAJ34)
CAENLGERTDKLIF

SEQ ID NO: 416350 - protein, 13 aa, Homo sapiens
  CDR3 for beta chain variable domain of TCR clone 208175 (TRBV12-5, TRBJ1-1)
CASGLVQGPEAFF

SEQ ID NO: 416351 - protein, 14 aa, Homo sapiens
  CDR3 for alpha chain variable domain of TCR clone 208176 (TRAV2, TRAJ9)
CAVDPNTGGFKTIF

SEQ ID NO: 416352 - protein, 19 aa, Homo sapiens
  CDR3 for beta chain variable domain of TCR clone 208176 (TRBV19, TRBJ2-5)
CASSIGQVTDFFLGETQYF

SEQ ID NO: 416353 - protein, 11 aa, Homo sapiens
  CDR3 for alpha chain variable domain of TCR clone 208177 (TRAV13-1, TRAJ20)
CAASNDYKLSF

SEQ ID NO: 416354 - protein, 15 aa, Homo sapiens
  CDR3 for beta chain variable domain of TCR clone 208177 (TRBV3-1, TRBJ2-7)
CASSQVRQGAYEQYF

SEQ ID NO: 416355 - protein, 14 aa, Homo sapiens
  CDR3 for alpha chain variable domain of TCR clone 208178 (TRAV1-2, TRAJ8)
CAVREDTGFRKLVF

SEQ ID NO: 416356 - protein, 14 aa, Homo sapiens
  CDR3 for beta chain variable domain of TCR clone 208178 (TRBV19, TRBJ2-5)
CASSMTGQQETQYF

SEQ ID NO: 416357 - protein, 12 aa, Homo sapiens
  CDR3 for alpha chain variable domain of TCR clone 208179 (TRAV13-2, TRAJ23)
CAERHRGGKLIF

SEQ ID NO: 416358 - protein, 15 aa, Homo sapiens
  CDR3 for beta chain variable domain of TCR clone 208179 (TRBV10-2, TRBJ2-6)
CASSEQGTGANVLTF

SEQ ID NO: 416359 - protein, 11 aa, Homo sapiens
  CDR3 for alpha chain variable domain of TCR clone 208180 (TRAV12-2, TRAJ29)
CAVTLRSPLVF

SEQ ID NO: 416360 - protein, 16 aa, Homo sapiens
  CDR3 for beta chain variable domain of TCR clone 208180 (TRBV19, TRBJ1-5)
CASSIERGGPRQPQHL

SEQ ID NO: 416361 - protein, 14 aa, Homo sapiens
  CDR3 for alpha chain variable domain of TCR clone 208181 (TRAV1-2, TRAJ16)
CAVNRFSDGQKVLF

SEQ ID NO: 416362 - protein, 13 aa, Homo sapiens
  CDR3 for beta chain variable domain of TCR clone 208181 (TRBV7-9, TRBJ1-2)
CASSLKQNYGYTF

SEQ ID NO: 416363 - protein, 15 aa, Homo sapiens
  CDR3 for alpha chain variable domain of TCR clone 208182 (TRAV1-2, TRAJ38)
CAVSENAGNNRKLIW

SEQ ID NO: 416364 - protein, 13 aa, Homo sapiens
  CDR3 for beta chain variable domain of TCR clone 208182 (TRBV12-4, TRBJ2-5)
CASRLAVQETQYF

SEQ ID NO: 416365 - protein, 13 aa, Homo sapiens
  CDR3 for alpha chain variable domain of TCR clone 208183 (TRAV21, TRAJ57)
CAVTQGGSEKLVF

SEQ ID NO: 416366 - protein, 16 aa, Homo sapiens
  CDR3 for beta chain variable domain of TCR clone 208183 (TRBV20-1, TRBJ1-4)
CSAPGQGLLTNEKLFF

SEQ ID NO: 416367 - protein, 13 aa, Homo sapiens
  CDR3 for alpha chain variable domain of TCR clone 208184 (TRAV13-1, TRAJ21)
CAASIYNFNKFYF

SEQ ID NO: 416368 - protein, 17 aa, Homo sapiens
  CDR3 for beta chain variable domain of TCR clone 208184 (TRBV20-1, TRBJ2-1)
CSASSSRLAGSYNEQFF

SEQ ID NO: 416369 - protein, 11 aa, Homo sapiens
  CDR3 for alpha chain variable domain of TCR clone 208185 (TRAV1-2, TRAJ20)
CAVSNDYKLSF

SEQ ID NO: 416370 - protein, 13 aa, Homo sapiens
  CDR3 for beta chain variable domain of TCR clone 208185 (TRBV19, TRBJ2-7)
CASSPRQSYEQYF

SEQ ID NO: 416371 - protein, 14 aa, Homo sapiens
  CDR3 for alpha chain variable domain of TCR clone 208186 (TRAV12-3, TRAJ10)
SHLPLTGGGNKLTF

SEQ ID NO: 416372 - protein, 13 aa, Homo sapiens
  CDR3 for beta chain variable domain of TCR clone 208186 (TRBV28, TRBJ2-7)
CASSPSGTYEQYF

SEQ ID NO: 416373 - protein, 10 aa, Homo sapiens
  CDR3 for alpha chain variable domain of TCR clone 208187 (TRAV2, TRAJ15)
RGQAGTALIF

SEQ ID NO: 416374 - protein, 14 aa, Homo sapiens
  CDR3 for beta chain variable domain of TCR clone 208187 (TRBV7-6, TRBJ2-3)
CASSLGTVTDTQYF

SEQ ID NO: 416375 - protein, 14 aa, Homo sapiens
  CDR3 for alpha chain variable domain of TCR clone 208188 (TRAV13-1, TRAJ48)
CAASTDFGNEKLTF

SEQ ID NO: 416376 - protein, 15 aa, Homo sapiens
  CDR3 for beta chain variable domain of TCR clone 208188 (TRBV10-2, TRBJ2-5)
CASKPEDRRQETQFF

SEQ ID NO: 416377 - protein, 16 aa, Homo sapiens
  CDR3 for alpha chain variable domain of TCR clone 208189 (TRAV3, TRAJ10)
CAVRDMRAGGGNKLTF

SEQ ID NO: 416378 - protein, 13 aa, Homo sapiens
  CDR3 for beta chain variable domain of TCR clone 208189 (TRBV7-3, TRBJ2-1)
CASSLWPYNEQFF

SEQ ID NO: 416379 - protein, 13 aa, Homo sapiens
  CDR3 for alpha chain variable domain of TCR clone 208190 (TRAV8-3, TRAJ28)
CTVGAVGSYQLTF

SEQ ID NO: 416380 - protein, 14 aa, Homo sapiens
  CDR3 for beta chain variable domain of TCR clone 208190 (TRBV7-2, TRBJ2-7)
CASRSQGAAYEQYL

SEQ ID NO: 416381 - protein, 17 aa, Homo sapiens
  CDR3 for alpha chain variable domain of TCR clone 208191 (TRAV3, TRAJ6)
CAVRDGPRAGGSYIPTS

SEQ ID NO: 416382 - protein, 14 aa, Homo sapiens
  CDR3 for beta chain variable domain of TCR clone 208191 (TRBV27, TRBJ2-2)
CASRPGVNTGELFF

SEQ ID NO: 416383 - protein, 14 aa, Homo sapiens
  CDR3 for alpha chain variable domain of TCR clone 208192 (TRAV3, TRAJ20)
CCERLPFYDYKLSF

SEQ ID NO: 416384 - protein, 14 aa, Homo sapiens
  CDR3 for beta chain variable domain of TCR clone 208192 (TRBV20-1, TRBJ2-7)
CSARRGNGIYEQYF

SEQ ID NO: 416385 - protein, 16 aa, Homo sapiens
  CDR3 for alpha chain variable domain of TCR clone 208193 (TRAV17, TRAJ53)
CATDGGSGGSNYKLTF

SEQ ID NO: 416386 - protein, 14 aa, Homo sapiens
  CDR3 for beta chain variable domain of TCR clone 208193 (TRBV6-1, TRBJ2-2)
CASRGLAYTGELFF

SEQ ID NO: 416387 - protein, 13 aa, Homo sapiens
  CDR3 for alpha chain variable domain of TCR clone 208194 (TRAV13-1, TRAJ5)
CAASDTGRRALTF

SEQ ID NO: 416388 - protein, 15 aa, Homo sapiens
  CDR3 for beta chain variable domain of TCR clone 208194 (TRBV28, TRBJ2-5)
CASSSGRTIQETQYF

SEQ ID NO: 416389 - protein, 14 aa, Homo sapiens
  CDR3 for alpha chain variable domain of TCR clone 208195 (TRAV8-3, TRAJ42)
CAVGAWGSQGNLIL

SEQ ID NO: 416390 - protein, 14 aa, Homo sapiens
  CDR3 for beta chain variable domain of TCR clone 208195 (TRBV19, TRBJ2-1)
CASPTFVLSGEQFF

SEQ ID NO: 416391 - protein, 12 aa, Homo sapiens
  CDR3 for alpha chain variable domain of TCR clone 208196 (TRAV21, TRAJ31)
CVLAGNNARLMF

SEQ ID NO: 416392 - protein, 17 aa, Homo sapiens
  CDR3 for beta chain variable domain of TCR clone 208196 (TRBV7-8, TRBJ2-6)
CASSAGTGGAGANVLTF

SEQ ID NO: 416393 - protein, 14 aa, Homo sapiens
  CDR3 for alpha chain variable domain of TCR clone 208197 (TRAV13-2, TRAJ42)
CGEWGGGSQGNLIF

SEQ ID NO: 416394 - protein, 14 aa, Homo sapiens
  CDR3 for beta chain variable domain of TCR clone 208197 (TRBV11-2, TRBJ1-5)
CASSSRTGNQPQHF

SEQ ID NO: 416395 - protein, 13 aa, Homo sapiens
  CDR3 for alpha chain variable domain of TCR clone 208198 (TRAV26-1, TRAJ36)
CIAVRRGANNLFF

SEQ ID NO: 416396 - protein, 19 aa, Homo sapiens
  CDR3 for beta chain variable domain of TCR clone 208198 (TRBV27, TRBJ2-1)
CTSSLEILSPGAAGNEQFF

SEQ ID NO: 416397 - protein, 12 aa, Homo sapiens
  CDR3 for alpha chain variable domain of TCR clone 208199 (TRAV16, TRAJ15)
FALKPGRNCSDL

SEQ ID NO: 416398 - protein, 13 aa, Homo sapiens
  CDR3 for beta chain variable domain of TCR clone 208199 (TRBV7-9, TRBJ1-2)
CASSLKQNYGYTF

SEQ ID NO: 416399 - protein, 20 aa, Homo sapiens
  CDR3 for alpha chain variable domain of TCR clone 208200 (TRAV1-1, TRAJ4)
CLLLLRCEGFLSGGYNKLIF

SEQ ID NO: 416400 - protein, 20 aa, Homo sapiens
  CDR3 for beta chain variable domain of TCR clone 208200 (TRBV7-8, TRBJ2-2)
CASSHLFPGPTIHITGELFF

SEQ ID NO: 416401 - protein, 13 aa, Homo sapiens
  CDR3 for alpha chain variable domain of TCR clone 208201 (TRAV27, TRAJ8)
CAGGPTGFQKLVF

SEQ ID NO: 416402 - protein, 12 aa, Homo sapiens
  CDR3 for beta chain variable domain of TCR clone 208201 (TRBV28, TRBJ2-3)
CASSLYRDTQYF

SEQ ID NO: 416403 - protein, 13 aa, Homo sapiens
  CDR3 for alpha chain variable domain of TCR clone 208202 (TRAV12-1, TRAJ26)
CVVRRNYGQNFVF

SEQ ID NO: 416404 - protein, 16 aa, Homo sapiens
  CDR3 for beta chain variable domain of TCR clone 208202 (TRBV15, TRBJ2-3)
CATRLSGGRAPDTQYF

SEQ ID NO: 416405 - protein, 12 aa, Homo sapiens
  CDR3 for alpha chain variable domain of TCR clone 208203 (TRAV13-1, TRAJ15)
CAASQAGTALIF

SEQ ID NO: 416406 - protein, 14 aa, Homo sapiens
  CDR3 for beta chain variable domain of TCR clone 208203 (TRBV19, TRBJ2-1)
CASPTFVLSGEQFV

SEQ ID NO: 416407 - protein, 16 aa, Homo sapiens
  CDR3 for alpha chain variable domain of TCR clone 208204 (TRAV4, TRAJ22)
CLVGDLYSGSARQLTF

SEQ ID NO: 416408 - protein, 15 aa, Homo sapiens
  CDR3 for beta chain variable domain of TCR clone 208204 (TRBV18, TRBJ2-1)
CASSPPSASYNEQFF

SEQ ID NO: 416409 - protein, 15 aa, Homo sapiens
  CDR3 for alpha chain variable domain of TCR clone 208205 (TRAV17, TRAJ23)
CAPDAEHNQGGKLIF

SEQ ID NO: 416410 - protein, 12 aa, Homo sapiens
  CDR3 for beta chain variable domain of TCR clone 208205 (TRBV2, TRBJ2-1)
CAKREGYNEQFF

SEQ ID NO: 416411 - protein, 17 aa, Homo sapiens
  CDR3 for alpha chain variable domain of TCR clone 208206 (TRAV26-1, TRAJ27)
CIVSTPWINTNAGKSTF

SEQ ID NO: 416412 - protein, 16 aa, Homo sapiens
  CDR3 for beta chain variable domain of TCR clone 208206 (TRBV7-9, TRBJ2-1)
CASSLDPGLASDEQFF

SEQ ID NO: 416413 - protein, 11 aa, Homo sapiens
  CDR3 for alpha chain variable domain of TCR clone 208207 (TRAV3, TRAJ21)
RAVGNFNKFYF

SEQ ID NO: 416414 - protein, 16 aa, Homo sapiens
  CDR3 for beta chain variable domain of TCR clone 208207 (TRBV19, TRBJ2-1)
CASSRAGPSSYNEQFF

SEQ ID NO: 416415 - protein, 13 aa, Homo sapiens
  CDR3 for alpha chain variable domain of TCR clone 208208 (TRAV12-2, TRAJ4)
CAGFSGGYNKLIF

SEQ ID NO: 416416 - protein, 17 aa, Homo sapiens
  CDR3 for beta chain variable domain of TCR clone 208208 (TRBV13, TRBJ2-3)
CASSLSRVAGGRNTQYF

SEQ ID NO: 416417 - protein, 15 aa, Homo sapiens
  CDR3 for alpha chain variable domain of TCR clone 208209 (TRAV21, TRAJ53)
CATLNRGGSNYKLTF

SEQ ID NO: 416418 - protein, 18 aa, Homo sapiens
  CDR3 for beta chain variable domain of TCR clone 208209 (TRBV7-2, TRBJ2-2)
CASSLASRGAGGPGELFF

SEQ ID NO: 416419 - protein, 14 aa, Homo sapiens
  CDR3 for alpha chain variable domain of TCR clone 208210 (TRAV1-2, TRAJ16)
CAVNRFSAGQKLLF

SEQ ID NO: 416420 - protein, 14 aa, Homo sapiens
  CDR3 for beta chain variable domain of TCR clone 208210 (TRBV19, TRBJ2-1)
CARGARSFQWEQFF

SEQ ID NO: 416421 - protein, 12 aa, Homo sapiens
  CDR3 for alpha chain variable domain of TCR clone 208211 (TRAV2, TRAJ26)
CAGSPGRLWSEF

SEQ ID NO: 416422 - protein, 13 aa, Homo sapiens
  CDR3 for beta chain variable domain of TCR clone 208211 (TRBV7-9, TRBJ1-2)
CASSVKQNYGYTF

SEQ ID NO: 416423 - protein, 11 aa, Homo sapiens
  CDR3 for alpha chain variable domain of TCR clone 208212 (TRAV8-3, TRAJ20)
CAVAQENKLSF

SEQ ID NO: 416424 - protein, 13 aa, Homo sapiens
  CDR3 for beta chain variable domain of TCR clone 208212 (TRBV11-2, TRBJ2-5)
CASSRGPSETQYF

SEQ ID NO: 416425 - protein, 17 aa, Homo sapiens
  CDR3 for alpha chain variable domain of TCR clone 208213 (TRAV36/DV7, TRAJ52)
CAVAQRAGGTSYGKPTF

SEQ ID NO: 416426 - protein, 15 aa, Homo sapiens
  CDR3 for beta chain variable domain of TCR clone 208213 (TRBV19, TRBJ2-7)
CASRPTPGLSIEQYF

SEQ ID NO: 416427 - protein, 14 aa, Homo sapiens
  CDR3 for alpha chain variable domain of TCR clone 208214 (TRAV12-2, TRAJ3)
CAVKGYSSASKIIF

SEQ ID NO: 416428 - protein, 15 aa, Homo sapiens
  CDR3 for beta chain variable domain of TCR clone 208214 (TRBV20-1, TRBJ2-7)
CSARDRVSGMDEQYF

SEQ ID NO: 416429 - protein, 13 aa, Homo sapiens
  CDR3 for alpha chain variable domain of TCR clone 208215 (TRAV23/DV6, TRAJ21)
CAASIGNFNKFYF

SEQ ID NO: 416430 - protein, 17 aa, Homo sapiens
  CDR3 for beta chain variable domain of TCR clone 208215 (TRBV6-5, TRBJ2-1)
LASRKNPRTGGHNEQFF

SEQ ID NO: 416431 - protein, 16 aa, Homo sapiens
  CDR3 for alpha chain variable domain of TCR clone 208216 (TRAV8-3, TRAJ44)
CAVGTLMTGTASKLTF

SEQ ID NO: 416432 - protein, 15 aa, Homo sapiens
  CDR3 for beta chain variable domain of TCR clone 208216 (TRBV10-2, TRBJ2-6)
CASSEQGTGANDLVF

SEQ ID NO: 416433 - protein, 14 aa, Homo sapiens
  CDR3 for alpha chain variable domain of TCR clone 208217 (TRAV1-2, TRAJ8)
CAVREDTGFQTLVF

SEQ ID NO: 416434 - protein, 15 aa, Homo sapiens
  CDR3 for beta chain variable domain of TCR clone 208217 (TRBV5-7, TRBJ2-3)
CASSPGLATTDTQYF

SEQ ID NO: 416435 - protein, 16 aa, Homo sapiens
  CDR3 for alpha chain variable domain of TCR clone 208218 (TRAV27, TRAJ37)
CVLLSVGSGNTGKLIF

SEQ ID NO: 416436 - protein, 16 aa, Homo sapiens
  CDR3 for beta chain variable domain of TCR clone 208218 (TRBV7-3, TRBJ2-2)
CASSLKRGTLSGELFF

SEQ ID NO: 416437 - protein, 14 aa, Homo sapiens
  CDR3 for alpha chain variable domain of TCR clone 208219 (TRAV23/DV6, TRAJ17)
CAARGRAAGNKQTF

SEQ ID NO: 416438 - protein, 12 aa, Homo sapiens
  CDR3 for beta chain variable domain of TCR clone 208219 (TRBV7-9, TRBJ2-3)
CASSFITDTQYF

SEQ ID NO: 416439 - protein, 15 aa, Homo sapiens
  CDR3 for alpha chain variable domain of TCR clone 208220 (TRAV12-2, TRAJ43)
CAFNMRFGAGTRLTV

SEQ ID NO: 416440 - protein, 13 aa, Homo sapiens
  CDR3 for beta chain variable domain of TCR clone 208220 (TRBV19, TRBJ1-2)
CASSPGTGVGYTF

SEQ ID NO: 416441 - protein, 18 aa, Homo sapiens
  CDR3 for alpha chain variable domain of TCR clone 208221 (TRAV3, TRAJ32)
CAVRDIRGYGGATNKLIF

SEQ ID NO: 416442 - protein, 15 aa, Homo sapiens
  CDR3 for beta chain variable domain of TCR clone 208221 (TRBV2, TRBJ2-5)
CASTRDGGPQETQYF

SEQ ID NO: 416443 - protein, 13 aa, Homo sapiens
  CDR3 for alpha chain variable domain of TCR clone 208222 (TRAV3, TRAJ3)
CSVADSSASKIIF

SEQ ID NO: 416444 - protein, 12 aa, Homo sapiens
  CDR3 for beta chain variable domain of TCR clone 208222 (TRBV7-8, TRBJ2-7)
CASEGGPHGQYF

SEQ ID NO: 416445 - protein, 14 aa, Homo sapiens
  CDR3 for alpha chain variable domain of TCR clone 208223 (TRAV1-1, TRAJ28)
CAAPSGAGSYQLTF

SEQ ID NO: 416446 - protein, 17 aa, Homo sapiens
  CDR3 for beta chain variable domain of TCR clone 208223 (TRBV4-3, TRBJ1-2)
CASSSRLQAGGSVGYTF

SEQ ID NO: 416447 - protein, 10 aa, Homo sapiens
  CDR3 for alpha chain variable domain of TCR clone 208224 (TRAV36/DV7, TRAJ31)
CAVGEARLMF

SEQ ID NO: 416448 - protein, 17 aa, Homo sapiens
  CDR3 for beta chain variable domain of TCR clone 208224 (TRBV7-6, TRBJ2-5)
CASSLGSGRSGSETQYF

SEQ ID NO: 416449 - protein, 21 aa, Homo sapiens
  CDR3 for alpha chain variable domain of TCR clone 208225 (TRAV1-1, TRAJ6)
CLLLLRCERLERTGGSYIPTF

SEQ ID NO: 416450 - protein, 13 aa, Homo sapiens
  CDR3 for beta chain variable domain of TCR clone 208225 (TRBV10-2, TRBJ2-7)
CVSGASGGYEQYF

SEQ ID NO: 416451 - protein, 14 aa, Homo sapiens
  CDR3 for alpha chain variable domain of TCR clone 208226 (TRAV8-3, TRAJ4)
CAVGAAGGYNKLIF

SEQ ID NO: 416452 - protein, 16 aa, Homo sapiens
  CDR3 for beta chain variable domain of TCR clone 208226 (TRBV2, TRBJ1-5)
CASSAPGLEGAQPQHF

SEQ ID NO: 416453 - protein, 14 aa, Homo sapiens
  CDR3 for alpha chain variable domain of TCR clone 208227 (TRAV3, TRAJ28)
CAVRRGAGSYQLPF

SEQ ID NO: 416454 - protein, 16 aa, Homo sapiens
  CDR3 for beta chain variable domain of TCR clone 208227 (TRBV4-1, TRBJ2-7)
CASSQEWTSGPLEQYF

SEQ ID NO: 416455 - protein, 14 aa, Homo sapiens
  CDR3 for alpha chain variable domain of TCR clone 208228 (TRAV3, TRAJ33)
CAGRDMGSNYQLIW

SEQ ID NO: 416456 - protein, 17 aa, Homo sapiens
  CDR3 for beta chain variable domain of TCR clone 208228 (TRBV19, TRBJ2-1)
CAGSIWSAQPTHNEQFF

SEQ ID NO: 416457 - protein, 16 aa, Homo sapiens
  CDR3 for alpha chain variable domain of TCR clone 208229 (TRAV21, TRAJ52)
CAVTNAGGTSYGKLTF

SEQ ID NO: 416458 - protein, 15 aa, Homo sapiens
  CDR3 for beta chain variable domain of TCR clone 208229 (TRBV20-1, TRBJ1-1)
CSASRGVTGNTEAFF

SEQ ID NO: 416459 - protein, 12 aa, Homo sapiens
  CDR3 for alpha chain variable domain of TCR clone 208230 (TRAV13-2, TRAJ23)
CAERHRGGKLIF

SEQ ID NO: 416460 - protein, 16 aa, Homo sapiens
  CDR3 for beta chain variable domain of TCR clone 208230 (TRBV7-3, TRBJ2-1)
CASSLSSGGGAKEQFF

SEQ ID NO: 416461 - protein, 13 aa, Homo sapiens
  CDR3 for alpha chain variable domain of TCR clone 208231 (TRAV13-2, TRAJ57)
CREFSGGSEKLVF

SEQ ID NO: 416462 - protein, 15 aa, Homo sapiens
  CDR3 for beta chain variable domain of TCR clone 208231 (TRBV28, TRBJ2-1)
CASSIIAGGRSEQFF

SEQ ID NO: 416463 - protein, 12 aa, Homo sapiens
  CDR3 for alpha chain variable domain of TCR clone 208232 (TRAV12-3, TRAJ17)
CAMTLTGNKLTF

SEQ ID NO: 416464 - protein, 15 aa, Homo sapiens
  CDR3 for beta chain variable domain of TCR clone 208232 (TRBV20-1, TRBJ2-7)
CSARDRGSGMDEQFF

SEQ ID NO: 416465 - protein, 13 aa, Homo sapiens
  CDR3 for alpha chain variable domain of TCR clone 208233 (TRAV35, TRAJ33)
CAGRHDSNYQLIW

SEQ ID NO: 416466 - protein, 19 aa, Homo sapiens
  CDR3 for beta chain variable domain of TCR clone 208233 (TRBV6-3, TRBJ2-1)
CASSYSWTSGRATYNERFF

SEQ ID NO: 416467 - protein, 12 aa, Homo sapiens
  CDR3 for alpha chain variable domain of TCR clone 208234 (TRAV27, TRAJ35)
CAGADFGNVLHC

SEQ ID NO: 416468 - protein, 16 aa, Homo sapiens
  CDR3 for beta chain variable domain of TCR clone 208234 (TRBV6-1, TRBJ2-1)
CPSILRQGSSYNEQFF

SEQ ID NO: 416469 - protein, 14 aa, Homo sapiens
  CDR3 for alpha chain variable domain of TCR clone 208235 (TRAV12-2, TRAJ13)
CAVKKTGGYQKVTF

SEQ ID NO: 416470 - protein, 15 aa, Homo sapiens
  CDR3 for beta chain variable domain of TCR clone 208235 (TRBV28, TRBJ2-5)
CAISPPWSYQETQYF

SEQ ID NO: 416471 - protein, 14 aa, Homo sapiens
  CDR3 for alpha chain variable domain of TCR clone 208236 (TRAV12-3, TRAJ33)
CAMSVPGSNYQLIW

SEQ ID NO: 416472 - protein, 15 aa, Homo sapiens
  CDR3 for beta chain variable domain of TCR clone 208236 (TRBV27, TRBJ1-6)
CASSFDRGLGSPLHF

SEQ ID NO: 416473 - protein, 13 aa, Homo sapiens
  CDR3 for alpha chain variable domain of TCR clone 208237 (TRAV12-3, TRAJ8)
CAMEKTGFQKLVF

SEQ ID NO: 416474 - protein, 11 aa, Homo sapiens
  CDR3 for beta chain variable domain of TCR clone 208237 (TRBV29-1, TRBJ2-5)
CSEDRTGTQYF

SEQ ID NO: 416475 - protein, 16 aa, Homo sapiens
  CDR3 for alpha chain variable domain of TCR clone 208238 (TRAV3, TRAJ21)
CAVRDIERGNFNKFYF

SEQ ID NO: 416476 - protein, 13 aa, Homo sapiens
  CDR3 for beta chain variable domain of TCR clone 208238 (TRBV7-9, TRBJ2-7)
CASSFAGAYEQYF

SEQ ID NO: 416477 - protein, 18 aa, Homo sapiens
  CDR3 for alpha chain variable domain of TCR clone 208239 (TRAV26-2, TRAJ54)
RILRDVEVGIQGAQKLVF

SEQ ID NO: 416478 - protein, 17 aa, Homo sapiens
  CDR3 for beta chain variable domain of TCR clone 208239 (TRBV20-1, TRBJ1-5)
CSASLSPGQGGNQPQHF

SEQ ID NO: 416479 - protein, 13 aa, Homo sapiens
  CDR3 for alpha chain variable domain of TCR clone 208240 (TRAV2, TRAJ15)
CAVASQAGTALIF

SEQ ID NO: 416480 - protein, 15 aa, Homo sapiens
  CDR3 for beta chain variable domain of TCR clone 208240 (TRBV27, TRBJ2-1)
CASSSGGGSSNEQFF

SEQ ID NO: 416481 - protein, 14 aa, Homo sapiens
  CDR3 for alpha chain variable domain of TCR clone 208241 (TRAV8-4, TRAJ9)
CAVGINTGGFKTFF

SEQ ID NO: 416482 - protein, 15 aa, Homo sapiens
  CDR3 for beta chain variable domain of TCR clone 208241 (TRBV10-2, TRBJ2-6)
CASSEQGTGANVLTF

SEQ ID NO: 416483 - protein, 13 aa, Homo sapiens
  CDR3 for alpha chain variable domain of TCR clone 208242 (TRAV2, TRAJ11)
CAVEVIGYSTLTF

SEQ ID NO: 416484 - protein, 17 aa, Homo sapiens
  CDR3 for beta chain variable domain of TCR clone 208242 (TRBV7-2, TRBJ2-1)
CASSRGTSGAVGWEQFF

SEQ ID NO: 416485 - protein, 14 aa, Homo sapiens
  CDR3 for alpha chain variable domain of TCR clone 208243 (TRAV8-1, TRAJ5)
CDVRTDTGRRALTF

SEQ ID NO: 416486 - protein, 12 aa, Homo sapiens
  CDR3 for beta chain variable domain of TCR clone 208243 (TRBV11-2, TRBJ2-1)
CASSPGNNEQFF

SEQ ID NO: 416487 - protein, 18 aa, Homo sapiens
  CDR3 for alpha chain variable domain of TCR clone 208244 (TRAV26-1, TRAJ37)
CIVRVDMHGSSKTGKLIF

SEQ ID NO: 416488 - protein, 15 aa, Homo sapiens
  CDR3 for beta chain variable domain of TCR clone 208244 (TRBV20-1, TRBJ2-7)
CSARVLASPLYEQYF

SEQ ID NO: 416489 - protein, 17 aa, Homo sapiens
  CDR3 for alpha chain variable domain of TCR clone 208245 (TRAV3, TRAJ6)
CAVRDGPRAGGSYVPTF

SEQ ID NO: 416490 - protein, 16 aa, Homo sapiens
  CDR3 for beta chain variable domain of TCR clone 208245 (TRBV7-8, TRBJ2-3)
CASSTEGQRETDTQYF

SEQ ID NO: 416491 - protein, 13 aa, Homo sapiens
  CDR3 for alpha chain variable domain of TCR clone 208246 (TRAV2, TRAJ40)
CAVVTSGTYKYVF

SEQ ID NO: 416492 - protein, 14 aa, Homo sapiens
  CDR3 for beta chain variable domain of TCR clone 208246 (TRBV19, TRBJ2-1)
CASPTFGLSGEQFF

SEQ ID NO: 416493 - protein, 11 aa, Homo sapiens
  CDR3 for alpha chain variable domain of TCR clone 208247 (TRAV25, TRAJ53)
CAGGSNYKLTF

SEQ ID NO: 416494 - protein, 11 aa, Homo sapiens
  CDR3 for beta chain variable domain of TCR clone 208247 (TRBV5-6, TRBJ1-1)
CAGSGGTEAFF

SEQ ID NO: 416495 - protein, 15 aa, Homo sapiens
  CDR3 for alpha chain variable domain of TCR clone 208248 (TRAV8-4, TRAJ36)
CAVRKSWTGANNLFF

SEQ ID NO: 416496 - protein, 14 aa, Homo sapiens
  CDR3 for beta chain variable domain of TCR clone 208248 (TRBV6-1, TRBJ1-3)
CASVQGGGGNTIYF

SEQ ID NO: 416497 - protein, 17 aa, Homo sapiens
  CDR3 for alpha chain variable domain of TCR clone 208249 (TRAV3, TRAJ42)
CAVRDRAYGGSQGNRIF

SEQ ID NO: 416498 - protein, 13 aa, Homo sapiens
  CDR3 for beta chain variable domain of TCR clone 208249 (TRBV10-3, TRBJ2-7)
CASKLPVNYEHYF

SEQ ID NO: 416499 - protein, 14 aa, Homo sapiens
  CDR3 for alpha chain variable domain of TCR clone 208250 (TRAV12-2, TRAJ40)
CAVKITSGTYKYIF

SEQ ID NO: 416500 - protein, 15 aa, Homo sapiens
  CDR3 for beta chain variable domain of TCR clone 208250 (TRBV20-1, TRBJ1-4)
CSARREWGVNEKLFF

SEQ ID NO: 416501 - protein, 15 aa, Homo sapiens
  CDR3 for alpha chain variable domain of TCR clone 208251 (TRAV12-3, TRAJ27)
CAMRAYNTNAGNSTF

SEQ ID NO: 416502 - protein, 13 aa, Homo sapiens
  CDR3 for beta chain variable domain of TCR clone 208251 (TRBV11-2, TRBJ2-5)
CASSRGPSETQYF

SEQ ID NO: 416503 - protein, 14 aa, Homo sapiens
  CDR3 for alpha chain variable domain of TCR clone 208252 (TRAV1-2, TRAJ16)
CAVNRFSDGQKLLF

SEQ ID NO: 416504 - protein, 16 aa, Homo sapiens
  CDR3 for beta chain variable domain of TCR clone 208252 (TRBV13, TRBJ2-3)
GQQPLQGSGGRNTQYF

SEQ ID NO: 416505 - protein, 14 aa, Homo sapiens
  CDR3 for alpha chain variable domain of TCR clone 208253 (TRAV8-3, TRAJ9)
CAVVYNTGGFKTIF

SEQ ID NO: 416506 - protein, 16 aa, Homo sapiens
  CDR3 for beta chain variable domain of TCR clone 208253 (TRBV7-3, TRBJ2-5)
CASSSKWLSGQETQYF

SEQ ID NO: 416507 - protein, 12 aa, Homo sapiens
  CDR3 for alpha chain variable domain of TCR clone 208254 (TRAV12-3, TRAJ17)
CAMTLTGNKLTF

SEQ ID NO: 416508 - protein, 13 aa, Homo sapiens
  CDR3 for beta chain variable domain of TCR clone 208254 (TRBV10-3, TRBJ1-1)
CAIIPEGGTEAFF

SEQ ID NO: 416509 - protein, 13 aa, Homo sapiens
  CDR3 for alpha chain variable domain of TCR clone 208255 (TRAV3, TRAJ27)
CAVRPLGAGQSTS

SEQ ID NO: 416510 - protein, 13 aa, Homo sapiens
  CDR3 for beta chain variable domain of TCR clone 208255 (TRBV7-9, TRBJ2-3)
CASSPGSTDTQYF

SEQ ID NO: 416511 - protein, 17 aa, Homo sapiens
  CDR3 for alpha chain variable domain of TCR clone 208256 (TRAV13-1, TRAJ53)
CAASWKSSGGSNYKLTF

SEQ ID NO: 416512 - protein, 19 aa, Homo sapiens
  CDR3 for beta chain variable domain of TCR clone 208256 (TRBV7-9, TRBJ2-1)
CASSHNRGALLRSHNEQFF

SEQ ID NO: 416513 - protein, 13 aa, Homo sapiens
  CDR3 for alpha chain variable domain of TCR clone 208257 (TRAV23/DV6, TRAJ27)
GAASKPMQANQPL

SEQ ID NO: 416514 - protein, 14 aa, Homo sapiens
  CDR3 for beta chain variable domain of TCR clone 208257 (TRBV5-4, TRBJ1-1)
CASSLDSRRDEAFF

SEQ ID NO: 416515 - protein, 14 aa, Homo sapiens
  CDR3 for alpha chain variable domain of TCR clone 208258 (TRAV20, TRAJ37)
CAVQEASNTGKLLF

SEQ ID NO: 416516 - protein, 15 aa, Homo sapiens
  CDR3 for beta chain variable domain of TCR clone 208258 (TRBV10-3, TRBJ2-5)
CAISESRDRGETQYF

SEQ ID NO: 416517 - protein, 15 aa, Homo sapiens
  CDR3 for alpha chain variable domain of TCR clone 208259 (TRAV21, TRAJ24)
CAARSSTNSWGKLQF

SEQ ID NO: 416518 - protein, 14 aa, Homo sapiens
  CDR3 for beta chain variable domain of TCR clone 208259 (TRBV11-2, TRBJ2-5)
CASSRTGGIETQYF

SEQ ID NO: 416519 - protein, 17 aa, Homo sapiens
  CDR3 for alpha chain variable domain of TCR clone 208260 (TRAV1-1, TRAJ6)
CAVRDERGQEEATYLHF

SEQ ID NO: 416520 - protein, 13 aa, Homo sapiens
  CDR3 for beta chain variable domain of TCR clone 208260 (TRBV10-2, TRBJ2-7)
CASGASGGYEQYF

SEQ ID NO: 416521 - protein, 15 aa, Homo sapiens
  CDR3 for alpha chain variable domain of TCR clone 208261 (TRAV8-4, TRAJ17)
CAVSRVKAAGNKLTF

SEQ ID NO: 416522 - protein, 14 aa, Homo sapiens
  CDR3 for beta chain variable domain of TCR clone 208261 (TRBV11-2, TRBJ2-5)
CASRPLAGRETQYF

SEQ ID NO: 416523 - protein, 14 aa, Homo sapiens
  CDR3 for alpha chain variable domain of TCR clone 208262 (TRAV23/DV6, TRAJ40)
CAASLTSGTYKYIF

SEQ ID NO: 416524 - protein, 15 aa, Homo sapiens
  CDR3 for beta chain variable domain of TCR clone 208262 (TRBV29-1, TRBJ2-1)
CSVRTSLSSYNEQFF

SEQ ID NO: 416525 - protein, 15 aa, Homo sapiens
  CDR3 for alpha chain variable domain of TCR clone 208263 (TRAV26-1, TRAJ29)
CIVRVEGSGNTPLVF

SEQ ID NO: 416526 - protein, 13 aa, Homo sapiens
  CDR3 for beta chain variable domain of TCR clone 208263 (TRBV6-4, TRBJ1-5)
CASSADLNQPQHF

SEQ ID NO: 416527 - protein, 15 aa, Homo sapiens
  CDR3 for alpha chain variable domain of TCR clone 208264 (TRAV3, TRAJ5)
CAVRDRKTGRRALTF

SEQ ID NO: 416528 - protein, 13 aa, Homo sapiens
  CDR3 for beta chain variable domain of TCR clone 208264 (TRBV11-2, TRBJ2-1)
CASSLDLVNEQFF

SEQ ID NO: 416529 - protein, 17 aa, Homo sapiens
  CDR3 for alpha chain variable domain of TCR clone 208265 (TRAV3, TRAJ42)
CAVRDRDYGGSQGNRIF

SEQ ID NO: 416530 - protein, 15 aa, Homo sapiens
  CDR3 for beta chain variable domain of TCR clone 208265 (TRBV6-5, TRBJ2-1)
CASSYDAGAGNEQFF

SEQ ID NO: 416531 - protein, 14 aa, Homo sapiens
  CDR3 for alpha chain variable domain of TCR clone 208266 (TRAV1-2, TRAJ8)
CAVREDTGFQRLVF

SEQ ID NO: 416532 - protein, 12 aa, Homo sapiens
  CDR3 for beta chain variable domain of TCR clone 208266 (TRBV11-2, TRBJ2-2)
CASSLPTGELFF

SEQ ID NO: 416533 - protein, 15 aa, Homo sapiens
  CDR3 for alpha chain variable domain of TCR clone 208267 (TRAV12-1, TRAJ44)
CVADLPTGTASKLTF

SEQ ID NO: 416534 - protein, 11 aa, Homo sapiens
  CDR3 for beta chain variable domain of TCR clone 208267 (TRBV11-2, TRBJ2-2)
CASSLPGELFF

SEQ ID NO: 416535 - protein, 14 aa, Homo sapiens
  CDR3 for alpha chain variable domain of TCR clone 208268 (TRAV8-1, TRAJ23)
CAVGTYNQGGKLIF

SEQ ID NO: 416536 - protein, 15 aa, Homo sapiens
  CDR3 for beta chain variable domain of TCR clone 208268 (TRBV2, TRBJ2-5)
CASSSSVAGGETQYF

SEQ ID NO: 416537 - protein, 15 aa, Homo sapiens
  CDR3 for alpha chain variable domain of TCR clone 208269 (TRAV23/DV6, TRAJ18)
CAATYRGSTLGRLYF

SEQ ID NO: 416538 - protein, 13 aa, Homo sapiens
  CDR3 for beta chain variable domain of TCR clone 208269 (TRBV7-2, TRBJ2-7)
CASSSPSGSEQYF

SEQ ID NO: 416539 - protein, 13 aa, Homo sapiens
  CDR3 for alpha chain variable domain of TCR clone 208270 (TRAV16, TRAJ34)
CALSRYNTDKLIF

SEQ ID NO: 416540 - protein, 11 aa, Homo sapiens
  CDR3 for beta chain variable domain of TCR clone 208270 (TRBV6-3, TRBJ2-3)
CATGQADTQYF

SEQ ID NO: 416541 - protein, 13 aa, Homo sapiens
  CDR3 for alpha chain variable domain of TCR clone 208271 (TRAV13-1, TRAJ17)
CAADGAAGNKLTF

SEQ ID NO: 416542 - protein, 14 aa, Homo sapiens
  CDR3 for beta chain variable domain of TCR clone 208271 (TRBV11-2, TRBJ1-3)
CASSLRQGRNTIYF

SEQ ID NO: 416543 - protein, 12 aa, Homo sapiens
  CDR3 for alpha chain variable domain of TCR clone 208272 (TRAV16, TRAJ15)
CARWQAGTALIF

SEQ ID NO: 416544 - protein, 15 aa, Homo sapiens
  CDR3 for beta chain variable domain of TCR clone 208272 (TRBV5-1, TRBJ2-1)
CASSPPRAPYNEQFF

SEQ ID NO: 416545 - protein, 10 aa, Homo sapiens
  CDR3 for alpha chain variable domain of TCR clone 208273 (TRAV23/DV6, TRAJ31)
CSRGGARLVF

SEQ ID NO: 416546 - protein, 14 aa, Homo sapiens
  CDR3 for beta chain variable domain of TCR clone 208273 (TRBV7-8, TRBJ1-2)
CASSPDSLSYGYTF

SEQ ID NO: 416547 - protein, 18 aa, Homo sapiens
  CDR3 for alpha chain variable domain of TCR clone 208274 (TRAV21, TRAJ52)
CAVRPSPAGGISYGNLTF

SEQ ID NO: 416548 - protein, 14 aa, Homo sapiens
  CDR3 for beta chain variable domain of TCR clone 208274 (TRBV4-1, TRBJ2-2)
CASSQAVNTGELFF

SEQ ID NO: 416549 - protein, 13 aa, Homo sapiens
  CDR3 for alpha chain variable domain of TCR clone 208275 (TRAV2, TRAJ15)
CAVEAQAGTALIF

SEQ ID NO: 416550 - protein, 14 aa, Homo sapiens
  CDR3 for beta chain variable domain of TCR clone 208275 (TRBV25-1, TRBJ1-1)
CACTHLGGNTEAFF

SEQ ID NO: 416551 - protein, 13 aa, Homo sapiens
  CDR3 for alpha chain variable domain of TCR clone 208276 (TRAV2, TRAJ40)
CAVVTSGTYTYIF

SEQ ID NO: 416552 - protein, 15 aa, Homo sapiens
  CDR3 for beta chain variable domain of TCR clone 208276 (TRBV7-9, TRBJ1-4)
CASSARTGGNEKLFF

SEQ ID NO: 416553 - protein, 11 aa, Homo sapiens
  CDR3 for alpha chain variable domain of TCR clone 208277 (TRAV21, TRAJ48)
CAVDGNEKLTF

SEQ ID NO: 416554 - protein, 14 aa, Homo sapiens
  CDR3 for beta chain variable domain of TCR clone 208277 (TRBV7-9, TRBJ2-3)
CASSLEDGTDTQYF

SEQ ID NO: 416555 - protein, 17 aa, Homo sapiens
  CDR3 for alpha chain variable domain of TCR clone 208278 (TRAV3, TRAJ38)
CAVRDGLNAGNNRKLIW

SEQ ID NO: 416556 - protein, 16 aa, Homo sapiens
  CDR3 for beta chain variable domain of TCR clone 208278 (TRBV20-1, TRBJ1-4)
CSAPGQGLLTNEKLFF

SEQ ID NO: 416557 - protein, 13 aa, Homo sapiens
  CDR3 for alpha chain variable domain of TCR clone 208279 (TRAV12-1, TRAJ16)
CVVNGPDGQKLLF

SEQ ID NO: 416558 - protein, 13 aa, Homo sapiens
  CDR3 for beta chain variable domain of TCR clone 208279 (TRBV2, TRBJ1-1)
CAKNPTGGFHAFF

SEQ ID NO: 416559 - protein, 12 aa, Homo sapiens
  CDR3 for alpha chain variable domain of TCR clone 208280 (TRAV21, TRAJ42)
CAVGGSQGNLIF

SEQ ID NO: 416560 - protein, 14 aa, Homo sapiens
  CDR3 for beta chain variable domain of TCR clone 208280 (TRBV7-2, TRBJ2-5)
CASSPRGSSETQYL

SEQ ID NO: 416561 - protein, 14 aa, Homo sapiens
  CDR3 for alpha chain variable domain of TCR clone 208281 (TRAV9-2, TRAJ39)
CALYIYNAGNMLTF

SEQ ID NO: 416562 - protein, 15 aa, Homo sapiens
  CDR3 for beta chain variable domain of TCR clone 208281 (TRBV4-3, TRBJ2-7)
CASSQGDWGDYEQYF

SEQ ID NO: 416563 - protein, 14 aa, Homo sapiens
  CDR3 for alpha chain variable domain of TCR clone 208282 (TRAV13-1, TRAJ40)
CAASMTSGTYKYIF

SEQ ID NO: 416564 - protein, 14 aa, Homo sapiens
  CDR3 for beta chain variable domain of TCR clone 208282 (TRBV5-4, TRBJ2-2)
CASRLDGGTGELFF

SEQ ID NO: 416565 - protein, 12 aa, Homo sapiens
  CDR3 for alpha chain variable domain of TCR clone 208283 (TRAV2, TRAJ9)
CAVVAGGFTTIF

SEQ ID NO: 416566 - protein, 16 aa, Homo sapiens
  CDR3 for beta chain variable domain of TCR clone 208283 (TRBV13, TRBJ2-2)
CASSPRTGEHTGELFF

SEQ ID NO: 416567 - protein, 16 aa, Homo sapiens
  CDR3 for alpha chain variable domain of TCR clone 208284 (TRAV8-3, TRAJ10)
CAVGPGVTGEGNKPTF

SEQ ID NO: 416568 - protein, 13 aa, Homo sapiens
  CDR3 for beta chain variable domain of TCR clone 208284 (TRBV18, TRBJ1-1)
CASSPGPSGEAFF

SEQ ID NO: 416569 - protein, 15 aa, Homo sapiens
  CDR3 for alpha chain variable domain of TCR clone 208285 (TRAV34, TRAJ38)
CGADFTTGNNRKLIW

SEQ ID NO: 416570 - protein, 12 aa, Homo sapiens
  CDR3 for beta chain variable domain of TCR clone 208285 (TRBV5-1, TRBJ2-7)
CASSFRGYEQYF

SEQ ID NO: 416571 - protein, 12 aa, Homo sapiens
  CDR3 for alpha chain variable domain of TCR clone 208286 (TRAV13-1, TRAJ20)
CAASMGDYKLSF

SEQ ID NO: 416572 - protein, 14 aa, Homo sapiens
  CDR3 for beta chain variable domain of TCR clone 208286 (TRBV20-1, TRBJ2-5)
CSASDSGSGENQYF

SEQ ID NO: 416573 - protein, 17 aa, Homo sapiens
  CDR3 for alpha chain variable domain of TCR clone 208287 (TRAV3, TRAJ6)
FAVRDGPRAGGSYIPTF

SEQ ID NO: 416574 - protein, 14 aa, Homo sapiens
  CDR3 for beta chain variable domain of TCR clone 208287 (TRBV7-2, TRBJ2-7)
CASSPKTSFYEQYF

SEQ ID NO: 416575 - protein, 15 aa, Homo sapiens
  CDR3 for alpha chain variable domain of TCR clone 208288 (TRAV26-1, TRAJ22)
CIVRVSFWFCKATDL

SEQ ID NO: 416576 - protein, 16 aa, Homo sapiens
  CDR3 for beta chain variable domain of TCR clone 208288 (TRBV5-1, TRBJ2-3)
CASSLGLAVYTDTQYF

SEQ ID NO: 416577 - protein, 12 aa, Homo sapiens
  CDR3 for alpha chain variable domain of TCR clone 208289 (TRAV25, TRAJ29)
CAGHSGNTPLVV

SEQ ID NO: 416578 - protein, 14 aa, Homo sapiens
  CDR3 for beta chain variable domain of TCR clone 208289 (TRBV6-1, TRBJ2-7)
CASTRTGDYYEQYF

SEQ ID NO: 416579 - protein, 14 aa, Homo sapiens
  CDR3 for alpha chain variable domain of TCR clone 208290 (TRAV27, TRAJ45)
CAGAQEEVLTDSPL

SEQ ID NO: 416580 - protein, 17 aa, Homo sapiens
  CDR3 for beta chain variable domain of TCR clone 208290 (TRBV11-2, TRBJ2-1)
CASSLYPPGVGYNEQFF

SEQ ID NO: 416581 - protein, 14 aa, Homo sapiens
  CDR3 for alpha chain variable domain of TCR clone 208291 (TRAV12-2, TRAJ17)
CAVLFKAAGNKLTF

SEQ ID NO: 416582 - protein, 15 aa, Homo sapiens
  CDR3 for beta chain variable domain of TCR clone 208291 (TRBV7-9, TRBJ1-6)
CASGSPGRGNSPLHF

SEQ ID NO: 416583 - protein, 14 aa, Homo sapiens
  CDR3 for alpha chain variable domain of TCR clone 208292 (TRAV8-3, TRAJ17)
CAVAAQTAGNKLTF

SEQ ID NO: 416584 - protein, 11 aa, Homo sapiens
  CDR3 for beta chain variable domain of TCR clone 208292 (TRBV29-1, TRBJ1-4)
CSVSSGEKLFF

SEQ ID NO: 416585 - protein, 17 aa, Homo sapiens
  CDR3 for alpha chain variable domain of TCR clone 208293 (TRAV4, )
CLVDIQNPDPAAYQLRD

SEQ ID NO: 416586 - protein, 15 aa, Homo sapiens
  CDR3 for beta chain variable domain of TCR clone 208293 (TRBV20-1, TRBJ1-5)
CSASRRGDLGQPQHF

SEQ ID NO: 416587 - protein, 14 aa, Homo sapiens
  CDR3 for alpha chain variable domain of TCR clone 208294 (TRAV2, TRAJ23)
CAVGLRNQGGKLIF

SEQ ID NO: 416588 - protein, 13 aa, Homo sapiens
  CDR3 for beta chain variable domain of TCR clone 208294 (TRBV12-4, TRBJ2-5)
CASSPGTEETQFL

SEQ ID NO: 416589 - protein, 13 aa, Homo sapiens
  CDR3 for alpha chain variable domain of TCR clone 208295 (TRAV21, TRAJ15)
CAVANQAGTALIF

SEQ ID NO: 416590 - protein, 13 aa, Homo sapiens
  CDR3 for beta chain variable domain of TCR clone 208295 (TRBV7-6, TRBJ1-2)
CASSLVADYGYTF

SEQ ID NO: 416591 - protein, 15 aa, Homo sapiens
  CDR3 for alpha chain variable domain of TCR clone 208296 (TRAV26-1, TRAJ29)
CIVRVEGSGNTTLVF

SEQ ID NO: 416592 - protein, 14 aa, Homo sapiens
  CDR3 for beta chain variable domain of TCR clone 208296 (TRBV18, TRBJ2-5)
CASSAGVSQETQYF

SEQ ID NO: 416593 - protein, 14 aa, Homo sapiens
  CDR3 for alpha chain variable domain of TCR clone 208297 (TRAV13-1, TRAJ24)
CAASGWGEIAVWSR

SEQ ID NO: 416594 - protein, 14 aa, Homo sapiens
  CDR3 for beta chain variable domain of TCR clone 208297 (TRBV7-7, TRBJ2-2)
CATRQDSDTGELFF

SEQ ID NO: 416595 - protein, 13 aa, Homo sapiens
  CDR3 for alpha chain variable domain of TCR clone 208298 (TRAV12-2, TRAJ52)
CAVSGTSYGKLTF

SEQ ID NO: 416596 - protein, 15 aa, Homo sapiens
  CDR3 for beta chain variable domain of TCR clone 208298 (TRBV7-3, TRBJ2-3)
CASSLGLTLGDTQYF

SEQ ID NO: 416597 - protein, 17 aa, Homo sapiens
  CDR3 for alpha chain variable domain of TCR clone 208299 (TRAV3, TRAJ6)
CAVRDGPRAGGSYIPTF

SEQ ID NO: 416598 - protein, 12 aa, Homo sapiens
  CDR3 for beta chain variable domain of TCR clone 208299 (TRBV11-3, TRBJ1-1)
CASSHRQGEASF

SEQ ID NO: 416599 - protein, 12 aa, Homo sapiens
  CDR3 for alpha chain variable domain of TCR clone 208300 (TRAV13-1, TRAJ15)
CAASQAGTALIF

SEQ ID NO: 416600 - protein, 14 aa, Homo sapiens
  CDR3 for beta chain variable domain of TCR clone 208300 (TRBV19, TRBJ2-2)
CSSSTLHRSGELFF

SEQ ID NO: 416601 - protein, 16 aa, Homo sapiens
  CDR3 for alpha chain variable domain of TCR clone 208301 (TRAV20, TRAJ22)
CAVQASSSGSARQLTF

SEQ ID NO: 416602 - protein, 17 aa, Homo sapiens
  CDR3 for beta chain variable domain of TCR clone 208301 (TRBV13, TRBJ2-3)
CASSLSRVAGGRNTQYF

SEQ ID NO: 416603 - protein, 17 aa, Homo sapiens
  CDR3 for alpha chain variable domain of TCR clone 208302 (TRAV36/DV7, TRAJ52)
CAVARRAGGTSYGKLTF

SEQ ID NO: 416604 - protein, 13 aa, Homo sapiens
  CDR3 for beta chain variable domain of TCR clone 208302 (TRBV28, TRBJ2-2)
CASIGGLGGELFF

SEQ ID NO: 416605 - protein, 12 aa, Homo sapiens
  CDR3 for alpha chain variable domain of TCR clone 208303 (TRAV8-3, TRAJ20)
CAVDFNDYKLSF

SEQ ID NO: 416606 - protein, 17 aa, Homo sapiens
  CDR3 for beta chain variable domain of TCR clone 208303 (TRBV7-8, TRBJ2-6)
CASSAATGGAGANGLTF

SEQ ID NO: 416607 - protein, 17 aa, Homo sapiens
  CDR3 for alpha chain variable domain of TCR clone 208304 (TRAV38-2/DV8, TRAJ54)
CAYRRGWGSQGAQKLVL

SEQ ID NO: 416608 - protein, 14 aa, Homo sapiens
  CDR3 for beta chain variable domain of TCR clone 208304 (TRBV20-1, TRBJ2-3)
CSARDGVGTDTQYF

SEQ ID NO: 416609 - protein, 17 aa, Homo sapiens
  CDR3 for alpha chain variable domain of TCR clone 208305 (TRAV3, TRAJ6)
CAVRDGPRAGGSYLPTF

SEQ ID NO: 416610 - protein, 15 aa, Homo sapiens
  CDR3 for beta chain variable domain of TCR clone 208305 (TRBV10-3, TRBJ2-3)
CAISLTSGGTDTQYF

SEQ ID NO: 416611 - protein, 10 aa, Homo sapiens
  CDR3 for alpha chain variable domain of TCR clone 208306 (TRAV21, TRAJ35)
CAVFGNVLHC

SEQ ID NO: 416612 - protein, 17 aa, Homo sapiens
  CDR3 for beta chain variable domain of TCR clone 208306 (TRBV7-2, TRBJ2-2)
CASGPRGAGEGTGELFF

SEQ ID NO: 416613 - protein, 14 aa, Homo sapiens
  CDR3 for alpha chain variable domain of TCR clone 208307 (TRAV1-2, TRAJ17)
CAVRDMTAGNKLTF

SEQ ID NO: 416614 - protein, 11 aa, Homo sapiens
  CDR3 for beta chain variable domain of TCR clone 208307 (TRBV2, TRBJ1-1)
CASREGTEAFF

SEQ ID NO: 416615 - protein, 14 aa, Homo sapiens
  CDR3 for alpha chain variable domain of TCR clone 208308 (TRAV8-4, TRAJ54)
CAVSEVLGAQKLVF

SEQ ID NO: 416616 - protein, 13 aa, Homo sapiens
  CDR3 for beta chain variable domain of TCR clone 208308 (TRBV27, TRBJ2-7)
CARSFVSSYEQYF

SEQ ID NO: 416617 - protein, 15 aa, Homo sapiens
  CDR3 for alpha chain variable domain of TCR clone 208309 (TRAV23/DV6, TRAJ18)
CAARYRGSTLGRLYF

SEQ ID NO: 416618 - protein, 18 aa, Homo sapiens
  CDR3 for beta chain variable domain of TCR clone 208309 (TRBV27, TRBJ2-3)
CTSVPAVLGLAATDTQYF

SEQ ID NO: 416619 - protein, 15 aa, Homo sapiens
  CDR3 for alpha chain variable domain of TCR clone 208310 (TRAV13-1, TRAJ11)
CAEVIGIQDTAPSPL

SEQ ID NO: 416620 - protein, 11 aa, Homo sapiens
  CDR3 for beta chain variable domain of TCR clone 208310 (TRBV20-1, TRBJ2-7)
CSARLSYEQYF

SEQ ID NO: 416621 - protein, 13 aa, Homo sapiens
  CDR3 for alpha chain variable domain of TCR clone 208311 (TRAV2, TRAJ40)
CAVVTSGTYKYIF

SEQ ID NO: 416622 - protein, 14 aa, Homo sapiens
  CDR3 for beta chain variable domain of TCR clone 208311 (TRBV28, TRBJ2-7)
CASRAAGLGYEQYF

SEQ ID NO: 416623 - protein, 12 aa, Homo sapiens
  CDR3 for alpha chain variable domain of TCR clone 208312 (TRAV21, TRAJ33)
CAKMDSNYQLIW

SEQ ID NO: 416624 - protein, 14 aa, Homo sapiens
  CDR3 for beta chain variable domain of TCR clone 208312 (TRBV11-2, TRBJ2-3)
CASSRLARTDTQYF

SEQ ID NO: 416625 - protein, 13 aa, Homo sapiens
  CDR3 for alpha chain variable domain of TCR clone 208313 (TRAV1-2, TRAJ9)
CAALNTGGFKTIF

SEQ ID NO: 416626 - protein, 14 aa, Homo sapiens
  CDR3 for beta chain variable domain of TCR clone 208313 (TRBV24-1, TRBJ2-1)
CATADRGEYNEQFF

SEQ ID NO: 416627 - protein, 13 aa, Homo sapiens
  CDR3 for alpha chain variable domain of TCR clone 208314 (TRAV29/DV5, TRAJ49)
CAASTNTGNTFYF

SEQ ID NO: 416628 - protein, 13 aa, Homo sapiens
  CDR3 for beta chain variable domain of TCR clone 208314 (TRBV7-2, TRBJ1-4)
CASSLAGLENLFF

SEQ ID NO: 416629 - protein, 11 aa, Homo sapiens
  CDR3 for alpha chain variable domain of TCR clone 208315 (TRAV2, TRAJ13)
CASGGYQKVTF

SEQ ID NO: 416630 - protein, 16 aa, Homo sapiens
  CDR3 for beta chain variable domain of TCR clone 208315 (TRBV28, TRBJ2-1)
CASSSRVRDSYNEQFF

SEQ ID NO: 416631 - protein, 13 aa, Homo sapiens
  CDR3 for alpha chain variable domain of TCR clone 208316 (TRAV2, TRAJ5)
CAVPDTGRRALTF

SEQ ID NO: 416632 - protein, 15 aa, Homo sapiens
  CDR3 for beta chain variable domain of TCR clone 208316 (TRBV7-2, TRBJ2-2)
CASSTRTGCTGELFF

SEQ ID NO: 416633 - protein, 15 aa, Homo sapiens
  CDR3 for alpha chain variable domain of TCR clone 208317 (TRAV3, TRAJ5)
CAVGDLDTGRRAITF

SEQ ID NO: 416634 - protein, 13 aa, Homo sapiens
  CDR3 for beta chain variable domain of TCR clone 208317 (TRBV12-4, TRBJ2-7)
CASSPTETYEQYF

SEQ ID NO: 416635 - protein, 15 aa, Homo sapiens
  CDR3 for alpha chain variable domain of TCR clone 208318 (TRAV1-2, TRAJ26)
CAVRALITMVRILSL

SEQ ID NO: 416636 - protein, 13 aa, Homo sapiens
  CDR3 for beta chain variable domain of TCR clone 208318 (TRBV19, TRBJ1-2)
CASSQGQVYGYTF

SEQ ID NO: 416637 - protein, 15 aa, Homo sapiens
  CDR3 for alpha chain variable domain of TCR clone 208319 (TRAV8-3, TRAJ11)
CAVGLLNSGYSTLTF

SEQ ID NO: 416638 - protein, 16 aa, Homo sapiens
  CDR3 for beta chain variable domain of TCR clone 208319 (TRBV7-9, TRBJ1-2)
CASSVGFSAGEDGYTF

SEQ ID NO: 416639 - protein, 11 aa, Homo sapiens
  CDR3 for alpha chain variable domain of TCR clone 208320 (TRAV16, TRAJ34)
CALYNTDKLIF

SEQ ID NO: 416640 - protein, 14 aa, Homo sapiens
  CDR3 for beta chain variable domain of TCR clone 208320 (TRBV7-3, TRBJ2-2)
CASSSGGYTGELVF

SEQ ID NO: 416641 - protein, 12 aa, Homo sapiens
  CDR3 for alpha chain variable domain of TCR clone 208321 (TRAV21, TRAJ13)
CAVRGGYQKVTF

SEQ ID NO: 416642 - protein, 15 aa, Homo sapiens
  CDR3 for beta chain variable domain of TCR clone 208321 (TRBV28, TRBJ2-2)
CASRRDRMIIRELFF

SEQ ID NO: 416643 - protein, 12 aa, Homo sapiens
  CDR3 for alpha chain variable domain of TCR clone 208322 (TRAV12-3, TRAJ17)
CAMTLTGNKLTF

SEQ ID NO: 416644 - protein, 11 aa, Homo sapiens
  CDR3 for beta chain variable domain of TCR clone 208322 (TRBV11-2, TRBJ1-1)
RASSINTEAFF

SEQ ID NO: 416645 - protein, 12 aa, Homo sapiens
  CDR3 for alpha chain variable domain of TCR clone 208323 (TRAV3, TRAJ20)
CAVRDPDYKLSF

SEQ ID NO: 416646 - protein, 14 aa, Homo sapiens
  CDR3 for beta chain variable domain of TCR clone 208323 (TRBV7-6, TRBJ2-7)
CASSLNPGTKEQYF

SEQ ID NO: 416647 - protein, 16 aa, Homo sapiens
  CDR3 for alpha chain variable domain of TCR clone 208324 (TRAV8-3, TRAJ13)
CAVVLMNSGGYQKVTF

SEQ ID NO: 416648 - protein, 15 aa, Homo sapiens
  CDR3 for beta chain variable domain of TCR clone 208324 (TRBV5-4, TRBJ2-5)
CASSLTGGAKETQYF

SEQ ID NO: 416649 - protein, 17 aa, Homo sapiens
  CDR3 for alpha chain variable domain of TCR clone 208325 (TRAV13-1, TRAJ28)
CAASPPYSGAGSYQLTF

SEQ ID NO: 416650 - protein, 14 aa, Homo sapiens
  CDR3 for beta chain variable domain of TCR clone 208325 (TRBV18, TRBJ2-5)
CASSPGVSQETQYF

SEQ ID NO: 416651 - protein, 13 aa, Homo sapiens
  CDR3 for alpha chain variable domain of TCR clone 208326 (TRAV36/DV7, TRAJ54)
CAVDIQGAQKLVF

SEQ ID NO: 416652 - protein, 14 aa, Homo sapiens
  CDR3 for beta chain variable domain of TCR clone 208326 (TRBV19, TRBJ2-7)
CASNFRDTFSGMYF

SEQ ID NO: 416653 - protein, 14 aa, Homo sapiens
  CDR3 for alpha chain variable domain of TCR clone 208327 (TRAV1-2, TRAJ16)
CAVNRFSDGQKLLF

SEQ ID NO: 416654 - protein, 14 aa, Homo sapiens
  CDR3 for beta chain variable domain of TCR clone 208327 (TRBV7-6, TRBJ2-7)
CASSFRQGADEQYF

SEQ ID NO: 416655 - protein, 13 aa, Homo sapiens
  CDR3 for alpha chain variable domain of TCR clone 208328 (TRAV3, TRAJ21)
CAVREPDFNKFYF

SEQ ID NO: 416656 - protein, 16 aa, Homo sapiens
  CDR3 for beta chain variable domain of TCR clone 208328 (TRBV7-6, TRBJ2-1)
CASSLNEGPSYNEQFF

SEQ ID NO: 416657 - protein, 14 aa, Homo sapiens
  CDR3 for alpha chain variable domain of TCR clone 208329 (TRAV26-1, TRAJ38)
CIADNAGNNRKLIW

SEQ ID NO: 416658 - protein, 16 aa, Homo sapiens
  CDR3 for beta chain variable domain of TCR clone 208329 (TRBV24-1, TRBJ2-3)
CATSDPGTGATDTRYF

SEQ ID NO: 416659 - protein, 14 aa, Homo sapiens
  CDR3 for alpha chain variable domain of TCR clone 208330 (TRAV26-2, TRAJ27)
CILRAISDAGKSTF

SEQ ID NO: 416660 - protein, 15 aa, Homo sapiens
  CDR3 for beta chain variable domain of TCR clone 208330 (TRBV10-3, TRBJ2-7)
CATREQGLRSYEQYF

SEQ ID NO: 416661 - protein, 14 aa, Homo sapiens
  CDR3 for alpha chain variable domain of TCR clone 208331 (TRAV13-1, TRAJ44)
CAAKATGTAIKLTF

SEQ ID NO: 416662 - protein, 17 aa, Homo sapiens
  CDR3 for beta chain variable domain of TCR clone 208331 (TRBV7-3, TRBJ2-3)
CASSLMKRMRGADTQYF

SEQ ID NO: 416663 - protein, 14 aa, Homo sapiens
  CDR3 for alpha chain variable domain of TCR clone 208332 (TRAV12-2, TRAJ40)
RAVKIPSGTYKYIF

SEQ ID NO: 416664 - protein, 14 aa, Homo sapiens
  CDR3 for beta chain variable domain of TCR clone 208332 (TRBV7-8, TRBJ2-7)
CASSPRDRVYEQYF

SEQ ID NO: 416665 - protein, 12 aa, Homo sapiens
  CDR3 for alpha chain variable domain of TCR clone 208333 (TRAV29/DV5, TRAJ49)
CAATDTGNQFYF

SEQ ID NO: 416666 - protein, 12 aa, Homo sapiens
  CDR3 for beta chain variable domain of TCR clone 208333 (TRBV2, TRBJ2-1)
CAKREGYNEQFF

SEQ ID NO: 416667 - protein, 14 aa, Homo sapiens
  CDR3 for alpha chain variable domain of TCR clone 208334 (TRAV29/DV5, TRAJ20)
CAATIRSNDYKLTF

SEQ ID NO: 416668 - protein, 19 aa, Homo sapiens
  CDR3 for beta chain variable domain of TCR clone 208334 (TRBV25-1, TRBJ2-2)
CAILVYRVDRGRKTGELFF

SEQ ID NO: 416669 - protein, 13 aa, Homo sapiens
  CDR3 for alpha chain variable domain of TCR clone 208335 (TRAV5, TRAJ30)
CAEIANRDDKIIF

SEQ ID NO: 416670 - protein, 16 aa, Homo sapiens
  CDR3 for beta chain variable domain of TCR clone 208335 (TRBV7-3, TRBJ2-2)
CASSFLPSGYTGELLF

SEQ ID NO: 416671 - protein, 17 aa, Homo sapiens
  CDR3 for alpha chain variable domain of TCR clone 208336 (TRAV3, TRAJ6)
CAVRDGPRAGGRYIPTF

SEQ ID NO: 416672 - protein, 13 aa, Homo sapiens
  CDR3 for beta chain variable domain of TCR clone 208336 (TRBV4-1, TRBJ2-2)
CASSQENTGELFF

SEQ ID NO: 416673 - protein, 13 aa, Homo sapiens
  CDR3 for alpha chain variable domain of TCR clone 208337 (TRAV23/DV6, TRAJ15)
CAALPAGGNCSDL

SEQ ID NO: 416674 - protein, 14 aa, Homo sapiens
  CDR3 for beta chain variable domain of TCR clone 208337 (TRBV7-9, TRBJ1-2)
CASSRQGANYGYAF

SEQ ID NO: 416675 - protein, 16 aa, Homo sapiens
  CDR3 for alpha chain variable domain of TCR clone 208338 (TRAV30, TRAJ24)
CGTEIVDADSWRKFQF

SEQ ID NO: 416676 - protein, 17 aa, Homo sapiens
  CDR3 for beta chain variable domain of TCR clone 208338 (TRBV20-1, TRBJ2-2)
CSASGSGQGGLTGELFF

SEQ ID NO: 416677 - protein, 13 aa, Homo sapiens
  CDR3 for alpha chain variable domain of TCR clone 208339 (TRAV12-3, TRAJ20)
CAMGATNDYKLSF

SEQ ID NO: 416678 - protein, 16 aa, Homo sapiens
  CDR3 for beta chain variable domain of TCR clone 208339 (TRBV18, TRBJ2-7)
CASSPYRDGQTYEQYF

SEQ ID NO: 416679 - protein, 12 aa, Homo sapiens
  CDR3 for alpha chain variable domain of TCR clone 208340 (TRAV25, TRAJ35)
CAGIGFGNVLHC

SEQ ID NO: 416680 - protein, 15 aa, Homo sapiens
  CDR3 for beta chain variable domain of TCR clone 208340 (TRBV20-1, TRBJ2-7)
CSARDRVSGMDEQYF

SEQ ID NO: 416681 - protein, 13 aa, Homo sapiens
  CDR3 for alpha chain variable domain of TCR clone 208341 (TRAV21, TRAJ23)
CALTYNQGGKLIF

SEQ ID NO: 416682 - protein, 15 aa, Homo sapiens
  CDR3 for beta chain variable domain of TCR clone 208341 (TRBV5-1, TRBJ1-3)
CASSFGQAAGNTIYF

SEQ ID NO: 416683 - protein, 13 aa, Homo sapiens
  CDR3 for alpha chain variable domain of TCR clone 208342 (TRAV13-1, TRAJ54)
CAASDQGAQKLVF

SEQ ID NO: 416684 - protein, 13 aa, Homo sapiens
  CDR3 for beta chain variable domain of TCR clone 208342 (TRBV4-2, TRBJ1-1)
CASSQAGNTEAFF

SEQ ID NO: 416685 - protein, 14 aa, Homo sapiens
  CDR3 for alpha chain variable domain of TCR clone 208343 (TRAV9-2, TRAJ39)
CALYIYNAGNMLPF

SEQ ID NO: 416686 - protein, 14 aa, Homo sapiens
  CDR3 for beta chain variable domain of TCR clone 208343 (TRBV28, TRBJ2-2)
CASRIRSGTGELFF

SEQ ID NO: 416687 - protein, 18 aa, Homo sapiens
  CDR3 for alpha chain variable domain of TCR clone 208344 (TRAV21, TRAJ52)
CAVRPSPAEGTSHGKLTF

SEQ ID NO: 416688 - protein, 13 aa, Homo sapiens
  CDR3 for beta chain variable domain of TCR clone 208344 (TRBV7-3, TRBJ1-1)
CASSQDWGAEAFF

SEQ ID NO: 416689 - protein, 12 aa, Homo sapiens
  CDR3 for alpha chain variable domain of TCR clone 208345 (TRAV8-4, TRAJ43)
CAVSVNNSDMRF

SEQ ID NO: 416690 - protein, 16 aa, Homo sapiens
  CDR3 for beta chain variable domain of TCR clone 208345 (TRBV7-2, TRBJ2-6)
CASSLAGRSGANVLTF

SEQ ID NO: 416691 - protein, 14 aa, Homo sapiens
  CDR3 for alpha chain variable domain of TCR clone 208346 (TRAV2, TRAJ37)
CAVDFTSNTGKLIF

SEQ ID NO: 416692 - protein, 14 aa, Homo sapiens
  CDR3 for beta chain variable domain of TCR clone 208346 (TRBV27, TRBJ1-5)
CASSLSVSNQPQHF

SEQ ID NO: 416693 - protein, 13 aa, Homo sapiens
  CDR3 for alpha chain variable domain of TCR clone 208347 (TRAV29/DV5, TRAJ26)
CAASANYGQNFVF

SEQ ID NO: 416694 - protein, 15 aa, Homo sapiens
  CDR3 for beta chain variable domain of TCR clone 208347 (TRBV7-3, TRBJ1-1)
CASSLIRQGETEAFL

SEQ ID NO: 416695 - protein, 14 aa, Homo sapiens
  CDR3 for alpha chain variable domain of TCR clone 208348 (TRAV17, TRAJ57)
CATDASGGTEKLVF

SEQ ID NO: 416696 - protein, 14 aa, Homo sapiens
  CDR3 for beta chain variable domain of TCR clone 208348 (TRBV4-2, TRBJ2-1)
CASGLDRAYNEQFF

SEQ ID NO: 416697 - protein, 13 aa, Homo sapiens
  CDR3 for alpha chain variable domain of TCR clone 208349 (TRAV17, TRAJ20)
CATDAVGDDKLSF

SEQ ID NO: 416698 - protein, 15 aa, Homo sapiens
  CDR3 for beta chain variable domain of TCR clone 208349 (TRBV9, TRBJ1-3)
CASSARAGGGNTIYF

SEQ ID NO: 416699 - protein, 11 aa, Homo sapiens
  CDR3 for alpha chain variable domain of TCR clone 208350 (TRAV12-3, TRAJ43)
CSMSVSNDMRF

SEQ ID NO: 416700 - protein, 16 aa, Homo sapiens
  CDR3 for beta chain variable domain of TCR clone 208350 (TRBV20-1, TRBJ2-1)
CSARDSLGAVYNEQFF

SEQ ID NO: 416701 - protein, 18 aa, Homo sapiens
  CDR3 for alpha chain variable domain of TCR clone 208351 (TRAV26-1, TRAJ52)
CIVRVEGAGGTSYGKLTF

SEQ ID NO: 416702 - protein, 11 aa, Homo sapiens
  CDR3 for beta chain variable domain of TCR clone 208351 (TRBV19, TRBJ2-2)
CASRYSGELFF

SEQ ID NO: 416703 - protein, 13 aa, Homo sapiens
  CDR3 for alpha chain variable domain of TCR clone 208352 (TRAV3, TRAJ15)
CAVRDQAGTALIF

SEQ ID NO: 416704 - protein, 16 aa, Homo sapiens
  CDR3 for beta chain variable domain of TCR clone 208352 (TRBV25-1, TRBJ1-1)
CASSGDRDRGRIEAFF

SEQ ID NO: 416705 - protein, 12 aa, Homo sapiens
  CDR3 for alpha chain variable domain of TCR clone 208353 (TRAV12-1, TRAJ40)
CVVPAGTYKYIF

SEQ ID NO: 416706 - protein, 15 aa, Homo sapiens
  CDR3 for beta chain variable domain of TCR clone 208353 (TRBV12-4, TRBJ2-1)
CASSPLSGRNNEQIF

SEQ ID NO: 416707 - protein, 14 aa, Homo sapiens
  CDR3 for alpha chain variable domain of TCR clone 208354 (TRAV25, TRAJ27)
CAGPGNTNAGKSTF

SEQ ID NO: 416708 - protein, 15 aa, Homo sapiens
  CDR3 for beta chain variable domain of TCR clone 208354 (TRBV11-2, TRBJ2-2)
CASSPSGGGTGELFF

SEQ ID NO: 416709 - protein, 15 aa, Homo sapiens
  CDR3 for alpha chain variable domain of TCR clone 208355 (TRAV21, TRAJ37)
CAVRPTLSNTGKLIF

SEQ ID NO: 416710 - protein, 16 aa, Homo sapiens
  CDR3 for beta chain variable domain of TCR clone 208355 (TRBV6-6, TRBJ2-1)
CASSYSFSGSYNEQFF

SEQ ID NO: 416711 - protein, 13 aa, Homo sapiens
  CDR3 for alpha chain variable domain of TCR clone 208356 (TRAV8-6, TRAJ49)
WAVITNTGNQFYF

SEQ ID NO: 416712 - protein, 17 aa, Homo sapiens
  CDR3 for beta chain variable domain of TCR clone 208356 (TRBV11-2, TRBJ2-1)
CASSLYPPGVEYNEQFF

SEQ ID NO: 416713 - protein, 14 aa, Homo sapiens
  CDR3 for alpha chain variable domain of TCR clone 208357 (TRAV8-3, TRAJ40)
CAVGASSGTYKYIF

SEQ ID NO: 416714 - protein, 15 aa, Homo sapiens
  CDR3 for beta chain variable domain of TCR clone 208357 (TRBV7-9, TRBJ1-2)
CASSLDREPNYGYTF

SEQ ID NO: 416715 - protein, 13 aa, Homo sapiens
  CDR3 for alpha chain variable domain of TCR clone 208358 (TRAV29/DV5, TRAJ31)
CAASRNNNARLMF

SEQ ID NO: 416716 - protein, 12 aa, Homo sapiens
  CDR3 for beta chain variable domain of TCR clone 208358 (TRBV14, TRBJ2-5)
CASSPLKETQYF

SEQ ID NO: 416717 - protein, 13 aa, Homo sapiens
  CDR3 for alpha chain variable domain of TCR clone 208359 (TRAV21, TRAJ27)
CAALYTNAGKSTF

SEQ ID NO: 416718 - protein, 14 aa, Homo sapiens
  CDR3 for beta chain variable domain of TCR clone 208359 (TRBV27, TRBJ1-1)
CASSLLSGLSEAFF

SEQ ID NO: 416719 - protein, 11 aa, Homo sapiens
  CDR3 for alpha chain variable domain of TCR clone 208360 (TRAV3, TRAJ20)
CCERPHYKLSF

SEQ ID NO: 416720 - protein, 14 aa, Homo sapiens
  CDR3 for beta chain variable domain of TCR clone 208360 (TRBV4-2, TRBJ2-1)
CASGLDRAYNEQFF

SEQ ID NO: 416721 - protein, 13 aa, Homo sapiens
  CDR3 for alpha chain variable domain of TCR clone 208361 (TRAV13-1, TRAJ21)
CAASIYNFNKFYF

SEQ ID NO: 416722 - protein, 17 aa, Homo sapiens
  CDR3 for beta chain variable domain of TCR clone 208361 (TRBV7-8, TRBJ2-6)
CASSAGTGGAGANVLTF

SEQ ID NO: 416723 - protein, 11 aa, Homo sapiens
  CDR3 for alpha chain variable domain of TCR clone 208362 (TRAV1-2, TRAJ20)
CAVANDYKLSF

SEQ ID NO: 416724 - protein, 18 aa, Homo sapiens
  CDR3 for beta chain variable domain of TCR clone 208362 (TRBV20-1, TRBJ2-6)
CSAETTPTPGSGSNVLTF

SEQ ID NO: 416725 - protein, 17 aa, Homo sapiens
  CDR3 for alpha chain variable domain of TCR clone 208363 (TRAV3, TRAJ6)
CAVRDGPRAGGSYIPTF

SEQ ID NO: 416726 - protein, 14 aa, Homo sapiens
  CDR3 for beta chain variable domain of TCR clone 208363 (TRBV27, TRBJ2-2)
CASSPGVNTGELFF

SEQ ID NO: 416727 - protein, 16 aa, Homo sapiens
  CDR3 for alpha chain variable domain of TCR clone 208364 (TRAV3, TRAJ37)
CAVRPHGPGNTGKPIF

SEQ ID NO: 416728 - protein, 15 aa, Homo sapiens
  CDR3 for beta chain variable domain of TCR clone 208364 (TRBV20-1, TRBJ2-7)
CSARDRVSGMDEQYF

SEQ ID NO: 416729 - protein, 14 aa, Homo sapiens
  CDR3 for alpha chain variable domain of TCR clone 208365 (TRAV13-1, TRAJ44)
CAAKATGTASKLNF

SEQ ID NO: 416730 - protein, 13 aa, Homo sapiens
  CDR3 for beta chain variable domain of TCR clone 208365 (TRBV6-1, TRBJ1-1)
CASSWTVDTEAFF

SEQ ID NO: 416731 - protein, 12 aa, Homo sapiens
  CDR3 for alpha chain variable domain of TCR clone 208366 (TRAV13-1, TRAJ21)
CAAKEGFNKFYF

SEQ ID NO: 416732 - protein, 17 aa, Homo sapiens
  CDR3 for beta chain variable domain of TCR clone 208366 (TRBV20-1, TRBJ2-1)
CCASSSGLAGSYNEQFF

SEQ ID NO: 416733 - protein, 16 aa, Homo sapiens
  CDR3 for alpha chain variable domain of TCR clone 208367 (TRAV30, TRAJ24)
CGTEIVGADSWGKFQF

SEQ ID NO: 416734 - protein, 15 aa, Homo sapiens
  CDR3 for beta chain variable domain of TCR clone 208367 (TRBV7-9, TRBJ1-4)
CASSARTGGNEKLSF

SEQ ID NO: 416735 - protein, 14 aa, Homo sapiens
  CDR3 for alpha chain variable domain of TCR clone 208368 (TRAV13-2, TRAJ17)
CAENSKAAGNKLTF

SEQ ID NO: 416736 - protein, 12 aa, Homo sapiens
  CDR3 for beta chain variable domain of TCR clone 208368 (TRBV14, TRBJ2-7)
CASSALKGEQYF

SEQ ID NO: 416737 - protein, 13 aa, Homo sapiens
  CDR3 for alpha chain variable domain of TCR clone 208369 (TRAV12-1, TRAJ9)
CVVLNTGGFKTTF

SEQ ID NO: 416738 - protein, 13 aa, Homo sapiens
  CDR3 for beta chain variable domain of TCR clone 208369 (TRBV20-1, TRBJ1-1)
CSARGGGNTEAFF

SEQ ID NO: 416739 - protein, 14 aa, Homo sapiens
  CDR3 for alpha chain variable domain of TCR clone 208370 (TRAV16, TRAJ39)
CALSKNNAGNMLTF

SEQ ID NO: 416740 - protein, 13 aa, Homo sapiens
  CDR3 for beta chain variable domain of TCR clone 208370 (TRBV20-1, TRBJ1-5)
CSASWGRSQPQHF

SEQ ID NO: 416741 - protein, 14 aa, Homo sapiens
  CDR3 for alpha chain variable domain of TCR clone 208371 (TRAV12-1, TRAJ30)
CVANIGGRDDKIIL

SEQ ID NO: 416742 - protein, 13 aa, Homo sapiens
  CDR3 for beta chain variable domain of TCR clone 208371 (TRBV12-5, TRBJ2-1)
CASGLGRGNEQFF

SEQ ID NO: 416743 - protein, 14 aa, Homo sapiens
  CDR3 for alpha chain variable domain of TCR clone 208372 (TRAV8-1, TRAJ49)
CASSIANTGNQFYF

SEQ ID NO: 416744 - protein, 16 aa, Homo sapiens
  CDR3 for beta chain variable domain of TCR clone 208372 (TRBV20-1, TRBJ1-2)
CSASMGQGVANYGYTF

SEQ ID NO: 416745 - protein, 20 aa, Homo sapiens
  CDR3 for alpha chain variable domain of TCR clone 208373 (TRAV26-1, TRAJ42)
CCVLLHRQTYYGGSQGNLIF

SEQ ID NO: 416746 - protein, 14 aa, Homo sapiens
  CDR3 for beta chain variable domain of TCR clone 208373 (TRBV5-1, TRBJ2-1)
CASSLDDRFDEQFF

SEQ ID NO: 416747 - protein, 15 aa, Homo sapiens
  CDR3 for alpha chain variable domain of TCR clone 208374 (TRAV3, TRAJ27)
CAVRDPLTNAGKSTF

SEQ ID NO: 416748 - protein, 15 aa, Homo sapiens
  CDR3 for beta chain variable domain of TCR clone 208374 (TRBV28, TRBJ2-1)
CARSMIAGGRSEQFF

SEQ ID NO: 416749 - protein, 14 aa, Homo sapiens
  CDR3 for alpha chain variable domain of TCR clone 208375 (TRAV29/DV5, TRAJ36)
CPARRKTGANNLFF

SEQ ID NO: 416750 - protein, 15 aa, Homo sapiens
  CDR3 for beta chain variable domain of TCR clone 208375 (TRBV9, TRBJ1-6)
CASSVAGTGDSPLHF

SEQ ID NO: 416751 - protein, 16 aa, Homo sapiens
  CDR3 for alpha chain variable domain of TCR clone 208376 (TRAV3, TRAJ37)
CAMRGKGSGNPGKLIF

SEQ ID NO: 416752 - protein, 14 aa, Homo sapiens
  CDR3 for beta chain variable domain of TCR clone 208376 (TRBV19, TRBJ1-4)
CASSINRGGEKLFF

SEQ ID NO: 416753 - protein, 11 aa, Homo sapiens
  CDR3 for alpha chain variable domain of TCR clone 208377 (TRAV13-2, TRAJ26)
CAEIPGQNFVF

SEQ ID NO: 416754 - protein, 19 aa, Homo sapiens
  CDR3 for beta chain variable domain of TCR clone 208377 (TRBV19, TRBJ2-2)
CDSTRPGLAGGRVTGELFF

SEQ ID NO: 416755 - protein, 13 aa, Homo sapiens
  CDR3 for alpha chain variable domain of TCR clone 208378 (TRAV8-3, TRAJ47)
CAVSMEYGNKLAF

SEQ ID NO: 416756 - protein, 14 aa, Homo sapiens
  CDR3 for beta chain variable domain of TCR clone 208378 (TRBV2, TRBJ1-5)
CASSGTGFNQPQHF

SEQ ID NO: 416757 - protein, 16 aa, Homo sapiens
  CDR3 for alpha chain variable domain of TCR clone 208379 (TRAV12-3, TRAJ53)
CAMSPGSGGSNYKLAS

SEQ ID NO: 416758 - protein, 11 aa, Homo sapiens
  CDR3 for beta chain variable domain of TCR clone 208379 (TRBV29-1, TRBJ2-5)
CSEDRTGTQYF

SEQ ID NO: 416759 - protein, 16 aa, Homo sapiens
  CDR3 for alpha chain variable domain of TCR clone 208380 (TRAV12-3, TRAJ53)
CAMSPGSGGSNYNLTF

SEQ ID NO: 416760 - protein, 17 aa, Homo sapiens
  CDR3 for beta chain variable domain of TCR clone 208380 (TRBV11-2, TRBJ2-1)
CASSLYPPGVEYNEQLF

SEQ ID NO: 416761 - protein, 13 aa, Homo sapiens
  CDR3 for alpha chain variable domain of TCR clone 208381 (TRAV8-2, TRAJ26)
CVVTLLLGSEFCL

SEQ ID NO: 416762 - protein, 15 aa, Homo sapiens
  CDR3 for beta chain variable domain of TCR clone 208381 (TRBV11-2, TRBJ2-2)
CASSSDRVNAGELFF

SEQ ID NO: 416763 - protein, 15 aa, Homo sapiens
  CDR3 for alpha chain variable domain of TCR clone 208382 (TRAV8-3, TRAJ45)
CASSYSGGGADGLTY

SEQ ID NO: 416764 - protein, 13 aa, Homo sapiens
  CDR3 for beta chain variable domain of TCR clone 208382 (TRBV10-3, TRBJ2-7)
CASKLAVNYQQYF

SEQ ID NO: 416765 - protein, 11 aa, Homo sapiens
  CDR3 for alpha chain variable domain of TCR clone 208383 (TRAV21, TRAJ34)
CAVTNTDKLIF

SEQ ID NO: 416766 - protein, 13 aa, Homo sapiens
  CDR3 for beta chain variable domain of TCR clone 208383 (TRBV9, TRBJ2-7)
CASSVAEYYEQYF

SEQ ID NO: 416767 - protein, 15 aa, Homo sapiens
  CDR3 for alpha chain variable domain of TCR clone 208384 (TRAV8-3, TRAJ45)
CASSYSGGGADGLTF

SEQ ID NO: 416768 - protein, 14 aa, Homo sapiens
  CDR3 for beta chain variable domain of TCR clone 208384 (TRBV7-2, TRBJ2-1)
CASSLGVGYNEQFF

SEQ ID NO: 416769 - protein, 14 aa, Homo sapiens
  CDR3 for alpha chain variable domain of TCR clone 208385 (TRAV22, TRAJ6)
CAGVGPGGSYIPTF

SEQ ID NO: 416770 - protein, 15 aa, Homo sapiens
  CDR3 for beta chain variable domain of TCR clone 208385 (TRBV12-4, TRBJ2-5)
CASSPPTGLQETQYF

SEQ ID NO: 416771 - protein, 15 aa, Homo sapiens
  CDR3 for alpha chain variable domain of TCR clone 208386 (TRAV8-3, TRAJ48)
CAVGASNFGNEKLTF

SEQ ID NO: 416772 - protein, 16 aa, Homo sapiens
  CDR3 for beta chain variable domain of TCR clone 208386 (TRBV6-6, TRBJ2-1)
CDSSYSFSGSYNEQFF

SEQ ID NO: 416773 - protein, 15 aa, Homo sapiens
  CDR3 for alpha chain variable domain of TCR clone 208387 (TRAV26-1, TRAJ29)
CIVRVEGSGNTPLVF

SEQ ID NO: 416774 - protein, 13 aa, Homo sapiens
  CDR3 for beta chain variable domain of TCR clone 208387 (TRBV5-7, TRBJ2-6)
CASTSSGANVLTF

SEQ ID NO: 416775 - protein, 13 aa, Homo sapiens
  CDR3 for alpha chain variable domain of TCR clone 208388 (TRAV2, TRAJ15)
CAVASQAGTALIC

SEQ ID NO: 416776 - protein, 12 aa, Homo sapiens
  CDR3 for beta chain variable domain of TCR clone 208388 (TRBV24-1, TRBJ1-1)
CATSDSDRGAFF

SEQ ID NO: 416777 - protein, 17 aa, Homo sapiens
  CDR3 for alpha chain variable domain of TCR clone 208389 (TRAV3, TRAJ6)
CAVRDGPRAGGSYIPTF

SEQ ID NO: 416778 - protein, 14 aa, Homo sapiens
  CDR3 for beta chain variable domain of TCR clone 208389 (TRBV6-1, TRBJ1-3)
CASVQGGGGNTIYV

SEQ ID NO: 416779 - protein, 13 aa, Homo sapiens
  CDR3 for alpha chain variable domain of TCR clone 208390 (TRAV21, TRAJ20)
CAVGLRVDYKLSF

SEQ ID NO: 416780 - protein, 16 aa, Homo sapiens
  CDR3 for beta chain variable domain of TCR clone 208390 (TRBV7-8, TRBJ2-4)
CASSAERTLAKNIQYF

SEQ ID NO: 416781 - protein, 14 aa, Homo sapiens
  CDR3 for alpha chain variable domain of TCR clone 208391 (TRAV38-1, TRAJ45)
CASHSGGGAVGLTF

SEQ ID NO: 416782 - protein, 16 aa, Homo sapiens
  CDR3 for beta chain variable domain of TCR clone 208391 (TRBV27, TRBJ2-2)
CASSFRGLVRTGELFF

SEQ ID NO: 416783 - protein, 13 aa, Homo sapiens
  CDR3 for alpha chain variable domain of TCR clone 208392 (TRAV21, TRAJ27)
CAAFNTNAGKSTF

SEQ ID NO: 416784 - protein, 14 aa, Homo sapiens
  CDR3 for beta chain variable domain of TCR clone 208392 (TRBV27, TRBJ1-1)
CASSLLSGLSEAFF

SEQ ID NO: 416785 - protein, 14 aa, Homo sapiens
  CDR3 for alpha chain variable domain of TCR clone 208393 (TRAV1-2, TRAJ16)
CAVNRLSDGQKLLF

SEQ ID NO: 416786 - protein, 19 aa, Homo sapiens
  CDR3 for beta chain variable domain of TCR clone 208393 (TRBV2, TRBJ2-7)
CASSDDETSGRANDYEQYF

SEQ ID NO: 416787 - protein, 14 aa, Homo sapiens
  CDR3 for alpha chain variable domain of TCR clone 208394 (TRAV26-2, TRAJ23)
CSRTLYNQGGKLIF

SEQ ID NO: 416788 - protein, 16 aa, Homo sapiens
  CDR3 for beta chain variable domain of TCR clone 208394 (TRBV20-1, TRBJ2-1)
CSARDLKQGMNNEQFF

SEQ ID NO: 416789 - protein, 11 aa, Homo sapiens
  CDR3 for alpha chain variable domain of TCR clone 208395 (TRAV26-1, TRAJ37)
CIVRVGRKLIF

SEQ ID NO: 416790 - protein, 16 aa, Homo sapiens
  CDR3 for beta chain variable domain of TCR clone 208395 (TRBV28, TRBJ2-7)
CASSLFFETGGPEQYF

SEQ ID NO: 416791 - protein, 16 aa, Homo sapiens
  CDR3 for alpha chain variable domain of TCR clone 208396 (TRAV23/DV6, TRAJ9)
CAASIGGNTGGFKTIL

SEQ ID NO: 416792 - protein, 11 aa, Homo sapiens
  CDR3 for beta chain variable domain of TCR clone 208396 (TRBV11-2, TRBJ2-2)
CASSLPGELFF

SEQ ID NO: 416793 - protein, 16 aa, Homo sapiens
  CDR3 for alpha chain variable domain of TCR clone 208397 (TRAV14/DV4, TRAJ54)
CAMREGRIQGAQKLVF

SEQ ID NO: 416794 - protein, 16 aa, Homo sapiens
  CDR3 for beta chain variable domain of TCR clone 208397 (TRBV5-1, TRBJ1-6)
CASSLARGTEGTPLHF

SEQ ID NO: 416795 - protein, 15 aa, Homo sapiens
  CDR3 for alpha chain variable domain of TCR clone 208398 (TRAV27, TRAJ38)
CAARRNAGNNRRLIW

SEQ ID NO: 416796 - protein, 17 aa, Homo sapiens
  CDR3 for beta chain variable domain of TCR clone 208398 (TRBV20-1, TRBJ2-2)
CSASGSGQGGLTGELFF

SEQ ID NO: 416797 - protein, 14 aa, Homo sapiens
  CDR3 for alpha chain variable domain of TCR clone 208399 (TRAV17, TRAJ35)
CATARPGFGNVLHL

SEQ ID NO: 416798 - protein, 14 aa, Homo sapiens
  CDR3 for beta chain variable domain of TCR clone 208399 (TRBV7-8, TRBJ2-3)
CASSLEAGTDTQYF

SEQ ID NO: 416799 - protein, 14 aa, Homo sapiens
  CDR3 for alpha chain variable domain of TCR clone 208400 (TRAV1-2, TRAJ16)
CAVNRFSDGQKMLF

SEQ ID NO: 416800 - protein, 12 aa, Homo sapiens
  CDR3 for beta chain variable domain of TCR clone 208400 (TRBV28, TRBJ2-6)
CAIQAGTNVLTF

SEQ ID NO: 416801 - protein, 13 aa, Homo sapiens
  CDR3 for alpha chain variable domain of TCR clone 208401 (TRAV2, TRAJ15)
CAVASQAGAALIF

SEQ ID NO: 416802 - protein, 16 aa, Homo sapiens
  CDR3 for beta chain variable domain of TCR clone 208401 (TRBV5-1, TRBJ1-1)
CASSSGGKSLNTEAFF

SEQ ID NO: 416803 - protein, 17 aa, Homo sapiens
  CDR3 for alpha chain variable domain of TCR clone 208402 (TRAV26-1, TRAJ53)
CIVRVDDSGGSNYKLTF

SEQ ID NO: 416804 - protein, 11 aa, Homo sapiens
  CDR3 for beta chain variable domain of TCR clone 208402 (TRBV19, TRBJ1-2)
CASSISSGYTF

SEQ ID NO: 416805 - protein, 16 aa, Homo sapiens
  CDR3 for alpha chain variable domain of TCR clone 208403 (TRAV30, TRAJ24)
CVTEIVDADSWGKFQF

SEQ ID NO: 416806 - protein, 14 aa, Homo sapiens
  CDR3 for beta chain variable domain of TCR clone 208403 (TRBV7-9, TRBJ2-4)
CASSLAMGGNIQYF

SEQ ID NO: 416807 - protein, 14 aa, Homo sapiens
  CDR3 for alpha chain variable domain of TCR clone 208404 (TRAV1-2, TRAJ16)
CAVNWFSDGQKLLF

SEQ ID NO: 416808 - protein, 14 aa, Homo sapiens
  CDR3 for beta chain variable domain of TCR clone 208404 (TRBV11-1, TRBJ2-7)
CASSFRQGSYEQYF

SEQ ID NO: 416809 - protein, 12 aa, Homo sapiens
  CDR3 for alpha chain variable domain of TCR clone 208405 (TRAV12-3, TRAJ27)
CAMKRPAGKSTF

SEQ ID NO: 416810 - protein, 14 aa, Homo sapiens
  CDR3 for beta chain variable domain of TCR clone 208405 (TRBV12-5, TRBJ2-5)
CASGSRTHQETQYF

SEQ ID NO: 416811 - protein, 14 aa, Homo sapiens
  CDR3 for alpha chain variable domain of TCR clone 208406 (TRAV16, TRAJ16)
CALSVLSDGQKLLF

SEQ ID NO: 416812 - protein, 14 aa, Homo sapiens
  CDR3 for beta chain variable domain of TCR clone 208406 (TRBV6-1, TRBJ1-3)
CASVQGGGGNTIYF

SEQ ID NO: 416813 - protein, 12 aa, Homo sapiens
  CDR3 for alpha chain variable domain of TCR clone 208407 (TRAV2, TRAJ36)
CAELTGANNLYF

SEQ ID NO: 416814 - protein, 14 aa, Homo sapiens
  CDR3 for beta chain variable domain of TCR clone 208407 (TRBV18, TRBJ2-7)
CASSPRGGAYEQYF

SEQ ID NO: 416815 - protein, 12 aa, Homo sapiens
  CDR3 for alpha chain variable domain of TCR clone 208408 (TRAV12-2, TRAJ49)
CAVLNTGNQFYF

SEQ ID NO: 416816 - protein, 14 aa, Homo sapiens
  CDR3 for beta chain variable domain of TCR clone 208408 (TRBV5-4, TRBJ2-3)
CASSVGQGADTQYF

SEQ ID NO: 416817 - protein, 14 aa, Homo sapiens
  CDR3 for alpha chain variable domain of TCR clone 208409 (TRAV3, TRAJ5)
CCERPRHRRRALTF

SEQ ID NO: 416818 - protein, 13 aa, Homo sapiens
  CDR3 for beta chain variable domain of TCR clone 208409 (TRBV12-4, TRBJ2-7)
CASSPTETYEQYF

SEQ ID NO: 416819 - protein, 15 aa, Homo sapiens
  CDR3 for alpha chain variable domain of TCR clone 208410 (TRAV16, TRAJ12)
CSKWPLRDSSYKLIF

SEQ ID NO: 416820 - protein, 17 aa, Homo sapiens
  CDR3 for beta chain variable domain of TCR clone 208410 (TRBV28, TRBJ2-5)
CASSTPEGDALQETQYF

SEQ ID NO: 416821 - protein, 17 aa, Homo sapiens
  CDR3 for alpha chain variable domain of TCR clone 208411 (TRAV17, TRAJ7)
CATLVRLAFGKGNQVLV

SEQ ID NO: 416822 - protein, 13 aa, Homo sapiens
  CDR3 for beta chain variable domain of TCR clone 208411 (TRBV12-4, TRBJ2-7)
CASSLERVREQYF

SEQ ID NO: 416823 - protein, 14 aa, Homo sapiens
  CDR3 for alpha chain variable domain of TCR clone 208412 (TRAV17, TRAJ57)
CATDPQGGSEKLVF

SEQ ID NO: 416824 - protein, 20 aa, Homo sapiens
  CDR3 for beta chain variable domain of TCR clone 208412 (TRBV28, TRBJ2-1)
CASTSIGRSPGLAGGNEQFF

SEQ ID NO: 416825 - protein, 15 aa, Homo sapiens
  CDR3 for alpha chain variable domain of TCR clone 208413 (TRAV1-2, TRAJ28)
CAVRNSGAGSYQLTF

SEQ ID NO: 416826 - protein, 15 aa, Homo sapiens
  CDR3 for beta chain variable domain of TCR clone 208413 (TRBV9, TRBJ1-6)
CASSVAGTGDSPLHF

SEQ ID NO: 416827 - protein, 16 aa, Homo sapiens
  CDR3 for alpha chain variable domain of TCR clone 208414 (TRAV3, TRAJ37)
CAVRPHGSGNTGKLIF

SEQ ID NO: 416828 - protein, 17 aa, Homo sapiens
  CDR3 for beta chain variable domain of TCR clone 208414 (TRBV7-2, TRBJ2-3)
CASSLEARGTSTDTQYF

SEQ ID NO: 416829 - protein, 15 aa, Homo sapiens
  CDR3 for alpha chain variable domain of TCR clone 208415 (TRAV38-1, TRAJ57)
CAFMDSQGGSEKLVF

SEQ ID NO: 416830 - protein, 12 aa, Homo sapiens
  CDR3 for beta chain variable domain of TCR clone 208415 (TRBV19, TRBJ2-1)
CASSMQDTEQFF

SEQ ID NO: 416831 - protein, 14 aa, Homo sapiens
  CDR3 for alpha chain variable domain of TCR clone 208416 (TRAV8-3, TRAJ6)
CAVGASGGSYIPTF

SEQ ID NO: 416832 - protein, 17 aa, Homo sapiens
  CDR3 for beta chain variable domain of TCR clone 208416 (TRBV18, TRBJ2-2)
CASSPSDPWQNPGELFF

SEQ ID NO: 416833 - protein, 16 aa, Homo sapiens
  CDR3 for alpha chain variable domain of TCR clone 208417 (TRAV12-2, TRAJ32)
CAVNLGQGGATNKLIF

SEQ ID NO: 416834 - protein, 15 aa, Homo sapiens
  CDR3 for beta chain variable domain of TCR clone 208417 (TRBV20-1, TRBJ2-7)
CSARWPLAGGREQYF

SEQ ID NO: 416835 - protein, 13 aa, Homo sapiens
  CDR3 for alpha chain variable domain of TCR clone 208418 (TRAV3, TRAJ27)
CAVRPLGAGKSTF

SEQ ID NO: 416836 - protein, 13 aa, Homo sapiens
  CDR3 for beta chain variable domain of TCR clone 208418 (TRBV10-3, TRBJ2-7)
CAIRAGGPHEQYF

SEQ ID NO: 416837 - protein, 14 aa, Homo sapiens
  CDR3 for alpha chain variable domain of TCR clone 208419 (TRAV13-1, TRAJ3)
CAASKSSSASKIIF

SEQ ID NO: 416838 - protein, 13 aa, Homo sapiens
  CDR3 for beta chain variable domain of TCR clone 208419 (TRBV25-1, TRBJ2-5)
CASSESGSETQYF

SEQ ID NO: 416839 - protein, 14 aa, Homo sapiens
  CDR3 for alpha chain variable domain of TCR clone 208420 (TRAV12-2, TRAJ13)
CAVKKTGGYQKVTF

SEQ ID NO: 416840 - protein, 16 aa, Homo sapiens
  CDR3 for beta chain variable domain of TCR clone 208420 (TRBV12-5, TRBJ2-5)
WASGPRTSGNQENQYF

SEQ ID NO: 416841 - protein, 16 aa, Homo sapiens
  CDR3 for alpha chain variable domain of TCR clone 208421 (TRAV17, TRAJ35)
CATAEGGIGFGNVLHG

SEQ ID NO: 416842 - protein, 16 aa, Homo sapiens
  CDR3 for beta chain variable domain of TCR clone 208421 (TRBV6-5, TRBJ2-7)
CASSSDPTSGFYEQYF

SEQ ID NO: 416843 - protein, 13 aa, Homo sapiens
  CDR3 for alpha chain variable domain of TCR clone 208422 (TRAV12-2, TRAJ42)
CAVKRGSQGNLTF

SEQ ID NO: 416844 - protein, 16 aa, Homo sapiens
  CDR3 for beta chain variable domain of TCR clone 208422 (TRBV9, TRBJ2-2)
CASSAMGKGNTGELFF

SEQ ID NO: 416845 - protein, 14 aa, Homo sapiens
  CDR3 for alpha chain variable domain of TCR clone 208423 (TRAV12-2, TRAJ13)
CAVKKTGGYQKVTF

SEQ ID NO: 416846 - protein, 16 aa, Homo sapiens
  CDR3 for beta chain variable domain of TCR clone 208423 (TRBV10-3, TRBJ2-1)
CAIRGGGRGDYNEQFF

SEQ ID NO: 416847 - protein, 13 aa, Homo sapiens
  CDR3 for alpha chain variable domain of TCR clone 208424 (TRAV13-1, TRAJ35)
CAAGLGFGNGLHC

SEQ ID NO: 416848 - protein, 15 aa, Homo sapiens
  CDR3 for beta chain variable domain of TCR clone 208424 (TRBV20-1, TRBJ2-7)
CSARDWVSGMDEQYC

SEQ ID NO: 416849 - protein, 16 aa, Homo sapiens
  CDR3 for alpha chain variable domain of TCR clone 208425 (TRAV26-1, TRAJ48)
CIVREPPNFGNEKLTF

SEQ ID NO: 416850 - protein, 12 aa, Homo sapiens
  CDR3 for beta chain variable domain of TCR clone 208425 (TRBV19, TRBJ2-1)
YASSRQGAEQFF

SEQ ID NO: 416851 - protein, 16 aa, Homo sapiens
  CDR3 for alpha chain variable domain of TCR clone 208426 (TRAV8-3, TRAJ13)
CSVGAYPSGGYQKVTF

SEQ ID NO: 416852 - protein, 15 aa, Homo sapiens
  CDR3 for beta chain variable domain of TCR clone 208426 (TRBV19, TRBJ1-5)
CASSIVSADNQPQHF

SEQ ID NO: 416853 - protein, 12 aa, Homo sapiens
  CDR3 for alpha chain variable domain of TCR clone 208427 (TRAV8-6, TRAJ8)
CAVTLGFQKLVF

SEQ ID NO: 416854 - protein, 16 aa, Homo sapiens
  CDR3 for beta chain variable domain of TCR clone 208427 (TRBV7-3, TRBJ2-2)
CASSLKRGTLSGELFF

SEQ ID NO: 416855 - protein, 12 aa, Homo sapiens
  CDR3 for alpha chain variable domain of TCR clone 208428 (TRAV12-2, TRAJ8)
CAGNTGFQKLVF

SEQ ID NO: 416856 - protein, 14 aa, Homo sapiens
  CDR3 for beta chain variable domain of TCR clone 208428 (TRBV20-1, TRBJ1-1)
CSAQTRIGGTEAFF

SEQ ID NO: 416857 - protein, 13 aa, Homo sapiens
  CDR3 for alpha chain variable domain of TCR clone 208429 (TRAV35, TRAJ36)
CAGPRIGGNNLFF

SEQ ID NO: 416858 - protein, 15 aa, Homo sapiens
  CDR3 for beta chain variable domain of TCR clone 208429 (TRBV28, TRBJ2-5)
CASSPPWSYQETQYF

SEQ ID NO: 416859 - protein, 15 aa, Homo sapiens
  CDR3 for alpha chain variable domain of TCR clone 208430 (TRAV12-2, TRAJ53)
CAVNGGGGSNYKLTF

SEQ ID NO: 416860 - protein, 13 aa, Homo sapiens
  CDR3 for beta chain variable domain of TCR clone 208430 (TRBV14, TRBJ1-1)
CASSREFGTEAFF

SEQ ID NO: 416861 - protein, 16 aa, Homo sapiens
  CDR3 for alpha chain variable domain of TCR clone 208431 (TRAV8-6, TRAJ39)
CAVMPMNNNAGNMLTL

SEQ ID NO: 416862 - protein, 16 aa, Homo sapiens
  CDR3 for beta chain variable domain of TCR clone 208431 (TRBV15, TRBJ2-5)
CATSRYLEAAQETQYF

SEQ ID NO: 416863 - protein, 11 aa, Homo sapiens
  CDR3 for alpha chain variable domain of TCR clone 208432 (TRAV21, TRAJ34)
CAVTNTDTLIF

SEQ ID NO: 416864 - protein, 16 aa, Homo sapiens
  CDR3 for beta chain variable domain of TCR clone 208432 (TRBV20-1, TRBJ1-4)
CSAPGQGLLTNEKLFF

SEQ ID NO: 416865 - protein, 14 aa, Homo sapiens
  CDR3 for alpha chain variable domain of TCR clone 208433 (TRAV26-1, TRAJ38)
CIADNAGNNRKLIW

SEQ ID NO: 416866 - protein, 13 aa, Homo sapiens
  CDR3 for beta chain variable domain of TCR clone 208433 (TRBV19, TRBJ1-2)
FASSVPGQDGYTF

SEQ ID NO: 416867 - protein, 14 aa, Homo sapiens
  CDR3 for alpha chain variable domain of TCR clone 208434 (TRAV1-1, TRAJ28)
CAAPSGAGSYQLTF

SEQ ID NO: 416868 - protein, 13 aa, Homo sapiens
  CDR3 for beta chain variable domain of TCR clone 208434 (TRBV7-9, TRBJ2-7)
CASSLQGSYEQYF

SEQ ID NO: 416869 - protein, 17 aa, Homo sapiens
  CDR3 for alpha chain variable domain of TCR clone 208435 (TRAV3, TRAJ6)
CAVRDGPSAGGSYIPTF

SEQ ID NO: 416870 - protein, 14 aa, Homo sapiens
  CDR3 for beta chain variable domain of TCR clone 208435 (TRBV7-2, TRBJ2-7)
CASSTKTSFYEQYF

SEQ ID NO: 416871 - protein, 15 aa, Homo sapiens
  CDR3 for alpha chain variable domain of TCR clone 208436 (TRAV17, TRAJ45)
CATAELGGGADGVTF

SEQ ID NO: 416872 - protein, 14 aa, Homo sapiens
  CDR3 for beta chain variable domain of TCR clone 208436 (TRBV3-1, TRBJ2-5)
CASSQAVRQETQYF

SEQ ID NO: 416873 - protein, 18 aa, Homo sapiens
  CDR3 for alpha chain variable domain of TCR clone 208437 (TRAV12-2, )
CAVEDIQNPDPAVYQLRD

SEQ ID NO: 416874 - protein, 15 aa, Homo sapiens
  CDR3 for beta chain variable domain of TCR clone 208437 (TRBV7-2, TRBJ1-2)
CASSLVSGGDYGYTF

SEQ ID NO: 416875 - protein, 14 aa, Homo sapiens
  CDR3 for alpha chain variable domain of TCR clone 208438 (TRAV8-3, TRAJ39)
CAVGANNAGNMLTF

SEQ ID NO: 416876 - protein, 18 aa, Homo sapiens
  CDR3 for beta chain variable domain of TCR clone 208438 (TRBV7-9, TRBJ2-1)
CASSLAVSGTSGRNEQFF

SEQ ID NO: 416877 - protein, 12 aa, Homo sapiens
  CDR3 for alpha chain variable domain of TCR clone 208439 (TRAV1-1, TRAJ23)
CAVTNQGGKLIF

SEQ ID NO: 416878 - protein, 20 aa, Homo sapiens
  CDR3 for beta chain variable domain of TCR clone 208439 (TRBV7-8, TRBJ2-2)
CASSHLFPGPTIHITGELFF

SEQ ID NO: 416879 - protein, 14 aa, Homo sapiens
  CDR3 for alpha chain variable domain of TCR clone 208440 (TRAV13-1, TRAJ44)
CAAKATGTASKLTF

SEQ ID NO: 416880 - protein, 17 aa, Homo sapiens
  CDR3 for beta chain variable domain of TCR clone 208440 (TRBV7-3, TRBJ2-3)
CATSLMKRMRGADTQYF

SEQ ID NO: 416881 - protein, 17 aa, Homo sapiens
  CDR3 for alpha chain variable domain of TCR clone 208441 (TRAV12-2, TRAJ45)
CAVNIWGSGGGAHGLTF

SEQ ID NO: 416882 - protein, 18 aa, Homo sapiens
  CDR3 for beta chain variable domain of TCR clone 208441 (TRBV20-1, TRBJ2-6)
CSAETTPTHGSGANVLTF

SEQ ID NO: 416883 - protein, 15 aa, Homo sapiens
  CDR3 for alpha chain variable domain of TCR clone 208442 (TRAV26-1, TRAJ29)
CIVRVEGSGNTPLVF

SEQ ID NO: 416884 - protein, 15 aa, Homo sapiens
  CDR3 for beta chain variable domain of TCR clone 208442 (TRBV3-1, TRBJ1-2)
CASSLGQDLWLHLRF

SEQ ID NO: 416885 - protein, 14 aa, Homo sapiens
  CDR3 for alpha chain variable domain of TCR clone 208443 (TRAV12-1, TRAJ42)
CVVIYGGSQGNLIF

SEQ ID NO: 416886 - protein, 14 aa, Homo sapiens
  CDR3 for beta chain variable domain of TCR clone 208443 (TRBV7-9, TRBJ2-2)
CASSLGHRTGELFF

SEQ ID NO: 416887 - protein, 13 aa, Homo sapiens
  CDR3 for alpha chain variable domain of TCR clone 208444 (TRAV21, TRAJ20)
CDVGLRVDYKLSF

SEQ ID NO: 416888 - protein, 17 aa, Homo sapiens
  CDR3 for beta chain variable domain of TCR clone 208444 (TRBV13, TRBJ2-3)
CASSLSRVAGGRNTQYF

SEQ ID NO: 416889 - protein, 11 aa, Homo sapiens
  CDR3 for alpha chain variable domain of TCR clone 208445 (TRAV17, TRAJ36)
CAPTGANNLFF

SEQ ID NO: 416890 - protein, 16 aa, Homo sapiens
  CDR3 for beta chain variable domain of TCR clone 208445 (TRBV4-1, TRBJ1-2)
CASSQDAGQVLYGYTF

SEQ ID NO: 416891 - protein, 13 aa, Homo sapiens
  CDR3 for alpha chain variable domain of TCR clone 208446 (TRAV12-2, TRAJ20)
CAVNRFDDYQLSF

SEQ ID NO: 416892 - protein, 12 aa, Homo sapiens
  CDR3 for beta chain variable domain of TCR clone 208446 (TRBV28, TRBJ2-3)
CASSLYRDTQYF

SEQ ID NO: 416893 - protein, 14 aa, Homo sapiens
  CDR3 for alpha chain variable domain of TCR clone 208447 (TRAV8-1, TRAJ5)
CAVRTDTGRRALTF

SEQ ID NO: 416894 - protein, 16 aa, Homo sapiens
  CDR3 for beta chain variable domain of TCR clone 208447 (TRBV4-1, TRBJ2-1)
CASSQEAGQGSDEQFF

SEQ ID NO: 416895 - protein, 12 aa, Homo sapiens
  CDR3 for alpha chain variable domain of TCR clone 208448 (TRAV13-1, TRAJ11)
CAGPSGYSTPTF

SEQ ID NO: 416896 - protein, 16 aa, Homo sapiens
  CDR3 for beta chain variable domain of TCR clone 208448 (TRBV28, TRBJ2-2)
CASSLEGGSNTGELFF

SEQ ID NO: 416897 - protein, 13 aa, Homo sapiens
  CDR3 for alpha chain variable domain of TCR clone 208449 (TRAV17, TRAJ5)
CAPMDTGRRALTF

SEQ ID NO: 416898 - protein, 15 aa, Homo sapiens
  CDR3 for beta chain variable domain of TCR clone 208449 (TRBV6-6, TRBJ2-5)
CATSPGGGLEETQYF

SEQ ID NO: 416899 - protein, 13 aa, Homo sapiens
  CDR3 for alpha chain variable domain of TCR clone 208450 (TRAV27, TRAJ49)
CAPRPYTGNQFYF

SEQ ID NO: 416900 - protein, 13 aa, Homo sapiens
  CDR3 for beta chain variable domain of TCR clone 208450 (TRBV2, TRBJ1-1)
CASRWTVNTEAFF

SEQ ID NO: 416901 - protein, 14 aa, Homo sapiens
  CDR3 for alpha chain variable domain of TCR clone 208451 (TRAV1-2, TRAJ15)
CAVRDRQAGTALIF

SEQ ID NO: 416902 - protein, 14 aa, Homo sapiens
  CDR3 for beta chain variable domain of TCR clone 208451 (TRBV7-8, TRBJ2-7)
CASSPRDRVYGQYF

SEQ ID NO: 416903 - protein, 15 aa, Homo sapiens
  CDR3 for alpha chain variable domain of TCR clone 208452 (TRAV2, TRAJ52)
CAVRGGGTSYGKLTF

SEQ ID NO: 416904 - protein, 15 aa, Homo sapiens
  CDR3 for beta chain variable domain of TCR clone 208452 (TRBV18, TRBJ1-5)
CASSPSDRSNQPQHF

SEQ ID NO: 416905 - protein, 14 aa, Homo sapiens
  CDR3 for alpha chain variable domain of TCR clone 208453 (TRAV23/DV6, TRAJ17)
CAARGRASGNKLTF

SEQ ID NO: 416906 - protein, 12 aa, Homo sapiens
  CDR3 for beta chain variable domain of TCR clone 208453 (TRBV7-9, TRBJ2-3)
CASSSITDTQYF

SEQ ID NO: 416907 - protein, 13 aa, Homo sapiens
  CDR3 for alpha chain variable domain of TCR clone 208454 (TRAV21, TRAJ15)
CAVANQAGTALIF

SEQ ID NO: 416908 - protein, 14 aa, Homo sapiens
  CDR3 for beta chain variable domain of TCR clone 208454 (TRBV27, TRBJ2-2)
CAGSLGAATGELFF

SEQ ID NO: 416909 - protein, 16 aa, Homo sapiens
  CDR3 for alpha chain variable domain of TCR clone 208455 (TRAV30, TRAJ24)
CGTELVDADSGGKFQF

SEQ ID NO: 416910 - protein, 14 aa, Homo sapiens
  CDR3 for beta chain variable domain of TCR clone 208455 (TRBV12-5, TRBJ2-5)
CASGSRTHQETQYF

SEQ ID NO: 416911 - protein, 16 aa, Homo sapiens
  CDR3 for alpha chain variable domain of TCR clone 208456 (TRAV26-1, TRAJ32)
CIVRTKYGGATNKLIL

SEQ ID NO: 416912 - protein, 14 aa, Homo sapiens
  CDR3 for beta chain variable domain of TCR clone 208456 (TRBV27, TRBJ1-1)
CASSLLSGLSEAFF

SEQ ID NO: 416913 - protein, 14 aa, Homo sapiens
  CDR3 for alpha chain variable domain of TCR clone 208457 (TRAV2, TRAJ37)
CAVDCTSNKGKLIF

SEQ ID NO: 416914 - protein, 15 aa, Homo sapiens
  CDR3 for beta chain variable domain of TCR clone 208457 (TRBV20-1, TRBJ1-1)
CSASRGVTGNTEAFF

SEQ ID NO: 416915 - protein, 16 aa, Homo sapiens
  CDR3 for alpha chain variable domain of TCR clone 208458 (TRAV3, TRAJ23)
CAVKRGIYNQGGKLIF

SEQ ID NO: 416916 - protein, 17 aa, Homo sapiens
  CDR3 for beta chain variable domain of TCR clone 208458 (TRBV10-3, TRBJ2-6)
CAISESTAPSGANVLTF

SEQ ID NO: 416917 - protein, 18 aa, Homo sapiens
  CDR3 for alpha chain variable domain of TCR clone 208459 (TRAV1-2, TRAJ18)
CAVRDMGDRGSTLGRLYF

SEQ ID NO: 416918 - protein, 13 aa, Homo sapiens
  CDR3 for beta chain variable domain of TCR clone 208459 (TRBV10-1, TRBJ2-1)
CASSAGPDNEQFF

SEQ ID NO: 416919 - protein, 19 aa, Homo sapiens
  CDR3 for alpha chain variable domain of TCR clone 208460 (TRAV26-1, TRAJ52)
CIVRVANNAGGTSYGKLTF

SEQ ID NO: 416920 - protein, 14 aa, Homo sapiens
  CDR3 for beta chain variable domain of TCR clone 208460 (TRBV4-1, TRBJ2-2)
CASSQAVNTGELFF

SEQ ID NO: 416921 - protein, 11 aa, Homo sapiens
  CDR3 for alpha chain variable domain of TCR clone 208461 (TRAV13-1, TRAJ49)
CAARIGNQFYF

SEQ ID NO: 416922 - protein, 20 aa, Homo sapiens
  CDR3 for beta chain variable domain of TCR clone 208461 (TRBV7-8, TRBJ2-2)
CASSHLFPGPTIHITGELFF

SEQ ID NO: 416923 - protein, 14 aa, Homo sapiens
  CDR3 for alpha chain variable domain of TCR clone 208462 (TRAV9-2, TRAJ39)
CALYIYNADNMLTF

SEQ ID NO: 416924 - protein, 13 aa, Homo sapiens
  CDR3 for beta chain variable domain of TCR clone 208462 (TRBV12-5, TRBJ2-3)
CASGDRQSDTQYF

SEQ ID NO: 416925 - protein, 17 aa, Homo sapiens
  CDR3 for alpha chain variable domain of TCR clone 208463 (TRAV3, TRAJ38)
CAVRDCLNAGNNRKLVW

SEQ ID NO: 416926 - protein, 16 aa, Homo sapiens
  CDR3 for beta chain variable domain of TCR clone 208463 (TRBV20-1, TRBJ1-4)
CSARPYGGELNEKLFF

SEQ ID NO: 416927 - protein, 17 aa, Homo sapiens
  CDR3 for alpha chain variable domain of TCR clone 208464 (TRAV26-2, TRAJ28)
CILRPLLIVAWSYQLTF

SEQ ID NO: 416928 - protein, 16 aa, Homo sapiens
  CDR3 for beta chain variable domain of TCR clone 208464 (TRBV6-4, TRBJ1-4)
CASSETGQDPNEKLFF

SEQ ID NO: 416929 - protein, 12 aa, Homo sapiens
  CDR3 for alpha chain variable domain of TCR clone 208465 (TRAV8-4, TRAJ43)
CAVSVNNNDMRF

SEQ ID NO: 416930 - protein, 14 aa, Homo sapiens
  CDR3 for beta chain variable domain of TCR clone 208465 (TRBV11-2, TRBJ2-7)
CASSSTGEGYEQYF

SEQ ID NO: 416931 - protein, 11 aa, Homo sapiens
  CDR3 for alpha chain variable domain of TCR clone 208466 (TRAV1-2, TRAJ20)
CAVSNDYKLSF

SEQ ID NO: 416932 - protein, 11 aa, Homo sapiens
  CDR3 for beta chain variable domain of TCR clone 208466 (TRBV12-4, TRBJ2-3)
CASTATDTQYF

SEQ ID NO: 416933 - protein, 17 aa, Homo sapiens
  CDR3 for alpha chain variable domain of TCR clone 208467 (TRAV14/DV4, TRAJ4)
CATREASGRGGYNKLIF

SEQ ID NO: 416934 - protein, 14 aa, Homo sapiens
  CDR3 for beta chain variable domain of TCR clone 208467 (TRBV19, TRBJ2-7)
CASSRGQGAIEQYF

SEQ ID NO: 416935 - protein, 13 aa, Homo sapiens
  CDR3 for alpha chain variable domain of TCR clone 208468 (TRAV12-2, TRAJ20)
CAVYPSNDYKLSF

SEQ ID NO: 416936 - protein, 13 aa, Homo sapiens
  CDR3 for beta chain variable domain of TCR clone 208468 (TRBV7-3, TRBJ2-1)
RASSPVAYNEQFF

SEQ ID NO: 416937 - protein, 16 aa, Homo sapiens
  CDR3 for alpha chain variable domain of TCR clone 208469 (TRAV1-2, TRAJ10)
CAVRGVLTGGGNKLTF

SEQ ID NO: 416938 - protein, 15 aa, Homo sapiens
  CDR3 for beta chain variable domain of TCR clone 208469 (TRBV27, TRBJ2-7)
CASSTIVTGAYEQYF

SEQ ID NO: 416939 - protein, 16 aa, Homo sapiens
  CDR3 for alpha chain variable domain of TCR clone 208470 (TRAV23/DV6, TRAJ9)
CAASIGGNTGGFKTIF

SEQ ID NO: 416940 - protein, 15 aa, Homo sapiens
  CDR3 for beta chain variable domain of TCR clone 208470 (TRBV4-1, TRBJ2-3)
CASSRGQGIPDTQYF

SEQ ID NO: 416941 - protein, 14 aa, Homo sapiens
  CDR3 for alpha chain variable domain of TCR clone 208471 (TRAV29/DV5, TRAJ32)
CAAAYGGVTNKLIF

SEQ ID NO: 416942 - protein, 14 aa, Homo sapiens
  CDR3 for beta chain variable domain of TCR clone 208471 (TRBV20-1, TRBJ1-1)
CSAQTRIGGTEAFF

SEQ ID NO: 416943 - protein, 14 aa, Homo sapiens
  CDR3 for alpha chain variable domain of TCR clone 208472 (TRAV1-2, TRAJ8)
CAVREETGFQKLVF

SEQ ID NO: 416944 - protein, 14 aa, Homo sapiens
  CDR3 for beta chain variable domain of TCR clone 208472 (TRBV7-2, TRBJ2-7)
CASSLYPGRYEQYF

SEQ ID NO: 416945 - protein, 12 aa, Homo sapiens
  CDR3 for alpha chain variable domain of TCR clone 208473 (TRAV1-1, TRAJ39)
CAVPVGGNMLTF

SEQ ID NO: 416946 - protein, 17 aa, Homo sapiens
  CDR3 for beta chain variable domain of TCR clone 208473 (TRBV28, TRBJ2-5)
CASSTPEGDALQETQYF

SEQ ID NO: 416947 - protein, 13 aa, Homo sapiens
  CDR3 for alpha chain variable domain of TCR clone 208474 (TRAV20, TRAJ37)
CAGCSSNTGKLIF

SEQ ID NO: 416948 - protein, 13 aa, Homo sapiens
  CDR3 for beta chain variable domain of TCR clone 208474 (TRBV19, TRBJ1-2)
CASSQGQVYGYTF

SEQ ID NO: 416949 - protein, 11 aa, Homo sapiens
  CDR3 for alpha chain variable domain of TCR clone 208475 (TRAV12-3, TRAJ27)
CAMANAGKSTF

SEQ ID NO: 416950 - protein, 11 aa, Homo sapiens
  CDR3 for beta chain variable domain of TCR clone 208475 (TRBV20-1, TRBJ1-5)
CSAQGDQPQHF

SEQ ID NO: 416951 - protein, 13 aa, Homo sapiens
  CDR3 for alpha chain variable domain of TCR clone 208476 (TRAV12-3, TRAJ35)
CAMSIGFGNVLHC

SEQ ID NO: 416952 - protein, 14 aa, Homo sapiens
  CDR3 for beta chain variable domain of TCR clone 208476 (TRBV13, TRBJ2-5)
CASSLERVGETQYF

SEQ ID NO: 416953 - protein, 18 aa, Homo sapiens
  CDR3 for alpha chain variable domain of TCR clone 208477 (TRAV21, TRAJ52)
CAVRPSPAGGTSYGKLTF

SEQ ID NO: 416954 - protein, 18 aa, Homo sapiens
  CDR3 for beta chain variable domain of TCR clone 208477 (TRBV27, TRBJ2-3)
CASSLSGTSGRGTDTQYF

SEQ ID NO: 416955 - protein, 11 aa, Homo sapiens
  CDR3 for alpha chain variable domain of TCR clone 208478 (TRAV21, TRAJ34)
CAHYNTDKLIF

SEQ ID NO: 416956 - protein, 14 aa, Homo sapiens
  CDR3 for beta chain variable domain of TCR clone 208478 (TRBV7-9, TRBJ1-1)
CASTPLQSYTETFF

SEQ ID NO: 416957 - protein, 11 aa, Homo sapiens
  CDR3 for alpha chain variable domain of TCR clone 208479 (TRAV1-1, TRAJ23)
CAVRQGGKLIF

SEQ ID NO: 416958 - protein, 14 aa, Homo sapiens
  CDR3 for beta chain variable domain of TCR clone 208479 (TRBV19, TRBJ1-5)
CASRAPDSFLSQHF

SEQ ID NO: 416959 - protein, 11 aa, Homo sapiens
  CDR3 for alpha chain variable domain of TCR clone 208480 (TRAV12-1, TRAJ34)
CVVNKGRELIF

SEQ ID NO: 416960 - protein, 12 aa, Homo sapiens
  CDR3 for beta chain variable domain of TCR clone 208480 (TRBV2, TRBJ2-1)
FAYGPPGNEQFF

SEQ ID NO: 416961 - protein, 15 aa, Homo sapiens
  CDR3 for alpha chain variable domain of TCR clone 208481 (TRAV13-2, TRAJ29)
GDSAARDGGNTPLVF

SEQ ID NO: 416962 - protein, 14 aa, Homo sapiens
  CDR3 for beta chain variable domain of TCR clone 208481 (TRBV7-6, TRBJ2-3)
CASSLGTVTDTQYF

SEQ ID NO: 416963 - protein, 13 aa, Homo sapiens
  CDR3 for alpha chain variable domain of TCR clone 208482 (TRAV26-1, TRAJ24)
CIVGVDSWGKLQF

SEQ ID NO: 416964 - protein, 15 aa, Homo sapiens
  CDR3 for beta chain variable domain of TCR clone 208482 (TRBV27, TRBJ2-1)
CASSLARGAYNEQFF

SEQ ID NO: 416965 - protein, 14 aa, Homo sapiens
  CDR3 for alpha chain variable domain of TCR clone 208483 (TRAV12-3, TRAJ10)
SHLPLTGGGNKLTF

SEQ ID NO: 416966 - protein, 15 aa, Homo sapiens
  CDR3 for beta chain variable domain of TCR clone 208483 (TRBV4-1, TRBJ1-4)
CTSSDTGGTNEKLFF

SEQ ID NO: 416967 - protein, 15 aa, Homo sapiens
  CDR3 for alpha chain variable domain of TCR clone 208484 (TRAV13-1, TRAJ6)
CAAIHPSGGSYIPTF

SEQ ID NO: 416968 - protein, 14 aa, Homo sapiens
  CDR3 for beta chain variable domain of TCR clone 208484 (TRBV7-9, TRBJ2-2)
CASGLAINTRELFF

SEQ ID NO: 416969 - protein, 14 aa, Homo sapiens
  CDR3 for alpha chain variable domain of TCR clone 208485 (TRAV17, TRAJ35)
CATDRAGFGNVPDC

SEQ ID NO: 416970 - protein, 19 aa, Homo sapiens
  CDR3 for beta chain variable domain of TCR clone 208485 (TRBV11-3, TRBJ2-2)
CASSTRPGAKTTNTGELFF

SEQ ID NO: 416971 - protein, 16 aa, Homo sapiens
  CDR3 for alpha chain variable domain of TCR clone 208486 (TRAV27, TRAJ52)
CAGAPAGGTSYGKLAF

SEQ ID NO: 416972 - protein, 12 aa, Homo sapiens
  CDR3 for beta chain variable domain of TCR clone 208486 (TRBV27, TRBJ2-1)
CASRGFYNEQFF

SEQ ID NO: 416973 - protein, 17 aa, Homo sapiens
  CDR3 for alpha chain variable domain of TCR clone 208487 (TRAV8-3, TRAJ52)
CAVGAEAGGTSYGKLTF

SEQ ID NO: 416974 - protein, 15 aa, Homo sapiens
  CDR3 for beta chain variable domain of TCR clone 208487 (TRBV11-3, TRBJ1-1)
CASSGRTGSNTEAFF

SEQ ID NO: 416975 - protein, 15 aa, Homo sapiens
  CDR3 for alpha chain variable domain of TCR clone 208488 (TRAV23/DV6, TRAJ4)
CAASPLRGGYNKLIF

SEQ ID NO: 416976 - protein, 15 aa, Homo sapiens
  CDR3 for beta chain variable domain of TCR clone 208488 (TRBV7-9, TRBJ1-6)
CASSAPGRGNSPLHF

SEQ ID NO: 416977 - protein, 16 aa, Homo sapiens
  CDR3 for alpha chain variable domain of TCR clone 208489 (TRAV3, TRAJ10)
CAVRDMRAGGGNKLTF

SEQ ID NO: 416978 - protein, 13 aa, Homo sapiens
  CDR3 for beta chain variable domain of TCR clone 208489 (TRBV24-1, TRBJ2-1)
CATSAGPYNEQFF

SEQ ID NO: 416979 - protein, 14 aa, Homo sapiens
  CDR3 for alpha chain variable domain of TCR clone 208490 (TRAV12-3, TRAJ10)
SHLPPKGGGNKLTF

SEQ ID NO: 416980 - protein, 15 aa, Homo sapiens
  CDR3 for beta chain variable domain of TCR clone 208490 (TRBV7-2, TRBJ2-7)
CASSLKGALTYEQYF

SEQ ID NO: 416981 - protein, 15 aa, Homo sapiens
  CDR3 for alpha chain variable domain of TCR clone 208491 (TRAV26-1, TRAJ38)
CIVRAEGGNNRKLIW

SEQ ID NO: 416982 - protein, 13 aa, Homo sapiens
  CDR3 for beta chain variable domain of TCR clone 208491 (TRBV7-9, TRBJ1-1)
CASTQGMNTEAFF

SEQ ID NO: 416983 - protein, 11 aa, Homo sapiens
  CDR3 for alpha chain variable domain of TCR clone 208492 (TRAV13-2, TRAJ20)
CAENMSYKPSF

SEQ ID NO: 416984 - protein, 13 aa, Homo sapiens
  CDR3 for beta chain variable domain of TCR clone 208492 (TRBV20-1, TRBJ2-5)
CSARYTGEETQYF

SEQ ID NO: 416985 - protein, 14 aa, Homo sapiens
  CDR3 for alpha chain variable domain of TCR clone 208493 (TRAV12-2, TRAJ40)
CAVKIPSGTYKYIF

SEQ ID NO: 416986 - protein, 14 aa, Homo sapiens
  CDR3 for beta chain variable domain of TCR clone 208493 (TRBV20-1, TRBJ1-1)
CSAQTRSGGTEAFC

SEQ ID NO: 416987 - protein, 16 aa, Homo sapiens
  CDR3 for alpha chain variable domain of TCR clone 208494 (TRAV35, TRAJ54)
SDVGIYPLQGAQKLVF

SEQ ID NO: 416988 - protein, 16 aa, Homo sapiens
  CDR3 for beta chain variable domain of TCR clone 208494 (TRBV4-1, TRBJ2-3)
CASSQRAGGLTDTQYF

SEQ ID NO: 416989 - protein, 11 aa, Homo sapiens
  CDR3 for alpha chain variable domain of TCR clone 208495 (TRAV4, TRAJ23)
CLVAPVGKLIF

SEQ ID NO: 416990 - protein, 15 aa, Homo sapiens
  CDR3 for beta chain variable domain of TCR clone 208495 (TRBV7-2, TRBJ2-1)
CASSLQADEYNEQFF

SEQ ID NO: 416991 - protein, 14 aa, Homo sapiens
  CDR3 for alpha chain variable domain of TCR clone 208496 (TRAV17, TRAJ34)
CATDSLEDTDKLIF

SEQ ID NO: 416992 - protein, 13 aa, Homo sapiens
  CDR3 for beta chain variable domain of TCR clone 208496 (TRBV11-2, TRBJ2-7)
CASSGTRPYEQYF

SEQ ID NO: 416993 - protein, 16 aa, Homo sapiens
  CDR3 for alpha chain variable domain of TCR clone 208497 (TRAV29/DV5, TRAJ36)
CSASAGVETGANNLFF

SEQ ID NO: 416994 - protein, 16 aa, Homo sapiens
  CDR3 for beta chain variable domain of TCR clone 208497 (TRBV5-1, TRBJ2-3)
CASSLGLAVYTDTQYF

SEQ ID NO: 416995 - protein, 13 aa, Homo sapiens
  CDR3 for alpha chain variable domain of TCR clone 208498 (TRAV21, TRAJ20)
CAVGLRVDYKLSF

SEQ ID NO: 416996 - protein, 15 aa, Homo sapiens
  CDR3 for beta chain variable domain of TCR clone 208498 (TRBV20-1, TRBJ2-1)
CSASSAGSSYNEQFF

SEQ ID NO: 416997 - protein, 13 aa, Homo sapiens
  CDR3 for alpha chain variable domain of TCR clone 208499 (TRAV2, TRAJ35)
CAVSCGFGNVLHC

SEQ ID NO: 416998 - protein, 16 aa, Homo sapiens
  CDR3 for beta chain variable domain of TCR clone 208499 (TRBV12-5, TRBJ2-5)
CASGPRTSGNQETQYF

SEQ ID NO: 416999 - protein, 17 aa, Homo sapiens
  CDR3 for alpha chain variable domain of TCR clone 208500 (TRAV26-1, TRAJ27)
CIVSTPWINTNSGKSTF

SEQ ID NO: 417000 - protein, 16 aa, Homo sapiens
  CDR3 for beta chain variable domain of TCR clone 208500 (TRBV7-9, TRBJ2-1)
CASSLDPGLAIDEQFF

SEQ ID NO: 417001 - protein, 18 aa, Homo sapiens
  CDR3 for alpha chain variable domain of TCR clone 208501 (TRAV21, TRAJ52)
CAVRPSPAGGTSYGKLTF

SEQ ID NO: 417002 - protein, 17 aa, Homo sapiens
  CDR3 for beta chain variable domain of TCR clone 208501 (TRBV11-2, TRBJ2-1)
CASSLYPPGVEYNGQFF

SEQ ID NO: 417003 - protein, 13 aa, Homo sapiens
  CDR3 for alpha chain variable domain of TCR clone 208502 (TRAV3, TRAJ20)
CAVRDTPRYKLSF

SEQ ID NO: 417004 - protein, 14 aa, Homo sapiens
  CDR3 for beta chain variable domain of TCR clone 208502 (TRBV11-1, TRBJ2-7)
CASTFAVPSNEQYF

SEQ ID NO: 417005 - protein, 14 aa, Homo sapiens
  CDR3 for alpha chain variable domain of TCR clone 208503 (TRAV21, TRAJ35)
CAVMPIGFGNVLHC

SEQ ID NO: 417006 - protein, 15 aa, Homo sapiens
  CDR3 for beta chain variable domain of TCR clone 208503 (TRBV7-2, TRBJ1-2)
CASRLGTGGNYGYTF

SEQ ID NO: 417007 - protein, 12 aa, Homo sapiens
  CDR3 for alpha chain variable domain of TCR clone 208504 (TRAV36/DV7, TRAJ50)
CAVEPENLLRQD

SEQ ID NO: 417008 - protein, 13 aa, Homo sapiens
  CDR3 for beta chain variable domain of TCR clone 208504 (TRBV7-2, TRBJ2-7)
CASSSPSGSEQYF

SEQ ID NO: 417009 - protein, 13 aa, Homo sapiens
  CDR3 for alpha chain variable domain of TCR clone 208505 (TRAV3, TRAJ31)
CAVREGNNARLMF

SEQ ID NO: 417010 - protein, 15 aa, Homo sapiens
  CDR3 for beta chain variable domain of TCR clone 208505 (TRBV7-3, TRBJ2-1)
CASSPTGGGEVEQFF

SEQ ID NO: 417011 - protein, 14 aa, Homo sapiens
  CDR3 for alpha chain variable domain of TCR clone 208506 (TRAV13-1, TRAJ35)
CAASKGGFGNVLHC

SEQ ID NO: 417012 - protein, 16 aa, Homo sapiens
  CDR3 for beta chain variable domain of TCR clone 208506 (TRBV7-2, TRBJ1-4)
CASSLAPGRRDEKLFF

SEQ ID NO: 417013 - protein, 13 aa, Homo sapiens
  CDR3 for alpha chain variable domain of TCR clone 208507 (TRAV8-4, TRAJ15)
CCDYPEAGTALIF

SEQ ID NO: 417014 - protein, 13 aa, Homo sapiens
  CDR3 for beta chain variable domain of TCR clone 208507 (TRBV10-3, TRBJ2-7)
CAISEKGGYEQYF

SEQ ID NO: 417015 - protein, 16 aa, Homo sapiens
  CDR3 for alpha chain variable domain of TCR clone 208508 (TRAV12-3, TRAJ53)
CAMSPGSGGSNYKLTF

SEQ ID NO: 417016 - protein, 13 aa, Homo sapiens
  CDR3 for beta chain variable domain of TCR clone 208508 (TRBV7-8, TRBJ2-7)
RRVRLTEMGEQYF

SEQ ID NO: 417017 - protein, 15 aa, Homo sapiens
  CDR3 for alpha chain variable domain of TCR clone 208509 (TRAV8-2, TRAJ44)
CVVSPNTGTASKLTF

SEQ ID NO: 417018 - protein, 12 aa, Homo sapiens
  CDR3 for beta chain variable domain of TCR clone 208509 (TRBV11-2, TRBJ2-2)
CEVPRNTGELFF

SEQ ID NO: 417019 - protein, 17 aa, Homo sapiens
  CDR3 for alpha chain variable domain of TCR clone 208510 (TRAV27, TRAJ52)
CAGAGWAGGTSNGKLTF

SEQ ID NO: 417020 - protein, 16 aa, Homo sapiens
  CDR3 for beta chain variable domain of TCR clone 208510 (TRBV19, TRBJ2-1)
CASSKAGPSSYNEQFF

SEQ ID NO: 417021 - protein, 17 aa, Homo sapiens
  CDR3 for alpha chain variable domain of TCR clone 208511 (TRAV12-3, TRAJ52)
CAMSARAGGTSYGKLTF

SEQ ID NO: 417022 - protein, 15 aa, Homo sapiens
  CDR3 for beta chain variable domain of TCR clone 208511 (TRBV6-1, TRBJ2-6)
CASRSDDSGANVLTF

SEQ ID NO: 417023 - protein, 16 aa, Homo sapiens
  CDR3 for alpha chain variable domain of TCR clone 208512 (TRAV2, TRAJ4)
CAVEDRFSGGHNKLIF

SEQ ID NO: 417024 - protein, 16 aa, Homo sapiens
  CDR3 for beta chain variable domain of TCR clone 208512 (TRBV5-1, TRBJ2-3)
CASSLGLAVYTDTQYF

SEQ ID NO: 417025 - protein, 10 aa, Homo sapiens
  CDR3 for alpha chain variable domain of TCR clone 208513 (TRAV29/DV5, TRAJ48)
CAAGGEKLTF

SEQ ID NO: 417026 - protein, 14 aa, Homo sapiens
  CDR3 for beta chain variable domain of TCR clone 208513 (TRBV7-9, TRBJ2-5)
CGSSLAPDQETQYF

SEQ ID NO: 417027 - protein, 18 aa, Homo sapiens
  CDR3 for alpha chain variable domain of TCR clone 208514 (TRAV21, TRAJ52)
CAVRPSPAGGTSYGKLTF

SEQ ID NO: 417028 - protein, 16 aa, Homo sapiens
  CDR3 for beta chain variable domain of TCR clone 208514 (TRBV2, TRBJ2-3)
CASSPRDSTYTDTQYF

SEQ ID NO: 417029 - protein, 14 aa, Homo sapiens
  CDR3 for alpha chain variable domain of TCR clone 208515 (TRAV1-2, TRAJ8)
CAVREDTGFQKIVF

SEQ ID NO: 417030 - protein, 13 aa, Homo sapiens
  CDR3 for beta chain variable domain of TCR clone 208515 (TRBV23-1, TRBJ1-4)
CASRGKFNEKLFF

SEQ ID NO: 417031 - protein, 13 aa, Homo sapiens
  CDR3 for alpha chain variable domain of TCR clone 208516 (TRAV2, TRAJ15)
CAVASQSGTALIF

SEQ ID NO: 417032 - protein, 17 aa, Homo sapiens
  CDR3 for beta chain variable domain of TCR clone 208516 (TRBV20-1, TRBJ2-2)
CSAGGSGQGGLTGELFF

SEQ ID NO: 417033 - protein, 14 aa, Homo sapiens
  CDR3 for alpha chain variable domain of TCR clone 208517 (TRAV8-3, TRAJ4)
CAVGASGGYNKLIF

SEQ ID NO: 417034 - protein, 16 aa, Homo sapiens
  CDR3 for beta chain variable domain of TCR clone 208517 (TRBV4-3, TRBJ2-2)
CASSHLQGSGTGELFF

SEQ ID NO: 417035 - protein, 18 aa, Homo sapiens
  CDR3 for alpha chain variable domain of TCR clone 208518 (TRAV12-3, TRAJ52)
CAMSVGGAGGTSYGKLTF

SEQ ID NO: 417036 - protein, 15 aa, Homo sapiens
  CDR3 for beta chain variable domain of TCR clone 208518 (TRBV28, TRBJ2-1)
CASSGLAEVDNEQFF

SEQ ID NO: 417037 - protein, 14 aa, Homo sapiens
  CDR3 for alpha chain variable domain of TCR clone 208519 (TRAV12-3, TRAJ10)
SHLPLTGGGNKLTF

SEQ ID NO: 417038 - protein, 12 aa, Homo sapiens
  CDR3 for beta chain variable domain of TCR clone 208519 (TRBV7-9, TRBJ2-7)
CASSIKLEEQYF

SEQ ID NO: 417039 - protein, 15 aa, Homo sapiens
  CDR3 for alpha chain variable domain of TCR clone 208520 (TRAV2, TRAJ28)
CAVPYSGAVSYQLTF

SEQ ID NO: 417040 - protein, 17 aa, Homo sapiens
  CDR3 for beta chain variable domain of TCR clone 208520 (TRBV20-1, TRBJ2-4)
CSARDWASGGRENIQYF

SEQ ID NO: 417041 - protein, 13 aa, Homo sapiens
  CDR3 for alpha chain variable domain of TCR clone 208521 (TRAV1-2, TRAJ9)
CAALNTGGFITIF

SEQ ID NO: 417042 - protein, 13 aa, Homo sapiens
  CDR3 for beta chain variable domain of TCR clone 208521 (TRBV19, TRBJ1-2)
CASSVPGQDGYAF

SEQ ID NO: 417043 - protein, 14 aa, Homo sapiens
  CDR3 for alpha chain variable domain of TCR clone 208522 (TRAV1-2, TRAJ8)
FAVREDTGFQKLVF

SEQ ID NO: 417044 - protein, 11 aa, Homo sapiens
  CDR3 for beta chain variable domain of TCR clone 208522 (TRBV29-1, TRBJ1-4)
CSVSSGEKLFF

SEQ ID NO: 417045 - protein, 12 aa, Homo sapiens
  CDR3 for alpha chain variable domain of TCR clone 208523 (TRAV12-3, TRAJ17)
CAMTLTGNKLTF

SEQ ID NO: 417046 - protein, 15 aa, Homo sapiens
  CDR3 for beta chain variable domain of TCR clone 208523 (TRBV20-1, TRBJ2-7)
CSARDPVKGEGEQYF

SEQ ID NO: 417047 - protein, 14 aa, Homo sapiens
  CDR3 for alpha chain variable domain of TCR clone 208524 (TRAV8-2, TRAJ37)
CVVSISGNTGKLIF

SEQ ID NO: 417048 - protein, 15 aa, Homo sapiens
  CDR3 for beta chain variable domain of TCR clone 208524 (TRBV7-2, TRBJ1-1)
CASSPQGGANTEAFF

SEQ ID NO: 417049 - protein, 12 aa, Homo sapiens
  CDR3 for alpha chain variable domain of TCR clone 208525 (TRAV36/DV7, TRAJ54)
CAVVRGAQKLVF

SEQ ID NO: 417050 - protein, 13 aa, Homo sapiens
  CDR3 for beta chain variable domain of TCR clone 208525 (TRBV11-2, TRBJ2-5)
CASGRGPSETQYF

SEQ ID NO: 417051 - protein, 16 aa, Homo sapiens
  CDR3 for alpha chain variable domain of TCR clone 208526 (TRAV16, TRAJ21)
CACGWATTSTNFTLDL

SEQ ID NO: 417052 - protein, 15 aa, Homo sapiens
  CDR3 for beta chain variable domain of TCR clone 208526 (TRBV19, TRBJ2-1)
CASSIQATSYNEQLF

SEQ ID NO: 417053 - protein, 15 aa, Homo sapiens
  CDR3 for alpha chain variable domain of TCR clone 208527 (TRAV14/DV4, TRAJ47)
CAMREAMEYGNKRVF

SEQ ID NO: 417054 - protein, 15 aa, Homo sapiens
  CDR3 for beta chain variable domain of TCR clone 208527 (TRBV7-3, TRBJ2-1)
CASSLGQGPFGEQFF

SEQ ID NO: 417055 - protein, 17 aa, Homo sapiens
  CDR3 for alpha chain variable domain of TCR clone 208528 (TRAV3, TRAJ6)
CAVRDGPRAGGSYIPTF

SEQ ID NO: 417056 - protein, 15 aa, Homo sapiens
  CDR3 for beta chain variable domain of TCR clone 208528 (TRBV4-1, TRBJ2-5)
CASSQSRGDQETQYF

SEQ ID NO: 417057 - protein, 16 aa, Homo sapiens
  CDR3 for alpha chain variable domain of TCR clone 208529 (TRAV3, TRAJ37)
CAVRGKGSGNTGKLIF

SEQ ID NO: 417058 - protein, 16 aa, Homo sapiens
  CDR3 for beta chain variable domain of TCR clone 208529 (TRBV7-9, TRBJ1-3)
CASSQTSGLRMGTIYF

SEQ ID NO: 417059 - protein, 16 aa, Homo sapiens
  CDR3 for alpha chain variable domain of TCR clone 208530 (TRAV3, TRAJ5)
CAVRNLMDTGRRALTF

SEQ ID NO: 417060 - protein, 16 aa, Homo sapiens
  CDR3 for beta chain variable domain of TCR clone 208530 (TRBV29-1, TRBJ2-7)
CSVEVVGTSGSYEQYF

SEQ ID NO: 417061 - protein, 13 aa, Homo sapiens
  CDR3 for alpha chain variable domain of TCR clone 208531 (TRAV2, TRAJ40)
CSVVTSGTYRYIF

SEQ ID NO: 417062 - protein, 14 aa, Homo sapiens
  CDR3 for beta chain variable domain of TCR clone 208531 (TRBV19, TRBJ2-1)
CASPTFVLSGEQFF

SEQ ID NO: 417063 - protein, 16 aa, Homo sapiens
  CDR3 for alpha chain variable domain of TCR clone 208532 (TRAV12-2, )
WAVEDIQNPDPAVYQL

SEQ ID NO: 417064 - protein, 16 aa, Homo sapiens
  CDR3 for beta chain variable domain of TCR clone 208532 (TRBV6-1, TRBJ1-2)
CASSGALQGRSHGYTF

SEQ ID NO: 417065 - protein, 14 aa, Homo sapiens
  CDR3 for alpha chain variable domain of TCR clone 208533 (TRAV2, TRAJ29)
CAVEFYSGNTPLVF

SEQ ID NO: 417066 - protein, 15 aa, Homo sapiens
  CDR3 for beta chain variable domain of TCR clone 208533 (TRBV19, TRBJ2-5)
CASSIARARGETQYF

SEQ ID NO: 417067 - protein, 14 aa, Homo sapiens
  CDR3 for alpha chain variable domain of TCR clone 208534 (TRAV8-2, TRAJ4)
CVVSPSGGYNKLIF

SEQ ID NO: 417068 - protein, 16 aa, Homo sapiens
  CDR3 for beta chain variable domain of TCR clone 208534 (TRBV7-3, TRBJ2-3)
CASSLSGYRPEDTQYF

SEQ ID NO: 417069 - protein, 12 aa, Homo sapiens
  CDR3 for alpha chain variable domain of TCR clone 208535 (TRAV8-3, TRAJ26)
CAGDNYGQNFVF

SEQ ID NO: 417070 - protein, 11 aa, Homo sapiens
  CDR3 for beta chain variable domain of TCR clone 208535 (TRBV29-1, TRBJ2-5)
CSEDRTWTQYF

SEQ ID NO: 417071 - protein, 11 aa, Homo sapiens
  CDR3 for alpha chain variable domain of TCR clone 208536 (TRAV2, TRAJ13)
CASGGYQKVTF

SEQ ID NO: 417072 - protein, 17 aa, Homo sapiens
  CDR3 for beta chain variable domain of TCR clone 208536 (TRBV7-3, TRBJ2-3)
CASRLMKRMRGADTRYF

SEQ ID NO: 417073 - protein, 15 aa, Homo sapiens
  CDR3 for alpha chain variable domain of TCR clone 208537 (TRAV14/DV4, TRAJ26)
CAMREGQNYGQNFVF

SEQ ID NO: 417074 - protein, 13 aa, Homo sapiens
  CDR3 for beta chain variable domain of TCR clone 208537 (TRBV12-4, TRBJ1-2)
CASSLRQGKGYTF

SEQ ID NO: 417075 - protein, 14 aa, Homo sapiens
  CDR3 for alpha chain variable domain of TCR clone 208538 (TRAV1-2, TRAJ8)
CAVREDTGFQKLVF

SEQ ID NO: 417076 - protein, 16 aa, Homo sapiens
  CDR3 for beta chain variable domain of TCR clone 208538 (TRBV7-2, TRBJ2-5)
CASSLAVSGGGETQYF

SEQ ID NO: 417077 - protein, 13 aa, Homo sapiens
  CDR3 for alpha chain variable domain of TCR clone 208539 (TRAV12-2, TRAJ39)
CAVNNNAGNMLTF

SEQ ID NO: 417078 - protein, 13 aa, Homo sapiens
  CDR3 for beta chain variable domain of TCR clone 208539 (TRBV2, TRBJ1-5)
CATAGPGNQRQHF

SEQ ID NO: 417079 - protein, 15 aa, Homo sapiens
  CDR3 for alpha chain variable domain of TCR clone 208540 (TRAV12-3, TRAJ6)
CAMSAASGGSYISTF

SEQ ID NO: 417080 - protein, 13 aa, Homo sapiens
  CDR3 for beta chain variable domain of TCR clone 208540 (TRBV20-1, TRBJ1-2)
CSASTERIYGYTF

SEQ ID NO: 417081 - protein, 12 aa, Homo sapiens
  CDR3 for alpha chain variable domain of TCR clone 208541 (TRAV2, TRAJ33)
CAVPDSNYQLIW

SEQ ID NO: 417082 - protein, 17 aa, Homo sapiens
  CDR3 for beta chain variable domain of TCR clone 208541 (TRBV6-5, TRBJ2-3)
CASSYGTSLCKSDTQYF

SEQ ID NO: 417083 - protein, 13 aa, Homo sapiens
  CDR3 for alpha chain variable domain of TCR clone 208542 (TRAV8-3, TRAJ28)
CAVGAVGSYQLTF

SEQ ID NO: 417084 - protein, 16 aa, Homo sapiens
  CDR3 for beta chain variable domain of TCR clone 208542 (TRBV2, TRBJ2-6)
CASSETGGSGANVLTF

SEQ ID NO: 417085 - protein, 12 aa, Homo sapiens
  CDR3 for alpha chain variable domain of TCR clone 208543 (TRAV13-1, TRAJ53)
AASGGSNYKLSF

SEQ ID NO: 417086 - protein, 15 aa, Homo sapiens
  CDR3 for beta chain variable domain of TCR clone 208543 (TRBV5-1, TRBJ2-1)
GASSPPRAPYNEQFF

SEQ ID NO: 417087 - protein, 11 aa, Homo sapiens
  CDR3 for alpha chain variable domain of TCR clone 208544 (TRAV3, TRAJ21)
CPVGNFNKFYF

SEQ ID NO: 417088 - protein, 12 aa, Homo sapiens
  CDR3 for beta chain variable domain of TCR clone 208544 (TRBV29-1, TRBJ2-3)
CSVTGGADTQYF

SEQ ID NO: 417089 - protein, 15 aa, Homo sapiens
  CDR3 for alpha chain variable domain of TCR clone 208545 (TRAV20, TRAJ4)
CAVEGSSGGYNKLIF

SEQ ID NO: 417090 - protein, 14 aa, Homo sapiens
  CDR3 for beta chain variable domain of TCR clone 208545 (TRBV7-8, TRBJ2-7)
CASTLGGALGELYF

SEQ ID NO: 417091 - protein, 12 aa, Homo sapiens
  CDR3 for alpha chain variable domain of TCR clone 208546 (TRAV20, TRAJ54)
CAVQEGAQKLVF

SEQ ID NO: 417092 - protein, 17 aa, Homo sapiens
  CDR3 for beta chain variable domain of TCR clone 208546 (TRBV13, TRBJ2-3)
CASSLSRVAGWRNTQYF

SEQ ID NO: 417093 - protein, 14 aa, Homo sapiens
  CDR3 for alpha chain variable domain of TCR clone 208547 (TRAV1-2, TRAJ8)
CAVREDPGFQKLVF

SEQ ID NO: 417094 - protein, 13 aa, Homo sapiens
  CDR3 for beta chain variable domain of TCR clone 208547 (TRBV19, TRBJ1-2)
CASSVPGQDGYTF

SEQ ID NO: 417095 - protein, 12 aa, Homo sapiens
  CDR3 for alpha chain variable domain of TCR clone 208548 (TRAV1-1, TRAJ8)
CAGGTGFQILVF

SEQ ID NO: 417096 - protein, 15 aa, Homo sapiens
  CDR3 for beta chain variable domain of TCR clone 208548 (TRBV7-9, TRBJ1-4)
CASSRTGGFNEKLFF

SEQ ID NO: 417097 - protein, 17 aa, Homo sapiens
  CDR3 for alpha chain variable domain of TCR clone 208549 (TRAV8-6, TRAJ8)
CAVKEGIENTGFQKLVF

SEQ ID NO: 417098 - protein, 12 aa, Homo sapiens
  CDR3 for beta chain variable domain of TCR clone 208549 (TRBV19, IGHJ2)
CASKDWPGGLFF

SEQ ID NO: 417099 - protein, 16 aa, Homo sapiens
  CDR3 for alpha chain variable domain of TCR clone 208550 (TRAV4, TRAJ22)
CLVGDLYSGSARQLTF

SEQ ID NO: 417100 - protein, 17 aa, Homo sapiens
  CDR3 for beta chain variable domain of TCR clone 208550 (TRBV5-1, TRBJ2-1)
CASSLGQISFSYNVQFF

SEQ ID NO: 417101 - protein, 11 aa, Homo sapiens
  CDR3 for alpha chain variable domain of TCR clone 208551 (TRAV21, TRAJ34)
CAHYNTDKLIF

SEQ ID NO: 417102 - protein, 15 aa, Homo sapiens
  CDR3 for beta chain variable domain of TCR clone 208551 (TRBV27, TRBJ2-5)
CASSLYPRGGETQYF

SEQ ID NO: 417103 - protein, 13 aa, Homo sapiens
  CDR3 for alpha chain variable domain of TCR clone 208552 (TRAV8-3, TRAJ6)
CAVEKGVSYILTF

SEQ ID NO: 417104 - protein, 15 aa, Homo sapiens
  CDR3 for beta chain variable domain of TCR clone 208552 (TRBV28, TRBJ2-5)
CASSADRGRGETQYF

SEQ ID NO: 417105 - protein, 16 aa, Homo sapiens
  CDR3 for alpha chain variable domain of TCR clone 208553 (TRAV20, TRAJ6)
CAVQAGGTGGSYIPTF

SEQ ID NO: 417106 - protein, 14 aa, Homo sapiens
  CDR3 for beta chain variable domain of TCR clone 208553 (TRBV12-4, TRBJ2-3)
CASSGQGSTDTQYF

SEQ ID NO: 417107 - protein, 15 aa, Homo sapiens
  CDR3 for alpha chain variable domain of TCR clone 208554 (TRAV3, TRAJ37)
CAVSRGSGNTGKLIF

SEQ ID NO: 417108 - protein, 15 aa, Homo sapiens
  CDR3 for beta chain variable domain of TCR clone 208554 (TRBV5-1, TRBJ2-7)
CASSLDLTSSYEQYF

SEQ ID NO: 417109 - protein, 15 aa, Homo sapiens
  CDR3 for alpha chain variable domain of TCR clone 208555 (TRAV2, TRAJ15)
CAVEDREQAGTALIF

SEQ ID NO: 417110 - protein, 13 aa, Homo sapiens
  CDR3 for beta chain variable domain of TCR clone 208555 (TRBV10-2, TRBJ2-3)
CASSESGNHTQYF

SEQ ID NO: 417111 - protein, 15 aa, Homo sapiens
  CDR3 for alpha chain variable domain of TCR clone 208556 (TRAV12-3, TRAJ49)
CAMAVTPNTGNQFYF

SEQ ID NO: 417112 - protein, 18 aa, Homo sapiens
  CDR3 for beta chain variable domain of TCR clone 208556 (TRBV4-1, TRBJ1-5)
CASSQDPRGQGLNQPQDF

SEQ ID NO: 417113 - protein, 14 aa, Homo sapiens
  CDR3 for alpha chain variable domain of TCR clone 208557 (TRAV13-2, TRAJ47)
CAESSMEYGNKLVF

SEQ ID NO: 417114 - protein, 15 aa, Homo sapiens
  CDR3 for beta chain variable domain of TCR clone 208557 (TRBV11-3, TRBJ2-3)
CASSAGTVVTNTQYF

SEQ ID NO: 417115 - protein, 15 aa, Homo sapiens
  CDR3 for alpha chain variable domain of TCR clone 208558 (TRAV12-1, TRAJ44)
CVVFVNTGTASKLTF

SEQ ID NO: 417116 - protein, 16 aa, Homo sapiens
  CDR3 for beta chain variable domain of TCR clone 208558 (TRBV2, TRBJ2-1)
CASSVGGSLSYNEQFF

SEQ ID NO: 417117 - protein, 15 aa, Homo sapiens
  CDR3 for alpha chain variable domain of TCR clone 208559 (TRAV12-1, TRAJ9)
CVVGCGDTGGFKTIF

SEQ ID NO: 417118 - protein, 13 aa, Homo sapiens
  CDR3 for beta chain variable domain of TCR clone 208559 (TRBV2, TRBJ1-4)
CASSERAGEKLFF

SEQ ID NO: 417119 - protein, 13 aa, Homo sapiens
  CDR3 for alpha chain variable domain of TCR clone 208560 (TRAV3, TRAJ13)
CAVRDGGYQKVTF

SEQ ID NO: 417120 - protein, 14 aa, Homo sapiens
  CDR3 for beta chain variable domain of TCR clone 208560 (TRBV15, TRBJ2-2)
CATSSGWNTGELFS

SEQ ID NO: 417121 - protein, 13 aa, Homo sapiens
  CDR3 for alpha chain variable domain of TCR clone 208561 (TRAV8-2, TRAJ34)
CVVSDRRTDKLIF

SEQ ID NO: 417122 - protein, 12 aa, Homo sapiens
  CDR3 for beta chain variable domain of TCR clone 208561 (TRBV11-2, TRBJ2-2)
CASSLGGGELFF

SEQ ID NO: 417123 - protein, 16 aa, Homo sapiens
  CDR3 for alpha chain variable domain of TCR clone 208562 (TRAV3, TRAJ37)
CAVRGKGSGNTGKLIF

SEQ ID NO: 417124 - protein, 16 aa, Homo sapiens
  CDR3 for beta chain variable domain of TCR clone 208562 (TRBV12-5, TRBJ2-5)
CASGPRTSGGQETQYF

SEQ ID NO: 417125 - protein, 14 aa, Homo sapiens
  CDR3 for alpha chain variable domain of TCR clone 208563 (TRAV1-2, TRAJ16)
CAVNRFSDGQKLLF

SEQ ID NO: 417126 - protein, 13 aa, Homo sapiens
  CDR3 for beta chain variable domain of TCR clone 208563 (TRBV7-9, TRBJ2-7)
CASNFAGAYEQYF

SEQ ID NO: 417127 - protein, 13 aa, Homo sapiens
  CDR3 for alpha chain variable domain of TCR clone 208564 (TRAV20, TRAJ37)
CAGCSSNTGKLIF

SEQ ID NO: 417128 - protein, 14 aa, Homo sapiens
  CDR3 for beta chain variable domain of TCR clone 208564 (TRBV20-1, TRBJ2-3)
CSARGGTSTDTQYF

SEQ ID NO: 417129 - protein, 13 aa, Homo sapiens
  CDR3 for alpha chain variable domain of TCR clone 208565 (TRAV2, TRAJ15)
CAVASPAGTALIF

SEQ ID NO: 417130 - protein, 16 aa, Homo sapiens
  CDR3 for beta chain variable domain of TCR clone 208565 (TRBV5-1, TRBJ1-1)
CASSSGGNSLNTEAFF

SEQ ID NO: 417131 - protein, 15 aa, Homo sapiens
  CDR3 for alpha chain variable domain of TCR clone 208566 (TRAV8-3, TRAJ27)
CAVGPSKTNAVKATF

SEQ ID NO: 417132 - protein, 15 aa, Homo sapiens
  CDR3 for beta chain variable domain of TCR clone 208566 (TRBV7-2, TRBJ2-1)
CASSSGLAGGNEQFF

SEQ ID NO: 417133 - protein, 11 aa, Homo sapiens
  CDR3 for alpha chain variable domain of TCR clone 208567 (TRAV17, TRAJ31)
CATPNNARLMF

SEQ ID NO: 417134 - protein, 16 aa, Homo sapiens
  CDR3 for beta chain variable domain of TCR clone 208567 (TRBV7-8, TRBJ2-4)
CASSAERTLAKNMQYF

SEQ ID NO: 417135 - protein, 15 aa, Homo sapiens
  CDR3 for alpha chain variable domain of TCR clone 208568 (TRAV23/DV6, TRAJ12)
CAAIDLGAMDSSYIL

SEQ ID NO: 417136 - protein, 12 aa, Homo sapiens
  CDR3 for beta chain variable domain of TCR clone 208568 (TRBV10-3, TRBJ2-2)
CAIRENTGELFF

SEQ ID NO: 417137 - protein, 15 aa, Homo sapiens
  CDR3 for alpha chain variable domain of TCR clone 208569 (TRAV8-4, TRAJ6)
CAVSAPSGGSDIPTF

SEQ ID NO: 417138 - protein, 14 aa, Homo sapiens
  CDR3 for beta chain variable domain of TCR clone 208569 (TRBV19, TRBJ2-1)
CASPTFVLSGEQFF

SEQ ID NO: 417139 - protein, 10 aa, Homo sapiens
  CDR3 for alpha chain variable domain of TCR clone 208570 (TRAV30, TRAJ48)
CGIGNEKLTF

SEQ ID NO: 417140 - protein, 13 aa, Homo sapiens
  CDR3 for beta chain variable domain of TCR clone 208570 (TRBV18, TRBJ1-2)
CASSASATEGYTF

SEQ ID NO: 417141 - protein, 14 aa, Homo sapiens
  CDR3 for alpha chain variable domain of TCR clone 208571 (TRAV13-1, TRAJ35)
CAASKGGFGNVRNC

SEQ ID NO: 417142 - protein, 13 aa, Homo sapiens
  CDR3 for beta chain variable domain of TCR clone 208571 (TRBV7-3, TRBJ1-1)
CASSQDWGAEAFF

SEQ ID NO: 417143 - protein, 12 aa, Homo sapiens
  CDR3 for alpha chain variable domain of TCR clone 208572 (TRAV12-2, TRAJ42)
CAVGGSQGNLIF

SEQ ID NO: 417144 - protein, 17 aa, Homo sapiens
  CDR3 for beta chain variable domain of TCR clone 208572 (TRBV7-3, TRBJ2-2)
CASSLSGTSGGTGELFF

SEQ ID NO: 417145 - protein, 13 aa, Homo sapiens
  CDR3 for alpha chain variable domain of TCR clone 208573 (TRAV38-2/DV8, TRAJ34)
CDYRTWNTDKLIF

SEQ ID NO: 417146 - protein, 13 aa, Homo sapiens
  CDR3 for beta chain variable domain of TCR clone 208573 (TRBV7-2, TRBJ2-2)
CASSLAVTGELFF

SEQ ID NO: 417147 - protein, 18 aa, Homo sapiens
  CDR3 for alpha chain variable domain of TCR clone 208574 (TRAV21, TRAJ52)
CAVRPSPAGGISYGKLTF

SEQ ID NO: 417148 - protein, 15 aa, Homo sapiens
  CDR3 for beta chain variable domain of TCR clone 208574 (TRBV19, TRBJ1-1)
CASTSGQIQNTEAFF

SEQ ID NO: 417149 - protein, 14 aa, Homo sapiens
  CDR3 for alpha chain variable domain of TCR clone 208575 (TRAV1-2, TRAJ16)
CAVNRFSDGQQLLF

SEQ ID NO: 417150 - protein, 17 aa, Homo sapiens
  CDR3 for beta chain variable domain of TCR clone 208575 (TRBV4-1, TRBJ2-7)
CASSRDPLGVRGGEQYF

SEQ ID NO: 417151 - protein, 14 aa, Homo sapiens
  CDR3 for alpha chain variable domain of TCR clone 208576 (TRAV35, TRAJ38)
CAGSNSGNNRKLIW

SEQ ID NO: 417152 - protein, 12 aa, Homo sapiens
  CDR3 for beta chain variable domain of TCR clone 208576 (TRBV19, TRBJ2-7)
CASTDRGYEQYF

SEQ ID NO: 417153 - protein, 11 aa, Homo sapiens
  CDR3 for alpha chain variable domain of TCR clone 208577 (TRAV2, TRAJ13)
CASGGYQKVTF

SEQ ID NO: 417154 - protein, 12 aa, Homo sapiens
  CDR3 for beta chain variable domain of TCR clone 208577 (TRBV11-2, TRBJ2-2)
CASSPGGGELFF

SEQ ID NO: 417155 - protein, 17 aa, Homo sapiens
  CDR3 for alpha chain variable domain of TCR clone 208578 (TRAV3, TRAJ42)
CAVRDRDYGGSQGNLIF

SEQ ID NO: 417156 - protein, 11 aa, Homo sapiens
  CDR3 for beta chain variable domain of TCR clone 208578 (TRBV11-2, TRBJ2-2)
CASSLPGELFF

SEQ ID NO: 417157 - protein, 17 aa, Homo sapiens
  CDR3 for alpha chain variable domain of TCR clone 208579 (TRAV12-3, TRAJ6)
CAMSARRGAGGSYLPTF

SEQ ID NO: 417158 - protein, 12 aa, Homo sapiens
  CDR3 for beta chain variable domain of TCR clone 208579 (TRBV12-4, TRBJ2-3)
CASSTLPDTQYF

SEQ ID NO: 417159 - protein, 14 aa, Homo sapiens
  CDR3 for alpha chain variable domain of TCR clone 208580 (TRAV1-2, TRAJ8)
CAVREDTGFQKLVF

SEQ ID NO: 417160 - protein, 13 aa, Homo sapiens
  CDR3 for beta chain variable domain of TCR clone 208580 (TRBV12-4, TRBJ1-3)
CASSLASGNTIYF

SEQ ID NO: 417161 - protein, 18 aa, Homo sapiens
  CDR3 for alpha chain variable domain of TCR clone 208581 (TRAV17, TRAJ17)
CATDASIIRRQQANFLRR

SEQ ID NO: 417162 - protein, 12 aa, Homo sapiens
  CDR3 for beta chain variable domain of TCR clone 208581 (TRBV5-4, TRBJ2-5)
CASSSIRETQYF

SEQ ID NO: 417163 - protein, 12 aa, Homo sapiens
  CDR3 for alpha chain variable domain of TCR clone 208582 (TRAV12-3, TRAJ17)
CSMTHTGNKLTF

SEQ ID NO: 417164 - protein, 15 aa, Homo sapiens
  CDR3 for beta chain variable domain of TCR clone 208582 (TRBV20-1, TRBJ2-7)
CSARDRVSGMDEQYF

SEQ ID NO: 417165 - protein, 14 aa, Homo sapiens
  CDR3 for alpha chain variable domain of TCR clone 208583 (TRAV1-2, TRAJ16)
CAVNRFSDCPKLLF

SEQ ID NO: 417166 - protein, 13 aa, Homo sapiens
  CDR3 for beta chain variable domain of TCR clone 208583 (TRBV19, TRBJ1-2)
CASSVPGQDGYTF

SEQ ID NO: 417167 - protein, 21 aa, Homo sapiens
  CDR3 for alpha chain variable domain of TCR clone 208584 (TRAV2, TRAJ20)
AAHPQVREADAAVYRDCKLSF

SEQ ID NO: 417168 - protein, 14 aa, Homo sapiens
  CDR3 for beta chain variable domain of TCR clone 208584 (TRBV11-2, TRBJ1-2)
CASSLGTANYGYTF

SEQ ID NO: 417169 - protein, 14 aa, Homo sapiens
  CDR3 for alpha chain variable domain of TCR clone 208585 (TRAV17, TRAJ15)
FATDRGQAGTALIF

SEQ ID NO: 417170 - protein, 17 aa, Homo sapiens
  CDR3 for beta chain variable domain of TCR clone 208585 (TRBV29-1, TRBJ2-1)
CSVVGLAGAYSYNEQFF

SEQ ID NO: 417171 - protein, 15 aa, Homo sapiens
  CDR3 for alpha chain variable domain of TCR clone 208586 (TRAV3, TRAJ3)
CAVRDRDSSASKIIF

SEQ ID NO: 417172 - protein, 16 aa, Homo sapiens
  CDR3 for beta chain variable domain of TCR clone 208586 (TRBV12-5, TRBJ2-5)
CASGPRTSGNQEAQYF

SEQ ID NO: 417173 - protein, 14 aa, Homo sapiens
  CDR3 for alpha chain variable domain of TCR clone 208587 (TRAV13-1, TRAJ35)
CAASKGGFGNVLHC

SEQ ID NO: 417174 - protein, 13 aa, Homo sapiens
  CDR3 for beta chain variable domain of TCR clone 208587 (TRBV20-1, TRBJ2-7)
CSATHTSGYEQYF

SEQ ID NO: 417175 - protein, 14 aa, Homo sapiens
  CDR3 for alpha chain variable domain of TCR clone 208588 (TRAV13-1, TRAJ20)
CAARPGSNDYKLSF

SEQ ID NO: 417176 - protein, 13 aa, Homo sapiens
  CDR3 for beta chain variable domain of TCR clone 208588 (TRBV19, TRBJ1-2)
CASSVPGQDGYTF

SEQ ID NO: 417177 - protein, 13 aa, Homo sapiens
  CDR3 for alpha chain variable domain of TCR clone 208589 (TRAV20, TRAJ52)
CSHGGTSYGKLTF

SEQ ID NO: 417178 - protein, 12 aa, Homo sapiens
  CDR3 for beta chain variable domain of TCR clone 208589 (TRBV19, TRBJ2-1)
CASSQISNEQFF

SEQ ID NO: 417179 - protein, 17 aa, Homo sapiens
  CDR3 for alpha chain variable domain of TCR clone 208590 (TRAV21, TRAJ24)
CAGIRLRSTDSWGKLQF

SEQ ID NO: 417180 - protein, 15 aa, Homo sapiens
  CDR3 for beta chain variable domain of TCR clone 208590 (TRBV7-2, TRBJ2-3)
CASSPRGLSTDTQNF

SEQ ID NO: 417181 - protein, 14 aa, Homo sapiens
  CDR3 for alpha chain variable domain of TCR clone 208591 (TRAV13-1, TRAJ12)
CAASYMDSSYKLIF

SEQ ID NO: 417182 - protein, 13 aa, Homo sapiens
  CDR3 for beta chain variable domain of TCR clone 208591 (TRBV2, TRBJ2-5)
CASSDGIQETQYL

SEQ ID NO: 417183 - protein, 12 aa, Homo sapiens
  CDR3 for alpha chain variable domain of TCR clone 208592 (TRAV16, TRAJ10)
CSRTGGGNKLTF

SEQ ID NO: 417184 - protein, 14 aa, Homo sapiens
  CDR3 for beta chain variable domain of TCR clone 208592 (TRBV7-2, TRBJ2-7)
CAIRSQWAAYEQYF

SEQ ID NO: 417185 - protein, 14 aa, Homo sapiens
  CDR3 for alpha chain variable domain of TCR clone 208593 (TRAV25, TRAJ27)
CAGPGNTNAGKSTF

SEQ ID NO: 417186 - protein, 16 aa, Homo sapiens
  CDR3 for beta chain variable domain of TCR clone 208593 (TRBV4-1, TRBJ2-6)
CASSQDGGPGANVMTF

SEQ ID NO: 417187 - protein, 18 aa, Homo sapiens
  CDR3 for alpha chain variable domain of TCR clone 208594 (TRAV29/DV5, TRAJ52)
CAAGFRVAGSTSYVELTF

SEQ ID NO: 417188 - protein, 16 aa, Homo sapiens
  CDR3 for beta chain variable domain of TCR clone 208594 (TRBV7-3, TRBJ2-2)
CASSLKRGTLSGELFF

SEQ ID NO: 417189 - protein, 13 aa, Homo sapiens
  CDR3 for alpha chain variable domain of TCR clone 208595 (TRAV29/DV5, TRAJ31)
CAASRNNNARLLF

SEQ ID NO: 417190 - protein, 14 aa, Homo sapiens
  CDR3 for beta chain variable domain of TCR clone 208595 (TRBV20-1, TRBJ1-5)
CSARDVTGFQTQDF

SEQ ID NO: 417191 - protein, 12 aa, Homo sapiens
  CDR3 for alpha chain variable domain of TCR clone 208596 (TRAV12-3, TRAJ17)
CAMKLTGNKLTF

SEQ ID NO: 417192 - protein, 15 aa, Homo sapiens
  CDR3 for beta chain variable domain of TCR clone 208596 (TRBV20-1, TRBJ2-7)
CSARDRVPGMDEQYF

SEQ ID NO: 417193 - protein, 14 aa, Homo sapiens
  CDR3 for alpha chain variable domain of TCR clone 208597 (TRAV27, TRAJ37)
CAGERSSNTGKLIF

SEQ ID NO: 417194 - protein, 14 aa, Homo sapiens
  CDR3 for beta chain variable domain of TCR clone 208597 (TRBV7-2, TRBJ2-7)
CASRSQGAAYEQYF

SEQ ID NO: 417195 - protein, 14 aa, Homo sapiens
  CDR3 for alpha chain variable domain of TCR clone 208598 (TRAV26-1, TRAJ38)
CIADNTGNNRKLIW

SEQ ID NO: 417196 - protein, 13 aa, Homo sapiens
  CDR3 for beta chain variable domain of TCR clone 208598 (TRBV2, TRBJ1-5)
CATAGPGNQPQHF

SEQ ID NO: 417197 - protein, 15 aa, Homo sapiens
  CDR3 for alpha chain variable domain of TCR clone 208599 (TRAV8-3, TRAJ21)
CAVGALPPRGYKFYF

SEQ ID NO: 417198 - protein, 15 aa, Homo sapiens
  CDR3 for beta chain variable domain of TCR clone 208599 (TRBV7-8, TRBJ1-5)
CASSLERRGLAHQHF

SEQ ID NO: 417199 - protein, 14 aa, Homo sapiens
  CDR3 for alpha chain variable domain of TCR clone 208600 (TRAV2, TRAJ9)
CAVEDRSGGFKTIF

SEQ ID NO: 417200 - protein, 14 aa, Homo sapiens
  CDR3 for beta chain variable domain of TCR clone 208600 (TRBV7-8, TRBJ2-3)
CASSLGAGTDTQYF

SEQ ID NO: 417201 - protein, 11 aa, Homo sapiens
  CDR3 for alpha chain variable domain of TCR clone 208601 (TRAV12-1, TRAJ43)
CVEYDNNGMRF

SEQ ID NO: 417202 - protein, 15 aa, Homo sapiens
  CDR3 for beta chain variable domain of TCR clone 208601 (TRBV18, TRBJ2-5)
CASSPRASEAETQYF

SEQ ID NO: 417203 - protein, 15 aa, Homo sapiens
  CDR3 for alpha chain variable domain of TCR clone 208602 (TRAV21, TRAJ10)
CAVRGLTGGGNKLTF

SEQ ID NO: 417204 - protein, 19 aa, Homo sapiens
  CDR3 for beta chain variable domain of TCR clone 208602 (TRBV7-2, TRBJ1-1)
CASSFWAKRAGNPNTEAFF

SEQ ID NO: 417205 - protein, 12 aa, Homo sapiens
  CDR3 for alpha chain variable domain of TCR clone 208603 (TRAV2, TRAJ9)
CTVGAGGFKTIF

SEQ ID NO: 417206 - protein, 16 aa, Homo sapiens
  CDR3 for beta chain variable domain of TCR clone 208603 (TRBV13, TRBJ2-2)
CASSPRTGEHTGELFF

SEQ ID NO: 417207 - protein, 15 aa, Homo sapiens
  CDR3 for alpha chain variable domain of TCR clone 208604 (TRAV2, TRAJ9)
CAVEDRGTGGFKTIF

SEQ ID NO: 417208 - protein, 17 aa, Homo sapiens
  CDR3 for beta chain variable domain of TCR clone 208604 (TRBV18, TRBJ2-1)
CASSPRVAGGSYNEQFF

SEQ ID NO: 417209 - protein, 17 aa, Homo sapiens
  CDR3 for alpha chain variable domain of TCR clone 208605 (TRAV3, TRAJ6)
CAVRDGPRAGGSYIPTF

SEQ ID NO: 417210 - protein, 16 aa, Homo sapiens
  CDR3 for beta chain variable domain of TCR clone 208605 (TRBV7-3, TRBJ2-1)
CASSLSGGVHYNEQFF

SEQ ID NO: 417211 - protein, 22 aa, Homo sapiens
  CDR3 for alpha chain variable domain of TCR clone 208606 (TRAV8-3, TRAJ41)
CAVGVELKFRVCTQLRQRHLAV

SEQ ID NO: 417212 - protein, 17 aa, Homo sapiens
  CDR3 for beta chain variable domain of TCR clone 208606 (TRBV25-1, TRBJ2-1)
CASSAYGQGRGVYEQFF

SEQ ID NO: 417213 - protein, 15 aa, Homo sapiens
  CDR3 for alpha chain variable domain of TCR clone 208607 (TRAV25, TRAJ53)
CAATGGGGSNYKLTF

SEQ ID NO: 417214 - protein, 16 aa, Homo sapiens
  CDR3 for beta chain variable domain of TCR clone 208607 (TRBV13, TRBJ2-2)
CASSPRTGEHTGELFF

SEQ ID NO: 417215 - protein, 13 aa, Homo sapiens
  CDR3 for alpha chain variable domain of TCR clone 208608 (TRAV2, TRAJ40)
CAVVTSGTYKYIL

SEQ ID NO: 417216 - protein, 15 aa, Homo sapiens
  CDR3 for beta chain variable domain of TCR clone 208608 (TRBV11-3, TRBJ2-3)
CASLEDGREGDTQYF

SEQ ID NO: 417217 - protein, 12 aa, Homo sapiens
  CDR3 for alpha chain variable domain of TCR clone 208609 (TRAV21, TRAJ11)
CAATSGYSTLTF

SEQ ID NO: 417218 - protein, 13 aa, Homo sapiens
  CDR3 for beta chain variable domain of TCR clone 208609 (TRBV20-1, TRBJ2-7)
QCPALAGVGEQYF

SEQ ID NO: 417219 - protein, 14 aa, Homo sapiens
  CDR3 for alpha chain variable domain of TCR clone 208610 (TRAV2, TRAJ37)
CAVDFTSNTGRLIF

SEQ ID NO: 417220 - protein, 15 aa, Homo sapiens
  CDR3 for beta chain variable domain of TCR clone 208610 (TRBV20-1, TRBJ1-1)
CSASRGVTGNTDAFF

SEQ ID NO: 417221 - protein, 13 aa, Homo sapiens
  CDR3 for alpha chain variable domain of TCR clone 208611 (TRAV12-3, TRAJ9)
CAMRNTGGFKTIF

SEQ ID NO: 417222 - protein, 14 aa, Homo sapiens
  CDR3 for beta chain variable domain of TCR clone 208611 (TRBV11-2, TRBJ2-7)
CASSSTGEAYEQYF

SEQ ID NO: 417223 - protein, 14 aa, Homo sapiens
  CDR3 for alpha chain variable domain of TCR clone 208612 (TRAV12-1, TRAJ43)
CVVNGRSNNNDMHF

SEQ ID NO: 417224 - protein, 10 aa, Homo sapiens
  CDR3 for beta chain variable domain of TCR clone 208612 (TRBV28, TRBJ2-5)
CQQSSWTQYF

SEQ ID NO: 417225 - protein, 14 aa, Homo sapiens
  CDR3 for alpha chain variable domain of TCR clone 208613 (TRAV8-2, TRAJ4)
CVVSPSGGYNKLIF

SEQ ID NO: 417226 - protein, 13 aa, Homo sapiens
  CDR3 for beta chain variable domain of TCR clone 208613 (TRBV29-1, TRBJ2-1)
CSVEGGRVNEQFF

SEQ ID NO: 417227 - protein, 15 aa, Homo sapiens
  CDR3 for alpha chain variable domain of TCR clone 208614 (TRAV10, TRAJ39)
CVVSASGNAGNMLTF

SEQ ID NO: 417228 - protein, 12 aa, Homo sapiens
  CDR3 for beta chain variable domain of TCR clone 208614 (TRBV7-9, TRBJ2-7)
CASSIKREEQYF

SEQ ID NO: 417229 - protein, 13 aa, Homo sapiens
  CDR3 for alpha chain variable domain of TCR clone 208615 (TRAV12-3, TRAJ21)
CAPGPHNFNKFYF

SEQ ID NO: 417230 - protein, 13 aa, Homo sapiens
  CDR3 for beta chain variable domain of TCR clone 208615 (TRBV10-2, TRBJ2-7)
CASGASGGYEQYF

SEQ ID NO: 417231 - protein, 13 aa, Homo sapiens
  CDR3 for alpha chain variable domain of TCR clone 208616 (TRAV17, TRAJ5)
CATDARGRRALTF

SEQ ID NO: 417232 - protein, 17 aa, Homo sapiens
  CDR3 for beta chain variable domain of TCR clone 208616 (TRBV20-1, TRBJ2-1)
CSASSSGLAGSYNEQFF

SEQ ID NO: 417233 - protein, 12 aa, Homo sapiens
  CDR3 for alpha chain variable domain of TCR clone 208617 (TRAV3, TRAJ43)
CAVRDPNNYMRL

SEQ ID NO: 417234 - protein, 15 aa, Homo sapiens
  CDR3 for beta chain variable domain of TCR clone 208617 (TRBV27, TRBJ1-5)
CASSLGTGFDQPQHF

SEQ ID NO: 417235 - protein, 12 aa, Homo sapiens
  CDR3 for alpha chain variable domain of TCR clone 208618 (TRAV12-1, TRAJ20)
CVVNPDDYKLSF

SEQ ID NO: 417236 - protein, 12 aa, Homo sapiens
  CDR3 for beta chain variable domain of TCR clone 208618 (TRBV11-2, TRBJ2-2)
CASSLGGGEQFF

SEQ ID NO: 417237 - protein, 15 aa, Homo sapiens
  CDR3 for alpha chain variable domain of TCR clone 208619 (TRAV4, TRAJ27)
CIVGDEGTNAGKSTF

SEQ ID NO: 417238 - protein, 14 aa, Homo sapiens
  CDR3 for beta chain variable domain of TCR clone 208619 (TRBV6-1, TRBJ1-3)
CASVQGGGGNTIYF

SEQ ID NO: 417239 - protein, 16 aa, Homo sapiens
  CDR3 for alpha chain variable domain of TCR clone 208620 (TRAV3, TRAJ10)
CAVRDLNAGGGNKLTF

SEQ ID NO: 417240 - protein, 15 aa, Homo sapiens
  CDR3 for beta chain variable domain of TCR clone 208620 (TRBV20-1, TRBJ2-7)
CSARDRVSGMDEQYF

SEQ ID NO: 417241 - protein, 14 aa, Homo sapiens
  CDR3 for alpha chain variable domain of TCR clone 208621 (TRAV8-3, TRAJ10)
CAVGNAGGGNKLTF

SEQ ID NO: 417242 - protein, 15 aa, Homo sapiens
  CDR3 for beta chain variable domain of TCR clone 208621 (TRBV6-3, TRBJ2-7)
CASSPPGTVFYEQYF

SEQ ID NO: 417243 - protein, 16 aa, Homo sapiens
  CDR3 for alpha chain variable domain of TCR clone 208622 (TRAV38-1, TRAJ37)
CAFKGDGSSNTGKLIF

SEQ ID NO: 417244 - protein, 13 aa, Homo sapiens
  CDR3 for beta chain variable domain of TCR clone 208622 (TRBV12-4, TRBJ2-5)
CASSLFRRETQDF

SEQ ID NO: 417245 - protein, 15 aa, Homo sapiens
  CDR3 for alpha chain variable domain of TCR clone 208623 (TRAV3, TRAJ3)
CAVRDMSSSASKIIF

SEQ ID NO: 417246 - protein, 14 aa, Homo sapiens
  CDR3 for beta chain variable domain of TCR clone 208623 (TRBV19, TRBJ2-1)
CASPTFVVSGEQFF

SEQ ID NO: 417247 - protein, 15 aa, Homo sapiens
  CDR3 for alpha chain variable domain of TCR clone 208624 (TRAV3, TRAJ17)
CAVSPKEAAGNKLTF

SEQ ID NO: 417248 - protein, 13 aa, Homo sapiens
  CDR3 for beta chain variable domain of TCR clone 208624 (TRBV11-2, TRBJ2-5)
CASSRGPSETQYF

SEQ ID NO: 417249 - protein, 13 aa, Homo sapiens
  CDR3 for alpha chain variable domain of TCR clone 208625 (TRAV5, TRAJ30)
CAELANRDDKIIF

SEQ ID NO: 417250 - protein, 14 aa, Homo sapiens
  CDR3 for beta chain variable domain of TCR clone 208625 (TRBV4-1, TRBJ2-2)
CASSQAVNTGELFF

SEQ ID NO: 417251 - protein, 11 aa, Homo sapiens
  CDR3 for alpha chain variable domain of TCR clone 208626 (TRAV3, TRAJ49)
CAPITGNQFYF

SEQ ID NO: 417252 - protein, 16 aa, Homo sapiens
  CDR3 for beta chain variable domain of TCR clone 208626 (TRBV5-1, TRBJ2-3)
CASSIFPMASTDAQYF

SEQ ID NO: 417253 - protein, 12 aa, Homo sapiens
  CDR3 for alpha chain variable domain of TCR clone 208627 (TRAV12-3, TRAJ17)
CAMTLTGNKLTF

SEQ ID NO: 417254 - protein, 14 aa, Homo sapiens
  CDR3 for beta chain variable domain of TCR clone 208627 (TRBV7-2, TRBJ2-3)
CASSQTGSSYTQYF

SEQ ID NO: 417255 - protein, 11 aa, Homo sapiens
  CDR3 for alpha chain variable domain of TCR clone 208628 (TRAV17, TRAJ9)
CATTGGFKTIF

SEQ ID NO: 417256 - protein, 13 aa, Homo sapiens
  CDR3 for beta chain variable domain of TCR clone 208628 (TRBV20-1, TRBJ1-1)
CSAPLGGGTEDFF

SEQ ID NO: 417257 - protein, 17 aa, Homo sapiens
  CDR3 for alpha chain variable domain of TCR clone 208629 (TRAV3, TRAJ6)
CAVRDGPRAGGSYIPTF

SEQ ID NO: 417258 - protein, 13 aa, Homo sapiens
  CDR3 for beta chain variable domain of TCR clone 208629 (TRBV24-1, TRBJ2-2)
CATSEWSTGELFF

SEQ ID NO: 417259 - protein, 14 aa, Homo sapiens
  CDR3 for alpha chain variable domain of TCR clone 208630 (TRAV8-2, TRAJ37)
CVVSISGNTGKQIF

SEQ ID NO: 417260 - protein, 17 aa, Homo sapiens
  CDR3 for beta chain variable domain of TCR clone 208630 (TRBV7-9, TRBJ2-3)
CASSPTVAGDLTDTQYF

SEQ ID NO: 417261 - protein, 12 aa, Homo sapiens
  CDR3 for alpha chain variable domain of TCR clone 208631 (TRAV3, TRAJ20)
CAVRDGDYKLSF

SEQ ID NO: 417262 - protein, 15 aa, Homo sapiens
  CDR3 for beta chain variable domain of TCR clone 208631 (TRBV28, TRBJ2-4)
CAAGSGTLLMGIQYF

SEQ ID NO: 417263 - protein, 14 aa, Homo sapiens
  CDR3 for alpha chain variable domain of TCR clone 208632 (TRAV13-1, TRAJ44)
CAAKATGTASKLTF

SEQ ID NO: 417264 - protein, 16 aa, Homo sapiens
  CDR3 for beta chain variable domain of TCR clone 208632 (TRBV19, TRBJ2-1)
CASSKAGQSSYNEQFF

SEQ ID NO: 417265 - protein, 12 aa, Homo sapiens
  CDR3 for alpha chain variable domain of TCR clone 208633 (TRAV3, TRAJ20)
CAVRDGDYKLSF

SEQ ID NO: 417266 - protein, 18 aa, Homo sapiens
  CDR3 for beta chain variable domain of TCR clone 208633 (TRBV10-3, TRBJ2-3)
CAISESRVGPMRGDTQYF

SEQ ID NO: 417267 - protein, 14 aa, Homo sapiens
  CDR3 for alpha chain variable domain of TCR clone 208634 (TRAV12-2, TRAJ44)
CAVNKAGTASKLTF

SEQ ID NO: 417268 - protein, 14 aa, Homo sapiens
  CDR3 for beta chain variable domain of TCR clone 208634 (TRBV19, TRBJ1-4)
CASKDWPGDCFLAV

SEQ ID NO: 417269 - protein, 13 aa, Homo sapiens
  CDR3 for alpha chain variable domain of TCR clone 208635 (TRAV35, TRAJ22)
CAGLSGSARQLTF

SEQ ID NO: 417270 - protein, 16 aa, Homo sapiens
  CDR3 for beta chain variable domain of TCR clone 208635 (TRBV7-9, TRBJ2-1)
CASSLVLTGQGNGQFF

SEQ ID NO: 417271 - protein, 13 aa, Homo sapiens
  CDR3 for alpha chain variable domain of TCR clone 208636 (TRAV29/DV5, TRAJ31)
CAASRNNNARLMF

SEQ ID NO: 417272 - protein, 15 aa, Homo sapiens
  CDR3 for beta chain variable domain of TCR clone 208636 (TRBV11-2, TRBJ2-1)
CASSLTSGGYNEQFF

SEQ ID NO: 417273 - protein, 18 aa, Homo sapiens
  CDR3 for alpha chain variable domain of TCR clone 208637 (TRAV26-2, TRAJ54)
CILRDVEVGIQGAQKLLF

SEQ ID NO: 417274 - protein, 16 aa, Homo sapiens
  CDR3 for beta chain variable domain of TCR clone 208637 (TRBV6-1, TRBJ2-5)
CASSETLDRGAETQYF

SEQ ID NO: 417275 - protein, 14 aa, Homo sapiens
  CDR3 for alpha chain variable domain of TCR clone 208638 (TRAV16, TRAJ22)
CALRGQGSARQLTF

SEQ ID NO: 417276 - protein, 15 aa, Homo sapiens
  CDR3 for beta chain variable domain of TCR clone 208638 (TRBV2, TRBJ2-5)
CASTRDGGPQETQYF

SEQ ID NO: 417277 - protein, 17 aa, Homo sapiens
  CDR3 for alpha chain variable domain of TCR clone 208639 (TRAV3, TRAJ42)
CAVRDRDYGGSQGNLIF

SEQ ID NO: 417278 - protein, 15 aa, Homo sapiens
  CDR3 for beta chain variable domain of TCR clone 208639 (TRBV6-1, TRBJ2-3)
CASGERGGITDTQYF

SEQ ID NO: 417279 - protein, 13 aa, Homo sapiens
  CDR3 for alpha chain variable domain of TCR clone 208640 (TRAV35, TRAJ42)
CAGFPGSQGNLIF

SEQ ID NO: 417280 - protein, 13 aa, Homo sapiens
  CDR3 for beta chain variable domain of TCR clone 208640 (TRBV29-1, TRBJ2-1)
CSVEGGRSMSSSS

SEQ ID NO: 417281 - protein, 16 aa, Homo sapiens
  CDR3 for alpha chain variable domain of TCR clone 208641 (TRAV17, TRAJ9)
CATGEWGGPGGFKTIF

SEQ ID NO: 417282 - protein, 15 aa, Homo sapiens
  CDR3 for beta chain variable domain of TCR clone 208641 (TRBV20-1, TRBJ1-2)
CSARDSRGRNYGYTF

SEQ ID NO: 417283 - protein, 11 aa, Homo sapiens
  CDR3 for alpha chain variable domain of TCR clone 208642 (TRAV8-3, TRAJ15)
CAVGPGTALIF

SEQ ID NO: 417284 - protein, 15 aa, Homo sapiens
  CDR3 for beta chain variable domain of TCR clone 208642 (TRBV7-9, TRBJ1-5)
CASSQGHQPNQPQHF

SEQ ID NO: 417285 - protein, 16 aa, Homo sapiens
  CDR3 for alpha chain variable domain of TCR clone 208643 (TRAV30, TRAJ24)
CGTEIVDADSWGKFQL

SEQ ID NO: 417286 - protein, 13 aa, Homo sapiens
  CDR3 for beta chain variable domain of TCR clone 208643 (TRBV4-2, TRBJ1-1)
CASSQAGNTEAFF

SEQ ID NO: 417287 - protein, 15 aa, Homo sapiens
  CDR3 for alpha chain variable domain of TCR clone 208644 (TRAV3, TRAJ3)
CAVRDRDSSAPNIIF

SEQ ID NO: 417288 - protein, 18 aa, Homo sapiens
  CDR3 for beta chain variable domain of TCR clone 208644 (TRBV25-1, TRBJ1-2)
CASSGLQNGQGLIFGYAF

SEQ ID NO: 417289 - protein, 11 aa, Homo sapiens
  CDR3 for alpha chain variable domain of TCR clone 208645 (TRAV1-1, TRAJ23)
CAVRQGGKLVF

SEQ ID NO: 417290 - protein, 12 aa, Homo sapiens
  CDR3 for beta chain variable domain of TCR clone 208645 (TRBV19, TRBJ1-1)
CASSIGTEEAFF

SEQ ID NO: 417291 - protein, 12 aa, Homo sapiens
  CDR3 for alpha chain variable domain of TCR clone 208646 (TRAV12-3, TRAJ6)
CAMTLTGNKLTF

SEQ ID NO: 417292 - protein, 14 aa, Homo sapiens
  CDR3 for beta chain variable domain of TCR clone 208646 (TRBV19, TRBJ2-1)
CASPTFVLSGEQFF

SEQ ID NO: 417293 - protein, 16 aa, Homo sapiens
  CDR3 for alpha chain variable domain of TCR clone 208647 (TRAV20, TRAJ28)
CAVRDPSGAGSYHLTF

SEQ ID NO: 417294 - protein, 12 aa, Homo sapiens
  CDR3 for beta chain variable domain of TCR clone 208647 (TRBV7-9, TRBJ2-7)
CASSIKREEQYF

SEQ ID NO: 417295 - protein, 13 aa, Homo sapiens
  CDR3 for alpha chain variable domain of TCR clone 208648 (TRAV2, TRAJ15)
CSVASQAGTALIF

SEQ ID NO: 417296 - protein, 16 aa, Homo sapiens
  CDR3 for beta chain variable domain of TCR clone 208648 (TRBV18, TRBJ1-5)
CASSPYRVEGSQPQHF

SEQ ID NO: 417297 - protein, 16 aa, Homo sapiens
  CDR3 for alpha chain variable domain of TCR clone 208649 (TRAV16, TRAJ42)
CARKMNYGGSQGNLIF

SEQ ID NO: 417298 - protein, 15 aa, Homo sapiens
  CDR3 for beta chain variable domain of TCR clone 208649 (TRBV13, TRBJ1-5)
CASSFGQGGVQPQHF

SEQ ID NO: 417299 - protein, 15 aa, Homo sapiens
  CDR3 for alpha chain variable domain of TCR clone 208650 (TRAV35, TRAJ40)
CSGQLGTSGTYKYIL

SEQ ID NO: 417300 - protein, 14 aa, Homo sapiens
  CDR3 for beta chain variable domain of TCR clone 208650 (TRBV7-3, TRBJ2-1)
CASSLAGGTNEQFF

SEQ ID NO: 417301 - protein, 14 aa, Homo sapiens
  CDR3 for alpha chain variable domain of TCR clone 208651 (TRAV21, TRAJ35)
CAVMPIGFGNVLHR

SEQ ID NO: 417302 - protein, 12 aa, Homo sapiens
  CDR3 for beta chain variable domain of TCR clone 208651 (TRBV7-9, TRBJ2-7)
CASSIKREEQYF

SEQ ID NO: 417303 - protein, 14 aa, Homo sapiens
  CDR3 for alpha chain variable domain of TCR clone 208652 (TRAV5, TRAJ21)
CAESILDNFNKFYF

SEQ ID NO: 417304 - protein, 14 aa, Homo sapiens
  CDR3 for beta chain variable domain of TCR clone 208652 (TRBV12-5, TRBJ2-5)
CASGSRTHQETQYF

SEQ ID NO: 417305 - protein, 22 aa, Homo sapiens
  CDR3 for alpha chain variable domain of TCR clone 208653 (TRAV3, TRAJ38)
CAVRDCLNAGNNHIKNPDPPVY

SEQ ID NO: 417306 - protein, 15 aa, Homo sapiens
  CDR3 for beta chain variable domain of TCR clone 208653 (TRBV6-5, TRBJ2-1)
CASSYDAGAGNEQFF

SEQ ID NO: 417307 - protein, 15 aa, Homo sapiens
  CDR3 for alpha chain variable domain of TCR clone 208654 (TRAV8-4, TRAJ12)
CAVSDRVDSSYKLIF

SEQ ID NO: 417308 - protein, 11 aa, Homo sapiens
  CDR3 for beta chain variable domain of TCR clone 208654 (TRBV29-1, TRBJ2-5)
CSEDRTGTQYF

SEQ ID NO: 417309 - protein, 15 aa, Homo sapiens
  CDR3 for alpha chain variable domain of TCR clone 208655 (TRAV12-1, TRAJ44)
CVADLPTGTASKLTF

SEQ ID NO: 417310 - protein, 13 aa, Homo sapiens
  CDR3 for beta chain variable domain of TCR clone 208655 (TRBV19, TRBJ2-7)
CASRKAGGSEQYF

SEQ ID NO: 417311 - protein, 15 aa, Homo sapiens
  CDR3 for alpha chain variable domain of TCR clone 208656 (TRAV35, TRAJ58)
CAGRRQETSGSRLTF

SEQ ID NO: 417312 - protein, 16 aa, Homo sapiens
  CDR3 for beta chain variable domain of TCR clone 208656 (TRBV23-1, TRBJ1-5)
CASSQLDRGSNQPQHF

SEQ ID NO: 417313 - protein, 12 aa, Homo sapiens
  CDR3 for alpha chain variable domain of TCR clone 208657 (TRAV21, TRAJ8)
CAVNTGFQKLVF

SEQ ID NO: 417314 - protein, 15 aa, Homo sapiens
  CDR3 for beta chain variable domain of TCR clone 208657 (TRBV19, TRBJ2-4)
CASSTPGIAKNIQYF

SEQ ID NO: 417315 - protein, 11 aa, Homo sapiens
  CDR3 for alpha chain variable domain of TCR clone 208658 (TRAV3, TRAJ21)
CAVGNFNKFYF

SEQ ID NO: 417316 - protein, 16 aa, Homo sapiens
  CDR3 for beta chain variable domain of TCR clone 208658 (TRBV20-1, TRBJ1-2)
CSASMGQGVANYGYTC

SEQ ID NO: 417317 - protein, 14 aa, Homo sapiens
  CDR3 for alpha chain variable domain of TCR clone 208659 (TRAV29/DV5, TRAJ36)
CASRRKTGANNLFF

SEQ ID NO: 417318 - protein, 12 aa, Homo sapiens
  CDR3 for beta chain variable domain of TCR clone 208659 (TRBV12-5, TRBJ2-5)
CASGQGVETQYF

SEQ ID NO: 417319 - protein, 13 aa, Homo sapiens
  CDR3 for alpha chain variable domain of TCR clone 208660 (TRAV27, TRAJ49)
CAPRPYTGNQFCF

SEQ ID NO: 417320 - protein, 16 aa, Homo sapiens
  CDR3 for beta chain variable domain of TCR clone 208660 (TRBV4-1, TRBJ1-2)
CASSHDAGQVLYGYTF

SEQ ID NO: 417321 - protein, 15 aa, Homo sapiens
  CDR3 for alpha chain variable domain of TCR clone 208661 (TRAV34, TRAJ38)
CGADFTPGNNRKLIW

SEQ ID NO: 417322 - protein, 14 aa, Homo sapiens
  CDR3 for beta chain variable domain of TCR clone 208661 (TRBV19, TRBJ2-1)
CASKDPSSYNEQFF

SEQ ID NO: 417323 - protein, 18 aa, Homo sapiens
  CDR3 for alpha chain variable domain of TCR clone 208662 (TRAV29/DV5, TRAJ52)
CAAGFRGAGGTSAGKLTF

SEQ ID NO: 417324 - protein, 16 aa, Homo sapiens
  CDR3 for beta chain variable domain of TCR clone 208662 (TRBV7-3, TRBJ2-2)
CASSLKRGTLSGELFF

SEQ ID NO: 417325 - protein, 14 aa, Homo sapiens
  CDR3 for alpha chain variable domain of TCR clone 208663 (TRAV13-1, TRAJ5)
CAAHPDTGRRALTF

SEQ ID NO: 417326 - protein, 15 aa, Homo sapiens
  CDR3 for beta chain variable domain of TCR clone 208663 (TRBV6-1, TRBJ2-3)
CASSERGGITDTQYF

SEQ ID NO: 417327 - protein, 14 aa, Homo sapiens
  CDR3 for alpha chain variable domain of TCR clone 208664 (TRAV3, TRAJ36)
CAVRDGTGANNLFF

SEQ ID NO: 417328 - protein, 16 aa, Homo sapiens
  CDR3 for beta chain variable domain of TCR clone 208664 (TRBV7-3, TRBJ2-5)
CASIQTGGSVQETQYF

SEQ ID NO: 417329 - protein, 15 aa, Homo sapiens
  CDR3 for alpha chain variable domain of TCR clone 208665 (TRAV8-3, TRAJ6)
CAVGPLGGGSYIPTF

SEQ ID NO: 417330 - protein, 11 aa, Homo sapiens
  CDR3 for beta chain variable domain of TCR clone 208665 (TRBV11-2, TRBJ2-2)
CASSLPGELFF

SEQ ID NO: 417331 - protein, 18 aa, Homo sapiens
  CDR3 for alpha chain variable domain of TCR clone 208666 (TRAV3, TRAJ17)
CAVRARRGGRSCRQQANF

SEQ ID NO: 417332 - protein, 13 aa, Homo sapiens
  CDR3 for beta chain variable domain of TCR clone 208666 (TRBV4-1, TRBJ2-2)
RQQPSGEHRELFF

SEQ ID NO: 417333 - protein, 15 aa, Homo sapiens
  CDR3 for alpha chain variable domain of TCR clone 208667 (TRAV8-4, TRAJ6)
CAVNGASGGSYIPTF

SEQ ID NO: 417334 - protein, 15 aa, Homo sapiens
  CDR3 for beta chain variable domain of TCR clone 208667 (TRBV7-9, TRBJ1-6)
CASSSPGRGNSPLHF

SEQ ID NO: 417335 - protein, 14 aa, Homo sapiens
  CDR3 for alpha chain variable domain of TCR clone 208668 (TRAV12-2, TRAJ13)
CAVKKTGGDQKVTF

SEQ ID NO: 417336 - protein, 15 aa, Homo sapiens
  CDR3 for beta chain variable domain of TCR clone 208668 (TRBV27, TRBJ2-1)
CASSNVGGSSNEQFF

SEQ ID NO: 417337 - protein, 11 aa, Homo sapiens
  CDR3 for alpha chain variable domain of TCR clone 208669 (TRAV2, TRAJ13)
CASGVYQKVTF

SEQ ID NO: 417338 - protein, 14 aa, Homo sapiens
  CDR3 for beta chain variable domain of TCR clone 208669 (TRBV7-3, TRBJ2-7)
CASSYDQDYYEQYF

SEQ ID NO: 417339 - protein, 14 aa, Homo sapiens
  CDR3 for alpha chain variable domain of TCR clone 208670 (TRAV38-1, TRAJ45)
CAYYSGGGADGLTF

SEQ ID NO: 417340 - protein, 15 aa, Homo sapiens
  CDR3 for beta chain variable domain of TCR clone 208670 (TRBV7-9, TRBJ2-1)
CASSFVGAGKNEQFF

SEQ ID NO: 417341 - protein, 13 aa, Homo sapiens
  CDR3 for alpha chain variable domain of TCR clone 208671 (TRAV21, TRAJ27)
CAARPGNAGKSTF

SEQ ID NO: 417342 - protein, 14 aa, Homo sapiens
  CDR3 for beta chain variable domain of TCR clone 208671 (TRBV7-6, TRBJ2-3)
CASSLGSVTDTHYF

SEQ ID NO: 417343 - protein, 13 aa, Homo sapiens
  CDR3 for alpha chain variable domain of TCR clone 208672 (TRAV29/DV5, TRAJ31)
CAASRNNNARLMF

SEQ ID NO: 417344 - protein, 14 aa, Homo sapiens
  CDR3 for beta chain variable domain of TCR clone 208672 (TRBV7-3, TRBJ2-1)
CASSLAGGTNEQFF

SEQ ID NO: 417345 - protein, 15 aa, Homo sapiens
  CDR3 for alpha chain variable domain of TCR clone 208673 (TRAV21, TRAJ53)
CATLNSGGSNYKLTF

SEQ ID NO: 417346 - protein, 18 aa, Homo sapiens
  CDR3 for beta chain variable domain of TCR clone 208673 (TRBV4-1, TRBJ2-3)
CASSHQLAGGRSTDTQYF

SEQ ID NO: 417347 - protein, 15 aa, Homo sapiens
  CDR3 for alpha chain variable domain of TCR clone 208674 (TRAV12-3, TRAJ6)
CAMSATTGGSYIPTF

SEQ ID NO: 417348 - protein, 16 aa, Homo sapiens
  CDR3 for beta chain variable domain of TCR clone 208674 (TRBV7-9, TRBJ1-2)
CASSLGFSSGEDGYIF

SEQ ID NO: 417349 - protein, 18 aa, Homo sapiens
  CDR3 for alpha chain variable domain of TCR clone 208675 (TRAV26-1, TRAJ5)
CIVRVVPPRDKGRRALTF

SEQ ID NO: 417350 - protein, 15 aa, Homo sapiens
  CDR3 for beta chain variable domain of TCR clone 208675 (TRBV7-9, TRBJ2-7)
CASSLPMGQANEQYF

SEQ ID NO: 417351 - protein, 13 aa, Homo sapiens
  CDR3 for alpha chain variable domain of TCR clone 208676 (TRAV8-6, TRAJ20)
CAVSYSNDYKLSF

SEQ ID NO: 417352 - protein, 15 aa, Homo sapiens
  CDR3 for beta chain variable domain of TCR clone 208676 (TRBV9, TRBJ1-6)
CASSVAGTGDSPLHF

SEQ ID NO: 417353 - protein, 12 aa, Homo sapiens
  CDR3 for alpha chain variable domain of TCR clone 208677 (TRAV12-3, TRAJ17)
CAMTLTGNKLTF

SEQ ID NO: 417354 - protein, 15 aa, Homo sapiens
  CDR3 for beta chain variable domain of TCR clone 208677 (TRBV20-1, TRBJ2-7)
CSARDRASGMDEQYI

SEQ ID NO: 417355 - protein, 21 aa, Homo sapiens
  CDR3 for alpha chain variable domain of TCR clone 208678 (TRAV29/DV5, TRAJ52)
CSVLLCSKREAGGTSYGKLTF

SEQ ID NO: 417356 - protein, 14 aa, Homo sapiens
  CDR3 for beta chain variable domain of TCR clone 208678 (TRBV7-8, TRBJ2-3)
CASSLEAGTDTQYF

SEQ ID NO: 417357 - protein, 15 aa, Homo sapiens
  CDR3 for alpha chain variable domain of TCR clone 208679 (TRAV8-3, TRAJ11)
CAVGLLNSGYSTITF

SEQ ID NO: 417358 - protein, 15 aa, Homo sapiens
  CDR3 for beta chain variable domain of TCR clone 208679 (TRBV13, TRBJ2-1)
CASSLLSGLNNEQFF

SEQ ID NO: 417359 - protein, 13 aa, Homo sapiens
  CDR3 for alpha chain variable domain of TCR clone 208680 (TRAV20, TRAJ42)
CAVQGGSQGNLIF

SEQ ID NO: 417360 - protein, 15 aa, Homo sapiens
  CDR3 for beta chain variable domain of TCR clone 208680 (TRBV10-1, TRBJ2-1)
CASSEGRGTYNEQFF

SEQ ID NO: 417361 - protein, 11 aa, Homo sapiens
  CDR3 for alpha chain variable domain of TCR clone 208681 (TRAV1-2, TRAJ40)
CAVPGTYKYIF

SEQ ID NO: 417362 - protein, 14 aa, Homo sapiens
  CDR3 for beta chain variable domain of TCR clone 208681 (TRBV7-9, TRBJ2-1)
CASSLANYYNEQFF

SEQ ID NO: 417363 - protein, 15 aa, Homo sapiens
  CDR3 for alpha chain variable domain of TCR clone 208682 (TRAV38-1, TRAJ37)
CAFIFGSGTTGKLIF

SEQ ID NO: 417364 - protein, 12 aa, Homo sapiens
  CDR3 for beta chain variable domain of TCR clone 208682 (TRBV7-9, TRBJ2-7)
CASSLEGDEQYF

SEQ ID NO: 417365 - protein, 13 aa, Homo sapiens
  CDR3 for alpha chain variable domain of TCR clone 208683 (TRAV26-2, TRAJ57)
CILSRGGSEKLVF

SEQ ID NO: 417366 - protein, 13 aa, Homo sapiens
  CDR3 for beta chain variable domain of TCR clone 208683 (TRBV7-9, TRBJ1-2)
CASSLKQNYGYTF

SEQ ID NO: 417367 - protein, 18 aa, Homo sapiens
  CDR3 for alpha chain variable domain of TCR clone 208684 (TRAV12-2, )
CAVEDIQNPDPAVYQLRD

SEQ ID NO: 417368 - protein, 13 aa, Homo sapiens
  CDR3 for beta chain variable domain of TCR clone 208684 (TRBV20-1, TRBJ1-1)
CSARGGGNTEAFF

SEQ ID NO: 417369 - protein, 16 aa, Homo sapiens
  CDR3 for alpha chain variable domain of TCR clone 208685 (TRAV27, TRAJ52)
CPGAPAGGTSYGKLTF

SEQ ID NO: 417370 - protein, 12 aa, Homo sapiens
  CDR3 for beta chain variable domain of TCR clone 208685 (TRBV27, TRBJ2-1)
CASRGFYNEQFF

SEQ ID NO: 417371 - protein, 15 aa, Homo sapiens
  CDR3 for alpha chain variable domain of TCR clone 208686 (TRAV3, TRAJ5)
CAVRDLDTGRRALTL

SEQ ID NO: 417372 - protein, 13 aa, Homo sapiens
  CDR3 for beta chain variable domain of TCR clone 208686 (TRBV12-3, TRBJ2-7)
CASSPTETYEQYF

SEQ ID NO: 417373 - protein, 15 aa, Homo sapiens
  CDR3 for alpha chain variable domain of TCR clone 208687 (TRAV21, TRAJ53)
CATLNSGGSNYKLTF

SEQ ID NO: 417374 - protein, 13 aa, Homo sapiens
  CDR3 for beta chain variable domain of TCR clone 208687 (TRBV20-1, TRBJ1-1)
CSARLGQGTEAFF

SEQ ID NO: 417375 - protein, 14 aa, Homo sapiens
  CDR3 for alpha chain variable domain of TCR clone 208688 (TRAV1-2, TRAJ16)
CAVNRFSDGQKLFF

SEQ ID NO: 417376 - protein, 16 aa, Homo sapiens
  CDR3 for beta chain variable domain of TCR clone 208688 (TRBV12-4, TRBJ2-5)
CASSFFVRGRQETQYF

SEQ ID NO: 417377 - protein, 14 aa, Homo sapiens
  CDR3 for alpha chain variable domain of TCR clone 208689 (TRAV1-2, TRAJ16)
CAVNRFSDGQKLLS

SEQ ID NO: 417378 - protein, 15 aa, Homo sapiens
  CDR3 for beta chain variable domain of TCR clone 208689 (TRBV28, TRBJ2-1)
CASSIIAGGRSEQFF

SEQ ID NO: 417379 - protein, 13 aa, Homo sapiens
  CDR3 for alpha chain variable domain of TCR clone 208690 (TRAV8-3, TRAJ21)
CAVGAYNFNKFYS

SEQ ID NO: 417380 - protein, 12 aa, Homo sapiens
  CDR3 for beta chain variable domain of TCR clone 208690 (TRBV11-2, TRBJ2-2)
CASSLGGGELFF

SEQ ID NO: 417381 - protein, 14 aa, Homo sapiens
  CDR3 for alpha chain variable domain of TCR clone 208691 (TRAV16, TRAJ54)
CALSGLQGAQKLVF

SEQ ID NO: 417382 - protein, 13 aa, Homo sapiens
  CDR3 for beta chain variable domain of TCR clone 208691 (TRBV24-1, TRBJ2-2)
CATSDWSTGELFF

SEQ ID NO: 417383 - protein, 13 aa, Homo sapiens
  CDR3 for alpha chain variable domain of TCR clone 208692 (TRAV8-6, TRAJ40)
CAVSATGAYKYIF

SEQ ID NO: 417384 - protein, 15 aa, Homo sapiens
  CDR3 for beta chain variable domain of TCR clone 208692 (TRBV4-1, TRBJ2-3)
CASGRGQGIPDTQYF

SEQ ID NO: 417385 - protein, 19 aa, Homo sapiens
  CDR3 for alpha chain variable domain of TCR clone 208693 (TRAV26-1, TRAJ52)
CIVRAHRNAGGTSYGKLPF

SEQ ID NO: 417386 - protein, 15 aa, Homo sapiens
  CDR3 for beta chain variable domain of TCR clone 208693 (TRBV29-1, TRBJ2-1)
CSGRDRKNSYNEQFF

SEQ ID NO: 417387 - protein, 14 aa, Homo sapiens
  CDR3 for alpha chain variable domain of TCR clone 208694 (TRAV1-2, TRAJ16)
CAVNRVSAGQKLLF

SEQ ID NO: 417388 - protein, 15 aa, Homo sapiens
  CDR3 for beta chain variable domain of TCR clone 208694 (TRBV6-1, TRBJ2-3)
CASSERGGITDTQYF

SEQ ID NO: 417389 - protein, 21 aa, Homo sapiens
  CDR3 for alpha chain variable domain of TCR clone 208695 (TRAV8-3, TRAJ32)
CAVEVVLQPSSSLELALCLLS

SEQ ID NO: 417390 - protein, 12 aa, Homo sapiens
  CDR3 for beta chain variable domain of TCR clone 208695 (TRBV7-8, TRBJ2-7)
CASSLGDREQYF

SEQ ID NO: 417391 - protein, 15 aa, Homo sapiens
  CDR3 for alpha chain variable domain of TCR clone 208696 (TRAV12-3, TRAJ6)
CAMSATTGGSYIPTF

SEQ ID NO: 417392 - protein, 15 aa, Homo sapiens
  CDR3 for beta chain variable domain of TCR clone 208696 (TRBV11-2, TRBJ2-5)
CASSLLMGSQETQYF

SEQ ID NO: 417393 - protein, 12 aa, Homo sapiens
  CDR3 for alpha chain variable domain of TCR clone 208697 (TRAV23/DV6, TRAJ30)
CAASKGMTRSSL

SEQ ID NO: 417394 - protein, 15 aa, Homo sapiens
  CDR3 for beta chain variable domain of TCR clone 208697 (TRBV29-1, TRBJ2-1)
CSGRDRKSPYNEQFF

SEQ ID NO: 417395 - protein, 11 aa, Homo sapiens
  CDR3 for alpha chain variable domain of TCR clone 208698 (TRAV1-1, TRAJ23)
CAVRQGGKLIF

SEQ ID NO: 417396 - protein, 20 aa, Homo sapiens
  CDR3 for beta chain variable domain of TCR clone 208698 (TRBV7-8, TRBJ2-2)
CASSHLFPGPTTHITGELFF

SEQ ID NO: 417397 - protein, 16 aa, Homo sapiens
  CDR3 for alpha chain variable domain of TCR clone 208699 (TRAV17, TRAJ52)
CATSNAGGTSYGKLTF

SEQ ID NO: 417398 - protein, 13 aa, Homo sapiens
  CDR3 for beta chain variable domain of TCR clone 208699 (TRBV27, TRBJ1-6)
CASSLVLVSPLLF

SEQ ID NO: 417399 - protein, 12 aa, Homo sapiens
  CDR3 for alpha chain variable domain of TCR clone 208700 (TRAV8-3, TRAJ27)
SAVGAEAGKSTF

SEQ ID NO: 417400 - protein, 14 aa, Homo sapiens
  CDR3 for beta chain variable domain of TCR clone 208700 (TRBV2, TRBJ2-1)
CASRLIVGHDEQFF

SEQ ID NO: 417401 - protein, 11 aa, Homo sapiens
  CDR3 for alpha chain variable domain of TCR clone 208701 (TRAV27, TRAJ47)
SIVEYGNKLGF

SEQ ID NO: 417402 - protein, 18 aa, Homo sapiens
  CDR3 for beta chain variable domain of TCR clone 208701 (TRBV2, TRBJ2-1)
CASRGLAGGPRTYNEQFF

SEQ ID NO: 417403 - protein, 15 aa, Homo sapiens
  CDR3 for alpha chain variable domain of TCR clone 208702 (TRAV3, TRAJ22)
CAVRDRGGSARQLTF

SEQ ID NO: 417404 - protein, 14 aa, Homo sapiens
  CDR3 for beta chain variable domain of TCR clone 208702 (TRBV23-1, TRBJ2-5)
CASSFLRSQETQYF

SEQ ID NO: 417405 - protein, 14 aa, Homo sapiens
  CDR3 for alpha chain variable domain of TCR clone 208703 (TRAV12-2, TRAJ40)
CAVKISSGTYKYIF

SEQ ID NO: 417406 - protein, 12 aa, Homo sapiens
  CDR3 for beta chain variable domain of TCR clone 208703 (TRBV11-2, TRBJ2-1)
CASSPGNNEQFF

SEQ ID NO: 417407 - protein, 13 aa, Homo sapiens
  CDR3 for alpha chain variable domain of TCR clone 208704 (TRAV22, TRAJ29)
CAVGGSGNTPLVF

SEQ ID NO: 417408 - protein, 13 aa, Homo sapiens
  CDR3 for beta chain variable domain of TCR clone 208704 (TRBV4-2, TRBJ1-1)
CASSQDWGAEAFF

SEQ ID NO: 417409 - protein, 15 aa, Homo sapiens
  CDR3 for alpha chain variable domain of TCR clone 208705 (TRAV8-6, TRAJ10)
CAVSDQAGGGNKLTF

SEQ ID NO: 417410 - protein, 13 aa, Homo sapiens
  CDR3 for beta chain variable domain of TCR clone 208705 (TRBV7-3, TRBJ1-1)
CASSQDWGAEAFC

SEQ ID NO: 417411 - protein, 13 aa, Homo sapiens
  CDR3 for alpha chain variable domain of TCR clone 208706 (TRAV8-6, TRAJ40)
CAVSVTGTYKYIF

SEQ ID NO: 417412 - protein, 15 aa, Homo sapiens
  CDR3 for beta chain variable domain of TCR clone 208706 (TRBV2, TRBJ2-3)
CASSDFEKATDTQYF

SEQ ID NO: 417413 - protein, 17 aa, Homo sapiens
  CDR3 for alpha chain variable domain of TCR clone 208707 (TRAV13-1, TRAJ53)
CAASWKSSGGSNYKLTF

SEQ ID NO: 417414 - protein, 19 aa, Homo sapiens
  CDR3 for beta chain variable domain of TCR clone 208707 (TRBV7-9, TRBJ2-1)
SASSHNRGALLRSYNEQFF

SEQ ID NO: 417415 - protein, 16 aa, Homo sapiens
  CDR3 for alpha chain variable domain of TCR clone 208708 (TRAV3, TRAJ21)
CAVRDIERGNFNKFYF

SEQ ID NO: 417416 - protein, 20 aa, Homo sapiens
  CDR3 for beta chain variable domain of TCR clone 208708 (TRBV4-1, TRBJ2-2)
CARSQASPPGLASNTGEMFF

SEQ ID NO: 417417 - protein, 13 aa, Homo sapiens
  CDR3 for alpha chain variable domain of TCR clone 208709 (TRAV8-6, TRAJ49)
CAVITNTGNLFYF

SEQ ID NO: 417418 - protein, 14 aa, Homo sapiens
  CDR3 for beta chain variable domain of TCR clone 208709 (TRBV5-1, TRBJ2-7)
CASSRGESLYEQYS

SEQ ID NO: 417419 - protein, 11 aa, Homo sapiens
  CDR3 for alpha chain variable domain of TCR clone 208710 (TRAV12-3, TRAJ43)
CAMSVSTDMRF

SEQ ID NO: 417420 - protein, 16 aa, Homo sapiens
  CDR3 for beta chain variable domain of TCR clone 208710 (TRBV20-1, TRBJ2-1)
CSARDSLGAVYNEQFF

SEQ ID NO: 417421 - protein, 14 aa, Homo sapiens
  CDR3 for alpha chain variable domain of TCR clone 208711 (TRAV12-2, TRAJ13)
CAAMNSGGYQKVTF

SEQ ID NO: 417422 - protein, 18 aa, Homo sapiens
  CDR3 for beta chain variable domain of TCR clone 208711 (TRBV12-4, TRBJ2-2)
CASSLVSGTRGRTGELFF

SEQ ID NO: 417423 - protein, 17 aa, Homo sapiens
  CDR3 for alpha chain variable domain of TCR clone 208712 (TRAV17, TRAJ52)
CATERPSGGTSYGKLTF

SEQ ID NO: 417424 - protein, 14 aa, Homo sapiens
  CDR3 for beta chain variable domain of TCR clone 208712 (TRBV7-2, TRBJ2-7)
CASRSQGAAYEQYF

SEQ ID NO: 417425 - protein, 16 aa, Homo sapiens
  CDR3 for alpha chain variable domain of TCR clone 208713 (TRAV13-1, TRAJ10)
CAAGYILTGGGNKLTF

SEQ ID NO: 417426 - protein, 15 aa, Homo sapiens
  CDR3 for beta chain variable domain of TCR clone 208713 (TRBV12-4, TRBJ2-7)
CASSQTGAISYEQYL

SEQ ID NO: 417427 - protein, 15 aa, Homo sapiens
  CDR3 for alpha chain variable domain of TCR clone 208714 (TRAV3, TRAJ24)
CAVRDKMTAGGNCSL

SEQ ID NO: 417428 - protein, 14 aa, Homo sapiens
  CDR3 for beta chain variable domain of TCR clone 208714 (TRBV7-2, TRBJ2-3)
GASSQTGSSYTQYF

SEQ ID NO: 417429 - protein, 17 aa, Homo sapiens
  CDR3 for alpha chain variable domain of TCR clone 208715 (TRAV38-2/DV8, TRAJ56)
CAYRSEVGTGANSNLTF

SEQ ID NO: 417430 - protein, 14 aa, Homo sapiens
  CDR3 for beta chain variable domain of TCR clone 208715 (TRBV11-1, TRBJ1-1)
CASSLEHPNTEAFF

SEQ ID NO: 417431 - protein, 16 aa, Homo sapiens
  CDR3 for alpha chain variable domain of TCR clone 208716 (TRAV3, TRAJ37)
CAVRPHGSGNTGKLIF

SEQ ID NO: 417432 - protein, 14 aa, Homo sapiens
  CDR3 for beta chain variable domain of TCR clone 208716 (TRBV20-1, TRBJ2-5)
CSARDGRAGETQYF

SEQ ID NO: 417433 - protein, 14 aa, Homo sapiens
  CDR3 for alpha chain variable domain of TCR clone 208717 (TRAV1-2, TRAJ29)
CAVRELTSATPLVF

SEQ ID NO: 417434 - protein, 13 aa, Homo sapiens
  CDR3 for beta chain variable domain of TCR clone 208717 (TRBV3-1, TRBJ2-5)
CQQSRPGSRDQYF

SEQ ID NO: 417435 - protein, 16 aa, Homo sapiens
  CDR3 for alpha chain variable domain of TCR clone 208718 (TRAV3, TRAJ37)
CAVRGKGSGNTGKLVF

SEQ ID NO: 417436 - protein, 12 aa, Homo sapiens
  CDR3 for beta chain variable domain of TCR clone 208718 (TRBV11-2, TRBJ2-2)
CASSLGGGELFF

SEQ ID NO: 417437 - protein, 11 aa, Homo sapiens
  CDR3 for alpha chain variable domain of TCR clone 208719 (TRAV39, TRAJ49)
CAVDISTQFYF

SEQ ID NO: 417438 - protein, 11 aa, Homo sapiens
  CDR3 for beta chain variable domain of TCR clone 208719 (TRBV7-8, TRBJ2-7)
CASSRSLEQYF

SEQ ID NO: 417439 - protein, 14 aa, Homo sapiens
  CDR3 for alpha chain variable domain of TCR clone 208720 (TRAV26-1, TRAJ15)
RIEAGNQAGTALIF

SEQ ID NO: 417440 - protein, 16 aa, Homo sapiens
  CDR3 for beta chain variable domain of TCR clone 208720 (TRBV27, TRBJ2-7)
CASSWLGGRGSYEQYF

SEQ ID NO: 417441 - protein, 13 aa, Homo sapiens
  CDR3 for alpha chain variable domain of TCR clone 208721 (TRAV12-2, TRAJ10)
CAVPTGGGNKLTF

SEQ ID NO: 417442 - protein, 14 aa, Homo sapiens
  CDR3 for beta chain variable domain of TCR clone 208721 (TRBV18, TRBJ2-7)
CASSPRGGAYEQYF

SEQ ID NO: 417443 - protein, 16 aa, Homo sapiens
  CDR3 for alpha chain variable domain of TCR clone 208722 (TRAV3, TRAJ10)
CAVRDMRAGGGNKLTF

SEQ ID NO: 417444 - protein, 16 aa, Homo sapiens
  CDR3 for beta chain variable domain of TCR clone 208722 (TRBV18, TRBJ1-5)
CASSPRTGGGNQPQHF

SEQ ID NO: 417445 - protein, 18 aa, Homo sapiens
  CDR3 for alpha chain variable domain of TCR clone 208723 (TRAV3, TRAJ52)
CAASKRSAGGTSYGKLTF

SEQ ID NO: 417446 - protein, 13 aa, Homo sapiens
  CDR3 for beta chain variable domain of TCR clone 208723 (TRBV12-4, TRBJ1-2)
CASSLRQGKGYTF

SEQ ID NO: 417447 - protein, 12 aa, Homo sapiens
  CDR3 for alpha chain variable domain of TCR clone 208724 (TRAV12-3, TRAJ17)
CAMTLTGNKLTF

SEQ ID NO: 417448 - protein, 11 aa, Homo sapiens
  CDR3 for beta chain variable domain of TCR clone 208724 (TRBV12-4, TRBJ2-3)
CASTASDTQYF

SEQ ID NO: 417449 - protein, 17 aa, Homo sapiens
  CDR3 for alpha chain variable domain of TCR clone 208725 (TRAV38-2/DV8, TRAJ28)
CPFLTLYSGAGSYQLTF

SEQ ID NO: 417450 - protein, 13 aa, Homo sapiens
  CDR3 for beta chain variable domain of TCR clone 208725 (TRBV7-2, TRBJ2-5)
CQQLVRGGETQYF

SEQ ID NO: 417451 - protein, 14 aa, Homo sapiens
  CDR3 for alpha chain variable domain of TCR clone 208726 (TRAV12-1, TRAJ17)
CVVNPKAAGNKLTF

SEQ ID NO: 417452 - protein, 16 aa, Homo sapiens
  CDR3 for beta chain variable domain of TCR clone 208726 (TRBV20-1, TRBJ2-1)
CSGSASGYSSYNEQFF

SEQ ID NO: 417453 - protein, 15 aa, Homo sapiens
  CDR3 for alpha chain variable domain of TCR clone 208727 (TRAV35, TRAJ58)
CAGRRQETRGSRLTF

SEQ ID NO: 417454 - protein, 16 aa, Homo sapiens
  CDR3 for beta chain variable domain of TCR clone 208727 (TRBV2, TRBJ2-1)
CASSVGGSLSYNEQFF

SEQ ID NO: 417455 - protein, 14 aa, Homo sapiens
  CDR3 for alpha chain variable domain of TCR clone 208728 (TRAV26-1, TRAJ49)
CIVRLTNTGNQFYF

SEQ ID NO: 417456 - protein, 13 aa, Homo sapiens
  CDR3 for beta chain variable domain of TCR clone 208728 (TRBV4-1, TRBJ2-7)
CASSQWQAYEQYF

SEQ ID NO: 417457 - protein, 14 aa, Homo sapiens
  CDR3 for alpha chain variable domain of TCR clone 208729 (TRAV1-2, TRAJ27)
CAVRSGTNAGKSTF

SEQ ID NO: 417458 - protein, 15 aa, Homo sapiens
  CDR3 for beta chain variable domain of TCR clone 208729 (TRBV18, TRBJ2-7)
CASSRLQGRTYEQYF

SEQ ID NO: 417459 - protein, 11 aa, Homo sapiens
  CDR3 for alpha chain variable domain of TCR clone 208730 (TRAV2, TRAJ13)
CASGGYQKVTF

SEQ ID NO: 417460 - protein, 15 aa, Homo sapiens
  CDR3 for beta chain variable domain of TCR clone 208730 (TRBV11-1, TRBJ2-7)
RASSLNYGASYEQYF

SEQ ID NO: 417461 - protein, 13 aa, Homo sapiens
  CDR3 for alpha chain variable domain of TCR clone 208731 (TRAV20, TRAJ37)
CAGCSSNTGKLIF

SEQ ID NO: 417462 - protein, 16 aa, Homo sapiens
  CDR3 for beta chain variable domain of TCR clone 208731 (TRBV5-1, TRBJ1-2)
CASSFGLADGLYGYTF

SEQ ID NO: 417463 - protein, 13 aa, Homo sapiens
  CDR3 for alpha chain variable domain of TCR clone 208732 (TRAV12-3, TRAJ5)
CAMIYTGRRALTF

SEQ ID NO: 417464 - protein, 12 aa, Homo sapiens
  CDR3 for beta chain variable domain of TCR clone 208732 (TRBV18, TRBJ1-4)
CASSPSRETLFF

SEQ ID NO: 417465 - protein, 11 aa, Homo sapiens
  CDR3 for alpha chain variable domain of TCR clone 208733 (TRAV16, TRAJ33)
CALHSNYQLIW

SEQ ID NO: 417466 - protein, 15 aa, Homo sapiens
  CDR3 for beta chain variable domain of TCR clone 208733 (TRBV4-1, TRBJ2-7)
CATSQQGQGFDEQYF

SEQ ID NO: 417467 - protein, 15 aa, Homo sapiens
  CDR3 for alpha chain variable domain of TCR clone 208734 (TRAV12-2, TRAJ53)
CAVNGGGGSNYKLTF

SEQ ID NO: 417468 - protein, 12 aa, Homo sapiens
  CDR3 for beta chain variable domain of TCR clone 208734 (TRBV7-3, TRBJ2-3)
MKRMRGADTQYF

SEQ ID NO: 417469 - protein, 13 aa, Homo sapiens
  CDR3 for alpha chain variable domain of TCR clone 208735 (TRAV20, TRAJ54)
SAVQAGGAQKLVF

SEQ ID NO: 417470 - protein, 14 aa, Homo sapiens
  CDR3 for beta chain variable domain of TCR clone 208735 (TRBV20-1, TRBJ2-7)
CSAKTGTGGYEQYF

SEQ ID NO: 417471 - protein, 16 aa, Homo sapiens
  CDR3 for alpha chain variable domain of TCR clone 208736 (TRAV21, TRAJ37)
CAVRTAGPSNTGQLIF

SEQ ID NO: 417472 - protein, 13 aa, Homo sapiens
  CDR3 for beta chain variable domain of TCR clone 208736 (TRBV7-9, TRBJ2-5)
CASLPSGRETQYF

SEQ ID NO: 417473 - protein, 13 aa, Homo sapiens
  CDR3 for alpha chain variable domain of TCR clone 208737 (TRAV3, TRAJ21)
CAVREPDFNKFYF

SEQ ID NO: 417474 - protein, 17 aa, Homo sapiens
  CDR3 for beta chain variable domain of TCR clone 208737 (TRBV7-8, TRBJ2-6)
CAISAGTGGGGANVLTF

SEQ ID NO: 417475 - protein, 19 aa, Homo sapiens
  CDR3 for alpha chain variable domain of TCR clone 208738 (TRAV3, TRAJ6)
CAVRDRNHSRSGGSYTPTF

SEQ ID NO: 417476 - protein, 15 aa, Homo sapiens
  CDR3 for beta chain variable domain of TCR clone 208738 (TRBV18, TRBJ2-7)
CASSPTFMDSYEQYF

SEQ ID NO: 417477 - protein, 17 aa, Homo sapiens
  CDR3 for alpha chain variable domain of TCR clone 208739 (TRAV4, TRAJ18)
CLVVAAGRGSTLGRLYF

SEQ ID NO: 417478 - protein, 17 aa, Homo sapiens
  CDR3 for beta chain variable domain of TCR clone 208739 (TRBV28, TRBJ2-2)
CVSSLATGMGDAGELFF

SEQ ID NO: 417479 - protein, 17 aa, Homo sapiens
  CDR3 for alpha chain variable domain of TCR clone 208740 (TRAV26-1, TRAJ53)
CIVRVDDSGGSNYKLTF

SEQ ID NO: 417480 - protein, 15 aa, Homo sapiens
  CDR3 for beta chain variable domain of TCR clone 208740 (TRBV7-3, TRBJ2-1)
CSSSYFRGTYNEQFF

SEQ ID NO: 417481 - protein, 14 aa, Homo sapiens
  CDR3 for alpha chain variable domain of TCR clone 208741 (TRAV23/DV6, TRAJ4)
CAAPSSGGYNKLIF

SEQ ID NO: 417482 - protein, 13 aa, Homo sapiens
  CDR3 for beta chain variable domain of TCR clone 208741 (TRBV7-2, TRBJ1-1)
CASSRNTNTEAFF

SEQ ID NO: 417483 - protein, 15 aa, Homo sapiens
  CDR3 for alpha chain variable domain of TCR clone 208742 (TRAV8-3, TRAJ45)
CASSYSGGGADGLTF

SEQ ID NO: 417484 - protein, 14 aa, Homo sapiens
  CDR3 for beta chain variable domain of TCR clone 208742 (TRBV7-6, TRBJ1-6)
CASSQAGGGSPLHF

SEQ ID NO: 417485 - protein, 13 aa, Homo sapiens
  CDR3 for alpha chain variable domain of TCR clone 208743 (TRAV8-1, TRAJ8)
CAVNRTGFQKLVF

SEQ ID NO: 417486 - protein, 13 aa, Homo sapiens
  CDR3 for beta chain variable domain of TCR clone 208743 (TRBV7-2, TRBJ2-2)
CASSLAVTGELFF

SEQ ID NO: 417487 - protein, 17 aa, Homo sapiens
  CDR3 for alpha chain variable domain of TCR clone 208744 (TRAV13-1, TRAJ28)
CAASPPYSEAGSYQLTF

SEQ ID NO: 417488 - protein, 15 aa, Homo sapiens
  CDR3 for beta chain variable domain of TCR clone 208744 (TRBV6-3, TRBJ2-2)
CASSFLATLTGELFF

SEQ ID NO: 417489 - protein, 15 aa, Homo sapiens
  CDR3 for alpha chain variable domain of TCR clone 208745 (TRAV23/DV6, TRAJ18)
CAARYRVSTLGRLYF

SEQ ID NO: 417490 - protein, 15 aa, Homo sapiens
  CDR3 for beta chain variable domain of TCR clone 208745 (TRBV9, TRBJ1-6)
CASSVAGTGDSPLHF

SEQ ID NO: 417491 - protein, 14 aa, Homo sapiens
  CDR3 for alpha chain variable domain of TCR clone 208746 (TRAV1-2, TRAJ6)
CAVSLSGGSYIPTF

SEQ ID NO: 417492 - protein, 15 aa, Homo sapiens
  CDR3 for beta chain variable domain of TCR clone 208746 (TRBV28, TRBJ2-7)
CASSPGGRDFYEQYF

SEQ ID NO: 417493 - protein, 14 aa, Homo sapiens
  CDR3 for alpha chain variable domain of TCR clone 208747 (TRAV1-1, TRAJ28)
CAAPSGAGSYQLTF

SEQ ID NO: 417494 - protein, 15 aa, Homo sapiens
  CDR3 for beta chain variable domain of TCR clone 208747 (TRBV7-2, TRBJ1-2)
CASSLVSGGDYVYTF

SEQ ID NO: 417495 - protein, 15 aa, Homo sapiens
  CDR3 for alpha chain variable domain of TCR clone 208748 (TRAV21, TRAJ53)
GATLNSGGSNYKLTF

SEQ ID NO: 417496 - protein, 16 aa, Homo sapiens
  CDR3 for beta chain variable domain of TCR clone 208748 (TRBV20-1, TRBJ1-4)
CSAPGQGLLTNDKPFF

SEQ ID NO: 417497 - protein, 17 aa, Homo sapiens
  CDR3 for alpha chain variable domain of TCR clone 208749 (TRAV3, TRAJ42)
FAVRDRDYGGSQGNLIF

SEQ ID NO: 417498 - protein, 15 aa, Homo sapiens
  CDR3 for beta chain variable domain of TCR clone 208749 (TRBV28, TRBJ2-1)
CASSIIAGGRSEQFF

SEQ ID NO: 417499 - protein, 12 aa, Homo sapiens
  CDR3 for alpha chain variable domain of TCR clone 208750 (TRAV8-3, TRAJ34)
CAVLTNTDKLIF

SEQ ID NO: 417500 - protein, 15 aa, Homo sapiens
  CDR3 for beta chain variable domain of TCR clone 208750 (TRBV7-2, TRBJ2-7)
CASSLGRGNDYEQYF

SEQ ID NO: 417501 - protein, 11 aa, Homo sapiens
  CDR3 for alpha chain variable domain of TCR clone 208751 (TRAV1-2, TRAJ40)
CAVPGTYKYIF

SEQ ID NO: 417502 - protein, 22 aa, Homo sapiens
  CDR3 for beta chain variable domain of TCR clone 208751 (TRBV7-8, TRBJ2-7)
CASSRVPLRGPSSGLFSYEQYF

SEQ ID NO: 417503 - protein, 16 aa, Homo sapiens
  CDR3 for alpha chain variable domain of TCR clone 208752 (TRAV16, TRAJ4)
CALSRMFSGGYNKLIF

SEQ ID NO: 417504 - protein, 14 aa, Homo sapiens
  CDR3 for beta chain variable domain of TCR clone 208752 (TRBV4-1, TRBJ2-2)
CACSQAVNTGELFF

SEQ ID NO: 417505 - protein, 14 aa, Homo sapiens
  CDR3 for alpha chain variable domain of TCR clone 208753 (TRAV12-2, TRAJ13)
CAVKKTGGYQKVTF

SEQ ID NO: 417506 - protein, 14 aa, Homo sapiens
  CDR3 for beta chain variable domain of TCR clone 208753 (TRBV6-5, TRBJ2-2)
CASTEGQEAGELFF

SEQ ID NO: 417507 - protein, 14 aa, Homo sapiens
  CDR3 for alpha chain variable domain of TCR clone 208754 (TRAV29/DV5, TRAJ45)
CAASFRGGADGLTF

SEQ ID NO: 417508 - protein, 11 aa, Homo sapiens
  CDR3 for beta chain variable domain of TCR clone 208754 (TRBV11-2, TRBJ2-2)
CASSLAGELFF

SEQ ID NO: 417509 - protein, 14 aa, Homo sapiens
  CDR3 for alpha chain variable domain of TCR clone 208755 (TRAV12-2, TRAJ40)
CAVKIPSGTYTYLF

SEQ ID NO: 417510 - protein, 17 aa, Homo sapiens
  CDR3 for beta chain variable domain of TCR clone 208755 (TRBV13, TRBJ2-3)
CASSLSRVAGGRNTQYF

SEQ ID NO: 417511 - protein, 11 aa, Homo sapiens
  CDR3 for alpha chain variable domain of TCR clone 208756 (TRAV2, TRAJ33)
CAVDSNYQLIW

SEQ ID NO: 417512 - protein, 15 aa, Homo sapiens
  CDR3 for beta chain variable domain of TCR clone 208756 (TRBV28, TRBJ2-1)
CASSGLAEVDNEQFF

SEQ ID NO: 417513 - protein, 14 aa, Homo sapiens
  CDR3 for alpha chain variable domain of TCR clone 208757 (TRAV1-2, TRAJ16)
CAVNRFSDGQELLF

SEQ ID NO: 417514 - protein, 17 aa, Homo sapiens
  CDR3 for beta chain variable domain of TCR clone 208757 (TRBV7-3, TRBJ2-3)
CASSLMKRMRGADTQYF

SEQ ID NO: 417515 - protein, 12 aa, Homo sapiens
  CDR3 for alpha chain variable domain of TCR clone 208758 (TRAV38-2/DV8, TRAJ48)
CALLSGNEQLTF

SEQ ID NO: 417516 - protein, 15 aa, Homo sapiens
  CDR3 for beta chain variable domain of TCR clone 208758 (TRBV7-2, TRBJ1-2)
CASSPRAGWNYGYTF

SEQ ID NO: 417517 - protein, 19 aa, Homo sapiens
  CDR3 for alpha chain variable domain of TCR clone 208759 (TRAV13-2, TRAJ28)
CLLFAEKSYSGAGSYQLTF

SEQ ID NO: 417518 - protein, 16 aa, Homo sapiens
  CDR3 for beta chain variable domain of TCR clone 208759 (TRBV19, TRBJ2-1)
CASSKAGPSSYNEQFF

SEQ ID NO: 417519 - protein, 13 aa, Homo sapiens
  CDR3 for alpha chain variable domain of TCR clone 208760 (TRAV12-2, TRAJ42)
CAVKRGSQGNLIF

SEQ ID NO: 417520 - protein, 17 aa, Homo sapiens
  CDR3 for beta chain variable domain of TCR clone 208760 (TRBV7-8, TRBJ2-6)
CASSAGTGGAGANVLTF

SEQ ID NO: 417521 - protein, 16 aa, Homo sapiens
  CDR3 for alpha chain variable domain of TCR clone 208761 (TRAV12-3, TRAJ53)
CAMSPGSGGSTNKLKF

SEQ ID NO: 417522 - protein, 11 aa, Homo sapiens
  CDR3 for beta chain variable domain of TCR clone 208761 (TRBV29-1, TRBJ2-5)
CSEDRTGTQYF

SEQ ID NO: 417523 - protein, 17 aa, Homo sapiens
  CDR3 for alpha chain variable domain of TCR clone 208762 (TRAV2, TRAJ36)
CAVEDRGNWGKQPLLWH

SEQ ID NO: 417524 - protein, 14 aa, Homo sapiens
  CDR3 for beta chain variable domain of TCR clone 208762 (TRBV7-9, TRBJ2-5)
CASSLDTAQETQYF

SEQ ID NO: 417525 - protein, 12 aa, Homo sapiens
  CDR3 for alpha chain variable domain of TCR clone 208763 (TRAV13-1, TRAJ21)
CAAKEGFNKFYF

SEQ ID NO: 417526 - protein, 13 aa, Homo sapiens
  CDR3 for beta chain variable domain of TCR clone 208763 (TRBV19, TRBJ1-2)
CASSVPEQDGYTF

SEQ ID NO: 417527 - protein, 14 aa, Homo sapiens
  CDR3 for alpha chain variable domain of TCR clone 208764 (TRAV8-6, TRAJ30)
CAVRPVNRDDKIIF

SEQ ID NO: 417528 - protein, 17 aa, Homo sapiens
  CDR3 for beta chain variable domain of TCR clone 208764 (TRBV7-8, TRBJ2-6)
CASSAGTGGAGANVLTL

SEQ ID NO: 417529 - protein, 14 aa, Homo sapiens
  CDR3 for alpha chain variable domain of TCR clone 208765 (TRAV1-2, TRAJ16)
CAVRGFSDGQKLLF

SEQ ID NO: 417530 - protein, 13 aa, Homo sapiens
  CDR3 for beta chain variable domain of TCR clone 208765 (TRBV5-7, TRBJ2-6)
CASTSSGANVLTF

SEQ ID NO: 417531 - protein, 18 aa, Homo sapiens
  CDR3 for alpha chain variable domain of TCR clone 208766 (TRAV21, TRAJ52)
CAVRPSPAGGTSYGKLTF

SEQ ID NO: 417532 - protein, 15 aa, Homo sapiens
  CDR3 for beta chain variable domain of TCR clone 208766 (TRBV13, TRBJ2-1)
CASSLLAGLNNEQFF

SEQ ID NO: 417533 - protein, 14 aa, Homo sapiens
  CDR3 for alpha chain variable domain of TCR clone 208767 (TRAV13-1, TRAJ35)
CAASKGGFGNVMHC

SEQ ID NO: 417534 - protein, 14 aa, Homo sapiens
  CDR3 for beta chain variable domain of TCR clone 208767 (TRBV7-2, TRBJ2-7)
CASSPKTSFYEQYF

SEQ ID NO: 417535 - protein, 16 aa, Homo sapiens
  CDR3 for alpha chain variable domain of TCR clone 208768 (TRAV22, TRAJ45)
CAVERGKRGGADGLTF

SEQ ID NO: 417536 - protein, 17 aa, Homo sapiens
  CDR3 for beta chain variable domain of TCR clone 208768 (TRBV11-2, TRBJ2-1)
CASSLYPPGVEYNEQFF

SEQ ID NO: 417537 - protein, 12 aa, Homo sapiens
  CDR3 for alpha chain variable domain of TCR clone 208769 (TRAV12-3, TRAJ20)
CAMVRGDYKLSF

SEQ ID NO: 417538 - protein, 16 aa, Homo sapiens
  CDR3 for beta chain variable domain of TCR clone 208769 (TRBV28, TRBJ1-5)
CASSFRGGYSNQPQHF

SEQ ID NO: 417539 - protein, 14 aa, Homo sapiens
  CDR3 for alpha chain variable domain of TCR clone 208770 (TRAV12-2, TRAJ53)
CRERGGGSNYKLTF

SEQ ID NO: 417540 - protein, 14 aa, Homo sapiens
  CDR3 for beta chain variable domain of TCR clone 208770 (TRBV19, TRBJ2-2)
CASSTLHRSGELLF

SEQ ID NO: 417541 - protein, 18 aa, Homo sapiens
  CDR3 for alpha chain variable domain of TCR clone 208771 (TRAV26-1, TRAJ23)
CIVRVGLEVWNQGGKLIF

SEQ ID NO: 417542 - protein, 12 aa, Homo sapiens
  CDR3 for beta chain variable domain of TCR clone 208771 (TRBV6-3, TRBJ2-1)
CASSGSYNEQFF

SEQ ID NO: 417543 - protein, 13 aa, Homo sapiens
  CDR3 for alpha chain variable domain of TCR clone 208772 (TRAV29/DV5, TRAJ31)
CAASRNNNARLMF

SEQ ID NO: 417544 - protein, 14 aa, Homo sapiens
  CDR3 for beta chain variable domain of TCR clone 208772 (TRBV6-1, TRBJ1-3)
CASVRGGGGNTIYF

SEQ ID NO: 417545 - protein, 16 aa, Homo sapiens
  CDR3 for alpha chain variable domain of TCR clone 208773 (TRAV8-3, TRAJ10)
CAVGPILTGGGNKLTF

SEQ ID NO: 417546 - protein, 16 aa, Homo sapiens
  CDR3 for beta chain variable domain of TCR clone 208773 (TRBV7-2, TRBJ2-5)
CARSSKWLSGQETQYF

SEQ ID NO: 417547 - protein, 14 aa, Homo sapiens
  CDR3 for alpha chain variable domain of TCR clone 208774 (TRAV23/DV6, TRAJ4)
CAAPSSGGYNKLFF

SEQ ID NO: 417548 - protein, 16 aa, Homo sapiens
  CDR3 for beta chain variable domain of TCR clone 208774 (TRBV19, TRBJ1-1)
CASRFGGPVTGTEAFF

SEQ ID NO: 417549 - protein, 16 aa, Homo sapiens
  CDR3 for alpha chain variable domain of TCR clone 208775 (TRAV12-3, TRAJ53)
CAMSVGSGGSNCKLTF

SEQ ID NO: 417550 - protein, 11 aa, Homo sapiens
  CDR3 for beta chain variable domain of TCR clone 208775 (TRBV29-1, TRBJ2-5)
CSVASGETQYF

SEQ ID NO: 417551 - protein, 16 aa, Homo sapiens
  CDR3 for alpha chain variable domain of TCR clone 208776 (TRAV8-3, TRAJ8)
CAVPRDGYTGFQKLVF

SEQ ID NO: 417552 - protein, 15 aa, Homo sapiens
  CDR3 for beta chain variable domain of TCR clone 208776 (TRBV6-1, TRBJ2-6)
CASSFRPSGANVLTF

SEQ ID NO: 417553 - protein, 14 aa, Homo sapiens
  CDR3 for alpha chain variable domain of TCR clone 208777 (TRAV8-4, TRAJ13)
CAVTLSGGYQKVTF

SEQ ID NO: 417554 - protein, 14 aa, Homo sapiens
  CDR3 for beta chain variable domain of TCR clone 208777 (TRBV7-2, TRBJ1-2)
CASSQTGSTYGYSL

SEQ ID NO: 417555 - protein, 18 aa, Homo sapiens
  CDR3 for alpha chain variable domain of TCR clone 208778 (TRAV12-2, )
CAVEDIQNPDPAVYQLRD

SEQ ID NO: 417556 - protein, 16 aa, Homo sapiens
  CDR3 for beta chain variable domain of TCR clone 208778 (TRBV6-1, TRBJ1-2)
CASSGAWQGRSHGYNF

SEQ ID NO: 417557 - protein, 14 aa, Homo sapiens
  CDR3 for alpha chain variable domain of TCR clone 208779 (TRAV12-2, TRAJ44)
CAVNKAGTASKLTF

SEQ ID NO: 417558 - protein, 15 aa, Homo sapiens
  CDR3 for beta chain variable domain of TCR clone 208779 (TRBV7-3, TRBJ2-1)
CASSLGQGPFGEQFF

SEQ ID NO: 417559 - protein, 15 aa, Homo sapiens
  CDR3 for alpha chain variable domain of TCR clone 208780 (TRAV12-1, TRAJ44)
CVVDTPQGTSSKLTF

SEQ ID NO: 417560 - protein, 14 aa, Homo sapiens
  CDR3 for beta chain variable domain of TCR clone 208780 (TRBV7-9, TRBJ2-1)
CASSPRDSLYEQFF

SEQ ID NO: 417561 - protein, 15 aa, Homo sapiens
  CDR3 for alpha chain variable domain of TCR clone 208781 (TRAV17, TRAJ35)
CATAFVLGFGNVLHC

SEQ ID NO: 417562 - protein, 14 aa, Homo sapiens
  CDR3 for beta chain variable domain of TCR clone 208781 (TRBV12-5, TRBJ2-5)
CASGSRTHQETQYF

SEQ ID NO: 417563 - protein, 12 aa, Homo sapiens
  CDR3 for alpha chain variable domain of TCR clone 208782 (TRAV1-1, TRAJ8)
CAGGTGFPKLVF

SEQ ID NO: 417564 - protein, 13 aa, Homo sapiens
  CDR3 for beta chain variable domain of TCR clone 208782 (TRBV7-9, TRBJ1-2)
CASSLKQNYGYTF

SEQ ID NO: 417565 - protein, 14 aa, Homo sapiens
  CDR3 for alpha chain variable domain of TCR clone 208783 (TRAV17, TRAJ12)
CATDREDSSYKLIF

SEQ ID NO: 417566 - protein, 13 aa, Homo sapiens
  CDR3 for beta chain variable domain of TCR clone 208783 (TRBV10-2, TRBJ2-6)
CASKSAGANVLTF

SEQ ID NO: 417567 - protein, 13 aa, Homo sapiens
  CDR3 for alpha chain variable domain of TCR clone 208784 (TRAV12-3, TRAJ5)
CAMIYSGRRALTF

SEQ ID NO: 417568 - protein, 12 aa, Homo sapiens
  CDR3 for beta chain variable domain of TCR clone 208784 (TRBV18, TRBJ1-4)
CASSPSREKLFF

SEQ ID NO: 417569 - protein, 13 aa, Homo sapiens
  CDR3 for alpha chain variable domain of TCR clone 208785 (TRAV2, TRAJ5)
CAVPDTGRRALTF

SEQ ID NO: 417570 - protein, 14 aa, Homo sapiens
  CDR3 for beta chain variable domain of TCR clone 208785 (TRBV4-2, TRBJ2-1)
CASGLDRAYNEQFF

SEQ ID NO: 417571 - protein, 14 aa, Homo sapiens
  CDR3 for alpha chain variable domain of TCR clone 208786 (TRAV16, TRAJ17)
CALSEGAAGNQLTF

SEQ ID NO: 417572 - protein, 14 aa, Homo sapiens
  CDR3 for beta chain variable domain of TCR clone 208786 (TRBV28, TRBJ2-2)
CASRIRSGTGELFF

SEQ ID NO: 417573 - protein, 15 aa, Homo sapiens
  CDR3 for alpha chain variable domain of TCR clone 208787 (TRAV26-1, TRAJ29)
CIVRVEGTGNTPLVF

SEQ ID NO: 417574 - protein, 15 aa, Homo sapiens
  CDR3 for beta chain variable domain of TCR clone 208787 (TRBV7-9, TRBJ1-5)
CASSQGHQPNKPQHF

SEQ ID NO: 417575 - protein, 13 aa, Homo sapiens
  CDR3 for alpha chain variable domain of TCR clone 208788 (TRAV8-3, TRAJ48)
CAVVPFGNAKLTF

SEQ ID NO: 417576 - protein, 14 aa, Homo sapiens
  CDR3 for beta chain variable domain of TCR clone 208788 (TRBV12-5, TRBJ2-5)
CASGSRTHQETQYF

SEQ ID NO: 417577 - protein, 13 aa, Homo sapiens
  CDR3 for alpha chain variable domain of TCR clone 208789 (TRAV21, TRAJ20)
CAVGLRVDYNLSF

SEQ ID NO: 417578 - protein, 18 aa, Homo sapiens
  CDR3 for beta chain variable domain of TCR clone 208789 (TRBV20-1, TRBJ2-2)
CSAIVQTARPSGTGELFF

SEQ ID NO: 417579 - protein, 11 aa, Homo sapiens
  CDR3 for alpha chain variable domain of TCR clone 208790 (TRAV2, TRAJ33)
CAVDSNYQLIW

SEQ ID NO: 417580 - protein, 14 aa, Homo sapiens
  CDR3 for beta chain variable domain of TCR clone 208790 (TRBV11-2, TRBJ2-3)
CASSRLARTDAQYF

SEQ ID NO: 417581 - protein, 14 aa, Homo sapiens
  CDR3 for alpha chain variable domain of TCR clone 208791 (TRAV22, TRAJ6)
CAGVGPGGSYIPPF

SEQ ID NO: 417582 - protein, 11 aa, Homo sapiens
  CDR3 for beta chain variable domain of TCR clone 208791 (TRBV20-1, TRBJ2-1)
CSLSSGSEQFF

SEQ ID NO: 417583 - protein, 15 aa, Homo sapiens
  CDR3 for alpha chain variable domain of TCR clone 208792 (TRAV29/DV5, TRAJ40)
RAASAQGSGTYKYIF

SEQ ID NO: 417584 - protein, 15 aa, Homo sapiens
  CDR3 for beta chain variable domain of TCR clone 208792 (TRBV7-2, TRBJ2-3)
CASSLAGAFIDTQYF

SEQ ID NO: 417585 - protein, 15 aa, Homo sapiens
  CDR3 for alpha chain variable domain of TCR clone 208793 (TRAV12-1, TRAJ44)
CVADLPTGTASQLTF

SEQ ID NO: 417586 - protein, 13 aa, Homo sapiens
  CDR3 for beta chain variable domain of TCR clone 208793 (TRBV6-5, TRBJ2-5)
CASSPQGGETQYF

SEQ ID NO: 417587 - protein, 18 aa, Homo sapiens
  CDR3 for alpha chain variable domain of TCR clone 208794 (TRAV12-2, )
CAVEDIQNLDPAVYQLRY

SEQ ID NO: 417588 - protein, 16 aa, Homo sapiens
  CDR3 for beta chain variable domain of TCR clone 208794 (TRBV6-1, TRBJ1-2)
CASSGAWQGRSHGYTF

SEQ ID NO: 417589 - protein, 16 aa, Homo sapiens
  CDR3 for alpha chain variable domain of TCR clone 208795 (TRAV38-2/DV8, TRAJ47)
CAYRSAIMEYGNKLVF

SEQ ID NO: 417590 - protein, 15 aa, Homo sapiens
  CDR3 for beta chain variable domain of TCR clone 208795 (TRBV6-5, TRBJ1-2)
CASSYSQAFNYGYTF

SEQ ID NO: 417591 - protein, 14 aa, Homo sapiens
  CDR3 for alpha chain variable domain of TCR clone 208796 (TRAV29/DV5, TRAJ36)
CAARRKTGANNLFF

SEQ ID NO: 417592 - protein, 14 aa, Homo sapiens
  CDR3 for beta chain variable domain of TCR clone 208796 (TRBV11-2, TRBJ2-3)
CASSLGGGANTQYF

SEQ ID NO: 417593 - protein, 15 aa, Homo sapiens
  CDR3 for alpha chain variable domain of TCR clone 208797 (TRAV14/DV4, TRAJ26)
CAMREGQNYGQNFVF

SEQ ID NO: 417594 - protein, 13 aa, Homo sapiens
  CDR3 for beta chain variable domain of TCR clone 208797 (TRBV24-1, TRBJ2-2)
CATSDLSTGELFF

SEQ ID NO: 417595 - protein, 14 aa, Homo sapiens
  CDR3 for alpha chain variable domain of TCR clone 208798 (TRAV2, TRAJ37)
CAVDFTSNTGKLIF

SEQ ID NO: 417596 - protein, 13 aa, Homo sapiens
  CDR3 for beta chain variable domain of TCR clone 208798 (TRBV19, TRBJ2-7)
CASSIDRTYEQYF

SEQ ID NO: 417597 - protein, 13 aa, Homo sapiens
  CDR3 for alpha chain variable domain of TCR clone 208799 (TRAV13-1, TRAJ35)
CSASLGFGNVLHC

SEQ ID NO: 417598 - protein, 15 aa, Homo sapiens
  CDR3 for beta chain variable domain of TCR clone 208799 (TRBV20-1, TRBJ2-7)
CSARDRVSGMDEQYF

SEQ ID NO: 417599 - protein, 13 aa, Homo sapiens
  CDR3 for alpha chain variable domain of TCR clone 208800 (TRAV12-3, TRAJ9)
CAMRNTVGFNTIF

SEQ ID NO: 417600 - protein, 14 aa, Homo sapiens
  CDR3 for beta chain variable domain of TCR clone 208800 (TRBV11-2, TRBJ2-7)
CASSSTGEGYEQYF

SEQ ID NO: 417601 - protein, 14 aa, Homo sapiens
  CDR3 for alpha chain variable domain of TCR clone 208801 (TRAV8-1, TRAJ34)
CAVNPSYNTDKLIF

SEQ ID NO: 417602 - protein, 16 aa, Homo sapiens
  CDR3 for beta chain variable domain of TCR clone 208801 (TRBV12-5, TRBJ2-5)
CASGPRTSGNQETQYF

SEQ ID NO: 417603 - protein, 14 aa, Homo sapiens
  CDR3 for alpha chain variable domain of TCR clone 208802 (TRAV17, TRAJ54)
CATDANQGAQKLVF

SEQ ID NO: 417604 - protein, 14 aa, Homo sapiens
  CDR3 for beta chain variable domain of TCR clone 208802 (TRBV7-2, TRBJ2-7)
CASSPKTSFYEQYF

SEQ ID NO: 417605 - protein, 14 aa, Homo sapiens
  CDR3 for alpha chain variable domain of TCR clone 208803 (TRAV38-1, TRAJ29)
CAFITPSVNTPLVF

SEQ ID NO: 417606 - protein, 14 aa, Homo sapiens
  CDR3 for beta chain variable domain of TCR clone 208803 (TRBV18, TRBJ2-7)
CASSPRGGAYGQYF

SEQ ID NO: 417607 - protein, 16 aa, Homo sapiens
  CDR3 for alpha chain variable domain of TCR clone 208804 (TRAV21, TRAJ45)
CALSWGSGGGADGLTF

SEQ ID NO: 417608 - protein, 14 aa, Homo sapiens
  CDR3 for beta chain variable domain of TCR clone 208804 (TRBV4-2, TRBJ1-2)
CASSPGGSNYGYTF

SEQ ID NO: 417609 - protein, 13 aa, Homo sapiens
  CDR3 for alpha chain variable domain of TCR clone 208805 (TRAV29/DV5, TRAJ31)
CAASRNNNARLMF

SEQ ID NO: 417610 - protein, 12 aa, Homo sapiens
  CDR3 for beta chain variable domain of TCR clone 208805 (TRBV14, TRBJ2-7)
CASSIYKDEQYF

SEQ ID NO: 417611 - protein, 14 aa, Homo sapiens
  CDR3 for alpha chain variable domain of TCR clone 208806 (TRAV3, TRAJ17)
CAVRDAAAGNQLTF

SEQ ID NO: 417612 - protein, 15 aa, Homo sapiens
  CDR3 for beta chain variable domain of TCR clone 208806 (TRBV3-1, TRBJ2-7)
CASSQVRQGAYEQYF

SEQ ID NO: 417613 - protein, 14 aa, Homo sapiens
  CDR3 for alpha chain variable domain of TCR clone 208807 (TRAV1-2, TRAJ16)
CAVNRFSDGQKLLF

SEQ ID NO: 417614 - protein, 17 aa, Homo sapiens
  CDR3 for beta chain variable domain of TCR clone 208807 (TRBV13, TRBJ2-3)
CASSLSRVAGGRNTQYV

SEQ ID NO: 417615 - protein, 11 aa, Homo sapiens
  CDR3 for alpha chain variable domain of TCR clone 208808 (TRAV13-1, TRAJ49)
CACVGGNQFYF

SEQ ID NO: 417616 - protein, 16 aa, Homo sapiens
  CDR3 for beta chain variable domain of TCR clone 208808 (TRBV11-2, TRBJ2-2)
CASSLRTGNLIGELFL

SEQ ID NO: 417617 - protein, 17 aa, Homo sapiens
  CDR3 for alpha chain variable domain of TCR clone 208809 (TRAV36/DV7, TRAJ52)
CAVAQRAGGTSYGKLTF

SEQ ID NO: 417618 - protein, 13 aa, Homo sapiens
  CDR3 for beta chain variable domain of TCR clone 208809 (TRBV29-1, TRBJ2-2)
CSTTGVNTGELFF

SEQ ID NO: 417619 - protein, 15 aa, Homo sapiens
  CDR3 for alpha chain variable domain of TCR clone 208810 (TRAV34, TRAJ38)
CGADFTPGNNRKLIW

SEQ ID NO: 417620 - protein, 16 aa, Homo sapiens
  CDR3 for beta chain variable domain of TCR clone 208810 (TRBV7-9, TRBJ1-3)
CASSQTSGLRMGTIYF

SEQ ID NO: 417621 - protein, 13 aa, Homo sapiens
  CDR3 for alpha chain variable domain of TCR clone 208811 (TRAV27, TRAJ41)
CAGEGNSGSALNF

SEQ ID NO: 417622 - protein, 14 aa, Homo sapiens
  CDR3 for beta chain variable domain of TCR clone 208811 (TRBV7-2, TRBJ1-1)
CASSFLTGTTEALF

SEQ ID NO: 417623 - protein, 14 aa, Homo sapiens
  CDR3 for alpha chain variable domain of TCR clone 208812 (TRAV1-2, TRAJ16)
CAVNRFSDGQKLLF

SEQ ID NO: 417624 - protein, 15 aa, Homo sapiens
  CDR3 for beta chain variable domain of TCR clone 208812 (TRBV4-2, TRBJ1-1)
CASSPQGAGDTEAFF

SEQ ID NO: 417625 - protein, 14 aa, Homo sapiens
  CDR3 for alpha chain variable domain of TCR clone 208813 (TRAV9-2, TRAJ36)
CALPWRTGATTLFF

SEQ ID NO: 417626 - protein, 14 aa, Homo sapiens
  CDR3 for beta chain variable domain of TCR clone 208813 (TRBV2, TRBJ1-2)
CASSELQVNYGYTF

SEQ ID NO: 417627 - protein, 15 aa, Homo sapiens
  CDR3 for alpha chain variable domain of TCR clone 208814 (TRAV8-3, TRAJ7)
CAVGSISYGNNRFAF

SEQ ID NO: 417628 - protein, 15 aa, Homo sapiens
  CDR3 for beta chain variable domain of TCR clone 208814 (TRBV4-2, TRBJ1-1)
CASSQEDLPRTEAFF

SEQ ID NO: 417629 - protein, 15 aa, Homo sapiens
  CDR3 for alpha chain variable domain of TCR clone 208815 (TRAV13-1, TRAJ44)
CAASRNTGTASKLTF

SEQ ID NO: 417630 - protein, 15 aa, Homo sapiens
  CDR3 for beta chain variable domain of TCR clone 208815 (TRBV7-2, TRBJ2-3)
CASSLVVRGPDTQYF

SEQ ID NO: 417631 - protein, 15 aa, Homo sapiens
  CDR3 for alpha chain variable domain of TCR clone 208816 (TRAV13-1, TRAJ9)
CAASTLIIGGFKTIF

SEQ ID NO: 417632 - protein, 15 aa, Homo sapiens
  CDR3 for beta chain variable domain of TCR clone 208816 (TRBV6-5, TRBJ2-4)
CASSLRESPKNIQYF

SEQ ID NO: 417633 - protein, 15 aa, Homo sapiens
  CDR3 for alpha chain variable domain of TCR clone 208817 (TRAV17, TRAJ10)
YATVLLTGGGNKLTF

SEQ ID NO: 417634 - protein, 17 aa, Homo sapiens
  CDR3 for beta chain variable domain of TCR clone 208817 (TRBV11-2, TRBJ2-1)
CASSLYPPGVEYNEQFF

SEQ ID NO: 417635 - protein, 11 aa, Homo sapiens
  CDR3 for alpha chain variable domain of TCR clone 208818 (TRAV21, TRAJ34)
CAHYNTDKLIF

SEQ ID NO: 417636 - protein, 13 aa, Homo sapiens
  CDR3 for beta chain variable domain of TCR clone 208818 (TRBV7-6, TRBJ1-2)
CASSLVAVYGYTF

SEQ ID NO: 417637 - protein, 14 aa, Homo sapiens
  CDR3 for alpha chain variable domain of TCR clone 208819 (TRAV23/DV6, TRAJ17)
CAARGGAAGNKLTF

SEQ ID NO: 417638 - protein, 12 aa, Homo sapiens
  CDR3 for beta chain variable domain of TCR clone 208819 (TRBV7-9, TRBJ2-3)
CASSFITDTQYF

SEQ ID NO: 417639 - protein, 14 aa, Homo sapiens
  CDR3 for alpha chain variable domain of TCR clone 208820 (TRAV1-2, TRAJ8)
CAVREDTGFQKLVF

SEQ ID NO: 417640 - protein, 15 aa, Homo sapiens
  CDR3 for beta chain variable domain of TCR clone 208820 (TRBV29-1, TRBJ2-1)
CSGRDRKSSYNEQFF

SEQ ID NO: 417641 - protein, 13 aa, Homo sapiens
  CDR3 for alpha chain variable domain of TCR clone 208821 (TRAV8-3, TRAJ43)
RAVGPDNNNDMRF

SEQ ID NO: 417642 - protein, 14 aa, Homo sapiens
  CDR3 for beta chain variable domain of TCR clone 208821 (TRBV20-1, TRBJ1-3)
CSASPTGAGNTIYF

SEQ ID NO: 417643 - protein, 12 aa, Homo sapiens
  CDR3 for alpha chain variable domain of TCR clone 208822 (TRAV16, TRAJ10)
CSRTGGGNKLTF

SEQ ID NO: 417644 - protein, 19 aa, Homo sapiens
  CDR3 for beta chain variable domain of TCR clone 208822 (TRBV25-1, TRBJ2-2)
CAILDYRVDRGRKTGELFF

SEQ ID NO: 417645 - protein, 13 aa, Homo sapiens
  CDR3 for alpha chain variable domain of TCR clone 208823 (TRAV20, TRAJ40)
CAVPFSATYKYIF

SEQ ID NO: 417646 - protein, 13 aa, Homo sapiens
  CDR3 for beta chain variable domain of TCR clone 208823 (TRBV15, TRBJ2-5)
CATSQIGEETQYF

SEQ ID NO: 417647 - protein, 14 aa, Homo sapiens
  CDR3 for alpha chain variable domain of TCR clone 208824 (TRAV35, TRAJ53)
GRVNSGGSNYKLTF

SEQ ID NO: 417648 - protein, 14 aa, Homo sapiens
  CDR3 for beta chain variable domain of TCR clone 208824 (TRBV7-3, TRBJ2-2)
CASSLLGSTGELFF

SEQ ID NO: 417649 - protein, 16 aa, Homo sapiens
  CDR3 for alpha chain variable domain of TCR clone 208825 (TRAV12-3, TRAJ53)
CAMSPGSGGSNSKLTF

SEQ ID NO: 417650 - protein, 15 aa, Homo sapiens
  CDR3 for beta chain variable domain of TCR clone 208825 (TRBV7-2, TRBJ2-1)
CASSSGLAGGNEQFF

SEQ ID NO: 417651 - protein, 12 aa, Homo sapiens
  CDR3 for alpha chain variable domain of TCR clone 208826 (TRAV26-1, TRAJ36)
CIVRVRADNPFF

SEQ ID NO: 417652 - protein, 13 aa, Homo sapiens
  CDR3 for beta chain variable domain of TCR clone 208826 (TRBV4-1, TRBJ2-7)
CASSQGQAYEQNF

SEQ ID NO: 417653 - protein, 11 aa, Homo sapiens
  CDR3 for alpha chain variable domain of TCR clone 208827 (TRAV30, TRAJ23)
CGTEIAGKLIF

SEQ ID NO: 417654 - protein, 16 aa, Homo sapiens
  CDR3 for beta chain variable domain of TCR clone 208827 (TRBV7-2, TRBJ2-7)
CASTSQAGSGGYEQYF

SEQ ID NO: 417655 - protein, 14 aa, Homo sapiens
  CDR3 for alpha chain variable domain of TCR clone 208828 (TRAV13-2, TRAJ9)
CAENSFTGGFKTIF

SEQ ID NO: 417656 - protein, 12 aa, Homo sapiens
  CDR3 for beta chain variable domain of TCR clone 208828 (TRBV12-4, TRBJ2-1)
CASSPGRNEQFF

SEQ ID NO: 417657 - protein, 14 aa, Homo sapiens
  CDR3 for alpha chain variable domain of TCR clone 208829 (TRAV8-6, TRAJ13)
CAVSDSGGYQKVTF

SEQ ID NO: 417658 - protein, 16 aa, Homo sapiens
  CDR3 for beta chain variable domain of TCR clone 208829 (TRBV7-9, TRBJ2-3)
CASSPWREVGTDTQYF

SEQ ID NO: 417659 - protein, 12 aa, Homo sapiens
  CDR3 for alpha chain variable domain of TCR clone 208830 (TRAV21, TRAJ33)
CAKMDSNYQLIW

SEQ ID NO: 417660 - protein, 16 aa, Homo sapiens
  CDR3 for beta chain variable domain of TCR clone 208830 (TRBV7-9, TRBJ2-1)
CASSRKNFSSPREQFF

SEQ ID NO: 417661 - protein, 15 aa, Homo sapiens
  CDR3 for alpha chain variable domain of TCR clone 208831 (TRAV8-4, TRAJ10)
CAVSDGPGGGNKLTF

SEQ ID NO: 417662 - protein, 15 aa, Homo sapiens
  CDR3 for beta chain variable domain of TCR clone 208831 (TRBV20-1, TRBJ2-7)
CSARDRVSGMDEQYF

SEQ ID NO: 417663 - protein, 14 aa, Homo sapiens
  CDR3 for alpha chain variable domain of TCR clone 208832 (TRAV12-3, TRAJ10)
NHLPLTGGGNKLTF

SEQ ID NO: 417664 - protein, 13 aa, Homo sapiens
  CDR3 for beta chain variable domain of TCR clone 208832 (TRBV27, TRBJ1-1)
CASSLSIGAEAFF

SEQ ID NO: 417665 - protein, 11 aa, Homo sapiens
  CDR3 for alpha chain variable domain of TCR clone 208833 (TRAV2, TRAJ37)
CAVDNTGKLIF

SEQ ID NO: 417666 - protein, 16 aa, Homo sapiens
  CDR3 for beta chain variable domain of TCR clone 208833 (TRBV15, TRBJ2-6)
CATSVNGGFLANVLTF

SEQ ID NO: 417667 - protein, 12 aa, Homo sapiens
  CDR3 for alpha chain variable domain of TCR clone 208834 (TRAV14/DV4, TRAJ34)
CAMREGRPHRQA

SEQ ID NO: 417668 - protein, 14 aa, Homo sapiens
  CDR3 for beta chain variable domain of TCR clone 208834 (TRBV19, TRBJ2-1)
CASPTFVLSGEQFF

SEQ ID NO: 417669 - protein, 13 aa, Homo sapiens
  CDR3 for alpha chain variable domain of TCR clone 208835 (TRAV16, TRAJ28)
GALTGAGSYQLTF

SEQ ID NO: 417670 - protein, 16 aa, Homo sapiens
  CDR3 for beta chain variable domain of TCR clone 208835 (TRBV28, TRBJ1-5)
CASSLTGQGWNQPQHF

SEQ ID NO: 417671 - protein, 11 aa, Homo sapiens
  CDR3 for alpha chain variable domain of TCR clone 208836 (TRAV35, TRAJ30)
CAPGGDDKIIF

SEQ ID NO: 417672 - protein, 17 aa, Homo sapiens
  CDR3 for beta chain variable domain of TCR clone 208836 (TRBV20-1, TRBJ2-1)
CSASSSGLAGSYNEQFF

SEQ ID NO: 417673 - protein, 13 aa, Homo sapiens
  CDR3 for alpha chain variable domain of TCR clone 208837 (TRAV13-2, TRAJ26)
CRESGELCQNFVF

SEQ ID NO: 417674 - protein, 14 aa, Homo sapiens
  CDR3 for beta chain variable domain of TCR clone 208837 (TRBV19, TRBJ1-3)
CASNRGNSGNTIYF

SEQ ID NO: 417675 - protein, 18 aa, Homo sapiens
  CDR3 for alpha chain variable domain of TCR clone 208838 (TRAV21, TRAJ52)
CAVSPSPAGGTSYGKLTF

SEQ ID NO: 417676 - protein, 17 aa, Homo sapiens
  CDR3 for beta chain variable domain of TCR clone 208838 (TRBV13, TRBJ2-3)
CACSLSRVAGGRNTQYF

SEQ ID NO: 417677 - protein, 14 aa, Homo sapiens
  CDR3 for alpha chain variable domain of TCR clone 208839 (TRAV8-3, TRAJ4)
CAVGAAGGYNKLIF

SEQ ID NO: 417678 - protein, 15 aa, Homo sapiens
  CDR3 for beta chain variable domain of TCR clone 208839 (TRBV11-3, TRBJ2-5)
CASLKDGREGDTQYF

SEQ ID NO: 417679 - protein, 14 aa, Homo sapiens
  CDR3 for alpha chain variable domain of TCR clone 208840 (TRAV8-6, TRAJ8)
CAVNENAGFQKLVF

SEQ ID NO: 417680 - protein, 15 aa, Homo sapiens
  CDR3 for beta chain variable domain of TCR clone 208840 (TRBV27, TRBJ2-3)
CASSSLAGVIDTQYF

SEQ ID NO: 417681 - protein, 11 aa, Homo sapiens
  CDR3 for alpha chain variable domain of TCR clone 208841 (TRAV3, TRAJ21)
CAVATSTNFTL

SEQ ID NO: 417682 - protein, 16 aa, Homo sapiens
  CDR3 for beta chain variable domain of TCR clone 208841 (TRBV19, TRBJ2-1)
CASSKAGPSSYNEQFF

SEQ ID NO: 417683 - protein, 16 aa, Homo sapiens
  CDR3 for alpha chain variable domain of TCR clone 208842 (TRAV30, TRAJ24)
CGTEIVDADSWGHSSL

SEQ ID NO: 417684 - protein, 14 aa, Homo sapiens
  CDR3 for beta chain variable domain of TCR clone 208842 (TRBV20-1, TRBJ1-1)
CSAQTRIGGTEAFF

SEQ ID NO: 417685 - protein, 13 aa, Homo sapiens
  CDR3 for alpha chain variable domain of TCR clone 208843 (TRAV26-1, TRAJ33)
CIVRVEGNYQLIW

SEQ ID NO: 417686 - protein, 16 aa, Homo sapiens
  CDR3 for beta chain variable domain of TCR clone 208843 (TRBV15, TRBJ2-7)
CATSRDRERRRGEQYF

SEQ ID NO: 417687 - protein, 17 aa, Homo sapiens
  CDR3 for alpha chain variable domain of TCR clone 208844 (TRAV23/DV6, TRAJ12)
CAAIDLVAMDSSYKLIF

SEQ ID NO: 417688 - protein, 12 aa, Homo sapiens
  CDR3 for beta chain variable domain of TCR clone 208844 (TRBV10-3, TRBJ2-2)
CAIRENTGELFF

SEQ ID NO: 417689 - protein, 16 aa, Homo sapiens
  CDR3 for alpha chain variable domain of TCR clone 208845 (TRAV12-2, TRAJ18)
CAVTPDRGSTLGRLYF

SEQ ID NO: 417690 - protein, 13 aa, Homo sapiens
  CDR3 for beta chain variable domain of TCR clone 208845 (TRBV19, TRBJ2-3)
CATWGKITDTQYF

SEQ ID NO: 417691 - protein, 14 aa, Homo sapiens
  CDR3 for alpha chain variable domain of TCR clone 208846 (TRAV12-2, TRAJ40)
CAVKIPSGTYKYIF

SEQ ID NO: 417692 - protein, 13 aa, Homo sapiens
  CDR3 for beta chain variable domain of TCR clone 208846 (TRBV7-9, TRBJ1-2)
CANSLKQNYGYTF

SEQ ID NO: 417693 - protein, 14 aa, Homo sapiens
  CDR3 for alpha chain variable domain of TCR clone 208847 (TRAV3, TRAJ6)
CAVRVRGGSYIPTF

SEQ ID NO: 417694 - protein, 16 aa, Homo sapiens
  CDR3 for beta chain variable domain of TCR clone 208847 (TRBV7-9, TRBJ1-2)
CASSLGFSSGEDGYTF

SEQ ID NO: 417695 - protein, 10 aa, Homo sapiens
  CDR3 for alpha chain variable domain of TCR clone 208848 (TRAV12-1, TRAJ23)
CVVSGGKLIF

SEQ ID NO: 417696 - protein, 12 aa, Homo sapiens
  CDR3 for beta chain variable domain of TCR clone 208848 (TRBV7-8, TRBJ2-7)
CASSLGDREQYF

SEQ ID NO: 417697 - protein, 15 aa, Homo sapiens
  CDR3 for alpha chain variable domain of TCR clone 208849 (TRAV13-2, TRAJ40)
CAENRSRQGTYKYIF

SEQ ID NO: 417698 - protein, 13 aa, Homo sapiens
  CDR3 for beta chain variable domain of TCR clone 208849 (TRBV7-9, TRBJ1-2)
CASSLKQNYGYTF

SEQ ID NO: 417699 - protein, 11 aa, Homo sapiens
  CDR3 for alpha chain variable domain of TCR clone 208850 (TRAV2, TRAJ21)
CAVVNFNKFYF

SEQ ID NO: 417700 - protein, 14 aa, Homo sapiens
  CDR3 for beta chain variable domain of TCR clone 208850 (TRBV6-1, TRBJ1-3)
CASVQGGGGNTIYF

SEQ ID NO: 417701 - protein, 13 aa, Homo sapiens
  CDR3 for alpha chain variable domain of TCR clone 208851 (TRAV38-1, TRAJ49)
CAFMKYTGNQFYF

SEQ ID NO: 417702 - protein, 14 aa, Homo sapiens
  CDR3 for beta chain variable domain of TCR clone 208851 (TRBV5-1, TRBJ1-1)
YASSFLQGGGEAFF

SEQ ID NO: 417703 - protein, 14 aa, Homo sapiens
  CDR3 for alpha chain variable domain of TCR clone 208852 (TRAV1-2, TRAJ8)
CAVREDTGFQKLVF

SEQ ID NO: 417704 - protein, 13 aa, Homo sapiens
  CDR3 for beta chain variable domain of TCR clone 208852 (TRBV7-3, TRBJ1-1)
CASSQDWGADAFF

SEQ ID NO: 417705 - protein, 13 aa, Homo sapiens
  CDR3 for alpha chain variable domain of TCR clone 208853 (TRAV8-6, TRAJ49)
CAVITNTGNQFYF

SEQ ID NO: 417706 - protein, 13 aa, Homo sapiens
  CDR3 for beta chain variable domain of TCR clone 208853 (TRBV7-9, TRBJ1-1)
CASSLAGVSEAFF

SEQ ID NO: 417707 - protein, 15 aa, Homo sapiens
  CDR3 for alpha chain variable domain of TCR clone 208854 (TRAV26-1, TRAJ29)
CIVRVAGSGNTPLVF

SEQ ID NO: 417708 - protein, 15 aa, Homo sapiens
  CDR3 for beta chain variable domain of TCR clone 208854 (TRBV7-9, TRBJ1-5)
CASSQGRQPNQPQHF

SEQ ID NO: 417709 - protein, 15 aa, Homo sapiens
  CDR3 for alpha chain variable domain of TCR clone 208855 (TRAV3, TRAJ22)
CAVRDRGGFARPLTL

SEQ ID NO: 417710 - protein, 16 aa, Homo sapiens
  CDR3 for beta chain variable domain of TCR clone 208855 (TRBV5-4, TRBJ2-3)
CASQQPGAGGADTQYF

SEQ ID NO: 417711 - protein, 13 aa, Homo sapiens
  CDR3 for alpha chain variable domain of TCR clone 208856 (TRAV4, TRAJ16)
CLVGSSDGQKLLF

SEQ ID NO: 417712 - protein, 15 aa, Homo sapiens
  CDR3 for beta chain variable domain of TCR clone 208856 (TRBV10-2, TRBJ2-6)
CASSEQGTGANVLTF

SEQ ID NO: 417713 - protein, 13 aa, Homo sapiens
  CDR3 for alpha chain variable domain of TCR clone 208857 (TRAV26-1, TRAJ34)
CIVRGHNTDKLIF

SEQ ID NO: 417714 - protein, 13 aa, Homo sapiens
  CDR3 for beta chain variable domain of TCR clone 208857 (TRBV7-9, TRBJ1-2)
FASSLKQNYGYTF

SEQ ID NO: 417715 - protein, 14 aa, Homo sapiens
  CDR3 for alpha chain variable domain of TCR clone 208858 (TRAV12-2, TRAJ40)
CAVKIPSGTYKYIF

SEQ ID NO: 417716 - protein, 15 aa, Homo sapiens
  CDR3 for beta chain variable domain of TCR clone 208858 (TRBV6-1, TRBJ2-3)
CASSERGGITDAQYF

SEQ ID NO: 417717 - protein, 15 aa, Homo sapiens
  CDR3 for alpha chain variable domain of TCR clone 208859 (TRAV21, TRAJ24)
CAARSSTDSWGKLQF

SEQ ID NO: 417718 - protein, 16 aa, Homo sapiens
  CDR3 for beta chain variable domain of TCR clone 208859 (TRBV7-9, TRBJ2-3)
CASSPWREVGTDTQYF

SEQ ID NO: 417719 - protein, 14 aa, Homo sapiens
  CDR3 for alpha chain variable domain of TCR clone 208860 (TRAV1-2, TRAJ8)
CAVREDTGFQKLVF

SEQ ID NO: 417720 - protein, 14 aa, Homo sapiens
  CDR3 for beta chain variable domain of TCR clone 208860 (TRBV28, TRBJ2-1)
CVSSPSTGYNEQFF

SEQ ID NO: 417721 - protein, 11 aa, Homo sapiens
  CDR3 for alpha chain variable domain of TCR clone 208861 (TRAV12-2, TRAJ49)
CALQGGNQFYC

SEQ ID NO: 417722 - protein, 14 aa, Homo sapiens
  CDR3 for beta chain variable domain of TCR clone 208861 (TRBV7-2, TRBJ2-7)
CASSPKTSFYEQYF

SEQ ID NO: 417723 - protein, 13 aa, Homo sapiens
  CDR3 for alpha chain variable domain of TCR clone 208862 (TRAV21, TRAJ27)
CAARPGNAGKSTF

SEQ ID NO: 417724 - protein, 13 aa, Homo sapiens
  CDR3 for beta chain variable domain of TCR clone 208862 (TRBV11-2, TRBJ2-7)
CASSGTRPYEQYY

SEQ ID NO: 417725 - protein, 15 aa, Homo sapiens
  CDR3 for alpha chain variable domain of TCR clone 208863 (TRAV17, TRAJ52)
CVTEAGGTSYGKLTF

SEQ ID NO: 417726 - protein, 14 aa, Homo sapiens
  CDR3 for beta chain variable domain of TCR clone 208863 (TRBV28, TRBJ1-5)
CASSLGVLVKAQHF

SEQ ID NO: 417727 - protein, 15 aa, Homo sapiens
  CDR3 for alpha chain variable domain of TCR clone 208864 (TRAV20, TRAJ58)
FAVQDLETSGSRLTF

SEQ ID NO: 417728 - protein, 12 aa, Homo sapiens
  CDR3 for beta chain variable domain of TCR clone 208864 (TRBV9, TRBJ2-2)
CASSARTGELFF

SEQ ID NO: 417729 - protein, 12 aa, Homo sapiens
  CDR3 for alpha chain variable domain of TCR clone 208865 (TRAV12-3, TRAJ40)
CAMSSGTYKYIF

SEQ ID NO: 417730 - protein, 16 aa, Homo sapiens
  CDR3 for beta chain variable domain of TCR clone 208865 (TRBV7-3, TRBJ2-1)
CASSLEGYRSYNEQFF

SEQ ID NO: 417731 - protein, 15 aa, Homo sapiens
  CDR3 for alpha chain variable domain of TCR clone 208866 (TRAV8-2, TRAJ16)
CVVSDGFSDGQKLLF

SEQ ID NO: 417732 - protein, 13 aa, Homo sapiens
  CDR3 for beta chain variable domain of TCR clone 208866 (TRBV6-4, TRBJ1-5)
CASSADLNQPQHF

SEQ ID NO: 417733 - protein, 15 aa, Homo sapiens
  CDR3 for alpha chain variable domain of TCR clone 208867 (TRAV21, TRAJ53)
CATLNSGGSNYKLTF

SEQ ID NO: 417734 - protein, 20 aa, Homo sapiens
  CDR3 for beta chain variable domain of TCR clone 208867 (TRBV7-8, TRBJ2-2)
CASSHLFLGPTIHITGELFF

SEQ ID NO: 417735 - protein, 14 aa, Homo sapiens
  CDR3 for alpha chain variable domain of TCR clone 208868 (TRAV12-3, TRAJ42)
CAMNYGGSQGNLIF

SEQ ID NO: 417736 - protein, 14 aa, Homo sapiens
  CDR3 for beta chain variable domain of TCR clone 208868 (TRBV7-2, TRBJ2-5)
CASSLTQGQETQYF

SEQ ID NO: 417737 - protein, 15 aa, Homo sapiens
  CDR3 for alpha chain variable domain of TCR clone 208869 (TRAV3, TRAJ5)
CAVRDLDTGRRALPF

SEQ ID NO: 417738 - protein, 13 aa, Homo sapiens
  CDR3 for beta chain variable domain of TCR clone 208869 (TRBV12-4, TRBJ2-7)
CASSPTEPYEQYF

SEQ ID NO: 417739 - protein, 13 aa, Homo sapiens
  CDR3 for alpha chain variable domain of TCR clone 208870 (TRAV12-3, TRAJ33)
CAMSVNSNYQLIW

SEQ ID NO: 417740 - protein, 13 aa, Homo sapiens
  CDR3 for beta chain variable domain of TCR clone 208870 (TRBV12-4, TRBJ1-5)
CASSPDRAQPQHF

SEQ ID NO: 417741 - protein, 16 aa, Homo sapiens
  CDR3 for alpha chain variable domain of TCR clone 208871 (TRAV30, TRAJ24)
CGTEIVDADSWGKFQF

SEQ ID NO: 417742 - protein, 15 aa, Homo sapiens
  CDR3 for beta chain variable domain of TCR clone 208871 (TRBV20-1, TRBJ2-6)
CSARDGGPGANVLTF

SEQ ID NO: 417743 - protein, 14 aa, Homo sapiens
  CDR3 for alpha chain variable domain of TCR clone 208872 (TRAV12-2, TRAJ13)
CAVKKTGGYQKDTF

SEQ ID NO: 417744 - protein, 15 aa, Homo sapiens
  CDR3 for beta chain variable domain of TCR clone 208872 (TRBV27, TRBJ2-1)
CASSDGGGSSNEQFF

SEQ ID NO: 417745 - protein, 11 aa, Homo sapiens
  CDR3 for alpha chain variable domain of TCR clone 208873 (TRAV29/DV5, TRAJ33)
CAGVSNYQLIW

SEQ ID NO: 417746 - protein, 17 aa, Homo sapiens
  CDR3 for beta chain variable domain of TCR clone 208873 (TRBV7-8, TRBJ2-6)
CASSAGTGGAGANVLTF

SEQ ID NO: 417747 - protein, 13 aa, Homo sapiens
  CDR3 for alpha chain variable domain of TCR clone 208874 (TRAV38-2/DV8, TRAJ45)
CAYVGGGADGLTF

SEQ ID NO: 417748 - protein, 15 aa, Homo sapiens
  CDR3 for beta chain variable domain of TCR clone 208874 (TRBV20-1, TRBJ2-7)
CSARDRVSGMDEQYF

SEQ ID NO: 417749 - protein, 14 aa, Homo sapiens
  CDR3 for alpha chain variable domain of TCR clone 208875 (TRAV1-2, TRAJ16)
CAVNRFSDGQKLLF

SEQ ID NO: 417750 - protein, 17 aa, Homo sapiens
  CDR3 for beta chain variable domain of TCR clone 208875 (TRBV7-2, TRBJ2-6)
CASSPTGTVFGANVLTF

SEQ ID NO: 417751 - protein, 14 aa, Homo sapiens
  CDR3 for alpha chain variable domain of TCR clone 208876 (TRAV12-2, TRAJ6)
CASKWGGGSYIPTF

SEQ ID NO: 417752 - protein, 13 aa, Homo sapiens
  CDR3 for beta chain variable domain of TCR clone 208876 (TRBV7-3, TRBJ1-1)
CASSQDWGAEAFF

SEQ ID NO: 417753 - protein, 11 aa, Homo sapiens
  CDR3 for alpha chain variable domain of TCR clone 208877 (TRAV12-1, TRAJ30)
CVVNGQDNIIF

SEQ ID NO: 417754 - protein, 15 aa, Homo sapiens
  CDR3 for beta chain variable domain of TCR clone 208877 (TRBV28, TRBJ2-5)
CASSSGRTIQETQYF

SEQ ID NO: 417755 - protein, 15 aa, Homo sapiens
  CDR3 for alpha chain variable domain of TCR clone 208878 (TRAV26-1, TRAJ22)
CIVRVSFWFCKATDL

SEQ ID NO: 417756 - protein, 13 aa, Homo sapiens
  CDR3 for beta chain variable domain of TCR clone 208878 (TRBV7-6, TRBJ2-3)
CASSLRSDNTQYF

SEQ ID NO: 417757 - protein, 15 aa, Homo sapiens
  CDR3 for alpha chain variable domain of TCR clone 208879 (TRAV38-2/DV8, TRAJ57)
CAYKSGLGGSEKLVF

SEQ ID NO: 417758 - protein, 15 aa, Homo sapiens
  CDR3 for beta chain variable domain of TCR clone 208879 (TRBV18, TRBJ1-5)
CASSPSDRSNQPQHF

SEQ ID NO: 417759 - protein, 16 aa, Homo sapiens
  CDR3 for alpha chain variable domain of TCR clone 208880 (TRAV27, TRAJ13)
CAGAKSDSGGYQKVTF

SEQ ID NO: 417760 - protein, 15 aa, Homo sapiens
  CDR3 for beta chain variable domain of TCR clone 208880 (TRBV28, TRBJ1-3)
CASSMGWASGNTIYF

SEQ ID NO: 417761 - protein, 14 aa, Homo sapiens
  CDR3 for alpha chain variable domain of TCR clone 208881 (TRAV16, TRAJ40)
CALHESYYLRNLQI

SEQ ID NO: 417762 - protein, 16 aa, Homo sapiens
  CDR3 for beta chain variable domain of TCR clone 208881 (TRBV7-3, TRBJ2-2)
CASSLKRGTLSGELFF

SEQ ID NO: 417763 - protein, 14 aa, Homo sapiens
  CDR3 for alpha chain variable domain of TCR clone 208882 (TRAV12-3, TRAJ10)
SHLPLTGGGNKLTF

SEQ ID NO: 417764 - protein, 13 aa, Homo sapiens
  CDR3 for beta chain variable domain of TCR clone 208882 (TRBV12-5, TRBJ2-3)
CASGDRRSDTQYF

SEQ ID NO: 417765 - protein, 14 aa, Homo sapiens
  CDR3 for alpha chain variable domain of TCR clone 208883 (TRAV12-2, TRAJ17)
CAVLFKAAGNKLTL

SEQ ID NO: 417766 - protein, 14 aa, Homo sapiens
  CDR3 for beta chain variable domain of TCR clone 208883 (TRBV7-3, TRBJ1-1)
CASSLKGGNTEAFC

SEQ ID NO: 417767 - protein, 20 aa, Homo sapiens
  CDR3 for alpha chain variable domain of TCR clone 208884 (TRAV13-1, TRAJ10)
CAAKGHGRRKQTHLWDRPSA

SEQ ID NO: 417768 - protein, 14 aa, Homo sapiens
  CDR3 for beta chain variable domain of TCR clone 208884 (TRBV20-1, TRBJ1-1)
SAVLGVGGNTEAFF

SEQ ID NO: 417769 - protein, 16 aa, Homo sapiens
  CDR3 for alpha chain variable domain of TCR clone 208885 (TRAV30, TRAJ24)
CATEIVDADSWGQFQF

SEQ ID NO: 417770 - protein, 14 aa, Homo sapiens
  CDR3 for beta chain variable domain of TCR clone 208885 (TRBV12-5, TRBJ2-5)
CASGSRTHQETQYF

SEQ ID NO: 417771 - protein, 17 aa, Homo sapiens
  CDR3 for alpha chain variable domain of TCR clone 208886 (TRAV13-1, TRAJ52)
CAAGRNAGGTSYGKLTF

SEQ ID NO: 417772 - protein, 14 aa, Homo sapiens
  CDR3 for beta chain variable domain of TCR clone 208886 (TRBV5-5, TRBJ1-5)
CASSGQGVDQPQHF

SEQ ID NO: 417773 - protein, 13 aa, Homo sapiens
  CDR3 for alpha chain variable domain of TCR clone 208887 (TRAV2, TRAJ40)
CAVVTSGTYKYIF

SEQ ID NO: 417774 - protein, 14 aa, Homo sapiens
  CDR3 for beta chain variable domain of TCR clone 208887 (TRBV28, TRBJ2-1)
CQQWVSGGGNEQFF

SEQ ID NO: 417775 - protein, 14 aa, Homo sapiens
  CDR3 for alpha chain variable domain of TCR clone 208888 (TRAV13-1, TRAJ39)
CAASEGNAGNMLTF

SEQ ID NO: 417776 - protein, 11 aa, Homo sapiens
  CDR3 for beta chain variable domain of TCR clone 208888 (TRBV12-4, TRBJ2-3)
CAITATDTQYF

SEQ ID NO: 417777 - protein, 15 aa, Homo sapiens
  CDR3 for alpha chain variable domain of TCR clone 208889 (TRAV3, TRAJ17)
CAVRDTGAAGNKLTF

SEQ ID NO: 417778 - protein, 17 aa, Homo sapiens
  CDR3 for beta chain variable domain of TCR clone 208889 (TRBV13, TRBJ2-3)
CASSLSRVAGGRNTQYF

SEQ ID NO: 417779 - protein, 12 aa, Homo sapiens
  CDR3 for alpha chain variable domain of TCR clone 208890 (TRAV21, TRAJ33)
CAKMDSNYQLIW

SEQ ID NO: 417780 - protein, 16 aa, Homo sapiens
  CDR3 for beta chain variable domain of TCR clone 208890 (TRBV18, TRBJ1-5)
CASSPSTGNSNQPQHF

SEQ ID NO: 417781 - protein, 11 aa, Homo sapiens
  CDR3 for alpha chain variable domain of TCR clone 208891 (TRAV23/DV6, TRAJ20)
CAARDHYKLSF

SEQ ID NO: 417782 - protein, 12 aa, Homo sapiens
  CDR3 for beta chain variable domain of TCR clone 208891 (TRBV3-1, TRBJ2-3)
CASSSGDRAEYF

SEQ ID NO: 417783 - protein, 10 aa, Homo sapiens
  CDR3 for alpha chain variable domain of TCR clone 208892 (TRAV2, TRAJ15)
RGQAGTALIF

SEQ ID NO: 417784 - protein, 12 aa, Homo sapiens
  CDR3 for beta chain variable domain of TCR clone 208892 (TRBV11-2, TRBJ2-2)
CASGLGGGELFF

SEQ ID NO: 417785 - protein, 11 aa, Homo sapiens
  CDR3 for alpha chain variable domain of TCR clone 208893 (TRAV13-1, TRAJ8)
CAARGFQKLVL

SEQ ID NO: 417786 - protein, 16 aa, Homo sapiens
  CDR3 for beta chain variable domain of TCR clone 208893 (TRBV19, TRBJ1-5)
CASSARGTRSNQPQHF

SEQ ID NO: 417787 - protein, 14 aa, Homo sapiens
  CDR3 for alpha chain variable domain of TCR clone 208894 (TRAV3, TRAJ6)
CAVRDWGGSYIPTF

SEQ ID NO: 417788 - protein, 17 aa, Homo sapiens
  CDR3 for beta chain variable domain of TCR clone 208894 (TRBV6-5, TRBJ2-1)
CSSRLSGRFESYNEQFF

SEQ ID NO: 417789 - protein, 13 aa, Homo sapiens
  CDR3 for alpha chain variable domain of TCR clone 208895 (TRAV26-1, TRAJ38)
CIVRGGNNRKLIW

SEQ ID NO: 417790 - protein, 20 aa, Homo sapiens
  CDR3 for beta chain variable domain of TCR clone 208895 (TRBV7-8, TRBJ2-2)
CASSHLFPGPTIHITGELFF

SEQ ID NO: 417791 - protein, 11 aa, Homo sapiens
  CDR3 for alpha chain variable domain of TCR clone 208896 (TRAV21, TRAJ41)
CAVRSGYALNF

SEQ ID NO: 417792 - protein, 13 aa, Homo sapiens
  CDR3 for beta chain variable domain of TCR clone 208896 (TRBV7-9, TRBJ1-2)
CASSLKQNYCHTV

SEQ ID NO: 417793 - protein, 14 aa, Homo sapiens
  CDR3 for alpha chain variable domain of TCR clone 208897 (TRAV13-1, TRAJ23)
CAASRLGQGGKLIF

SEQ ID NO: 417794 - protein, 15 aa, Homo sapiens
  CDR3 for beta chain variable domain of TCR clone 208897 (TRBV7-2, TRBJ2-1)
CASSLVAGRYNEQFF

SEQ ID NO: 417795 - protein, 15 aa, Homo sapiens
  CDR3 for alpha chain variable domain of TCR clone 208898 (TRAV13-1, TRAJ52)
CAATSPRTSYGKVTF

SEQ ID NO: 417796 - protein, 12 aa, Homo sapiens
  CDR3 for beta chain variable domain of TCR clone 208898 (TRBV7-8, TRBJ2-7)
CASSLGDREQYF

SEQ ID NO: 417797 - protein, 13 aa, Homo sapiens
  CDR3 for alpha chain variable domain of TCR clone 208899 (TRAV35, TRAJ43)
CVGYPYNNNDMRF

SEQ ID NO: 417798 - protein, 15 aa, Homo sapiens
  CDR3 for beta chain variable domain of TCR clone 208899 (TRBV25-1, TRBJ1-4)
CASSKRIATNEKLFF

SEQ ID NO: 417799 - protein, 14 aa, Homo sapiens
  CDR3 for alpha chain variable domain of TCR clone 208900 (TRAV1-2, TRAJ16)
CAVNRFSDGQKLLF

SEQ ID NO: 417800 - protein, 13 aa, Homo sapiens
  CDR3 for beta chain variable domain of TCR clone 208900 (TRBV7-6, TRBJ2-1)
CASSPLTYNEQFF

SEQ ID NO: 417801 - protein, 22 aa, Homo sapiens
  CDR3 for alpha chain variable domain of TCR clone 208901 (TRAV25, TRAJ13)
TATQTTDVGTFLDSGGYQKVTF

SEQ ID NO: 417802 - protein, 15 aa, Homo sapiens
  CDR3 for beta chain variable domain of TCR clone 208901 (TRBV5-7, TRBJ1-5)
CASSYGKLWDQPQHF

SEQ ID NO: 417803 - protein, 14 aa, Homo sapiens
  CDR3 for alpha chain variable domain of TCR clone 208902 (TRAV17, TRAJ16)
CATADFSDGQKLLF

SEQ ID NO: 417804 - protein, 16 aa, Homo sapiens
  CDR3 for beta chain variable domain of TCR clone 208902 (TRBV15, TRBJ2-1)
CATSRERLAGAYEQFF

SEQ ID NO: 417805 - protein, 16 aa, Homo sapiens
  CDR3 for alpha chain variable domain of TCR clone 208903 (TRAV12-2, TRAJ6)
CAAPLAGSGGTYIPTF

SEQ ID NO: 417806 - protein, 10 aa, Homo sapiens
  CDR3 for beta chain variable domain of TCR clone 208903 (TRBV28, TRBJ1-2)
CASSSDRAVF

SEQ ID NO: 417807 - protein, 11 aa, Homo sapiens
  CDR3 for alpha chain variable domain of TCR clone 208904 (TRAV20, TRAJ31)
CAVQMRARLMF

SEQ ID NO: 417808 - protein, 15 aa, Homo sapiens
  CDR3 for beta chain variable domain of TCR clone 208904 (TRBV2, TRBJ2-7)
CASTLLGSGATEQYF

SEQ ID NO: 417809 - protein, 14 aa, Homo sapiens
  CDR3 for alpha chain variable domain of TCR clone 208905 (TRAV13-1, TRAJ24)
CAASRTDSWGKLQF

SEQ ID NO: 417810 - protein, 15 aa, Homo sapiens
  CDR3 for beta chain variable domain of TCR clone 208905 (TRBV7-9, TRBJ1-5)
CASSQGHQPNQHQHF

SEQ ID NO: 417811 - protein, 13 aa, Homo sapiens
  CDR3 for alpha chain variable domain of TCR clone 208906 (TRAV8-3, TRAJ48)
CAVVPFGNEKLTF

SEQ ID NO: 417812 - protein, 19 aa, Homo sapiens
  CDR3 for beta chain variable domain of TCR clone 208906 (TRBV25-1, TRBJ2-2)
CAILVYRVDRVRKTGELFF

SEQ ID NO: 417813 - protein, 14 aa, Homo sapiens
  CDR3 for alpha chain variable domain of TCR clone 208907 (TRAV12-1, TRAJ16)
CVALPLSDGQKLLF

SEQ ID NO: 417814 - protein, 13 aa, Homo sapiens
  CDR3 for beta chain variable domain of TCR clone 208907 (TRBV27, TRBJ2-3)
CACRDTSTDTQYF

SEQ ID NO: 417815 - protein, 16 aa, Homo sapiens
  CDR3 for alpha chain variable domain of TCR clone 208908 (TRAV17, TRAJ9)
CATGEWGGAGGFKTIF

SEQ ID NO: 417816 - protein, 12 aa, Homo sapiens
  CDR3 for beta chain variable domain of TCR clone 208908 (TRBV11-2, TRBJ2-1)
CASSPGNNEQFF

SEQ ID NO: 417817 - protein, 11 aa, Homo sapiens
  CDR3 for alpha chain variable domain of TCR clone 208909 (TRAV12-3, TRAJ27)
CAMANAGKSTF

SEQ ID NO: 417818 - protein, 15 aa, Homo sapiens
  CDR3 for beta chain variable domain of TCR clone 208909 (TRBV25-1, TRBJ2-5)
CASSRMEGRGETRYF

SEQ ID NO: 417819 - protein, 11 aa, Homo sapiens
  CDR3 for alpha chain variable domain of TCR clone 208910 (TRAV25, TRAJ49)
CAGNTGNQFYF

SEQ ID NO: 417820 - protein, 15 aa, Homo sapiens
  CDR3 for beta chain variable domain of TCR clone 208910 (TRBV20-1, TRBJ2-7)
CSARDRVSGMDEQYF

SEQ ID NO: 417821 - protein, 14 aa, Homo sapiens
  CDR3 for alpha chain variable domain of TCR clone 208911 (TRAV3, TRAJ40)
CAVRDRRGTYKYIF

SEQ ID NO: 417822 - protein, 20 aa, Homo sapiens
  CDR3 for beta chain variable domain of TCR clone 208911 (TRBV28, TRBJ2-1)
CASTPIGRSPGLAGGNEQFF

SEQ ID NO: 417823 - protein, 16 aa, Homo sapiens
  CDR3 for alpha chain variable domain of TCR clone 208912 (TRAV12-1, TRAJ8)
CVVNGRGNTGFQKLVF

SEQ ID NO: 417824 - protein, 12 aa, Homo sapiens
  CDR3 for beta chain variable domain of TCR clone 208912 (TRBV11-2, TRBJ2-2)
CASSLGGGELFF

SEQ ID NO: 417825 - protein, 14 aa, Homo sapiens
  CDR3 for alpha chain variable domain of TCR clone 208913 (TRAV8-1, TRAJ5)
CAGRTDTGRRALTF

SEQ ID NO: 417826 - protein, 15 aa, Homo sapiens
  CDR3 for beta chain variable domain of TCR clone 208913 (TRBV11-3, TRBJ2-3)
CASLKDGREGDTQYF

SEQ ID NO: 417827 - protein, 14 aa, Homo sapiens
  CDR3 for alpha chain variable domain of TCR clone 208914 (TRAV1-2, TRAJ16)
CAVNRFSDGQKLLF

SEQ ID NO: 417828 - protein, 18 aa, Homo sapiens
  CDR3 for beta chain variable domain of TCR clone 208914 (TRBV11-1, TRBJ2-6)
CASSFPGAGISGANGLTF

SEQ ID NO: 417829 - protein, 13 aa, Homo sapiens
  CDR3 for alpha chain variable domain of TCR clone 208915 (TRAV13-1, TRAJ5)
CAASETGRRALTF

SEQ ID NO: 417830 - protein, 12 aa, Homo sapiens
  CDR3 for beta chain variable domain of TCR clone 208915 (TRBV28, TRBJ2-3)
CASSLCRDTQYF

SEQ ID NO: 417831 - protein, 17 aa, Homo sapiens
  CDR3 for alpha chain variable domain of TCR clone 208916 (TRAV3, TRAJ42)
CAVRDRDYGGSQGNLIF

SEQ ID NO: 417832 - protein, 11 aa, Homo sapiens
  CDR3 for beta chain variable domain of TCR clone 208916 (TRBV7-6, TRBJ2-1)
CASSVANEQFF

SEQ ID NO: 417833 - protein, 15 aa, Homo sapiens
  CDR3 for alpha chain variable domain of TCR clone 208917 (TRAV21, TRAJ32)
CAANSYGGATNKLIF

SEQ ID NO: 417834 - protein, 14 aa, Homo sapiens
  CDR3 for beta chain variable domain of TCR clone 208917 (TRBV7-2, TRBJ2-7)
CASSPKTSFYEQYF

SEQ ID NO: 417835 - protein, 12 aa, Homo sapiens
  CDR3 for alpha chain variable domain of TCR clone 208918 (TRAV8-3, TRAJ26)
CAGDNYGQNFVF

SEQ ID NO: 417836 - protein, 13 aa, Homo sapiens
  CDR3 for beta chain variable domain of TCR clone 208918 (TRBV7-2, TRBJ2-7)
CASSPRGLREQYF

SEQ ID NO: 417837 - protein, 13 aa, Homo sapiens
  CDR3 for alpha chain variable domain of TCR clone 208919 (TRAV27, TRAJ8)
CAGGPTGFQKLVF

SEQ ID NO: 417838 - protein, 16 aa, Homo sapiens
  CDR3 for beta chain variable domain of TCR clone 208919 (TRBV7-3, TRBJ2-1)
CASSLEGYRSYNEQFF

SEQ ID NO: 417839 - protein, 13 aa, Homo sapiens
  CDR3 for alpha chain variable domain of TCR clone 208920 (TRAV2, TRAJ15)
CAVASQAGTALIF

SEQ ID NO: 417840 - protein, 17 aa, Homo sapiens
  CDR3 for beta chain variable domain of TCR clone 208920 (TRBV20-1, TRBJ2-2)
CSASGSGQGGLAGELFF

SEQ ID NO: 417841 - protein, 14 aa, Homo sapiens
  CDR3 for alpha chain variable domain of TCR clone 208921 (TRAV1-2, TRAJ16)
CAVNRFSDGQKLLF

SEQ ID NO: 417842 - protein, 15 aa, Homo sapiens
  CDR3 for beta chain variable domain of TCR clone 208921 (TRBV7-8, TRBJ2-7)
CASSLESAGSYEQYF

SEQ ID NO: 417843 - protein, 14 aa, Homo sapiens
  CDR3 for alpha chain variable domain of TCR clone 208922 (TRAV12-1, TRAJ26)
CVVKGSNYGQNFVF

SEQ ID NO: 417844 - protein, 17 aa, Homo sapiens
  CDR3 for beta chain variable domain of TCR clone 208922 (TRBV11-2, TRBJ2-6)
CASSQRDIISGANVLTF

SEQ ID NO: 417845 - protein, 18 aa, Homo sapiens
  CDR3 for alpha chain variable domain of TCR clone 208923 (TRAV21, TRAJ53)
CAVKGGGNSGGSNYKLAF

SEQ ID NO: 417846 - protein, 14 aa, Homo sapiens
  CDR3 for beta chain variable domain of TCR clone 208923 (TRBV11-3, TRBJ1-5)
LTGDRLYYNQPQHF

SEQ ID NO: 417847 - protein, 13 aa, Homo sapiens
  CDR3 for alpha chain variable domain of TCR clone 208924 (TRAV17, TRAJ9)
CATAITGGFKTIF

SEQ ID NO: 417848 - protein, 12 aa, Homo sapiens
  CDR3 for beta chain variable domain of TCR clone 208924 (TRBV3-1, TRBJ2-1)
CASSQGSSGQFF

SEQ ID NO: 417849 - protein, 16 aa, Homo sapiens
  CDR3 for alpha chain variable domain of TCR clone 208925 (TRAV3, TRAJ37)
CVVRGKGSGNTGKLIF

SEQ ID NO: 417850 - protein, 17 aa, Homo sapiens
  CDR3 for beta chain variable domain of TCR clone 208925 (TRBV13, TRBJ2-3)
CASSLSRVAGGRNTQYF

SEQ ID NO: 417851 - protein, 11 aa, Homo sapiens
  CDR3 for alpha chain variable domain of TCR clone 208926 (TRAV8-2, TRAJ26)
CVVTLLLGSEF

SEQ ID NO: 417852 - protein, 13 aa, Homo sapiens
  CDR3 for beta chain variable domain of TCR clone 208926 (TRBV10-3, TRBJ2-7)
CASKLAVNYEQYF

SEQ ID NO: 417853 - protein, 15 aa, Homo sapiens
  CDR3 for alpha chain variable domain of TCR clone 208927 (TRAV3, TRAJ3)
CAVRDRRSSASKIIF

SEQ ID NO: 417854 - protein, 13 aa, Homo sapiens
  CDR3 for beta chain variable domain of TCR clone 208927 (TRBV9, TRBJ2-5)
RASSPAGLGTQYF

SEQ ID NO: 417855 - protein, 13 aa, Homo sapiens
  CDR3 for alpha chain variable domain of TCR clone 208928 (TRAV8-6, TRAJ49)
CAVITTTGNQFYF

SEQ ID NO: 417856 - protein, 12 aa, Homo sapiens
  CDR3 for beta chain variable domain of TCR clone 208928 (TRBV12-4, TRBJ2-7)
CASSLGGYEQYF

SEQ ID NO: 417857 - protein, 14 aa, Homo sapiens
  CDR3 for alpha chain variable domain of TCR clone 208929 (TRAV12-3, TRAJ22)
YAMSLFGSARQLAF

SEQ ID NO: 417858 - protein, 11 aa, Homo sapiens
  CDR3 for beta chain variable domain of TCR clone 208929 (TRBV12-4, TRBJ2-2)
CASSSAGELFF

SEQ ID NO: 417859 - protein, 18 aa, Homo sapiens
  CDR3 for alpha chain variable domain of TCR clone 208930 (TRAV21, TRAJ52)
CAVRPSPAGGTSYGKLIF

SEQ ID NO: 417860 - protein, 17 aa, Homo sapiens
  CDR3 for beta chain variable domain of TCR clone 208930 (TRBV13, TRBJ2-3)
CASSLARVAGGRNTQYF

SEQ ID NO: 417861 - protein, 14 aa, Homo sapiens
  CDR3 for alpha chain variable domain of TCR clone 208931 (TRAV8-4, TRAJ8)
CAVSLNTGYQKLVF

SEQ ID NO: 417862 - protein, 13 aa, Homo sapiens
  CDR3 for beta chain variable domain of TCR clone 208931 (TRBV7-9, TRBJ2-3)
CASSPGSTDTQYF

SEQ ID NO: 417863 - protein, 10 aa, Homo sapiens
  CDR3 for alpha chain variable domain of TCR clone 208932 (TRAV13-1, TRAJ43)
CAASIYDMRF

SEQ ID NO: 417864 - protein, 13 aa, Homo sapiens
  CDR3 for beta chain variable domain of TCR clone 208932 (TRBV7-6, TRBJ1-2)
CASSLVADYGYTF

SEQ ID NO: 417865 - protein, 17 aa, Homo sapiens
  CDR3 for alpha chain variable domain of TCR clone 208933 (TRAV12-3, TRAJ18)
CAMIRADRGSTLGRLYF

SEQ ID NO: 417866 - protein, 14 aa, Homo sapiens
  CDR3 for beta chain variable domain of TCR clone 208933 (TRBV5-7, TRBJ1-6)
YASTPWPADSPLHF

SEQ ID NO: 417867 - protein, 13 aa, Homo sapiens
  CDR3 for alpha chain variable domain of TCR clone 208934 (TRAV35, TRAJ57)
CAGSQGGSEKLVF

SEQ ID NO: 417868 - protein, 14 aa, Homo sapiens
  CDR3 for beta chain variable domain of TCR clone 208934 (TRBV25-1, TRBJ1-1)
CASTHQGGNTEAFF

SEQ ID NO: 417869 - protein, 15 aa, Homo sapiens
  CDR3 for alpha chain variable domain of TCR clone 208935 (TRAV4, TRAJ39)
CLVGPNNNACNMLTF

SEQ ID NO: 417870 - protein, 16 aa, Homo sapiens
  CDR3 for beta chain variable domain of TCR clone 208935 (TRBV13, TRBJ2-2)
CASSPRTGEHTGELFF

SEQ ID NO: 417871 - protein, 15 aa, Homo sapiens
  CDR3 for alpha chain variable domain of TCR clone 208936 (TRAV8-6, TRAJ12)
CSPLGRMDSSYKLIF

SEQ ID NO: 417872 - protein, 15 aa, Homo sapiens
  CDR3 for beta chain variable domain of TCR clone 208936 (TRBV7-9, TRBJ1-6)
CASSSPGRGNSPLHF

SEQ ID NO: 417873 - protein, 14 aa, Homo sapiens
  CDR3 for alpha chain variable domain of TCR clone 208937 (TRAV25, TRAJ35)
CARRMEGFGNVLHC

SEQ ID NO: 417874 - protein, 20 aa, Homo sapiens
  CDR3 for beta chain variable domain of TCR clone 208937 (TRBV7-2, TRBJ1-4)
RRTRPCISVPSLAGLEKLFF

SEQ ID NO: 417875 - protein, 12 aa, Homo sapiens
  CDR3 for alpha chain variable domain of TCR clone 208938 (TRAV3, TRAJ7)
CAVLLWEQQTRF

SEQ ID NO: 417876 - protein, 13 aa, Homo sapiens
  CDR3 for beta chain variable domain of TCR clone 208938 (TRBV7-3, TRBJ2-5)
CASSFRGGETQYF

SEQ ID NO: 417877 - protein, 12 aa, Homo sapiens
  CDR3 for alpha chain variable domain of TCR clone 208939 (TRAV13-2, TRAJ23)
CAERHRGGKLIF

SEQ ID NO: 417878 - protein, 16 aa, Homo sapiens
  CDR3 for beta chain variable domain of TCR clone 208939 (TRBV13, TRBJ2-2)
CASSPRTGEHTRELFF

SEQ ID NO: 417879 - protein, 15 aa, Homo sapiens
  CDR3 for alpha chain variable domain of TCR clone 208940 (TRAV14/DV4, TRAJ49)
CAMREGRDPGNQFYF

SEQ ID NO: 417880 - protein, 17 aa, Homo sapiens
  CDR3 for beta chain variable domain of TCR clone 208940 (TRBV12-4, TRBJ1-5)
CASSLRGDRGPNQPQHF

SEQ ID NO: 417881 - protein, 13 aa, Homo sapiens
  CDR3 for alpha chain variable domain of TCR clone 208941 (TRAV8-3, TRAJ36)
CAVGATGANNLFF

SEQ ID NO: 417882 - protein, 15 aa, Homo sapiens
  CDR3 for beta chain variable domain of TCR clone 208941 (TRBV19, TRBJ1-2)
CASSVGQVLNHGYTF

SEQ ID NO: 417883 - protein, 13 aa, Homo sapiens
  CDR3 for alpha chain variable domain of TCR clone 208942 (TRAV8-3, TRAJ6)
CAVEKGGSYIPTF

SEQ ID NO: 417884 - protein, 15 aa, Homo sapiens
  CDR3 for beta chain variable domain of TCR clone 208942 (TRBV28, TRBJ2-5)
CASSADRGRGETKYF

SEQ ID NO: 417885 - protein, 13 aa, Homo sapiens
  CDR3 for alpha chain variable domain of TCR clone 208943 (TRAV21, TRAJ20)
CAVGLRVGYKLSF

SEQ ID NO: 417886 - protein, 16 aa, Homo sapiens
  CDR3 for beta chain variable domain of TCR clone 208943 (TRBV12-5, TRBJ2-5)
CASGPRTSGNQETQYF

SEQ ID NO: 417887 - protein, 12 aa, Homo sapiens
  CDR3 for alpha chain variable domain of TCR clone 208944 (TRAV17, TRAJ20)
CATDGDDYKLSF

SEQ ID NO: 417888 - protein, 14 aa, Homo sapiens
  CDR3 for beta chain variable domain of TCR clone 208944 (TRBV7-2, TRBJ2-7)
CASSPKTSFYEQYF

SEQ ID NO: 417889 - protein, 15 aa, Homo sapiens
  CDR3 for alpha chain variable domain of TCR clone 208945 (TRAV29/DV5, TRAJ30)
FAASALLGRDDKIIF

SEQ ID NO: 417890 - protein, 14 aa, Homo sapiens
  CDR3 for beta chain variable domain of TCR clone 208945 (TRBV5-1, TRBJ2-5)
CASSTDRGGETQYF

SEQ ID NO: 417891 - protein, 12 aa, Homo sapiens
  CDR3 for alpha chain variable domain of TCR clone 208946 (TRAV12-1, TRAJ40)
CVFYSGTYKYIF

SEQ ID NO: 417892 - protein, 14 aa, Homo sapiens
  CDR3 for beta chain variable domain of TCR clone 208946 (TRBV19, TRBJ2-1)
CASGKSTQYNEQFF

SEQ ID NO: 417893 - protein, 16 aa, Homo sapiens
  CDR3 for alpha chain variable domain of TCR clone 208947 (TRAV3, TRAJ37)
CAVRGKGSGNTGKLIF

SEQ ID NO: 417894 - protein, 16 aa, Homo sapiens
  CDR3 for beta chain variable domain of TCR clone 208947 (TRBV19, TRBJ1-1)
CASRPRSEALNTEAFF

SEQ ID NO: 417895 - protein, 15 aa, Homo sapiens
  CDR3 for alpha chain variable domain of TCR clone 208948 (TRAV29/DV5, TRAJ24)
CAASGATDSWGKFQF

SEQ ID NO: 417896 - protein, 12 aa, Homo sapiens
  CDR3 for beta chain variable domain of TCR clone 208948 (TRBV11-2, TRBJ2-2)
CANSLPTGELFF

SEQ ID NO: 417897 - protein, 11 aa, Homo sapiens
  CDR3 for alpha chain variable domain of TCR clone 208949 (TRAV17, TRAJ49)
CATDAGNQFYF

SEQ ID NO: 417898 - protein, 13 aa, Homo sapiens
  CDR3 for beta chain variable domain of TCR clone 208949 (TRBV7-3, TRBJ2-1)
CASSLDSYNEQFF

SEQ ID NO: 417899 - protein, 12 aa, Homo sapiens
  CDR3 for alpha chain variable domain of TCR clone 208950 (TRAV12-3, TRAJ17)
CAMTLTGTKLTF

SEQ ID NO: 417900 - protein, 15 aa, Homo sapiens
  CDR3 for beta chain variable domain of TCR clone 208950 (TRBV20-1, TRBJ2-7)
CSARDRVYGMDEQYF

SEQ ID NO: 417901 - protein, 12 aa, Homo sapiens
  CDR3 for alpha chain variable domain of TCR clone 208951 (TRAV26-2, TRAJ21)
CILKGNFNKFYF

SEQ ID NO: 417902 - protein, 11 aa, Homo sapiens
  CDR3 for beta chain variable domain of TCR clone 208951 (TRBV12-4, TRBJ2-7)
CQQFRGYEQYF

SEQ ID NO: 417903 - protein, 15 aa, Homo sapiens
  CDR3 for alpha chain variable domain of TCR clone 208952 (TRAV12-2, TRAJ53)
CAVNGGGGGNYKLTF

SEQ ID NO: 417904 - protein, 17 aa, Homo sapiens
  CDR3 for beta chain variable domain of TCR clone 208952 (TRBV7-3, TRBJ2-3)
CGSSLMKRMRGADTQYF

SEQ ID NO: 417905 - protein, 18 aa, Homo sapiens
  CDR3 for alpha chain variable domain of TCR clone 208953 (TRAV21, TRAJ52)
CAVRPSPAGGTSFRKLTF

SEQ ID NO: 417906 - protein, 17 aa, Homo sapiens
  CDR3 for beta chain variable domain of TCR clone 208953 (TRBV13, TRBJ2-3)
CASSLSRVAGGRNTQYF

SEQ ID NO: 417907 - protein, 12 aa, Homo sapiens
  CDR3 for alpha chain variable domain of TCR clone 208954 (TRAV13-1, TRAJ15)
CAANHAGTALIF

SEQ ID NO: 417908 - protein, 14 aa, Homo sapiens
  CDR3 for beta chain variable domain of TCR clone 208954 (TRBV20-1, TRBJ2-5)
CSARYRGLQETQYF

SEQ ID NO: 417909 - protein, 13 aa, Homo sapiens
  CDR3 for alpha chain variable domain of TCR clone 208955 (TRAV13-2, TRAJ48)
YAEMEFGNEKLTF

SEQ ID NO: 417910 - protein, 15 aa, Homo sapiens
  CDR3 for beta chain variable domain of TCR clone 208955 (TRBV7-9, TRBJ1-6)
CASSSPGRGNSPLHF

SEQ ID NO: 417911 - protein, 12 aa, Homo sapiens
  CDR3 for alpha chain variable domain of TCR clone 208956 (TRAV12-3, TRAJ40)
CAISTGTYKYIF

SEQ ID NO: 417912 - protein, 15 aa, Homo sapiens
  CDR3 for beta chain variable domain of TCR clone 208956 (TRBV11-2, TRBJ2-3)
CASSPRSGGTDTQYF

SEQ ID NO: 417913 - protein, 13 aa, Homo sapiens
  CDR3 for alpha chain variable domain of TCR clone 208957 (TRAV8-3, TRAJ37)
CAVPSGNTGKLIF

SEQ ID NO: 417914 - protein, 12 aa, Homo sapiens
  CDR3 for beta chain variable domain of TCR clone 208957 (TRBV11-3, TRBJ2-1)
CASSPGNNEQFF

SEQ ID NO: 417915 - protein, 12 aa, Homo sapiens
  CDR3 for alpha chain variable domain of TCR clone 208958 (TRAV13-2, TRAJ23)
CAERHSGGKLIF

SEQ ID NO: 417916 - protein, 16 aa, Homo sapiens
  CDR3 for beta chain variable domain of TCR clone 208958 (TRBV7-2, TRBJ2-6)
CAILSGVSSGANDLTF

SEQ ID NO: 417917 - protein, 14 aa, Homo sapiens
  CDR3 for alpha chain variable domain of TCR clone 208959 (TRAV16, TRAJ33)
CALSAMDSNYQLIW

SEQ ID NO: 417918 - protein, 17 aa, Homo sapiens
  CDR3 for beta chain variable domain of TCR clone 208959 (TRBV25-1, TRBJ2-7)
CASSAARVVFSSYEQYF

SEQ ID NO: 417919 - protein, 14 aa, Homo sapiens
  CDR3 for alpha chain variable domain of TCR clone 208960 (TRAV29/DV5, TRAJ44)
CAAFLVGTASKLTF

SEQ ID NO: 417920 - protein, 15 aa, Homo sapiens
  CDR3 for beta chain variable domain of TCR clone 208960 (TRBV12-4, TRBJ2-5)
CASSPPTGFQETQYF

SEQ ID NO: 417921 - protein, 16 aa, Homo sapiens
  CDR3 for alpha chain variable domain of TCR clone 208961 (TRAV3, TRAJ37)
CAVRGKGSGNTGKLIF

SEQ ID NO: 417922 - protein, 16 aa, Homo sapiens
  CDR3 for beta chain variable domain of TCR clone 208961 (TRBV12-4, TRBJ1-5)
CASSRPVGGSNQPQHV

SEQ ID NO: 417923 - protein, 17 aa, Homo sapiens
  CDR3 for alpha chain variable domain of TCR clone 208962 (TRAV3, TRAJ12)
CAVRDGGRMDSSYKLIF

SEQ ID NO: 417924 - protein, 13 aa, Homo sapiens
  CDR3 for beta chain variable domain of TCR clone 208962 (TRBV14, TRBJ1-1)
CASSQEAGTEAFV

SEQ ID NO: 417925 - protein, 18 aa, Homo sapiens
  CDR3 for alpha chain variable domain of TCR clone 208963 (TRAV13-1, TRAJ52)
CAASKRSAGGTSYGKLTS

SEQ ID NO: 417926 - protein, 13 aa, Homo sapiens
  CDR3 for beta chain variable domain of TCR clone 208963 (TRBV12-4, TRBJ1-2)
CASSLRQGKGDTF

SEQ ID NO: 417927 - protein, 11 aa, Homo sapiens
  CDR3 for alpha chain variable domain of TCR clone 208964 (TRAV12-2, TRAJ29)
CAVTLRSPLCF

SEQ ID NO: 417928 - protein, 16 aa, Homo sapiens
  CDR3 for beta chain variable domain of TCR clone 208964 (TRBV5-1, TRBJ2-2)
CASSLGGTGSTGELFF

SEQ ID NO: 417929 - protein, 14 aa, Homo sapiens
  CDR3 for alpha chain variable domain of TCR clone 208965 (TRAV8-1, TRAJ5)
CAVSMDTGRKALTF

SEQ ID NO: 417930 - protein, 15 aa, Homo sapiens
  CDR3 for beta chain variable domain of TCR clone 208965 (TRBV5-1, TRBJ2-7)
CASSLDLTSSYEQYF

SEQ ID NO: 417931 - protein, 22 aa, Homo sapiens
  CDR3 for alpha chain variable domain of TCR clone 208966 (TRAV16, )
CALRTQIPDIQNPDPAVYQLRD

SEQ ID NO: 417932 - protein, 16 aa, Homo sapiens
  CDR3 for beta chain variable domain of TCR clone 208966 (TRBV7-2, TRBJ1-2)
CASSSNQDRRGHSYTF

SEQ ID NO: 417933 - protein, 14 aa, Homo sapiens
  CDR3 for alpha chain variable domain of TCR clone 208967 (TRAV12-1, TRAJ27)
CGEHIRTNAGKSTF

SEQ ID NO: 417934 - protein, 13 aa, Homo sapiens
  CDR3 for beta chain variable domain of TCR clone 208967 (TRBV7-9, TRBJ1-2)
CASSLKQNYGYTF

SEQ ID NO: 417935 - protein, 12 aa, Homo sapiens
  CDR3 for alpha chain variable domain of TCR clone 208968 (TRAV25, TRAJ31)
CAGHLNNARLMF

SEQ ID NO: 417936 - protein, 12 aa, Homo sapiens
  CDR3 for beta chain variable domain of TCR clone 208968 (TRBV7-9, TRBJ1-4)
CASSTDREKLFF

SEQ ID NO: 417937 - protein, 14 aa, Homo sapiens
  CDR3 for alpha chain variable domain of TCR clone 208969 (TRAV8-3, TRAJ34)
CAVGPPHNTDKLIF

SEQ ID NO: 417938 - protein, 15 aa, Homo sapiens
  CDR3 for beta chain variable domain of TCR clone 208969 (TRBV4-1, TRBJ1-4)
CASSDTGGTNEKLFF

SEQ ID NO: 417939 - protein, 12 aa, Homo sapiens
  CDR3 for alpha chain variable domain of TCR clone 208970 (TRAV12-3, TRAJ32)
CAGGGATNKLIF

SEQ ID NO: 417940 - protein, 17 aa, Homo sapiens
  CDR3 for beta chain variable domain of TCR clone 208970 (TRBV28, TRBJ2-5)
CASSTPEVDALQETQYF

SEQ ID NO: 417941 - protein, 14 aa, Homo sapiens
  CDR3 for alpha chain variable domain of TCR clone 208971 (TRAV12-2, TRAJ9)
CAVNALEGGFKTIF

SEQ ID NO: 417942 - protein, 14 aa, Homo sapiens
  CDR3 for beta chain variable domain of TCR clone 208971 (TRBV25-1, TRBJ1-1)
CASTHLGGNAEAFF

SEQ ID NO: 417943 - protein, 12 aa, Homo sapiens
  CDR3 for alpha chain variable domain of TCR clone 208972 (TRAV36/DV7, TRAJ50)
CAVEPENLLRQG

SEQ ID NO: 417944 - protein, 16 aa, Homo sapiens
  CDR3 for beta chain variable domain of TCR clone 208972 (TRBV7-3, TRBJ2-2)
CASSLKRGTLSGELFF

SEQ ID NO: 417945 - protein, 16 aa, Homo sapiens
  CDR3 for alpha chain variable domain of TCR clone 208973 (TRAV3, TRAJ10)
CAVRDVRAGGGNKLTF

SEQ ID NO: 417946 - protein, 15 aa, Homo sapiens
  CDR3 for beta chain variable domain of TCR clone 208973 (TRBV15, TRBJ1-5)
CATSTTGAVNQPQHF

SEQ ID NO: 417947 - protein, 12 aa, Homo sapiens
  CDR3 for alpha chain variable domain of TCR clone 208974 (TRAV13-1, TRAJ53)
AASGGSNYKLTF

SEQ ID NO: 417948 - protein, 16 aa, Homo sapiens
  CDR3 for beta chain variable domain of TCR clone 208974 (TRBV28, TRBJ2-6)
CASGNRRGSGANVLTL

SEQ ID NO: 417949 - protein, 14 aa, Homo sapiens
  CDR3 for alpha chain variable domain of TCR clone 208975 (TRAV1-2, TRAJ16)
CAVNRFSDGQKLLF

SEQ ID NO: 417950 - protein, 15 aa, Homo sapiens
  CDR3 for beta chain variable domain of TCR clone 208975 (TRBV5-1, TRBJ2-3)
CASSVTSGSTDTQYL

SEQ ID NO: 417951 - protein, 16 aa, Homo sapiens
  CDR3 for alpha chain variable domain of TCR clone 208976 (TRAV30, TRAJ24)
CGTEIVDADSWGKFQF

SEQ ID NO: 417952 - protein, 13 aa, Homo sapiens
  CDR3 for beta chain variable domain of TCR clone 208976 (TRBV20-1, TRBJ1-1)
CSAPPGGHTEDFF

SEQ ID NO: 417953 - protein, 17 aa, Homo sapiens
  CDR3 for alpha chain variable domain of TCR clone 208977 (TRAV26-1, TRAJ53)
CIVRVDDSGGSNYKLTF

SEQ ID NO: 417954 - protein, 14 aa, Homo sapiens
  CDR3 for beta chain variable domain of TCR clone 208977 (TRBV24-1, TRBJ1-2)
CATSGRGSGAGYTF

SEQ ID NO: 417955 - protein, 14 aa, Homo sapiens
  CDR3 for alpha chain variable domain of TCR clone 208978 (TRAV2, TRAJ9)
CAVEYRSGGFKTIF

SEQ ID NO: 417956 - protein, 14 aa, Homo sapiens
  CDR3 for beta chain variable domain of TCR clone 208978 (TRBV7-3, TRBJ2-1)
CASSLAGGTNEQFF

SEQ ID NO: 417957 - protein, 16 aa, Homo sapiens
  CDR3 for alpha chain variable domain of TCR clone 208979 (TRAV38-1, TRAJ56)
CAFMKRQTGANSKLTF

SEQ ID NO: 417958 - protein, 14 aa, Homo sapiens
  CDR3 for beta chain variable domain of TCR clone 208979 (TRBV7-9, TRBJ2-5)
CASSLVGGEETQYF

SEQ ID NO: 417959 - protein, 13 aa, Homo sapiens
  CDR3 for alpha chain variable domain of TCR clone 208980 (TRAV12-1, TRAJ9)
CVVLNTGGYKTIF

SEQ ID NO: 417960 - protein, 13 aa, Homo sapiens
  CDR3 for beta chain variable domain of TCR clone 208980 (TRBV20-1, TRBJ1-1)
CSARGGGNTEAFF

SEQ ID NO: 417961 - protein, 11 aa, Homo sapiens
  CDR3 for alpha chain variable domain of TCR clone 208981 (TRAV2, TRAJ13)
CASGGYQKVTF

SEQ ID NO: 417962 - protein, 20 aa, Homo sapiens
  CDR3 for beta chain variable domain of TCR clone 208981 (TRBV28, TRBJ2-1)
CASTPIGRSLGLAGGNEQFF

SEQ ID NO: 417963 - protein, 14 aa, Homo sapiens
  CDR3 for alpha chain variable domain of TCR clone 208982 (TRAV13-1, TRAJ20)
CAVRPGSNDYKLSF

SEQ ID NO: 417964 - protein, 20 aa, Homo sapiens
  CDR3 for beta chain variable domain of TCR clone 208982 (TRBV28, TRBJ2-1)
CASTPIGRSPGLAGGNEQFF

SEQ ID NO: 417965 - protein, 15 aa, Homo sapiens
  CDR3 for alpha chain variable domain of TCR clone 208983 (TRAV8-6, TRAJ11)
CAVNFMNSGYSTLTF

SEQ ID NO: 417966 - protein, 11 aa, Homo sapiens
  CDR3 for beta chain variable domain of TCR clone 208983 (TRBV7-9, TRBJ2-3)
CASSGPDTQYF

SEQ ID NO: 417967 - protein, 15 aa, Homo sapiens
  CDR3 for alpha chain variable domain of TCR clone 208984 (TRAV1-2, TRAJ38)
CAVSENAGNNRKPIW

SEQ ID NO: 417968 - protein, 16 aa, Homo sapiens
  CDR3 for beta chain variable domain of TCR clone 208984 (TRBV4-1, TRBJ2-7)
CASSLTAGQATYEQYF

SEQ ID NO: 417969 - protein, 15 aa, Homo sapiens
  CDR3 for alpha chain variable domain of TCR clone 208985 (TRAV8-4, TRAJ34)
CAVSHLSYNTDTLIF

SEQ ID NO: 417970 - protein, 15 aa, Homo sapiens
  CDR3 for beta chain variable domain of TCR clone 208985 (TRBV2, TRBJ2-1)
CASRARDGSYNEQFF

SEQ ID NO: 417971 - protein, 11 aa, Homo sapiens
  CDR3 for alpha chain variable domain of TCR clone 208986 (TRAV2, TRAJ40)
CAVADPGNLQI

SEQ ID NO: 417972 - protein, 14 aa, Homo sapiens
  CDR3 for beta chain variable domain of TCR clone 208986 (TRBV19, TRBJ2-2)
CASSTLHRSGELFF

SEQ ID NO: 417973 - protein, 12 aa, Homo sapiens
  CDR3 for alpha chain variable domain of TCR clone 208987 (TRAV27, TRAJ48)
CAGARGNEKLTF

SEQ ID NO: 417974 - protein, 11 aa, Homo sapiens
  CDR3 for beta chain variable domain of TCR clone 208987 (TRBV7-8, TRBJ2-7)
CASSLSLEQYF

SEQ ID NO: 417975 - protein, 11 aa, Homo sapiens
  CDR3 for alpha chain variable domain of TCR clone 208988 (TRAV12-2, TRAJ54)
CAVEGAQKLLF

SEQ ID NO: 417976 - protein, 17 aa, Homo sapiens
  CDR3 for beta chain variable domain of TCR clone 208988 (TRBV18, TRBJ1-3)
CASSPYPTGPSGNTIYF

SEQ ID NO: 417977 - protein, 16 aa, Homo sapiens
  CDR3 for alpha chain variable domain of TCR clone 208989 (TRAV26-1, TRAJ37)
CIVRGDGSGNTGTLIF

SEQ ID NO: 417978 - protein, 13 aa, Homo sapiens
  CDR3 for beta chain variable domain of TCR clone 208989 (TRBV4-1, TRBJ2-2)
CASSQENTGELFF

SEQ ID NO: 417979 - protein, 16 aa, Homo sapiens
  CDR3 for alpha chain variable domain of TCR clone 208990 (TRAV20, TRAJ28)
CAVRDPSGAGSYQLTF

SEQ ID NO: 417980 - protein, 14 aa, Homo sapiens
  CDR3 for beta chain variable domain of TCR clone 208990 (TRBV11-2, TRBJ2-7)
CASSSTGEGYEQYF

SEQ ID NO: 417981 - protein, 12 aa, Homo sapiens
  CDR3 for alpha chain variable domain of TCR clone 208991 (TRAV12-3, TRAJ17)
CAMTLTGNNLTF

SEQ ID NO: 417982 - protein, 12 aa, Homo sapiens
  CDR3 for beta chain variable domain of TCR clone 208991 (TRBV2, TRBJ2-1)
CAYGPPGNEQFF

SEQ ID NO: 417983 - protein, 15 aa, Homo sapiens
  CDR3 for alpha chain variable domain of TCR clone 208992 (TRAV17, TRAJ37)
CATDHGSSNSGKLIF

SEQ ID NO: 417984 - protein, 14 aa, Homo sapiens
  CDR3 for beta chain variable domain of TCR clone 208992 (TRBV7-2, TRBJ2-3)
CASSRTSGADTQYF

SEQ ID NO: 417985 - protein, 15 aa, Homo sapiens
  CDR3 for alpha chain variable domain of TCR clone 208993 (TRAV38-2/DV8, TRAJ57)
CASARTQGGSEKLVF

SEQ ID NO: 417986 - protein, 17 aa, Homo sapiens
  CDR3 for beta chain variable domain of TCR clone 208993 (TRBV18, TRBJ1-5)
CASSPTMGQGTNQPQHF

SEQ ID NO: 417987 - protein, 11 aa, Homo sapiens
  CDR3 for alpha chain variable domain of TCR clone 208994 (TRAV27, TRAJ20)
CAGLNDYKLSF

SEQ ID NO: 417988 - protein, 15 aa, Homo sapiens
  CDR3 for beta chain variable domain of TCR clone 208994 (TRBV9, TRBJ1-6)
CASSVAGTGDSPLHF

SEQ ID NO: 417989 - protein, 13 aa, Homo sapiens
  CDR3 for alpha chain variable domain of TCR clone 208995 (TRAV3, TRAJ30)
CAVRDRGDDKIIF

SEQ ID NO: 417990 - protein, 15 aa, Homo sapiens
  CDR3 for beta chain variable domain of TCR clone 208995 (TRBV20-1, TRBJ2-3)
CSARASGGTTDTQYF

SEQ ID NO: 417991 - protein, 18 aa, Homo sapiens
  CDR3 for alpha chain variable domain of TCR clone 208996 (TRAV13-1, TRAJ52)
CAAKDPNAGGTSYGKLTF

SEQ ID NO: 417992 - protein, 18 aa, Homo sapiens
  CDR3 for beta chain variable domain of TCR clone 208996 (TRBV4-1, TRBJ1-4)
CASSPSTGGAWTNDKLFF

SEQ ID NO: 417993 - protein, 14 aa, Homo sapiens
  CDR3 for alpha chain variable domain of TCR clone 208997 (TRAV12-3, TRAJ58)
CAMSTETSGSRLSF

SEQ ID NO: 417994 - protein, 15 aa, Homo sapiens
  CDR3 for beta chain variable domain of TCR clone 208997 (TRBV4-1, TRBJ1-4)
CASSDTGGTNEKLFF

SEQ ID NO: 417995 - protein, 15 aa, Homo sapiens
  CDR3 for alpha chain variable domain of TCR clone 208998 (TRAV12-1, TRAJ44)
CVVFVNTGTASKLTF

SEQ ID NO: 417996 - protein, 13 aa, Homo sapiens
  CDR3 for beta chain variable domain of TCR clone 208998 (TRBV7-9, TRBJ2-3)
CASSPGSTDTQYF

SEQ ID NO: 417997 - protein, 14 aa, Homo sapiens
  CDR3 for alpha chain variable domain of TCR clone 208999 (TRAV1-2, TRAJ15)
CAVRDRQAGTALIF

SEQ ID NO: 417998 - protein, 15 aa, Homo sapiens
  CDR3 for beta chain variable domain of TCR clone 208999 (TRBV28, TRBJ2-3)
CASSLNSSEHRYAVF

SEQ ID NO: 417999 - protein, 14 aa, Homo sapiens
  CDR3 for alpha chain variable domain of TCR clone 209000 (TRAV1-2, TRAJ8)
CAVREDTGFQTLVF

SEQ ID NO: 418000 - protein, 14 aa, Homo sapiens
  CDR3 for beta chain variable domain of TCR clone 209000 (TRBV29-1, TRBJ2-5)
CSIETSGSGETQYF

SEQ ID NO: 418001 - protein, 14 aa, Homo sapiens
  CDR3 for alpha chain variable domain of TCR clone 209001 (TRAV12-2, TRAJ36)
CAVKISTGANNIFF

SEQ ID NO: 418002 - protein, 14 aa, Homo sapiens
  CDR3 for beta chain variable domain of TCR clone 209001 (TRBV25-1, TRBJ1-2)
CASSDTTGVVGYTF

SEQ ID NO: 418003 - protein, 14 aa, Homo sapiens
  CDR3 for alpha chain variable domain of TCR clone 209002 (TRAV26-1, TRAJ54)
CIVRVPQGAKKLVF

SEQ ID NO: 418004 - protein, 15 aa, Homo sapiens
  CDR3 for beta chain variable domain of TCR clone 209002 (TRBV18, TRBJ2-7)
CASSPNSGSGNEQYF

SEQ ID NO: 418005 - protein, 14 aa, Homo sapiens
  CDR3 for alpha chain variable domain of TCR clone 209003 (TRAV1-2, TRAJ27)
CAPAEYTNAGKSTF

SEQ ID NO: 418006 - protein, 18 aa, Homo sapiens
  CDR3 for beta chain variable domain of TCR clone 209003 (TRBV28, TRBJ1-2)
CASRQQQGKRGSNYGYIF

SEQ ID NO: 418007 - protein, 15 aa, Homo sapiens
  CDR3 for alpha chain variable domain of TCR clone 209004 (TRAV8-3, TRAJ40)
CAAPSLGSGTYKYIF

SEQ ID NO: 418008 - protein, 15 aa, Homo sapiens
  CDR3 for beta chain variable domain of TCR clone 209004 (TRBV7-2, TRBJ2-1)
CASTHGTGIYNEQFF

SEQ ID NO: 418009 - protein, 11 aa, Homo sapiens
  CDR3 for alpha chain variable domain of TCR clone 209005 (TRAV39, TRAJ49)
CAVDISTQFYF

SEQ ID NO: 418010 - protein, 15 aa, Homo sapiens
  CDR3 for beta chain variable domain of TCR clone 209005 (TRBV20-1, TRBJ2-7)
CSARDRVSGMDEQYF

SEQ ID NO: 418011 - protein, 17 aa, Homo sapiens
  CDR3 for alpha chain variable domain of TCR clone 209006 (TRAV3, TRAJ6)
CAVRDGPRAGGSYIPTF

SEQ ID NO: 418012 - protein, 14 aa, Homo sapiens
  CDR3 for beta chain variable domain of TCR clone 209006 (TRBV4-1, TRBJ1-1)
CASSQAGYSTEAFF

SEQ ID NO: 418013 - protein, 12 aa, Homo sapiens
  CDR3 for alpha chain variable domain of TCR clone 209007 (TRAV1-1, TRAJ33)
CAASDSNYQLIW

SEQ ID NO: 418014 - protein, 18 aa, Homo sapiens
  CDR3 for beta chain variable domain of TCR clone 209007 (TRBV20-1, TRBJ2-2)
CSARVQTARPSGTGELFF

SEQ ID NO: 418015 - protein, 16 aa, Homo sapiens
  CDR3 for alpha chain variable domain of TCR clone 209008 (TRAV38-2/DV8, TRAJ28)
CAYSPPSGAGSYQLTF

SEQ ID NO: 418016 - protein, 16 aa, Homo sapiens
  CDR3 for beta chain variable domain of TCR clone 209008 (TRBV3-1, TRBJ2-7)
CASSQGATGVAYEQYF

SEQ ID NO: 418017 - protein, 15 aa, Homo sapiens
  CDR3 for alpha chain variable domain of TCR clone 209009 (TRAV3, TRAJ32)
CAVSSYGGATNKLIF

SEQ ID NO: 418018 - protein, 12 aa, Homo sapiens
  CDR3 for beta chain variable domain of TCR clone 209009 (TRBV11-2, TRBJ2-2)
CASSLGGGELFF

SEQ ID NO: 418019 - protein, 14 aa, Homo sapiens
  CDR3 for alpha chain variable domain of TCR clone 209010 (TRAV3, TRAJ32)
CCERRAGATNKLIF

SEQ ID NO: 418020 - protein, 14 aa, Homo sapiens
  CDR3 for beta chain variable domain of TCR clone 209010 (TRBV7-3, TRBJ2-1)
CASSLSGSYNEQFF

SEQ ID NO: 418021 - protein, 13 aa, Homo sapiens
  CDR3 for alpha chain variable domain of TCR clone 209011 (TRAV29/DV5, TRAJ31)
CAASRNNNARLMF

SEQ ID NO: 418022 - protein, 14 aa, Homo sapiens
  CDR3 for beta chain variable domain of TCR clone 209011 (TRBV5-4, TRBJ1-1)
CASSLDSRRDEAFF

SEQ ID NO: 418023 - protein, 15 aa, Homo sapiens
  CDR3 for alpha chain variable domain of TCR clone 209012 (TRAV3, TRAJ5)
CAVRDLDTGRRALTS

SEQ ID NO: 418024 - protein, 13 aa, Homo sapiens
  CDR3 for beta chain variable domain of TCR clone 209012 (TRBV12-4, TRBJ2-7)
CGSSPTETYEQYF

SEQ ID NO: 418025 - protein, 15 aa, Homo sapiens
  CDR3 for alpha chain variable domain of TCR clone 209013 (TRAV3, TRAJ3)
CAVRDRDSSASKIMF

SEQ ID NO: 418026 - protein, 18 aa, Homo sapiens
  CDR3 for beta chain variable domain of TCR clone 209013 (TRBV25-1, TRBJ1-2)
CASSGLQNGQGLIFGYTF

SEQ ID NO: 418027 - protein, 15 aa, Homo sapiens
  CDR3 for alpha chain variable domain of TCR clone 209014 (TRAV35, TRAJ23)
CAGQRGYNQGGKLIF

SEQ ID NO: 418028 - protein, 15 aa, Homo sapiens
  CDR3 for beta chain variable domain of TCR clone 209014 (TRBV12-4, TRBJ1-1)
CQQQDRVVANTEAFF

SEQ ID NO: 418029 - protein, 15 aa, Homo sapiens
  CDR3 for alpha chain variable domain of TCR clone 209015 (TRAV12-3, TRAJ13)
CAMSARSGGYQKVTF

SEQ ID NO: 418030 - protein, 14 aa, Homo sapiens
  CDR3 for beta chain variable domain of TCR clone 209015 (TRBV7-8, TRBJ2-7)
CASSPGLADYEQYF

SEQ ID NO: 418031 - protein, 14 aa, Homo sapiens
  CDR3 for alpha chain variable domain of TCR clone 209016 (TRAV4, TRAJ9)
CLVGSGTGGFKTIF

SEQ ID NO: 418032 - protein, 14 aa, Homo sapiens
  CDR3 for beta chain variable domain of TCR clone 209016 (TRBV20-1, TRBJ1-1)
CSAMGGTANTEAFF

SEQ ID NO: 418033 - protein, 14 aa, Homo sapiens
  CDR3 for alpha chain variable domain of TCR clone 209017 (TRAV20, TRAJ22)
CAVALGGSARQLTF

SEQ ID NO: 418034 - protein, 15 aa, Homo sapiens
  CDR3 for beta chain variable domain of TCR clone 209017 (TRBV7-2, TRBJ1-1)
CASSFAGDRDTEALF

SEQ ID NO: 418035 - protein, 11 aa, Homo sapiens
  CDR3 for alpha chain variable domain of TCR clone 209018 (TRAV21, TRAJ11)
CAVNGYSTLTF

SEQ ID NO: 418036 - protein, 15 aa, Homo sapiens
  CDR3 for beta chain variable domain of TCR clone 209018 (TRBV2, TRBJ2-1)
CASSELAGSYNEQFF

SEQ ID NO: 418037 - protein, 15 aa, Homo sapiens
  CDR3 for alpha chain variable domain of TCR clone 209019 (TRAV21, TRAJ53)
CATLNSGGSNYKLTF

SEQ ID NO: 418038 - protein, 14 aa, Homo sapiens
  CDR3 for beta chain variable domain of TCR clone 209019 (TRBV12-5, TRBJ2-5)
CASVSRTHQETQYF

SEQ ID NO: 418039 - protein, 13 aa, Homo sapiens
  CDR3 for alpha chain variable domain of TCR clone 209020 (TRAV13-1, TRAJ39)
CSKYRNAGNMLTF

SEQ ID NO: 418040 - protein, 14 aa, Homo sapiens
  CDR3 for beta chain variable domain of TCR clone 209020 (TRBV18, TRBJ2-7)
CASSPRGGAYEQYF

SEQ ID NO: 418041 - protein, 14 aa, Homo sapiens
  CDR3 for alpha chain variable domain of TCR clone 209021 (TRAV12-2, TRAJ40)
CAGKIPSGTYKYIF

SEQ ID NO: 418042 - protein, 12 aa, Homo sapiens
  CDR3 for beta chain variable domain of TCR clone 209021 (TRBV11-2, TRBJ2-2)
CASSLGGGELFF

SEQ ID NO: 418043 - protein, 16 aa, Homo sapiens
  CDR3 for alpha chain variable domain of TCR clone 209022 (TRAV26-1, TRAJ37)
CIVRGDGSGNTGKLIF

SEQ ID NO: 418044 - protein, 13 aa, Homo sapiens
  CDR3 for beta chain variable domain of TCR clone 209022 (TRBV12-4, TRBJ1-2)
CASSLRQGKGYTF

SEQ ID NO: 418045 - protein, 11 aa, Homo sapiens
  CDR3 for alpha chain variable domain of TCR clone 209023 (TRAV12-3, TRAJ27)
CAMANAGKSTF

SEQ ID NO: 418046 - protein, 16 aa, Homo sapiens
  CDR3 for beta chain variable domain of TCR clone 209023 (TRBV7-2, TRBJ2-5)
CASSSEWLSGQETQYF

SEQ ID NO: 418047 - protein, 10 aa, Homo sapiens
  CDR3 for alpha chain variable domain of TCR clone 209024 (TRAV30, TRAJ48)
CGIGNEKLTF

SEQ ID NO: 418048 - protein, 13 aa, Homo sapiens
  CDR3 for beta chain variable domain of TCR clone 209024 (TRBV7-6, TRBJ2-3)
CASSVAGTDTQYF

SEQ ID NO: 418049 - protein, 16 aa, Homo sapiens
  CDR3 for alpha chain variable domain of TCR clone 209025 (TRAV20, TRAJ22)
CAVQTSSSGSARQLTF

SEQ ID NO: 418050 - protein, 13 aa, Homo sapiens
  CDR3 for beta chain variable domain of TCR clone 209025 (TRBV7-2, TRBJ2-5)
CASSQTSVETQYF

SEQ ID NO: 418051 - protein, 15 aa, Homo sapiens
  CDR3 for alpha chain variable domain of TCR clone 209026 (TRAV35, TRAJ40)
CAGQLGTSGTYKYIF

SEQ ID NO: 418052 - protein, 15 aa, Homo sapiens
  CDR3 for beta chain variable domain of TCR clone 209026 (TRBV14, TRBJ1-1)
CASSQEGMGFTEAFF

SEQ ID NO: 418053 - protein, 14 aa, Homo sapiens
  CDR3 for alpha chain variable domain of TCR clone 209027 (TRAV27, TRAJ44)
CAASFTGTASKLTF

SEQ ID NO: 418054 - protein, 13 aa, Homo sapiens
  CDR3 for beta chain variable domain of TCR clone 209027 (TRBV27, TRBJ2-5)
CATSRGGLYTQYF

SEQ ID NO: 418055 - protein, 13 aa, Homo sapiens
  CDR3 for alpha chain variable domain of TCR clone 209028 (TRAV3, TRAJ20)
CSVRSLNDYKLSF

SEQ ID NO: 418056 - protein, 13 aa, Homo sapiens
  CDR3 for beta chain variable domain of TCR clone 209028 (TRBV6-1, TRBJ2-1)
CAGMDPTNNEQFF

SEQ ID NO: 418057 - protein, 12 aa, Homo sapiens
  CDR3 for alpha chain variable domain of TCR clone 209029 (TRAV13-2, TRAJ23)
CAESHRGGKLIF

SEQ ID NO: 418058 - protein, 12 aa, Homo sapiens
  CDR3 for beta chain variable domain of TCR clone 209029 (TRBV11-2, TRBJ2-2)
CASSLGGGELFF

SEQ ID NO: 418059 - protein, 14 aa, Homo sapiens
  CDR3 for alpha chain variable domain of TCR clone 209030 (TRAV8-3, TRAJ13)
CAVGAAGGYQKVTF

SEQ ID NO: 418060 - protein, 14 aa, Homo sapiens
  CDR3 for beta chain variable domain of TCR clone 209030 (TRBV7-2, TRBJ2-7)
CASSPKTSFYEQYF

SEQ ID NO: 418061 - protein, 16 aa, Homo sapiens
  CDR3 for alpha chain variable domain of TCR clone 209031 (TRAV26-1, TRAJ42)
CIVGTGYGGSQGNLIF

SEQ ID NO: 418062 - protein, 13 aa, Homo sapiens
  CDR3 for beta chain variable domain of TCR clone 209031 (TRBV7-9, TRBJ1-2)
CASSLKQNYGYTF

SEQ ID NO: 418063 - protein, 13 aa, Homo sapiens
  CDR3 for alpha chain variable domain of TCR clone 209032 (TRAV1-2, TRAJ9)
CAVLNTGGFKTIF

SEQ ID NO: 418064 - protein, 15 aa, Homo sapiens
  CDR3 for beta chain variable domain of TCR clone 209032 (TRBV9, TRBJ2-2)
CASSDFAGASGELFF

SEQ ID NO: 418065 - protein, 13 aa, Homo sapiens
  CDR3 for alpha chain variable domain of TCR clone 209033 (TRAV8-6, TRAJ49)
CAFITNTGNQFYF

SEQ ID NO: 418066 - protein, 13 aa, Homo sapiens
  CDR3 for beta chain variable domain of TCR clone 209033 (TRBV7-9, TRBJ1-2)
CASSLKQNYGYTF

SEQ ID NO: 418067 - protein, 17 aa, Homo sapiens
  CDR3 for alpha chain variable domain of TCR clone 209034 (TRAV8-1, TRAJ43)
CAVTNDIRFGAGTRLTV

SEQ ID NO: 418068 - protein, 13 aa, Homo sapiens
  CDR3 for beta chain variable domain of TCR clone 209034 (TRBV7-3, TRBJ1-1)
CASSQDWGAEAFF

SEQ ID NO: 418069 - protein, 12 aa, Homo sapiens
  CDR3 for alpha chain variable domain of TCR clone 209035 (TRAV34, TRAJ27)
CGADTNAGKSTF

SEQ ID NO: 418070 - protein, 17 aa, Homo sapiens
  CDR3 for beta chain variable domain of TCR clone 209035 (TRBV7-3, TRBJ2-2)
CACSLSGTSGGTGELFF

SEQ ID NO: 418071 - protein, 12 aa, Homo sapiens
  CDR3 for alpha chain variable domain of TCR clone 209036 (TRAV17, TRAJ12)
CATLRSSYKLIF

SEQ ID NO: 418072 - protein, 16 aa, Homo sapiens
  CDR3 for beta chain variable domain of TCR clone 209036 (TRBV28, TRBJ2-7)
CASNLFFETGGPEQYF

SEQ ID NO: 418073 - protein, 15 aa, Homo sapiens
  CDR3 for alpha chain variable domain of TCR clone 209037 (TRAV12-2, TRAJ52)
CAAPGGGTSYGKLTF

SEQ ID NO: 418074 - protein, 13 aa, Homo sapiens
  CDR3 for beta chain variable domain of TCR clone 209037 (TRBV20-1, TRBJ1-1)
CSAPLGGGTEAFF

SEQ ID NO: 418075 - protein, 14 aa, Homo sapiens
  CDR3 for alpha chain variable domain of TCR clone 209038 (TRAV20, TRAJ56)
CALQFGGVNSKLTF

SEQ ID NO: 418076 - protein, 14 aa, Homo sapiens
  CDR3 for beta chain variable domain of TCR clone 209038 (TRBV20-1, TRBJ2-7)
CSAKRGRSSYEQYF

SEQ ID NO: 418077 - protein, 15 aa, Homo sapiens
  CDR3 for alpha chain variable domain of TCR clone 209039 (TRAV8-2, TRAJ28)
CGVSESGAGSYQLTF

SEQ ID NO: 418078 - protein, 12 aa, Homo sapiens
  CDR3 for beta chain variable domain of TCR clone 209039 (TRBV11-2, TRBJ2-2)
CASSLGGGELFF

SEQ ID NO: 418079 - protein, 13 aa, Homo sapiens
  CDR3 for alpha chain variable domain of TCR clone 209040 (TRAV21, TRAJ27)
CAARPGNAGKSTF

SEQ ID NO: 418080 - protein, 15 aa, Homo sapiens
  CDR3 for beta chain variable domain of TCR clone 209040 (TRBV20-1, TRBJ2-7)
CSARDRVSGMDEQYV

SEQ ID NO: 418081 - protein, 13 aa, Homo sapiens
  CDR3 for alpha chain variable domain of TCR clone 209041 (TRAV35, TRAJ27)
CAGQEGDAGKSTF

SEQ ID NO: 418082 - protein, 16 aa, Homo sapiens
  CDR3 for beta chain variable domain of TCR clone 209041 (TRBV7-2, TRBJ2-5)
CASRYKTGISLETQYF

SEQ ID NO: 418083 - protein, 15 aa, Homo sapiens
  CDR3 for alpha chain variable domain of TCR clone 209042 (TRAV8-4, TRAJ40)
CAVSDDTSGTYKYTF

SEQ ID NO: 418084 - protein, 11 aa, Homo sapiens
  CDR3 for beta chain variable domain of TCR clone 209042 (TRBV19, TRBJ1-2)
CASSISSGYTF

SEQ ID NO: 418085 - protein, 11 aa, Homo sapiens
  CDR3 for alpha chain variable domain of TCR clone 209043 (TRAV35, TRAJ30)
CAPGGDDKIIF

SEQ ID NO: 418086 - protein, 17 aa, Homo sapiens
  CDR3 for beta chain variable domain of TCR clone 209043 (TRBV7-6, TRBJ2-1)
CIAVPAAWGGGADKQFF

SEQ ID NO: 418087 - protein, 12 aa, Homo sapiens
  CDR3 for alpha chain variable domain of TCR clone 209044 (TRAV29/DV5, TRAJ34)
CAASGKTDKLIF

SEQ ID NO: 418088 - protein, 15 aa, Homo sapiens
  CDR3 for beta chain variable domain of TCR clone 209044 (TRBV6-1, TRBJ2-5)
CASSEGWGIQETQYF

SEQ ID NO: 418089 - protein, 12 aa, Homo sapiens
  CDR3 for alpha chain variable domain of TCR clone 209045 (TRAV17, TRAJ39)
CATGAAGNMLTF

SEQ ID NO: 418090 - protein, 14 aa, Homo sapiens
  CDR3 for beta chain variable domain of TCR clone 209045 (TRBV20-1, TRBJ2-1)
CSAQIGGSANEQFF

SEQ ID NO: 418091 - protein, 13 aa, Homo sapiens
  CDR3 for alpha chain variable domain of TCR clone 209046 (TRAV29/DV5, TRAJ31)
CAASRNNNARPMF

SEQ ID NO: 418092 - protein, 12 aa, Homo sapiens
  CDR3 for beta chain variable domain of TCR clone 209046 (TRBV14, TRBJ2-4)
CASSNLKSIQYF

SEQ ID NO: 418093 - protein, 16 aa, Homo sapiens
  CDR3 for alpha chain variable domain of TCR clone 209047 (TRAV30, TRAJ24)
CGTEIVDADSWGKFQF

SEQ ID NO: 418094 - protein, 13 aa, Homo sapiens
  CDR3 for beta chain variable domain of TCR clone 209047 (TRBV7-8, TRBJ2-2)
CASSFQRSGELFF

SEQ ID NO: 418095 - protein, 12 aa, Homo sapiens
  CDR3 for alpha chain variable domain of TCR clone 209048 (TRAV12-1, TRAJ41)
CVVGNSGYALNF

SEQ ID NO: 418096 - protein, 15 aa, Homo sapiens
  CDR3 for beta chain variable domain of TCR clone 209048 (TRBV20-1, TRBJ2-7)
CSARDRVSGMDEQYF

SEQ ID NO: 418097 - protein, 12 aa, Homo sapiens
  CDR3 for alpha chain variable domain of TCR clone 209049 (TRAV1-2, TRAJ37)
CAFPGNTGKLIF

SEQ ID NO: 418098 - protein, 17 aa, Homo sapiens
  CDR3 for beta chain variable domain of TCR clone 209049 (TRBV4-2, TRBJ1-1)
CASSHVATGGMNTEAFF

SEQ ID NO: 418099 - protein, 12 aa, Homo sapiens
  CDR3 for alpha chain variable domain of TCR clone 209050 (TRAV21, TRAJ42)
CAVGGSQGNLIF

SEQ ID NO: 418100 - protein, 15 aa, Homo sapiens
  CDR3 for beta chain variable domain of TCR clone 209050 (TRBV27, TRBJ2-5)
CASSLIPSGGETQYF

SEQ ID NO: 418101 - protein, 15 aa, Homo sapiens
  CDR3 for alpha chain variable domain of TCR clone 209051 (TRAV3, TRAJ5)
CAVRDLDTGRRALTF

SEQ ID NO: 418102 - protein, 15 aa, Homo sapiens
  CDR3 for beta chain variable domain of TCR clone 209051 (TRBV12-4, TRBJ2-7)
CASSPTETYESTSGR

SEQ ID NO: 418103 - protein, 15 aa, Homo sapiens
  CDR3 for alpha chain variable domain of TCR clone 209052 (TRAV27, TRAJ38)
CAARRNAGNNRTRIW

SEQ ID NO: 418104 - protein, 13 aa, Homo sapiens
  CDR3 for beta chain variable domain of TCR clone 209052 (TRBV12-5, TRBJ2-3)
CASGDRQSDTQYF

SEQ ID NO: 418105 - protein, 14 aa, Homo sapiens
  CDR3 for alpha chain variable domain of TCR clone 209053 (TRAV1-1, TRAJ27)
CAVICNTNAGKSTF

SEQ ID NO: 418106 - protein, 13 aa, Homo sapiens
  CDR3 for beta chain variable domain of TCR clone 209053 (TRBV7-9, TRBJ1-2)
CASSLKQNYGYTF

SEQ ID NO: 418107 - protein, 15 aa, Homo sapiens
  CDR3 for alpha chain variable domain of TCR clone 209054 (TRAV26-1, TRAJ29)
CIVRVEGSGNTPLVF

SEQ ID NO: 418108 - protein, 15 aa, Homo sapiens
  CDR3 for beta chain variable domain of TCR clone 209054 (TRBV25-1, TRBJ1-5)
CASSQGHQPNQPQHF

SEQ ID NO: 418109 - protein, 11 aa, Homo sapiens
  CDR3 for alpha chain variable domain of TCR clone 209055 (TRAV23/DV6, TRAJ47)
CAAGYGNKLVF

SEQ ID NO: 418110 - protein, 15 aa, Homo sapiens
  CDR3 for beta chain variable domain of TCR clone 209055 (TRBV7-2, TRBJ2-1)
CASSSGLAGGNEQFF

SEQ ID NO: 418111 - protein, 13 aa, Homo sapiens
  CDR3 for alpha chain variable domain of TCR clone 209056 (TRAV17, TRAJ5)
CAPMDTGRRALTF

SEQ ID NO: 418112 - protein, 16 aa, Homo sapiens
  CDR3 for beta chain variable domain of TCR clone 209056 (TRBV5-1, TRBJ1-1)
CASSSGGNSLNTEAFF

SEQ ID NO: 418113 - protein, 15 aa, Homo sapiens
  CDR3 for alpha chain variable domain of TCR clone 209057 (TRAV12-2, TRAJ53)
CAVNGGGGSNYKRTF

SEQ ID NO: 418114 - protein, 12 aa, Homo sapiens
  CDR3 for beta chain variable domain of TCR clone 209057 (TRBV7-6, TRBJ2-5)
CASSLSQETQYF

SEQ ID NO: 418115 - protein, 14 aa, Homo sapiens
  CDR3 for alpha chain variable domain of TCR clone 209058 (TRAV8-6, TRAJ49)
CAVSVRYTGNQFYL

SEQ ID NO: 418116 - protein, 19 aa, Homo sapiens
  CDR3 for beta chain variable domain of TCR clone 209058 (TRBV28, TRBJ2-1)
CASSFSIRGSGRTRYEQFF

SEQ ID NO: 418117 - protein, 13 aa, Homo sapiens
  CDR3 for alpha chain variable domain of TCR clone 209059 (TRAV12-2, TRAJ39)
CAVNNNAGNMLTF

SEQ ID NO: 418118 - protein, 14 aa, Homo sapiens
  CDR3 for beta chain variable domain of TCR clone 209059 (TRBV7-8, TRBJ2-3)
CASSLEAGTDTQYF

SEQ ID NO: 418119 - protein, 14 aa, Homo sapiens
  CDR3 for alpha chain variable domain of TCR clone 209060 (TRAV14/DV4, TRAJ20)
CAMRESLNDYKLSF

SEQ ID NO: 418120 - protein, 17 aa, Homo sapiens
  CDR3 for beta chain variable domain of TCR clone 209060 (TRBV28, TRBJ1-1)
CASSLSGTGYENTEAFF

SEQ ID NO: 418121 - protein, 17 aa, Homo sapiens
  CDR3 for alpha chain variable domain of TCR clone 209061 (TRAV26-1, TRAJ53)
CIVRVDDSGGSNYKLTF

SEQ ID NO: 418122 - protein, 12 aa, Homo sapiens
  CDR3 for beta chain variable domain of TCR clone 209061 (TRBV19, TRBJ2-1)
CASSMQDTEQFF

SEQ ID NO: 418123 - protein, 15 aa, Homo sapiens
  CDR3 for alpha chain variable domain of TCR clone 209062 (TRAV12-3, TRAJ42)
CAMITSVGSQGNLIF

SEQ ID NO: 418124 - protein, 15 aa, Homo sapiens
  CDR3 for beta chain variable domain of TCR clone 209062 (TRBV11-3, TRBJ2-3)
CASLKDGREGDTQYF

SEQ ID NO: 418125 - protein, 17 aa, Homo sapiens
  CDR3 for alpha chain variable domain of TCR clone 209063 (TRAV8-6, TRAJ58)
CAVSSWVGETSGSRWTF

SEQ ID NO: 418126 - protein, 15 aa, Homo sapiens
  CDR3 for beta chain variable domain of TCR clone 209063 (TRBV6-3, TRBJ2-7)
CASSSPGTVFYEQYF

SEQ ID NO: 418127 - protein, 14 aa, Homo sapiens
  CDR3 for alpha chain variable domain of TCR clone 209064 (TRAV12-2, TRAJ17)
CAVLFKAAGNKLTF

SEQ ID NO: 418128 - protein, 14 aa, Homo sapiens
  CDR3 for beta chain variable domain of TCR clone 209064 (TRBV4-1, TRBJ2-2)
CASSQAVNTGELFV

SEQ ID NO: 418129 - protein, 13 aa, Homo sapiens
  CDR3 for alpha chain variable domain of TCR clone 209065 (TRAV36/DV7, TRAJ37)
CAVFSSNKGKLIF

SEQ ID NO: 418130 - protein, 15 aa, Homo sapiens
  CDR3 for beta chain variable domain of TCR clone 209065 (TRBV20-1, TRBJ1-1)
CSARDPRGEYTEAFF

SEQ ID NO: 418131 - protein, 16 aa, Homo sapiens
  CDR3 for alpha chain variable domain of TCR clone 209066 (TRAV3, TRAJ37)
CAVRPHGSGNTGKLIF

SEQ ID NO: 418132 - protein, 16 aa, Homo sapiens
  CDR3 for beta chain variable domain of TCR clone 209066 (TRBV19, TRBJ2-3)
CASSPGAASRTDTQYF

SEQ ID NO: 418133 - protein, 14 aa, Homo sapiens
  CDR3 for alpha chain variable domain of TCR clone 209067 (TRAV12-3, TRAJ6)
CAMSATGGRYIPTF

SEQ ID NO: 418134 - protein, 16 aa, Homo sapiens
  CDR3 for beta chain variable domain of TCR clone 209067 (TRBV12-5, TRBJ2-5)
CASGPRTSGNQETQYF

SEQ ID NO: 418135 - protein, 13 aa, Homo sapiens
  CDR3 for alpha chain variable domain of TCR clone 209068 (TRAV21, TRAJ27)
CAARPGNAGKSTF

SEQ ID NO: 418136 - protein, 17 aa, Homo sapiens
  CDR3 for beta chain variable domain of TCR clone 209068 (TRBV12-4, TRBJ2-2)
CQQFGSGHPRTDRGAVF

SEQ ID NO: 418137 - protein, 16 aa, Homo sapiens
  CDR3 for alpha chain variable domain of TCR clone 209069 (TRAV8-3, TRAJ8)
CAVPRDGNTGLQKLVF

SEQ ID NO: 418138 - protein, 15 aa, Homo sapiens
  CDR3 for beta chain variable domain of TCR clone 209069 (TRBV6-1, TRBJ2-6)
CASSSRPSGANVLTF

SEQ ID NO: 418139 - protein, 16 aa, Homo sapiens
  CDR3 for alpha chain variable domain of TCR clone 209070 (TRAV30, TRAJ24)
CGTEIVDADSWGKFQF

SEQ ID NO: 418140 - protein, 14 aa, Homo sapiens
  CDR3 for beta chain variable domain of TCR clone 209070 (TRBV5-1, TRBJ1-2)
CASSLEPVSYGYTF

SEQ ID NO: 418141 - protein, 12 aa, Homo sapiens
  CDR3 for alpha chain variable domain of TCR clone 209071 (TRAV21, TRAJ33)
CAVQDSDYQLIW

SEQ ID NO: 418142 - protein, 14 aa, Homo sapiens
  CDR3 for beta chain variable domain of TCR clone 209071 (TRBV7-2, TRBJ2-7)
CASRSQGAAYEQYF

SEQ ID NO: 418143 - protein, 13 aa, Homo sapiens
  CDR3 for alpha chain variable domain of TCR clone 209072 (TRAV1-2, TRAJ26)
CALRPNYGQNFVF

SEQ ID NO: 418144 - protein, 14 aa, Homo sapiens
  CDR3 for beta chain variable domain of TCR clone 209072 (TRBV4-1, TRBJ2-5)
CASSQDLALETQYF

SEQ ID NO: 418145 - protein, 15 aa, Homo sapiens
  CDR3 for alpha chain variable domain of TCR clone 209073 (TRAV20, TRAJ23)
CAVQAVRKQGGKLIF

SEQ ID NO: 418146 - protein, 18 aa, Homo sapiens
  CDR3 for beta chain variable domain of TCR clone 209073 (TRBV4-1, TRBJ1-6)
CASSQWDKKIIHPSTLGT

SEQ ID NO: 418147 - protein, 22 aa, Homo sapiens
  CDR3 for alpha chain variable domain of TCR clone 209074 (TRAV8-6, TRAJ36)
CAVSDWLGQTTSSLGLERDSPL

SEQ ID NO: 418148 - protein, 16 aa, Homo sapiens
  CDR3 for beta chain variable domain of TCR clone 209074 (TRBV20-1, TRBJ1-4)
CSAPGQGLLTNEKLFF

SEQ ID NO: 418149 - protein, 16 aa, Homo sapiens
  CDR3 for alpha chain variable domain of TCR clone 209075 (TRAV3, TRAJ37)
CAVRPHGSGNTGELIF

SEQ ID NO: 418150 - protein, 17 aa, Homo sapiens
  CDR3 for beta chain variable domain of TCR clone 209075 (TRBV5-1, TRBJ2-5)
CASSPVALGQNQETQYF

SEQ ID NO: 418151 - protein, 15 aa, Homo sapiens
  CDR3 for alpha chain variable domain of TCR clone 209076 (TRAV1-1, TRAJ24)
CALSGGTDSWGKFKF

SEQ ID NO: 418152 - protein, 16 aa, Homo sapiens
  CDR3 for beta chain variable domain of TCR clone 209076 (TRBV2, TRBJ2-7)
CASSEPWTGPSYEQYF

SEQ ID NO: 418153 - protein, 15 aa, Homo sapiens
  CDR3 for alpha chain variable domain of TCR clone 209077 (TRAV26-1, TRAJ29)
CIVRVEGSGNTPLVF

SEQ ID NO: 418154 - protein, 15 aa, Homo sapiens
  CDR3 for beta chain variable domain of TCR clone 209077 (TRBV12-4, TRBJ1-1)
CQQRDRVEANTEAFF

SEQ ID NO: 418155 - protein, 13 aa, Homo sapiens
  CDR3 for alpha chain variable domain of TCR clone 209078 (TRAV13-1, TRAJ4)
CAASIGGYNKLLF

SEQ ID NO: 418156 - protein, 16 aa, Homo sapiens
  CDR3 for beta chain variable domain of TCR clone 209078 (TRBV20-1, TRBJ2-1)
CSAPGLAGSYSDEQFF

SEQ ID NO: 418157 - protein, 12 aa, Homo sapiens
  CDR3 for alpha chain variable domain of TCR clone 209079 (TRAV16, TRAJ10)
CSRTGGGNKLTF

SEQ ID NO: 418158 - protein, 16 aa, Homo sapiens
  CDR3 for beta chain variable domain of TCR clone 209079 (TRBV7-6, TRBJ1-6)
CASSLSSRIGDSPLHF

SEQ ID NO: 418159 - protein, 15 aa, Homo sapiens
  CDR3 for alpha chain variable domain of TCR clone 209080 (TRAV13-1, TRAJ15)
CAASIEPQAGTALIF

SEQ ID NO: 418160 - protein, 13 aa, Homo sapiens
  CDR3 for beta chain variable domain of TCR clone 209080 (TRBV5-1, TRBJ2-7)
CASSATGGNEQYF

SEQ ID NO: 418161 - protein, 15 aa, Homo sapiens
  CDR3 for alpha chain variable domain of TCR clone 209081 (TRAV3, TRAJ29)
CAVRDLYSGNTPLVF

SEQ ID NO: 418162 - protein, 13 aa, Homo sapiens
  CDR3 for beta chain variable domain of TCR clone 209081 (TRBV7-6, TRBJ1-2)
CASSLVADYGYTF

SEQ ID NO: 418163 - protein, 14 aa, Homo sapiens
  CDR3 for alpha chain variable domain of TCR clone 209082 (TRAV3, TRAJ33)
CAVRDMGSNYQLIW

SEQ ID NO: 418164 - protein, 12 aa, Homo sapiens
  CDR3 for beta chain variable domain of TCR clone 209082 (TRBV11-2, TRBJ2-2)
CASSLGGGELFF

SEQ ID NO: 418165 - protein, 13 aa, Homo sapiens
  CDR3 for alpha chain variable domain of TCR clone 209083 (TRAV16, TRAJ9)
CALSSTGGFKTIF

SEQ ID NO: 418166 - protein, 14 aa, Homo sapiens
  CDR3 for beta chain variable domain of TCR clone 209083 (TRBV5-1, TRBJ2-1)
CASSLEGPVYEQFF

SEQ ID NO: 418167 - protein, 11 aa, Homo sapiens
  CDR3 for alpha chain variable domain of TCR clone 209084 (TRAV8-6, TRAJ42)
CAVRGRKPRQS

SEQ ID NO: 418168 - protein, 13 aa, Homo sapiens
  CDR3 for beta chain variable domain of TCR clone 209084 (TRBV7-3, TRBJ1-1)
CASSHDWGAEAFF

SEQ ID NO: 418169 - protein, 17 aa, Homo sapiens
  CDR3 for alpha chain variable domain of TCR clone 209085 (TRAV26-2, TRAJ42)
CILRDVGYGESQGNLIF

SEQ ID NO: 418170 - protein, 16 aa, Homo sapiens
  CDR3 for beta chain variable domain of TCR clone 209085 (TRBV12-4, TRBJ2-7)
CASSLIGGTGTYEQYF

SEQ ID NO: 418171 - protein, 14 aa, Homo sapiens
  CDR3 for alpha chain variable domain of TCR clone 209086 (TRAV12-2, TRAJ40)
CAVKIPSGTCKYIF

SEQ ID NO: 418172 - protein, 15 aa, Homo sapiens
  CDR3 for beta chain variable domain of TCR clone 209086 (TRBV12-4, TRBJ2-5)
CASSPPTGLQETQYF

SEQ ID NO: 418173 - protein, 16 aa, Homo sapiens
  CDR3 for alpha chain variable domain of TCR clone 209087 (TRAV35, TRAJ20)
CWADPSSGFNDYKLSF

SEQ ID NO: 418174 - protein, 16 aa, Homo sapiens
  CDR3 for beta chain variable domain of TCR clone 209087 (TRBV28, TRBJ2-1)
CASSSPEYPRDNEQFF

SEQ ID NO: 418175 - protein, 15 aa, Homo sapiens
  CDR3 for alpha chain variable domain of TCR clone 209088 (TRAV12-3, TRAJ47)
CAMSALVEYGNKLVF

SEQ ID NO: 418176 - protein, 20 aa, Homo sapiens
  CDR3 for beta chain variable domain of TCR clone 209088 (TRBV28, TRBJ2-1)
CASTPIGRSPGLAGGNEQFF

SEQ ID NO: 418177 - protein, 16 aa, Homo sapiens
  CDR3 for alpha chain variable domain of TCR clone 209089 (TRAV3, TRAJ37)
CAVRPHGSGNTGKLIS

SEQ ID NO: 418178 - protein, 11 aa, Homo sapiens
  CDR3 for beta chain variable domain of TCR clone 209089 (TRBV10-3, TRBJ2-7)
CAISEGLEQYF

SEQ ID NO: 418179 - protein, 15 aa, Homo sapiens
  CDR3 for alpha chain variable domain of TCR clone 209090 (TRAV8-6, TRAJ6)
CAVSFTSGGSYIPTF

SEQ ID NO: 418180 - protein, 16 aa, Homo sapiens
  CDR3 for beta chain variable domain of TCR clone 209090 (TRBV5-1, TRBJ2-1)
CASSGAGASDYNEQFF

SEQ ID NO: 418181 - protein, 13 aa, Homo sapiens
  CDR3 for alpha chain variable domain of TCR clone 209091 (TRAV3, TRAJ8)
CAGRHTGFQKLVF

SEQ ID NO: 418182 - protein, 14 aa, Homo sapiens
  CDR3 for beta chain variable domain of TCR clone 209091 (TRBV7-6, TRBJ2-1)
CASSVAGEINEQFF

SEQ ID NO: 418183 - protein, 14 aa, Homo sapiens
  CDR3 for alpha chain variable domain of TCR clone 209092 (TRAV12-2, TRAJ13)
CAVKKTGGYQKVTF

SEQ ID NO: 418184 - protein, 13 aa, Homo sapiens
  CDR3 for beta chain variable domain of TCR clone 209092 (TRBV19, TRBJ1-2)
CASSVPGQDGYIF

SEQ ID NO: 418185 - protein, 15 aa, Homo sapiens
  CDR3 for alpha chain variable domain of TCR clone 209093 (TRAV6, TRAJ32)
CALDMGGGATNKLIF

SEQ ID NO: 418186 - protein, 13 aa, Homo sapiens
  CDR3 for beta chain variable domain of TCR clone 209093 (TRBV19, TRBJ1-2)
CASSVPGQDGYTF

SEQ ID NO: 418187 - protein, 11 aa, Homo sapiens
  CDR3 for alpha chain variable domain of TCR clone 209094 (TRAV3, TRAJ21)
CAVGNFNKFYF

SEQ ID NO: 418188 - protein, 16 aa, Homo sapiens
  CDR3 for beta chain variable domain of TCR clone 209094 (TRBV19, TRBJ2-1)
CASSKAGQSYYNEQFF

SEQ ID NO: 418189 - protein, 11 aa, Homo sapiens
  CDR3 for alpha chain variable domain of TCR clone 209095 (TRAV21, TRAJ23)
CAPQRRGKLIF

SEQ ID NO: 418190 - protein, 14 aa, Homo sapiens
  CDR3 for beta chain variable domain of TCR clone 209095 (TRBV12-4, TRBJ1-1)
CASTRTGHDTEAFF

SEQ ID NO: 418191 - protein, 16 aa, Homo sapiens
  CDR3 for alpha chain variable domain of TCR clone 209096 (TRAV3, TRAJ37)
CAVRGKGSGNTGKLIF

SEQ ID NO: 418192 - protein, 14 aa, Homo sapiens
  CDR3 for beta chain variable domain of TCR clone 209096 (TRBV5-1, TRBJ2-7)
CASSWGQPSYEQYF

SEQ ID NO: 418193 - protein, 16 aa, Homo sapiens
  CDR3 for alpha chain variable domain of TCR clone 209097 (TRAV17, TRAJ52)
CATSNAVGTSYGKLTF

SEQ ID NO: 418194 - protein, 13 aa, Homo sapiens
  CDR3 for beta chain variable domain of TCR clone 209097 (TRBV27, TRBJ1-6)
CASSLVLVSPLHF

SEQ ID NO: 418195 - protein, 17 aa, Homo sapiens
  CDR3 for alpha chain variable domain of TCR clone 209098 (TRAV3, TRAJ6)
CAVRDGPRAGGSYIPKF

SEQ ID NO: 418196 - protein, 13 aa, Homo sapiens
  CDR3 for beta chain variable domain of TCR clone 209098 (TRBV12-4, TRBJ2-7)
CASSPTETYEQYF

SEQ ID NO: 418197 - protein, 17 aa, Homo sapiens
  CDR3 for alpha chain variable domain of TCR clone 209099 (TRAV8-6, TRAJ58)
CAVSSWVGKTSGSRLTF

SEQ ID NO: 418198 - protein, 14 aa, Homo sapiens
  CDR3 for beta chain variable domain of TCR clone 209099 (TRBV19, TRBJ2-1)
CASPTFVLSGEQFF

SEQ ID NO: 418199 - protein, 15 aa, Homo sapiens
  CDR3 for alpha chain variable domain of TCR clone 209100 (TRAV17, TRAJ48)
CATDETNFGNEKLTV

SEQ ID NO: 418200 - protein, 14 aa, Homo sapiens
  CDR3 for beta chain variable domain of TCR clone 209100 (TRBV10-3, TRBJ1-3)
CAIRGQRAGNTIYF

SEQ ID NO: 418201 - protein, 15 aa, Homo sapiens
  CDR3 for alpha chain variable domain of TCR clone 209101 (TRAV14/DV4, TRAJ12)
CAMREERDSSYKLIF

SEQ ID NO: 418202 - protein, 16 aa, Homo sapiens
  CDR3 for beta chain variable domain of TCR clone 209101 (TRBV11-2, TRBJ1-2)
CASSLDRGGNNYGYTV

SEQ ID NO: 418203 - protein, 12 aa, Homo sapiens
  CDR3 for alpha chain variable domain of TCR clone 209102 (TRAV16, TRAJ54)
CSNVQGAQKLVF

SEQ ID NO: 418204 - protein, 12 aa, Homo sapiens
  CDR3 for beta chain variable domain of TCR clone 209102 (TRBV18, TRBJ2-7)
CASSTAMGEQYF

SEQ ID NO: 418205 - protein, 13 aa, Homo sapiens
  CDR3 for alpha chain variable domain of TCR clone 209103 (TRAV12-2, TRAJ20)
CAVYPSNDYKLSF

SEQ ID NO: 418206 - protein, 16 aa, Homo sapiens
  CDR3 for beta chain variable domain of TCR clone 209103 (TRBV5-1, TRBJ2-2)
CASSSRTGGRTGELFF

SEQ ID NO: 418207 - protein, 11 aa, Homo sapiens
  CDR3 for alpha chain variable domain of TCR clone 209104 (TRAV23/DV6, TRAJ17)
CKWAAGTKLTF

SEQ ID NO: 418208 - protein, 14 aa, Homo sapiens
  CDR3 for beta chain variable domain of TCR clone 209104 (TRBV6-1, TRBJ2-7)
CASSGGSYLYEQYF

SEQ ID NO: 418209 - protein, 13 aa, Homo sapiens
  CDR3 for alpha chain variable domain of TCR clone 209105 (TRAV30, TRAJ24)
SGTVTDSWGKLQF

SEQ ID NO: 418210 - protein, 16 aa, Homo sapiens
  CDR3 for beta chain variable domain of TCR clone 209105 (TRBV7-3, TRBJ2-2)
CASSLKRETLSGELFF

SEQ ID NO: 418211 - protein, 15 aa, Homo sapiens
  CDR3 for alpha chain variable domain of TCR clone 209106 (TRAV13-1, TRAJ27)
CAARELNTNAGKSTF

SEQ ID NO: 418212 - protein, 17 aa, Homo sapiens
  CDR3 for beta chain variable domain of TCR clone 209106 (TRBV5-5, TRBJ1-2)
CASSLGSLDGQSEGYTF

SEQ ID NO: 418213 - protein, 14 aa, Homo sapiens
  CDR3 for alpha chain variable domain of TCR clone 209107 (TRAV12-2, TRAJ13)
CAVKKTGGYQKVTF

SEQ ID NO: 418214 - protein, 14 aa, Homo sapiens
  CDR3 for beta chain variable domain of TCR clone 209107 (TRBV12-5, TRBJ2-5)
CASGSRTRQETQYF

SEQ ID NO: 418215 - protein, 15 aa, Homo sapiens
  CDR3 for alpha chain variable domain of TCR clone 209108 (TRAV8-3, TRAJ45)
CASSYSGGGADGLTF

SEQ ID NO: 418216 - protein, 17 aa, Homo sapiens
  CDR3 for beta chain variable domain of TCR clone 209108 (TRBV7-8, TRBJ1-2)
CAGSLRPLQGHLYGYTF

SEQ ID NO: 418217 - protein, 16 aa, Homo sapiens
  CDR3 for alpha chain variable domain of TCR clone 209109 (TRAV20, TRAJ52)
CAVLRAGGTSYGKLTF

SEQ ID NO: 418218 - protein, 13 aa, Homo sapiens
  CDR3 for beta chain variable domain of TCR clone 209109 (TRBV20-1, TRBJ2-7)
CSASRSSSYEQYF

SEQ ID NO: 418219 - protein, 10 aa, Homo sapiens
  CDR3 for alpha chain variable domain of TCR clone 209110 (TRAV13-1, TRAJ52)
CAAKTPMLVV

SEQ ID NO: 418220 - protein, 13 aa, Homo sapiens
  CDR3 for beta chain variable domain of TCR clone 209110 (TRBV27, TRBJ2-1)
CASRTLGVGEQFF

SEQ ID NO: 418221 - protein, 15 aa, Homo sapiens
  CDR3 for alpha chain variable domain of TCR clone 209111 (TRAV23/DV6, TRAJ7)
CAASVGRSGNNRPAF

SEQ ID NO: 418222 - protein, 15 aa, Homo sapiens
  CDR3 for beta chain variable domain of TCR clone 209111 (TRBV12-4, TRBJ1-6)
CASSLLGGSNSPLHF

SEQ ID NO: 418223 - protein, 14 aa, Homo sapiens
  CDR3 for alpha chain variable domain of TCR clone 209112 (TRAV12-3, TRAJ10)
SHLPLTGVGNKLTF

SEQ ID NO: 418224 - protein, 11 aa, Homo sapiens
  CDR3 for beta chain variable domain of TCR clone 209112 (TRBV20-1, TRBJ2-5)
CSADRAETQYF

SEQ ID NO: 418225 - protein, 13 aa, Homo sapiens
  CDR3 for alpha chain variable domain of TCR clone 209113 (TRAV8-3, TRAJ40)
CAVDPSGTYKYIF

SEQ ID NO: 418226 - protein, 13 aa, Homo sapiens
  CDR3 for beta chain variable domain of TCR clone 209113 (TRBV7-9, TRBJ2-1)
CASSLGTVNEQFF

SEQ ID NO: 418227 - protein, 13 aa, Homo sapiens
  CDR3 for alpha chain variable domain of TCR clone 209114 (TRAV30, TRAJ24)
CGTVTASWGKLQF

SEQ ID NO: 418228 - protein, 15 aa, Homo sapiens
  CDR3 for beta chain variable domain of TCR clone 209114 (TRBV19, TRBJ1-1)
CASTSGQIQNTEAFF

SEQ ID NO: 418229 - protein, 15 aa, Homo sapiens
  CDR3 for alpha chain variable domain of TCR clone 209115 (TRAV38-1, TRAJ57)
CAFMGSQGGSETLVF

SEQ ID NO: 418230 - protein, 16 aa, Homo sapiens
  CDR3 for beta chain variable domain of TCR clone 209115 (TRBV10-3, TRBJ2-1)
CAIRGGGRGDYNEQFF

SEQ ID NO: 418231 - protein, 15 aa, Homo sapiens
  CDR3 for alpha chain variable domain of TCR clone 209116 (TRAV23/DV6, TRAJ18)
CAARYRGSTLGRLYF

SEQ ID NO: 418232 - protein, 13 aa, Homo sapiens
  CDR3 for beta chain variable domain of TCR clone 209116 (TRBV7-2, TRBJ2-7)
CAGSSPSGSEQYF

SEQ ID NO: 418233 - protein, 13 aa, Homo sapiens
  CDR3 for alpha chain variable domain of TCR clone 209117 (TRAV12-1, TRAJ9)
CVVLNTGGFKTIF

SEQ ID NO: 418234 - protein, 14 aa, Homo sapiens
  CDR3 for beta chain variable domain of TCR clone 209117 (TRBV7-2, TRBJ1-2)
CASSQTGSTYGYTF

SEQ ID NO: 418235 - protein, 16 aa, Homo sapiens
  CDR3 for alpha chain variable domain of TCR clone 209118 (TRAV13-2, TRAJ37)
CAENIRGSSNTGQLIL

SEQ ID NO: 418236 - protein, 15 aa, Homo sapiens
  CDR3 for beta chain variable domain of TCR clone 209118 (TRBV5-1, TRBJ2-7)
CASSPQGRPLDEQYF

SEQ ID NO: 418237 - protein, 16 aa, Homo sapiens
  CDR3 for alpha chain variable domain of TCR clone 209119 (TRAV3, TRAJ23)
CAVKIGIYNQGGKLIF

SEQ ID NO: 418238 - protein, 11 aa, Homo sapiens
  CDR3 for beta chain variable domain of TCR clone 209119 (TRBV25-1, TRBJ2-7)
CASSTSYEQYF

SEQ ID NO: 418239 - protein, 16 aa, Homo sapiens
  CDR3 for alpha chain variable domain of TCR clone 209120 (TRAV30, TRAJ24)
CGTEIVGADSWGKFQF

SEQ ID NO: 418240 - protein, 13 aa, Homo sapiens
  CDR3 for beta chain variable domain of TCR clone 209120 (TRBV7-9, TRBJ2-3)
CASSPGSTDTQYF

SEQ ID NO: 418241 - protein, 13 aa, Homo sapiens
  CDR3 for alpha chain variable domain of TCR clone 209121 (TRAV8-2, TRAJ49)
CVVTPNTGNQFYS

SEQ ID NO: 418242 - protein, 15 aa, Homo sapiens
  CDR3 for beta chain variable domain of TCR clone 209121 (TRBV11-2, TRBJ2-1)
CASSLTSGGYNEQFF

SEQ ID NO: 418243 - protein, 15 aa, Homo sapiens
  CDR3 for alpha chain variable domain of TCR clone 209122 (TRAV13-2, TRAJ45)
CAEHHSGGGADRLTF

SEQ ID NO: 418244 - protein, 15 aa, Homo sapiens
  CDR3 for beta chain variable domain of TCR clone 209122 (TRBV7-2, TRBJ2-7)
CASSLALGSAYEQYF

SEQ ID NO: 418245 - protein, 16 aa, Homo sapiens
  CDR3 for alpha chain variable domain of TCR clone 209123 (TRAV30, TRAJ42)
CGTSQNYGGSKGNLIF

SEQ ID NO: 418246 - protein, 14 aa, Homo sapiens
  CDR3 for beta chain variable domain of TCR clone 209123 (TRBV19, TRBJ1-5)
CASNSYGTHQPQHF

SEQ ID NO: 418247 - protein, 15 aa, Homo sapiens
  CDR3 for alpha chain variable domain of TCR clone 209124 (TRAV29/DV5, TRAJ29)
CAASERSSGNTPLVF

SEQ ID NO: 418248 - protein, 13 aa, Homo sapiens
  CDR3 for beta chain variable domain of TCR clone 209124 (TRBV18, TRBJ1-3)
CASSGTAGNTIYF

SEQ ID NO: 418249 - protein, 11 aa, Homo sapiens
  CDR3 for alpha chain variable domain of TCR clone 209125 (TRAV1-2, TRAJ20)
CAVANDYKLSF

SEQ ID NO: 418250 - protein, 14 aa, Homo sapiens
  CDR3 for beta chain variable domain of TCR clone 209125 (TRBV7-9, TRBJ1-1)
CASTPLQSHTEAFF

SEQ ID NO: 418251 - protein, 13 aa, Homo sapiens
  CDR3 for alpha chain variable domain of TCR clone 209126 (TRAV13-1, TRAJ39)
CSEYSNAGNMLTF

SEQ ID NO: 418252 - protein, 14 aa, Homo sapiens
  CDR3 for beta chain variable domain of TCR clone 209126 (TRBV23-1, TRBJ2-5)
CASSFLRSQETQYF

SEQ ID NO: 418253 - protein, 17 aa, Homo sapiens
  CDR3 for alpha chain variable domain of TCR clone 209127 (TRAV3, TRAJ28)
CAVREAYAGAVSYQLTF

SEQ ID NO: 418254 - protein, 18 aa, Homo sapiens
  CDR3 for beta chain variable domain of TCR clone 209127 (TRBV27, TRBJ2-1)
CASGNRAVGVGSKNEQFF

SEQ ID NO: 418255 - protein, 13 aa, Homo sapiens
  CDR3 for alpha chain variable domain of TCR clone 209128 (TRAV2, TRAJ40)
CAVFTSGTYKYIF

SEQ ID NO: 418256 - protein, 15 aa, Homo sapiens
  CDR3 for beta chain variable domain of TCR clone 209128 (TRBV18, TRBJ2-1)
CASSPPSASYNEQFF

SEQ ID NO: 418257 - protein, 16 aa, Homo sapiens
  CDR3 for alpha chain variable domain of TCR clone 209129 (TRAV1-2, TRAJ10)
CAVRGVLTGGGNKLTF

SEQ ID NO: 418258 - protein, 16 aa, Homo sapiens
  CDR3 for beta chain variable domain of TCR clone 209129 (TRBV14, TRBJ2-7)
CASSQGRGGYSYEQYF

SEQ ID NO: 418259 - protein, 14 aa, Homo sapiens
  CDR3 for alpha chain variable domain of TCR clone 209130 (TRAV1-1, TRAJ27)
CAVIYNTNAGKSTL

SEQ ID NO: 418260 - protein, 18 aa, Homo sapiens
  CDR3 for beta chain variable domain of TCR clone 209130 (TRBV7-3, TRBJ2-1)
CASSLTLASGRAMVSSSS

SEQ ID NO: 418261 - protein, 12 aa, Homo sapiens
  CDR3 for alpha chain variable domain of TCR clone 209131 (TRAV27, TRAJ35)
CAGADFGNVLHC

SEQ ID NO: 418262 - protein, 15 aa, Homo sapiens
  CDR3 for beta chain variable domain of TCR clone 209131 (TRBV4-1, TRBJ1-2)
CASSQGQGAAYGYTF

SEQ ID NO: 418263 - protein, 16 aa, Homo sapiens
  CDR3 for alpha chain variable domain of TCR clone 209132 (TRAV4, TRAJ22)
CLVGDLYSGSARQLTF

SEQ ID NO: 418264 - protein, 14 aa, Homo sapiens
  CDR3 for beta chain variable domain of TCR clone 209132 (TRBV28, TRBJ2-3)
CASSWRGRADTQYL

SEQ ID NO: 418265 - protein, 14 aa, Homo sapiens
  CDR3 for alpha chain variable domain of TCR clone 209133 (TRAV8-4, TRAJ15)
CAVTIREAGTALVF

SEQ ID NO: 418266 - protein, 13 aa, Homo sapiens
  CDR3 for beta chain variable domain of TCR clone 209133 (TRBV10-3, TRBJ2-7)
CAISEKGGYEQYF

SEQ ID NO: 418267 - protein, 12 aa, Homo sapiens
  CDR3 for alpha chain variable domain of TCR clone 209134 (TRAV27, TRAJ35)
CAGTDFGNVLHF

SEQ ID NO: 418268 - protein, 16 aa, Homo sapiens
  CDR3 for beta chain variable domain of TCR clone 209134 (TRBV6-1, TRBJ2-1)
CASILRQGSSYNEQFF

SEQ ID NO: 418269 - protein, 12 aa, Homo sapiens
  CDR3 for alpha chain variable domain of TCR clone 209135 (TRAV13-1, TRAJ21)
CAAKAGFNKFYF

SEQ ID NO: 418270 - protein, 16 aa, Homo sapiens
  CDR3 for beta chain variable domain of TCR clone 209135 (TRBV5-4, TRBJ2-3)
CASQQPGAGGADTQYF

SEQ ID NO: 418271 - protein, 14 aa, Homo sapiens
  CDR3 for alpha chain variable domain of TCR clone 209136 (TRAV1-2, TRAJ16)
CAVNRFSDGQKLLF

SEQ ID NO: 418272 - protein, 13 aa, Homo sapiens
  CDR3 for beta chain variable domain of TCR clone 209136 (TRBV7-2, TRBJ2-5)
CASSSWRQETQYF

SEQ ID NO: 418273 - protein, 16 aa, Homo sapiens
  CDR3 for alpha chain variable domain of TCR clone 209137 (TRAV12-3, TRAJ18)
CAMRGSRGSTLGRLYF

SEQ ID NO: 418274 - protein, 14 aa, Homo sapiens
  CDR3 for beta chain variable domain of TCR clone 209137 (TRBV7-2, TRBJ2-7)
CASRSQGAAYEQYF

SEQ ID NO: 418275 - protein, 11 aa, Homo sapiens
  CDR3 for alpha chain variable domain of TCR clone 209138 (TRAV23/DV6, TRAJ58)
CAARLLRGETS

SEQ ID NO: 418276 - protein, 15 aa, Homo sapiens
  CDR3 for beta chain variable domain of TCR clone 209138 (TRBV7-2, TRBJ2-7)
CASSTPGLTRGEQYF

SEQ ID NO: 418277 - protein, 15 aa, Homo sapiens
  CDR3 for alpha chain variable domain of TCR clone 209139 (TRAV14/DV4, TRAJ49)
CAMREGRDTGNQFYF

SEQ ID NO: 418278 - protein, 17 aa, Homo sapiens
  CDR3 for beta chain variable domain of TCR clone 209139 (TRBV12-4, TRBJ1-5)
WASSLRGDRGPNQPQHF

SEQ ID NO: 418279 - protein, 14 aa, Homo sapiens
  CDR3 for alpha chain variable domain of TCR clone 209140 (TRAV8-3, TRAJ4)
CAVGAAGGYNKLIF

SEQ ID NO: 418280 - protein, 13 aa, Homo sapiens
  CDR3 for beta chain variable domain of TCR clone 209140 (TRBV7-6, TRBJ1-2)
CASSLVADYGYTF

SEQ ID NO: 418281 - protein, 14 aa, Homo sapiens
  CDR3 for alpha chain variable domain of TCR clone 209141 (TRAV12-1, TRAJ3)
CVVNPGSSASKIIF

SEQ ID NO: 418282 - protein, 18 aa, Homo sapiens
  CDR3 for beta chain variable domain of TCR clone 209141 (TRBV4-2, TRBJ1-2)
CASNQDKVGHTVNYGYAF

SEQ ID NO: 418283 - protein, 16 aa, Homo sapiens
  CDR3 for alpha chain variable domain of TCR clone 209142 (TRAV23/DV6, TRAJ9)
CAASIGGNTGGFKTIF

SEQ ID NO: 418284 - protein, 14 aa, Homo sapiens
  CDR3 for beta chain variable domain of TCR clone 209142 (TRBV4-1, TRBJ2-2)
CASSQAVNTGELLF

SEQ ID NO: 418285 - protein, 14 aa, Homo sapiens
  CDR3 for alpha chain variable domain of TCR clone 209143 (TRAV17, TRAJ57)
CATDPQAGSEKLVF

SEQ ID NO: 418286 - protein, 18 aa, Homo sapiens
  CDR3 for beta chain variable domain of TCR clone 209143 (TRBV25-1, TRBJ2-1)
CASSESRAGGPGYNEQFF

SEQ ID NO: 418287 - protein, 11 aa, Homo sapiens
  CDR3 for alpha chain variable domain of TCR clone 209144 (TRAV3, TRAJ17)
CAEAAGNKLTF

SEQ ID NO: 418288 - protein, 15 aa, Homo sapiens
  CDR3 for beta chain variable domain of TCR clone 209144 (TRBV12-4, TRBJ2-7)
CASSFGSGGPYEQYF

SEQ ID NO: 418289 - protein, 14 aa, Homo sapiens
  CDR3 for alpha chain variable domain of TCR clone 209145 (TRAV2, TRAJ5)
CAVEDRAGRRALTF

SEQ ID NO: 418290 - protein, 17 aa, Homo sapiens
  CDR3 for beta chain variable domain of TCR clone 209145 (TRBV4-1, TRBJ1-4)
CASSQEGPRGVEEKLFF

SEQ ID NO: 418291 - protein, 11 aa, Homo sapiens
  CDR3 for alpha chain variable domain of TCR clone 209146 (TRAV2, TRAJ13)
CASGGYQKVTF

SEQ ID NO: 418292 - protein, 15 aa, Homo sapiens
  CDR3 for beta chain variable domain of TCR clone 209146 (TRBV4-2, TRBJ1-1)
CASSQQGAGDTEAFF

SEQ ID NO: 418293 - protein, 13 aa, Homo sapiens
  CDR3 for alpha chain variable domain of TCR clone 209147 (TRAV21, TRAJ27)
CAARPGNAVKSTF

SEQ ID NO: 418294 - protein, 15 aa, Homo sapiens
  CDR3 for beta chain variable domain of TCR clone 209147 (TRBV12-4, TRBJ2-5)
CASSPPTGLQETQYF

SEQ ID NO: 418295 - protein, 14 aa, Homo sapiens
  CDR3 for alpha chain variable domain of TCR clone 209148 (TRAV1-2, TRAJ16)
CAVNRFSDGQNLLF

SEQ ID NO: 418296 - protein, 12 aa, Homo sapiens
  CDR3 for beta chain variable domain of TCR clone 209148 (TRBV11-2, TRBJ2-2)
CASSLGGGELFF

SEQ ID NO: 418297 - protein, 14 aa, Homo sapiens
  CDR3 for alpha chain variable domain of TCR clone 209149 (TRAV38-1, TRAJ40)
CALRPTSGTYKYIF

SEQ ID NO: 418298 - protein, 16 aa, Homo sapiens
  CDR3 for beta chain variable domain of TCR clone 209149 (TRBV10-3, TRBJ2-6)
CAISTSGDLGANVLTF

SEQ ID NO: 418299 - protein, 12 aa, Homo sapiens
  CDR3 for alpha chain variable domain of TCR clone 209150 (TRAV1-2, TRAJ33)
CSALDINYQLIW

SEQ ID NO: 418300 - protein, 16 aa, Homo sapiens
  CDR3 for beta chain variable domain of TCR clone 209150 (TRBV6-4, TRBJ1-2)
CASSEAVGDPNYGYTF

SEQ ID NO: 418301 - protein, 13 aa, Homo sapiens
  CDR3 for alpha chain variable domain of TCR clone 209151 (TRAV21, TRAJ20)
CSVGLRVDTKLSF

SEQ ID NO: 418302 - protein, 13 aa, Homo sapiens
  CDR3 for beta chain variable domain of TCR clone 209151 (TRBV6-1, TRBJ1-1)
CASSRQGNTEAFF

SEQ ID NO: 418303 - protein, 18 aa, Homo sapiens
  CDR3 for alpha chain variable domain of TCR clone 209152 (TRAV17, TRAJ45)
CATSLALYSGGGADGLTF

SEQ ID NO: 418304 - protein, 13 aa, Homo sapiens
  CDR3 for beta chain variable domain of TCR clone 209152 (TRBV10-3, TRBJ2-7)
CASKLAVNYEQYL

SEQ ID NO: 418305 - protein, 16 aa, Homo sapiens
  CDR3 for alpha chain variable domain of TCR clone 209153 (TRAV30, TRAJ24)
CGTEIVDADSWGKFQF

SEQ ID NO: 418306 - protein, 16 aa, Homo sapiens
  CDR3 for beta chain variable domain of TCR clone 209153 (TRBV7-9, TRBJ2-6)
CASSLKGPLRANVLTF

SEQ ID NO: 418307 - protein, 15 aa, Homo sapiens
  CDR3 for alpha chain variable domain of TCR clone 209154 (TRAV13-2, TRAJ5)
CAENPHWTGRGALTF

SEQ ID NO: 418308 - protein, 14 aa, Homo sapiens
  CDR3 for beta chain variable domain of TCR clone 209154 (TRBV5-7, TRBJ2-7)
CASSFKGATGEQYF

SEQ ID NO: 418309 - protein, 16 aa, Homo sapiens
  CDR3 for alpha chain variable domain of TCR clone 209155 (TRAV12-3, TRAJ53)
CAMSPGSGGSNYKLTF

SEQ ID NO: 418310 - protein, 15 aa, Homo sapiens
  CDR3 for beta chain variable domain of TCR clone 209155 (TRBV7-8, TRBJ1-1)
CASSLGDSRNTEAFF

SEQ ID NO: 418311 - protein, 13 aa, Homo sapiens
  CDR3 for alpha chain variable domain of TCR clone 209156 (TRAV27, TRAJ6)
CAGGTRGSYVPTF

SEQ ID NO: 418312 - protein, 15 aa, Homo sapiens
  CDR3 for beta chain variable domain of TCR clone 209156 (TRBV11-2, TRBJ1-3)
CASSLSPLVRDTIYF

SEQ ID NO: 418313 - protein, 14 aa, Homo sapiens
  CDR3 for alpha chain variable domain of TCR clone 209157 (TRAV12-2, TRAJ17)
CAVPFKAAGNKLPF

SEQ ID NO: 418314 - protein, 17 aa, Homo sapiens
  CDR3 for beta chain variable domain of TCR clone 209157 (TRBV20-1, TRBJ2-2)
CSASGSGQGGLTGELFF

SEQ ID NO: 418315 - protein, 16 aa, Homo sapiens
  CDR3 for alpha chain variable domain of TCR clone 209158 (TRAV30, TRAJ24)
CGTEILDADSWGKFQF

SEQ ID NO: 418316 - protein, 19 aa, Homo sapiens
  CDR3 for beta chain variable domain of TCR clone 209158 (TRBV7-2, TRBJ2-3)
CASSFLSRNWGGGTDTQYF

SEQ ID NO: 418317 - protein, 12 aa, Homo sapiens
  CDR3 for alpha chain variable domain of TCR clone 209159 (TRAV12-2, TRAJ8)
CAVNTGFQKLVF

SEQ ID NO: 418318 - protein, 13 aa, Homo sapiens
  CDR3 for beta chain variable domain of TCR clone 209159 (TRBV11-2, TRBJ2-3)
CASSLRSDNTQYF

SEQ ID NO: 418319 - protein, 15 aa, Homo sapiens
  CDR3 for alpha chain variable domain of TCR clone 209160 (TRAV26-1, TRAJ23)
CIVRVAEYQGGKLIF

SEQ ID NO: 418320 - protein, 18 aa, Homo sapiens
  CDR3 for beta chain variable domain of TCR clone 209160 (TRBV28, TRBJ2-1)
CASSSTSGRANSYNEQFF

SEQ ID NO: 418321 - protein, 16 aa, Homo sapiens
  CDR3 for alpha chain variable domain of TCR clone 209161 (TRAV30, TRAJ48)
CGTEIKSNFGNEKLTF

SEQ ID NO: 418322 - protein, 17 aa, Homo sapiens
  CDR3 for beta chain variable domain of TCR clone 209161 (TRBV27, TRBJ2-1)
CANSSERGGQSADEQFF

SEQ ID NO: 418323 - protein, 16 aa, Homo sapiens
  CDR3 for alpha chain variable domain of TCR clone 209162 (TRAV3, TRAJ37)
CAVRGKGSGNTGKLIF

SEQ ID NO: 418324 - protein, 15 aa, Homo sapiens
  CDR3 for beta chain variable domain of TCR clone 209162 (TRBV2, TRBJ2-3)
CASSDFEKATDTQYF

SEQ ID NO: 418325 - protein, 16 aa, Homo sapiens
  CDR3 for alpha chain variable domain of TCR clone 209163 (TRAV12-3, TRAJ53)
CAMSSGSGGSNYKLTF

SEQ ID NO: 418326 - protein, 16 aa, Homo sapiens
  CDR3 for beta chain variable domain of TCR clone 209163 (TRBV7-2, TRBJ2-6)
CAILSGVSSGANVLTF

SEQ ID NO: 418327 - protein, 14 aa, Homo sapiens
  CDR3 for alpha chain variable domain of TCR clone 209164 (TRAV8-4, TRAJ54)
CAVSEVLGAQKLVF

SEQ ID NO: 418328 - protein, 15 aa, Homo sapiens
  CDR3 for beta chain variable domain of TCR clone 209164 (TRBV2, TRBJ2-1)
CATLPSGLPYNEQFF

SEQ ID NO: 418329 - protein, 14 aa, Homo sapiens
  CDR3 for alpha chain variable domain of TCR clone 209165 (TRAV35, TRAJ33)
CAGSSQDSNYQLIW

SEQ ID NO: 418330 - protein, 15 aa, Homo sapiens
  CDR3 for beta chain variable domain of TCR clone 209165 (TRBV20-1, TRBJ2-7)
CSDESETSGAYEQYF

SEQ ID NO: 418331 - protein, 14 aa, Homo sapiens
  CDR3 for alpha chain variable domain of TCR clone 209166 (TRAV12-1, TRAJ30)
CVVRGMNRGDKIIF

SEQ ID NO: 418332 - protein, 14 aa, Homo sapiens
  CDR3 for beta chain variable domain of TCR clone 209166 (TRBV7-2, TRBJ2-1)
CASSLTSGNRRQFF

SEQ ID NO: 418333 - protein, 14 aa, Homo sapiens
  CDR3 for alpha chain variable domain of TCR clone 209167 (TRAV30, TRAJ33)
CGTVAPRSNYQLIW

SEQ ID NO: 418334 - protein, 14 aa, Homo sapiens
  CDR3 for beta chain variable domain of TCR clone 209167 (TRBV19, TRBJ2-1)
CASPTFVWSGEQFF

SEQ ID NO: 418335 - protein, 13 aa, Homo sapiens
  CDR3 for alpha chain variable domain of TCR clone 209168 (TRAV12-2, TRAJ50)
CAVLVTSYDKAIF

SEQ ID NO: 418336 - protein, 20 aa, Homo sapiens
  CDR3 for beta chain variable domain of TCR clone 209168 (TRBV7-8, TRBJ2-2)
CASSHLFPGPTIHITGELFF

SEQ ID NO: 418337 - protein, 15 aa, Homo sapiens
  CDR3 for alpha chain variable domain of TCR clone 209169 (TRAV3, TRAJ29)
CDVRAPLSGNTPLVF

SEQ ID NO: 418338 - protein, 15 aa, Homo sapiens
  CDR3 for beta chain variable domain of TCR clone 209169 (TRBV28, TRBJ1-1)
CASRIKGGLNTEAFF

SEQ ID NO: 418339 - protein, 14 aa, Homo sapiens
  CDR3 for alpha chain variable domain of TCR clone 209170 (TRAV34, TRAJ22)
CGADTSGSARQLTF

SEQ ID NO: 418340 - protein, 16 aa, Homo sapiens
  CDR3 for beta chain variable domain of TCR clone 209170 (TRBV2, TRBJ2-3)
CQHRGAPRRWTDTQYY

SEQ ID NO: 418341 - protein, 14 aa, Homo sapiens
  CDR3 for alpha chain variable domain of TCR clone 209171 (TRAV1-2, TRAJ16)
CAVNRLSDGQKLLF

SEQ ID NO: 418342 - protein, 16 aa, Homo sapiens
  CDR3 for beta chain variable domain of TCR clone 209171 (TRBV9, TRBJ2-1)
CASSVGGGGNYNEQFF

SEQ ID NO: 418343 - protein, 14 aa, Homo sapiens
  CDR3 for alpha chain variable domain of TCR clone 209172 (TRAV12-2, TRAJ9)
CAVNALEGGFKTIF

SEQ ID NO: 418344 - protein, 15 aa, Homo sapiens
  CDR3 for beta chain variable domain of TCR clone 209172 (TRBV20-1, TRBJ2-7)
CSAESGTSGAYEQYF

SEQ ID NO: 418345 - protein, 15 aa, Homo sapiens
  CDR3 for alpha chain variable domain of TCR clone 209173 (TRAV3, TRAJ9)
CAVRARNTGSFKTIF

SEQ ID NO: 418346 - protein, 15 aa, Homo sapiens
  CDR3 for beta chain variable domain of TCR clone 209173 (TRBV27, TRBJ1-1)
CASSPYADPYTEAFF

SEQ ID NO: 418347 - protein, 11 aa, Homo sapiens
  CDR3 for alpha chain variable domain of TCR clone 209174 (TRAV21, TRAJ48)
CAVDGNEKLTF

SEQ ID NO: 418348 - protein, 18 aa, Homo sapiens
  CDR3 for beta chain variable domain of TCR clone 209174 (TRBV7-9, TRBJ2-7)
CASSLTTSGSRTWYEQYF

SEQ ID NO: 418349 - protein, 15 aa, Homo sapiens
  CDR3 for alpha chain variable domain of TCR clone 209175 (TRAV17, TRAJ22)
SATVAPSGSARQLTF

SEQ ID NO: 418350 - protein, 16 aa, Homo sapiens
  CDR3 for beta chain variable domain of TCR clone 209175 (TRBV10-3, TRBJ2-7)
CAISADFADRPYEQYF

SEQ ID NO: 418351 - protein, 15 aa, Homo sapiens
  CDR3 for alpha chain variable domain of TCR clone 209176 (TRAV12-3, TRAJ6)
CAMSPASGGSYILTF

SEQ ID NO: 418352 - protein, 16 aa, Homo sapiens
  CDR3 for beta chain variable domain of TCR clone 209176 (TRBV27, TRBJ2-2)
CASSSSGVSNTGELFF

SEQ ID NO: 418353 - protein, 13 aa, Homo sapiens
  CDR3 for alpha chain variable domain of TCR clone 209177 (TRAV21, TRAJ27)
CAARPGNAGKSTF

SEQ ID NO: 418354 - protein, 15 aa, Homo sapiens
  CDR3 for beta chain variable domain of TCR clone 209177 (TRBV2, TRBJ2-2)
CASSRETVGTGELFF

SEQ ID NO: 418355 - protein, 11 aa, Homo sapiens
  CDR3 for alpha chain variable domain of TCR clone 209178 (TRAV1-2, TRAJ34)
CAGYNTDKLIF

SEQ ID NO: 418356 - protein, 13 aa, Homo sapiens
  CDR3 for beta chain variable domain of TCR clone 209178 (TRBV11-2, TRBJ1-1)
CASSVGNGAEAFF

SEQ ID NO: 418357 - protein, 14 aa, Homo sapiens
  CDR3 for alpha chain variable domain of TCR clone 209179 (TRAV2, TRAJ22)
CAGGRGGSARQLTF

SEQ ID NO: 418358 - protein, 12 aa, Homo sapiens
  CDR3 for beta chain variable domain of TCR clone 209179 (TRBV19, TRBJ2-1)
CASSMQDTEQFF

SEQ ID NO: 418359 - protein, 14 aa, Homo sapiens
  CDR3 for alpha chain variable domain of TCR clone 209180 (TRAV21, TRAJ52)
CGRAGGTSYGKMTF

SEQ ID NO: 418360 - protein, 14 aa, Homo sapiens
  CDR3 for beta chain variable domain of TCR clone 209180 (TRBV19, TRBJ1-2)
CASSVLGYNYGYTF

SEQ ID NO: 418361 - protein, 12 aa, Homo sapiens
  CDR3 for alpha chain variable domain of TCR clone 209181 (TRAV16, TRAJ10)
CSRTGGGNKLTF

SEQ ID NO: 418362 - protein, 15 aa, Homo sapiens
  CDR3 for beta chain variable domain of TCR clone 209181 (TRBV6-3, TRBJ2-7)
CASSSAGTVFYEQYF

SEQ ID NO: 418363 - protein, 15 aa, Homo sapiens
  CDR3 for alpha chain variable domain of TCR clone 209182 (TRAV17, TRAJ48)
CATDETNFVNEKLTF

SEQ ID NO: 418364 - protein, 14 aa, Homo sapiens
  CDR3 for beta chain variable domain of TCR clone 209182 (TRBV10-3, TRBJ1-3)
CAIRGQRAGNTIYF

SEQ ID NO: 418365 - protein, 13 aa, Homo sapiens
  CDR3 for alpha chain variable domain of TCR clone 209183 (TRAV1-2, TRAJ9)
CAALNTGGFKTIF

SEQ ID NO: 418366 - protein, 14 aa, Homo sapiens
  CDR3 for beta chain variable domain of TCR clone 209183 (TRBV7-3, TRBJ2-1)
CASSSAGGTNEQFF

SEQ ID NO: 418367 - protein, 16 aa, Homo sapiens
  CDR3 for alpha chain variable domain of TCR clone 209184 (TRAV3, TRAJ28)
CAVLPRSGAGSYQLTF

SEQ ID NO: 418368 - protein, 13 aa, Homo sapiens
  CDR3 for beta chain variable domain of TCR clone 209184 (TRBV12-4, TRBJ2-5)
CASRLAVQETQYF

SEQ ID NO: 418369 - protein, 15 aa, Homo sapiens
  CDR3 for alpha chain variable domain of TCR clone 209185 (TRAV25, TRAJ23)
CALAPNYNQGGKLIF

SEQ ID NO: 418370 - protein, 16 aa, Homo sapiens
  CDR3 for beta chain variable domain of TCR clone 209185 (TRBV18, TRBJ1-1)
CASSPGVGGRGGEAFF

SEQ ID NO: 418371 - protein, 15 aa, Homo sapiens
  CDR3 for alpha chain variable domain of TCR clone 209186 (TRAV14/DV4, TRAJ12)
CAMREERDSSYKLIF

SEQ ID NO: 418372 - protein, 18 aa, Homo sapiens
  CDR3 for beta chain variable domain of TCR clone 209186 (TRBV12-4, TRBJ2-2)
CASSLVAGTRGRTGELFF

SEQ ID NO: 418373 - protein, 16 aa, Homo sapiens
  CDR3 for alpha chain variable domain of TCR clone 209187 (TRAV12-2, TRAJ10)
CAVNRILTGGGNKLTF

SEQ ID NO: 418374 - protein, 16 aa, Homo sapiens
  CDR3 for beta chain variable domain of TCR clone 209187 (TRBV7-3, TRBJ2-2)
CASSLKRGTLSGELFF

SEQ ID NO: 418375 - protein, 14 aa, Homo sapiens
  CDR3 for alpha chain variable domain of TCR clone 209188 (TRAV12-2, TRAJ40)
CAVKIPSGTYKYIF

SEQ ID NO: 418376 - protein, 12 aa, Homo sapiens
  CDR3 for beta chain variable domain of TCR clone 209188 (TRBV11-2, TRBJ2-2)
CASSLGGGELFY

SEQ ID NO: 418377 - protein, 16 aa, Homo sapiens
  CDR3 for alpha chain variable domain of TCR clone 209189 (TRAV12-3, TRAJ21)
CNFNKFYFGSGTKLNV

SEQ ID NO: 418378 - protein, 16 aa, Homo sapiens
  CDR3 for beta chain variable domain of TCR clone 209189 (TRBV20-1, TRBJ2-3)
CSARLPGQAFTDTQYF

SEQ ID NO: 418379 - protein, 10 aa, Homo sapiens
  CDR3 for alpha chain variable domain of TCR clone 209190 (TRAV8-4, TRAJ12)
WRDSSYKLIF

SEQ ID NO: 418380 - protein, 14 aa, Homo sapiens
  CDR3 for beta chain variable domain of TCR clone 209190 (TRBV15, TRBJ2-5)
CATSGDRGQETQYF

SEQ ID NO: 418381 - protein, 14 aa, Homo sapiens
  CDR3 for alpha chain variable domain of TCR clone 209191 (TRAV38-1, TRAJ45)
CAYYSGGGADGLTF

SEQ ID NO: 418382 - protein, 20 aa, Homo sapiens
  CDR3 for beta chain variable domain of TCR clone 209191 (TRBV28, TRBJ2-1)
CASTPIGRAPGLAGGNEQFF

SEQ ID NO: 418383 - protein, 14 aa, Homo sapiens
  CDR3 for alpha chain variable domain of TCR clone 209192 (TRAV26-1, TRAJ39)
CIVRGSRAGNMLTF

SEQ ID NO: 418384 - protein, 15 aa, Homo sapiens
  CDR3 for beta chain variable domain of TCR clone 209192 (TRBV7-9, TRBJ1-5)
CASSQGHQPNQHQNF

SEQ ID NO: 418385 - protein, 16 aa, Homo sapiens
  CDR3 for alpha chain variable domain of TCR clone 209193 (TRAV3, TRAJ37)
CAVRGKGSGNTGKLIF

SEQ ID NO: 418386 - protein, 15 aa, Homo sapiens
  CDR3 for beta chain variable domain of TCR clone 209193 (TRBV7-9, TRBJ2-2)
CASGPLDTFPEELFF

SEQ ID NO: 418387 - protein, 15 aa, Homo sapiens
  CDR3 for alpha chain variable domain of TCR clone 209194 (TRAV38-1, TRAJ45)
CAFMKGGGGADGLTF

SEQ ID NO: 418388 - protein, 13 aa, Homo sapiens
  CDR3 for beta chain variable domain of TCR clone 209194 (TRBV7-9, TRBJ1-2)
CASSLKQNYGYTL

SEQ ID NO: 418389 - protein, 14 aa, Homo sapiens
  CDR3 for alpha chain variable domain of TCR clone 209195 (TRAV6, TRAJ37)
CGGRSSGNTGKLIF

SEQ ID NO: 418390 - protein, 14 aa, Homo sapiens
  CDR3 for beta chain variable domain of TCR clone 209195 (TRBV3-1, TRBJ2-5)
CASSQGPDQETQYF

SEQ ID NO: 418391 - protein, 18 aa, Homo sapiens
  CDR3 for alpha chain variable domain of TCR clone 209196 (TRAV21, TRAJ52)
CAVRPSPAGGTSYGELTF

SEQ ID NO: 418392 - protein, 13 aa, Homo sapiens
  CDR3 for beta chain variable domain of TCR clone 209196 (TRBV19, TRBJ1-2)
CASSVPGQDGYTF

SEQ ID NO: 418393 - protein, 11 aa, Homo sapiens
  CDR3 for alpha chain variable domain of TCR clone 209197 (TRAV3, TRAJ21)
CAVGNFNKFYF

SEQ ID NO: 418394 - protein, 15 aa, Homo sapiens
  CDR3 for beta chain variable domain of TCR clone 209197 (TRBV11-2, TRBJ2-1)
CASSKNRGLIYEQFF

SEQ ID NO: 418395 - protein, 13 aa, Homo sapiens
  CDR3 for alpha chain variable domain of TCR clone 209198 (TRAV12-1, TRAJ31)
CVVIPNNNAILMF

SEQ ID NO: 418396 - protein, 15 aa, Homo sapiens
  CDR3 for beta chain variable domain of TCR clone 209198 (TRBV19, TRBJ1-2)
CASNLGGETPYGYTF

SEQ ID NO: 418397 - protein, 16 aa, Homo sapiens
  CDR3 for alpha chain variable domain of TCR clone 209199 (TRAV3, TRAJ37)
CAVRGKGSGNTGKLIF

SEQ ID NO: 418398 - protein, 15 aa, Homo sapiens
  CDR3 for beta chain variable domain of TCR clone 209199 (TRBV7-9, TRBJ2-2)
CASGPLDSFPGELFF

SEQ ID NO: 418399 - protein, 15 aa, Homo sapiens
  CDR3 for alpha chain variable domain of TCR clone 209200 (TRAV26-1, TRAJ29)
SIVRVEGSGNTPLVF

SEQ ID NO: 418400 - protein, 14 aa, Homo sapiens
  CDR3 for beta chain variable domain of TCR clone 209200 (TRBV25-1, TRBJ1-1)
CASTQLGGNTEAFF

SEQ ID NO: 418401 - protein, 13 aa, Homo sapiens
  CDR3 for alpha chain variable domain of TCR clone 209201 (TRAV8-3, TRAJ36)
CAVGATGANNLFF

SEQ ID NO: 418402 - protein, 15 aa, Homo sapiens
  CDR3 for beta chain variable domain of TCR clone 209201 (TRBV7-2, TRBJ1-2)
CGSSPRAGWNYGYTF

SEQ ID NO: 418403 - protein, 15 aa, Homo sapiens
  CDR3 for alpha chain variable domain of TCR clone 209202 (TRAV23/DV6, TRAJ18)
CAARYRGSTLGRLDL

SEQ ID NO: 418404 - protein, 14 aa, Homo sapiens
  CDR3 for beta chain variable domain of TCR clone 209202 (TRBV7-8, TRBJ2-7)
CASSPRDRVYEQYF

SEQ ID NO: 418405 - protein, 14 aa, Homo sapiens
  CDR3 for alpha chain variable domain of TCR clone 209203 (TRAV35, TRAJ54)
CAGSIIQGAQKLVF

SEQ ID NO: 418406 - protein, 15 aa, Homo sapiens
  CDR3 for beta chain variable domain of TCR clone 209203 (TRBV10-3, TRBJ2-3)
CAISVRVSATDTQYF

SEQ ID NO: 418407 - protein, 14 aa, Homo sapiens
  CDR3 for alpha chain variable domain of TCR clone 209204 (TRAV12-2, TRAJ17)
CAVLFKAAGNKSTF

SEQ ID NO: 418408 - protein, 17 aa, Homo sapiens
  CDR3 for beta chain variable domain of TCR clone 209204 (TRBV20-1, TRBJ2-2)
CSASGSGQGGLTGELFF

SEQ ID NO: 418409 - protein, 15 aa, Homo sapiens
  CDR3 for alpha chain variable domain of TCR clone 209205 (TRAV8-1, TRAJ23)
CAVNSHYNKGGKLIF

SEQ ID NO: 418410 - protein, 15 aa, Homo sapiens
  CDR3 for beta chain variable domain of TCR clone 209205 (TRBV11-2, TRBJ1-6)
CASTLRGTGNSPLHF

SEQ ID NO: 418411 - protein, 16 aa, Homo sapiens
  CDR3 for alpha chain variable domain of TCR clone 209206 (TRAV1-2, TRAJ10)
CAVRGVLTGGGNKLTF

SEQ ID NO: 418412 - protein, 14 aa, Homo sapiens
  CDR3 for beta chain variable domain of TCR clone 209206 (TRBV25-1, TRBJ1-1)
CASTRLGGNTEAFF

SEQ ID NO: 418413 - protein, 15 aa, Homo sapiens
  CDR3 for alpha chain variable domain of TCR clone 209207 (TRAV17, TRAJ52)
CDTEAGGTSYGKLTF

SEQ ID NO: 418414 - protein, 14 aa, Homo sapiens
  CDR3 for beta chain variable domain of TCR clone 209207 (TRBV28, TRBJ1-5)
CASSLGVLVKPQHF

SEQ ID NO: 418415 - protein, 15 aa, Homo sapiens
  CDR3 for alpha chain variable domain of TCR clone 209208 (TRAV30, TRAJ32)
CGTEILGGATNKLIF

SEQ ID NO: 418416 - protein, 13 aa, Homo sapiens
  CDR3 for beta chain variable domain of TCR clone 209208 (TRBV6-3, TRBJ2-7)
CANSFSGGYEQYF

SEQ ID NO: 418417 - protein, 13 aa, Homo sapiens
  CDR3 for alpha chain variable domain of TCR clone 209209 (TRAV36/DV7, TRAJ38)
CVANAGNNRKLIG

SEQ ID NO: 418418 - protein, 14 aa, Homo sapiens
  CDR3 for beta chain variable domain of TCR clone 209209 (TRBV19, TRBJ2-1)
CASPTFVLSGEQFF

SEQ ID NO: 418419 - protein, 14 aa, Homo sapiens
  CDR3 for alpha chain variable domain of TCR clone 209210 (TRAV8-2, TRAJ37)
CVVSLTGNTGKLIF

SEQ ID NO: 418420 - protein, 19 aa, Homo sapiens
  CDR3 for beta chain variable domain of TCR clone 209210 (TRBV19, TRBJ2-5)
CASSIGQVTDFFLGETQYF

SEQ ID NO: 418421 - protein, 16 aa, Homo sapiens
  CDR3 for alpha chain variable domain of TCR clone 209211 (TRAV30, TRAJ24)
CGTEIVDADSWGKFQF

SEQ ID NO: 418422 - protein, 14 aa, Homo sapiens
  CDR3 for beta chain variable domain of TCR clone 209211 (TRBV13, TRBJ2-1)
CASSPRRRYNEQFF

SEQ ID NO: 418423 - protein, 14 aa, Homo sapiens
  CDR3 for alpha chain variable domain of TCR clone 209212 (TRAV8-3, TRAJ4)
CAVGAAGGYNKLIF

SEQ ID NO: 418424 - protein, 15 aa, Homo sapiens
  CDR3 for beta chain variable domain of TCR clone 209212 (TRBV6-5, TRBJ2-1)
CASIYDAGAGNEQLF

SEQ ID NO: 418425 - protein, 14 aa, Homo sapiens
  CDR3 for alpha chain variable domain of TCR clone 209213 (TRAV8-2, TRAJ13)
CVVTASGGYQKVTF

SEQ ID NO: 418426 - protein, 15 aa, Homo sapiens
  CDR3 for beta chain variable domain of TCR clone 209213 (TRBV12-4, TRBJ1-5)
CQQPTGRGSNQPQHF

SEQ ID NO: 418427 - protein, 15 aa, Homo sapiens
  CDR3 for alpha chain variable domain of TCR clone 209214 (TRAV17, TRAJ28)
CATVYSGARSYQLTF

SEQ ID NO: 418428 - protein, 12 aa, Homo sapiens
  CDR3 for beta chain variable domain of TCR clone 209214 (TRBV7-2, TRBJ2-5)
CASSLAKETQYF

SEQ ID NO: 418429 - protein, 16 aa, Homo sapiens
  CDR3 for alpha chain variable domain of TCR clone 209215 (TRAV26-1, TRAJ53)
CIVRVAMGGNNYKLTF

SEQ ID NO: 418430 - protein, 12 aa, Homo sapiens
  CDR3 for beta chain variable domain of TCR clone 209215 (TRBV7-9, TRBJ1-5)
CASSPQGQPQHF

SEQ ID NO: 418431 - protein, 14 aa, Homo sapiens
  CDR3 for alpha chain variable domain of TCR clone 209216 (TRAV2, TRAJ37)
CAVDFTSNTGKLIF

SEQ ID NO: 418432 - protein, 15 aa, Homo sapiens
  CDR3 for beta chain variable domain of TCR clone 209216 (TRBV18, TRBJ2-6)
CASSPSYAGANVLTF

SEQ ID NO: 418433 - protein, 14 aa, Homo sapiens
  CDR3 for alpha chain variable domain of TCR clone 209217 (TRAV8-4, TRAJ9)
CAVRINTGVFKTIF

SEQ ID NO: 418434 - protein, 15 aa, Homo sapiens
  CDR3 for beta chain variable domain of TCR clone 209217 (TRBV10-2, TRBJ2-6)
CASSEHGTGANVLTF

SEQ ID NO: 418435 - protein, 13 aa, Homo sapiens
  CDR3 for alpha chain variable domain of TCR clone 209218 (TRAV1-1, TRAJ9)
CAAKNTGGFKTIF

SEQ ID NO: 418436 - protein, 14 aa, Homo sapiens
  CDR3 for beta chain variable domain of TCR clone 209218 (TRBV20-1, TRBJ2-1)
CSAQIGGSANVQFF

SEQ ID NO: 418437 - protein, 12 aa, Homo sapiens
  CDR3 for alpha chain variable domain of TCR clone 209219 (TRAV21, TRAJ29)
CAVTSGNTPLVF

SEQ ID NO: 418438 - protein, 18 aa, Homo sapiens
  CDR3 for beta chain variable domain of TCR clone 209219 (TRBV20-1, TRBJ2-6)
CSAETTPTHGSGANVLTF

SEQ ID NO: 418439 - protein, 11 aa, Homo sapiens
  CDR3 for alpha chain variable domain of TCR clone 209220 (TRAV1-2, TRAJ31)
CAWNNNARLMF

SEQ ID NO: 418440 - protein, 15 aa, Homo sapiens
  CDR3 for beta chain variable domain of TCR clone 209220 (TRBV28, TRBJ2-1)
CASSIIAGGRSEQFF

SEQ ID NO: 418441 - protein, 11 aa, Homo sapiens
  CDR3 for alpha chain variable domain of TCR clone 209221 (TRAV3, TRAJ21)
CAVGNFGKFYF

SEQ ID NO: 418442 - protein, 16 aa, Homo sapiens
  CDR3 for beta chain variable domain of TCR clone 209221 (TRBV19, TRBJ2-1)
CASSKAGPSSYNEQFF

SEQ ID NO: 418443 - protein, 12 aa, Homo sapiens
  CDR3 for alpha chain variable domain of TCR clone 209222 (TRAV8-3, TRAJ26)
CAGDNYVQNFVF

SEQ ID NO: 418444 - protein, 12 aa, Homo sapiens
  CDR3 for beta chain variable domain of TCR clone 209222 (TRBV11-2, TRBJ2-1)
CASSPGNNEQFF

SEQ ID NO: 418445 - protein, 14 aa, Homo sapiens
  CDR3 for alpha chain variable domain of TCR clone 209223 (TRAV1-2, TRAJ16)
CAVNRFSDGQKLLF

SEQ ID NO: 418446 - protein, 15 aa, Homo sapiens
  CDR3 for beta chain variable domain of TCR clone 209223 (TRBV27, TRBJ1-5)
CASSSSGTGNQPQHF

SEQ ID NO: 418447 - protein, 12 aa, Homo sapiens
  CDR3 for alpha chain variable domain of TCR clone 209224 (TRAV13-1, TRAJ17)
CSRWAAGNKLTF

SEQ ID NO: 418448 - protein, 14 aa, Homo sapiens
  CDR3 for beta chain variable domain of TCR clone 209224 (TRBV11-2, TRBJ1-3)
CASSLTQGRNTIYF

SEQ ID NO: 418449 - protein, 14 aa, Homo sapiens
  CDR3 for alpha chain variable domain of TCR clone 209225 (TRAV9-2, TRAJ39)
CALYIYNAGNMLTF

SEQ ID NO: 418450 - protein, 15 aa, Homo sapiens
  CDR3 for beta chain variable domain of TCR clone 209225 (TRBV20-1, TRBJ1-1)
CSASRGVTGNTEAFF

SEQ ID NO: 418451 - protein, 13 aa, Homo sapiens
  CDR3 for alpha chain variable domain of TCR clone 209226 (TRAV13-2, TRAJ48)
CAEMDFGNEKLTF

SEQ ID NO: 418452 - protein, 16 aa, Homo sapiens
  CDR3 for beta chain variable domain of TCR clone 209226 (TRBV11-2, TRBJ1-2)
CASSPSGREANYGYTF

SEQ ID NO: 418453 - protein, 13 aa, Homo sapiens
  CDR3 for alpha chain variable domain of TCR clone 209227 (TRAV12-3, TRAJ13)
CAMGTGGYQKVTF

SEQ ID NO: 418454 - protein, 14 aa, Homo sapiens
  CDR3 for beta chain variable domain of TCR clone 209227 (TRBV11-3, TRBJ1-6)
CASSFSGGDSPLHF

SEQ ID NO: 418455 - protein, 14 aa, Homo sapiens
  CDR3 for alpha chain variable domain of TCR clone 209228 (TRAV2, TRAJ8)
CAGRGNTGFQKLGF

SEQ ID NO: 418456 - protein, 14 aa, Homo sapiens
  CDR3 for beta chain variable domain of TCR clone 209228 (TRBV20-1, TRBJ1-1)
CSAQTRIGGTEAFF

SEQ ID NO: 418457 - protein, 15 aa, Homo sapiens
  CDR3 for alpha chain variable domain of TCR clone 209229 (TRAV27, TRAJ38)
CAARRNAGNNRKLSG

SEQ ID NO: 418458 - protein, 13 aa, Homo sapiens
  CDR3 for beta chain variable domain of TCR clone 209229 (TRBV7-9, TRBJ2-3)
CASSPGSTDTQYF

SEQ ID NO: 418459 - protein, 15 aa, Homo sapiens
  CDR3 for alpha chain variable domain of TCR clone 209230 (TRAV3, TRAJ9)
CAVRDSNTGCFKTIF

SEQ ID NO: 418460 - protein, 16 aa, Homo sapiens
  CDR3 for beta chain variable domain of TCR clone 209230 (TRBV15, TRBJ2-5)
CATSTTTGQGMETQYF

SEQ ID NO: 418461 - protein, 12 aa, Homo sapiens
  CDR3 for alpha chain variable domain of TCR clone 209231 (TRAV35, TRAJ49)
CAGWNTGNQFYF

SEQ ID NO: 418462 - protein, 16 aa, Homo sapiens
  CDR3 for beta chain variable domain of TCR clone 209231 (TRBV5-1, TRBJ2-3)
CASSLALAVVSDTQYF

SEQ ID NO: 418463 - protein, 12 aa, Homo sapiens
  CDR3 for alpha chain variable domain of TCR clone 209232 (TRAV12-3, TRAJ17)
YAMTLTGNKLTF

SEQ ID NO: 418464 - protein, 15 aa, Homo sapiens
  CDR3 for beta chain variable domain of TCR clone 209232 (TRBV20-1, TRBJ2-7)
CSARDRVAGMDEQYF

SEQ ID NO: 418465 - protein, 14 aa, Homo sapiens
  CDR3 for alpha chain variable domain of TCR clone 209233 (TRAV20, TRAJ42)
CAVQAGGSQGNLIF

SEQ ID NO: 418466 - protein, 14 aa, Homo sapiens
  CDR3 for beta chain variable domain of TCR clone 209233 (TRBV28, TRBJ1-2)
CVSRIQGANYGYTF

SEQ ID NO: 418467 - protein, 14 aa, Homo sapiens
  CDR3 for alpha chain variable domain of TCR clone 209234 (TRAV13-2, TRAJ17)
CAENSKATGNKLTF

SEQ ID NO: 418468 - protein, 11 aa, Homo sapiens
  CDR3 for beta chain variable domain of TCR clone 209234 (TRBV6-3, TRBJ2-3)
CATGQADTQYF

SEQ ID NO: 418469 - protein, 16 aa, Homo sapiens
  CDR3 for alpha chain variable domain of TCR clone 209235 (TRAV13-1, TRAJ40)
CAASIATTSGTYKYIS

SEQ ID NO: 418470 - protein, 14 aa, Homo sapiens
  CDR3 for beta chain variable domain of TCR clone 209235 (TRBV6-1, TRBJ1-3)
CASVQGGGGNTIYF

SEQ ID NO: 418471 - protein, 12 aa, Homo sapiens
  CDR3 for alpha chain variable domain of TCR clone 209236 (TRAV1-1, TRAJ8)
FAGGTGFQELVF

SEQ ID NO: 418472 - protein, 15 aa, Homo sapiens
  CDR3 for beta chain variable domain of TCR clone 209236 (TRBV7-9, TRBJ1-4)
CASSRTGGFNEKLFF

SEQ ID NO: 418473 - protein, 14 aa, Homo sapiens
  CDR3 for alpha chain variable domain of TCR clone 209237 (TRAV1-2, TRAJ8)
CAVREDTGFQKLVF

SEQ ID NO: 418474 - protein, 12 aa, Homo sapiens
  CDR3 for beta chain variable domain of TCR clone 209237 (TRBV11-3, TRBJ1-1)
CASSHRQDEAFF

SEQ ID NO: 418475 - protein, 13 aa, Homo sapiens
  CDR3 for alpha chain variable domain of TCR clone 209238 (TRAV12-3, TRAJ40)
CAMSDSGTYKYIF

SEQ ID NO: 418476 - protein, 13 aa, Homo sapiens
  CDR3 for beta chain variable domain of TCR clone 209238 (TRBV7-2, TRBJ1-5)
CQQHTGGSQPQHF

SEQ ID NO: 418477 - protein, 13 aa, Homo sapiens
  CDR3 for alpha chain variable domain of TCR clone 209239 (TRAV23/DV6, TRAJ47)
CAASMTRGNKLVF

SEQ ID NO: 418478 - protein, 16 aa, Homo sapiens
  CDR3 for beta chain variable domain of TCR clone 209239 (TRBV18, TRBJ1-4)
CASSPLVGDRAEKLFF

SEQ ID NO: 418479 - protein, 14 aa, Homo sapiens
  CDR3 for alpha chain variable domain of TCR clone 209240 (TRAV13-1, TRAJ44)
CAAKATGTASKLTF

SEQ ID NO: 418480 - protein, 12 aa, Homo sapiens
  CDR3 for beta chain variable domain of TCR clone 209240 (TRBV7-8, TRBJ2-7)
CTSSLGDREQYF

SEQ ID NO: 418481 - protein, 17 aa, Homo sapiens
  CDR3 for alpha chain variable domain of TCR clone 209241 (TRAV39, TRAJ32)
CAVDIKWLGGATNKLIF

SEQ ID NO: 418482 - protein, 11 aa, Homo sapiens
  CDR3 for beta chain variable domain of TCR clone 209241 (TRBV18, TRBJ1-2)
CASSPLNGYTF

SEQ ID NO: 418483 - protein, 11 aa, Homo sapiens
  CDR3 for alpha chain variable domain of TCR clone 209242 (TRAV3, TRAJ21)
CAVGNFNKFYF

SEQ ID NO: 418484 - protein, 14 aa, Homo sapiens
  CDR3 for beta chain variable domain of TCR clone 209242 (TRBV19, TRBJ2-1)
CAWSVGSGATEQFF

SEQ ID NO: 418485 - protein, 15 aa, Homo sapiens
  CDR3 for alpha chain variable domain of TCR clone 209243 (TRAV13-1, TRAJ44)
CAASRGGGTASKLTF

SEQ ID NO: 418486 - protein, 18 aa, Homo sapiens
  CDR3 for beta chain variable domain of TCR clone 209243 (TRBV7-8, TRBJ2-1)
CASSPYLGQRGSNNEQFF

SEQ ID NO: 418487 - protein, 12 aa, Homo sapiens
  CDR3 for alpha chain variable domain of TCR clone 209244 (TRAV8-3, TRAJ20)
CAVDFNDYKLSL

SEQ ID NO: 418488 - protein, 12 aa, Homo sapiens
  CDR3 for beta chain variable domain of TCR clone 209244 (TRBV12-4, TRBJ1-3)
CASSFSGNIMYF

SEQ ID NO: 418489 - protein, 15 aa, Homo sapiens
  CDR3 for alpha chain variable domain of TCR clone 209245 (TRAV38-2/DV8, TRAJ57)
CAYVRVFGKGTKLTV

SEQ ID NO: 418490 - protein, 18 aa, Homo sapiens
  CDR3 for beta chain variable domain of TCR clone 209245 (TRBV18, TRBJ1-1)
CASSLPGAPQGAGTEAFF

SEQ ID NO: 418491 - protein, 14 aa, Homo sapiens
  CDR3 for alpha chain variable domain of TCR clone 209246 (TRAV20, TRAJ4)
CAVRLGGGYNKLIF

SEQ ID NO: 418492 - protein, 21 aa, Homo sapiens
  CDR3 for beta chain variable domain of TCR clone 209246 (TRBV15, TRBJ2-1)
AWGTQPCTCVQPAEVDTARFF

SEQ ID NO: 418493 - protein, 13 aa, Homo sapiens
  CDR3 for alpha chain variable domain of TCR clone 209247 (TRAV12-3, TRAJ33)
CAMSVNSNYQLIW

SEQ ID NO: 418494 - protein, 13 aa, Homo sapiens
  CDR3 for beta chain variable domain of TCR clone 209247 (TRBV7-8, TRBJ2-2)
CASSLAVTGELFF

SEQ ID NO: 418495 - protein, 14 aa, Homo sapiens
  CDR3 for alpha chain variable domain of TCR clone 209248 (TRAV3, TRAJ30)
CAVRDIGRDDKIIF

SEQ ID NO: 418496 - protein, 13 aa, Homo sapiens
  CDR3 for beta chain variable domain of TCR clone 209248 (TRBV27, TRBJ2-7)
CASSLTTGYEQYF

SEQ ID NO: 418497 - protein, 13 aa, Homo sapiens
  CDR3 for alpha chain variable domain of TCR clone 209249 (TRAV13-1, TRAJ39)
CSKYSNAGNMLTF

SEQ ID NO: 418498 - protein, 12 aa, Homo sapiens
  CDR3 for beta chain variable domain of TCR clone 209249 (TRBV19, TRBJ1-5)
CASSIAQQPQHF

SEQ ID NO: 418499 - protein, 10 aa, Homo sapiens
  CDR3 for alpha chain variable domain of TCR clone 209250 (TRAV1-2, TRAJ20)
CALNDYKLSF

SEQ ID NO: 418500 - protein, 16 aa, Homo sapiens
  CDR3 for beta chain variable domain of TCR clone 209250 (TRBV20-1, TRBJ2-1)
CSARDLKQGMNNEQFF

SEQ ID NO: 418501 - protein, 14 aa, Homo sapiens
  CDR3 for alpha chain variable domain of TCR clone 209251 (TRAV1-2, TRAJ16)
CAVNRFSDGQKRLF

SEQ ID NO: 418502 - protein, 13 aa, Homo sapiens
  CDR3 for beta chain variable domain of TCR clone 209251 (TRBV20-1, TRBJ1-1)
CSARGGGNTEAFF

SEQ ID NO: 418503 - protein, 13 aa, Homo sapiens
  CDR3 for alpha chain variable domain of TCR clone 209252 (TRAV3, TRAJ27)
CAVRPLGAGKSTF

SEQ ID NO: 418504 - protein, 15 aa, Homo sapiens
  CDR3 for beta chain variable domain of TCR clone 209252 (TRBV20-1, TRBJ1-5)
CSATSDRGLGQPQHF

SEQ ID NO: 418505 - protein, 16 aa, Homo sapiens
  CDR3 for alpha chain variable domain of TCR clone 209253 (TRAV14/DV4, TRAJ12)
CAMREVLMESSYKLIF

SEQ ID NO: 418506 - protein, 14 aa, Homo sapiens
  CDR3 for beta chain variable domain of TCR clone 209253 (TRBV7-2, TRBJ2-5)
CASSFTQGQETQYF

SEQ ID NO: 418507 - protein, 16 aa, Homo sapiens
  CDR3 for alpha chain variable domain of TCR clone 209254 (TRAV12-3, TRAJ53)
CAMSEGSGGSNYKLTF

SEQ ID NO: 418508 - protein, 11 aa, Homo sapiens
  CDR3 for beta chain variable domain of TCR clone 209254 (TRBV29-1, TRBJ2-5)
CSVASGETQYF

SEQ ID NO: 418509 - protein, 12 aa, Homo sapiens
  CDR3 for alpha chain variable domain of TCR clone 209255 (TRAV27, TRAJ35)
CAGQTLGMCCIA

SEQ ID NO: 418510 - protein, 13 aa, Homo sapiens
  CDR3 for beta chain variable domain of TCR clone 209255 (TRBV7-3, TRBJ1-1)
CASSQDWGAEAFF

SEQ ID NO: 418511 - protein, 13 aa, Homo sapiens
  CDR3 for alpha chain variable domain of TCR clone 209256 (TRAV17, TRAJ5)
CATMDTVRRALTF

SEQ ID NO: 418512 - protein, 15 aa, Homo sapiens
  CDR3 for beta chain variable domain of TCR clone 209256 (TRBV20-1, TRBJ2-5)
CSATRTSGSLETQYF

SEQ ID NO: 418513 - protein, 15 aa, Homo sapiens
  CDR3 for alpha chain variable domain of TCR clone 209257 (TRAV8-4, TRAJ3)
CAVTGGNLVQQCFQA

SEQ ID NO: 418514 - protein, 16 aa, Homo sapiens
  CDR3 for beta chain variable domain of TCR clone 209257 (TRBV4-2, TRBJ1-1)
CASSQAGFGMNTEAFF

SEQ ID NO: 418515 - protein, 14 aa, Homo sapiens
  CDR3 for alpha chain variable domain of TCR clone 209258 (TRAV8-3, TRAJ4)
CAVGASGGYKKLIF

SEQ ID NO: 418516 - protein, 17 aa, Homo sapiens
  CDR3 for beta chain variable domain of TCR clone 209258 (TRBV11-2, TRBJ2-1)
CASSLYPPGVEYNEQFF

SEQ ID NO: 418517 - protein, 12 aa, Homo sapiens
  CDR3 for alpha chain variable domain of TCR clone 209259 (TRAV8-3, TRAJ20)
CAVGANDYELSF

SEQ ID NO: 418518 - protein, 16 aa, Homo sapiens
  CDR3 for beta chain variable domain of TCR clone 209259 (TRBV19, TRBJ2-2)
CASRAPGTGATGELFF

SEQ ID NO: 418519 - protein, 12 aa, Homo sapiens
  CDR3 for alpha chain variable domain of TCR clone 209260 (TRAV1-2, TRAJ26)
CAVRYYGQNFVF

SEQ ID NO: 418520 - protein, 13 aa, Homo sapiens
  CDR3 for beta chain variable domain of TCR clone 209260 (TRBV7-9, TRBJ2-7)
CASSFAGAYEQYF

SEQ ID NO: 418521 - protein, 13 aa, Homo sapiens
  CDR3 for alpha chain variable domain of TCR clone 209261 (TRAV12-2, TRAJ40)
CAVKRTGTYKYIF

SEQ ID NO: 418522 - protein, 15 aa, Homo sapiens
  CDR3 for beta chain variable domain of TCR clone 209261 (TRBV12-4, TRBJ1-2)
CASSPITGGGYGDTF

SEQ ID NO: 418523 - protein, 19 aa, Homo sapiens
  CDR3 for alpha chain variable domain of TCR clone 209262 (TRAV1-2, TRAJ26)
CLLPLCCERPDNYGQNFVF

SEQ ID NO: 418524 - protein, 17 aa, Homo sapiens
  CDR3 for beta chain variable domain of TCR clone 209262 (TRBV4-2, TRBJ2-1)
CASSQEIPSTPYNEQFF

SEQ ID NO: 418525 - protein, 10 aa, Homo sapiens
  CDR3 for alpha chain variable domain of TCR clone 209263 (TRAV13-1, TRAJ7)
LIGGNNRLAF

SEQ ID NO: 418526 - protein, 16 aa, Homo sapiens
  CDR3 for beta chain variable domain of TCR clone 209263 (TRBV4-1, TRBJ1-2)
CASSKAAGQVLYGYTF

SEQ ID NO: 418527 - protein, 17 aa, Homo sapiens
  CDR3 for alpha chain variable domain of TCR clone 209264 (TRAV3, TRAJ38)
CAVRDCLNAGNNSKLIW

SEQ ID NO: 418528 - protein, 13 aa, Homo sapiens
  CDR3 for beta chain variable domain of TCR clone 209264 (TRBV23-1, TRBJ1-4)
CASRGKFNEELFF

SEQ ID NO: 418529 - protein, 15 aa, Homo sapiens
  CDR3 for alpha chain variable domain of TCR clone 209265 (TRAV17, TRAJ17)
CATDASIIRRQQANF

SEQ ID NO: 418530 - protein, 12 aa, Homo sapiens
  CDR3 for beta chain variable domain of TCR clone 209265 (TRBV5-4, TRBJ2-5)
CASSSTGETQYF

SEQ ID NO: 418531 - protein, 14 aa, Homo sapiens
  CDR3 for alpha chain variable domain of TCR clone 209266 (TRAV12-2, TRAJ33)
CAVKRARSNYQLIW

SEQ ID NO: 418532 - protein, 15 aa, Homo sapiens
  CDR3 for beta chain variable domain of TCR clone 209266 (TRBV27, TRBJ2-1)
CASSNGGGSSNEQFF

SEQ ID NO: 418533 - protein, 13 aa, Homo sapiens
  CDR3 for alpha chain variable domain of TCR clone 209267 (TRAV26-1, TRAJ34)
CIVRPWITDKLIF

SEQ ID NO: 418534 - protein, 14 aa, Homo sapiens
  CDR3 for beta chain variable domain of TCR clone 209267 (TRBV12-4, TRBJ1-4)
CASSRQGANETLFF

SEQ ID NO: 418535 - protein, 16 aa, Homo sapiens
  CDR3 for alpha chain variable domain of TCR clone 209268 (TRAV3, TRAJ37)
CDVRGKGSGNTGKLIF

SEQ ID NO: 418536 - protein, 15 aa, Homo sapiens
  CDR3 for beta chain variable domain of TCR clone 209268 (TRBV9, TRBJ1-4)
CASSVGGSTNEKLFF

SEQ ID NO: 418537 - protein, 13 aa, Homo sapiens
  CDR3 for alpha chain variable domain of TCR clone 209269 (TRAV2, TRAJ40)
CAVVTSGTYKSIF

SEQ ID NO: 418538 - protein, 16 aa, Homo sapiens
  CDR3 for beta chain variable domain of TCR clone 209269 (TRBV7-9, TRBJ1-3)
CASSLGAGSSGNTIYF

SEQ ID NO: 418539 - protein, 13 aa, Homo sapiens
  CDR3 for alpha chain variable domain of TCR clone 209270 (TRAV39, TRAJ49)
CAVDRNTGNQFSF

SEQ ID NO: 418540 - protein, 12 aa, Homo sapiens
  CDR3 for beta chain variable domain of TCR clone 209270 (TRBV24-1, TRBJ1-1)
CATLYPDTEAFF

SEQ ID NO: 418541 - protein, 16 aa, Homo sapiens
  CDR3 for alpha chain variable domain of TCR clone 209271 (TRAV4, TRAJ8)
CLVGDSGNTGFQKLVF

SEQ ID NO: 418542 - protein, 15 aa, Homo sapiens
  CDR3 for beta chain variable domain of TCR clone 209271 (TRBV15, TRBJ1-2)
CATSRVRASGSGYTV

SEQ ID NO: 418543 - protein, 14 aa, Homo sapiens
  CDR3 for alpha chain variable domain of TCR clone 209272 (TRAV12-1, TRAJ33)
CVVDPEDSNYQLIW

SEQ ID NO: 418544 - protein, 11 aa, Homo sapiens
  CDR3 for beta chain variable domain of TCR clone 209272 (TRBV7-6, TRBJ2-1)
CASSNFGEQFF

SEQ ID NO: 418545 - protein, 14 aa, Homo sapiens
  CDR3 for alpha chain variable domain of TCR clone 209273 (TRAV12-2, TRAJ5)
CAVNRSTGRRALTF

SEQ ID NO: 418546 - protein, 16 aa, Homo sapiens
  CDR3 for beta chain variable domain of TCR clone 209273 (TRBV7-2, TRBJ2-5)
CASSPFPTGGEETQYF

SEQ ID NO: 418547 - protein, 14 aa, Homo sapiens
  CDR3 for alpha chain variable domain of TCR clone 209274 (TRAV9-2, TRAJ39)
CALYIYTAGNMLTF

SEQ ID NO: 418548 - protein, 14 aa, Homo sapiens
  CDR3 for beta chain variable domain of TCR clone 209274 (TRBV4-2, TRBJ1-2)
CASSQVGQNYGYTF

SEQ ID NO: 418549 - protein, 14 aa, Homo sapiens
  CDR3 for alpha chain variable domain of TCR clone 209275 (TRAV8-1, TRAJ22)
CAAPSSGSARQLTF

SEQ ID NO: 418550 - protein, 13 aa, Homo sapiens
  CDR3 for beta chain variable domain of TCR clone 209275 (TRBV10-3, TRBJ1-2)
CAISERDSYGYTF

SEQ ID NO: 418551 - protein, 14 aa, Homo sapiens
  CDR3 for alpha chain variable domain of TCR clone 209276 (TRAV1-1, TRAJ34)
CAVSPSYNTDELIF

SEQ ID NO: 418552 - protein, 15 aa, Homo sapiens
  CDR3 for beta chain variable domain of TCR clone 209276 (TRBV6-3, TRBJ2-7)
CASSSPGTVFYEQYF

SEQ ID NO: 418553 - protein, 15 aa, Homo sapiens
  CDR3 for alpha chain variable domain of TCR clone 209277 (TRAV26-1, TRAJ40)
CIVRAVPSGSYKYIF

SEQ ID NO: 418554 - protein, 15 aa, Homo sapiens
  CDR3 for beta chain variable domain of TCR clone 209277 (TRBV20-1, TRBJ2-7)
CSARDRVSGMDEQYF

SEQ ID NO: 418555 - protein, 16 aa, Homo sapiens
  CDR3 for alpha chain variable domain of TCR clone 209278 (TRAV3, TRAJ21)
CAVREIERGNFNKFYF

SEQ ID NO: 418556 - protein, 13 aa, Homo sapiens
  CDR3 for beta chain variable domain of TCR clone 209278 (TRBV10-3, TRBJ2-7)
CASKLAVNYEQYF

SEQ ID NO: 418557 - protein, 15 aa, Homo sapiens
  CDR3 for alpha chain variable domain of TCR clone 209279 (TRAV38-1, TRAJ28)
CAFWGVGAGSYKLTF

SEQ ID NO: 418558 - protein, 15 aa, Homo sapiens
  CDR3 for beta chain variable domain of TCR clone 209279 (TRBV12-4, TRBJ2-2)
CASSPQPGSTGELFF

SEQ ID NO: 418559 - protein, 17 aa, Homo sapiens
  CDR3 for alpha chain variable domain of TCR clone 209280 (TRAV26-1, TRAJ53)
CIVRVDDSGGSNYKLTF

SEQ ID NO: 418560 - protein, 17 aa, Homo sapiens
  CDR3 for beta chain variable domain of TCR clone 209280 (TRBV7-3, TRBJ2-5)
CASSLGSGRSGSETQYF

SEQ ID NO: 418561 - protein, 13 aa, Homo sapiens
  CDR3 for alpha chain variable domain of TCR clone 209281 (TRAV13-1, TRAJ39)
CSKYSNAGNMLTF

SEQ ID NO: 418562 - protein, 16 aa, Homo sapiens
  CDR3 for beta chain variable domain of TCR clone 209281 (TRBV20-1, TRBJ1-4)
CSVPGQGLLTNEKLLF

SEQ ID NO: 418563 - protein, 15 aa, Homo sapiens
  CDR3 for alpha chain variable domain of TCR clone 209282 (TRAV26-1, TRAJ29)
CIVRVEGSGNTPLVF

SEQ ID NO: 418564 - protein, 15 aa, Homo sapiens
  CDR3 for beta chain variable domain of TCR clone 209282 (TRBV7-9, TRBJ1-5)
CASGQGHQPNQHQHF

SEQ ID NO: 418565 - protein, 17 aa, Homo sapiens
  CDR3 for alpha chain variable domain of TCR clone 209283 (TRAV8-6, TRAJ58)
CAVSSWVGETSGSRLTF

SEQ ID NO: 418566 - protein, 13 aa, Homo sapiens
  CDR3 for beta chain variable domain of TCR clone 209283 (TRBV11-2, TRBJ1-3)
CASSLEPVNTIYF

SEQ ID NO: 418567 - protein, 13 aa, Homo sapiens
  CDR3 for alpha chain variable domain of TCR clone 209284 (TRAV38-2/DV8, TRAJ34)
CAYRNYNTDKLIF

SEQ ID NO: 418568 - protein, 17 aa, Homo sapiens
  CDR3 for beta chain variable domain of TCR clone 209284 (TRBV13, TRBJ2-3)
CASSLSRVAGGRNTHYF

SEQ ID NO: 418569 - protein, 14 aa, Homo sapiens
  CDR3 for alpha chain variable domain of TCR clone 209285 (TRAV12-2, TRAJ17)
CAVLFKAAVNERTF

SEQ ID NO: 418570 - protein, 16 aa, Homo sapiens
  CDR3 for beta chain variable domain of TCR clone 209285 (TRBV20-1, TRBJ1-4)
CSAPRQGLLTNEKLFF

SEQ ID NO: 418571 - protein, 11 aa, Homo sapiens
  CDR3 for alpha chain variable domain of TCR clone 209286 (TRAV2, TRAJ13)
CASGGYQKVTC

SEQ ID NO: 418572 - protein, 15 aa, Homo sapiens
  CDR3 for beta chain variable domain of TCR clone 209286 (TRBV6-1, TRBJ2-2)
CASSRLRGDTGELFF

SEQ ID NO: 418573 - protein, 13 aa, Homo sapiens
  CDR3 for alpha chain variable domain of TCR clone 209287 (TRAV2, TRAJ40)
CAVVTSGTYKYLF

SEQ ID NO: 418574 - protein, 14 aa, Homo sapiens
  CDR3 for beta chain variable domain of TCR clone 209287 (TRBV19, TRBJ2-1)
RASPTFVLSGEQFF

SEQ ID NO: 418575 - protein, 13 aa, Homo sapiens
  CDR3 for alpha chain variable domain of TCR clone 209288 (TRAV8-4, TRAJ20)
CAVSRSNDYKLSF

SEQ ID NO: 418576 - protein, 16 aa, Homo sapiens
  CDR3 for beta chain variable domain of TCR clone 209288 (TRBV20-1, TRBJ1-2)
CSASMGQGVANYGYTF

SEQ ID NO: 418577 - protein, 16 aa, Homo sapiens
  CDR3 for alpha chain variable domain of TCR clone 209289 (TRAV8-3, TRAJ13)
CAVGAYPSGGYQKVTF

SEQ ID NO: 418578 - protein, 16 aa, Homo sapiens
  CDR3 for beta chain variable domain of TCR clone 209289 (TRBV7-3, TRBJ2-1)
CASSLVSGSSNNEQFF

SEQ ID NO: 418579 - protein, 12 aa, Homo sapiens
  CDR3 for alpha chain variable domain of TCR clone 209290 (TRAV36/DV7, TRAJ41)
CAVAWDGYALNF

SEQ ID NO: 418580 - protein, 15 aa, Homo sapiens
  CDR3 for beta chain variable domain of TCR clone 209290 (TRBV4-2, TRBJ1-6)
CASSLKEGQESPLHF

SEQ ID NO: 418581 - protein, 16 aa, Homo sapiens
  CDR3 for alpha chain variable domain of TCR clone 209291 (TRAV35, TRAJ37)
CWALLRGSSNTGKLIF

SEQ ID NO: 418582 - protein, 13 aa, Homo sapiens
  CDR3 for beta chain variable domain of TCR clone 209291 (TRBV2, TRBJ1-2)
CASSVRGNYGYTF

SEQ ID NO: 418583 - protein, 13 aa, Homo sapiens
  CDR3 for alpha chain variable domain of TCR clone 209292 (TRAV17, TRAJ5)
CALRGTGRRALTF

SEQ ID NO: 418584 - protein, 16 aa, Homo sapiens
  CDR3 for beta chain variable domain of TCR clone 209292 (TRBV20-1, TRBJ1-4)
CSAPGQGLLTNEKLFF

SEQ ID NO: 418585 - protein, 14 aa, Homo sapiens
  CDR3 for alpha chain variable domain of TCR clone 209293 (TRAV12-3, TRAJ33)
CAMSVPGSNYQLIW

SEQ ID NO: 418586 - protein, 13 aa, Homo sapiens
  CDR3 for beta chain variable domain of TCR clone 209293 (TRBV7-3, TRBJ2-5)
CASSFRGGETQYF

SEQ ID NO: 418587 - protein, 12 aa, Homo sapiens
  CDR3 for alpha chain variable domain of TCR clone 209294 (TRAV8-3, TRAJ20)
CAVDFNDYKLSF

SEQ ID NO: 418588 - protein, 11 aa, Homo sapiens
  CDR3 for beta chain variable domain of TCR clone 209294 (TRBV11-2, TRBJ2-2)
CASSLPEELFF

SEQ ID NO: 418589 - protein, 12 aa, Homo sapiens
  CDR3 for alpha chain variable domain of TCR clone 209295 (TRAV12-3, TRAJ17)
CAMTLTGNKLTF

SEQ ID NO: 418590 - protein, 16 aa, Homo sapiens
  CDR3 for beta chain variable domain of TCR clone 209295 (TRBV2, TRBJ2-1)
CASRRPAGGKYNEQFF

SEQ ID NO: 418591 - protein, 15 aa, Homo sapiens
  CDR3 for alpha chain variable domain of TCR clone 209296 (TRAV12-3, TRAJ6)
CAMSATSGGSYIPTF

SEQ ID NO: 418592 - protein, 16 aa, Homo sapiens
  CDR3 for beta chain variable domain of TCR clone 209296 (TRBV7-3, TRBJ2-1)
CASSLEGYRSYNEQFF

SEQ ID NO: 418593 - protein, 14 aa, Homo sapiens
  CDR3 for alpha chain variable domain of TCR clone 209297 (TRAV17, TRAJ35)
CATDRPGFGNVLHC

SEQ ID NO: 418594 - protein, 13 aa, Homo sapiens
  CDR3 for beta chain variable domain of TCR clone 209297 (TRBV7-8, TRBJ2-3)
CQQLRGSTDTQYF

SEQ ID NO: 418595 - protein, 12 aa, Homo sapiens
  CDR3 for alpha chain variable domain of TCR clone 209298 (TRAV12-3, TRAJ43)
CAISSNNNDMRF

SEQ ID NO: 418596 - protein, 15 aa, Homo sapiens
  CDR3 for beta chain variable domain of TCR clone 209298 (TRBV27, TRBJ1-4)
CASSPRHATNEKLFC

SEQ ID NO: 418597 - protein, 14 aa, Homo sapiens
  CDR3 for alpha chain variable domain of TCR clone 209299 (TRAV26-1, TRAJ49)
CIVRLTNTGNQVYF

SEQ ID NO: 418598 - protein, 13 aa, Homo sapiens
  CDR3 for beta chain variable domain of TCR clone 209299 (TRBV4-1, TRBJ2-7)
CASSQGQAYKQYF

SEQ ID NO: 418599 - protein, 14 aa, Homo sapiens
  CDR3 for alpha chain variable domain of TCR clone 209300 (TRAV1-1, TRAJ30)
CAVRSLNRYDKIIF

SEQ ID NO: 418600 - protein, 14 aa, Homo sapiens
  CDR3 for beta chain variable domain of TCR clone 209300 (TRBV7-8, TRBJ2-3)
CASSLEAGTDTQYF

SEQ ID NO: 418601 - protein, 14 aa, Homo sapiens
  CDR3 for alpha chain variable domain of TCR clone 209301 (TRAV26-1, TRAJ21)
CIVRPPYNFNKFYF

SEQ ID NO: 418602 - protein, 11 aa, Homo sapiens
  CDR3 for beta chain variable domain of TCR clone 209301 (TRBV7-2, TRBJ2-7)
CASSLGWEQYF

SEQ ID NO: 418603 - protein, 17 aa, Homo sapiens
  CDR3 for alpha chain variable domain of TCR clone 209302 (TRAV19, TRAJ24)
CALSEAGPTDSWGKLQF

SEQ ID NO: 418604 - protein, 15 aa, Homo sapiens
  CDR3 for beta chain variable domain of TCR clone 209302 (TRBV12-4, TRBJ2-5)
CASSPPTGLQETQYF

SEQ ID NO: 418605 - protein, 14 aa, Homo sapiens
  CDR3 for alpha chain variable domain of TCR clone 209303 (TRAV2, TRAJ37)
CAVDFTSNTGKLIF

SEQ ID NO: 418606 - protein, 14 aa, Homo sapiens
  CDR3 for beta chain variable domain of TCR clone 209303 (TRBV5-1, TRBJ1-2)
CASSLEPVNYGYTF

SEQ ID NO: 418607 - protein, 15 aa, Homo sapiens
  CDR3 for alpha chain variable domain of TCR clone 209304 (TRAV17, TRAJ56)
CATEPFTGANSKLTF

SEQ ID NO: 418608 - protein, 15 aa, Homo sapiens
  CDR3 for beta chain variable domain of TCR clone 209304 (TRBV7-9, TRBJ2-2)
CASGPLDTFPGELFF

SEQ ID NO: 418609 - protein, 17 aa, Homo sapiens
  CDR3 for alpha chain variable domain of TCR clone 209305 (TRAV26-1, TRAJ27)
CIVITPWINTNAGKSTF

SEQ ID NO: 418610 - protein, 16 aa, Homo sapiens
  CDR3 for beta chain variable domain of TCR clone 209305 (TRBV7-9, TRBJ2-1)
CASSLDPGLAIDEQFF

SEQ ID NO: 418611 - protein, 13 aa, Homo sapiens
  CDR3 for alpha chain variable domain of TCR clone 209306 (TRAV26-1, TRAJ30)
CIVRVESNDKIIF

SEQ ID NO: 418612 - protein, 15 aa, Homo sapiens
  CDR3 for beta chain variable domain of TCR clone 209306 (TRBV6-1, TRBJ2-3)
CASSERGGITDTQYL

SEQ ID NO: 418613 - protein, 16 aa, Homo sapiens
  CDR3 for alpha chain variable domain of TCR clone 209307 (TRAV12-3, TRAJ53)
CAMSPGSGGSNYKLTF

SEQ ID NO: 418614 - protein, 16 aa, Homo sapiens
  CDR3 for beta chain variable domain of TCR clone 209307 (TRBV10-2, TRBJ1-5)
CASSVRDRASNQPQHF

SEQ ID NO: 418615 - protein, 14 aa, Homo sapiens
  CDR3 for alpha chain variable domain of TCR clone 209308 (TRAV23/DV6, TRAJ39)
CAASIGNAGNMLTF

SEQ ID NO: 418616 - protein, 16 aa, Homo sapiens
  CDR3 for beta chain variable domain of TCR clone 209308 (TRBV6-5, TRBJ2-1)
CASSETLAGHYNEQFF

SEQ ID NO: 418617 - protein, 13 aa, Homo sapiens
  CDR3 for alpha chain variable domain of TCR clone 209309 (TRAV3, TRAJ21)
CAVREPDFNKFYF

SEQ ID NO: 418618 - protein, 16 aa, Homo sapiens
  CDR3 for beta chain variable domain of TCR clone 209309 (TRBV5-1, TRBJ2-2)
CASSPRTGEHTGELFF

SEQ ID NO: 418619 - protein, 15 aa, Homo sapiens
  CDR3 for alpha chain variable domain of TCR clone 209310 (TRAV4, TRAJ39)
CLVCPNYNAGNMLTF

SEQ ID NO: 418620 - protein, 13 aa, Homo sapiens
  CDR3 for beta chain variable domain of TCR clone 209310 (TRBV11-2, TRBJ2-5)
CASSSTGEETQYF

SEQ ID NO: 418621 - protein, 15 aa, Homo sapiens
  CDR3 for alpha chain variable domain of TCR clone 209311 (TRAV26-1, TRAJ29)
CIVRVEGSGNTPLVF

SEQ ID NO: 418622 - protein, 14 aa, Homo sapiens
  CDR3 for beta chain variable domain of TCR clone 209311 (TRBV15, TRBJ2-7)
CATSRVARGYEQYF

SEQ ID NO: 418623 - protein, 15 aa, Homo sapiens
  CDR3 for alpha chain variable domain of TCR clone 209312 (TRAV38-2/DV8, TRAJ57)
CASARAQGGSEKLGF

SEQ ID NO: 418624 - protein, 17 aa, Homo sapiens
  CDR3 for beta chain variable domain of TCR clone 209312 (TRBV18, TRBJ1-5)
CASSPTMGQGTNQPQHF

SEQ ID NO: 418625 - protein, 13 aa, Homo sapiens
  CDR3 for alpha chain variable domain of TCR clone 209313 (TRAV2, TRAJ40)
CAVVTSGTYKYIF

SEQ ID NO: 418626 - protein, 19 aa, Homo sapiens
  CDR3 for beta chain variable domain of TCR clone 209313 (TRBV19, TRBJ2-5)
CASSIGQVTDFFLGETQYL

SEQ ID NO: 418627 - protein, 14 aa, Homo sapiens
  CDR3 for alpha chain variable domain of TCR clone 209314 (TRAV1-2, TRAJ8)
CAVREDTGFQKLVF

SEQ ID NO: 418628 - protein, 13 aa, Homo sapiens
  CDR3 for beta chain variable domain of TCR clone 209314 (TRBV5-1, TRBJ2-1)
CASRPFGYNEQFF

SEQ ID NO: 418629 - protein, 14 aa, Homo sapiens
  CDR3 for alpha chain variable domain of TCR clone 209315 (TRAV2, TRAJ9)
CAVEDRSGGFQTIF

SEQ ID NO: 418630 - protein, 12 aa, Homo sapiens
  CDR3 for beta chain variable domain of TCR clone 209315 (TRBV12-5, TRBJ2-5)
CASGQGVETQYF

SEQ ID NO: 418631 - protein, 14 aa, Homo sapiens
  CDR3 for alpha chain variable domain of TCR clone 209316 (TRAV1-2, TRAJ12)
CAVSGTDSSYKLIF

SEQ ID NO: 418632 - protein, 15 aa, Homo sapiens
  CDR3 for beta chain variable domain of TCR clone 209316 (TRBV2, TRBJ2-4)
CASSGTNLAKNVQYF

SEQ ID NO: 418633 - protein, 14 aa, Homo sapiens
  CDR3 for alpha chain variable domain of TCR clone 209317 (TRAV1-1, TRAJ27)
CAVIYNTNAVKSTF

SEQ ID NO: 418634 - protein, 14 aa, Homo sapiens
  CDR3 for beta chain variable domain of TCR clone 209317 (TRBV6-5, TRBJ1-2)
CASSYDGTGGGYTF

SEQ ID NO: 418635 - protein, 14 aa, Homo sapiens
  CDR3 for alpha chain variable domain of TCR clone 209318 (TRAV2, TRAJ9)
CAVEDRSGGFKTIF

SEQ ID NO: 418636 - protein, 13 aa, Homo sapiens
  CDR3 for beta chain variable domain of TCR clone 209318 (TRBV7-7, TRBJ2-3)
CASSLSRADTQYF

SEQ ID NO: 418637 - protein, 15 aa, Homo sapiens
  CDR3 for alpha chain variable domain of TCR clone 209319 (TRAV25, TRAJ52)
CAGTSGGTSYGKLTF

SEQ ID NO: 418638 - protein, 16 aa, Homo sapiens
  CDR3 for beta chain variable domain of TCR clone 209319 (TRBV15, TRBJ1-2)
CATSRCPRTGGGGYTF

SEQ ID NO: 418639 - protein, 10 aa, Homo sapiens
  CDR3 for alpha chain variable domain of TCR clone 209320 (TRAV1-2, TRAJ31)
CAFFDARLMF

SEQ ID NO: 418640 - protein, 15 aa, Homo sapiens
  CDR3 for beta chain variable domain of TCR clone 209320 (TRBV4-1, TRBJ1-4)
CASSNTGGTNEKLFF

SEQ ID NO: 418641 - protein, 13 aa, Homo sapiens
  CDR3 for alpha chain variable domain of TCR clone 209321 (TRAV12-1, TRAJ37)
CVVSSGNTGKLIF

SEQ ID NO: 418642 - protein, 13 aa, Homo sapiens
  CDR3 for beta chain variable domain of TCR clone 209321 (TRBV4-2, TRBJ1-1)
CASSQAGNTEAFF

SEQ ID NO: 418643 - protein, 12 aa, Homo sapiens
  CDR3 for alpha chain variable domain of TCR clone 209322 (TRAV13-2, TRAJ23)
CAERHRGGKLIS

SEQ ID NO: 418644 - protein, 13 aa, Homo sapiens
  CDR3 for beta chain variable domain of TCR clone 209322 (TRBV7-9, TRBJ2-3)
CASSPGSTDTQYF

SEQ ID NO: 418645 - protein, 17 aa, Homo sapiens
  CDR3 for alpha chain variable domain of TCR clone 209323 (TRAV14/DV4, TRAJ4)
CAMREASGRGGYNKLIF

SEQ ID NO: 418646 - protein, 13 aa, Homo sapiens
  CDR3 for beta chain variable domain of TCR clone 209323 (TRBV7-2, TRBJ1-4)
CASSLAGLEKLFF

SEQ ID NO: 418647 - protein, 14 aa, Homo sapiens
  CDR3 for alpha chain variable domain of TCR clone 209324 (TRAV9-2, TRAJ39)
CALYIYNAGNMLTF

SEQ ID NO: 418648 - protein, 15 aa, Homo sapiens
  CDR3 for beta chain variable domain of TCR clone 209324 (TRBV7-2, TRBJ2-2)
CASRRPGQNAGELFF

SEQ ID NO: 418649 - protein, 13 aa, Homo sapiens
  CDR3 for alpha chain variable domain of TCR clone 209325 (TRAV9-2, TRAJ53)
CALSGGSNYKLTF

SEQ ID NO: 418650 - protein, 16 aa, Homo sapiens
  CDR3 for beta chain variable domain of TCR clone 209325 (TRBV20-1, TRBJ2-1)
CSALTWTSGSYNEQFF

SEQ ID NO: 418651 - protein, 13 aa, Homo sapiens
  CDR3 for alpha chain variable domain of TCR clone 209326 (TRAV8-3, TRAJ28)
CAVGAVGSYQLTF

SEQ ID NO: 418652 - protein, 17 aa, Homo sapiens
  CDR3 for beta chain variable domain of TCR clone 209326 (TRBV11-2, TRBJ2-1)
CSSSLYPPGVEYNEQFF

SEQ ID NO: 418653 - protein, 14 aa, Homo sapiens
  CDR3 for alpha chain variable domain of TCR clone 209327 (TRAV1-2, TRAJ8)
CAGREDTGFQKLVF

SEQ ID NO: 418654 - protein, 12 aa, Homo sapiens
  CDR3 for beta chain variable domain of TCR clone 209327 (TRBV24-1, TRBJ1-1)
CATLYPDTEAFF

SEQ ID NO: 418655 - protein, 15 aa, Homo sapiens
  CDR3 for alpha chain variable domain of TCR clone 209328 (TRAV26-1, TRAJ9)
CIVRVGGTGGFTTIF

SEQ ID NO: 418656 - protein, 13 aa, Homo sapiens
  CDR3 for beta chain variable domain of TCR clone 209328 (TRBV7-9, TRBJ1-2)
CASSLKQNYGYTF

SEQ ID NO: 418657 - protein, 14 aa, Homo sapiens
  CDR3 for alpha chain variable domain of TCR clone 209329 (TRAV16, TRAJ17)
CALSGSAAGNKLTF

SEQ ID NO: 418658 - protein, 15 aa, Homo sapiens
  CDR3 for beta chain variable domain of TCR clone 209329 (TRBV3-1, TRBJ1-2)
CASSPTRLPEGGYTF

SEQ ID NO: 418659 - protein, 14 aa, Homo sapiens
  CDR3 for alpha chain variable domain of TCR clone 209330 (TRAV26-1, TRAJ49)
CIVRLTNTGNQFYF

SEQ ID NO: 418660 - protein, 11 aa, Homo sapiens
  CDR3 for beta chain variable domain of TCR clone 209330 (TRBV29-1, TRBJ2-5)
CSEDRAGTQYF

SEQ ID NO: 418661 - protein, 14 aa, Homo sapiens
  CDR3 for alpha chain variable domain of TCR clone 209331 (TRAV12-2, TRAJ6)
CAVIAPGGSYIPTF

SEQ ID NO: 418662 - protein, 15 aa, Homo sapiens
  CDR3 for beta chain variable domain of TCR clone 209331 (TRBV20-1, TRBJ2-7)
CSARDRVSGMDEQYF

SEQ ID NO: 418663 - protein, 16 aa, Homo sapiens
  CDR3 for alpha chain variable domain of TCR clone 209332 (TRAV21, TRAJ45)
CAVSWGSGGGADGLTF

SEQ ID NO: 418664 - protein, 15 aa, Homo sapiens
  CDR3 for beta chain variable domain of TCR clone 209332 (TRBV27, TRBJ2-1)
CASSNGGGSSNEQFF

SEQ ID NO: 418665 - protein, 13 aa, Homo sapiens
  CDR3 for alpha chain variable domain of TCR clone 209333 (TRAV27, TRAJ6)
CAGGTRGSNIPTF

SEQ ID NO: 418666 - protein, 15 aa, Homo sapiens
  CDR3 for beta chain variable domain of TCR clone 209333 (TRBV11-2, TRBJ1-3)
CASSLSPLVRDTIYF

SEQ ID NO: 418667 - protein, 14 aa, Homo sapiens
  CDR3 for alpha chain variable domain of TCR clone 209334 (TRAV4, TRAJ6)
CLVGEAGGSYIPTF

SEQ ID NO: 418668 - protein, 15 aa, Homo sapiens
  CDR3 for beta chain variable domain of TCR clone 209334 (TRBV7-2, TRBJ2-1)
CASTHGTGIYNEQFF

SEQ ID NO: 418669 - protein, 13 aa, Homo sapiens
  CDR3 for alpha chain variable domain of TCR clone 209335 (TRAV2, TRAJ24)
CAVPTDSWGKLQF

SEQ ID NO: 418670 - protein, 16 aa, Homo sapiens
  CDR3 for beta chain variable domain of TCR clone 209335 (TRBV13, TRBJ2-2)
CASSPRTGEHTGELFF

SEQ ID NO: 418671 - protein, 15 aa, Homo sapiens
  CDR3 for alpha chain variable domain of TCR clone 209336 (TRAV3, TRAJ5)
CAVRDLDTGRRALTF

SEQ ID NO: 418672 - protein, 14 aa, Homo sapiens
  CDR3 for beta chain variable domain of TCR clone 209336 (TRBV25-1, TRBJ1-1)
CASTHLGGNTEAFL

SEQ ID NO: 418673 - protein, 17 aa, Homo sapiens
  CDR3 for alpha chain variable domain of TCR clone 209337 (TRAV26-1, TRAJ46)
IASSESEKKSSGYKLTF

SEQ ID NO: 418674 - protein, 13 aa, Homo sapiens
  CDR3 for beta chain variable domain of TCR clone 209337 (TRBV7-9, TRBJ1-2)
CASSLKQNYGYTF

SEQ ID NO: 418675 - protein, 13 aa, Homo sapiens
  CDR3 for alpha chain variable domain of TCR clone 209338 (TRAV1-2, TRAJ20)
CAVRDGNDYKISF

SEQ ID NO: 418676 - protein, 16 aa, Homo sapiens
  CDR3 for beta chain variable domain of TCR clone 209338 (TRBV12-5, TRBJ2-5)
CASGPRTSGNQETQYF

SEQ ID NO: 418677 - protein, 11 aa, Homo sapiens
  CDR3 for alpha chain variable domain of TCR clone 209339 (TRAV12-3, TRAJ27)
CAMANAGKSTF

SEQ ID NO: 418678 - protein, 18 aa, Homo sapiens
  CDR3 for beta chain variable domain of TCR clone 209339 (TRBV12-4, TRBJ2-4)
CASSRTGAVDVAKNIQYF

SEQ ID NO: 418679 - protein, 14 aa, Homo sapiens
  CDR3 for alpha chain variable domain of TCR clone 209340 (TRAV1-2, TRAJ33)
CAVRAPDSNYQLIC

SEQ ID NO: 418680 - protein, 15 aa, Homo sapiens
  CDR3 for beta chain variable domain of TCR clone 209340 (TRBV27, TRBJ2-7)
CASTQRRPEYYEQYF

SEQ ID NO: 418681 - protein, 15 aa, Homo sapiens
  CDR3 for alpha chain variable domain of TCR clone 209341 (TRAV8-4, TRAJ3)
CAVTGENLVQQCFQD

SEQ ID NO: 418682 - protein, 12 aa, Homo sapiens
  CDR3 for beta chain variable domain of TCR clone 209341 (TRBV14, TRBJ2-7)
CASSSLKGEQYF

SEQ ID NO: 418683 - protein, 13 aa, Homo sapiens
  CDR3 for alpha chain variable domain of TCR clone 209342 (TRAV36/DV7, TRAJ7)
CAGTRYGNNRLDF

SEQ ID NO: 418684 - protein, 15 aa, Homo sapiens
  CDR3 for beta chain variable domain of TCR clone 209342 (TRBV11-3, TRBJ2-7)
CASSPGPASSYEQYF

SEQ ID NO: 418685 - protein, 14 aa, Homo sapiens
  CDR3 for alpha chain variable domain of TCR clone 209343 (TRAV21, TRAJ35)
CAVMPIGFGNVLHC

SEQ ID NO: 418686 - protein, 16 aa, Homo sapiens
  CDR3 for beta chain variable domain of TCR clone 209343 (TRBV20-1, TRBJ2-6)
CSASSQGYDGANVLAF

SEQ ID NO: 418687 - protein, 14 aa, Homo sapiens
  CDR3 for alpha chain variable domain of TCR clone 209344 (TRAV27, TRAJ15)
CAGFDNQAGTALIS

SEQ ID NO: 418688 - protein, 11 aa, Homo sapiens
  CDR3 for beta chain variable domain of TCR clone 209344 (TRBV29-1, TRBJ1-1)
CSVEVGTRTFF

SEQ ID NO: 418689 - protein, 10 aa, Homo sapiens
  CDR3 for alpha chain variable domain of TCR clone 209345 (TRAV1-2, TRAJ31)
CVSEDASLMF

SEQ ID NO: 418690 - protein, 14 aa, Homo sapiens
  CDR3 for beta chain variable domain of TCR clone 209345 (TRBV19, TRBJ2-1)
CASPTFVLSGGQFF

SEQ ID NO: 418691 - protein, 15 aa, Homo sapiens
  CDR3 for alpha chain variable domain of TCR clone 209346 (TRAV12-1, TRAJ44)
CVVFVNTGTASKLTF

SEQ ID NO: 418692 - protein, 17 aa, Homo sapiens
  CDR3 for beta chain variable domain of TCR clone 209346 (TRBV7-8, TRBJ2-6)
CAISAGTGGAGANVLTF

SEQ ID NO: 418693 - protein, 11 aa, Homo sapiens
  CDR3 for alpha chain variable domain of TCR clone 209347 (TRAV1-1, TRAJ23)
CAVRQGGKLIF

SEQ ID NO: 418694 - protein, 16 aa, Homo sapiens
  CDR3 for beta chain variable domain of TCR clone 209347 (TRBV20-1, TRBJ2-1)
CSASASGYSSYNEQFF

SEQ ID NO: 418695 - protein, 23 aa, Homo sapiens
  CDR3 for alpha chain variable domain of TCR clone 209348 (TRAV21, )
CAVMGAGNNHIQNPDPAVYQLRD

SEQ ID NO: 418696 - protein, 16 aa, Homo sapiens
  CDR3 for beta chain variable domain of TCR clone 209348 (TRBV7-3, TRBJ2-2)
CASSLKRGTLSGELFF

SEQ ID NO: 418697 - protein, 13 aa, Homo sapiens
  CDR3 for alpha chain variable domain of TCR clone 209349 (TRAV3, TRAJ20)
CAVRDTARYKLSF

SEQ ID NO: 418698 - protein, 16 aa, Homo sapiens
  CDR3 for beta chain variable domain of TCR clone 209349 (TRBV24-1, TRBJ2-1)
CATSAVGQSSYNEQFF

SEQ ID NO: 418699 - protein, 15 aa, Homo sapiens
  CDR3 for alpha chain variable domain of TCR clone 209350 (TRAV26-1, TRAJ29)
CIVRVKGSGNTPPVF

SEQ ID NO: 418700 - protein, 14 aa, Homo sapiens
  CDR3 for beta chain variable domain of TCR clone 209350 (TRBV18, TRBJ2-5)
CASSPGVSQETQYF

SEQ ID NO: 418701 - protein, 15 aa, Homo sapiens
  CDR3 for alpha chain variable domain of TCR clone 209351 (TRAV17, TRAJ4)
CATGTWSGGYNKLIF

SEQ ID NO: 418702 - protein, 15 aa, Homo sapiens
  CDR3 for beta chain variable domain of TCR clone 209351 (TRBV20-1, TRBJ2-7)
CSARDRVSAMDEQYF

SEQ ID NO: 418703 - protein, 12 aa, Homo sapiens
  CDR3 for alpha chain variable domain of TCR clone 209352 (TRAV21, TRAJ37)
CAVRGNTGKLIC

SEQ ID NO: 418704 - protein, 14 aa, Homo sapiens
  CDR3 for beta chain variable domain of TCR clone 209352 (TRBV19, TRBJ2-1)
CASGVTGARNEQFF

SEQ ID NO: 418705 - protein, 14 aa, Homo sapiens
  CDR3 for alpha chain variable domain of TCR clone 209353 (TRAV12-2, TRAJ40)
CAVKIPSGTYKYIF

SEQ ID NO: 418706 - protein, 15 aa, Homo sapiens
  CDR3 for beta chain variable domain of TCR clone 209353 (TRBV5-1, TRBJ2-2)
CASSLFGQNTGELFF

SEQ ID NO: 418707 - protein, 15 aa, Homo sapiens
  CDR3 for alpha chain variable domain of TCR clone 209354 (TRAV26-2, TRAJ22)
CILRDVSGSARQLTF

SEQ ID NO: 418708 - protein, 14 aa, Homo sapiens
  CDR3 for beta chain variable domain of TCR clone 209354 (TRBV11-3, TRBJ2-3)
CASSRLARTDTQYF

SEQ ID NO: 418709 - protein, 14 aa, Homo sapiens
  CDR3 for alpha chain variable domain of TCR clone 209355 (TRAV2, TRAJ37)
CAVDFTSNTGKLIF

SEQ ID NO: 418710 - protein, 13 aa, Homo sapiens
  CDR3 for beta chain variable domain of TCR clone 209355 (TRBV3-1, TRBJ1-5)
CASSQAGGQPQHF

SEQ ID NO: 418711 - protein, 14 aa, Homo sapiens
  CDR3 for alpha chain variable domain of TCR clone 209356 (TRAV1-2, TRAJ16)
CAVNRFSDGQKLLF

SEQ ID NO: 418712 - protein, 13 aa, Homo sapiens
  CDR3 for beta chain variable domain of TCR clone 209356 (TRBV10-2, TRBJ2-7)
CASSEAGVYEQYF

SEQ ID NO: 418713 - protein, 16 aa, Homo sapiens
  CDR3 for alpha chain variable domain of TCR clone 209357 (TRAV12-3, TRAJ53)
CAMSVGSGGSNYKLTF

SEQ ID NO: 418714 - protein, 11 aa, Homo sapiens
  CDR3 for beta chain variable domain of TCR clone 209357 (TRBV29-1, TRBJ2-5)
RSVASGETQYF

SEQ ID NO: 418715 - protein, 18 aa, Homo sapiens
  CDR3 for alpha chain variable domain of TCR clone 209358 (TRAV12-3, TRAJ52)
CAMSVGGAGGASYGKLTF

SEQ ID NO: 418716 - protein, 15 aa, Homo sapiens
  CDR3 for beta chain variable domain of TCR clone 209358 (TRBV27, TRBJ1-6)
CASSFDRGLGSTLHF

SEQ ID NO: 418717 - protein, 15 aa, Homo sapiens
  CDR3 for alpha chain variable domain of TCR clone 209359 (TRAV8-6, TRAJ38)
CAVSSNAGNNRKLLW

SEQ ID NO: 418718 - protein, 15 aa, Homo sapiens
  CDR3 for beta chain variable domain of TCR clone 209359 (TRBV6-4, TRBJ2-1)
CASSSGTSGYNEQFF

SEQ ID NO: 418719 - protein, 15 aa, Homo sapiens
  CDR3 for alpha chain variable domain of TCR clone 209360 (TRAV23/DV6, TRAJ44)
CAATIRYGTASKLTF

SEQ ID NO: 418720 - protein, 12 aa, Homo sapiens
  CDR3 for beta chain variable domain of TCR clone 209360 (TRBV11-2, TRBJ2-2)
CASSLGGGELFF

SEQ ID NO: 418721 - protein, 11 aa, Homo sapiens
  CDR3 for alpha chain variable domain of TCR clone 209361 (TRAV2, TRAJ13)
CASGGCQKVTF

SEQ ID NO: 418722 - protein, 13 aa, Homo sapiens
  CDR3 for beta chain variable domain of TCR clone 209361 (TRBV19, TRBJ1-2)
CASSVPGQDGYTF

SEQ ID NO: 418723 - protein, 13 aa, Homo sapiens
  CDR3 for alpha chain variable domain of TCR clone 209362 (TRAV13-1, TRAJ35)
CAASLGFGNVLHC

SEQ ID NO: 418724 - protein, 15 aa, Homo sapiens
  CDR3 for beta chain variable domain of TCR clone 209362 (TRBV20-1, TRBJ2-7)
CSARDRVSGTDEQYF

SEQ ID NO: 418725 - protein, 14 aa, Homo sapiens
  CDR3 for alpha chain variable domain of TCR clone 209363 (TRAV8-3, TRAJ4)
CAVGAAGGYNKLIF

SEQ ID NO: 418726 - protein, 16 aa, Homo sapiens
  CDR3 for beta chain variable domain of TCR clone 209363 (TRBV6-1, TRBJ1-2)
CASSGAWQGRSHGYTF

SEQ ID NO: 418727 - protein, 15 aa, Homo sapiens
  CDR3 for alpha chain variable domain of TCR clone 209364 (TRAV26-1, TRAJ56)
CIVRVATGANSMLTF

SEQ ID NO: 418728 - protein, 15 aa, Homo sapiens
  CDR3 for beta chain variable domain of TCR clone 209364 (TRBV27, TRBJ2-7)
CASIPQREGQREQYF

SEQ ID NO: 418729 - protein, 12 aa, Homo sapiens
  CDR3 for alpha chain variable domain of TCR clone 209365 (TRAV27, TRAJ33)
CAGDGINYQLIW

SEQ ID NO: 418730 - protein, 15 aa, Homo sapiens
  CDR3 for beta chain variable domain of TCR clone 209365 (TRBV6-5, TRBJ2-7)
CASSYSTSGNYEQYF

SEQ ID NO: 418731 - protein, 17 aa, Homo sapiens
  CDR3 for alpha chain variable domain of TCR clone 209366 (TRAV12-3, TRAJ52)
CAMRTNAGGTSDGKLTF

SEQ ID NO: 418732 - protein, 17 aa, Homo sapiens
  CDR3 for beta chain variable domain of TCR clone 209366 (TRBV7-3, TRBJ2-3)
CASSLMKRMRGADTQYF

SEQ ID NO: 418733 - protein, 20 aa, Homo sapiens
  CDR3 for alpha chain variable domain of TCR clone 209367 (TRAV12-2, TRAJ52)
SPVIQPPARAGGTSYGKLTF

SEQ ID NO: 418734 - protein, 19 aa, Homo sapiens
  CDR3 for beta chain variable domain of TCR clone 209367 (TRBV2, TRBJ2-2)
CASSQPGLAGGGNTGELFF

SEQ ID NO: 418735 - protein, 17 aa, Homo sapiens
  CDR3 for alpha chain variable domain of TCR clone 209368 (TRAV8-6, TRAJ58)
CGVSSWVGETSGSRLTF

SEQ ID NO: 418736 - protein, 14 aa, Homo sapiens
  CDR3 for beta chain variable domain of TCR clone 209368 (TRBV4-2, TRBJ2-1)
CASGLDRAYNEQFF

SEQ ID NO: 418737 - protein, 15 aa, Homo sapiens
  CDR3 for alpha chain variable domain of TCR clone 209369 (TRAV17, TRAJ56)
CATDANTGANSKLTF

SEQ ID NO: 418738 - protein, 16 aa, Homo sapiens
  CDR3 for beta chain variable domain of TCR clone 209369 (TRBV4-1, TRBJ1-2)
CASSQDAGQVLYGYTF

SEQ ID NO: 418739 - protein, 12 aa, Homo sapiens
  CDR3 for alpha chain variable domain of TCR clone 209370 (TRAV12-3, TRAJ17)
CAMTLTGNKLTF

SEQ ID NO: 418740 - protein, 14 aa, Homo sapiens
  CDR3 for beta chain variable domain of TCR clone 209370 (TRBV7-9, TRBJ2-7)
CASSPSGGQNEQYF

SEQ ID NO: 418741 - protein, 15 aa, Homo sapiens
  CDR3 for alpha chain variable domain of TCR clone 209371 (TRAV21, TRAJ37)
CAVRPTLSNTGKLIF

SEQ ID NO: 418742 - protein, 13 aa, Homo sapiens
  CDR3 for beta chain variable domain of TCR clone 209371 (TRBV4-1, TRBJ2-4)
CASSQVGIDIQYF

SEQ ID NO: 418743 - protein, 11 aa, Homo sapiens
  CDR3 for alpha chain variable domain of TCR clone 209372 (TRAV12-3, TRAJ43)
CAMSFSNDIRF

SEQ ID NO: 418744 - protein, 13 aa, Homo sapiens
  CDR3 for beta chain variable domain of TCR clone 209372 (TRBV20-1, TRBJ1-1)
CSAPLGGGTEAFF

SEQ ID NO: 418745 - protein, 12 aa, Homo sapiens
  CDR3 for alpha chain variable domain of TCR clone 209373 (TRAV8-3, TRAJ28)
CNSGAGSYQLTF

SEQ ID NO: 418746 - protein, 14 aa, Homo sapiens
  CDR3 for beta chain variable domain of TCR clone 209373 (TRBV7-2, TRBJ2-1)
CASSLGVGYNEQFF

SEQ ID NO: 418747 - protein, 13 aa, Homo sapiens
  CDR3 for alpha chain variable domain of TCR clone 209374 (TRAV1-2, TRAJ11)
CAVRSSGYSTLTF

SEQ ID NO: 418748 - protein, 12 aa, Homo sapiens
  CDR3 for beta chain variable domain of TCR clone 209374 (TRBV7-8, TRBJ2-7)
CASEGGPHGQYY

SEQ ID NO: 418749 - protein, 16 aa, Homo sapiens
  CDR3 for alpha chain variable domain of TCR clone 209375 (TRAV12-3, TRAJ45)
CAMGWGSGGGADGLTF

SEQ ID NO: 418750 - protein, 16 aa, Homo sapiens
  CDR3 for beta chain variable domain of TCR clone 209375 (TRBV2, TRBJ2-1)
CASSVGVSLSYNEQFF

SEQ ID NO: 418751 - protein, 13 aa, Homo sapiens
  CDR3 for alpha chain variable domain of TCR clone 209376 (TRAV2, TRAJ40)
CAVVTSGTYKYIF

SEQ ID NO: 418752 - protein, 13 aa, Homo sapiens
  CDR3 for beta chain variable domain of TCR clone 209376 (TRBV13, TRBJ2-5)
CASSPEVGETQYF

SEQ ID NO: 418753 - protein, 15 aa, Homo sapiens
  CDR3 for alpha chain variable domain of TCR clone 209377 (TRAV26-1, TRAJ29)
CIVRVEGSGNTPIVF

SEQ ID NO: 418754 - protein, 14 aa, Homo sapiens
  CDR3 for beta chain variable domain of TCR clone 209377 (TRBV18, TRBJ2-5)
CASSPGVSPETQYF

SEQ ID NO: 418755 - protein, 14 aa, Homo sapiens
  CDR3 for alpha chain variable domain of TCR clone 209378 (TRAV12-2, TRAJ13)
CAVKKTGGYQKVTF

SEQ ID NO: 418756 - protein, 14 aa, Homo sapiens
  CDR3 for beta chain variable domain of TCR clone 209378 (TRBV27, TRBJ2-1)
CASSATGGYNEQFF

SEQ ID NO: 418757 - protein, 11 aa, Homo sapiens
  CDR3 for alpha chain variable domain of TCR clone 209379 (TRAV16, TRAJ20)
CALSECFKAAL

SEQ ID NO: 418758 - protein, 13 aa, Homo sapiens
  CDR3 for beta chain variable domain of TCR clone 209379 (TRBV7-3, TRBJ2-1)
CASSLDSYNEQFF

SEQ ID NO: 418759 - protein, 11 aa, Homo sapiens
  CDR3 for alpha chain variable domain of TCR clone 209380 (TRAV1-1, TRAJ20)
CAVFNDYKLSF

SEQ ID NO: 418760 - protein, 14 aa, Homo sapiens
  CDR3 for beta chain variable domain of TCR clone 209380 (TRBV19, TRBJ2-1)
YASSKDRGQDEQFF

SEQ ID NO: 418761 - protein, 12 aa, Homo sapiens
  CDR3 for alpha chain variable domain of TCR clone 209381 (TRAV12-3, TRAJ17)
RAMTLTGNKLTF

SEQ ID NO: 418762 - protein, 15 aa, Homo sapiens
  CDR3 for beta chain variable domain of TCR clone 209381 (TRBV20-1, TRBJ1-1)
CSASRGVTGNTEAFF

SEQ ID NO: 418763 - protein, 17 aa, Homo sapiens
  CDR3 for alpha chain variable domain of TCR clone 209382 (TRAV3, TRAJ28)
CAVREAYSGAGSYQLTF

SEQ ID NO: 418764 - protein, 16 aa, Homo sapiens
  CDR3 for beta chain variable domain of TCR clone 209382 (TRBV5-1, TRBJ1-1)
CASSSGGNSLNTEAFF

SEQ ID NO: 418765 - protein, 16 aa, Homo sapiens
  CDR3 for alpha chain variable domain of TCR clone 209383 (TRAV8-3, TRAJ42)
CAVGEGNGGSQGNLIF

SEQ ID NO: 418766 - protein, 14 aa, Homo sapiens
  CDR3 for beta chain variable domain of TCR clone 209383 (TRBV7-2, TRBJ2-1)
CSSSRGGARNEQFF

SEQ ID NO: 418767 - protein, 14 aa, Homo sapiens
  CDR3 for alpha chain variable domain of TCR clone 209384 (TRAV12-3, TRAJ54)
CAMRGIQGAQKLVF

SEQ ID NO: 418768 - protein, 13 aa, Homo sapiens
  CDR3 for beta chain variable domain of TCR clone 209384 (TRBV19, TRBJ1-1)
CASSPSNGGEAVF

SEQ ID NO: 418769 - protein, 12 aa, Homo sapiens
  CDR3 for alpha chain variable domain of TCR clone 209385 (TRAV27, TRAJ33)
CAGDGSNYQLIW

SEQ ID NO: 418770 - protein, 15 aa, Homo sapiens
  CDR3 for beta chain variable domain of TCR clone 209385 (TRBV7-9, TRBJ1-1)
CASSRPGTANTEAFF

SEQ ID NO: 418771 - protein, 19 aa, Homo sapiens
  CDR3 for alpha chain variable domain of TCR clone 209386 (TRAV2, TRAJ20)
ILQVREADAAVYRDCKLSF

SEQ ID NO: 418772 - protein, 12 aa, Homo sapiens
  CDR3 for beta chain variable domain of TCR clone 209386 (TRBV11-2, TRBJ2-1)
CASRPGNNEQFF

SEQ ID NO: 418773 - protein, 14 aa, Homo sapiens
  CDR3 for alpha chain variable domain of TCR clone 209387 (TRAV1-2, TRAJ8)
CAVREDTGLQKLVF

SEQ ID NO: 418774 - protein, 14 aa, Homo sapiens
  CDR3 for beta chain variable domain of TCR clone 209387 (TRBV29-1, TRBJ1-4)
CSVTGTGGNEKLFF

SEQ ID NO: 418775 - protein, 18 aa, Homo sapiens
  CDR3 for alpha chain variable domain of TCR clone 209388 (TRAV13-1, TRAJ52)
CAASKRSAGGTSYGTLTF

SEQ ID NO: 418776 - protein, 13 aa, Homo sapiens
  CDR3 for beta chain variable domain of TCR clone 209388 (TRBV12-4, TRBJ1-2)
CASSVRQGKGYTF

SEQ ID NO: 418777 - protein, 15 aa, Homo sapiens
  CDR3 for alpha chain variable domain of TCR clone 209389 (TRAV16, TRAJ20)
CALKGGLRADFKLSF

SEQ ID NO: 418778 - protein, 16 aa, Homo sapiens
  CDR3 for beta chain variable domain of TCR clone 209389 (TRBV11-3, TRBJ2-2)
CASSSRTSPGTGELFF

SEQ ID NO: 418779 - protein, 16 aa, Homo sapiens
  CDR3 for alpha chain variable domain of TCR clone 209390 (TRAV3, TRAJ10)
CAVRDMRAGGGKKITF

SEQ ID NO: 418780 - protein, 19 aa, Homo sapiens
  CDR3 for beta chain variable domain of TCR clone 209390 (TRBV6-3, TRBJ1-2)
CASSYSKGRTGPPNYGYTF

SEQ ID NO: 418781 - protein, 13 aa, Homo sapiens
  CDR3 for alpha chain variable domain of TCR clone 209391 (TRAV12-2, TRAJ18)
CAVRGSTLGRLYF

SEQ ID NO: 418782 - protein, 14 aa, Homo sapiens
  CDR3 for beta chain variable domain of TCR clone 209391 (TRBV7-2, TRBJ1-3)
CASSRLRSGNTIYF

SEQ ID NO: 418783 - protein, 12 aa, Homo sapiens
  CDR3 for alpha chain variable domain of TCR clone 209392 (TRAV12-3, TRAJ17)
CAMTLTGNKLTF

SEQ ID NO: 418784 - protein, 18 aa, Homo sapiens
  CDR3 for beta chain variable domain of TCR clone 209392 (TRBV11-3, TRBJ2-1)
CASSSYRGGRDSYNGQFF

SEQ ID NO: 418785 - protein, 14 aa, Homo sapiens
  CDR3 for alpha chain variable domain of TCR clone 209393 (TRAV13-1, TRAJ20)
CAARPGSNDYNLSF

SEQ ID NO: 418786 - protein, 13 aa, Homo sapiens
  CDR3 for beta chain variable domain of TCR clone 209393 (TRBV20-1, TRBJ1-1)
CSAPPGGHTEAVF

SEQ ID NO: 418787 - protein, 17 aa, Homo sapiens
  CDR3 for alpha chain variable domain of TCR clone 209394 (TRAV1-1, TRAJ4)
CALYNKLIFGAGTRLAV

SEQ ID NO: 418788 - protein, 16 aa, Homo sapiens
  CDR3 for beta chain variable domain of TCR clone 209394 (TRBV7-3, TRBJ2-2)
CARSLKRGTLSGELFF

SEQ ID NO: 418789 - protein, 16 aa, Homo sapiens
  CDR3 for alpha chain variable domain of TCR clone 209395 (TRAV27, TRAJ13)
CAGAKSDSGGYQKVTF

SEQ ID NO: 418790 - protein, 14 aa, Homo sapiens
  CDR3 for beta chain variable domain of TCR clone 209395 (TRBV12-4, TRBJ1-2)
CASSPPGPGGGYTF

SEQ ID NO: 418791 - protein, 13 aa, Homo sapiens
  CDR3 for alpha chain variable domain of TCR clone 209396 (TRAV5, TRAJ30)
CAEIANRDDKIIF

SEQ ID NO: 418792 - protein, 13 aa, Homo sapiens
  CDR3 for beta chain variable domain of TCR clone 209396 (TRBV4-1, TRBJ2-2)
CASSQENTGELFF

SEQ ID NO: 418793 - protein, 18 aa, Homo sapiens
  CDR3 for alpha chain variable domain of TCR clone 209397 (TRAV26-2, TRAJ45)
CILRVDKYSGGGADGLTF

SEQ ID NO: 418794 - protein, 16 aa, Homo sapiens
  CDR3 for beta chain variable domain of TCR clone 209397 (TRBV2, TRBJ1-4)
CVSNLLQGATNEKLFF

SEQ ID NO: 418795 - protein, 13 aa, Homo sapiens
  CDR3 for alpha chain variable domain of TCR clone 209398 (TRAV29/DV5, TRAJ31)
CAASRNNNARLMF

SEQ ID NO: 418796 - protein, 13 aa, Homo sapiens
  CDR3 for beta chain variable domain of TCR clone 209398 (TRBV12-5, TRBJ1-2)
CASGVRTGNGYTF

SEQ ID NO: 418797 - protein, 13 aa, Homo sapiens
  CDR3 for alpha chain variable domain of TCR clone 209399 (TRAV8-3, TRAJ28)
CDVGAVGSYQITF

SEQ ID NO: 418798 - protein, 15 aa, Homo sapiens
  CDR3 for beta chain variable domain of TCR clone 209399 (TRBV7-9, TRBJ1-5)
CASSQGHQPNQPQHF

SEQ ID NO: 418799 - protein, 13 aa, Homo sapiens
  CDR3 for alpha chain variable domain of TCR clone 209400 (TRAV12-1, TRAJ22)
CVASWGSARQLTF

SEQ ID NO: 418800 - protein, 12 aa, Homo sapiens
  CDR3 for beta chain variable domain of TCR clone 209400 (TRBV29-1, TRBJ2-3)
CSVTGGADTQYF

SEQ ID NO: 418801 - protein, 14 aa, Homo sapiens
  CDR3 for alpha chain variable domain of TCR clone 209401 (TRAV12-2, TRAJ52)
CRCAGGTSYGQLTF

SEQ ID NO: 418802 - protein, 13 aa, Homo sapiens
  CDR3 for beta chain variable domain of TCR clone 209401 (TRBV11-2, TRBJ2-1)
CASSLRLTHEQFF

SEQ ID NO: 418803 - protein, 11 aa, Homo sapiens
  CDR3 for alpha chain variable domain of TCR clone 209402 (TRAV12-1, TRAJ30)
CVVNGQDKIIF

SEQ ID NO: 418804 - protein, 13 aa, Homo sapiens
  CDR3 for beta chain variable domain of TCR clone 209402 (TRBV7-9, TRBJ1-2)
CASSLKQNYGYTF

SEQ ID NO: 418805 - protein, 16 aa, Homo sapiens
  CDR3 for alpha chain variable domain of TCR clone 209403 (TRAV21, TRAJ37)
CAVRTAGSSNTGQLIF

SEQ ID NO: 418806 - protein, 14 aa, Homo sapiens
  CDR3 for beta chain variable domain of TCR clone 209403 (TRBV19, TRBJ2-1)
CARGARSFQWEQFF

SEQ ID NO: 418807 - protein, 12 aa, Homo sapiens
  CDR3 for alpha chain variable domain of TCR clone 209404 (TRAV26-1, TRAJ35)
CIGLSFGNVRHC

SEQ ID NO: 418808 - protein, 17 aa, Homo sapiens
  CDR3 for beta chain variable domain of TCR clone 209404 (TRBV11-3, TRBJ2-5)
CASSLPGVRGGKETQYF

SEQ ID NO: 418809 - protein, 14 aa, Homo sapiens
  CDR3 for alpha chain variable domain of TCR clone 209405 (TRAV3, TRAJ21)
CAVRHKYNFNRFYF

SEQ ID NO: 418810 - protein, 14 aa, Homo sapiens
  CDR3 for beta chain variable domain of TCR clone 209405 (TRBV27, TRBJ2-3)
CASRDSPITDTQYF

SEQ ID NO: 418811 - protein, 14 aa, Homo sapiens
  CDR3 for alpha chain variable domain of TCR clone 209406 (TRAV16, TRAJ29)
CALTRNSGNPPLVF

SEQ ID NO: 418812 - protein, 12 aa, Homo sapiens
  CDR3 for beta chain variable domain of TCR clone 209406 (TRBV2, TRBJ2-1)
CAKREGYNEQFF

SEQ ID NO: 418813 - protein, 15 aa, Homo sapiens
  CDR3 for alpha chain variable domain of TCR clone 209407 (TRAV14/DV4, TRAJ26)
CAMREGQNYGQNFVF

SEQ ID NO: 418814 - protein, 13 aa, Homo sapiens
  CDR3 for beta chain variable domain of TCR clone 209407 (TRBV24-1, TRBJ2-2)
CATSDPITGELFF

SEQ ID NO: 418815 - protein, 11 aa, Homo sapiens
  CDR3 for alpha chain variable domain of TCR clone 209408 (TRAV12-1, TRAJ8)
RVVTGFQKLLF

SEQ ID NO: 418816 - protein, 14 aa, Homo sapiens
  CDR3 for beta chain variable domain of TCR clone 209408 (TRBV19, TRBJ2-1)
CASGKSTQYNEQFF

SEQ ID NO: 418817 - protein, 14 aa, Homo sapiens
  CDR3 for alpha chain variable domain of TCR clone 209409 (TRAV13-2, TRAJ11)
CRESSYSGYSTLTF

SEQ ID NO: 418818 - protein, 18 aa, Homo sapiens
  CDR3 for beta chain variable domain of TCR clone 209409 (TRBV12-4, TRBJ2-2)
CASSLVAGTRGRTGELFF

SEQ ID NO: 418819 - protein, 14 aa, Homo sapiens
  CDR3 for alpha chain variable domain of TCR clone 209410 (TRAV8-4, TRAJ15)
CAVILNKAGTALIF

SEQ ID NO: 418820 - protein, 12 aa, Homo sapiens
  CDR3 for beta chain variable domain of TCR clone 209410 (TRBV7-9, TRBJ1-6)
CASSASESPLHF

SEQ ID NO: 418821 - protein, 20 aa, Homo sapiens
  CDR3 for alpha chain variable domain of TCR clone 209411 (TRAV17, TRAJ17)
CFLLLCYGPPGEAAGNKLTF

SEQ ID NO: 418822 - protein, 15 aa, Homo sapiens
  CDR3 for beta chain variable domain of TCR clone 209411 (TRBV9, TRBJ1-6)
CASSVAGTGDSPLHF

SEQ ID NO: 418823 - protein, 16 aa, Homo sapiens
  CDR3 for alpha chain variable domain of TCR clone 209412 (TRAV30, TRAJ24)
CGTELVDADSWGKFQF

SEQ ID NO: 418824 - protein, 14 aa, Homo sapiens
  CDR3 for beta chain variable domain of TCR clone 209412 (TRBV12-5, TRBJ2-5)
CASGSRTHQGTQYF

SEQ ID NO: 418825 - protein, 14 aa, Homo sapiens
  CDR3 for alpha chain variable domain of TCR clone 209413 (TRAV35, TRAJ50)
CAGHRKTSYDKVIL

SEQ ID NO: 418826 - protein, 13 aa, Homo sapiens
  CDR3 for beta chain variable domain of TCR clone 209413 (TRBV7-7, TRBJ2-3)
CASSLSRADTQYF

SEQ ID NO: 418827 - protein, 13 aa, Homo sapiens
  CDR3 for alpha chain variable domain of TCR clone 209414 (TRAV2, TRAJ40)
CAVVISGTYKYIF

SEQ ID NO: 418828 - protein, 14 aa, Homo sapiens
  CDR3 for beta chain variable domain of TCR clone 209414 (TRBV19, TRBJ2-1)
CASPTFVLSGEQFL

SEQ ID NO: 418829 - protein, 16 aa, Homo sapiens
  CDR3 for alpha chain variable domain of TCR clone 209415 (TRAV23/DV6, TRAJ3)
CAARAPQQCFQDNLWI

SEQ ID NO: 418830 - protein, 17 aa, Homo sapiens
  CDR3 for beta chain variable domain of TCR clone 209415 (TRBV7-9, TRBJ2-3)
CASSPTVAGDLTDTQYF

SEQ ID NO: 418831 - protein, 14 aa, Homo sapiens
  CDR3 for alpha chain variable domain of TCR clone 209416 (TRAV12-3, TRAJ15)
CAMIPPQAGTALIF

SEQ ID NO: 418832 - protein, 14 aa, Homo sapiens
  CDR3 for beta chain variable domain of TCR clone 209416 (TRBV20-1, TRBJ2-2)
CSARKRLATGELFI

SEQ ID NO: 418833 - protein, 18 aa, Homo sapiens
  CDR3 for alpha chain variable domain of TCR clone 209417 (TRAV21, TRAJ52)
FSVRPSPAGGTSYGKLTF

SEQ ID NO: 418834 - protein, 13 aa, Homo sapiens
  CDR3 for beta chain variable domain of TCR clone 209417 (TRBV7-3, TRBJ1-1)
CASSQDWGAEAFF

SEQ ID NO: 418835 - protein, 16 aa, Homo sapiens
  CDR3 for alpha chain variable domain of TCR clone 209418 (TRAV8-3, TRAJ10)
CAVGPILTGGGNQLTF

SEQ ID NO: 418836 - protein, 16 aa, Homo sapiens
  CDR3 for beta chain variable domain of TCR clone 209418 (TRBV7-2, TRBJ2-5)
CASSSKWLSGQETQYF

SEQ ID NO: 418837 - protein, 15 aa, Homo sapiens
  CDR3 for alpha chain variable domain of TCR clone 209419 (TRAV3, TRAJ5)
CAARDLDTGRRALTF

SEQ ID NO: 418838 - protein, 14 aa, Homo sapiens
  CDR3 for beta chain variable domain of TCR clone 209419 (TRBV25-1, TRBJ1-4)
CASSGGGQPEKLFF

SEQ ID NO: 418839 - protein, 12 aa, Homo sapiens
  CDR3 for alpha chain variable domain of TCR clone 209420 (TRAV17, TRAJ39)
CATGAAGDMLTF

SEQ ID NO: 418840 - protein, 14 aa, Homo sapiens
  CDR3 for beta chain variable domain of TCR clone 209420 (TRBV7-9, TRBJ1-2)
CASSRQGANYGYTC

SEQ ID NO: 418841 - protein, 18 aa, Homo sapiens
  CDR3 for alpha chain variable domain of TCR clone 209421 (TRAV21, TRAJ52)
CAVRPSPAGGTIYGKLTF

SEQ ID NO: 418842 - protein, 15 aa, Homo sapiens
  CDR3 for beta chain variable domain of TCR clone 209421 (TRBV7-9, TRBJ2-7)
CASSSSGLAVYEQYF

SEQ ID NO: 418843 - protein, 13 aa, Homo sapiens
  CDR3 for alpha chain variable domain of TCR clone 209422 (TRAV12-1, TRAJ34)
CVVTVYNTDKLIF

SEQ ID NO: 418844 - protein, 13 aa, Homo sapiens
  CDR3 for beta chain variable domain of TCR clone 209422 (TRBV28, TRBJ2-7)
CASKAGGVYEQYF

SEQ ID NO: 418845 - protein, 14 aa, Homo sapiens
  CDR3 for alpha chain variable domain of TCR clone 209423 (TRAV16, TRAJ33)
CALSAMNSNYQLIW

SEQ ID NO: 418846 - protein, 15 aa, Homo sapiens
  CDR3 for beta chain variable domain of TCR clone 209423 (TRBV28, TRBJ2-7)
CASSLEAYPIYEQYF

SEQ ID NO: 418847 - protein, 10 aa, Homo sapiens
  CDR3 for alpha chain variable domain of TCR clone 209424 (TRAV12-3, TRAJ49)
CAMNDDQFYF

SEQ ID NO: 418848 - protein, 16 aa, Homo sapiens
  CDR3 for beta chain variable domain of TCR clone 209424 (TRBV5-1, TRBJ2-2)
CASSLWDTTNTGELFF

SEQ ID NO: 418849 - protein, 13 aa, Homo sapiens
  CDR3 for alpha chain variable domain of TCR clone 209425 (TRAV2, TRAJ35)
CAVSCGFGNVLHC

SEQ ID NO: 418850 - protein, 14 aa, Homo sapiens
  CDR3 for beta chain variable domain of TCR clone 209425 (TRBV19, TRBJ2-1)
CASPTFVLSGEQFF

SEQ ID NO: 418851 - protein, 17 aa, Homo sapiens
  CDR3 for alpha chain variable domain of TCR clone 209426 (TRAV13-1, TRAJ52)
CAASSGAGGTSYGKLTF

SEQ ID NO: 418852 - protein, 14 aa, Homo sapiens
  CDR3 for beta chain variable domain of TCR clone 209426 (TRBV12-4, TRBJ1-1)
CASSLGTGGTEAFF

SEQ ID NO: 418853 - protein, 17 aa, Homo sapiens
  CDR3 for alpha chain variable domain of TCR clone 209427 (TRAV27, TRAJ18)
CAGLHRGRGSTLGRLYF

SEQ ID NO: 418854 - protein, 14 aa, Homo sapiens
  CDR3 for beta chain variable domain of TCR clone 209427 (TRBV20-1, TRBJ1-5)
CSARGRGSNQPQYF

SEQ ID NO: 418855 - protein, 11 aa, Homo sapiens
  CDR3 for alpha chain variable domain of TCR clone 209428 (TRAV13-1, TRAJ24)
CAASVWGKLQF

SEQ ID NO: 418856 - protein, 14 aa, Homo sapiens
  CDR3 for beta chain variable domain of TCR clone 209428 (TRBV7-7, TRBJ2-2)
CATRQDSDTGELFF

SEQ ID NO: 418857 - protein, 14 aa, Homo sapiens
  CDR3 for alpha chain variable domain of TCR clone 209429 (TRAV12-1, TRAJ41)
CVVLNSNSGYALNF

SEQ ID NO: 418858 - protein, 11 aa, Homo sapiens
  CDR3 for beta chain variable domain of TCR clone 209429 (TRBV6-3, TRBJ2-7)
CASSFSYEQYF

SEQ ID NO: 418859 - protein, 12 aa, Homo sapiens
  CDR3 for alpha chain variable domain of TCR clone 209430 (TRAV13-1, TRAJ40)
CAANSGPYKYIF

SEQ ID NO: 418860 - protein, 12 aa, Homo sapiens
  CDR3 for beta chain variable domain of TCR clone 209430 (TRBV12-4, TRBJ2-7)
CASSVGGYEQYF

SEQ ID NO: 418861 - protein, 12 aa, Homo sapiens
  CDR3 for alpha chain variable domain of TCR clone 209431 (TRAV35, TRAJ30)
CAGLNRDDKIIF

SEQ ID NO: 418862 - protein, 14 aa, Homo sapiens
  CDR3 for beta chain variable domain of TCR clone 209431 (TRBV19, TRBJ2-1)
CASPTFVLSGEQFF

SEQ ID NO: 418863 - protein, 17 aa, Homo sapiens
  CDR3 for alpha chain variable domain of TCR clone 209432 (TRAV3, TRAJ42)
CAVRDRDYGGSQGNLIF

SEQ ID NO: 418864 - protein, 13 aa, Homo sapiens
  CDR3 for beta chain variable domain of TCR clone 209432 (TRBV20-1, TRBJ2-2)
CSALSGGAGELFF

SEQ ID NO: 418865 - protein, 13 aa, Homo sapiens
  CDR3 for alpha chain variable domain of TCR clone 209433 (TRAV3, TRAJ43)
CAVRDTRGGDMRF

SEQ ID NO: 418866 - protein, 15 aa, Homo sapiens
  CDR3 for beta chain variable domain of TCR clone 209433 (TRBV6-5, TRBJ1-5)
CASSYSRRSNQPQYF

SEQ ID NO: 418867 - protein, 13 aa, Homo sapiens
  CDR3 for alpha chain variable domain of TCR clone 209434 (TRAV36/DV7, TRAJ38)
CVANAGNNRKLIC

SEQ ID NO: 418868 - protein, 14 aa, Homo sapiens
  CDR3 for beta chain variable domain of TCR clone 209434 (TRBV7-2, TRBJ2-7)
CASSRRWEVNEQYF

SEQ ID NO: 418869 - protein, 15 aa, Homo sapiens
  CDR3 for alpha chain variable domain of TCR clone 209435 (TRAV8-4, TRAJ7)
CAVSGGNYGNNILAF

SEQ ID NO: 418870 - protein, 11 aa, Homo sapiens
  CDR3 for beta chain variable domain of TCR clone 209435 (TRBV20-1, TRBJ2-1)
CSLSSGSEQFF

SEQ ID NO: 418871 - protein, 14 aa, Homo sapiens
  CDR3 for alpha chain variable domain of TCR clone 209436 (TRAV1-2, TRAJ33)
CAVRAPDSNYQLIW

SEQ ID NO: 418872 - protein, 14 aa, Homo sapiens
  CDR3 for beta chain variable domain of TCR clone 209436 (TRBV18, TRBJ2-7)
CASSPRGGAYEQYF

SEQ ID NO: 418873 - protein, 16 aa, Homo sapiens
  CDR3 for alpha chain variable domain of TCR clone 209437 (TRAV27, TRAJ53)
CAAPEGSGGSNYKLTF

SEQ ID NO: 418874 - protein, 13 aa, Homo sapiens
  CDR3 for beta chain variable domain of TCR clone 209437 (TRBV6-1, TRBJ1-2)
CASSAREGYGYTF

SEQ ID NO: 418875 - protein, 14 aa, Homo sapiens
  CDR3 for alpha chain variable domain of TCR clone 209438 (TRAV17, TRAJ15)
CATTTKQAGTALIF

SEQ ID NO: 418876 - protein, 16 aa, Homo sapiens
  CDR3 for beta chain variable domain of TCR clone 209438 (TRBV4-1, TRBJ2-7)
CASSRGDILNSYEQYF

SEQ ID NO: 418877 - protein, 14 aa, Homo sapiens
  CDR3 for alpha chain variable domain of TCR clone 209439 (TRAV12-1, TRAJ13)
CVLIDSGGYQKVTF

SEQ ID NO: 418878 - protein, 13 aa, Homo sapiens
  CDR3 for beta chain variable domain of TCR clone 209439 (TRBV20-1, TRBJ1-1)
CSAPPGGHTEAFF

SEQ ID NO: 418879 - protein, 14 aa, Homo sapiens
  CDR3 for alpha chain variable domain of TCR clone 209440 (TRAV38-1, TRAJ45)
CAYYSGGGADGLTF

SEQ ID NO: 418880 - protein, 20 aa, Homo sapiens
  CDR3 for beta chain variable domain of TCR clone 209440 (TRBV28, TRBJ2-1)
FASTPIGRSPGLAGGNEQFF

SEQ ID NO: 418881 - protein, 14 aa, Homo sapiens
  CDR3 for alpha chain variable domain of TCR clone 209441 (TRAV26-2, TRAJ32)
CCVGYGGATNKLIF

SEQ ID NO: 418882 - protein, 16 aa, Homo sapiens
  CDR3 for beta chain variable domain of TCR clone 209441 (TRBV7-9, TRBJ2-3)
CASSPWREVGTDTQYF

SEQ ID NO: 418883 - protein, 13 aa, Homo sapiens
  CDR3 for alpha chain variable domain of TCR clone 209442 (TRAV35, TRAJ57)
CAGSQGGTEKLVF

SEQ ID NO: 418884 - protein, 14 aa, Homo sapiens
  CDR3 for beta chain variable domain of TCR clone 209442 (TRBV25-1, TRBJ1-1)
CASTHLGGNTEAFF

SEQ ID NO: 418885 - protein, 15 aa, Homo sapiens
  CDR3 for alpha chain variable domain of TCR clone 209443 (TRAV8-3, TRAJ45)
CASSYSGGGADELTF

SEQ ID NO: 418886 - protein, 17 aa, Homo sapiens
  CDR3 for beta chain variable domain of TCR clone 209443 (TRBV7-8, TRBJ1-2)
CASSLRPLQGHLYGYTF

SEQ ID NO: 418887 - protein, 12 aa, Homo sapiens
  CDR3 for alpha chain variable domain of TCR clone 209444 (TRAV13-2, TRAJ23)
CAERHRGGKLTF

SEQ ID NO: 418888 - protein, 12 aa, Homo sapiens
  CDR3 for beta chain variable domain of TCR clone 209444 (TRBV11-2, TRBJ2-2)
CASSLGGGELFF

SEQ ID NO: 418889 - protein, 13 aa, Homo sapiens
  CDR3 for alpha chain variable domain of TCR clone 209445 (TRAV3, TRAJ3)
CAVRALGASKIIF

SEQ ID NO: 418890 - protein, 13 aa, Homo sapiens
  CDR3 for beta chain variable domain of TCR clone 209445 (TRBV7-2, TRBJ2-2)
CASSLAVTGELFF

SEQ ID NO: 418891 - protein, 16 aa, Homo sapiens
  CDR3 for alpha chain variable domain of TCR clone 209446 (TRAV26-1, TRAJ38)
CIVRVSGAGNNRKLIW

SEQ ID NO: 418892 - protein, 19 aa, Homo sapiens
  CDR3 for beta chain variable domain of TCR clone 209446 (TRBV7-2, TRBJ2-3)
GRVSLGQQLRGGGRDTQYF

SEQ ID NO: 418893 - protein, 12 aa, Homo sapiens
  CDR3 for alpha chain variable domain of TCR clone 209447 (TRAV12-2, TRAJ47)
CAVAEYGNKLVF

SEQ ID NO: 418894 - protein, 15 aa, Homo sapiens
  CDR3 for beta chain variable domain of TCR clone 209447 (TRBV18, TRBJ2-1)
CASLPDRGRDNEQFF

SEQ ID NO: 418895 - protein, 17 aa, Homo sapiens
  CDR3 for alpha chain variable domain of TCR clone 209448 (TRAV4, TRAJ42)
CLVGGLNYGGSQGNLIF

SEQ ID NO: 418896 - protein, 16 aa, Homo sapiens
  CDR3 for beta chain variable domain of TCR clone 209448 (TRBV20-1, TRBJ1-2)
CSASMGQGVANYGYTF

SEQ ID NO: 418897 - protein, 13 aa, Homo sapiens
  CDR3 for alpha chain variable domain of TCR clone 209449 (TRAV30, TRAJ30)
SVAQSRRDDKIIF

SEQ ID NO: 418898 - protein, 13 aa, Homo sapiens
  CDR3 for beta chain variable domain of TCR clone 209449 (TRBV20-1, TRBJ1-1)
CSARGGGNTEAFF

SEQ ID NO: 418899 - protein, 13 aa, Homo sapiens
  CDR3 for alpha chain variable domain of TCR clone 209450 (TRAV3, TRAJ21)
CAWREPDFNKFYF

SEQ ID NO: 418900 - protein, 18 aa, Homo sapiens
  CDR3 for beta chain variable domain of TCR clone 209450 (TRBV11-2, TRBJ2-3)
CASSLGGSSRGAPNTQYF

SEQ ID NO: 418901 - protein, 15 aa, Homo sapiens
  CDR3 for alpha chain variable domain of TCR clone 209451 (TRAV2, TRAJ9)
CAVEDRGTGGFKTIF

SEQ ID NO: 418902 - protein, 13 aa, Homo sapiens
  CDR3 for beta chain variable domain of TCR clone 209451 (TRBV12-4, TRBJ2-7)
CASSLRQGKGYTF

SEQ ID NO: 418903 - protein, 14 aa, Homo sapiens
  CDR3 for alpha chain variable domain of TCR clone 209452 (TRAV8-4, TRAJ8)
CAVSVNTGFQKLVF

SEQ ID NO: 418904 - protein, 15 aa, Homo sapiens
  CDR3 for beta chain variable domain of TCR clone 209452 (TRBV20-1, TRBJ2-3)
CSARRTGPSTDTQYF

SEQ ID NO: 418905 - protein, 14 aa, Homo sapiens
  CDR3 for alpha chain variable domain of TCR clone 209453 (TRAV38-1, TRAJ40)
CALRPTSGTYKYIF

SEQ ID NO: 418906 - protein, 13 aa, Homo sapiens
  CDR3 for beta chain variable domain of TCR clone 209453 (TRBV28, TRBJ2-5)
CASRDRGRKTQYF

SEQ ID NO: 418907 - protein, 14 aa, Homo sapiens
  CDR3 for alpha chain variable domain of TCR clone 209454 (TRAV12-1, TRAJ17)
CVVNYKAAGNKLTF

SEQ ID NO: 418908 - protein, 15 aa, Homo sapiens
  CDR3 for beta chain variable domain of TCR clone 209454 (TRBV7-2, TRBJ2-1)
CASTHGTGIYNEQFC

SEQ ID NO: 418909 - protein, 15 aa, Homo sapiens
  CDR3 for alpha chain variable domain of TCR clone 209455 (TRAV12-3, TRAJ11)
CAMSEENSGYSTLTF

SEQ ID NO: 418910 - protein, 15 aa, Homo sapiens
  CDR3 for beta chain variable domain of TCR clone 209455 (TRBV4-1, TRBJ1-4)
CASSDTGGTNEKLFF

SEQ ID NO: 418911 - protein, 12 aa, Homo sapiens
  CDR3 for alpha chain variable domain of TCR clone 209456 (TRAV8-3, TRAJ26)
CAGDNYGQNFVF

SEQ ID NO: 418912 - protein, 13 aa, Homo sapiens
  CDR3 for beta chain variable domain of TCR clone 209456 (TRBV7-9, TRBJ1-2)
CASSLKQNYGYTC

SEQ ID NO: 418913 - protein, 10 aa, Homo sapiens
  CDR3 for alpha chain variable domain of TCR clone 209457 (TRAV36/DV7, TRAJ38)
CAANNRKLIW

SEQ ID NO: 418914 - protein, 15 aa, Homo sapiens
  CDR3 for beta chain variable domain of TCR clone 209457 (TRBV20-1, TRBJ2-7)
CSARDQVSGMDEQYF

SEQ ID NO: 418915 - protein, 12 aa, Homo sapiens
  CDR3 for alpha chain variable domain of TCR clone 209458 (TRAV19, TRAJ23)
CALSAWGGKLIF

SEQ ID NO: 418916 - protein, 13 aa, Homo sapiens
  CDR3 for beta chain variable domain of TCR clone 209458 (TRBV20-1, TRBJ1-1)
CSARGGGNTEAFF

SEQ ID NO: 418917 - protein, 16 aa, Homo sapiens
  CDR3 for alpha chain variable domain of TCR clone 209459 (TRAV3, TRAJ23)
CAVKIGIYNQGGKLIF

SEQ ID NO: 418918 - protein, 17 aa, Homo sapiens
  CDR3 for beta chain variable domain of TCR clone 209459 (TRBV10-3, TRBJ2-6)
CTISESTAPSGANVLTF

SEQ ID NO: 418919 - protein, 13 aa, Homo sapiens
  CDR3 for alpha chain variable domain of TCR clone 209460 (TRAV21, TRAJ20)
CAVGLRVDYKLSF

SEQ ID NO: 418920 - protein, 16 aa, Homo sapiens
  CDR3 for beta chain variable domain of TCR clone 209460 (TRBV7-9, TRBJ2-5)
CASSPSGQGVKGTQYF

SEQ ID NO: 418921 - protein, 15 aa, Homo sapiens
  CDR3 for alpha chain variable domain of TCR clone 209461 (TRAV26-1, TRAJ42)
FVVRVKGGSQGNLIF

SEQ ID NO: 418922 - protein, 14 aa, Homo sapiens
  CDR3 for beta chain variable domain of TCR clone 209461 (TRBV19, TRBJ2-2)
CATTGHANTGELFF

SEQ ID NO: 418923 - protein, 15 aa, Homo sapiens
  CDR3 for alpha chain variable domain of TCR clone 209462 (TRAV3, TRAJ22)
CAVRDRGGSARQLTF

SEQ ID NO: 418924 - protein, 15 aa, Homo sapiens
  CDR3 for beta chain variable domain of TCR clone 209462 (TRBV2, TRBJ2-1)
CATQARLVMIGEQFF

SEQ ID NO: 418925 - protein, 12 aa, Homo sapiens
  CDR3 for alpha chain variable domain of TCR clone 209463 (TRAV17, TRAJ30)
CATDARDDKITF

SEQ ID NO: 418926 - protein, 15 aa, Homo sapiens
  CDR3 for beta chain variable domain of TCR clone 209463 (TRBV4-1, TRBJ2-1)
CASSQGGELYNEQFF

SEQ ID NO: 418927 - protein, 11 aa, Homo sapiens
  CDR3 for alpha chain variable domain of TCR clone 209464 (TRAV36/DV7, TRAJ45)
SGGGGADGLTF

SEQ ID NO: 418928 - protein, 13 aa, Homo sapiens
  CDR3 for beta chain variable domain of TCR clone 209464 (TRBV28, TRBJ2-7)
CASNPSGTYGQYF

SEQ ID NO: 418929 - protein, 15 aa, Homo sapiens
  CDR3 for alpha chain variable domain of TCR clone 209465 (TRAV38-2/DV8, TRAJ48)
CAYRSGGFVNEKLTF

SEQ ID NO: 418930 - protein, 16 aa, Homo sapiens
  CDR3 for beta chain variable domain of TCR clone 209465 (TRBV28, TRBJ2-7)
CASSPWVATGDLSQYF

SEQ ID NO: 418931 - protein, 15 aa, Homo sapiens
  CDR3 for alpha chain variable domain of TCR clone 209466 (TRAV3, TRAJ20)
CAVRDIKLRDYKPSF

SEQ ID NO: 418932 - protein, 15 aa, Homo sapiens
  CDR3 for beta chain variable domain of TCR clone 209466 (TRBV7-9, TRBJ1-6)
CASSSPGRGNSPLHF

SEQ ID NO: 418933 - protein, 17 aa, Homo sapiens
  CDR3 for alpha chain variable domain of TCR clone 209467 (TRAV3, TRAJ12)
CAVRDGGRMDSSYKLIF

SEQ ID NO: 418934 - protein, 13 aa, Homo sapiens
  CDR3 for beta chain variable domain of TCR clone 209467 (TRBV20-1, TRBJ1-1)
CSAPLGGRTEAFF

SEQ ID NO: 418935 - protein, 14 aa, Homo sapiens
  CDR3 for alpha chain variable domain of TCR clone 209468 (TRAV12-3, TRAJ10)
SHLPLTGGGNKLTF

SEQ ID NO: 418936 - protein, 16 aa, Homo sapiens
  CDR3 for beta chain variable domain of TCR clone 209468 (TRBV3-1, TRBJ1-2)
CAISQGQGVQRDGYTF

SEQ ID NO: 418937 - protein, 14 aa, Homo sapiens
  CDR3 for alpha chain variable domain of TCR clone 209469 (TRAV12-2, TRAJ13)
CDVKKTGGYQKVTF

SEQ ID NO: 418938 - protein, 15 aa, Homo sapiens
  CDR3 for beta chain variable domain of TCR clone 209469 (TRBV28, TRBJ2-5)
CASSPPWSYQETQYF

SEQ ID NO: 418939 - protein, 12 aa, Homo sapiens
  CDR3 for alpha chain variable domain of TCR clone 209470 (TRAV12-3, TRAJ20)
CAMVRGEYKLSF

SEQ ID NO: 418940 - protein, 14 aa, Homo sapiens
  CDR3 for beta chain variable domain of TCR clone 209470 (TRBV5-5, TRBJ1-5)
CASSGQGVDQPQHF

SEQ ID NO: 418941 - protein, 14 aa, Homo sapiens
  CDR3 for alpha chain variable domain of TCR clone 209471 (TRAV1-2, TRAJ8)
CAVREDTGFQKLVF

SEQ ID NO: 418942 - protein, 15 aa, Homo sapiens
  CDR3 for beta chain variable domain of TCR clone 209471 (TRBV6-5, TRBJ1-4)
CASSSVGGAGEKLFF

SEQ ID NO: 418943 - protein, 15 aa, Homo sapiens
  CDR3 for alpha chain variable domain of TCR clone 209472 (TRAV25, TRAJ52)
CAGRPSGTSYGKLTF

SEQ ID NO: 418944 - protein, 17 aa, Homo sapiens
  CDR3 for beta chain variable domain of TCR clone 209472 (TRBV7-8, TRBJ2-6)
CASSAGTGGAGANDLTF

SEQ ID NO: 418945 - protein, 16 aa, Homo sapiens
  CDR3 for alpha chain variable domain of TCR clone 209473 (TRAV12-3, TRAJ53)
CAMSPGSGGSNYKLTF

SEQ ID NO: 418946 - protein, 12 aa, Homo sapiens
  CDR3 for beta chain variable domain of TCR clone 209473 (TRBV6-1, TRBJ1-5)
CASTYSNQPQHF

SEQ ID NO: 418947 - protein, 15 aa, Homo sapiens
  CDR3 for alpha chain variable domain of TCR clone 209474 (TRAV20, TRAJ40)
CAVQRGTSGTYQYIF

SEQ ID NO: 418948 - protein, 19 aa, Homo sapiens
  CDR3 for beta chain variable domain of TCR clone 209474 (TRBV28, TRBJ2-7)
CASSYSGTSRLGWVYEQYF

SEQ ID NO: 418949 - protein, 16 aa, Homo sapiens
  CDR3 for alpha chain variable domain of TCR clone 209475 (TRAV30, TRAJ44)
CGTEDKRTGTASKLTF

SEQ ID NO: 418950 - protein, 16 aa, Homo sapiens
  CDR3 for beta chain variable domain of TCR clone 209475 (TRBV10-2, TRBJ2-7)
CASSESPGTSGFEQYF

SEQ ID NO: 418951 - protein, 14 aa, Homo sapiens
  CDR3 for alpha chain variable domain of TCR clone 209476 (TRAV12-1, TRAJ30)
CVVNIGNRDDKITF

SEQ ID NO: 418952 - protein, 14 aa, Homo sapiens
  CDR3 for beta chain variable domain of TCR clone 209476 (TRBV7-9, TRBJ2-5)
CASSPRPSGETQYF

SEQ ID NO: 418953 - protein, 17 aa, Homo sapiens
  CDR3 for alpha chain variable domain of TCR clone 209477 (TRAV3, TRAJ6)
CAVRDGPRTGGSYIPPF

SEQ ID NO: 418954 - protein, 14 aa, Homo sapiens
  CDR3 for beta chain variable domain of TCR clone 209477 (TRBV7-2, TRBJ2-7)
CASSPKTSFYEQYF

SEQ ID NO: 418955 - protein, 13 aa, Homo sapiens
  CDR3 for alpha chain variable domain of TCR clone 209478 (TRAV20, TRAJ37)
CAGCSSNTGKLIF

SEQ ID NO: 418956 - protein, 13 aa, Homo sapiens
  CDR3 for beta chain variable domain of TCR clone 209478 (TRBV12-4, TRBJ1-2)
CASSLRQGKGYTF

SEQ ID NO: 418957 - protein, 18 aa, Homo sapiens
  CDR3 for alpha chain variable domain of TCR clone 209479 (TRAV13-1, TRAJ52)
CAAKNPNAGGTSYGKLTF

SEQ ID NO: 418958 - protein, 15 aa, Homo sapiens
  CDR3 for beta chain variable domain of TCR clone 209479 (TRBV29-1, TRBJ2-7)
CSVEFFDRGSYEQYF

SEQ ID NO: 418959 - protein, 14 aa, Homo sapiens
  CDR3 for alpha chain variable domain of TCR clone 209480 (TRAV8-3, TRAJ9)
CAVVYNTGGFKTIF

SEQ ID NO: 418960 - protein, 13 aa, Homo sapiens
  CDR3 for beta chain variable domain of TCR clone 209480 (TRBV11-3, TRBJ2-3)
CASSHDTKDTQYF

SEQ ID NO: 418961 - protein, 15 aa, Homo sapiens
  CDR3 for alpha chain variable domain of TCR clone 209481 (TRAV2, TRAJ42)
CAVEVYGGSQGNLIF

SEQ ID NO: 418962 - protein, 16 aa, Homo sapiens
  CDR3 for beta chain variable domain of TCR clone 209481 (TRBV27, TRBJ2-2)
CASGFRGLVRTGELFF

SEQ ID NO: 418963 - protein, 16 aa, Homo sapiens
  CDR3 for alpha chain variable domain of TCR clone 209482 (TRAV3, TRAJ37)
CAVTPHGSGNTGKLIF

SEQ ID NO: 418964 - protein, 16 aa, Homo sapiens
  CDR3 for beta chain variable domain of TCR clone 209482 (TRBV20-1, TRBJ1-4)
CSAPGQGLLTNEKLFF

SEQ ID NO: 418965 - protein, 13 aa, Homo sapiens
  CDR3 for alpha chain variable domain of TCR clone 209483 (TRAV13-1, TRAJ21)
CAASIYNFNKFYF

SEQ ID NO: 418966 - protein, 13 aa, Homo sapiens
  CDR3 for beta chain variable domain of TCR clone 209483 (TRBV4-2, TRBJ2-3)
CASSQGNTDTQYF

SEQ ID NO: 418967 - protein, 10 aa, Homo sapiens
  CDR3 for alpha chain variable domain of TCR clone 209484 (TRAV26-1, TRAJ22)
RSGSAGQLTF

SEQ ID NO: 418968 - protein, 14 aa, Homo sapiens
  CDR3 for beta chain variable domain of TCR clone 209484 (TRBV4-1, TRBJ2-2)
CASSQAVNTGELFF

SEQ ID NO: 418969 - protein, 14 aa, Homo sapiens
  CDR3 for alpha chain variable domain of TCR clone 209485 (TRAV12-3, TRAJ10)
SHLPLTGGGNKLTF

SEQ ID NO: 418970 - protein, 15 aa, Homo sapiens
  CDR3 for beta chain variable domain of TCR clone 209485 (TRBV6-1, TRBJ2-4)
CASSEAVWTINIQYF

SEQ ID NO: 418971 - protein, 15 aa, Homo sapiens
  CDR3 for alpha chain variable domain of TCR clone 209486 (TRAV23/DV6, TRAJ18)
CAARYRGSTLGRLYF

SEQ ID NO: 418972 - protein, 13 aa, Homo sapiens
  CDR3 for beta chain variable domain of TCR clone 209486 (TRBV7-2, TRBJ2-7)
CASGSPSGSEQYF

SEQ ID NO: 418973 - protein, 14 aa, Homo sapiens
  CDR3 for alpha chain variable domain of TCR clone 209487 (TRAV12-2, TRAJ33)
CAVNRARSNYQLIW

SEQ ID NO: 418974 - protein, 12 aa, Homo sapiens
  CDR3 for beta chain variable domain of TCR clone 209487 (TRBV24-1, TRBJ2-3)
CATSDSTDTQYF

SEQ ID NO: 418975 - protein, 14 aa, Homo sapiens
  CDR3 for alpha chain variable domain of TCR clone 209488 (TRAV1-2, TRAJ8)
CAVREDTGFQKLVF

SEQ ID NO: 418976 - protein, 12 aa, Homo sapiens
  CDR3 for beta chain variable domain of TCR clone 209488 (TRBV7-8, TRBJ2-7)
CASSLGDKEQYF

SEQ ID NO: 418977 - protein, 16 aa, Homo sapiens
  CDR3 for alpha chain variable domain of TCR clone 209489 (TRAV39, TRAJ32)
CAVDMEYGGATNKLIF

SEQ ID NO: 418978 - protein, 13 aa, Homo sapiens
  CDR3 for beta chain variable domain of TCR clone 209489 (TRBV11-2, TRBJ2-5)
CASSSTGEETQYF

SEQ ID NO: 418979 - protein, 16 aa, Homo sapiens
  CDR3 for alpha chain variable domain of TCR clone 209490 (TRAV12-3, TRAJ53)
CAMSPGSGRSNYKLTF

SEQ ID NO: 418980 - protein, 13 aa, Homo sapiens
  CDR3 for beta chain variable domain of TCR clone 209490 (TRBV7-3, TRBJ1-1)
CASSQDWGAEAFF

SEQ ID NO: 418981 - protein, 12 aa, Homo sapiens
  CDR3 for alpha chain variable domain of TCR clone 209491 (TRAV13-1, TRAJ48)
CAANFGNEKLTF

SEQ ID NO: 418982 - protein, 13 aa, Homo sapiens
  CDR3 for beta chain variable domain of TCR clone 209491 (TRBV7-3, TRBJ1-1)
CASSEDWGAEAFF

SEQ ID NO: 418983 - protein, 12 aa, Homo sapiens
  CDR3 for alpha chain variable domain of TCR clone 209492 (TRAV17, TRAJ57)
CAKDGGSEKLVF

SEQ ID NO: 418984 - protein, 13 aa, Homo sapiens
  CDR3 for beta chain variable domain of TCR clone 209492 (TRBV7-9, TRBJ2-7)
CASSFAGAYEQYF

SEQ ID NO: 418985 - protein, 15 aa, Homo sapiens
  CDR3 for alpha chain variable domain of TCR clone 209493 (TRAV13-1, TRAJ45)
CAASGSGGGADGLTF

SEQ ID NO: 418986 - protein, 14 aa, Homo sapiens
  CDR3 for beta chain variable domain of TCR clone 209493 (TRBV12-4, TRBJ1-2)
CASSFVGTTYGYTF

SEQ ID NO: 418987 - protein, 13 aa, Homo sapiens
  CDR3 for alpha chain variable domain of TCR clone 209494 (TRAV13-1, TRAJ20)
CAARVSNDYKLSF

SEQ ID NO: 418988 - protein, 12 aa, Homo sapiens
  CDR3 for beta chain variable domain of TCR clone 209494 (TRBV20-1, TRBJ2-1)
CSARRGRDEQFF

SEQ ID NO: 418989 - protein, 14 aa, Homo sapiens
  CDR3 for alpha chain variable domain of TCR clone 209495 (TRAV1-2, TRAJ16)
CAVNRFSDGQKLLF

SEQ ID NO: 418990 - protein, 14 aa, Homo sapiens
  CDR3 for beta chain variable domain of TCR clone 209495 (TRBV20-1, TRBJ2-4)
CSARDRGQGGIQYF

SEQ ID NO: 418991 - protein, 12 aa, Homo sapiens
  CDR3 for alpha chain variable domain of TCR clone 209496 (TRAV21, TRAJ33)
CAKMDSNYQLIW

SEQ ID NO: 418992 - protein, 14 aa, Homo sapiens
  CDR3 for beta chain variable domain of TCR clone 209496 (TRBV2, TRBJ2-7)
CDSSLTAGGYEQYF

SEQ ID NO: 418993 - protein, 12 aa, Homo sapiens
  CDR3 for alpha chain variable domain of TCR clone 209497 (TRAV26-1, TRAJ53)
CIEGGSNYKLTF

SEQ ID NO: 418994 - protein, 15 aa, Homo sapiens
  CDR3 for beta chain variable domain of TCR clone 209497 (TRBV11-3, TRBJ2-3)
CASLKDGREGDTQYF

SEQ ID NO: 418995 - protein, 15 aa, Homo sapiens
  CDR3 for alpha chain variable domain of TCR clone 209498 (TRAV13-1, TRAJ44)
CAASRGGGTASKLTF

SEQ ID NO: 418996 - protein, 15 aa, Homo sapiens
  CDR3 for beta chain variable domain of TCR clone 209498 (TRBV27, TRBJ2-1)
CASSNGGGSSNEQFF

SEQ ID NO: 418997 - protein, 14 aa, Homo sapiens
  CDR3 for alpha chain variable domain of TCR clone 209499 (TRAV30, TRAJ26)
CGTEIVSYGKNFVF

SEQ ID NO: 418998 - protein, 13 aa, Homo sapiens
  CDR3 for beta chain variable domain of TCR clone 209499 (TRBV19, TRBJ1-3)
CASRLSLGNTIYC

SEQ ID NO: 418999 - protein, 18 aa, Homo sapiens
  CDR3 for alpha chain variable domain of TCR clone 209500 (TRAV26-1, TRAJ23)
CIVRVGLEVWNQGGKLIF

SEQ ID NO: 419000 - protein, 16 aa, Homo sapiens
  CDR3 for beta chain variable domain of TCR clone 209500 (TRBV19, TRBJ1-5)
CASSIDRGGPRQPQHF

SEQ ID NO: 419001 - protein, 13 aa, Homo sapiens
  CDR3 for alpha chain variable domain of TCR clone 209501 (TRAV8-3, TRAJ43)
CAVVPYNNNDMRF

SEQ ID NO: 419002 - protein, 13 aa, Homo sapiens
  CDR3 for beta chain variable domain of TCR clone 209501 (TRBV11-2, TRBJ1-1)
CASSLGNGAEAFF

SEQ ID NO: 419003 - protein, 14 aa, Homo sapiens
  CDR3 for alpha chain variable domain of TCR clone 209502 (TRAV12-3, TRAJ20)
CAMSARRGDYKISF

SEQ ID NO: 419004 - protein, 14 aa, Homo sapiens
  CDR3 for beta chain variable domain of TCR clone 209502 (TRBV7-3, TRBJ2-3)
CASSPSARTDTQYF

SEQ ID NO: 419005 - protein, 13 aa, Homo sapiens
  CDR3 for alpha chain variable domain of TCR clone 209503 (TRAV26-1, )
CIVSHRVEGFWNQ

SEQ ID NO: 419006 - protein, 13 aa, Homo sapiens
  CDR3 for beta chain variable domain of TCR clone 209503 (TRBV20-1, TRBJ1-2)
CSARDQGAYGYTF

SEQ ID NO: 419007 - protein, 13 aa, Homo sapiens
  CDR3 for alpha chain variable domain of TCR clone 209504 (TRAV8-1, TRAJ34)
CAVNGKGTDKLIF

SEQ ID NO: 419008 - protein, 13 aa, Homo sapiens
  CDR3 for beta chain variable domain of TCR clone 209504 (TRBV20-1, TRBJ2-5)
CSARLAGVETQSF

SEQ ID NO: 419009 - protein, 14 aa, Homo sapiens
  CDR3 for alpha chain variable domain of TCR clone 209505 (TRAV1-2, TRAJ16)
CAVNRFSDGTKLLF

SEQ ID NO: 419010 - protein, 14 aa, Homo sapiens
  CDR3 for beta chain variable domain of TCR clone 209505 (TRBV6-1, TRBJ2-2)
CASTWQGNTGELFF

SEQ ID NO: 419011 - protein, 14 aa, Homo sapiens
  CDR3 for alpha chain variable domain of TCR clone 209506 (TRAV8-4, TRAJ48)
CAVGETFGNEKLTF

SEQ ID NO: 419012 - protein, 14 aa, Homo sapiens
  CDR3 for beta chain variable domain of TCR clone 209506 (TRBV13, TRBJ2-7)
CASSLKGASYEQYF

SEQ ID NO: 419013 - protein, 20 aa, Homo sapiens
  CDR3 for alpha chain variable domain of TCR clone 209507 (TRAV12-1, TRAJ42)
SSVIQPPTSVKGGSQGNLIF

SEQ ID NO: 419014 - protein, 17 aa, Homo sapiens
  CDR3 for beta chain variable domain of TCR clone 209507 (TRBV11-2, TRBJ2-3)
CQQLRGGSRGAPNTQYF

SEQ ID NO: 419015 - protein, 13 aa, Homo sapiens
  CDR3 for alpha chain variable domain of TCR clone 209508 (TRAV12-3, TRAJ33)
CAMSVNSNYQLIW

SEQ ID NO: 419016 - protein, 12 aa, Homo sapiens
  CDR3 for beta chain variable domain of TCR clone 209508 (TRBV4-1, TRBJ2-3)
CASSQGTDTQYF

SEQ ID NO: 419017 - protein, 14 aa, Homo sapiens
  CDR3 for alpha chain variable domain of TCR clone 209509 (TRAV12-3, TRAJ9)
CAMSPNTGGFKTIF

SEQ ID NO: 419018 - protein, 15 aa, Homo sapiens
  CDR3 for beta chain variable domain of TCR clone 209509 (TRBV5-1, TRBJ2-7)
CASSLNGGPAREQYF

SEQ ID NO: 419019 - protein, 14 aa, Homo sapiens
  CDR3 for alpha chain variable domain of TCR clone 209510 (TRAV2, TRAJ37)
CAVDFTSNTCKLIF

SEQ ID NO: 419020 - protein, 15 aa, Homo sapiens
  CDR3 for beta chain variable domain of TCR clone 209510 (TRBV20-1, TRBJ1-1)
CSASRGVTGNTEALF

SEQ ID NO: 419021 - protein, 11 aa, Homo sapiens
  CDR3 for alpha chain variable domain of TCR clone 209511 (TRAV3, TRAJ21)
CAVGNFNKFYF

SEQ ID NO: 419022 - protein, 19 aa, Homo sapiens
  CDR3 for beta chain variable domain of TCR clone 209511 (TRBV2, TRBJ2-7)
CASSDDETSGRANDYEQYF

SEQ ID NO: 419023 - protein, 14 aa, Homo sapiens
  CDR3 for alpha chain variable domain of TCR clone 209512 (TRAV38-1, TRAJ29)
CTFITPSGNTPLVF

SEQ ID NO: 419024 - protein, 14 aa, Homo sapiens
  CDR3 for beta chain variable domain of TCR clone 209512 (TRBV18, TRBJ2-7)
CASSPRGGAYEQYF

SEQ ID NO: 419025 - protein, 18 aa, Homo sapiens
  CDR3 for alpha chain variable domain of TCR clone 209513 (TRAV21, TRAJ52)
CAVRPSPAGGTSYGKLTF

SEQ ID NO: 419026 - protein, 17 aa, Homo sapiens
  CDR3 for beta chain variable domain of TCR clone 209513 (TRBV13, TRBJ2-3)
CASSLSSVAGGTDTQYF

SEQ ID NO: 419027 - protein, 12 aa, Homo sapiens
  CDR3 for alpha chain variable domain of TCR clone 209514 (TRAV21, TRAJ3)
CCFYSSASKIIF

SEQ ID NO: 419028 - protein, 16 aa, Homo sapiens
  CDR3 for beta chain variable domain of TCR clone 209514 (TRBV19, TRBJ2-1)
CASSKAGPNSYNEQFF

SEQ ID NO: 419029 - protein, 13 aa, Homo sapiens
  CDR3 for alpha chain variable domain of TCR clone 209515 (TRAV2, TRAJ40)
CAVVTSGTYKYIF

SEQ ID NO: 419030 - protein, 14 aa, Homo sapiens
  CDR3 for beta chain variable domain of TCR clone 209515 (TRBV13, TRBJ2-5)
CASSLERVGETQYF

SEQ ID NO: 419031 - protein, 16 aa, Homo sapiens
  CDR3 for alpha chain variable domain of TCR clone 209516 (TRAV30, TRAJ26)
CGTESVGDNYGQNFVF

SEQ ID NO: 419032 - protein, 13 aa, Homo sapiens
  CDR3 for beta chain variable domain of TCR clone 209516 (TRBV19, TRBJ1-2)
CASSISEDYGYTV

SEQ ID NO: 419033 - protein, 14 aa, Homo sapiens
  CDR3 for alpha chain variable domain of TCR clone 209517 (TRAV12-3, TRAJ12)
CAMSEVDSSYKLIF

SEQ ID NO: 419034 - protein, 16 aa, Homo sapiens
  CDR3 for beta chain variable domain of TCR clone 209517 (TRBV12-5, TRBJ2-5)
CASGPRTSGNQETQYF

SEQ ID NO: 419035 - protein, 14 aa, Homo sapiens
  CDR3 for alpha chain variable domain of TCR clone 209518 (TRAV12-3, TRAJ42)
CAVNYGGSQGNLIF

SEQ ID NO: 419036 - protein, 15 aa, Homo sapiens
  CDR3 for beta chain variable domain of TCR clone 209518 (TRBV9, TRBJ1-6)
CASSVAGTGDSPLNF

SEQ ID NO: 419037 - protein, 14 aa, Homo sapiens
  CDR3 for alpha chain variable domain of TCR clone 209519 (TRAV1-2, TRAJ8)
CAVREDTGFQKLVF

SEQ ID NO: 419038 - protein, 13 aa, Homo sapiens
  CDR3 for beta chain variable domain of TCR clone 209519 (TRBV12-4, TRBJ1-5)
CASSPERAQPQHF

SEQ ID NO: 419039 - protein, 13 aa, Homo sapiens
  CDR3 for alpha chain variable domain of TCR clone 209520 (TRAV26-1, TRAJ48)
CIVRVVGDEKLTF

SEQ ID NO: 419040 - protein, 13 aa, Homo sapiens
  CDR3 for beta chain variable domain of TCR clone 209520 (TRBV19, TRBJ1-1)
CASSQGGNTEAFF

SEQ ID NO: 419041 - protein, 13 aa, Homo sapiens
  CDR3 for alpha chain variable domain of TCR clone 209521 (TRAV26-1, TRAJ30)
CIVNMKRDDKIIF

SEQ ID NO: 419042 - protein, 16 aa, Homo sapiens
  CDR3 for beta chain variable domain of TCR clone 209521 (TRBV16, TRBJ2-7)
CASSRPAGGSSYKQYF

SEQ ID NO: 419043 - protein, 13 aa, Homo sapiens
  CDR3 for alpha chain variable domain of TCR clone 209522 (TRAV12-3, TRAJ9)
CAMRNTGGFKTIC

SEQ ID NO: 419044 - protein, 13 aa, Homo sapiens
  CDR3 for beta chain variable domain of TCR clone 209522 (TRBV9, TRBJ2-1)
CASSVGQGGEQFF

SEQ ID NO: 419045 - protein, 15 aa, Homo sapiens
  CDR3 for alpha chain variable domain of TCR clone 209523 (TRAV14/DV4, TRAJ15)
CAMREGWQAGTALIF

SEQ ID NO: 419046 - protein, 14 aa, Homo sapiens
  CDR3 for beta chain variable domain of TCR clone 209523 (TRBV19, TRBJ2-5)
CASSMTGQQETQYY

SEQ ID NO: 419047 - protein, 12 aa, Homo sapiens
  CDR3 for alpha chain variable domain of TCR clone 209524 (TRAV12-3, TRAJ17)
CAMTLTGNKITF

SEQ ID NO: 419048 - protein, 16 aa, Homo sapiens
  CDR3 for beta chain variable domain of TCR clone 209524 (TRBV15, TRBJ2-3)
CATSRDLGIVTDTQYF

SEQ ID NO: 419049 - protein, 15 aa, Homo sapiens
  CDR3 for alpha chain variable domain of TCR clone 209525 (TRAV4, TRAJ39)
CRVGPNNNAGNMLTL

SEQ ID NO: 419050 - protein, 13 aa, Homo sapiens
  CDR3 for beta chain variable domain of TCR clone 209525 (TRBV11-2, TRBJ2-5)
CASSSTGEETPYF

SEQ ID NO: 419051 - protein, 14 aa, Homo sapiens
  CDR3 for alpha chain variable domain of TCR clone 209526 (TRAV12-2, TRAJ4)
CAEDLSGGYNQLLL

SEQ ID NO: 419052 - protein, 13 aa, Homo sapiens
  CDR3 for beta chain variable domain of TCR clone 209526 (TRBV7-9, TRBJ1-2)
CASSLKQSYGYTF

SEQ ID NO: 419053 - protein, 16 aa, Homo sapiens
  CDR3 for alpha chain variable domain of TCR clone 209527 (TRAV12-3, TRAJ53)
CAMSPGSGGSNYKLTF

SEQ ID NO: 419054 - protein, 17 aa, Homo sapiens
  CDR3 for beta chain variable domain of TCR clone 209527 (TRBV28, TRBJ2-5)
CSSSTPEGDALQETQYF

SEQ ID NO: 419055 - protein, 18 aa, Homo sapiens
  CDR3 for alpha chain variable domain of TCR clone 209528 (TRAV9-2, TRAJ52)
CARSRHNAGGTSYGKLTF

SEQ ID NO: 419056 - protein, 15 aa, Homo sapiens
  CDR3 for beta chain variable domain of TCR clone 209528 (TRBV11-2, TRBJ2-1)
CASSKNRGLIYEQFF

SEQ ID NO: 419057 - protein, 14 aa, Homo sapiens
  CDR3 for alpha chain variable domain of TCR clone 209529 (TRAV29/DV5, TRAJ49)
CAASLSTTGNQFYF

SEQ ID NO: 419058 - protein, 15 aa, Homo sapiens
  CDR3 for beta chain variable domain of TCR clone 209529 (TRBV20-1, TRBJ2-1)
CSARGIRGTYNEQFF

SEQ ID NO: 419059 - protein, 11 aa, Homo sapiens
  CDR3 for alpha chain variable domain of TCR clone 209530 (TRAV13-2, TRAJ45)
VTGGGADGLTF

SEQ ID NO: 419060 - protein, 17 aa, Homo sapiens
  CDR3 for beta chain variable domain of TCR clone 209530 (TRBV19, TRBJ1-1)
CASSIAGRGLMNAEAFF

SEQ ID NO: 419061 - protein, 17 aa, Homo sapiens
  CDR3 for alpha chain variable domain of TCR clone 209531 (TRAV3, TRAJ6)
CAVIDGPRAAGSYIPTF

SEQ ID NO: 419062 - protein, 14 aa, Homo sapiens
  CDR3 for beta chain variable domain of TCR clone 209531 (TRBV7-2, TRBJ2-7)
CASSPKTSFYEQYF

SEQ ID NO: 419063 - protein, 13 aa, Homo sapiens
  CDR3 for alpha chain variable domain of TCR clone 209532 (TRAV2, TRAJ40)
CAVVTSGTYEYIF

SEQ ID NO: 419064 - protein, 13 aa, Homo sapiens
  CDR3 for beta chain variable domain of TCR clone 209532 (TRBV7-2, TRBJ2-7)
CASSSPSGSEQYF

SEQ ID NO: 419065 - protein, 14 aa, Homo sapiens
  CDR3 for alpha chain variable domain of TCR clone 209533 (TRAV12-2, TRAJ13)
CAVKKTGGYQKFTF

SEQ ID NO: 419066 - protein, 14 aa, Homo sapiens
  CDR3 for beta chain variable domain of TCR clone 209533 (TRBV7-2, TRBJ2-7)
CASSPRTSFYEQYF

SEQ ID NO: 419067 - protein, 15 aa, Homo sapiens
  CDR3 for alpha chain variable domain of TCR clone 209534 (TRAV3, TRAJ40)
CAVRDGTSGTYKYIF

SEQ ID NO: 419068 - protein, 13 aa, Homo sapiens
  CDR3 for beta chain variable domain of TCR clone 209534 (TRBV7-9, TRBJ1-2)
CASSLKQNYGYTF

SEQ ID NO: 419069 - protein, 17 aa, Homo sapiens
  CDR3 for alpha chain variable domain of TCR clone 209535 (TRAV26-1, TRAJ20)
CCVLLHRQSRYDYKLSF

SEQ ID NO: 419070 - protein, 15 aa, Homo sapiens
  CDR3 for beta chain variable domain of TCR clone 209535 (TRBV6-5, TRBJ2-7)
CASSYGGVATYEQYF

SEQ ID NO: 419071 - protein, 13 aa, Homo sapiens
  CDR3 for alpha chain variable domain of TCR clone 209536 (TRAV16, TRAJ34)
CAPRTWNTDKLIF

SEQ ID NO: 419072 - protein, 16 aa, Homo sapiens
  CDR3 for beta chain variable domain of TCR clone 209536 (TRBV2, TRBJ1-3)
CASSRTGGSTGNTIYF

SEQ ID NO: 419073 - protein, 13 aa, Homo sapiens
  CDR3 for alpha chain variable domain of TCR clone 209537 (TRAV12-3, TRAJ9)
CAMGNTGGFETIF

SEQ ID NO: 419074 - protein, 13 aa, Homo sapiens
  CDR3 for beta chain variable domain of TCR clone 209537 (TRBV9, TRBJ2-1)
CASSVGQGGEQFF

SEQ ID NO: 419075 - protein, 13 aa, Homo sapiens
  CDR3 for alpha chain variable domain of TCR clone 209538 (TRAV2, TRAJ40)
CAVVTSGTYKYIF

SEQ ID NO: 419076 - protein, 12 aa, Homo sapiens
  CDR3 for beta chain variable domain of TCR clone 209538 (TRBV5-4, TRBJ2-7)
CASSLEAYEQYF

SEQ ID NO: 419077 - protein, 10 aa, Homo sapiens
  CDR3 for alpha chain variable domain of TCR clone 209539 (TRAV23/DV6, TRAJ57)
CAASSTLSQG

SEQ ID NO: 419078 - protein, 14 aa, Homo sapiens
  CDR3 for beta chain variable domain of TCR clone 209539 (TRBV25-1, TRBJ1-1)
CATTHLGGNTAAFF

SEQ ID NO: 419079 - protein, 12 aa, Homo sapiens
  CDR3 for alpha chain variable domain of TCR clone 209540 (TRAV12-3, TRAJ17)
CAMTLTGNKLTF

SEQ ID NO: 419080 - protein, 15 aa, Homo sapiens
  CDR3 for beta chain variable domain of TCR clone 209540 (TRBV20-1, TRBJ2-7)
CSARDRGSGMNEQYF

SEQ ID NO: 419081 - protein, 14 aa, Homo sapiens
  CDR3 for alpha chain variable domain of TCR clone 209541 (TRAV20, TRAJ22)
CAVQVSGSARQLTL

SEQ ID NO: 419082 - protein, 13 aa, Homo sapiens
  CDR3 for beta chain variable domain of TCR clone 209541 (TRBV20-1, TRBJ2-5)
CSAREGGKETQYF

SEQ ID NO: 419083 - protein, 17 aa, Homo sapiens
  CDR3 for alpha chain variable domain of TCR clone 209542 (TRAV19, TRAJ28)
CALSEASSGAGSYQLTF

SEQ ID NO: 419084 - protein, 12 aa, Homo sapiens
  CDR3 for beta chain variable domain of TCR clone 209542 (TRBV12-5, TRBJ2-5)
CASGQGVETQYF

SEQ ID NO: 419085 - protein, 13 aa, Homo sapiens
  CDR3 for alpha chain variable domain of TCR clone 209543 (TRAV3, TRAJ21)
CAVREPDFNKFYF

SEQ ID NO: 419086 - protein, 12 aa, Homo sapiens
  CDR3 for beta chain variable domain of TCR clone 209543 (TRBV24-1, TRBJ1-1)
CATSDSDRGAFF

SEQ ID NO: 419087 - protein, 15 aa, Homo sapiens
  CDR3 for alpha chain variable domain of TCR clone 209544 (TRAV17, TRAJ22)
CATVAPSGSARQPTF

SEQ ID NO: 419088 - protein, 16 aa, Homo sapiens
  CDR3 for beta chain variable domain of TCR clone 209544 (TRBV10-3, TRBJ2-7)
CAISADCADRPYEQYF

SEQ ID NO: 419089 - protein, 15 aa, Homo sapiens
  CDR3 for alpha chain variable domain of TCR clone 209545 (TRAV27, TRAJ38)
CAARRNAGNNRKLIW

SEQ ID NO: 419090 - protein, 15 aa, Homo sapiens
  CDR3 for beta chain variable domain of TCR clone 209545 (TRBV5-1, TRBJ2-1)
CGGSPPRAPYNEQFF

SEQ ID NO: 419091 - protein, 15 aa, Homo sapiens
  CDR3 for alpha chain variable domain of TCR clone 209546 (TRAV29/DV5, TRAJ24)
CAASGATYSWGKFQF

SEQ ID NO: 419092 - protein, 12 aa, Homo sapiens
  CDR3 for beta chain variable domain of TCR clone 209546 (TRBV11-2, TRBJ2-2)
CASNLPTGELFF

SEQ ID NO: 419093 - protein, 13 aa, Homo sapiens
  CDR3 for alpha chain variable domain of TCR clone 209547 (TRAV2, TRAJ29)
CAAGNSGNTPLVF

SEQ ID NO: 419094 - protein, 14 aa, Homo sapiens
  CDR3 for beta chain variable domain of TCR clone 209547 (TRBV7-9, TRBJ2-2)
CASSQAVNTGELFF

SEQ ID NO: 419095 - protein, 14 aa, Homo sapiens
  CDR3 for alpha chain variable domain of TCR clone 209548 (TRAV3, TRAJ21)
CAVEYQANFNKFYF

SEQ ID NO: 419096 - protein, 18 aa, Homo sapiens
  CDR3 for beta chain variable domain of TCR clone 209548 (TRBV7-9, TRBJ2-1)
CASSLAVSGTSGRNEQFF

SEQ ID NO: 419097 - protein, 16 aa, Homo sapiens
  CDR3 for alpha chain variable domain of TCR clone 209549 (TRAV23/DV6, TRAJ9)
CAASIGGNTGGFKTIF

SEQ ID NO: 419098 - protein, 15 aa, Homo sapiens
  CDR3 for beta chain variable domain of TCR clone 209549 (TRBV11-2, TRBJ1-3)
CASSLDGTVGNTIYF

SEQ ID NO: 419099 - protein, 12 aa, Homo sapiens
  CDR3 for alpha chain variable domain of TCR clone 209550 (TRAV8-3, TRAJ26)
CAGDNYGQNFVF

SEQ ID NO: 419100 - protein, 14 aa, Homo sapiens
  CDR3 for beta chain variable domain of TCR clone 209550 (TRBV10-1, TRBJ2-5)
CASSESQGAKTQYF

SEQ ID NO: 419101 - protein, 12 aa, Homo sapiens
  CDR3 for alpha chain variable domain of TCR clone 209551 (TRAV23/DV6, TRAJ52)
CAASPNAGGTSY

SEQ ID NO: 419102 - protein, 13 aa, Homo sapiens
  CDR3 for beta chain variable domain of TCR clone 209551 (TRBV7-9, TRBJ1-2)
CASSLKQNYGYTF

SEQ ID NO: 419103 - protein, 12 aa, Homo sapiens
  CDR3 for alpha chain variable domain of TCR clone 209552 (TRAV12-1, TRAJ40)
CVVSSGTYQYIF

SEQ ID NO: 419104 - protein, 14 aa, Homo sapiens
  CDR3 for beta chain variable domain of TCR clone 209552 (TRBV20-1, TRBJ2-2)
CSAPDTANTGELFF

SEQ ID NO: 419105 - protein, 15 aa, Homo sapiens
  CDR3 for alpha chain variable domain of TCR clone 209553 (TRAV12-1, TRAJ44)
CVVFVNTGTASKLTF

SEQ ID NO: 419106 - protein, 13 aa, Homo sapiens
  CDR3 for beta chain variable domain of TCR clone 209553 (TRBV13, TRBJ2-5)
CASSPEVGETQYF

SEQ ID NO: 419107 - protein, 12 aa, Homo sapiens
  CDR3 for alpha chain variable domain of TCR clone 209554 (TRAV21, TRAJ13)
PGPSGGYQKVTF

SEQ ID NO: 419108 - protein, 15 aa, Homo sapiens
  CDR3 for beta chain variable domain of TCR clone 209554 (TRBV7-2, TRBJ2-7)
CASSFTGQGAQEQYF

SEQ ID NO: 419109 - protein, 17 aa, Homo sapiens
  CDR3 for alpha chain variable domain of TCR clone 209555 (TRAV3, TRAJ6)
CAVRDGPSSGGSYIPTF

SEQ ID NO: 419110 - protein, 14 aa, Homo sapiens
  CDR3 for beta chain variable domain of TCR clone 209555 (TRBV7-2, TRBJ2-7)
CASSPKTSFYEQYF

SEQ ID NO: 419111 - protein, 11 aa, Homo sapiens
  CDR3 for alpha chain variable domain of TCR clone 209556 (TRAV35, TRAJ30)
CAPGGDDKIIF

SEQ ID NO: 419112 - protein, 16 aa, Homo sapiens
  CDR3 for beta chain variable domain of TCR clone 209556 (TRBV2, TRBJ1-4)
CASNLLQGATNEKLFF

SEQ ID NO: 419113 - protein, 12 aa, Homo sapiens
  CDR3 for alpha chain variable domain of TCR clone 209557 (TRAV35, TRAJ31)
RAAASNNARLMF

SEQ ID NO: 419114 - protein, 14 aa, Homo sapiens
  CDR3 for beta chain variable domain of TCR clone 209557 (TRBV2, TRBJ2-2)
CASSLFGGNGELFF

SEQ ID NO: 419115 - protein, 10 aa, Homo sapiens
  CDR3 for alpha chain variable domain of TCR clone 209558 (TRAV12-1, TRAJ20)
CVVNPRKLSF

SEQ ID NO: 419116 - protein, 14 aa, Homo sapiens
  CDR3 for beta chain variable domain of TCR clone 209558 (TRBV11-2, TRBJ2-1)
CASTTGQGNNEQFF

SEQ ID NO: 419117 - protein, 13 aa, Homo sapiens
  CDR3 for alpha chain variable domain of TCR clone 209559 (TRAV12-3, TRAJ53)
CARRGGSNYKLTF

SEQ ID NO: 419118 - protein, 13 aa, Homo sapiens
  CDR3 for beta chain variable domain of TCR clone 209559 (TRBV7-9, TRBJ1-2)
CASSLKQNYGYTF

SEQ ID NO: 419119 - protein, 14 aa, Homo sapiens
  CDR3 for alpha chain variable domain of TCR clone 209560 (TRAV12-3, TRAJ50)
RAMSPKTSYDKVIF

SEQ ID NO: 419120 - protein, 14 aa, Homo sapiens
  CDR3 for beta chain variable domain of TCR clone 209560 (TRBV19, TRBJ1-1)
CASSMGRNAFEAFF

SEQ ID NO: 419121 - protein, 12 aa, Homo sapiens
  CDR3 for alpha chain variable domain of TCR clone 209561 (TRAV13-2, TRAJ39)
CAENNAGNMLTF

SEQ ID NO: 419122 - protein, 15 aa, Homo sapiens
  CDR3 for beta chain variable domain of TCR clone 209561 (TRBV2, TRBJ2-3)
CASSDFEKATDTQYF

SEQ ID NO: 419123 - protein, 14 aa, Homo sapiens
  CDR3 for alpha chain variable domain of TCR clone 209562 (TRAV2, TRAJ37)
CAVDFTSNTGKLIF

SEQ ID NO: 419124 - protein, 16 aa, Homo sapiens
  CDR3 for beta chain variable domain of TCR clone 209562 (TRBV20-1, TRBJ2-1)
CSASASGYSSYNEQFF

SEQ ID NO: 419125 - protein, 16 aa, Homo sapiens
  CDR3 for alpha chain variable domain of TCR clone 209563 (TRAV26-1, TRAJ37)
CIVRGAGSGTTGKLIF

SEQ ID NO: 419126 - protein, 17 aa, Homo sapiens
  CDR3 for beta chain variable domain of TCR clone 209563 (TRBV4-1, TRBJ2-7)
CASSRDPLGVRGGEQYF

SEQ ID NO: 419127 - protein, 13 aa, Homo sapiens
  CDR3 for alpha chain variable domain of TCR clone 209564 (TRAV12-1, TRAJ4)
CVVSLGGYNKLIF

SEQ ID NO: 419128 - protein, 15 aa, Homo sapiens
  CDR3 for beta chain variable domain of TCR clone 209564 (TRBV5-1, TRBJ1-1)
CASSSGGRRVTEAFF

SEQ ID NO: 419129 - protein, 13 aa, Homo sapiens
  CDR3 for alpha chain variable domain of TCR clone 209565 (TRAV12-3, TRAJ54)
CAVKRRGAQKLVF

SEQ ID NO: 419130 - protein, 18 aa, Homo sapiens
  CDR3 for beta chain variable domain of TCR clone 209565 (TRBV7-3, TRBJ2-5)
CASSLGGAAQGRWETQYF

SEQ ID NO: 419131 - protein, 13 aa, Homo sapiens
  CDR3 for alpha chain variable domain of TCR clone 209566 (TRAV27, TRAJ27)
CAGGITNAGKSTF

SEQ ID NO: 419132 - protein, 14 aa, Homo sapiens
  CDR3 for beta chain variable domain of TCR clone 209566 (TRBV7-6, TRBJ2-7)
CASSPRSAAHEQYF

SEQ ID NO: 419133 - protein, 13 aa, Homo sapiens
  CDR3 for alpha chain variable domain of TCR clone 209567 (TRAV1-1, TRAJ23)
CAVVANQGGKLIF

SEQ ID NO: 419134 - protein, 13 aa, Homo sapiens
  CDR3 for beta chain variable domain of TCR clone 209567 (TRBV7-2, TRBJ2-2)
CASSLAVTGELFF

SEQ ID NO: 419135 - protein, 15 aa, Homo sapiens
  CDR3 for alpha chain variable domain of TCR clone 209568 (TRAV3, TRAJ3)
CAVRDRDSSASKIIF

SEQ ID NO: 419136 - protein, 13 aa, Homo sapiens
  CDR3 for beta chain variable domain of TCR clone 209568 (TRBV12-5, TRBJ2-3)
CASGDRQSDTQYF

SEQ ID NO: 419137 - protein, 12 aa, Homo sapiens
  CDR3 for alpha chain variable domain of TCR clone 209569 (TRAV8-1, TRAJ32)
CAVIGATNKLIF

SEQ ID NO: 419138 - protein, 14 aa, Homo sapiens
  CDR3 for beta chain variable domain of TCR clone 209569 (TRBV27, TRBJ1-6)
CASSFFRVNSPLHF

SEQ ID NO: 419139 - protein, 13 aa, Homo sapiens
  CDR3 for alpha chain variable domain of TCR clone 209570 (TRAV21, TRAJ27)
CAARPGNAGKSTF

SEQ ID NO: 419140 - protein, 16 aa, Homo sapiens
  CDR3 for beta chain variable domain of TCR clone 209570 (TRBV29-1, TRBJ2-7)
CSVEVVGTSGSYEQYF

SEQ ID NO: 419141 - protein, 23 aa, Homo sapiens
  CDR3 for alpha chain variable domain of TCR clone 209571 (TRAV8-6, TRAJ38)
CAVSNAGNNHIQNPDPAVYQLRD

SEQ ID NO: 419142 - protein, 15 aa, Homo sapiens
  CDR3 for beta chain variable domain of TCR clone 209571 (TRBV4-1, TRBJ2-2)
CASSEGQGITGELFF

SEQ ID NO: 419143 - protein, 20 aa, Homo sapiens
  CDR3 for alpha chain variable domain of TCR clone 209572 (TRAV12-3, TRAJ41)
SLFIRDSQPSDSATPEAPNF

SEQ ID NO: 419144 - protein, 13 aa, Homo sapiens
  CDR3 for beta chain variable domain of TCR clone 209572 (TRBV10-3, TRBJ2-3)
CAIRDTGADTQYF

SEQ ID NO: 419145 - protein, 14 aa, Homo sapiens
  CDR3 for alpha chain variable domain of TCR clone 209573 (TRAV12-2, TRAJ13)
CAVKKTGGSQKVTF

SEQ ID NO: 419146 - protein, 14 aa, Homo sapiens
  CDR3 for beta chain variable domain of TCR clone 209573 (TRBV7-2, TRBJ2-7)
CASSPKTSFYEQYF

SEQ ID NO: 419147 - protein, 14 aa, Homo sapiens
  CDR3 for alpha chain variable domain of TCR clone 209574 (TRAV13-1, TRAJ22)
CAAIYSGSARQLTF

SEQ ID NO: 419148 - protein, 13 aa, Homo sapiens
  CDR3 for beta chain variable domain of TCR clone 209574 (TRBV6-3, TRBJ1-2)
CASSLTGDYGYTF

SEQ ID NO: 419149 - protein, 13 aa, Homo sapiens
  CDR3 for alpha chain variable domain of TCR clone 209575 (TRAV8-6, TRAJ54)
CAVEAQGAQKLIF

SEQ ID NO: 419150 - protein, 13 aa, Homo sapiens
  CDR3 for beta chain variable domain of TCR clone 209575 (TRBV6-5, TRBJ2-2)
CASRTVNTGELFF

SEQ ID NO: 419151 - protein, 16 aa, Homo sapiens
  CDR3 for alpha chain variable domain of TCR clone 209576 (TRAV3, TRAJ4)
CAVRPSPAGGYNKLSF

SEQ ID NO: 419152 - protein, 12 aa, Homo sapiens
  CDR3 for beta chain variable domain of TCR clone 209576 (TRBV7-9, TRBJ1-5)
CASSPQGQPQHF

SEQ ID NO: 419153 - protein, 12 aa, Homo sapiens
  CDR3 for alpha chain variable domain of TCR clone 209577 (TRAV12-3, TRAJ17)
CAMTLTGNKQTF

SEQ ID NO: 419154 - protein, 15 aa, Homo sapiens
  CDR3 for beta chain variable domain of TCR clone 209577 (TRBV2, TRBJ2-1)
CASSELAGSYNEQFF

SEQ ID NO: 419155 - protein, 15 aa, Homo sapiens
  CDR3 for alpha chain variable domain of TCR clone 209578 (TRAV3, TRAJ4)
CAVRDGTGGYNKLIF

SEQ ID NO: 419156 - protein, 12 aa, Homo sapiens
  CDR3 for beta chain variable domain of TCR clone 209578 (TRBV7-6, TRBJ2-7)
CASSLADSEQYF

SEQ ID NO: 419157 - protein, 14 aa, Homo sapiens
  CDR3 for alpha chain variable domain of TCR clone 209579 (TRAV12-3, TRAJ54)
CAMRGILGAQKLVF

SEQ ID NO: 419158 - protein, 13 aa, Homo sapiens
  CDR3 for beta chain variable domain of TCR clone 209579 (TRBV19, TRBJ1-1)
CASSPSNGGEAFF

SEQ ID NO: 419159 - protein, 13 aa, Homo sapiens
  CDR3 for alpha chain variable domain of TCR clone 209580 (TRAV38-1, TRAJ20)
CAFMRDNDYKPSF

SEQ ID NO: 419160 - protein, 12 aa, Homo sapiens
  CDR3 for beta chain variable domain of TCR clone 209580 (TRBV18, TRBJ2-5)
CASSPSKETQYF

SEQ ID NO: 419161 - protein, 14 aa, Homo sapiens
  CDR3 for alpha chain variable domain of TCR clone 209581 (TRAV12-2, TRAJ17)
CAVNIKAAGNKLPF

SEQ ID NO: 419162 - protein, 11 aa, Homo sapiens
  CDR3 for beta chain variable domain of TCR clone 209581 (TRBV29-1, TRBJ2-5)
CSEDRTGTQYF

SEQ ID NO: 419163 - protein, 12 aa, Homo sapiens
  CDR3 for alpha chain variable domain of TCR clone 209582 (TRAV12-1, TRAJ9)
CVVNTGGFKTIF

SEQ ID NO: 419164 - protein, 14 aa, Homo sapiens
  CDR3 for beta chain variable domain of TCR clone 209582 (TRBV11-2, TRBJ2-3)
CASSRLARTDTQYF

SEQ ID NO: 419165 - protein, 15 aa, Homo sapiens
  CDR3 for alpha chain variable domain of TCR clone 209583 (TRAV25, TRAJ53)
CPTSNSGGSNYKLTF

SEQ ID NO: 419166 - protein, 18 aa, Homo sapiens
  CDR3 for beta chain variable domain of TCR clone 209583 (TRBV11-2, TRBJ2-3)
CASSLGGASRGAPNTQYC

SEQ ID NO: 419167 - protein, 13 aa, Homo sapiens
  CDR3 for alpha chain variable domain of TCR clone 209584 (TRAV25, TRAJ30)
CAGRVDRDDKIIF

SEQ ID NO: 419168 - protein, 17 aa, Homo sapiens
  CDR3 for beta chain variable domain of TCR clone 209584 (TRBV7-9, TRBJ2-6)
CASSFGAGYSGANVLAF

SEQ ID NO: 419169 - protein, 13 aa, Homo sapiens
  CDR3 for alpha chain variable domain of TCR clone 209585 (TRAV16, TRAJ53)
CALRGGSNYKLTF

SEQ ID NO: 419170 - protein, 16 aa, Homo sapiens
  CDR3 for beta chain variable domain of TCR clone 209585 (TRBV5-4, TRBJ2-3)
CASQQPGAGGADTQYF

SEQ ID NO: 419171 - protein, 14 aa, Homo sapiens
  CDR3 for alpha chain variable domain of TCR clone 209586 (TRAV12-3, TRAJ29)
CAVRRNSGNTPLVF

SEQ ID NO: 419172 - protein, 13 aa, Homo sapiens
  CDR3 for beta chain variable domain of TCR clone 209586 (TRBV12-4, TRBJ2-1)
CASSHYTDNEQFF

SEQ ID NO: 419173 - protein, 13 aa, Homo sapiens
  CDR3 for alpha chain variable domain of TCR clone 209587 (TRAV12-3, TRAJ33)
CAMSVNSNYQLIW

SEQ ID NO: 419174 - protein, 16 aa, Homo sapiens
  CDR3 for beta chain variable domain of TCR clone 209587 (TRBV5-4, TRBJ2-3)
CASQQPGAGGADTQYF

SEQ ID NO: 419175 - protein, 15 aa, Homo sapiens
  CDR3 for alpha chain variable domain of TCR clone 209588 (TRAV12-2, TRAJ53)
CAVNGGGGSNYQLTF

SEQ ID NO: 419176 - protein, 14 aa, Homo sapiens
  CDR3 for beta chain variable domain of TCR clone 209588 (TRBV19, TRBJ2-2)
CASSTLHRSGELFF

SEQ ID NO: 419177 - protein, 15 aa, Homo sapiens
  CDR3 for alpha chain variable domain of TCR clone 209589 (TRAV25, TRAJ52)
CAGTSGGTSYGKLTF

SEQ ID NO: 419178 - protein, 11 aa, Homo sapiens
  CDR3 for beta chain variable domain of TCR clone 209589 (TRBV19, TRBJ1-1)
CASSIGSEAFF

SEQ ID NO: 419179 - protein, 14 aa, Homo sapiens
  CDR3 for alpha chain variable domain of TCR clone 209590 (TRAV12-2, TRAJ11)
YAVRKNTGYSTLTF

SEQ ID NO: 419180 - protein, 14 aa, Homo sapiens
  CDR3 for beta chain variable domain of TCR clone 209590 (TRBV7-2, TRBJ2-5)
CASWQERFRETQYF

SEQ ID NO: 419181 - protein, 16 aa, Homo sapiens
  CDR3 for alpha chain variable domain of TCR clone 209591 (TRAV16, TRAJ42)
CALSGLLGGSQGNLIF

SEQ ID NO: 419182 - protein, 15 aa, Homo sapiens
  CDR3 for beta chain variable domain of TCR clone 209591 (TRBV5-1, TRBJ2-1)
CASSPGGLAENEQFF

SEQ ID NO: 419183 - protein, 10 aa, Homo sapiens
  CDR3 for alpha chain variable domain of TCR clone 209592 (TRAV12-2, TRAJ22)
CAVNETQLTF

SEQ ID NO: 419184 - protein, 12 aa, Homo sapiens
  CDR3 for beta chain variable domain of TCR clone 209592 (TRBV7-3, TRBJ2-5)
RASSPGKETQYF

SEQ ID NO: 419185 - protein, 11 aa, Homo sapiens
  CDR3 for alpha chain variable domain of TCR clone 209593 (TRAV12-1, TRAJ43)
CVVIRNNDLRF

SEQ ID NO: 419186 - protein, 16 aa, Homo sapiens
  CDR3 for beta chain variable domain of TCR clone 209593 (TRBV14, TRBJ2-1)
CASSPRLAGEGNEQFF

SEQ ID NO: 419187 - protein, 13 aa, Homo sapiens
  CDR3 for alpha chain variable domain of TCR clone 209594 (TRAV16, TRAJ15)
CSKFQQAGTALIF

SEQ ID NO: 419188 - protein, 16 aa, Homo sapiens
  CDR3 for beta chain variable domain of TCR clone 209594 (TRBV9, TRBJ2-7)
CASSAGPDRSPYEQYF

SEQ ID NO: 419189 - protein, 13 aa, Homo sapiens
  CDR3 for alpha chain variable domain of TCR clone 209595 (TRAV21, TRAJ20)
CAVGLRVAYKLSF

SEQ ID NO: 419190 - protein, 12 aa, Homo sapiens
  CDR3 for beta chain variable domain of TCR clone 209595 (TRBV27, TRBJ2-5)
CASSPTGETQYF

SEQ ID NO: 419191 - protein, 13 aa, Homo sapiens
  CDR3 for alpha chain variable domain of TCR clone 209596 (TRAV13-1, TRAJ37)
CAAVSGNTGKLIF

SEQ ID NO: 419192 - protein, 13 aa, Homo sapiens
  CDR3 for beta chain variable domain of TCR clone 209596 (TRBV7-9, TRBJ1-2)
CASSLEQNYGYTF

SEQ ID NO: 419193 - protein, 16 aa, Homo sapiens
  CDR3 for alpha chain variable domain of TCR clone 209597 (TRAV3, TRAJ13)
CAVGDFESGGYQKVTF

SEQ ID NO: 419194 - protein, 16 aa, Homo sapiens
  CDR3 for beta chain variable domain of TCR clone 209597 (TRBV27, TRBJ2-5)
CASSYGPGGQKETQYF

SEQ ID NO: 419195 - protein, 19 aa, Homo sapiens
  CDR3 for alpha chain variable domain of TCR clone 209598 (TRAV2, TRAJ20)
ILQVREADAAVYRDCKLSF

SEQ ID NO: 419196 - protein, 17 aa, Homo sapiens
  CDR3 for beta chain variable domain of TCR clone 209598 (TRBV11-2, TRBJ2-1)
CASSLYPPGVEYNGQFF

SEQ ID NO: 419197 - protein, 15 aa, Homo sapiens
  CDR3 for alpha chain variable domain of TCR clone 209599 (TRAV12-2, TRAJ9)
CAVNNGRTGGFKTIF

SEQ ID NO: 419198 - protein, 14 aa, Homo sapiens
  CDR3 for beta chain variable domain of TCR clone 209599 (TRBV4-1, TRBJ1-4)
CASSQERKNERLFF

SEQ ID NO: 419199 - protein, 14 aa, Homo sapiens
  CDR3 for alpha chain variable domain of TCR clone 209600 (TRAV26-1, TRAJ38)
CIADNAGNNRKLTW

SEQ ID NO: 419200 - protein, 16 aa, Homo sapiens
  CDR3 for beta chain variable domain of TCR clone 209600 (TRBV7-9, TRBJ1-2)
CASSLGFSSGEDGYTF

SEQ ID NO: 419201 - protein, 12 aa, Homo sapiens
  CDR3 for alpha chain variable domain of TCR clone 209601 (TRAV13-1, TRAJ16)
CAASNGGQKLLF

SEQ ID NO: 419202 - protein, 14 aa, Homo sapiens
  CDR3 for beta chain variable domain of TCR clone 209601 (TRBV20-1, TRBJ2-7)
SSARDPTGLDEQYF

SEQ ID NO: 419203 - protein, 15 aa, Homo sapiens
  CDR3 for alpha chain variable domain of TCR clone 209602 (TRAV21, TRAJ13)
RAVRPTSGGYQKVTF

SEQ ID NO: 419204 - protein, 18 aa, Homo sapiens
  CDR3 for beta chain variable domain of TCR clone 209602 (TRBV11-3, TRBJ2-1)
CASSSHPGGRDSYNEQFF

SEQ ID NO: 419205 - protein, 13 aa, Homo sapiens
  CDR3 for alpha chain variable domain of TCR clone 209603 (TRAV12-2, TRAJ24)
CAVATDSWGKFQF

SEQ ID NO: 419206 - protein, 16 aa, Homo sapiens
  CDR3 for beta chain variable domain of TCR clone 209603 (TRBV4-1, TRBJ2-7)
CASSLTAGQATYEQYF

SEQ ID NO: 419207 - protein, 14 aa, Homo sapiens
  CDR3 for alpha chain variable domain of TCR clone 209604 (TRAV17, TRAJ6)
CATDASGGSYIPTF

SEQ ID NO: 419208 - protein, 19 aa, Homo sapiens
  CDR3 for beta chain variable domain of TCR clone 209604 (TRBV4-3, TRBJ2-7)
CASCQEFIGWQVTPYEQYF

SEQ ID NO: 419209 - protein, 14 aa, Homo sapiens
  CDR3 for alpha chain variable domain of TCR clone 209605 (TRAV21, TRAJ35)
CAVMPIGFGNVLHC

SEQ ID NO: 419210 - protein, 12 aa, Homo sapiens
  CDR3 for beta chain variable domain of TCR clone 209605 (TRBV5-1, TRBJ2-7)
CASSLDSYEQYF

SEQ ID NO: 419211 - protein, 15 aa, Homo sapiens
  CDR3 for alpha chain variable domain of TCR clone 209606 (TRAV12-3, TRAJ6)
CAMSATSGGSYIPTF

SEQ ID NO: 419212 - protein, 14 aa, Homo sapiens
  CDR3 for beta chain variable domain of TCR clone 209606 (TRBV7-2, TRBJ2-3)
CASRRGLAADTQYF

SEQ ID NO: 419213 - protein, 14 aa, Homo sapiens
  CDR3 for alpha chain variable domain of TCR clone 209607 (TRAV2, TRAJ39)
CAVEGDNAGNMHTF

SEQ ID NO: 419214 - protein, 14 aa, Homo sapiens
  CDR3 for beta chain variable domain of TCR clone 209607 (TRBV28, TRBJ2-7)
CASSLRARGNEQYF

SEQ ID NO: 419215 - protein, 15 aa, Homo sapiens
  CDR3 for alpha chain variable domain of TCR clone 209608 (TRAV3, TRAJ22)
CAVRDRGGSARQLTF

SEQ ID NO: 419216 - protein, 14 aa, Homo sapiens
  CDR3 for beta chain variable domain of TCR clone 209608 (TRBV4-2, TRBJ1-2)
CASSPGGSNYGYTF

SEQ ID NO: 419217 - protein, 15 aa, Homo sapiens
  CDR3 for alpha chain variable domain of TCR clone 209609 (TRAV2, TRAJ9)
CAVAALNTGGFKTIF

SEQ ID NO: 419218 - protein, 15 aa, Homo sapiens
  CDR3 for beta chain variable domain of TCR clone 209609 (TRBV11-2, TRBJ1-6)
CASTLRGTGNSPLHF

SEQ ID NO: 419219 - protein, 16 aa, Homo sapiens
  CDR3 for alpha chain variable domain of TCR clone 209610 (TRAV3, TRAJ3)
CAVRDRVKSSASKIIF

SEQ ID NO: 419220 - protein, 13 aa, Homo sapiens
  CDR3 for beta chain variable domain of TCR clone 209610 (TRBV10-3, TRBJ2-7)
CASKLAVNYEQYF

SEQ ID NO: 419221 - protein, 14 aa, Homo sapiens
  CDR3 for alpha chain variable domain of TCR clone 209611 (TRAV16, TRAJ15)
CALSFNQAGTALIF

SEQ ID NO: 419222 - protein, 14 aa, Homo sapiens
  CDR3 for beta chain variable domain of TCR clone 209611 (TRBV18, TRBJ1-2)
CASSPEGDLYGYTF

SEQ ID NO: 419223 - protein, 13 aa, Homo sapiens
  CDR3 for alpha chain variable domain of TCR clone 209612 (TRAV25, TRAJ17)
CAGLRAAGNKLTF

SEQ ID NO: 419224 - protein, 15 aa, Homo sapiens
  CDR3 for beta chain variable domain of TCR clone 209612 (TRBV20-1, TRBJ1-1)
CSARGGGTLKLSLDK

SEQ ID NO: 419225 - protein, 14 aa, Homo sapiens
  CDR3 for alpha chain variable domain of TCR clone 209613 (TRAV30, TRAJ26)
CGTELVSYGQNFVF

SEQ ID NO: 419226 - protein, 13 aa, Homo sapiens
  CDR3 for beta chain variable domain of TCR clone 209613 (TRBV24-1, TRBJ2-2)
CATSDWSTGELFF

SEQ ID NO: 419227 - protein, 20 aa, Homo sapiens
  CDR3 for alpha chain variable domain of TCR clone 209614 (TRAV26-1, TRAJ42)
CCVLLHRQTYYGGSQGNLIF

SEQ ID NO: 419228 - protein, 15 aa, Homo sapiens
  CDR3 for beta chain variable domain of TCR clone 209614 (TRBV7-2, TRBJ2-1)
CASTHGTGIYNEQFF

SEQ ID NO: 419229 - protein, 13 aa, Homo sapiens
  CDR3 for alpha chain variable domain of TCR clone 209615 (TRAV20, TRAJ48)
CAVHLVGNEKLTF

SEQ ID NO: 419230 - protein, 15 aa, Homo sapiens
  CDR3 for beta chain variable domain of TCR clone 209615 (TRBV6-5, TRBJ2-6)
CASSQWEAGANVLTF

SEQ ID NO: 419231 - protein, 14 aa, Homo sapiens
  CDR3 for alpha chain variable domain of TCR clone 209616 (TRAV1-2, TRAJ16)
FAVNRFSDGQKLLF

SEQ ID NO: 419232 - protein, 15 aa, Homo sapiens
  CDR3 for beta chain variable domain of TCR clone 209616 (TRBV27, TRBJ2-1)
CASSNGGGSSNEQFF

SEQ ID NO: 419233 - protein, 11 aa, Homo sapiens
  CDR3 for alpha chain variable domain of TCR clone 209617 (TRAV12-1, TRAJ21)
CVVNNFNKFYF

SEQ ID NO: 419234 - protein, 17 aa, Homo sapiens
  CDR3 for beta chain variable domain of TCR clone 209617 (TRBV28, TRBJ2-7)
CASSPGLAGGDSSEQYF

SEQ ID NO: 419235 - protein, 13 aa, Homo sapiens
  CDR3 for alpha chain variable domain of TCR clone 209618 (TRAV27, TRAJ41)
CAGEGNSGYALNF

SEQ ID NO: 419236 - protein, 15 aa, Homo sapiens
  CDR3 for beta chain variable domain of TCR clone 209618 (TRBV7-9, TRBJ1-5)
CASSQGHQPNQTQHF

SEQ ID NO: 419237 - protein, 14 aa, Homo sapiens
  CDR3 for alpha chain variable domain of TCR clone 209619 (TRAV29/DV5, TRAJ36)
CAARRKTGANNLFF

SEQ ID NO: 419238 - protein, 12 aa, Homo sapiens
  CDR3 for beta chain variable domain of TCR clone 209619 (TRBV11-2, TRBJ2-1)
CASRPGNNEQFF

SEQ ID NO: 419239 - protein, 21 aa, Homo sapiens
  CDR3 for alpha chain variable domain of TCR clone 209620 (TRAV27, TRAJ6)
CAGGTRGSYIPTLEEEPALLF

SEQ ID NO: 419240 - protein, 15 aa, Homo sapiens
  CDR3 for beta chain variable domain of TCR clone 209620 (TRBV5-5, TRBJ2-7)
CASSLAAPLSYEQYF

SEQ ID NO: 419241 - protein, 19 aa, Homo sapiens
  CDR3 for alpha chain variable domain of TCR clone 209621 (TRAV1-2, TRAJ26)
CLLPLCCERPDNYGQNSVF

SEQ ID NO: 419242 - protein, 11 aa, Homo sapiens
  CDR3 for beta chain variable domain of TCR clone 209621 (TRBV12-4, TRBJ2-3)
CASTATDTQYF

SEQ ID NO: 419243 - protein, 11 aa, Homo sapiens
  CDR3 for alpha chain variable domain of TCR clone 209622 (TRAV12-1, TRAJ16)
CGDPDGQKLLF

SEQ ID NO: 419244 - protein, 11 aa, Homo sapiens
  CDR3 for beta chain variable domain of TCR clone 209622 (TRBV29-1, TRBJ2-5)
CREDRTGTQYF

SEQ ID NO: 419245 - protein, 19 aa, Homo sapiens
  CDR3 for alpha chain variable domain of TCR clone 209623 (TRAV38-1, TRAJ53)
CAFMKHGLESGGSNYKLTF

SEQ ID NO: 419246 - protein, 16 aa, Homo sapiens
  CDR3 for beta chain variable domain of TCR clone 209623 (TRBV28, TRBJ1-5)
CASSFRGGYSNQPQHF

SEQ ID NO: 419247 - protein, 15 aa, Homo sapiens
  CDR3 for alpha chain variable domain of TCR clone 209624 (TRAV12-2, TRAJ53)
CAVNGGGGSNYKLTF

SEQ ID NO: 419248 - protein, 17 aa, Homo sapiens
  CDR3 for beta chain variable domain of TCR clone 209624 (TRBV7-3, TRBJ2-3)
CASSLMKRMRGADTQYG

SEQ ID NO: 419249 - protein, 17 aa, Homo sapiens
  CDR3 for alpha chain variable domain of TCR clone 209625 (TRAV3, TRAJ42)
CAVRDGAYGGSQGNLIF

SEQ ID NO: 419250 - protein, 15 aa, Homo sapiens
  CDR3 for beta chain variable domain of TCR clone 209625 (TRBV6-6, TRBJ2-7)
CASSYSYGGSYEQYF

SEQ ID NO: 419251 - protein, 13 aa, Homo sapiens
  CDR3 for alpha chain variable domain of TCR clone 209626 (TRAV21, TRAJ27)
CAVRPGNAGKSTF

SEQ ID NO: 419252 - protein, 12 aa, Homo sapiens
  CDR3 for beta chain variable domain of TCR clone 209626 (TRBV11-2, TRBJ2-2)
CASSLGGGELFL

SEQ ID NO: 419253 - protein, 15 aa, Homo sapiens
  CDR3 for alpha chain variable domain of TCR clone 209627 (TRAV12-1, TRAJ15)
CVVTRANQAGPALIF

SEQ ID NO: 419254 - protein, 14 aa, Homo sapiens
  CDR3 for beta chain variable domain of TCR clone 209627 (TRBV5-1, TRBJ1-1)
CASSLVSINTEAFF

SEQ ID NO: 419255 - protein, 13 aa, Homo sapiens
  CDR3 for alpha chain variable domain of TCR clone 209628 (TRAV8-3, TRAJ43)
CVVGPDNNNDMRF

SEQ ID NO: 419256 - protein, 14 aa, Homo sapiens
  CDR3 for beta chain variable domain of TCR clone 209628 (TRBV19, TRBJ2-1)
CASPTFVLSGEQFF

SEQ ID NO: 419257 - protein, 17 aa, Homo sapiens
  CDR3 for alpha chain variable domain of TCR clone 209629 (TRAV3, TRAJ6)
CAVRDGPRAGGSYIPTL

SEQ ID NO: 419258 - protein, 15 aa, Homo sapiens
  CDR3 for beta chain variable domain of TCR clone 209629 (TRBV20-1, TRBJ1-1)
CSASWDRFLNTEAFF

SEQ ID NO: 419259 - protein, 11 aa, Homo sapiens
  CDR3 for alpha chain variable domain of TCR clone 209630 (TRAV13-1, TRAJ6)
CATLGSYIPTF

SEQ ID NO: 419260 - protein, 12 aa, Homo sapiens
  CDR3 for beta chain variable domain of TCR clone 209630 (TRBV11-2, TRBJ2-1)
CSSSPGNNEQFF

SEQ ID NO: 419261 - protein, 16 aa, Homo sapiens
  CDR3 for alpha chain variable domain of TCR clone 209631 (TRAV3, TRAJ37)
CAVRGKGFGNTGKLIF

SEQ ID NO: 419262 - protein, 15 aa, Homo sapiens
  CDR3 for beta chain variable domain of TCR clone 209631 (TRBV7-3, TRBJ2-2)
CASSETGQGTGELFF

SEQ ID NO: 419263 - protein, 17 aa, Homo sapiens
  CDR3 for alpha chain variable domain of TCR clone 209632 (TRAV26-1, )
CIDIQNPDPAVYQLRNS

SEQ ID NO: 419264 - protein, 19 aa, Homo sapiens
  CDR3 for beta chain variable domain of TCR clone 209632 (TRBV19, TRBJ2-5)
CASSIGQVTDFFLGETQYF

SEQ ID NO: 419265 - protein, 10 aa, Homo sapiens
  CDR3 for alpha chain variable domain of TCR clone 209633 (TRAV12-2, TRAJ16)
CAVRGQKLLF

SEQ ID NO: 419266 - protein, 13 aa, Homo sapiens
  CDR3 for beta chain variable domain of TCR clone 209633 (TRBV18, TRBJ1-1)
CASSGGRNTEAFF

SEQ ID NO: 419267 - protein, 15 aa, Homo sapiens
  CDR3 for alpha chain variable domain of TCR clone 209634 (TRAV3, TRAJ32)
CAVSSYGGATNKLIF

SEQ ID NO: 419268 - protein, 16 aa, Homo sapiens
  CDR3 for beta chain variable domain of TCR clone 209634 (TRBV5-1, TRBJ2-5)
RASSLSLAGAQETQYF

SEQ ID NO: 419269 - protein, 14 aa, Homo sapiens
  CDR3 for alpha chain variable domain of TCR clone 209635 (TRAV1-2, TRAJ16)
CAVNRFSDVQKLLF

SEQ ID NO: 419270 - protein, 12 aa, Homo sapiens
  CDR3 for beta chain variable domain of TCR clone 209635 (TRBV7-6, TRBJ2-7)
CASSLADSEQYF

SEQ ID NO: 419271 - protein, 14 aa, Homo sapiens
  CDR3 for alpha chain variable domain of TCR clone 209636 (TRAV20, TRAJ42)
CAVQAGGSQGNLIF

SEQ ID NO: 419272 - protein, 16 aa, Homo sapiens
  CDR3 for beta chain variable domain of TCR clone 209636 (TRBV11-2, TRBJ2-2)
CASSLRTGNLIGELFF

SEQ ID NO: 419273 - protein, 11 aa, Homo sapiens
  CDR3 for alpha chain variable domain of TCR clone 209637 (TRAV2, TRAJ20)
CAVLKDYKLSF

SEQ ID NO: 419274 - protein, 16 aa, Homo sapiens
  CDR3 for beta chain variable domain of TCR clone 209637 (TRBV11-1, TRBJ2-2)
CASSAEGLKNTGELFF

SEQ ID NO: 419275 - protein, 16 aa, Homo sapiens
  CDR3 for alpha chain variable domain of TCR clone 209638 (TRAV17, TRAJ52)
CATSNAGGTSYGKLTF

SEQ ID NO: 419276 - protein, 12 aa, Homo sapiens
  CDR3 for beta chain variable domain of TCR clone 209638 (TRBV7-8, TRBJ2-7)
CASSLGDREQYF

SEQ ID NO: 419277 - protein, 13 aa, Homo sapiens
  CDR3 for alpha chain variable domain of TCR clone 209639 (TRAV21, TRAJ56)
CAVRLGANSKLTF

SEQ ID NO: 419278 - protein, 12 aa, Homo sapiens
  CDR3 for beta chain variable domain of TCR clone 209639 (TRBV12-4, TRBJ2-3)
CASISTTDTQYF

SEQ ID NO: 419279 - protein, 15 aa, Homo sapiens
  CDR3 for alpha chain variable domain of TCR clone 209640 (TRAV29/DV5, TRAJ53)
CAALNSGGSNYKLTF

SEQ ID NO: 419280 - protein, 15 aa, Homo sapiens
  CDR3 for beta chain variable domain of TCR clone 209640 (TRBV18, TRBJ1-1)
CASSPSSWVNTEAFF

SEQ ID NO: 419281 - protein, 15 aa, Homo sapiens
  CDR3 for alpha chain variable domain of TCR clone 209641 (TRAV21, TRAJ32)
CAGNSYGGATNKLIF

SEQ ID NO: 419282 - protein, 18 aa, Homo sapiens
  CDR3 for beta chain variable domain of TCR clone 209641 (TRBV7-9, TRBJ2-1)
CASSTGLAEGSSYNEQFF

SEQ ID NO: 419283 - protein, 15 aa, Homo sapiens
  CDR3 for alpha chain variable domain of TCR clone 209642 (TRAV17, TRAJ4)
CASGTWSGGYNKLIF

SEQ ID NO: 419284 - protein, 13 aa, Homo sapiens
  CDR3 for beta chain variable domain of TCR clone 209642 (TRBV6-6, TRBJ2-7)
CASSPKHLAEQYF

SEQ ID NO: 419285 - protein, 13 aa, Homo sapiens
  CDR3 for alpha chain variable domain of TCR clone 209643 (TRAV13-2, TRAJ53)
CAENMGSNYKLTF

SEQ ID NO: 419286 - protein, 13 aa, Homo sapiens
  CDR3 for beta chain variable domain of TCR clone 209643 (TRBV4-1, TRBJ2-2)
CASSQENTVELFF

SEQ ID NO: 419287 - protein, 10 aa, Homo sapiens
  CDR3 for alpha chain variable domain of TCR clone 209644 (TRAV26-1, TRAJ22)
CIVSLNFFWF

SEQ ID NO: 419288 - protein, 15 aa, Homo sapiens
  CDR3 for beta chain variable domain of TCR clone 209644 (TRBV12-4, TRBJ2-5)
CASSPPTGLQETQYF

SEQ ID NO: 419289 - protein, 12 aa, Homo sapiens
  CDR3 for alpha chain variable domain of TCR clone 209645 (TRAV3, TRAJ20)
CAVRDPDYKLSF

SEQ ID NO: 419290 - protein, 13 aa, Homo sapiens
  CDR3 for beta chain variable domain of TCR clone 209645 (TRBV2, TRBJ2-7)
CASSVGGSGEQYF

SEQ ID NO: 419291 - protein, 14 aa, Homo sapiens
  CDR3 for alpha chain variable domain of TCR clone 209646 (TRAV35, TRAJ33)
CWPRGRDSNYQLIW

SEQ ID NO: 419292 - protein, 11 aa, Homo sapiens
  CDR3 for beta chain variable domain of TCR clone 209646 (TRBV10-3, TRBJ2-7)
CAFSEGLEQYF

SEQ ID NO: 419293 - protein, 14 aa, Homo sapiens
  CDR3 for alpha chain variable domain of TCR clone 209647 (TRAV2, TRAJ22)
CAVGRGGSARQLTF

SEQ ID NO: 419294 - protein, 16 aa, Homo sapiens
  CDR3 for beta chain variable domain of TCR clone 209647 (TRBV11-3, TRBJ2-5)
CASSPSGQGVKGTQYF

SEQ ID NO: 419295 - protein, 21 aa, Homo sapiens
  CDR3 for alpha chain variable domain of TCR clone 209648 (TRAV1-1, TRAJ6)
CLLLLRCERLERTGGSYIPTF

SEQ ID NO: 419296 - protein, 13 aa, Homo sapiens
  CDR3 for beta chain variable domain of TCR clone 209648 (TRBV7-2, TRBJ2-5)
CQQLVRGGGTQYF

SEQ ID NO: 419297 - protein, 11 aa, Homo sapiens
  CDR3 for alpha chain variable domain of TCR clone 209649 (TRAV12-2, )
CAVASLAATIT

SEQ ID NO: 419298 - protein, 16 aa, Homo sapiens
  CDR3 for beta chain variable domain of TCR clone 209649 (TRBV5-1, TRBJ2-2)
CASSSRAGGRTGELFF

SEQ ID NO: 419299 - protein, 15 aa, Homo sapiens
  CDR3 for alpha chain variable domain of TCR clone 209650 (TRAV16, TRAJ20)
CALKGGLRADYKLSF

SEQ ID NO: 419300 - protein, 16 aa, Homo sapiens
  CDR3 for beta chain variable domain of TCR clone 209650 (TRBV11-3, TRBJ2-2)
CASSSRTSPGTGELFC

SEQ ID NO: 419301 - protein, 13 aa, Homo sapiens
  CDR3 for alpha chain variable domain of TCR clone 209651 (TRAV9-2, TRAJ53)
CALSGGSNYKLTF

SEQ ID NO: 419302 - protein, 17 aa, Homo sapiens
  CDR3 for beta chain variable domain of TCR clone 209651 (TRBV11-2, TRBJ2-1)
CASSLYPPGVEYDEQFF

SEQ ID NO: 419303 - protein, 16 aa, Homo sapiens
  CDR3 for alpha chain variable domain of TCR clone 209652 (TRAV12-1, TRAJ45)
CVVIRYSGGGADGLTF

SEQ ID NO: 419304 - protein, 12 aa, Homo sapiens
  CDR3 for beta chain variable domain of TCR clone 209652 (TRBV6-5, TRBJ2-2)
CASRLITGELFF

SEQ ID NO: 419305 - protein, 15 aa, Homo sapiens
  CDR3 for alpha chain variable domain of TCR clone 209653 (TRAV4, TRAJ39)
CLVGPNYNAGNMLTF

SEQ ID NO: 419306 - protein, 13 aa, Homo sapiens
  CDR3 for beta chain variable domain of TCR clone 209653 (TRBV11-2, TRBJ2-5)
CASSSTGEETQYF

SEQ ID NO: 419307 - protein, 16 aa, Homo sapiens
  CDR3 for alpha chain variable domain of TCR clone 209654 (TRAV3, TRAJ18)
CAVRDGRGSTLGRLYF

SEQ ID NO: 419308 - protein, 17 aa, Homo sapiens
  CDR3 for beta chain variable domain of TCR clone 209654 (TRBV13, TRBJ2-3)
CASSLSRVAGGRNTQYF

SEQ ID NO: 419309 - protein, 15 aa, Homo sapiens
  CDR3 for alpha chain variable domain of TCR clone 209655 (TRAV8-3, TRAJ45)
CASSYSGGGADGFTF

SEQ ID NO: 419310 - protein, 16 aa, Homo sapiens
  CDR3 for beta chain variable domain of TCR clone 209655 (TRBV20-1, TRBJ2-2)
CSASASGIPGAGELFY

SEQ ID NO: 419311 - protein, 12 aa, Homo sapiens
  CDR3 for alpha chain variable domain of TCR clone 209656 (TRAV13-1, TRAJ53)
CAAGGSNYKLTF

SEQ ID NO: 419312 - protein, 14 aa, Homo sapiens
  CDR3 for beta chain variable domain of TCR clone 209656 (TRBV13, TRBJ2-7)
CASSLKGASYEQYF

SEQ ID NO: 419313 - protein, 14 aa, Homo sapiens
  CDR3 for alpha chain variable domain of TCR clone 209657 (TRAV3, TRAJ9)
CAVRLNTGGFKTIF

SEQ ID NO: 419314 - protein, 13 aa, Homo sapiens
  CDR3 for beta chain variable domain of TCR clone 209657 (TRBV20-1, TRBJ1-1)
CSARGGGNTEAFF

SEQ ID NO: 419315 - protein, 18 aa, Homo sapiens
  CDR3 for alpha chain variable domain of TCR clone 209658 (TRAV12-2, )
CAVEDIQNPDPAVYQLRD

SEQ ID NO: 419316 - protein, 13 aa, Homo sapiens
  CDR3 for beta chain variable domain of TCR clone 209658 (TRBV12-5, TRBJ2-3)
CANGDRQSDTQYF

SEQ ID NO: 419317 - protein, 13 aa, Homo sapiens
  CDR3 for alpha chain variable domain of TCR clone 209659 (TRAV8-6, TRAJ21)
CAVSPSSHNKFYF

SEQ ID NO: 419318 - protein, 14 aa, Homo sapiens
  CDR3 for beta chain variable domain of TCR clone 209659 (TRBV7-9, TRBJ2-5)
CASSLDAAQETQYF

SEQ ID NO: 419319 - protein, 12 aa, Homo sapiens
  CDR3 for alpha chain variable domain of TCR clone 209660 (TRAV36/DV7, TRAJ40)
CAVGTGTYKYIF

SEQ ID NO: 419320 - protein, 14 aa, Homo sapiens
  CDR3 for beta chain variable domain of TCR clone 209660 (TRBV7-8, TRBJ2-3)
CASSLEAGTDTQYF

SEQ ID NO: 419321 - protein, 14 aa, Homo sapiens
  CDR3 for alpha chain variable domain of TCR clone 209661 (TRAV12-2, TRAJ13)
CAVKKTGGYQKVTL

SEQ ID NO: 419322 - protein, 16 aa, Homo sapiens
  CDR3 for beta chain variable domain of TCR clone 209661 (TRBV7-9, TRBJ2-1)
CASSDVAGGSYNEQFF

SEQ ID NO: 419323 - protein, 14 aa, Homo sapiens
  CDR3 for alpha chain variable domain of TCR clone 209662 (TRAV13-1, TRAJ35)
CAASKGGFGNVLHC

SEQ ID NO: 419324 - protein, 13 aa, Homo sapiens
  CDR3 for beta chain variable domain of TCR clone 209662 (TRBV7-3, TRBJ1-1)
CACSQDWGAEDFF

SEQ ID NO: 419325 - protein, 14 aa, Homo sapiens
  CDR3 for alpha chain variable domain of TCR clone 209663 (TRAV19, TRAJ49)
CALSEANTGNQFYF

SEQ ID NO: 419326 - protein, 15 aa, Homo sapiens
  CDR3 for beta chain variable domain of TCR clone 209663 (TRBV6-1, TRBJ2-5)
CASSEGWGIQETQYF

SEQ ID NO: 419327 - protein, 14 aa, Homo sapiens
  CDR3 for alpha chain variable domain of TCR clone 209664 (TRAV38-2/DV8, TRAJ31)
CAYRRDNNNARLMF

SEQ ID NO: 419328 - protein, 13 aa, Homo sapiens
  CDR3 for beta chain variable domain of TCR clone 209664 (TRBV28, TRBJ1-1)
CASSKQGWTEAFF

SEQ ID NO: 419329 - protein, 15 aa, Homo sapiens
  CDR3 for alpha chain variable domain of TCR clone 209665 (TRAV25, TRAJ52)
CAGTSGGTSYGKPTF

SEQ ID NO: 419330 - protein, 16 aa, Homo sapiens
  CDR3 for beta chain variable domain of TCR clone 209665 (TRBV15, TRBJ1-2)
CATSRGPRTGGGGYSF

SEQ ID NO: 419331 - protein, 17 aa, Homo sapiens
  CDR3 for alpha chain variable domain of TCR clone 209666 (TRAV38-1, TRAJ45)
CAFMRSHSGGGADGLTF

SEQ ID NO: 419332 - protein, 14 aa, Homo sapiens
  CDR3 for beta chain variable domain of TCR clone 209666 (TRBV5-1, TRBJ1-4)
CASSLDRTHEKLFF

SEQ ID NO: 419333 - protein, 14 aa, Homo sapiens
  CDR3 for alpha chain variable domain of TCR clone 209667 (TRAV13-1, TRAJ40)
CAASMTSGTYKYIF

SEQ ID NO: 419334 - protein, 15 aa, Homo sapiens
  CDR3 for beta chain variable domain of TCR clone 209667 (TRBV7-3, TRBJ2-1)
CASSPTGGAEVEQFF

SEQ ID NO: 419335 - protein, 12 aa, Homo sapiens
  CDR3 for alpha chain variable domain of TCR clone 209668 (TRAV13-1, TRAJ49)
CAASPMGNQFYF

SEQ ID NO: 419336 - protein, 13 aa, Homo sapiens
  CDR3 for beta chain variable domain of TCR clone 209668 (TRBV10-3, TRBJ2-7)
CASKLAVNYEQYF

SEQ ID NO: 419337 - protein, 10 aa, Homo sapiens
  CDR3 for alpha chain variable domain of TCR clone 209669 (TRAV25, TRAJ20)
CAVNDYKPSF

SEQ ID NO: 419338 - protein, 18 aa, Homo sapiens
  CDR3 for beta chain variable domain of TCR clone 209669 (TRBV20-1, TRBJ2-6)
CSAETTPTHGSGANVLTF

SEQ ID NO: 419339 - protein, 14 aa, Homo sapiens
  CDR3 for alpha chain variable domain of TCR clone 209670 (TRAV12-2, TRAJ13)
CAVTKTGGYPKVTF

SEQ ID NO: 419340 - protein, 15 aa, Homo sapiens
  CDR3 for beta chain variable domain of TCR clone 209670 (TRBV27, TRBJ2-1)
CASSNGGGSSNEQFF

SEQ ID NO: 419341 - protein, 19 aa, Homo sapiens
  CDR3 for alpha chain variable domain of TCR clone 209671 (TRAV1-1, TRAJ6)
CAVRDYRGQEEATSLHLEE

SEQ ID NO: 419342 - protein, 13 aa, Homo sapiens
  CDR3 for beta chain variable domain of TCR clone 209671 (TRBV10-2, TRBJ2-7)
CASGASGGYEQYF

SEQ ID NO: 419343 - protein, 11 aa, Homo sapiens
  CDR3 for alpha chain variable domain of TCR clone 209672 (TRAV23/DV6, TRAJ58)
CAARLLRGETS

SEQ ID NO: 419344 - protein, 19 aa, Homo sapiens
  CDR3 for beta chain variable domain of TCR clone 209672 (TRBV25-1, TRBJ2-2)
CAILVYRVDRGRKTGELFF

SEQ ID NO: 419345 - protein, 11 aa, Homo sapiens
  CDR3 for alpha chain variable domain of TCR clone 209673 (TRAV12-1, TRAJ30)
CVVNGQAKIIF

SEQ ID NO: 419346 - protein, 12 aa, Homo sapiens
  CDR3 for beta chain variable domain of TCR clone 209673 (TRBV27, TRBJ2-2)
CASKLFTGELFF

SEQ ID NO: 419347 - protein, 14 aa, Homo sapiens
  CDR3 for alpha chain variable domain of TCR clone 209674 (TRAV1-2, TRAJ16)
CAVTRFSDAQKLLF

SEQ ID NO: 419348 - protein, 14 aa, Homo sapiens
  CDR3 for beta chain variable domain of TCR clone 209674 (TRBV7-9, TRBJ2-1)
CASSPRDSLYEQFF

SEQ ID NO: 419349 - protein, 12 aa, Homo sapiens
  CDR3 for alpha chain variable domain of TCR clone 209675 (TRAV12-3, TRAJ17)
CAMTLTGNKLTF

SEQ ID NO: 419350 - protein, 13 aa, Homo sapiens
  CDR3 for beta chain variable domain of TCR clone 209675 (TRBV5-1, TRBJ1-1)
CAISADWDTEAFF

SEQ ID NO: 419351 - protein, 11 aa, Homo sapiens
  CDR3 for alpha chain variable domain of TCR clone 209676 (TRAV3, TRAJ21)
CAVGNFNKFYF

SEQ ID NO: 419352 - protein, 14 aa, Homo sapiens
  CDR3 for beta chain variable domain of TCR clone 209676 (TRBV20-1, TRBJ2-7)
CSARRSGSYYEEYF

SEQ ID NO: 419353 - protein, 17 aa, Homo sapiens
  CDR3 for alpha chain variable domain of TCR clone 209677 (TRAV13-1, TRAJ52)
CAAGRNAGGTSYGKLTF

SEQ ID NO: 419354 - protein, 13 aa, Homo sapiens
  CDR3 for beta chain variable domain of TCR clone 209677 (TRBV7-2, TRBJ1-1)
CASNLKGARVVFF

SEQ ID NO: 419355 - protein, 13 aa, Homo sapiens
  CDR3 for alpha chain variable domain of TCR clone 209678 (TRAV27, TRAJ29)
CAGAHSGNTPLVF

SEQ ID NO: 419356 - protein, 14 aa, Homo sapiens
  CDR3 for beta chain variable domain of TCR clone 209678 (TRBV6-3, TRBJ2-1)
CASSSNQWGNEQFF

SEQ ID NO: 419357 - protein, 12 aa, Homo sapiens
  CDR3 for alpha chain variable domain of TCR clone 209679 (TRAV38-1, TRAJ43)
CAFMTRQADMRF

SEQ ID NO: 419358 - protein, 14 aa, Homo sapiens
  CDR3 for beta chain variable domain of TCR clone 209679 (TRBV27, TRBJ2-2)
CASSLSVVDGRMFF

SEQ ID NO: 419359 - protein, 16 aa, Homo sapiens
  CDR3 for alpha chain variable domain of TCR clone 209680 (TRAV12-3, TRAJ45)
CAMGWGSGGGADGLTF

SEQ ID NO: 419360 - protein, 15 aa, Homo sapiens
  CDR3 for beta chain variable domain of TCR clone 209680 (TRBV11-2, TRBJ2-2)
CASSSDRVNAGELFF

SEQ ID NO: 419361 - protein, 16 aa, Homo sapiens
  CDR3 for alpha chain variable domain of TCR clone 209681 (TRAV14/DV4, TRAJ54)
CAMREGRIQGAQKQVF

SEQ ID NO: 419362 - protein, 15 aa, Homo sapiens
  CDR3 for beta chain variable domain of TCR clone 209681 (TRBV3-1, TRBJ2-1)
CASSQQPSGGNEQFF

SEQ ID NO: 419363 - protein, 14 aa, Homo sapiens
  CDR3 for alpha chain variable domain of TCR clone 209682 (TRAV8-3, TRAJ4)
CTVGASGSYNKLIF

SEQ ID NO: 419364 - protein, 16 aa, Homo sapiens
  CDR3 for beta chain variable domain of TCR clone 209682 (TRBV4-3, TRBJ2-2)
CASSHLQGSGTGELFF

SEQ ID NO: 419365 - protein, 13 aa, Homo sapiens
  CDR3 for alpha chain variable domain of TCR clone 209683 (TRAV2, TRAJ40)
CAVVTSGTYKCTF

SEQ ID NO: 419366 - protein, 14 aa, Homo sapiens
  CDR3 for beta chain variable domain of TCR clone 209683 (TRBV19, TRBJ2-1)
CASPTVVLSGEQFF

SEQ ID NO: 419367 - protein, 13 aa, Homo sapiens
  CDR3 for alpha chain variable domain of TCR clone 209684 (TRAV13-1, TRAJ21)
CAASKGNFNKFYF

SEQ ID NO: 419368 - protein, 12 aa, Homo sapiens
  CDR3 for beta chain variable domain of TCR clone 209684 (TRBV7-9, TRBJ2-7)
CASSIKREEQYF

SEQ ID NO: 419369 - protein, 10 aa, Homo sapiens
  CDR3 for alpha chain variable domain of TCR clone 209685 (TRAV21, TRAJ34)
CAADTDKLIF

SEQ ID NO: 419370 - protein, 13 aa, Homo sapiens
  CDR3 for beta chain variable domain of TCR clone 209685 (TRBV7-7, TRBJ2-5)
CASSRSGQETQYF

SEQ ID NO: 419371 - protein, 15 aa, Homo sapiens
  CDR3 for alpha chain variable domain of TCR clone 209686 (TRAV8-3, TRAJ45)
CAVEGSGGGADGLTF

SEQ ID NO: 419372 - protein, 16 aa, Homo sapiens
  CDR3 for beta chain variable domain of TCR clone 209686 (TRBV6-5, TRBJ2-6)
CASSYPLSAGANVLTF

SEQ ID NO: 419373 - protein, 14 aa, Homo sapiens
  CDR3 for alpha chain variable domain of TCR clone 209687 (TRAV2, TRAJ37)
CAVDFTSNTGKLIF

SEQ ID NO: 419374 - protein, 15 aa, Homo sapiens
  CDR3 for beta chain variable domain of TCR clone 209687 (TRBV20-1, TRBJ1-1)
CSPSRGVTGNTEAFF

SEQ ID NO: 419375 - protein, 18 aa, Homo sapiens
  CDR3 for alpha chain variable domain of TCR clone 209688 (TRAV13-1, TRAJ52)
CAASKRSAGGASYGKLTF

SEQ ID NO: 419376 - protein, 13 aa, Homo sapiens
  CDR3 for beta chain variable domain of TCR clone 209688 (TRBV12-4, TRBJ1-2)
CASSLRQGKGYTR

SEQ ID NO: 419377 - protein, 14 aa, Homo sapiens
  CDR3 for alpha chain variable domain of TCR clone 209689 (TRAV13-1, TRAJ9)
CAASALTGGFKTLF

SEQ ID NO: 419378 - protein, 15 aa, Homo sapiens
  CDR3 for beta chain variable domain of TCR clone 209689 (TRBV10-3, TRBJ2-3)
CAISLTSGGTDTQYF

SEQ ID NO: 419379 - protein, 18 aa, Homo sapiens
  CDR3 for alpha chain variable domain of TCR clone 209690 (TRAV21, TRAJ52)
CAVRPSPAGGTSYGKLTF

SEQ ID NO: 419380 - protein, 13 aa, Homo sapiens
  CDR3 for beta chain variable domain of TCR clone 209690 (TRBV9, TRBJ2-1)
CASSPSGGSEQFF

SEQ ID NO: 419381 - protein, 14 aa, Homo sapiens
  CDR3 for alpha chain variable domain of TCR clone 209691 (TRAV12-1, TRAJ30)
CVVRGMNRDDKITF

SEQ ID NO: 419382 - protein, 14 aa, Homo sapiens
  CDR3 for beta chain variable domain of TCR clone 209691 (TRBV7-2, TRBJ2-1)
CASSLTSGNRRQFF

SEQ ID NO: 419383 - protein, 14 aa, Homo sapiens
  CDR3 for alpha chain variable domain of TCR clone 209692 (TRAV13-2, TRAJ29)
CAEGTFEANTPLVF

SEQ ID NO: 419384 - protein, 13 aa, Homo sapiens
  CDR3 for beta chain variable domain of TCR clone 209692 (TRBV2, TRBJ1-1)
CASNLLRNTEAFF

SEQ ID NO: 419385 - protein, 14 aa, Homo sapiens
  CDR3 for alpha chain variable domain of TCR clone 209693 (TRAV12-2, TRAJ17)
CAVLFKAAGNKVTV

SEQ ID NO: 419386 - protein, 17 aa, Homo sapiens
  CDR3 for beta chain variable domain of TCR clone 209693 (TRBV11-2, TRBJ2-1)
CASSLYPPGVEYNEQFF

SEQ ID NO: 419387 - protein, 12 aa, Homo sapiens
  CDR3 for alpha chain variable domain of TCR clone 209694 (TRAV4, TRAJ26)
CLVGDYGQHFVF

SEQ ID NO: 419388 - protein, 16 aa, Homo sapiens
  CDR3 for beta chain variable domain of TCR clone 209694 (TRBV7-2, TRBJ1-2)
CASSSNQDRRGHGYTF

SEQ ID NO: 419389 - protein, 13 aa, Homo sapiens
  CDR3 for alpha chain variable domain of TCR clone 209695 (TRAV23/DV6, TRAJ17)
CSKGRAAGNKLTF

SEQ ID NO: 419390 - protein, 12 aa, Homo sapiens
  CDR3 for beta chain variable domain of TCR clone 209695 (TRBV7-9, TRBJ2-3)
CASSFITDTQYF

SEQ ID NO: 419391 - protein, 12 aa, Homo sapiens
  CDR3 for alpha chain variable domain of TCR clone 209696 (TRAV13-1, TRAJ21)
CAAKEGFNKFYF

SEQ ID NO: 419392 - protein, 14 aa, Homo sapiens
  CDR3 for beta chain variable domain of TCR clone 209696 (TRBV5-4, TRBJ1-1)
CGSSLDSRRDEAFF

SEQ ID NO: 419393 - protein, 10 aa, Homo sapiens
  CDR3 for alpha chain variable domain of TCR clone 209697 (TRAV21, TRAJ31)
CAVDTARLMF

SEQ ID NO: 419394 - protein, 13 aa, Homo sapiens
  CDR3 for beta chain variable domain of TCR clone 209697 (TRBV4-1, TRBJ1-1)
CASSRKMNTEAFF

SEQ ID NO: 419395 - protein, 14 aa, Homo sapiens
  CDR3 for alpha chain variable domain of TCR clone 209698 (TRAV12-2, TRAJ13)
CAVKKTGGYQKITF

SEQ ID NO: 419396 - protein, 14 aa, Homo sapiens
  CDR3 for beta chain variable domain of TCR clone 209698 (TRBV10-3, TRBJ2-1)
CAISSDLAYNEQFF

SEQ ID NO: 419397 - protein, 13 aa, Homo sapiens
  CDR3 for alpha chain variable domain of TCR clone 209699 (TRAV8-3, TRAJ44)
CAVVPGTDSKLTF

SEQ ID NO: 419398 - protein, 14 aa, Homo sapiens
  CDR3 for beta chain variable domain of TCR clone 209699 (TRBV11-2, TRBJ2-3)
CASSRLARTDTQYF

SEQ ID NO: 419399 - protein, 14 aa, Homo sapiens
  CDR3 for alpha chain variable domain of TCR clone 209700 (TRAV12-2, TRAJ13)
CAVKKTGGYQKVTL

SEQ ID NO: 419400 - protein, 15 aa, Homo sapiens
  CDR3 for beta chain variable domain of TCR clone 209700 (TRBV7-2, TRBJ2-1)
CASSLASGRVNEQFF

SEQ ID NO: 419401 - protein, 15 aa, Homo sapiens
  CDR3 for alpha chain variable domain of TCR clone 209701 (TRAV8-3, TRAJ45)
CASSYSGGGADGLTF

SEQ ID NO: 419402 - protein, 15 aa, Homo sapiens
  CDR3 for beta chain variable domain of TCR clone 209701 (TRBV27, TRBJ1-6)
CASSFDRGLGSPLHF

SEQ ID NO: 419403 - protein, 15 aa, Homo sapiens
  CDR3 for alpha chain variable domain of TCR clone 209702 (TRAV8-4, TRAJ47)
CAVSDPEEYGNKLVF

SEQ ID NO: 419404 - protein, 14 aa, Homo sapiens
  CDR3 for beta chain variable domain of TCR clone 209702 (TRBV4-1, TRBJ2-2)
CASSQAVNTGELFF

SEQ ID NO: 419405 - protein, 14 aa, Homo sapiens
  CDR3 for alpha chain variable domain of TCR clone 209703 (TRAV8-6, TRAJ6)
CAVHASGGSYIPTF

SEQ ID NO: 419406 - protein, 15 aa, Homo sapiens
  CDR3 for beta chain variable domain of TCR clone 209703 (TRBV6-3, TRBJ2-7)
CASSSPGTVFYEQYF

SEQ ID NO: 419407 - protein, 14 aa, Homo sapiens
  CDR3 for alpha chain variable domain of TCR clone 209704 (TRAV17, TRAJ16)
CATADFSDGQKLLF

SEQ ID NO: 419408 - protein, 13 aa, Homo sapiens
  CDR3 for beta chain variable domain of TCR clone 209704 (TRBV7-2, TRBJ2-5)
CASSQTSVETQYF

SEQ ID NO: 419409 - protein, 14 aa, Homo sapiens
  CDR3 for alpha chain variable domain of TCR clone 209705 (TRAV34, TRAJ44)
CGADGTGTASKLTF

SEQ ID NO: 419410 - protein, 16 aa, Homo sapiens
  CDR3 for beta chain variable domain of TCR clone 209705 (TRBV20-1, TRBJ1-4)
CSAPGQGLLTNDKLFF

SEQ ID NO: 419411 - protein, 15 aa, Homo sapiens
  CDR3 for alpha chain variable domain of TCR clone 209706 (TRAV26-1, TRAJ3)
CIVRSGYSSASKIIF

SEQ ID NO: 419412 - protein, 20 aa, Homo sapiens
  CDR3 for beta chain variable domain of TCR clone 209706 (TRBV28, TRBJ2-1)
CASTPIGRSPGLAGGNEQFF

SEQ ID NO: 419413 - protein, 14 aa, Homo sapiens
  CDR3 for alpha chain variable domain of TCR clone 209707 (TRAV26-1, TRAJ48)
CIVRVVFGNEKLTF

SEQ ID NO: 419414 - protein, 13 aa, Homo sapiens
  CDR3 for beta chain variable domain of TCR clone 209707 (TRBV11-3, TRBJ2-3)
CASSHDTKDTQYF

SEQ ID NO: 419415 - protein, 14 aa, Homo sapiens
  CDR3 for alpha chain variable domain of TCR clone 209708 (TRAV29/DV5, TRAJ32)
CAAAYGGSTKKLIF

SEQ ID NO: 419416 - protein, 15 aa, Homo sapiens
  CDR3 for beta chain variable domain of TCR clone 209708 (TRBV27, TRBJ2-7)
CASSTAGTGSYEQYF

SEQ ID NO: 419417 - protein, 16 aa, Homo sapiens
  CDR3 for alpha chain variable domain of TCR clone 209709 (TRAV3, TRAJ10)
CAVRDMRAGGGNKLTF

SEQ ID NO: 419418 - protein, 16 aa, Homo sapiens
  CDR3 for beta chain variable domain of TCR clone 209709 (TRBV10-3, TRBJ2-1)
CAIRGGGRGDYNEQFF

SEQ ID NO: 419419 - protein, 16 aa, Homo sapiens
  CDR3 for alpha chain variable domain of TCR clone 209710 (TRAV30, TRAJ24)
CGTEIVDADSWWKFQF

SEQ ID NO: 419420 - protein, 13 aa, Homo sapiens
  CDR3 for beta chain variable domain of TCR clone 209710 (TRBV20-1, TRBJ1-1)
CSARGGGNTEAFF

SEQ ID NO: 419421 - protein, 13 aa, Homo sapiens
  CDR3 for alpha chain variable domain of TCR clone 209711 (TRAV12-1, TRAJ15)
CVAQNQAGTALIF

SEQ ID NO: 419422 - protein, 15 aa, Homo sapiens
  CDR3 for beta chain variable domain of TCR clone 209711 (TRBV5-1, TRBJ2-3)
CASSVTSGSTDTQYF

SEQ ID NO: 419423 - protein, 13 aa, Homo sapiens
  CDR3 for alpha chain variable domain of TCR clone 209712 (TRAV8-3, TRAJ43)
CAVVPYNNNDMRF

SEQ ID NO: 419424 - protein, 17 aa, Homo sapiens
  CDR3 for beta chain variable domain of TCR clone 209712 (TRBV7-6, TRBJ1-1)
CASIGDRPNLGVTEAFF

SEQ ID NO: 419425 - protein, 14 aa, Homo sapiens
  CDR3 for alpha chain variable domain of TCR clone 209713 (TRAV8-3, TRAJ4)
CAVGAAGGDNKLIF

SEQ ID NO: 419426 - protein, 13 aa, Homo sapiens
  CDR3 for beta chain variable domain of TCR clone 209713 (TRBV20-1, TRBJ1-1)
CSARGGGNTEAFF

SEQ ID NO: 419427 - protein, 14 aa, Homo sapiens
  CDR3 for alpha chain variable domain of TCR clone 209714 (TRAV17, TRAJ57)
CATDASGGSEKLVF

SEQ ID NO: 419428 - protein, 14 aa, Homo sapiens
  CDR3 for beta chain variable domain of TCR clone 209714 (TRBV4-2, TRBJ2-1)
CASGLYRAYNEQFF

SEQ ID NO: 419429 - protein, 18 aa, Homo sapiens
  CDR3 for alpha chain variable domain of TCR clone 209715 (TRAV26-1, TRAJ5)
CIVRVVPPRDTGRRALTF

SEQ ID NO: 419430 - protein, 14 aa, Homo sapiens
  CDR3 for beta chain variable domain of TCR clone 209715 (TRBV7-3, TRBJ2-7)
CASSLKADSYEQYF

SEQ ID NO: 419431 - protein, 17 aa, Homo sapiens
  CDR3 for alpha chain variable domain of TCR clone 209716 (TRAV26-1, TRAJ28)
CIVRVADSGAGSYQLTF

SEQ ID NO: 419432 - protein, 17 aa, Homo sapiens
  CDR3 for beta chain variable domain of TCR clone 209716 (TRBV28, TRBJ2-7)
CASSPLPAGGKSYEQYF

SEQ ID NO: 419433 - protein, 10 aa, Homo sapiens
  CDR3 for alpha chain variable domain of TCR clone 209717 (TRAV30, TRAJ48)
CGIGNAKLTF

SEQ ID NO: 419434 - protein, 15 aa, Homo sapiens
  CDR3 for beta chain variable domain of TCR clone 209717 (TRBV28, TRBJ2-5)
CARSPPWSYQETQYF

SEQ ID NO: 419435 - protein, 13 aa, Homo sapiens
  CDR3 for alpha chain variable domain of TCR clone 209718 (TRAV35, TRAJ27)
CAGQEGDAGKSTF

SEQ ID NO: 419436 - protein, 14 aa, Homo sapiens
  CDR3 for beta chain variable domain of TCR clone 209718 (TRBV7-2, TRBJ2-7)
CASSPKTSFYEQYF

SEQ ID NO: 419437 - protein, 15 aa, Homo sapiens
  CDR3 for alpha chain variable domain of TCR clone 209719 (TRAV8-3, TRAJ45)
CASSYSGGGADGLTF

SEQ ID NO: 419438 - protein, 14 aa, Homo sapiens
  CDR3 for beta chain variable domain of TCR clone 209719 (TRBV4-1, TRBJ2-5)
CASSQYRDQETQYF

SEQ ID NO: 419439 - protein, 12 aa, Homo sapiens
  CDR3 for alpha chain variable domain of TCR clone 209720 (TRAV4, TRAJ26)
CLVGDYGQNFVF

SEQ ID NO: 419440 - protein, 16 aa, Homo sapiens
  CDR3 for beta chain variable domain of TCR clone 209720 (TRBV7-2, TRBJ1-2)
CASSSNQDRRGDGYTF

SEQ ID NO: 419441 - protein, 13 aa, Homo sapiens
  CDR3 for alpha chain variable domain of TCR clone 209721 (TRAV23/DV6, TRAJ12)
CAPGGDSSYKLIF

SEQ ID NO: 419442 - protein, 20 aa, Homo sapiens
  CDR3 for beta chain variable domain of TCR clone 209721 (TRBV7-8, TRBJ2-2)
CASSHLFPGPTIHITGELFF

SEQ ID NO: 419443 - protein, 14 aa, Homo sapiens
  CDR3 for alpha chain variable domain of TCR clone 209722 (TRAV20, TRAJ13)
CAVLNSGGYQKVTF

SEQ ID NO: 419444 - protein, 16 aa, Homo sapiens
  CDR3 for beta chain variable domain of TCR clone 209722 (TRBV2, TRBJ2-1)
CASSVGGSLSYSEQFF

SEQ ID NO: 419445 - protein, 15 aa, Homo sapiens
  CDR3 for alpha chain variable domain of TCR clone 209723 (TRAV3, TRAJ9)
CAVRDSNTGGFKTIF

SEQ ID NO: 419446 - protein, 16 aa, Homo sapiens
  CDR3 for beta chain variable domain of TCR clone 209723 (TRBV15, TRBJ2-5)
CATSPTTGPGMETQYF

SEQ ID NO: 419447 - protein, 15 aa, Homo sapiens
  CDR3 for alpha chain variable domain of TCR clone 209724 (TRAV21, TRAJ53)
CATLTSGGSKYKLTF

SEQ ID NO: 419448 - protein, 15 aa, Homo sapiens
  CDR3 for beta chain variable domain of TCR clone 209724 (TRBV11-3, TRBJ2-3)
CASSAGTVVTNTQYF

SEQ ID NO: 419449 - protein, 14 aa, Homo sapiens
  CDR3 for alpha chain variable domain of TCR clone 209725 (TRAV16, TRAJ29)
CALTRNSGNTPLVF

SEQ ID NO: 419450 - protein, 11 aa, Homo sapiens
  CDR3 for beta chain variable domain of TCR clone 209725 (TRBV29-1, TRBJ2-5)
CSEDRTGTQYF

SEQ ID NO: 419451 - protein, 12 aa, Homo sapiens
  CDR3 for alpha chain variable domain of TCR clone 209726 (TRAV12-3, TRAJ17)
CAMTLTCNKLTF

SEQ ID NO: 419452 - protein, 12 aa, Homo sapiens
  CDR3 for beta chain variable domain of TCR clone 209726 (TRBV2, TRBJ2-1)
CAYGPPGNEQFF

SEQ ID NO: 419453 - protein, 12 aa, Homo sapiens
  CDR3 for alpha chain variable domain of TCR clone 209727 (TRAV12-3, TRAJ17)
CAMTLTGNKLTF

SEQ ID NO: 419454 - protein, 15 aa, Homo sapiens
  CDR3 for beta chain variable domain of TCR clone 209727 (TRBV3-1, TRBJ2-1)
CASSQDTSGYNEQFF

SEQ ID NO: 419455 - protein, 12 aa, Homo sapiens
  CDR3 for alpha chain variable domain of TCR clone 209728 (TRAV27, TRAJ33)
CAGDGSNYQLIL

SEQ ID NO: 419456 - protein, 15 aa, Homo sapiens
  CDR3 for beta chain variable domain of TCR clone 209728 (TRBV6-5, TRBJ2-7)
CASSYSTSGNYEQYF

SEQ ID NO: 419457 - protein, 13 aa, Homo sapiens
  CDR3 for alpha chain variable domain of TCR clone 209729 (TRAV13-2, TRAJ48)
CAEMDFGNEKLTF

SEQ ID NO: 419458 - protein, 15 aa, Homo sapiens
  CDR3 for beta chain variable domain of TCR clone 209729 (TRBV7-9, TRBJ1-6)
CASSSAGRGNSPLHF

SEQ ID NO: 419459 - protein, 15 aa, Homo sapiens
  CDR3 for alpha chain variable domain of TCR clone 209730 (TRAV21, TRAJ24)
CAARSSTDSWGKLQF

SEQ ID NO: 419460 - protein, 19 aa, Homo sapiens
  CDR3 for beta chain variable domain of TCR clone 209730 (TRBV14, TRBJ2-1)
CVSSQDQLWEAPEYNEQFF

SEQ ID NO: 419461 - protein, 15 aa, Homo sapiens
  CDR3 for alpha chain variable domain of TCR clone 209731 (TRAV27, TRAJ38)
CAARCNAGNNRKLIW

SEQ ID NO: 419462 - protein, 15 aa, Homo sapiens
  CDR3 for beta chain variable domain of TCR clone 209731 (TRBV5-1, TRBJ2-1)
CASSPPRAPYNEQFF

SEQ ID NO: 419463 - protein, 14 aa, Homo sapiens
  CDR3 for alpha chain variable domain of TCR clone 209732 (TRAV1-2, TRAJ16)
CAANRFSDGQKLLF

SEQ ID NO: 419464 - protein, 13 aa, Homo sapiens
  CDR3 for beta chain variable domain of TCR clone 209732 (TRBV4-1, TRBJ1-1)
CASSRKMNTEAFF

SEQ ID NO: 419465 - protein, 14 aa, Homo sapiens
  CDR3 for alpha chain variable domain of TCR clone 209733 (TRAV13-1, TRAJ20)
CADRPGSNDYKLSF

SEQ ID NO: 419466 - protein, 13 aa, Homo sapiens
  CDR3 for beta chain variable domain of TCR clone 209733 (TRBV20-1, TRBJ1-1)
CSAPPGGHTEAFF

SEQ ID NO: 419467 - protein, 13 aa, Homo sapiens
  CDR3 for alpha chain variable domain of TCR clone 209734 (TRAV8-3, TRAJ21)
CAVGAYNFNKFYF

SEQ ID NO: 419468 - protein, 16 aa, Homo sapiens
  CDR3 for beta chain variable domain of TCR clone 209734 (TRBV19, TRBJ2-1)
CASSMGGGSPYNEQFF

SEQ ID NO: 419469 - protein, 14 aa, Homo sapiens
  CDR3 for alpha chain variable domain of TCR clone 209735 (TRAV35, TRAJ42)
CAGRYGESQGNLIF

SEQ ID NO: 419470 - protein, 15 aa, Homo sapiens
  CDR3 for beta chain variable domain of TCR clone 209735 (TRBV7-9, TRBJ2-1)
CASSLGWGRANEQFF

SEQ ID NO: 419471 - protein, 18 aa, Homo sapiens
  CDR3 for alpha chain variable domain of TCR clone 209736 (TRAV21, TRAJ37)
CAVRPCPAGGTSYGKLTF

SEQ ID NO: 419472 - protein, 15 aa, Homo sapiens
  CDR3 for beta chain variable domain of TCR clone 209736 (TRBV20-1, TRBJ1-1)
CSASRGVTGNTEAFF

SEQ ID NO: 419473 - protein, 15 aa, Homo sapiens
  CDR3 for alpha chain variable domain of TCR clone 209737 (TRAV8-3, TRAJ45)
CASSYSGGGADGLTF

SEQ ID NO: 419474 - protein, 14 aa, Homo sapiens
  CDR3 for beta chain variable domain of TCR clone 209737 (TRBV2, TRBJ2-7)
CASSLTSGGYEQYF

SEQ ID NO: 419475 - protein, 13 aa, Homo sapiens
  CDR3 for alpha chain variable domain of TCR clone 209738 (TRAV27, TRAJ6)
CAGGTRGSYIPTF

SEQ ID NO: 419476 - protein, 17 aa, Homo sapiens
  CDR3 for beta chain variable domain of TCR clone 209738 (TRBV20-1, TRBJ2-1)
CSASSSGLAGSYNEQFF

SEQ ID NO: 419477 - protein, 15 aa, Homo sapiens
  CDR3 for alpha chain variable domain of TCR clone 209739 (TRAV2, TRAJ24)
CAVEVLTDSWGKFQF

SEQ ID NO: 419478 - protein, 15 aa, Homo sapiens
  CDR3 for beta chain variable domain of TCR clone 209739 (TRBV9, TRBJ1-6)
CASSVAGTGDSPLHF

SEQ ID NO: 419479 - protein, 11 aa, Homo sapiens
  CDR3 for alpha chain variable domain of TCR clone 209740 (TRAV35, TRAJ22)
CAGPGVGQLTF

SEQ ID NO: 419480 - protein, 12 aa, Homo sapiens
  CDR3 for beta chain variable domain of TCR clone 209740 (TRBV9, TRBJ2-3)
CASSLRAGTQYF

SEQ ID NO: 419481 - protein, 14 aa, Homo sapiens
  CDR3 for alpha chain variable domain of TCR clone 209741 (TRAV12-3, TRAJ10)
SHLHLTGGGNKLTF

SEQ ID NO: 419482 - protein, 12 aa, Homo sapiens
  CDR3 for beta chain variable domain of TCR clone 209741 (TRBV11-2, TRBJ2-2)
CASSLGGGELFF

SEQ ID NO: 419483 - protein, 23 aa, Homo sapiens
  CDR3 for alpha chain variable domain of TCR clone 209742 (TRAV12-2, TRAJ36)
SLLIRDSQPSDSATLGRANNLFF

SEQ ID NO: 419484 - protein, 17 aa, Homo sapiens
  CDR3 for beta chain variable domain of TCR clone 209742 (TRBV3-1, TRBJ2-3)
CASSQLLDRGHTDTQYF

SEQ ID NO: 419485 - protein, 16 aa, Homo sapiens
  CDR3 for alpha chain variable domain of TCR clone 209743 (TRAV3, TRAJ4)
CAVRPSPSGGYNKLIF

SEQ ID NO: 419486 - protein, 14 aa, Homo sapiens
  CDR3 for beta chain variable domain of TCR clone 209743 (TRBV7-2, TRBJ1-1)
CASSFLTGTTEAFF

SEQ ID NO: 419487 - protein, 13 aa, Homo sapiens
  CDR3 for alpha chain variable domain of TCR clone 209744 (TRAV2, TRAJ5)
CAVPDTGRRALTF

SEQ ID NO: 419488 - protein, 14 aa, Homo sapiens
  CDR3 for beta chain variable domain of TCR clone 209744 (TRBV25-1, TRBJ1-1)
CASTHLGGNTEAFF

SEQ ID NO: 419489 - protein, 12 aa, Homo sapiens
  CDR3 for alpha chain variable domain of TCR clone 209745 (TRAV17, TRAJ43)
CAADAFPADMRF

SEQ ID NO: 419490 - protein, 14 aa, Homo sapiens
  CDR3 for beta chain variable domain of TCR clone 209745 (TRBV20-1, TRBJ2-3)
CSARDGGSTDTQYF

SEQ ID NO: 419491 - protein, 13 aa, Homo sapiens
  CDR3 for alpha chain variable domain of TCR clone 209746 (TRAV8-2, TRAJ49)
CVVTPNTGNQFYL

SEQ ID NO: 419492 - protein, 15 aa, Homo sapiens
  CDR3 for beta chain variable domain of TCR clone 209746 (TRBV11-2, TRBJ2-1)
CASSLTSGGYNEQFF

SEQ ID NO: 419493 - protein, 11 aa, Homo sapiens
  CDR3 for alpha chain variable domain of TCR clone 209747 (TRAV1-1, TRAJ23)
CAVRQGGKLIF

SEQ ID NO: 419494 - protein, 14 aa, Homo sapiens
  CDR3 for beta chain variable domain of TCR clone 209747 (TRBV12-4, TRBJ2-3)
CASSGQGSTDTQYF

SEQ ID NO: 419495 - protein, 18 aa, Homo sapiens
  CDR3 for alpha chain variable domain of TCR clone 209748 (TRAV13-1, TRAJ52)
CAAKNPNAGGTSYEKLTF

SEQ ID NO: 419496 - protein, 13 aa, Homo sapiens
  CDR3 for beta chain variable domain of TCR clone 209748 (TRBV7-2, TRBJ2-7)
CASSSPSGSEQYF

SEQ ID NO: 419497 - protein, 14 aa, Homo sapiens
  CDR3 for alpha chain variable domain of TCR clone 209749 (TRAV23/DV6, TRAJ45)
CSMTPGGGADGLTF

SEQ ID NO: 419498 - protein, 17 aa, Homo sapiens
  CDR3 for beta chain variable domain of TCR clone 209749 (TRBV4-1, TRBJ2-1)
CASSQGRGGGLYNEQFF

SEQ ID NO: 419499 - protein, 15 aa, Homo sapiens
  CDR3 for alpha chain variable domain of TCR clone 209750 (TRAV2, TRAJ11)
CDVGGRNSGYSTLTF

SEQ ID NO: 419500 - protein, 12 aa, Homo sapiens
  CDR3 for beta chain variable domain of TCR clone 209750 (TRBV5-4, TRBJ2-7)
CASSLEAYEQYF

SEQ ID NO: 419501 - protein, 11 aa, Homo sapiens
  CDR3 for alpha chain variable domain of TCR clone 209751 (TRAV26-1, TRAJ37)
CIVRVGRKLIL

SEQ ID NO: 419502 - protein, 14 aa, Homo sapiens
  CDR3 for beta chain variable domain of TCR clone 209751 (TRBV5-4, TRBJ2-7)
CASSRVGGSYEQYF

SEQ ID NO: 419503 - protein, 14 aa, Homo sapiens
  CDR3 for alpha chain variable domain of TCR clone 209752 (TRAV1-2, TRAJ8)
CAVREDTGFKKLVF

SEQ ID NO: 419504 - protein, 15 aa, Homo sapiens
  CDR3 for beta chain variable domain of TCR clone 209752 (TRBV9, TRBJ1-6)
CASSVAGTGDSPLHF

SEQ ID NO: 419505 - protein, 17 aa, Homo sapiens
  CDR3 for alpha chain variable domain of TCR clone 209753 (TRAV3, TRAJ6)
CAVRGGPRAGGSYILTF

SEQ ID NO: 419506 - protein, 20 aa, Homo sapiens
  CDR3 for beta chain variable domain of TCR clone 209753 (TRBV28, TRBJ2-1)
CASTPIGRSPGLAGGNEQFF

SEQ ID NO: 419507 - protein, 14 aa, Homo sapiens
  CDR3 for alpha chain variable domain of TCR clone 209754 (TRAV26-1, TRAJ38)
CIADNAGNNRKLIW

SEQ ID NO: 419508 - protein, 13 aa, Homo sapiens
  CDR3 for beta chain variable domain of TCR clone 209754 (TRBV2, TRBJ2-7)
CASSVGGSGEQYF

SEQ ID NO: 419509 - protein, 14 aa, Homo sapiens
  CDR3 for alpha chain variable domain of TCR clone 209755 (TRAV3, TRAJ22)
CAVRDSGSARQLTF

SEQ ID NO: 419510 - protein, 15 aa, Homo sapiens
  CDR3 for beta chain variable domain of TCR clone 209755 (TRBV7-2, TRBJ2-1)
CASSSGLAGGNEQFF

SEQ ID NO: 419511 - protein, 15 aa, Homo sapiens
  CDR3 for alpha chain variable domain of TCR clone 209756 (TRAV4, TRAJ3)
CLVGDSDSSASKIIF

SEQ ID NO: 419512 - protein, 14 aa, Homo sapiens
  CDR3 for beta chain variable domain of TCR clone 209756 (TRBV7-2, TRBJ2-7)
CASRSQGAAYEQYF

SEQ ID NO: 419513 - protein, 14 aa, Homo sapiens
  CDR3 for alpha chain variable domain of TCR clone 209757 (TRAV26-1, TRAJ48)
CIVRVGFGNEKLTF

SEQ ID NO: 419514 - protein, 15 aa, Homo sapiens
  CDR3 for beta chain variable domain of TCR clone 209757 (TRBV6-3, TRBJ2-7)
CASSSPGTVFYEQYF

SEQ ID NO: 419515 - protein, 13 aa, Homo sapiens
  CDR3 for alpha chain variable domain of TCR clone 209758 (TRAV21, TRAJ17)
CAPVKAAGNKLTF

SEQ ID NO: 419516 - protein, 13 aa, Homo sapiens
  CDR3 for beta chain variable domain of TCR clone 209758 (TRBV20-1, TRBJ1-1)
RSAVDGTLNEAFF

SEQ ID NO: 419517 - protein, 14 aa, Homo sapiens
  CDR3 for alpha chain variable domain of TCR clone 209759 (TRAV12-3, TRAJ42)
CAMNYGGSQGNLIF

SEQ ID NO: 419518 - protein, 15 aa, Homo sapiens
  CDR3 for beta chain variable domain of TCR clone 209759 (TRBV5-7, TRBJ1-5)
CASSYGKWWDHPQHF

SEQ ID NO: 419519 - protein, 17 aa, Homo sapiens
  CDR3 for alpha chain variable domain of TCR clone 209760 (TRAV12-3, TRAJ6)
CAMSARGGAGGSYIPTF

SEQ ID NO: 419520 - protein, 12 aa, Homo sapiens
  CDR3 for beta chain variable domain of TCR clone 209760 (TRBV12-4, TRBJ2-3)
CASSALPDTRYF

SEQ ID NO: 419521 - protein, 15 aa, Homo sapiens
  CDR3 for alpha chain variable domain of TCR clone 209761 (TRAV25, TRAJ52)
CAGRPGGTGYGKLTF

SEQ ID NO: 419522 - protein, 12 aa, Homo sapiens
  CDR3 for beta chain variable domain of TCR clone 209761 (TRBV7-8, TRBJ2-7)
CASSLGDREQYF

SEQ ID NO: 419523 - protein, 14 aa, Homo sapiens
  CDR3 for alpha chain variable domain of TCR clone 209762 (TRAV1-1, TRAJ27)
CAAIYNTNAGKSTF

SEQ ID NO: 419524 - protein, 13 aa, Homo sapiens
  CDR3 for beta chain variable domain of TCR clone 209762 (TRBV7-9, TRBJ1-2)
CASSLKQNYGYTF

SEQ ID NO: 419525 - protein, 13 aa, Homo sapiens
  CDR3 for alpha chain variable domain of TCR clone 209763 (TRAV1-2, TRAJ31)
CAASRNNNARLMF

SEQ ID NO: 419526 - protein, 14 aa, Homo sapiens
  CDR3 for beta chain variable domain of TCR clone 209763 (TRBV7-2, TRBJ2-7)
CASSPKTSFYEQYF

SEQ ID NO: 419527 - protein, 14 aa, Homo sapiens
  CDR3 for alpha chain variable domain of TCR clone 209764 (TRAV20, TRAJ56)
CALQFGGANRKLTF

SEQ ID NO: 419528 - protein, 14 aa, Homo sapiens
  CDR3 for beta chain variable domain of TCR clone 209764 (TRBV20-1, TRBJ2-7)
CSAKRGRSSYEQYF

SEQ ID NO: 419529 - protein, 14 aa, Homo sapiens
  CDR3 for alpha chain variable domain of TCR clone 209765 (TRAV8-3, TRAJ23)
CAVIIYNQGGKLIF

SEQ ID NO: 419530 - protein, 14 aa, Homo sapiens
  CDR3 for beta chain variable domain of TCR clone 209765 (TRBV18, TRBJ2-7)
CASSPRGGAYEQYF

SEQ ID NO: 419531 - protein, 12 aa, Homo sapiens
  CDR3 for alpha chain variable domain of TCR clone 209766 (TRAV3, TRAJ7)
CADLLWEQQTRF

SEQ ID NO: 419532 - protein, 13 aa, Homo sapiens
  CDR3 for beta chain variable domain of TCR clone 209766 (TRBV7-3, TRBJ2-5)
CASSFRGGETLYF

SEQ ID NO: 419533 - protein, 16 aa, Homo sapiens
  CDR3 for alpha chain variable domain of TCR clone 209767 (TRAV14/DV4, TRAJ54)
CAMREGRIQGAQKLVF

SEQ ID NO: 419534 - protein, 12 aa, Homo sapiens
  CDR3 for beta chain variable domain of TCR clone 209767 (TRBV11-2, TRBJ2-1)
CASSPGNNEQFF

SEQ ID NO: 419535 - protein, 14 aa, Homo sapiens
  CDR3 for alpha chain variable domain of TCR clone 209768 (TRAV8-2, TRAJ23)
CVVSDDNQGGKLIF

SEQ ID NO: 419536 - protein, 16 aa, Homo sapiens
  CDR3 for beta chain variable domain of TCR clone 209768 (TRBV4-2, TRBJ2-5)
CASSQALVGSQETQYF

SEQ ID NO: 419537 - protein, 14 aa, Homo sapiens
  CDR3 for alpha chain variable domain of TCR clone 209769 (TRAV14/DV4, TRAJ20)
CAMRESLNDYKLSF

SEQ ID NO: 419538 - protein, 15 aa, Homo sapiens
  CDR3 for beta chain variable domain of TCR clone 209769 (TRBV7-9, TRBJ2-7)
CASSLAPAEAYEQYF

SEQ ID NO: 419539 - protein, 14 aa, Homo sapiens
  CDR3 for alpha chain variable domain of TCR clone 209770 (TRAV9-2, TRAJ39)
CALYIYNAGNMLTF

SEQ ID NO: 419540 - protein, 14 aa, Homo sapiens
  CDR3 for beta chain variable domain of TCR clone 209770 (TRBV13, TRBJ2-5)
CASYRRLAEETQYF

SEQ ID NO: 419541 - protein, 12 aa, Homo sapiens
  CDR3 for alpha chain variable domain of TCR clone 209771 (TRAV12-1, TRAJ40)
CVVPSGTYKYLF

SEQ ID NO: 419542 - protein, 15 aa, Homo sapiens
  CDR3 for beta chain variable domain of TCR clone 209771 (TRBV12-4, TRBJ2-1)
CAGSPLSGRNNEQFF

SEQ ID NO: 419543 - protein, 12 aa, Homo sapiens
  CDR3 for alpha chain variable domain of TCR clone 209772 (TRAV12-3, TRAJ20)
CAMVRGDYKLSF

SEQ ID NO: 419544 - protein, 16 aa, Homo sapiens
  CDR3 for beta chain variable domain of TCR clone 209772 (TRBV2, TRBJ2-1)
CASRPRSGGPYGEQFF

SEQ ID NO: 419545 - protein, 11 aa, Homo sapiens
  CDR3 for alpha chain variable domain of TCR clone 209773 (TRAV3, TRAJ21)
CAWGNFNKFSF

SEQ ID NO: 419546 - protein, 16 aa, Homo sapiens
  CDR3 for beta chain variable domain of TCR clone 209773 (TRBV19, TRBJ2-1)
CASSKAGPSSYNEQFF

SEQ ID NO: 419547 - protein, 13 aa, Homo sapiens
  CDR3 for alpha chain variable domain of TCR clone 209774 (TRAV26-1, TRAJ48)
CIVRVVGGEKLPF

SEQ ID NO: 419548 - protein, 19 aa, Homo sapiens
  CDR3 for beta chain variable domain of TCR clone 209774 (TRBV11-3, TRBJ2-2)
CASSTRPGAKTTNTGELFF

SEQ ID NO: 419549 - protein, 19 aa, Homo sapiens
  CDR3 for alpha chain variable domain of TCR clone 209775 (TRAV21, TRAJ40)
SLVTQPPTSVISGTYKYIF

SEQ ID NO: 419550 - protein, 16 aa, Homo sapiens
  CDR3 for beta chain variable domain of TCR clone 209775 (TRBV28, TRBJ2-3)
CASSCFRDPRLGTQYF

SEQ ID NO: 419551 - protein, 15 aa, Homo sapiens
  CDR3 for alpha chain variable domain of TCR clone 209776 (TRAV17, TRAJ4)
CATGTWSGGYNKLIF

SEQ ID NO: 419552 - protein, 13 aa, Homo sapiens
  CDR3 for beta chain variable domain of TCR clone 209776 (TRBV6-6, TRBJ2-7)
CARSPKHLAEQYF

SEQ ID NO: 419553 - protein, 13 aa, Homo sapiens
  CDR3 for alpha chain variable domain of TCR clone 209777 (TRAV2, TRAJ40)
CAVVTSGTYKYIF

SEQ ID NO: 419554 - protein, 16 aa, Homo sapiens
  CDR3 for beta chain variable domain of TCR clone 209777 (TRBV19, TRBJ2-2)
CASRSPGTGATGELVF

SEQ ID NO: 419555 - protein, 12 aa, Homo sapiens
  CDR3 for alpha chain variable domain of TCR clone 209778 (TRAV16, TRAJ10)
CSRTGGGNKLTF

SEQ ID NO: 419556 - protein, 17 aa, Homo sapiens
  CDR3 for beta chain variable domain of TCR clone 209778 (TRBV5-1, TRBJ2-5)
CASSPVALGQNQETQYF

SEQ ID NO: 419557 - protein, 15 aa, Homo sapiens
  CDR3 for alpha chain variable domain of TCR clone 209779 (TRAV20, TRAJ53)
CAVRASGCSNYKLTF

SEQ ID NO: 419558 - protein, 12 aa, Homo sapiens
  CDR3 for beta chain variable domain of TCR clone 209779 (TRBV7-8, TRBJ2-7)
CASSLGDREQYF

SEQ ID NO: 419559 - protein, 14 aa, Homo sapiens
  CDR3 for alpha chain variable domain of TCR clone 209780 (TRAV12-2, TRAJ13)
CAVKKTGGYQKVTF

SEQ ID NO: 419560 - protein, 16 aa, Homo sapiens
  CDR3 for beta chain variable domain of TCR clone 209780 (TRBV3-1, TRBJ2-6)
CASSLTWVSGANVLTF

SEQ ID NO: 419561 - protein, 17 aa, Homo sapiens
  CDR3 for alpha chain variable domain of TCR clone 209781 (TRAV13-1, TRAJ52)
CAAGRNAGGTSYGKLTF

SEQ ID NO: 419562 - protein, 13 aa, Homo sapiens
  CDR3 for beta chain variable domain of TCR clone 209781 (TRBV15, TRBJ1-6)
CATSGGLNSPLHF

SEQ ID NO: 419563 - protein, 12 aa, Homo sapiens
  CDR3 for alpha chain variable domain of TCR clone 209782 (TRAV25, TRAJ45)
DYSGGGADGLTF

SEQ ID NO: 419564 - protein, 19 aa, Homo sapiens
  CDR3 for beta chain variable domain of TCR clone 209782 (TRBV28, TRBJ2-7)
CASSYSRTSRLGWVYEQYF

SEQ ID NO: 419565 - protein, 14 aa, Homo sapiens
  CDR3 for alpha chain variable domain of TCR clone 209783 (TRAV17, TRAJ16)
CATADFSDGQKLLF

SEQ ID NO: 419566 - protein, 13 aa, Homo sapiens
  CDR3 for beta chain variable domain of TCR clone 209783 (TRBV11-2, TRBJ2-1)
CASSLGLAGGRFF

SEQ ID NO: 419567 - protein, 13 aa, Homo sapiens
  CDR3 for alpha chain variable domain of TCR clone 209784 (TRAV17, TRAJ5)
CALRGTGRRALTF

SEQ ID NO: 419568 - protein, 14 aa, Homo sapiens
  CDR3 for beta chain variable domain of TCR clone 209784 (TRBV10-3, TRBJ2-5)
CAISERDYQETQYF

SEQ ID NO: 419569 - protein, 19 aa, Homo sapiens
  CDR3 for alpha chain variable domain of TCR clone 209785 (TRAV3, TRAJ6)
CAVRDRNPSRSGGRYIHTF

SEQ ID NO: 419570 - protein, 15 aa, Homo sapiens
  CDR3 for beta chain variable domain of TCR clone 209785 (TRBV18, TRBJ2-7)
CASSPTFMDSYEQYF

SEQ ID NO: 419571 - protein, 14 aa, Homo sapiens
  CDR3 for alpha chain variable domain of TCR clone 209786 (TRAV35, TRAJ33)
CAGSSQASNYQLIW

SEQ ID NO: 419572 - protein, 15 aa, Homo sapiens
  CDR3 for beta chain variable domain of TCR clone 209786 (TRBV5-1, TRBJ1-4)
FAPAAWKDGNEKLFF

SEQ ID NO: 419573 - protein, 13 aa, Homo sapiens
  CDR3 for alpha chain variable domain of TCR clone 209787 (TRAV16, TRAJ37)
CALRGSNTVKLIF

SEQ ID NO: 419574 - protein, 10 aa, Homo sapiens
  CDR3 for beta chain variable domain of TCR clone 209787 (TRBV5-6, TRBJ2-7)
CASSGNEQYF

SEQ ID NO: 419575 - protein, 14 aa, Homo sapiens
  CDR3 for alpha chain variable domain of TCR clone 209788 (TRAV12-1, TRAJ30)
CVVNIGGRDDKIIF

SEQ ID NO: 419576 - protein, 14 aa, Homo sapiens
  CDR3 for beta chain variable domain of TCR clone 209788 (TRBV19, TRBJ2-7)
CASSIFAGTYEQYF

SEQ ID NO: 419577 - protein, 14 aa, Homo sapiens
  CDR3 for alpha chain variable domain of TCR clone 209789 (TRAV4, TRAJ43)
CLVGPMYKNNDMRF

SEQ ID NO: 419578 - protein, 21 aa, Homo sapiens
  CDR3 for beta chain variable domain of TCR clone 209789 (TRBV11-1, TRBJ2-1)
CASSARERLRPEGPSYNEQFF

SEQ ID NO: 419579 - protein, 14 aa, Homo sapiens
  CDR3 for alpha chain variable domain of TCR clone 209790 (TRAV29/DV5, TRAJ54)
CAASAKQGAQKLVF

SEQ ID NO: 419580 - protein, 14 aa, Homo sapiens
  CDR3 for beta chain variable domain of TCR clone 209790 (TRBV7-9, TRBJ2-7)
CASSPSGGQNEEYF

SEQ ID NO: 419581 - protein, 16 aa, Homo sapiens
  CDR3 for alpha chain variable domain of TCR clone 209791 (TRAV30, TRAJ24)
CGTEIVNADSWGKFQF

SEQ ID NO: 419582 - protein, 15 aa, Homo sapiens
  CDR3 for beta chain variable domain of TCR clone 209791 (TRBV18, TRBJ2-1)
CASSPPSASYNEQFF

SEQ ID NO: 419583 - protein, 14 aa, Homo sapiens
  CDR3 for alpha chain variable domain of TCR clone 209792 (TRAV25, TRAJ23)
CAGQGDNQGGKLIF

SEQ ID NO: 419584 - protein, 14 aa, Homo sapiens
  CDR3 for beta chain variable domain of TCR clone 209792 (TRBV7-9, TRBJ1-1)
CASSLVRGEAFLDK

SEQ ID NO: 419585 - protein, 14 aa, Homo sapiens
  CDR3 for alpha chain variable domain of TCR clone 209793 (TRAV3, TRAJ9)
CAVRLNTGGFKTIF

SEQ ID NO: 419586 - protein, 15 aa, Homo sapiens
  CDR3 for beta chain variable domain of TCR clone 209793 (TRBV7-2, TRBJ2-1)
RASSLASGRGNEQFF

SEQ ID NO: 419587 - protein, 15 aa, Homo sapiens
  CDR3 for alpha chain variable domain of TCR clone 209794 (TRAV3, TRAJ3)
CAVRDMSSSASMIIF

SEQ ID NO: 419588 - protein, 14 aa, Homo sapiens
  CDR3 for beta chain variable domain of TCR clone 209794 (TRBV19, TRBJ2-1)
CASPTFVLSGEQFF

SEQ ID NO: 419589 - protein, 14 aa, Homo sapiens
  CDR3 for alpha chain variable domain of TCR clone 209795 (TRAV2, TRAJ9)
CAVEDRSGGFKTIF

SEQ ID NO: 419590 - protein, 14 aa, Homo sapiens
  CDR3 for beta chain variable domain of TCR clone 209795 (TRBV28, TRBJ2-7)
CASTFDGRAHEQYF

SEQ ID NO: 419591 - protein, 12 aa, Homo sapiens
  CDR3 for alpha chain variable domain of TCR clone 209796 (TRAV13-2, TRAJ23)
CAERHRGGKLIF

SEQ ID NO: 419592 - protein, 17 aa, Homo sapiens
  CDR3 for beta chain variable domain of TCR clone 209796 (TRBV5-1, TRBJ2-5)
CASAVTRQFGNKETQYF

SEQ ID NO: 419593 - protein, 13 aa, Homo sapiens
  CDR3 for alpha chain variable domain of TCR clone 209797 (TRAV25, TRAJ10)
CAGRTGGGNKLTF

SEQ ID NO: 419594 - protein, 15 aa, Homo sapiens
  CDR3 for beta chain variable domain of TCR clone 209797 (TRBV19, TRBJ2-1)
SASSSPGVPLDEQFF

SEQ ID NO: 419595 - protein, 13 aa, Homo sapiens
  CDR3 for alpha chain variable domain of TCR clone 209798 (TRAV2, TRAJ40)
CAVVTSGTYKYIF

SEQ ID NO: 419596 - protein, 14 aa, Homo sapiens
  CDR3 for beta chain variable domain of TCR clone 209798 (TRBV28, TRBJ2-1)
CASSIQGTVGEQFF

SEQ ID NO: 419597 - protein, 15 aa, Homo sapiens
  CDR3 for alpha chain variable domain of TCR clone 209799 (TRAV21, TRAJ24)
CAARSSTDIWGKLQF

SEQ ID NO: 419598 - protein, 14 aa, Homo sapiens
  CDR3 for beta chain variable domain of TCR clone 209799 (TRBV11-2, TRBJ2-5)
CASSRTGGIETQYF

SEQ ID NO: 419599 - protein, 14 aa, Homo sapiens
  CDR3 for alpha chain variable domain of TCR clone 209800 (TRAV1-2, TRAJ16)
CAVNRFSDGQKLLF

SEQ ID NO: 419600 - protein, 19 aa, Homo sapiens
  CDR3 for beta chain variable domain of TCR clone 209800 (TRBV25-1, TRBJ2-2)
WAILVYRVDRGRKTGELFF

SEQ ID NO: 419601 - protein, 13 aa, Homo sapiens
  CDR3 for alpha chain variable domain of TCR clone 209801 (TRAV39, TRAJ17)
CAAQFTAGNKLTF

SEQ ID NO: 419602 - protein, 13 aa, Homo sapiens
  CDR3 for beta chain variable domain of TCR clone 209801 (TRBV3-1, TRBJ1-5)
CAITRRGGQPQHF

SEQ ID NO: 419603 - protein, 16 aa, Homo sapiens
  CDR3 for alpha chain variable domain of TCR clone 209802 (TRAV3, TRAJ23)
CAVRDSSYNQGGKLVF

SEQ ID NO: 419604 - protein, 15 aa, Homo sapiens
  CDR3 for beta chain variable domain of TCR clone 209802 (TRBV6-3, TRBJ2-5)
CASRTRTSSRETQYF

SEQ ID NO: 419605 - protein, 13 aa, Homo sapiens
  CDR3 for alpha chain variable domain of TCR clone 209803 (TRAV2, TRAJ40)
CAVVTAGTYKYIF

SEQ ID NO: 419606 - protein, 13 aa, Homo sapiens
  CDR3 for beta chain variable domain of TCR clone 209803 (TRBV7-9, TRBJ1-2)
CASSLKQNYGYTF

SEQ ID NO: 419607 - protein, 12 aa, Homo sapiens
  CDR3 for alpha chain variable domain of TCR clone 209804 (TRAV12-3, TRAJ17)
CAMTITGNKLTF

SEQ ID NO: 419608 - protein, 15 aa, Homo sapiens
  CDR3 for beta chain variable domain of TCR clone 209804 (TRBV20-1, TRBJ2-7)
CSARDRVYGMDEQYF

SEQ ID NO: 419609 - protein, 11 aa, Homo sapiens
  CDR3 for alpha chain variable domain of TCR clone 209805 (TRAV35, TRAJ34)
CWVRNTDKLIF

SEQ ID NO: 419610 - protein, 14 aa, Homo sapiens
  CDR3 for beta chain variable domain of TCR clone 209805 (TRBV5-1, TRBJ2-7)
CASSRGESLYEQYF

SEQ ID NO: 419611 - protein, 14 aa, Homo sapiens
  CDR3 for alpha chain variable domain of TCR clone 209806 (TRAV12-2, TRAJ40)
CAVKIPSGTYKYIF

SEQ ID NO: 419612 - protein, 12 aa, Homo sapiens
  CDR3 for beta chain variable domain of TCR clone 209806 (TRBV7-8, TRBJ2-7)
CASNLGDREQYF

SEQ ID NO: 419613 - protein, 16 aa, Homo sapiens
  CDR3 for alpha chain variable domain of TCR clone 209807 (TRAV1-2, TRAJ10)
CAVRGVLTGGGNKLTF

SEQ ID NO: 419614 - protein, 18 aa, Homo sapiens
  CDR3 for beta chain variable domain of TCR clone 209807 (TRBV20-1, TRBJ2-6)
CSAETTPTRGSGANVLTF

SEQ ID NO: 419615 - protein, 16 aa, Homo sapiens
  CDR3 for alpha chain variable domain of TCR clone 209808 (TRAV27, TRAJ13)
CAGAKSDSGGYQKVTF

SEQ ID NO: 419616 - protein, 12 aa, Homo sapiens
  CDR3 for beta chain variable domain of TCR clone 209808 (TRBV7-3, TRBJ2-1)
CASSFQSGPQFF

SEQ ID NO: 419617 - protein, 16 aa, Homo sapiens
  CDR3 for alpha chain variable domain of TCR clone 209809 (TRAV3, TRAJ37)
CAVRGKRSGNTGKLIF

SEQ ID NO: 419618 - protein, 14 aa, Homo sapiens
  CDR3 for beta chain variable domain of TCR clone 209809 (TRBV25-1, TRBJ1-1)
CASTHLGGNTEAFF

SEQ ID NO: 419619 - protein, 17 aa, Homo sapiens
  CDR3 for alpha chain variable domain of TCR clone 209810 (TRAV13-1, TRAJ31)
CAPRDRLMFGDGTQLVV

SEQ ID NO: 419620 - protein, 15 aa, Homo sapiens
  CDR3 for beta chain variable domain of TCR clone 209810 (TRBV5-1, TRBJ2-1)
CASTGSGRTYNEKFF

SEQ ID NO: 419621 - protein, 12 aa, Homo sapiens
  CDR3 for alpha chain variable domain of TCR clone 209811 (TRAV3, TRAJ20)
CAVRDPDYKLSF

SEQ ID NO: 419622 - protein, 13 aa, Homo sapiens
  CDR3 for beta chain variable domain of TCR clone 209811 (TRBV7-3, TRBJ2-1)
CASSLDSYNEQFF

SEQ ID NO: 419623 - protein, 15 aa, Homo sapiens
  CDR3 for alpha chain variable domain of TCR clone 209812 (TRAV21, TRAJ53)
CATLNSGGSNDKLTF

SEQ ID NO: 419624 - protein, 16 aa, Homo sapiens
  CDR3 for beta chain variable domain of TCR clone 209812 (TRBV12-4, TRBJ2-3)
CASSLRLAETTDTQYF

SEQ ID NO: 419625 - protein, 14 aa, Homo sapiens
  CDR3 for alpha chain variable domain of TCR clone 209813 (TRAV8-3, TRAJ9)
CAVVYNTGGFKTIF

SEQ ID NO: 419626 - protein, 14 aa, Homo sapiens
  CDR3 for beta chain variable domain of TCR clone 209813 (TRBV7-3, TRBJ2-1)
CASSLAGGTNEQFF

SEQ ID NO: 419627 - protein, 15 aa, Homo sapiens
  CDR3 for alpha chain variable domain of TCR clone 209814 (TRAV2, TRAJ9)
CAVEDRGTGGFKTIF

SEQ ID NO: 419628 - protein, 11 aa, Homo sapiens
  CDR3 for beta chain variable domain of TCR clone 209814 (TRBV12-4, TRBJ2-3)
CASTATETQYF

SEQ ID NO: 419629 - protein, 14 aa, Homo sapiens
  CDR3 for alpha chain variable domain of TCR clone 209815 (TRAV1-2, TRAJ8)
CAVREDTGFQKLVF

SEQ ID NO: 419630 - protein, 15 aa, Homo sapiens
  CDR3 for beta chain variable domain of TCR clone 209815 (TRBV7-3, TRBJ2-7)
CASSLTPTGYDEQYF

SEQ ID NO: 419631 - protein, 16 aa, Homo sapiens
  CDR3 for alpha chain variable domain of TCR clone 209816 (TRAV29/DV5, TRAJ36)
CAASAGVETGANNRFF

SEQ ID NO: 419632 - protein, 16 aa, Homo sapiens
  CDR3 for beta chain variable domain of TCR clone 209816 (TRBV5-1, TRBJ2-3)
CASSLGLAVYTDTQYF

SEQ ID NO: 419633 - protein, 15 aa, Homo sapiens
  CDR3 for alpha chain variable domain of TCR clone 209817 (TRAV38-2/DV8, TRAJ57)
CAYKSGLGGSEKLVF

SEQ ID NO: 419634 - protein, 16 aa, Homo sapiens
  CDR3 for beta chain variable domain of TCR clone 209817 (TRBV28, TRBJ1-5)
CASSFRGGYSKQPQHF

SEQ ID NO: 419635 - protein, 14 aa, Homo sapiens
  CDR3 for alpha chain variable domain of TCR clone 209818 (TRAV13-1, TRAJ13)
CAASRVGGYQKVTF

SEQ ID NO: 419636 - protein, 17 aa, Homo sapiens
  CDR3 for beta chain variable domain of TCR clone 209818 (TRBV15, TRBJ1-5)
CATSRAPPGTRSQPQHF

SEQ ID NO: 419637 - protein, 15 aa, Homo sapiens
  CDR3 for alpha chain variable domain of TCR clone 209819 (TRAV21, TRAJ53)
CATLNSGGSIYKLTF

SEQ ID NO: 419638 - protein, 16 aa, Homo sapiens
  CDR3 for beta chain variable domain of TCR clone 209819 (TRBV9, TRBJ2-1)
CASSVGGGGNYNEQFF

SEQ ID NO: 419639 - protein, 14 aa, Homo sapiens
  CDR3 for alpha chain variable domain of TCR clone 209820 (TRAV1-2, TRAJ8)
CAVREDTCFQKLVF

SEQ ID NO: 419640 - protein, 15 aa, Homo sapiens
  CDR3 for beta chain variable domain of TCR clone 209820 (TRBV6-3, TRBJ2-7)
CASSSPGAVFYEQYF

SEQ ID NO: 419641 - protein, 12 aa, Homo sapiens
  CDR3 for alpha chain variable domain of TCR clone 209821 (TRAV12-3, TRAJ34)
CAMGYNTDKLIF

SEQ ID NO: 419642 - protein, 14 aa, Homo sapiens
  CDR3 for beta chain variable domain of TCR clone 209821 (TRBV4-1, TRBJ2-2)
CAGSQAVNTGELFF

SEQ ID NO: 419643 - protein, 13 aa, Homo sapiens
  CDR3 for alpha chain variable domain of TCR clone 209822 (TRAV8-4, TRAJ52)
LIAGGTSYGKLTF

SEQ ID NO: 419644 - protein, 13 aa, Homo sapiens
  CDR3 for beta chain variable domain of TCR clone 209822 (TRBV28, TRBJ2-2)
CASIGGLGGELFF

SEQ ID NO: 419645 - protein, 12 aa, Homo sapiens
  CDR3 for alpha chain variable domain of TCR clone 209823 (TRAV16, TRAJ17)
CAPSAAGNKLTF

SEQ ID NO: 419646 - protein, 15 aa, Homo sapiens
  CDR3 for beta chain variable domain of TCR clone 209823 (TRBV7-8, TRBJ2-1)
CASSLADSLYNEQFF

SEQ ID NO: 419647 - protein, 14 aa, Homo sapiens
  CDR3 for alpha chain variable domain of TCR clone 209824 (TRAV1-2, TRAJ8)
CAVREDTGFQKLVF

SEQ ID NO: 419648 - protein, 15 aa, Homo sapiens
  CDR3 for beta chain variable domain of TCR clone 209824 (TRBV10-2, TRBJ2-6)
CGSSEQGTGANVLTF

SEQ ID NO: 419649 - protein, 12 aa, Homo sapiens
  CDR3 for alpha chain variable domain of TCR clone 209825 (TRAV12-3, TRAJ17)
RAMTLTGNKRTF

SEQ ID NO: 419650 - protein, 15 aa, Homo sapiens
  CDR3 for beta chain variable domain of TCR clone 209825 (TRBV20-1, TRBJ2-7)
CSARDRVSGMDEQYF

SEQ ID NO: 419651 - protein, 14 aa, Homo sapiens
  CDR3 for alpha chain variable domain of TCR clone 209826 (TRAV12-2, TRAJ44)
CAVNPAGTASKLTF

SEQ ID NO: 419652 - protein, 16 aa, Homo sapiens
  CDR3 for beta chain variable domain of TCR clone 209826 (TRBV16, TRBJ2-7)
CASSRPAGGSSYEQYF

SEQ ID NO: 419653 - protein, 12 aa, Homo sapiens
  CDR3 for alpha chain variable domain of TCR clone 209827 (TRAV12-3, TRAJ17)
CAMTLTGNKLTF

SEQ ID NO: 419654 - protein, 18 aa, Homo sapiens
  CDR3 for beta chain variable domain of TCR clone 209827 (TRBV23-1, TRBJ2-3)
CASSQFHTGGISTDTQYF

SEQ ID NO: 419655 - protein, 14 aa, Homo sapiens
  CDR3 for alpha chain variable domain of TCR clone 209828 (TRAV13-2, TRAJ20)
CAESPAKDDYKLSF

SEQ ID NO: 419656 - protein, 16 aa, Homo sapiens
  CDR3 for beta chain variable domain of TCR clone 209828 (TRBV9, TRBJ2-1)
YASSVGGGGNYNEQFF

SEQ ID NO: 419657 - protein, 13 aa, Homo sapiens
  CDR3 for alpha chain variable domain of TCR clone 209829 (TRAV29/DV5, TRAJ31)
CAASRNNNARLMF

SEQ ID NO: 419658 - protein, 15 aa, Homo sapiens
  CDR3 for beta chain variable domain of TCR clone 209829 (TRBV28, TRBJ2-5)
CASSPPWSYQETKYF

SEQ ID NO: 419659 - protein, 11 aa, Homo sapiens
  CDR3 for alpha chain variable domain of TCR clone 209830 (TRAV21, TRAJ9)
CAVPGGFKTIF

SEQ ID NO: 419660 - protein, 17 aa, Homo sapiens
  CDR3 for beta chain variable domain of TCR clone 209830 (TRBV7-9, TRBJ2-5)
CATSGGARDPVLRSRHA

SEQ ID NO: 419661 - protein, 14 aa, Homo sapiens
  CDR3 for alpha chain variable domain of TCR clone 209831 (TRAV12-2, TRAJ36)
CAVNPPTGANNLFF

SEQ ID NO: 419662 - protein, 13 aa, Homo sapiens
  CDR3 for beta chain variable domain of TCR clone 209831 (TRBV20-1, TRBJ1-6)
GSAPTGLGSPLHF

SEQ ID NO: 419663 - protein, 15 aa, Homo sapiens
  CDR3 for alpha chain variable domain of TCR clone 209832 (TRAV26-1, TRAJ13)
CIVRHEAGGYQKVTF

SEQ ID NO: 419664 - protein, 15 aa, Homo sapiens
  CDR3 for beta chain variable domain of TCR clone 209832 (TRBV20-1, TRBJ2-7)
CSARDRVSGMDEQYF

SEQ ID NO: 419665 - protein, 14 aa, Homo sapiens
  CDR3 for alpha chain variable domain of TCR clone 209833 (TRAV1-2, TRAJ16)
CAVNRFSDGQKLLF

SEQ ID NO: 419666 - protein, 13 aa, Homo sapiens
  CDR3 for beta chain variable domain of TCR clone 209833 (TRBV7-9, TRBJ2-5)
CASSLPPGETQYF

SEQ ID NO: 419667 - protein, 14 aa, Homo sapiens
  CDR3 for alpha chain variable domain of TCR clone 209834 (TRAV13-1, TRAJ44)
CAAKATGTASKLTF

SEQ ID NO: 419668 - protein, 15 aa, Homo sapiens
  CDR3 for beta chain variable domain of TCR clone 209834 (TRBV2, TRBJ1-2)
CASSEGDRVSYGYTF

SEQ ID NO: 419669 - protein, 12 aa, Homo sapiens
  CDR3 for alpha chain variable domain of TCR clone 209835 (TRAV3, TRAJ26)
CAVRDYGQNFVF

SEQ ID NO: 419670 - protein, 16 aa, Homo sapiens
  CDR3 for beta chain variable domain of TCR clone 209835 (TRBV11-2, TRBJ1-2)
SASSTSGREANYGYTF

SEQ ID NO: 419671 - protein, 13 aa, Homo sapiens
  CDR3 for alpha chain variable domain of TCR clone 209836 (TRAV12-1, TRAJ22)
CVASGGSARQLTF

SEQ ID NO: 419672 - protein, 15 aa, Homo sapiens
  CDR3 for beta chain variable domain of TCR clone 209836 (TRBV5-1, TRBJ2-3)
CASSYTSGSTDTQYF

SEQ ID NO: 419673 - protein, 14 aa, Homo sapiens
  CDR3 for alpha chain variable domain of TCR clone 209837 (TRAV23/DV6, TRAJ37)
CAASTSSNTGKLIF

SEQ ID NO: 419674 - protein, 16 aa, Homo sapiens
  CDR3 for beta chain variable domain of TCR clone 209837 (TRBV7-9, TRBJ1-2)
CASSLGFSSGEDGYTF

SEQ ID NO: 419675 - protein, 12 aa, Homo sapiens
  CDR3 for alpha chain variable domain of TCR clone 209838 (TRAV12-3, TRAJ17)
CAMTLTGNKLTF

SEQ ID NO: 419676 - protein, 14 aa, Homo sapiens
  CDR3 for beta chain variable domain of TCR clone 209838 (TRBV7-2, TRBJ2-7)
CASRTQGAAYEQYF

SEQ ID NO: 419677 - protein, 12 aa, Homo sapiens
  CDR3 for alpha chain variable domain of TCR clone 209839 (TRAV12-3, TRAJ20)
CAMVRGDYKLSF

SEQ ID NO: 419678 - protein, 12 aa, Homo sapiens
  CDR3 for beta chain variable domain of TCR clone 209839 (TRBV6-1, TRBJ2-7)
CASIDYSYEQYF

SEQ ID NO: 419679 - protein, 17 aa, Homo sapiens
  CDR3 for alpha chain variable domain of TCR clone 209840 (TRAV3, TRAJ6)
CAVRDGPRAGGSYIPKF

SEQ ID NO: 419680 - protein, 15 aa, Homo sapiens
  CDR3 for beta chain variable domain of TCR clone 209840 (TRBV7-6, TRBJ2-3)
CASSPIIYSTDTQYF

SEQ ID NO: 419681 - protein, 15 aa, Homo sapiens
  CDR3 for alpha chain variable domain of TCR clone 209841 (TRAV3, TRAJ10)
CAVRDGKGGGNKLTF

SEQ ID NO: 419682 - protein, 15 aa, Homo sapiens
  CDR3 for beta chain variable domain of TCR clone 209841 (TRBV4-2, TRBJ1-4)
CASSLVQREVEKLFF

SEQ ID NO: 419683 - protein, 15 aa, Homo sapiens
  CDR3 for alpha chain variable domain of TCR clone 209842 (TRAV12-3, TRAJ44)
CVVFVNTGTASKLTF

SEQ ID NO: 419684 - protein, 17 aa, Homo sapiens
  CDR3 for beta chain variable domain of TCR clone 209842 (TRBV7-8, TRBJ2-6)
CASSAGTGGAGANVLTF

SEQ ID NO: 419685 - protein, 16 aa, Homo sapiens
  CDR3 for alpha chain variable domain of TCR clone 209843 (TRAV12-2, TRAJ28)
CAVNEYSGAGSYQLTF

SEQ ID NO: 419686 - protein, 15 aa, Homo sapiens
  CDR3 for beta chain variable domain of TCR clone 209843 (TRBV7-9, TRBJ1-4)
CASSARTGGNEKLFF

SEQ ID NO: 419687 - protein, 11 aa, Homo sapiens
  CDR3 for alpha chain variable domain of TCR clone 209844 (TRAV27, TRAJ47)
SLVEYGNKLVF

SEQ ID NO: 419688 - protein, 18 aa, Homo sapiens
  CDR3 for beta chain variable domain of TCR clone 209844 (TRBV2, TRBJ2-1)
CDSRGLAGGPRTYNEQFF

SEQ ID NO: 419689 - protein, 17 aa, Homo sapiens
  CDR3 for alpha chain variable domain of TCR clone 209845 (TRAV13-1, TRAJ52)
CAAGRNAGGTSYGKMKF

SEQ ID NO: 419690 - protein, 13 aa, Homo sapiens
  CDR3 for beta chain variable domain of TCR clone 209845 (TRBV7-2, TRBJ1-1)
CASNLKGAKVAFF

SEQ ID NO: 419691 - protein, 11 aa, Homo sapiens
  CDR3 for alpha chain variable domain of TCR clone 209846 (TRAV3, TRAJ17)
PRGAASNKLTF

SEQ ID NO: 419692 - protein, 16 aa, Homo sapiens
  CDR3 for beta chain variable domain of TCR clone 209846 (TRBV7-6, TRBJ2-1)
CASSAPGPSSYNEQFF

SEQ ID NO: 419693 - protein, 14 aa, Homo sapiens
  CDR3 for alpha chain variable domain of TCR clone 209847 (TRAV38-1, TRAJ45)
CASHSGGGADGLPF

SEQ ID NO: 419694 - protein, 17 aa, Homo sapiens
  CDR3 for beta chain variable domain of TCR clone 209847 (TRBV11-2, TRBJ2-1)
CASSLYPPGVEYNEQFF

SEQ ID NO: 419695 - protein, 14 aa, Homo sapiens
  CDR3 for alpha chain variable domain of TCR clone 209848 (TRAV35, TRAJ33)
CSGSSQDSNYQLIW

SEQ ID NO: 419696 - protein, 15 aa, Homo sapiens
  CDR3 for beta chain variable domain of TCR clone 209848 (TRBV4-1, TRBJ1-4)
CASSDTGGTNEKLFF

SEQ ID NO: 419697 - protein, 15 aa, Homo sapiens
  CDR3 for alpha chain variable domain of TCR clone 209849 (TRAV8-4, TRAJ37)
CAVSRGSGNTGKLIF

SEQ ID NO: 419698 - protein, 14 aa, Homo sapiens
  CDR3 for beta chain variable domain of TCR clone 209849 (TRBV7-2, TRBJ1-1)
CASSFLTGTTEAFF

SEQ ID NO: 419699 - protein, 13 aa, Homo sapiens
  CDR3 for alpha chain variable domain of TCR clone 209850 (TRAV13-2, TRAJ40)
CAENLHYLRNLQI

SEQ ID NO: 419700 - protein, 14 aa, Homo sapiens
  CDR3 for beta chain variable domain of TCR clone 209850 (TRBV19, TRBJ2-7)
CASTVQGRPYEQYF

SEQ ID NO: 419701 - protein, 14 aa, Homo sapiens
  CDR3 for alpha chain variable domain of TCR clone 209851 (TRAV1-2, TRAJ16)
CAVTRFSDGQKLLF

SEQ ID NO: 419702 - protein, 13 aa, Homo sapiens
  CDR3 for beta chain variable domain of TCR clone 209851 (TRBV7-9, TRBJ1-2)
CASSLKQNYGYTF

SEQ ID NO: 419703 - protein, 14 aa, Homo sapiens
  CDR3 for alpha chain variable domain of TCR clone 209852 (TRAV8-1, TRAJ39)
CAVNDNNAGNMLTF

SEQ ID NO: 419704 - protein, 14 aa, Homo sapiens
  CDR3 for beta chain variable domain of TCR clone 209852 (TRBV28, TRBJ2-1)
CASSPTTGYNEQFF

SEQ ID NO: 419705 - protein, 11 aa, Homo sapiens
  CDR3 for alpha chain variable domain of TCR clone 209853 (TRAV16, TRAJ33)
CALHSNYQLIW

SEQ ID NO: 419706 - protein, 14 aa, Homo sapiens
  CDR3 for beta chain variable domain of TCR clone 209853 (TRBV7-9, TRBJ1-1)
CASSLGGANTEAFF

SEQ ID NO: 419707 - protein, 14 aa, Homo sapiens
  CDR3 for alpha chain variable domain of TCR clone 209854 (TRAV12-2, TRAJ32)
CAHPESGATNKLIF

SEQ ID NO: 419708 - protein, 15 aa, Homo sapiens
  CDR3 for beta chain variable domain of TCR clone 209854 (TRBV7-9, TRBJ1-4)
CASSARTGGNEKLFF

SEQ ID NO: 419709 - protein, 17 aa, Homo sapiens
  CDR3 for alpha chain variable domain of TCR clone 209855 (TRAV12-2, TRAJ36)
CAVKDNPFFGTGTRLTV

SEQ ID NO: 419710 - protein, 15 aa, Homo sapiens
  CDR3 for beta chain variable domain of TCR clone 209855 (TRBV28, TRBJ2-2)
CASTVAGANTGELFL

SEQ ID NO: 419711 - protein, 17 aa, Homo sapiens
  CDR3 for alpha chain variable domain of TCR clone 209856 (TRAV4, TRAJ18)
CLVVAAGRGSTRGRLYF

SEQ ID NO: 419712 - protein, 17 aa, Homo sapiens
  CDR3 for beta chain variable domain of TCR clone 209856 (TRBV28, TRBJ2-2)
CACSLATGMGDAGELFF

SEQ ID NO: 419713 - protein, 16 aa, Homo sapiens
  CDR3 for alpha chain variable domain of TCR clone 209857 (TRAV3, TRAJ3)
CAVRDRAKSSASKIIY

SEQ ID NO: 419714 - protein, 13 aa, Homo sapiens
  CDR3 for beta chain variable domain of TCR clone 209857 (TRBV10-3, TRBJ2-7)
CASKLAVNYEQYF

SEQ ID NO: 419715 - protein, 16 aa, Homo sapiens
  CDR3 for alpha chain variable domain of TCR clone 209858 (TRAV3, TRAJ37)
CAVRPHGSGNTGKLIF

SEQ ID NO: 419716 - protein, 17 aa, Homo sapiens
  CDR3 for beta chain variable domain of TCR clone 209858 (TRBV20-1, TRBJ2-1)
CSASSSRLAGSYNEQFF

SEQ ID NO: 419717 - protein, 17 aa, Homo sapiens
  CDR3 for alpha chain variable domain of TCR clone 209859 (TRAV4, TRAJ13)
CLVGVQGSSGGYQKVTF

SEQ ID NO: 419718 - protein, 15 aa, Homo sapiens
  CDR3 for beta chain variable domain of TCR clone 209859 (TRBV19, TRBJ1-1)
CASTSGQIQNTEAFF

SEQ ID NO: 419719 - protein, 13 aa, Homo sapiens
  CDR3 for alpha chain variable domain of TCR clone 209860 (TRAV19, TRAJ48)
CALKGFGNDKLTF

SEQ ID NO: 419720 - protein, 16 aa, Homo sapiens
  CDR3 for beta chain variable domain of TCR clone 209860 (TRBV10-2, TRBJ1-2)
CASSERRGPDNYGYTF

SEQ ID NO: 419721 - protein, 15 aa, Homo sapiens
  CDR3 for alpha chain variable domain of TCR clone 209861 (TRAV3, TRAJ5)
CAVRDLDTVRRALTF

SEQ ID NO: 419722 - protein, 15 aa, Homo sapiens
  CDR3 for beta chain variable domain of TCR clone 209861 (TRBV12-4, TRBJ2-5)
CASSPPTGLQETQYF

SEQ ID NO: 419723 - protein, 16 aa, Homo sapiens
  CDR3 for alpha chain variable domain of TCR clone 209862 (TRAV8-3, TRAJ8)
CAVPRDGNTGFQKLVF

SEQ ID NO: 419724 - protein, 13 aa, Homo sapiens
  CDR3 for beta chain variable domain of TCR clone 209862 (TRBV7-2, TRBJ2-2)
CASSLAVTGELFF

SEQ ID NO: 419725 - protein, 16 aa, Homo sapiens
  CDR3 for alpha chain variable domain of TCR clone 209863 (TRAV3, TRAJ18)
CAVRDGRGSTLGRLYF

SEQ ID NO: 419726 - protein, 15 aa, Homo sapiens
  CDR3 for beta chain variable domain of TCR clone 209863 (TRBV7-9, TRBJ1-2)
CASSLDREPNYGYTF

SEQ ID NO: 419727 - protein, 14 aa, Homo sapiens
  CDR3 for alpha chain variable domain of TCR clone 209864 (TRAV1-2, TRAJ27)
CAPAEYTNAGKSNF

SEQ ID NO: 419728 - protein, 18 aa, Homo sapiens
  CDR3 for beta chain variable domain of TCR clone 209864 (TRBV28, TRBJ1-2)
CASRQQQGKRGSNYGYTF

SEQ ID NO: 419729 - protein, 15 aa, Homo sapiens
  CDR3 for alpha chain variable domain of TCR clone 209865 (TRAV20, TRAJ50)
CAVRQMKTSYDKVIF

SEQ ID NO: 419730 - protein, 17 aa, Homo sapiens
  CDR3 for beta chain variable domain of TCR clone 209865 (TRBV28, TRBJ2-7)
CASSPLHRASGVYEQCF

SEQ ID NO: 419731 - protein, 13 aa, Homo sapiens
  CDR3 for alpha chain variable domain of TCR clone 209866 (TRAV26-1, TRAJ33)
CIVRVEGIYQLIW

SEQ ID NO: 419732 - protein, 16 aa, Homo sapiens
  CDR3 for beta chain variable domain of TCR clone 209866 (TRBV15, TRBJ2-7)
CATSRDRGRRRGEQYF

SEQ ID NO: 419733 - protein, 17 aa, Homo sapiens
  CDR3 for alpha chain variable domain of TCR clone 209867 (TRAV8-6, TRAJ58)
CAVSSWVGETSGSRLTF

SEQ ID NO: 419734 - protein, 14 aa, Homo sapiens
  CDR3 for beta chain variable domain of TCR clone 209867 (TRBV6-5, TRBJ1-2)
CASSYDGTGGGYTF

SEQ ID NO: 419735 - protein, 13 aa, Homo sapiens
  CDR3 for alpha chain variable domain of TCR clone 209868 (TRAV2, TRAJ15)
CAVASQAGTALIF

SEQ ID NO: 419736 - protein, 15 aa, Homo sapiens
  CDR3 for beta chain variable domain of TCR clone 209868 (TRBV10-2, TRBJ2-6)
CAGSEQGTGANVLTF

SEQ ID NO: 419737 - protein, 16 aa, Homo sapiens
  CDR3 for alpha chain variable domain of TCR clone 209869 (TRAV4, TRAJ9)
CLVGDPNRPGGFKTIF

SEQ ID NO: 419738 - protein, 14 aa, Homo sapiens
  CDR3 for beta chain variable domain of TCR clone 209869 (TRBV12-5, TRBJ2-5)
CASGSRTHQETQYF

SEQ ID NO: 419739 - protein, 14 aa, Homo sapiens
  CDR3 for alpha chain variable domain of TCR clone 209870 (TRAV12-1, TRAJ24)
CVVGATDSWGKFQF

SEQ ID NO: 419740 - protein, 13 aa, Homo sapiens
  CDR3 for beta chain variable domain of TCR clone 209870 (TRBV2, TRBJ2-3)
CASILAGGQGQYF

SEQ ID NO: 419741 - protein, 11 aa, Homo sapiens
  CDR3 for alpha chain variable domain of TCR clone 209871 (TRAV13-1, TRAJ43)
CAASGANAMRF

SEQ ID NO: 419742 - protein, 14 aa, Homo sapiens
  CDR3 for beta chain variable domain of TCR clone 209871 (TRBV4-1, TRBJ1-1)
CASSPPEVNTEAFF

SEQ ID NO: 419743 - protein, 18 aa, Homo sapiens
  CDR3 for alpha chain variable domain of TCR clone 209872 (TRAV8-4, TRAJ52)
CAVASFNAGGTSYGKLTF

SEQ ID NO: 419744 - protein, 16 aa, Homo sapiens
  CDR3 for beta chain variable domain of TCR clone 209872 (TRBV7-3, TRBJ2-2)
CASSLKRGTLSGELFL

SEQ ID NO: 419745 - protein, 13 aa, Homo sapiens
  CDR3 for alpha chain variable domain of TCR clone 209873 (TRAV27, TRAJ6)
CAGGTRGSYIPTF

SEQ ID NO: 419746 - protein, 15 aa, Homo sapiens
  CDR3 for beta chain variable domain of TCR clone 209873 (TRBV7-9, TRBJ2-7)
CASSLDLQGPYEQYF

SEQ ID NO: 419747 - protein, 16 aa, Homo sapiens
  CDR3 for alpha chain variable domain of TCR clone 209874 (TRAV27, TRAJ52)
CAGAPAGGTSYGKLTF

SEQ ID NO: 419748 - protein, 12 aa, Homo sapiens
  CDR3 for beta chain variable domain of TCR clone 209874 (TRBV27, TRBJ2-1)
CASRGFYNEQFV

SEQ ID NO: 419749 - protein, 11 aa, Homo sapiens
  CDR3 for alpha chain variable domain of TCR clone 209875 (TRAV12-1, TRAJ42)
CERRKPRKSIF

SEQ ID NO: 419750 - protein, 18 aa, Homo sapiens
  CDR3 for beta chain variable domain of TCR clone 209875 (TRBV11-2, TRBJ2-3)
CASSLGGASRGAPNTQYF

SEQ ID NO: 419751 - protein, 14 aa, Homo sapiens
  CDR3 for alpha chain variable domain of TCR clone 209876 (TRAV26-1, TRAJ38)
CIADHAGNNRKLIW

SEQ ID NO: 419752 - protein, 12 aa, Homo sapiens
  CDR3 for beta chain variable domain of TCR clone 209876 (TRBV5-1, TRBJ2-7)
CASSFRGYEQYF

SEQ ID NO: 419753 - protein, 14 aa, Homo sapiens
  CDR3 for alpha chain variable domain of TCR clone 209877 (TRAV14/DV4, TRAJ15)
CAMRRDQAGTALIF

SEQ ID NO: 419754 - protein, 13 aa, Homo sapiens
  CDR3 for beta chain variable domain of TCR clone 209877 (TRBV2, TRBJ1-1)
CASNLLRNTEAFF

SEQ ID NO: 419755 - protein, 15 aa, Homo sapiens
  CDR3 for alpha chain variable domain of TCR clone 209878 (TRAV12-3, TRAJ6)
CAMSATTGGSYIPTF

SEQ ID NO: 419756 - protein, 15 aa, Homo sapiens
  CDR3 for beta chain variable domain of TCR clone 209878 (TRBV9, TRBJ2-1)
CQQPYDRGLLNEQFF

SEQ ID NO: 419757 - protein, 18 aa, Homo sapiens
  CDR3 for alpha chain variable domain of TCR clone 209879 (TRAV1-2, TRAJ18)
CAVRDMGDRGSTLGRLYF

SEQ ID NO: 419758 - protein, 14 aa, Homo sapiens
  CDR3 for beta chain variable domain of TCR clone 209879 (TRBV7-6, TRBJ2-1)
CASSLGGGADEQFF

SEQ ID NO: 419759 - protein, 14 aa, Homo sapiens
  CDR3 for alpha chain variable domain of TCR clone 209880 (TRAV12-2, TRAJ13)
CAVKKTGGYQKVTF

SEQ ID NO: 419760 - protein, 13 aa, Homo sapiens
  CDR3 for beta chain variable domain of TCR clone 209880 (TRBV10-3, TRBJ2-7)
CASKLEVNYEQYF

SEQ ID NO: 419761 - protein, 14 aa, Homo sapiens
  CDR3 for alpha chain variable domain of TCR clone 209881 (TRAV14/DV4, TRAJ15)
CAMRRDQAGTALIF

SEQ ID NO: 419762 - protein, 16 aa, Homo sapiens
  CDR3 for beta chain variable domain of TCR clone 209881 (TRBV19, TRBJ2-1)
CASSKAGPSSYNEQFF

SEQ ID NO: 419763 - protein, 19 aa, Homo sapiens
  CDR3 for alpha chain variable domain of TCR clone 209882 (TRAV3, TRAJ37)
CAVRDLVGGYPSKTGKLIF

SEQ ID NO: 419764 - protein, 14 aa, Homo sapiens
  CDR3 for beta chain variable domain of TCR clone 209882 (TRBV7-8, TRBJ2-3)
CASSLEAGTDTQYF

SEQ ID NO: 419765 - protein, 14 aa, Homo sapiens
  CDR3 for alpha chain variable domain of TCR clone 209883 (TRAV16, TRAJ33)
CALSAMDSNYPLIW

SEQ ID NO: 419766 - protein, 16 aa, Homo sapiens
  CDR3 for beta chain variable domain of TCR clone 209883 (TRBV12-4, TRBJ2-3)
CASSFPSNTNTDTQCF

SEQ ID NO: 419767 - protein, 11 aa, Homo sapiens
  CDR3 for alpha chain variable domain of TCR clone 209884 (TRAV8-3, TRAJ20)
CAVAQENKLSF

SEQ ID NO: 419768 - protein, 15 aa, Homo sapiens
  CDR3 for beta chain variable domain of TCR clone 209884 (TRBV7-2, TRBJ2-3)
CASSLRGGSTDTQYF

SEQ ID NO: 419769 - protein, 21 aa, Homo sapiens
  CDR3 for alpha chain variable domain of TCR clone 209885 (TRAV12-1, TRAJ32)
SSVIQPPTSMNYGGATNKLIF

SEQ ID NO: 419770 - protein, 18 aa, Homo sapiens
  CDR3 for beta chain variable domain of TCR clone 209885 (TRBV20-1, TRBJ2-3)
CSASGRAGGPGTTDTQYF

SEQ ID NO: 419771 - protein, 15 aa, Homo sapiens
  CDR3 for alpha chain variable domain of TCR clone 209886 (TRAV26-1, TRAJ29)
CIVRVEGSGNTPLVF

SEQ ID NO: 419772 - protein, 14 aa, Homo sapiens
  CDR3 for beta chain variable domain of TCR clone 209886 (TRBV9, TRBJ2-7)
CASSVGVGSYEQYF

SEQ ID NO: 419773 - protein, 14 aa, Homo sapiens
  CDR3 for alpha chain variable domain of TCR clone 209887 (TRAV14/DV4, TRAJ34)
CAMREGRPHRQAHL

SEQ ID NO: 419774 - protein, 16 aa, Homo sapiens
  CDR3 for beta chain variable domain of TCR clone 209887 (TRBV20-1, TRBJ1-2)
CSASMGQGVANYGYTF

SEQ ID NO: 419775 - protein, 15 aa, Homo sapiens
  CDR3 for alpha chain variable domain of TCR clone 209888 (TRAV12-2, TRAJ50)
CAVNGLETSYDKVIF

SEQ ID NO: 419776 - protein, 12 aa, Homo sapiens
  CDR3 for beta chain variable domain of TCR clone 209888 (TRBV27, TRBJ2-2)
CASKLFTGELFF

SEQ ID NO: 419777 - protein, 17 aa, Homo sapiens
  CDR3 for alpha chain variable domain of TCR clone 209889 (TRAV3, TRAJ4)
CAVSDIMFSGGYNKLIF

SEQ ID NO: 419778 - protein, 13 aa, Homo sapiens
  CDR3 for beta chain variable domain of TCR clone 209889 (TRBV28, TRBJ2-1)
CASSLIGRDEQFF

SEQ ID NO: 419779 - protein, 15 aa, Homo sapiens
  CDR3 for alpha chain variable domain of TCR clone 209890 (TRAV17, TRAJ37)
CATDHGSSNTGKLIF

SEQ ID NO: 419780 - protein, 18 aa, Homo sapiens
  CDR3 for beta chain variable domain of TCR clone 209890 (TRBV11-2, TRBJ2-3)
CASSLGGASRGAPNTQYF

SEQ ID NO: 419781 - protein, 14 aa, Homo sapiens
  CDR3 for alpha chain variable domain of TCR clone 209891 (TRAV22, TRAJ15)
CAVEMIQAGTALIF

SEQ ID NO: 419782 - protein, 15 aa, Homo sapiens
  CDR3 for beta chain variable domain of TCR clone 209891 (TRBV19, TRBJ2-3)
CASSARWTITDTQYF

SEQ ID NO: 419783 - protein, 16 aa, Homo sapiens
  CDR3 for alpha chain variable domain of TCR clone 209892 (TRAV30, TRAJ24)
CGTEIVDANSWGNFQF

SEQ ID NO: 419784 - protein, 14 aa, Homo sapiens
  CDR3 for beta chain variable domain of TCR clone 209892 (TRBV12-5, TRBJ2-5)
CASGSRTHQETQYF

SEQ ID NO: 419785 - protein, 13 aa, Homo sapiens
  CDR3 for alpha chain variable domain of TCR clone 209893 (TRAV13-2, TRAJ48)
CAEMDFGNEKLTL

SEQ ID NO: 419786 - protein, 15 aa, Homo sapiens
  CDR3 for beta chain variable domain of TCR clone 209893 (TRBV7-9, TRBJ1-6)
CASSSPGRGNSPLYF

SEQ ID NO: 419787 - protein, 14 aa, Homo sapiens
  CDR3 for alpha chain variable domain of TCR clone 209894 (TRAV12-1, TRAJ30)
CVVNIGGRNDEIIF

SEQ ID NO: 419788 - protein, 14 aa, Homo sapiens
  CDR3 for beta chain variable domain of TCR clone 209894 (TRBV20-1, TRBJ2-1)
CSAQIGGSANEQFF

SEQ ID NO: 419789 - protein, 14 aa, Homo sapiens
  CDR3 for alpha chain variable domain of TCR clone 209895 (TRAV1-2, TRAJ16)
CAVNRFSGGQKLLF

SEQ ID NO: 419790 - protein, 16 aa, Homo sapiens
  CDR3 for beta chain variable domain of TCR clone 209895 (TRBV18, TRBJ1-4)
CASSLQTVATNEKLFF

SEQ ID NO: 419791 - protein, 15 aa, Homo sapiens
  CDR3 for alpha chain variable domain of TCR clone 209896 (TRAV3, TRAJ5)
CAVRDRKTGRRALTF

SEQ ID NO: 419792 - protein, 15 aa, Homo sapiens
  CDR3 for beta chain variable domain of TCR clone 209896 (TRBV7-8, TRBJ2-1)
FASSLADSLYNEQFF

SEQ ID NO: 419793 - protein, 14 aa, Homo sapiens
  CDR3 for alpha chain variable domain of TCR clone 209897 (TRAV12-1, TRAJ17)
CVVNYKAAGNKLTS

SEQ ID NO: 419794 - protein, 15 aa, Homo sapiens
  CDR3 for beta chain variable domain of TCR clone 209897 (TRBV20-1, TRBJ2-7)
CSARDRVSGMDEQYF

SEQ ID NO: 419795 - protein, 14 aa, Homo sapiens
  CDR3 for alpha chain variable domain of TCR clone 209898 (TRAV9-2, TRAJ39)
CALYIYNAGNMLTF

SEQ ID NO: 419796 - protein, 16 aa, Homo sapiens
  CDR3 for beta chain variable domain of TCR clone 209898 (TRBV5-7, TRBJ1-1)
CASSLVGPRGDTEAFF

SEQ ID NO: 419797 - protein, 12 aa, Homo sapiens
  CDR3 for alpha chain variable domain of TCR clone 209899 (TRAV2, TRAJ9)
CAVGAGGFKTIF

SEQ ID NO: 419798 - protein, 14 aa, Homo sapiens
  CDR3 for beta chain variable domain of TCR clone 209899 (TRBV9, TRBJ2-1)
CASSVSSFDNEQFF

SEQ ID NO: 419799 - protein, 14 aa, Homo sapiens
  CDR3 for alpha chain variable domain of TCR clone 209900 (TRAV1-2, TRAJ8)
CAVRGDTGFQKLVF

SEQ ID NO: 419800 - protein, 16 aa, Homo sapiens
  CDR3 for beta chain variable domain of TCR clone 209900 (TRBV27, TRBJ2-2)
CASSFRGLVRTGELFF

SEQ ID NO: 419801 - protein, 13 aa, Homo sapiens
  CDR3 for alpha chain variable domain of TCR clone 209901 (TRAV21, TRAJ57)
CAVTQGGSEKLVF

SEQ ID NO: 419802 - protein, 15 aa, Homo sapiens
  CDR3 for beta chain variable domain of TCR clone 209901 (TRBV11-2, TRBJ2-1)
CASSLGPDSYNEQFF

SEQ ID NO: 419803 - protein, 14 aa, Homo sapiens
  CDR3 for alpha chain variable domain of TCR clone 209902 (TRAV35, TRAJ42)
CAGRYGGSQGNLIF

SEQ ID NO: 419804 - protein, 11 aa, Homo sapiens
  CDR3 for beta chain variable domain of TCR clone 209902 (TRBV18, TRBJ1-2)
CASSPLNGYTF

SEQ ID NO: 419805 - protein, 15 aa, Homo sapiens
  CDR3 for alpha chain variable domain of TCR clone 209903 (TRAV8-4, TRAJ48)
CAVSYESRGNEKLTF

SEQ ID NO: 419806 - protein, 16 aa, Homo sapiens
  CDR3 for beta chain variable domain of TCR clone 209903 (TRBV12-4, TRBJ2-5)
CASSFFVRGRQKTQYF

SEQ ID NO: 419807 - protein, 15 aa, Homo sapiens
  CDR3 for alpha chain variable domain of TCR clone 209904 (TRAV34, TRAJ38)
CGADFTPGNNRKLIW

SEQ ID NO: 419808 - protein, 14 aa, Homo sapiens
  CDR3 for beta chain variable domain of TCR clone 209904 (TRBV18, TRBJ2-7)
CASSPRGGSYEQYF

SEQ ID NO: 419809 - protein, 13 aa, Homo sapiens
  CDR3 for alpha chain variable domain of TCR clone 209905 (TRAV12-3, TRAJ9)
CAMSADGGFKTIF

SEQ ID NO: 419810 - protein, 15 aa, Homo sapiens
  CDR3 for beta chain variable domain of TCR clone 209905 (TRBV7-2, TRBJ2-1)
CASSSGLAGGNEQFF

SEQ ID NO: 419811 - protein, 13 aa, Homo sapiens
  CDR3 for alpha chain variable domain of TCR clone 209906 (TRAV12-1, TRAJ8)
CVGMGPGFQKLVF

SEQ ID NO: 419812 - protein, 14 aa, Homo sapiens
  CDR3 for beta chain variable domain of TCR clone 209906 (TRBV18, TRBJ2-5)
CASSPGVSQETQYF

SEQ ID NO: 419813 - protein, 14 aa, Homo sapiens
  CDR3 for alpha chain variable domain of TCR clone 209907 (TRAV12-2, TRAJ40)
CAVKIPSGTYKYIF

SEQ ID NO: 419814 - protein, 14 aa, Homo sapiens
  CDR3 for beta chain variable domain of TCR clone 209907 (TRBV19, TRBJ2-7)
CASNFRDTFTGMYF

SEQ ID NO: 419815 - protein, 14 aa, Homo sapiens
  CDR3 for alpha chain variable domain of TCR clone 209908 (TRAV12-2, TRAJ17)
CAVNIKAAGNKLTF

SEQ ID NO: 419816 - protein, 16 aa, Homo sapiens
  CDR3 for beta chain variable domain of TCR clone 209908 (TRBV20-1, TRBJ2-6)
CSASSKGYDGANVLTF

SEQ ID NO: 419817 - protein, 18 aa, Homo sapiens
  CDR3 for alpha chain variable domain of TCR clone 209909 (TRAV26-2, TRAJ45)
CILRGDKYSGGGADGLTF

SEQ ID NO: 419818 - protein, 16 aa, Homo sapiens
  CDR3 for beta chain variable domain of TCR clone 209909 (TRBV2, TRBJ1-4)
CASNLLQGATNEKLFF

SEQ ID NO: 419819 - protein, 18 aa, Homo sapiens
  CDR3 for alpha chain variable domain of TCR clone 209910 (TRAV21, TRAJ52)
CAVRPSPAGGTSSGKLTF

SEQ ID NO: 419820 - protein, 17 aa, Homo sapiens
  CDR3 for beta chain variable domain of TCR clone 209910 (TRBV13, TRBJ2-3)
YASSLSRVAGGRNTQYF

SEQ ID NO: 419821 - protein, 14 aa, Homo sapiens
  CDR3 for alpha chain variable domain of TCR clone 209911 (TRAV26-2, TRAJ31)
CILIPGNNNTRPMF

SEQ ID NO: 419822 - protein, 16 aa, Homo sapiens
  CDR3 for beta chain variable domain of TCR clone 209911 (TRBV7-3, TRBJ2-1)
CASSLVSGSSNNEQFF

SEQ ID NO: 419823 - protein, 14 aa, Homo sapiens
  CDR3 for alpha chain variable domain of TCR clone 209912 (TRAV12-3, TRAJ10)
SHLPLTGGGNKLTF

SEQ ID NO: 419824 - protein, 16 aa, Homo sapiens
  CDR3 for beta chain variable domain of TCR clone 209912 (TRBV4-1, TRBJ1-4)
CASSQDLRRGGEKLSF

SEQ ID NO: 419825 - protein, 14 aa, Homo sapiens
  CDR3 for alpha chain variable domain of TCR clone 209913 (TRAV8-4, TRAJ23)
CAVSGGNQGGKLIF

SEQ ID NO: 419826 - protein, 16 aa, Homo sapiens
  CDR3 for beta chain variable domain of TCR clone 209913 (TRBV12-4, TRBJ2-7)
CASSLIGGTGTYEQYF

SEQ ID NO: 419827 - protein, 14 aa, Homo sapiens
  CDR3 for alpha chain variable domain of TCR clone 209914 (TRAV12-3, TRAJ22)
CAMSLFGSARQLTF

SEQ ID NO: 419828 - protein, 15 aa, Homo sapiens
  CDR3 for beta chain variable domain of TCR clone 209914 (TRBV19, TRBJ1-1)
CASTSGQIQNTEAFF

SEQ ID NO: 419829 - protein, 14 aa, Homo sapiens
  CDR3 for alpha chain variable domain of TCR clone 209915 (TRAV29/DV5, TRAJ47)
CAASSIEYGNKLVF

SEQ ID NO: 419830 - protein, 15 aa, Homo sapiens
  CDR3 for beta chain variable domain of TCR clone 209915 (TRBV7-2, TRBJ1-5)
CASSLDRGQDQPQHF

SEQ ID NO: 419831 - protein, 15 aa, Homo sapiens
  CDR3 for alpha chain variable domain of TCR clone 209916 (TRAV38-1, TRAJ37)
CAFIFGSGNTSKLIF

SEQ ID NO: 419832 - protein, 12 aa, Homo sapiens
  CDR3 for beta chain variable domain of TCR clone 209916 (TRBV7-9, TRBJ2-7)
CASSLEGYEQYS

SEQ ID NO: 419833 - protein, 11 aa, Homo sapiens
  CDR3 for alpha chain variable domain of TCR clone 209917 (TRAV2, TRAJ21)
CAVFNFNKFYF

SEQ ID NO: 419834 - protein, 15 aa, Homo sapiens
  CDR3 for beta chain variable domain of TCR clone 209917 (TRBV7-2, TRBJ1-2)
CASSPRAGWNYGYTF

SEQ ID NO: 419835 - protein, 16 aa, Homo sapiens
  CDR3 for alpha chain variable domain of TCR clone 209918 (TRAV30, TRAJ24)
CGTEIVDADSWGKFQF

SEQ ID NO: 419836 - protein, 18 aa, Homo sapiens
  CDR3 for beta chain variable domain of TCR clone 209918 (TRBV20-1, TRBJ2-6)
CSAETTPTHGSGANVLPF

SEQ ID NO: 419837 - protein, 14 aa, Homo sapiens
  CDR3 for alpha chain variable domain of TCR clone 209919 (TRAV2, TRAJ9)
CAVEDRSGGFKTII

SEQ ID NO: 419838 - protein, 13 aa, Homo sapiens
  CDR3 for beta chain variable domain of TCR clone 209919 (TRBV2, TRBJ1-1)
CASRWTVNTEAFF

SEQ ID NO: 419839 - protein, 13 aa, Homo sapiens
  CDR3 for alpha chain variable domain of TCR clone 209920 (TRAV13-2, TRAJ11)
CAENYSGYSTLTF

SEQ ID NO: 419840 - protein, 15 aa, Homo sapiens
  CDR3 for beta chain variable domain of TCR clone 209920 (TRBV20-1, TRBJ2-7)
CSARDRVSGMDEQYF

SEQ ID NO: 419841 - protein, 13 aa, Homo sapiens
  CDR3 for alpha chain variable domain of TCR clone 209921 (TRAV23/DV6, TRAJ34)
CAASFEGTDKLIF

SEQ ID NO: 419842 - protein, 15 aa, Homo sapiens
  CDR3 for beta chain variable domain of TCR clone 209921 (TRBV20-1, TRBJ2-7)
CSAESGTSGAYEQYF

SEQ ID NO: 419843 - protein, 13 aa, Homo sapiens
  CDR3 for alpha chain variable domain of TCR clone 209922 (TRAV27, TRAJ56)
CAGKPGANSKLTL

SEQ ID NO: 419844 - protein, 14 aa, Homo sapiens
  CDR3 for beta chain variable domain of TCR clone 209922 (TRBV7-2, TRBJ2-7)
CASSPKTSFYEQYF

SEQ ID NO: 419845 - protein, 18 aa, Homo sapiens
  CDR3 for alpha chain variable domain of TCR clone 209923 (TRAV3, TRAJ32)
CAVRDIRGYGGATNKLIF

SEQ ID NO: 419846 - protein, 13 aa, Homo sapiens
  CDR3 for beta chain variable domain of TCR clone 209923 (TRBV7-9, TRBJ1-2)
CASSLKQNYGYTF

SEQ ID NO: 419847 - protein, 14 aa, Homo sapiens
  CDR3 for alpha chain variable domain of TCR clone 209924 (TRAV12-1, TRAJ17)
CVVNYKAAGNKLTF

SEQ ID NO: 419848 - protein, 17 aa, Homo sapiens
  CDR3 for beta chain variable domain of TCR clone 209924 (TRBV20-1, TRBJ2-5)
CSASSSGLVGSYNEQYF

SEQ ID NO: 419849 - protein, 12 aa, Homo sapiens
  CDR3 for alpha chain variable domain of TCR clone 209925 (TRAV12-3, TRAJ17)
CAMTLTGNKLTF

SEQ ID NO: 419850 - protein, 11 aa, Homo sapiens
  CDR3 for beta chain variable domain of TCR clone 209925 (TRBV27, TRBJ2-3)
CASTATDTQYF

SEQ ID NO: 419851 - protein, 18 aa, Homo sapiens
  CDR3 for alpha chain variable domain of TCR clone 209926 (TRAV21, TRAJ52)
CAVRPSPAGGTSYGKLTF

SEQ ID NO: 419852 - protein, 19 aa, Homo sapiens
  CDR3 for beta chain variable domain of TCR clone 209926 (TRBV27, TRBJ2-2)
CTSVPAVTPGRERTGELFF

SEQ ID NO: 419853 - protein, 13 aa, Homo sapiens
  CDR3 for alpha chain variable domain of TCR clone 209927 (TRAV35, TRAJ42)
CAGFPGSQGALIF

SEQ ID NO: 419854 - protein, 14 aa, Homo sapiens
  CDR3 for beta chain variable domain of TCR clone 209927 (TRBV4-1, TRBJ2-2)
CASSQAANTGELFF

SEQ ID NO: 419855 - protein, 12 aa, Homo sapiens
  CDR3 for alpha chain variable domain of TCR clone 209928 (TRAV22, TRAJ22)
CAPGGSARQLTF

SEQ ID NO: 419856 - protein, 16 aa, Homo sapiens
  CDR3 for beta chain variable domain of TCR clone 209928 (TRBV4-1, TRBJ2-7)
CASSQEWTSVPLEQYF

SEQ ID NO: 419857 - protein, 15 aa, Homo sapiens
  CDR3 for alpha chain variable domain of TCR clone 209929 (TRAV21, TRAJ53)
CATLNSGGSNYKLTF

SEQ ID NO: 419858 - protein, 16 aa, Homo sapiens
  CDR3 for beta chain variable domain of TCR clone 209929 (TRBV28, TRBJ2-7)
CASSFPDRRLTYEQYF

SEQ ID NO: 419859 - protein, 11 aa, Homo sapiens
  CDR3 for alpha chain variable domain of TCR clone 209930 (TRAV4, TRAJ28)
CLVGDNRAATL

SEQ ID NO: 419860 - protein, 13 aa, Homo sapiens
  CDR3 for beta chain variable domain of TCR clone 209930 (TRBV20-1, TRBJ2-7)
CSATHTSGYEQYF

SEQ ID NO: 419861 - protein, 12 aa, Homo sapiens
  CDR3 for alpha chain variable domain of TCR clone 209931 (TRAV12-1, TRAJ29)
CVADSGNTPLVF

SEQ ID NO: 419862 - protein, 12 aa, Homo sapiens
  CDR3 for beta chain variable domain of TCR clone 209931 (TRBV2, TRBJ2-7)
SASKKGSYEQYF

SEQ ID NO: 419863 - protein, 15 aa, Homo sapiens
  CDR3 for alpha chain variable domain of TCR clone 209932 (TRAV19, TRAJ9)
CALSLPDTGGFKTIF

SEQ ID NO: 419864 - protein, 11 aa, Homo sapiens
  CDR3 for beta chain variable domain of TCR clone 209932 (TRBV12-4, TRBJ2-3)
CASTATDTQYF

SEQ ID NO: 419865 - protein, 19 aa, Homo sapiens
  CDR3 for alpha chain variable domain of TCR clone 209933 (TRAV2, TRAJ20)
ILQVREADAAVYRDCKLSF

SEQ ID NO: 419866 - protein, 18 aa, Homo sapiens
  CDR3 for beta chain variable domain of TCR clone 209933 (TRBV11-2, TRBJ2-3)
CASRLGGASRGAPNTQYF

SEQ ID NO: 419867 - protein, 14 aa, Homo sapiens
  CDR3 for alpha chain variable domain of TCR clone 209934 (TRAV1-2, TRAJ8)
CAVREDTGFQKLVF

SEQ ID NO: 419868 - protein, 12 aa, Homo sapiens
  CDR3 for beta chain variable domain of TCR clone 209934 (TRBV7-8, TRBJ2-7)
CASSIGDREQYF

SEQ ID NO: 419869 - protein, 15 aa, Homo sapiens
  CDR3 for alpha chain variable domain of TCR clone 209935 (TRAV17, TRAJ45)
CATAELGGGADGLTF

SEQ ID NO: 419870 - protein, 16 aa, Homo sapiens
  CDR3 for beta chain variable domain of TCR clone 209935 (TRBV15, TRBJ1-2)
CATSRGPRTGGGGYTF

SEQ ID NO: 419871 - protein, 17 aa, Homo sapiens
  CDR3 for alpha chain variable domain of TCR clone 209936 (TRAV13-1, TRAJ52)
WAAGRNAGGTSYGKRTF

SEQ ID NO: 419872 - protein, 13 aa, Homo sapiens
  CDR3 for beta chain variable domain of TCR clone 209936 (TRBV7-2, TRBJ1-1)
CASNLKGAKVAFF

SEQ ID NO: 419873 - protein, 15 aa, Homo sapiens
  CDR3 for alpha chain variable domain of TCR clone 209937 (TRAV13-2, TRAJ10)
CAENKIGGGGNKLTF

SEQ ID NO: 419874 - protein, 12 aa, Homo sapiens
  CDR3 for beta chain variable domain of TCR clone 209937 (TRBV11-2, TRBJ2-3)
CASSPPEDTQYF

SEQ ID NO: 419875 - protein, 13 aa, Homo sapiens
  CDR3 for alpha chain variable domain of TCR clone 209938 (TRAV12-1, TRAJ31)
CVVNDNNNARLMV

SEQ ID NO: 419876 - protein, 14 aa, Homo sapiens
  CDR3 for beta chain variable domain of TCR clone 209938 (TRBV7-8, TRBJ2-1)
CASSFGTSYGEQFF

SEQ ID NO: 419877 - protein, 13 aa, Homo sapiens
  CDR3 for alpha chain variable domain of TCR clone 209939 (TRAV21, TRAJ20)
CAVGLRVDYKLSF

SEQ ID NO: 419878 - protein, 14 aa, Homo sapiens
  CDR3 for beta chain variable domain of TCR clone 209939 (TRBV7-9, TRBJ1-6)
CASSVMTDYSPLHF

SEQ ID NO: 419879 - protein, 14 aa, Homo sapiens
  CDR3 for alpha chain variable domain of TCR clone 209940 (TRAV3, TRAJ7)
CAVIEEEREQQTRF

SEQ ID NO: 419880 - protein, 12 aa, Homo sapiens
  CDR3 for beta chain variable domain of TCR clone 209940 (TRBV24-1, TRBJ1-4)
CATSEPNEKLFF

SEQ ID NO: 419881 - protein, 12 aa, Homo sapiens
  CDR3 for alpha chain variable domain of TCR clone 209941 (TRAV23/DV6, TRAJ17)
CARGSCRQQANF

SEQ ID NO: 419882 - protein, 13 aa, Homo sapiens
  CDR3 for beta chain variable domain of TCR clone 209941 (TRBV4-1, TRBJ2-2)
CASSQENTGELFF

SEQ ID NO: 419883 - protein, 12 aa, Homo sapiens
  CDR3 for alpha chain variable domain of TCR clone 209942 (TRAV13-2, TRAJ23)
CAERHRGGRLIF

SEQ ID NO: 419884 - protein, 15 aa, Homo sapiens
  CDR3 for beta chain variable domain of TCR clone 209942 (TRBV7-9, TRBJ1-6)
CASSSPGRGNSLLHF

SEQ ID NO: 419885 - protein, 19 aa, Homo sapiens
  CDR3 for alpha chain variable domain of TCR clone 209943 (TRAV29/DV5, TRAJ49)
CSVLLCSKLTVGTGNQFYF

SEQ ID NO: 419886 - protein, 17 aa, Homo sapiens
  CDR3 for beta chain variable domain of TCR clone 209943 (TRBV13, TRBJ2-3)
CASSLSRVAGGRNTQYF

SEQ ID NO: 419887 - protein, 13 aa, Homo sapiens
  CDR3 for alpha chain variable domain of TCR clone 209944 (TRAV35, TRAJ48)
CAGHEFGNEKLTF

SEQ ID NO: 419888 - protein, 15 aa, Homo sapiens
  CDR3 for beta chain variable domain of TCR clone 209944 (TRBV19, TRBJ2-1)
CASSSPGVPLDEQFF

SEQ ID NO: 419889 - protein, 15 aa, Homo sapiens
  CDR3 for alpha chain variable domain of TCR clone 209945 (TRAV1-2, TRAJ9)
CAVRDDGTGGFRTIF

SEQ ID NO: 419890 - protein, 17 aa, Homo sapiens
  CDR3 for beta chain variable domain of TCR clone 209945 (TRBV20-1, TRBJ2-1)
CSASSSGLAGSYNEQFF

SEQ ID NO: 419891 - protein, 12 aa, Homo sapiens
  CDR3 for alpha chain variable domain of TCR clone 209946 (TRAV2, TRAJ9)
CAVGAGGFKTIF

SEQ ID NO: 419892 - protein, 13 aa, Homo sapiens
  CDR3 for beta chain variable domain of TCR clone 209946 (TRBV7-7, TRBJ2-2)
CASSLTSAGELFF

SEQ ID NO: 419893 - protein, 11 aa, Homo sapiens
  CDR3 for alpha chain variable domain of TCR clone 209947 (TRAV23/DV6, TRAJ58)
CAARLLRGETS

SEQ ID NO: 419894 - protein, 16 aa, Homo sapiens
  CDR3 for beta chain variable domain of TCR clone 209947 (TRBV19, TRBJ2-2)
CASRSPGTGATGELFF

SEQ ID NO: 419895 - protein, 12 aa, Homo sapiens
  CDR3 for alpha chain variable domain of TCR clone 209948 (TRAV21, TRAJ13)
PGPSGGYQKVTF

SEQ ID NO: 419896 - protein, 14 aa, Homo sapiens
  CDR3 for beta chain variable domain of TCR clone 209948 (TRBV4-2, TRBJ2-1)
CASGLDRAYNEQFF

SEQ ID NO: 419897 - protein, 11 aa, Homo sapiens
  CDR3 for alpha chain variable domain of TCR clone 209949 (TRAV12-1, TRAJ43)
CVEYDNNDMRF

SEQ ID NO: 419898 - protein, 16 aa, Homo sapiens
  CDR3 for beta chain variable domain of TCR clone 209949 (TRBV19, TRBJ2-1)
CASSKAGPSSYNEQFF

SEQ ID NO: 419899 - protein, 12 aa, Homo sapiens
  CDR3 for alpha chain variable domain of TCR clone 209950 (TRAV21, TRAJ31)
WAVWGNNARLMF

SEQ ID NO: 419900 - protein, 16 aa, Homo sapiens
  CDR3 for beta chain variable domain of TCR clone 209950 (TRBV27, TRBJ2-5)
CASSSGPGGQKETQYF

SEQ ID NO: 419901 - protein, 13 aa, Homo sapiens
  CDR3 for alpha chain variable domain of TCR clone 209951 (TRAV12-3, TRAJ13)
CAMSSGGSQKVTF

SEQ ID NO: 419902 - protein, 13 aa, Homo sapiens
  CDR3 for beta chain variable domain of TCR clone 209951 (TRBV20-1, TRBJ1-1)
CSAPPGGHTEAFF

SEQ ID NO: 419903 - protein, 15 aa, Homo sapiens
  CDR3 for alpha chain variable domain of TCR clone 209952 (TRAV13-1, TRAJ17)
CAASIESAAGNKLTF

SEQ ID NO: 419904 - protein, 12 aa, Homo sapiens
  CDR3 for beta chain variable domain of TCR clone 209952 (TRBV5-7, TRBJ1-1)
CASSLGRGKAFF

SEQ ID NO: 419905 - protein, 17 aa, Homo sapiens
  CDR3 for alpha chain variable domain of TCR clone 209953 (TRAV35, TRAJ28)
CWAQLPSFWGWSYQLTF

SEQ ID NO: 419906 - protein, 12 aa, Homo sapiens
  CDR3 for beta chain variable domain of TCR clone 209953 (TRBV7-9, TRBJ1-1)
CASSLEGTEAFF

SEQ ID NO: 419907 - protein, 16 aa, Homo sapiens
  CDR3 for alpha chain variable domain of TCR clone 209954 (TRAV30, TRAJ24)
CGTEIVDADSWGKFQL

SEQ ID NO: 419908 - protein, 14 aa, Homo sapiens
  CDR3 for beta chain variable domain of TCR clone 209954 (TRBV12-5, TRBJ2-5)
CASGSLTHQETQYF

SEQ ID NO: 419909 - protein, 15 aa, Homo sapiens
  CDR3 for alpha chain variable domain of TCR clone 209955 (TRAV17, TRAJ13)
CATDAGSGGYQKVTF

SEQ ID NO: 419910 - protein, 18 aa, Homo sapiens
  CDR3 for beta chain variable domain of TCR clone 209955 (TRBV3-1, TRBJ1-2)
CASSQDVIGWNGDYGYTF

SEQ ID NO: 419911 - protein, 14 aa, Homo sapiens
  CDR3 for alpha chain variable domain of TCR clone 209956 (TRAV1-2, TRAJ16)
CSVNRFSDGQKLLF

SEQ ID NO: 419912 - protein, 15 aa, Homo sapiens
  CDR3 for beta chain variable domain of TCR clone 209956 (TRBV2, TRBJ2-1)
CASSEEREGDNEQFF

SEQ ID NO: 419913 - protein, 15 aa, Homo sapiens
  CDR3 for alpha chain variable domain of TCR clone 209957 (TRAV2, TRAJ22)
CAVPSRGGSARQLTF

SEQ ID NO: 419914 - protein, 14 aa, Homo sapiens
  CDR3 for beta chain variable domain of TCR clone 209957 (TRBV7-9, TRBJ2-7)
CASSLGGSSYEQYF

SEQ ID NO: 419915 - protein, 10 aa, Homo sapiens
  CDR3 for alpha chain variable domain of TCR clone 209958 (TRAV38-2/DV8, TRAJ40)
CASGTYKYIF

SEQ ID NO: 419916 - protein, 14 aa, Homo sapiens
  CDR3 for beta chain variable domain of TCR clone 209958 (TRBV7-9, TRBJ2-1)
CASSPRDSLYEQFC

SEQ ID NO: 419917 - protein, 13 aa, Homo sapiens
  CDR3 for alpha chain variable domain of TCR clone 209959 (TRAV12-1, TRAJ16)
CVVNGPDGQKLLF

SEQ ID NO: 419918 - protein, 15 aa, Homo sapiens
  CDR3 for beta chain variable domain of TCR clone 209959 (TRBV11-3, TRBJ2-3)
CASLKDGREGDTQYF

SEQ ID NO: 419919 - protein, 14 aa, Homo sapiens
  CDR3 for alpha chain variable domain of TCR clone 209960 (TRAV21, TRAJ35)
CAVMLIGFGHVLHC

SEQ ID NO: 419920 - protein, 12 aa, Homo sapiens
  CDR3 for beta chain variable domain of TCR clone 209960 (TRBV7-9, TRBJ2-7)
CASSIKREEQYF

SEQ ID NO: 419921 - protein, 15 aa, Homo sapiens
  CDR3 for alpha chain variable domain of TCR clone 209961 (TRAV35, TRAJ53)
CAGLTQAGRNYKLTF

SEQ ID NO: 419922 - protein, 11 aa, Homo sapiens
  CDR3 for beta chain variable domain of TCR clone 209961 (TRBV20-1, TRBJ1-2)
CSIWASYGYTF

SEQ ID NO: 419923 - protein, 11 aa, Homo sapiens
  CDR3 for alpha chain variable domain of TCR clone 209962 (TRAV21, TRAJ48)
SAVDGNEKLTF

SEQ ID NO: 419924 - protein, 16 aa, Homo sapiens
  CDR3 for beta chain variable domain of TCR clone 209962 (TRBV12-4, TRBJ1-5)
CASSSGPRGSSQPQHF

SEQ ID NO: 419925 - protein, 14 aa, Homo sapiens
  CDR3 for alpha chain variable domain of TCR clone 209963 (TRAV2, TRAJ9)
CAVEDRSGGFKTIF

SEQ ID NO: 419926 - protein, 15 aa, Homo sapiens
  CDR3 for beta chain variable domain of TCR clone 209963 (TRBV11-3, TRBJ2-3)
SASSAGTVVTNTQYF

SEQ ID NO: 419927 - protein, 19 aa, Homo sapiens
  CDR3 for alpha chain variable domain of TCR clone 209964 (TRAV1-2, TRAJ26)
CLLPLYCERPDNYGQNFVF

SEQ ID NO: 419928 - protein, 12 aa, Homo sapiens
  CDR3 for beta chain variable domain of TCR clone 209964 (TRBV7-9, TRBJ2-7)
CATRTDAYEQYF

SEQ ID NO: 419929 - protein, 13 aa, Homo sapiens
  CDR3 for alpha chain variable domain of TCR clone 209965 (TRAV27, TRAJ45)
CRSSGGGAAGLIF

SEQ ID NO: 419930 - protein, 17 aa, Homo sapiens
  CDR3 for beta chain variable domain of TCR clone 209965 (TRBV11-2, TRBJ2-1)
CASSLYPPGVEYNEQFF

SEQ ID NO: 419931 - protein, 10 aa, Homo sapiens
  CDR3 for alpha chain variable domain of TCR clone 209966 (TRAV12-3, TRAJ49)
CAMNDDQFYV

SEQ ID NO: 419932 - protein, 15 aa, Homo sapiens
  CDR3 for beta chain variable domain of TCR clone 209966 (TRBV19, TRBJ1-1)
CASSIRRQMNTEAFF

SEQ ID NO: 419933 - protein, 14 aa, Homo sapiens
  CDR3 for alpha chain variable domain of TCR clone 209967 (TRAV12-2, TRAJ13)
CAVKKTGGYQKVTF

SEQ ID NO: 419934 - protein, 15 aa, Homo sapiens
  CDR3 for beta chain variable domain of TCR clone 209967 (TRBV27, TRBJ2-1)
CASSNGGGASNEQFF

SEQ ID NO: 419935 - protein, 12 aa, Homo sapiens
  CDR3 for alpha chain variable domain of TCR clone 209968 (TRAV13-1, TRAJ15)
CAASQAGAALIF

SEQ ID NO: 419936 - protein, 13 aa, Homo sapiens
  CDR3 for beta chain variable domain of TCR clone 209968 (TRBV7-2, TRBJ2-4)
CASSREHANIQYF

SEQ ID NO: 419937 - protein, 13 aa, Homo sapiens
  CDR3 for alpha chain variable domain of TCR clone 209969 (TRAV2, TRAJ40)
CAVVTSGTYKYIF

SEQ ID NO: 419938 - protein, 14 aa, Homo sapiens
  CDR3 for beta chain variable domain of TCR clone 209969 (TRBV7-9, TRBJ2-1)
CASSSMVGLGEQFF

SEQ ID NO: 419939 - protein, 12 aa, Homo sapiens
  CDR3 for alpha chain variable domain of TCR clone 209970 (TRAV21, TRAJ30)
CAALNRNDKIIF

SEQ ID NO: 419940 - protein, 15 aa, Homo sapiens
  CDR3 for beta chain variable domain of TCR clone 209970 (TRBV28, TRBJ2-1)
CASKGGVSSYNEQFF

SEQ ID NO: 419941 - protein, 15 aa, Homo sapiens
  CDR3 for alpha chain variable domain of TCR clone 209971 (TRAV2, TRAJ42)
CAVEGYGGSQGNLIF

SEQ ID NO: 419942 - protein, 15 aa, Homo sapiens
  CDR3 for beta chain variable domain of TCR clone 209971 (TRBV20-1, TRBJ2-7)
CSARDRVSGMDEQYF

SEQ ID NO: 419943 - protein, 15 aa, Homo sapiens
  CDR3 for alpha chain variable domain of TCR clone 209972 (TRAV23/DV6, TRAJ58)
CAARLLRGETSGFRL

SEQ ID NO: 419944 - protein, 14 aa, Homo sapiens
  CDR3 for beta chain variable domain of TCR clone 209972 (TRBV7-3, TRBJ2-1)
CASSLAGGTNEQFF

SEQ ID NO: 419945 - protein, 13 aa, Homo sapiens
  CDR3 for alpha chain variable domain of TCR clone 209973 (TRAV20, TRAJ20)
YAVRWVRDYKLSF

SEQ ID NO: 419946 - protein, 14 aa, Homo sapiens
  CDR3 for beta chain variable domain of TCR clone 209973 (TRBV19, TRBJ2-2)
CASTVTANTGELFF

SEQ ID NO: 419947 - protein, 12 aa, Homo sapiens
  CDR3 for alpha chain variable domain of TCR clone 209974 (TRAV17, TRAJ21)
CALRYNFNKFHF

SEQ ID NO: 419948 - protein, 13 aa, Homo sapiens
  CDR3 for beta chain variable domain of TCR clone 209974 (TRBV24-1, TRBJ2-5)
CATSTGGTETQYF

SEQ ID NO: 419949 - protein, 16 aa, Homo sapiens
  CDR3 for alpha chain variable domain of TCR clone 209975 (TRAV30, TRAJ24)
CGTEGVDADSWGKFQF

SEQ ID NO: 419950 - protein, 14 aa, Homo sapiens
  CDR3 for beta chain variable domain of TCR clone 209975 (TRBV12-5, TRBJ2-5)
CASGSRTHQETQYF

SEQ ID NO: 419951 - protein, 12 aa, Homo sapiens
  CDR3 for alpha chain variable domain of TCR clone 209976 (TRAV2, TRAJ9)
CAVGAGGFKTSF

SEQ ID NO: 419952 - protein, 16 aa, Homo sapiens
  CDR3 for beta chain variable domain of TCR clone 209976 (TRBV13, TRBJ2-2)
CASSPRTGEHTRELFF

SEQ ID NO: 419953 - protein, 11 aa, Homo sapiens
  CDR3 for alpha chain variable domain of TCR clone 209977 (TRAV1-1, TRAJ23)
CAVGQGGKLIF

SEQ ID NO: 419954 - protein, 13 aa, Homo sapiens
  CDR3 for beta chain variable domain of TCR clone 209977 (TRBV11-2, TRBJ2-5)
CASSRGPSETQYF

SEQ ID NO: 419955 - protein, 18 aa, Homo sapiens
  CDR3 for alpha chain variable domain of TCR clone 209978 (TRAV26-1, TRAJ52)
CIVRVEGAGGTSYGKLTF

SEQ ID NO: 419956 - protein, 13 aa, Homo sapiens
  CDR3 for beta chain variable domain of TCR clone 209978 (TRBV7-8, TRBJ1-2)
CASSAQSYYGYTF

SEQ ID NO: 419957 - protein, 15 aa, Homo sapiens
  CDR3 for alpha chain variable domain of TCR clone 209979 (TRAV13-1, TRAJ6)
CAAIHPSGGSYIHTF

SEQ ID NO: 419958 - protein, 14 aa, Homo sapiens
  CDR3 for beta chain variable domain of TCR clone 209979 (TRBV7-9, TRBJ2-2)
CASGLAINTGELFF

SEQ ID NO: 419959 - protein, 15 aa, Homo sapiens
  CDR3 for alpha chain variable domain of TCR clone 209980 (TRAV3, TRAJ22)
CAVRDRGGSARQLTF

SEQ ID NO: 419960 - protein, 16 aa, Homo sapiens
  CDR3 for beta chain variable domain of TCR clone 209980 (TRBV5-4, TRBJ2-3)
CASQQPGAGVADTQYF

SEQ ID NO: 419961 - protein, 16 aa, Homo sapiens
  CDR3 for alpha chain variable domain of TCR clone 209981 (TRAV12-2, TRAJ52)
CAVNNRGGTSYGKLTF

SEQ ID NO: 419962 - protein, 14 aa, Homo sapiens
  CDR3 for beta chain variable domain of TCR clone 209981 (TRBV19, TRBJ2-5)
CASSMTGQQETQYF

SEQ ID NO: 419963 - protein, 17 aa, Homo sapiens
  CDR3 for alpha chain variable domain of TCR clone 209982 (TRAV13-1, TRAJ28)
CAASPPYSGAGSYQLTF

SEQ ID NO: 419964 - protein, 15 aa, Homo sapiens
  CDR3 for beta chain variable domain of TCR clone 209982 (TRBV7-6, TRBJ1-5)
CASSQSSGINQPQHF

SEQ ID NO: 419965 - protein, 16 aa, Homo sapiens
  CDR3 for alpha chain variable domain of TCR clone 209983 (TRAV30, TRAJ24)
CGTEIVDADSWGKFQF

SEQ ID NO: 419966 - protein, 15 aa, Homo sapiens
  CDR3 for beta chain variable domain of TCR clone 209983 (TRBV27, TRBJ2-1)
CASSNGEGSSNEQFF

SEQ ID NO: 419967 - protein, 13 aa, Homo sapiens
  CDR3 for alpha chain variable domain of TCR clone 209984 (TRAV12-2, TRAJ47)
CAVFMEYGNKLVF

SEQ ID NO: 419968 - protein, 14 aa, Homo sapiens
  CDR3 for beta chain variable domain of TCR clone 209984 (TRBV4-1, TRBJ1-5)
CASSQGPTNRPQHF

SEQ ID NO: 419969 - protein, 18 aa, Homo sapiens
  CDR3 for alpha chain variable domain of TCR clone 209985 (TRAV9-2, TRAJ52)
CALGRHNAGGTSYGKLTF

SEQ ID NO: 419970 - protein, 16 aa, Homo sapiens
  CDR3 for beta chain variable domain of TCR clone 209985 (TRBV19, TRBJ2-1)
CASSKAGPSSYNEQFF

SEQ ID NO: 419971 - protein, 16 aa, Homo sapiens
  CDR3 for alpha chain variable domain of TCR clone 209986 (TRAV17, TRAJ36)
CATVSLNWGKQPLLWD

SEQ ID NO: 419972 - protein, 14 aa, Homo sapiens
  CDR3 for beta chain variable domain of TCR clone 209986 (TRBV19, TRBJ2-1)
CASSRLASINEQFF

SEQ ID NO: 419973 - protein, 12 aa, Homo sapiens
  CDR3 for alpha chain variable domain of TCR clone 209987 (TRAV13-1, TRAJ42)
SVLRGSQGNLIF

SEQ ID NO: 419974 - protein, 13 aa, Homo sapiens
  CDR3 for beta chain variable domain of TCR clone 209987 (TRBV2, TRBJ1-4)
CASSELGLEKLFF

SEQ ID NO: 419975 - protein, 16 aa, Homo sapiens
  CDR3 for alpha chain variable domain of TCR clone 209988 (TRAV3, TRAJ37)
CAVRGKGSGNTGKLIF

SEQ ID NO: 419976 - protein, 16 aa, Homo sapiens
  CDR3 for beta chain variable domain of TCR clone 209988 (TRBV29-1, TRBJ1-2)
CSVEANRDIANYGYTF

SEQ ID NO: 419977 - protein, 12 aa, Homo sapiens
  CDR3 for alpha chain variable domain of TCR clone 209989 (TRAV29/DV5, TRAJ34)
CAASGNTDKLIF

SEQ ID NO: 419978 - protein, 17 aa, Homo sapiens
  CDR3 for beta chain variable domain of TCR clone 209989 (TRBV20-1, TRBJ2-1)
CSAPPRPAGTRYNEQFF

SEQ ID NO: 419979 - protein, 14 aa, Homo sapiens
  CDR3 for alpha chain variable domain of TCR clone 209990 (TRAV9-2, TRAJ39)
CALYIYNAGNMLTF

SEQ ID NO: 419980 - protein, 14 aa, Homo sapiens
  CDR3 for beta chain variable domain of TCR clone 209990 (TRBV12-4, TRBJ2-2)
CASSSGGNTGELFF

SEQ ID NO: 419981 - protein, 14 aa, Homo sapiens
  CDR3 for alpha chain variable domain of TCR clone 209991 (TRAV12-2, TRAJ13)
CAVKKTGGYQKVTF

SEQ ID NO: 419982 - protein, 16 aa, Homo sapiens
  CDR3 for beta chain variable domain of TCR clone 209991 (TRBV6-4, TRBJ1-2)
CASSEAVGDPNYGYTF

SEQ ID NO: 419983 - protein, 12 aa, Homo sapiens
  CDR3 for alpha chain variable domain of TCR clone 209992 (TRAV13-1, TRAJ15)
CAANQAGTALIF

SEQ ID NO: 419984 - protein, 13 aa, Homo sapiens
  CDR3 for beta chain variable domain of TCR clone 209992 (TRBV27, TRBJ2-1)
CASRTLGVGEQFF

SEQ ID NO: 419985 - protein, 12 aa, Homo sapiens
  CDR3 for alpha chain variable domain of TCR clone 209993 (TRAV12-2, TRAJ9)
CAVYNGGFKTIF

SEQ ID NO: 419986 - protein, 14 aa, Homo sapiens
  CDR3 for beta chain variable domain of TCR clone 209993 (TRBV11-2, TRBJ2-2)
CASSFTPGDGELFS

SEQ ID NO: 419987 - protein, 10 aa, Homo sapiens
  CDR3 for alpha chain variable domain of TCR clone 209994 (TRAV1-2, TRAJ31)
CAFFRCQTHV

SEQ ID NO: 419988 - protein, 16 aa, Homo sapiens
  CDR3 for beta chain variable domain of TCR clone 209994 (TRBV27, TRBJ2-5)
CASSYGPGGQKETQYF

SEQ ID NO: 419989 - protein, 16 aa, Homo sapiens
  CDR3 for alpha chain variable domain of TCR clone 209995 (TRAV3, TRAJ10)
CAVRDMRAGGGNKLTF

SEQ ID NO: 419990 - protein, 16 aa, Homo sapiens
  CDR3 for beta chain variable domain of TCR clone 209995 (TRBV19, TRBJ2-2)
CARSFPGQGLAGELFF

SEQ ID NO: 419991 - protein, 10 aa, Homo sapiens
  CDR3 for alpha chain variable domain of TCR clone 209996 (TRAV1-2, TRAJ20)
CALNDYKLSF

SEQ ID NO: 419992 - protein, 15 aa, Homo sapiens
  CDR3 for beta chain variable domain of TCR clone 209996 (TRBV9, TRBJ1-2)
CASSVTGQRNYGYTF

SEQ ID NO: 419993 - protein, 12 aa, Homo sapiens
  CDR3 for alpha chain variable domain of TCR clone 209997 (TRAV12-3, TRAJ17)
CAMTLTGSKLTF

SEQ ID NO: 419994 - protein, 12 aa, Homo sapiens
  CDR3 for beta chain variable domain of TCR clone 209997 (TRBV11-2, TRBJ2-7)
CASSLPTYEQYF

SEQ ID NO: 419995 - protein, 17 aa, Homo sapiens
  CDR3 for alpha chain variable domain of TCR clone 209998 (TRAV13-1, TRAJ31)
CAPRDRLMFGDGTQLVV

SEQ ID NO: 419996 - protein, 12 aa, Homo sapiens
  CDR3 for beta chain variable domain of TCR clone 209998 (TRBV7-9, TRBJ2-7)
CASSLEGDEQYF

SEQ ID NO: 419997 - protein, 16 aa, Homo sapiens
  CDR3 for alpha chain variable domain of TCR clone 209999 (TRAV17, TRAJ35)
CATAEGGIGFGNVLHC

SEQ ID NO: 419998 - protein, 17 aa, Homo sapiens
  CDR3 for beta chain variable domain of TCR clone 209999 (TRBV20-1, TRBJ2-2)
CSASGSGQGGLTGELFF

SEQ ID NO: 419999 - protein, 16 aa, Homo sapiens
  CDR3 for alpha chain variable domain of TCR clone 210000 (TRAV12-2, TRAJ32)
CAANMNYGGATNKLIF

SEQ ID NO: 420000 - protein, 16 aa, Homo sapiens
  CDR3 for beta chain variable domain of TCR clone 210000 (TRBV7-8, TRBJ2-3)
CASSTEGQRETDTQYF

SEQ ID NO: 420001 - protein, 16 aa, Homo sapiens
  CDR3 for alpha chain variable domain of TCR clone 210001 (TRAV1-1, TRAJ28)
CAVRDDSGAGSYQLTF

SEQ ID NO: 420002 - protein, 14 aa, Homo sapiens
  CDR3 for beta chain variable domain of TCR clone 210001 (TRBV7-2, TRBJ2-7)
CASRSQGAAYEQYF

SEQ ID NO: 420003 - protein, 11 aa, Homo sapiens
  CDR3 for alpha chain variable domain of TCR clone 210002 (TRAV12-2, TRAJ43)
CASPIGNDMRF

SEQ ID NO: 420004 - protein, 12 aa, Homo sapiens
  CDR3 for beta chain variable domain of TCR clone 210002 (TRBV20-1, TRBJ2-7)
CSAGLKTGEQYF

SEQ ID NO: 420005 - protein, 13 aa, Homo sapiens
  CDR3 for alpha chain variable domain of TCR clone 210003 (TRAV12-1, TRAJ7)
CVVNMRGNNRLAF

SEQ ID NO: 420006 - protein, 12 aa, Homo sapiens
  CDR3 for beta chain variable domain of TCR clone 210003 (TRBV11-2, TRBJ2-1)
CASSPGNNEQFF

SEQ ID NO: 420007 - protein, 12 aa, Homo sapiens
  CDR3 for alpha chain variable domain of TCR clone 210004 (TRAV12-1, TRAJ40)
CVVYSGTYKYIF

SEQ ID NO: 420008 - protein, 16 aa, Homo sapiens
  CDR3 for beta chain variable domain of TCR clone 210004 (TRBV5-1, TRBJ2-2)
CASSLWDTTNTGELFF

SEQ ID NO: 420009 - protein, 15 aa, Homo sapiens
  CDR3 for alpha chain variable domain of TCR clone 210005 (TRAV8-3, TRAJ27)
CSVGPSKTNAGKSTF

SEQ ID NO: 420010 - protein, 14 aa, Homo sapiens
  CDR3 for beta chain variable domain of TCR clone 210005 (TRBV11-2, TRBJ2-3)
CASSRLARTDTQYF

SEQ ID NO: 420011 - protein, 14 aa, Homo sapiens
  CDR3 for alpha chain variable domain of TCR clone 210006 (TRAV12-2, TRAJ17)
CAVLFKAAGNKPTF

SEQ ID NO: 420012 - protein, 14 aa, Homo sapiens
  CDR3 for beta chain variable domain of TCR clone 210006 (TRBV4-1, TRBJ2-2)
CASSQAVNTGELFF

SEQ ID NO: 420013 - protein, 14 aa, Homo sapiens
  CDR3 for alpha chain variable domain of TCR clone 210007 (TRAV26-2, TRAJ54)
CILSRIQGAQTLVF

SEQ ID NO: 420014 - protein, 15 aa, Homo sapiens
  CDR3 for beta chain variable domain of TCR clone 210007 (TRBV7-9, TRBJ1-1)
CASSLLEQGGTEAFF

SEQ ID NO: 420015 - protein, 14 aa, Homo sapiens
  CDR3 for alpha chain variable domain of TCR clone 210008 (TRAV12-2, TRAJ17)
CAVLFKAAGNKLNF

SEQ ID NO: 420016 - protein, 14 aa, Homo sapiens
  CDR3 for beta chain variable domain of TCR clone 210008 (TRBV4-2, TRBJ2-1)
CASGLDRAYNEQFF

SEQ ID NO: 420017 - protein, 13 aa, Homo sapiens
  CDR3 for alpha chain variable domain of TCR clone 210009 (TRAV35, TRAJ42)
CAGFPGSQGNLIF

SEQ ID NO: 420018 - protein, 13 aa, Homo sapiens
  CDR3 for beta chain variable domain of TCR clone 210009 (TRBV3-1, TRBJ1-1)
CASSPGVITEAFF

SEQ ID NO: 420019 - protein, 14 aa, Homo sapiens
  CDR3 for alpha chain variable domain of TCR clone 210010 (TRAV12-2, TRAJ13)
CAVQKTGGYQKVTF

SEQ ID NO: 420020 - protein, 14 aa, Homo sapiens
  CDR3 for beta chain variable domain of TCR clone 210010 (TRBV5-5, TRBJ2-7)
CASSLGQGTYEQYF

SEQ ID NO: 420021 - protein, 13 aa, Homo sapiens
  CDR3 for alpha chain variable domain of TCR clone 210011 (TRAV8-6, TRAJ49)
CAVITNTGNQFYF

SEQ ID NO: 420022 - protein, 16 aa, Homo sapiens
  CDR3 for beta chain variable domain of TCR clone 210011 (TRBV10-3, TRBJ2-6)
CAISTSGDLGANVLTF

SEQ ID NO: 420023 - protein, 14 aa, Homo sapiens
  CDR3 for alpha chain variable domain of TCR clone 210012 (TRAV8-4, TRAJ15)
CAVTIRDAGTALIF

SEQ ID NO: 420024 - protein, 16 aa, Homo sapiens
  CDR3 for beta chain variable domain of TCR clone 210012 (TRBV29-1, TRBJ2-6)
CSVEDITYSGANVLTF

SEQ ID NO: 420025 - protein, 11 aa, Homo sapiens
  CDR3 for alpha chain variable domain of TCR clone 210013 (TRAV27, TRAJ45)
CAGAQAEVLTD

SEQ ID NO: 420026 - protein, 14 aa, Homo sapiens
  CDR3 for beta chain variable domain of TCR clone 210013 (TRBV7-9, TRBJ2-1)
CASSSMVGFGEQFF

SEQ ID NO: 420027 - protein, 14 aa, Homo sapiens
  CDR3 for alpha chain variable domain of TCR clone 210014 (TRAV1-2, TRAJ8)
CAVRADTGFQKLVF

SEQ ID NO: 420028 - protein, 16 aa, Homo sapiens
  CDR3 for beta chain variable domain of TCR clone 210014 (TRBV19, TRBJ2-1)
CASSKAGPSSYNEQFF

SEQ ID NO: 420029 - protein, 10 aa, Homo sapiens
  CDR3 for alpha chain variable domain of TCR clone 210015 (TRAV12-1, TRAJ33)
CVASNYPLIW

SEQ ID NO: 420030 - protein, 15 aa, Homo sapiens
  CDR3 for beta chain variable domain of TCR clone 210015 (TRBV5-4, TRBJ1-4)
CASSHGDGENEKLFF

SEQ ID NO: 420031 - protein, 12 aa, Homo sapiens
  CDR3 for alpha chain variable domain of TCR clone 210016 (TRAV12-1, TRAJ23)
CVVRNQGGKLIF

SEQ ID NO: 420032 - protein, 18 aa, Homo sapiens
  CDR3 for beta chain variable domain of TCR clone 210016 (TRBV20-1, TRBJ2-1)
CSASVAGGRQGAYNEQFF

SEQ ID NO: 420033 - protein, 14 aa, Homo sapiens
  CDR3 for alpha chain variable domain of TCR clone 210017 (TRAV2, TRAJ9)
CAVEDRSGGFKTIF

SEQ ID NO: 420034 - protein, 15 aa, Homo sapiens
  CDR3 for beta chain variable domain of TCR clone 210017 (TRBV2, TRBJ1-6)
CASSERQLYNSPLHF

SEQ ID NO: 420035 - protein, 14 aa, Homo sapiens
  CDR3 for alpha chain variable domain of TCR clone 210018 (TRAV12-3, TRAJ10)
SHLPLTGGGNKLTF

SEQ ID NO: 420036 - protein, 12 aa, Homo sapiens
  CDR3 for beta chain variable domain of TCR clone 210018 (TRBV7-9, TRBJ2-7)
CASSITREEQYF

SEQ ID NO: 420037 - protein, 13 aa, Homo sapiens
  CDR3 for alpha chain variable domain of TCR clone 210019 (TRAV17, TRAJ40)
CAGALGGTYKSIF

SEQ ID NO: 420038 - protein, 16 aa, Homo sapiens
  CDR3 for beta chain variable domain of TCR clone 210019 (TRBV7-2, TRBJ1-4)
CASSLAPGRRDEKLFF

SEQ ID NO: 420039 - protein, 17 aa, Homo sapiens
  CDR3 for alpha chain variable domain of TCR clone 210020 (TRAV12-1, TRAJ42)
CVVMRMHYGGSQGNLIL

SEQ ID NO: 420040 - protein, 13 aa, Homo sapiens
  CDR3 for beta chain variable domain of TCR clone 210020 (TRBV7-2, TRBJ1-1)
CASSLARPAEAFF

SEQ ID NO: 420041 - protein, 16 aa, Homo sapiens
  CDR3 for alpha chain variable domain of TCR clone 210021 (TRAV21, TRAJ52)
CAVSNAGGTSYGKLTF

SEQ ID NO: 420042 - protein, 13 aa, Homo sapiens
  CDR3 for beta chain variable domain of TCR clone 210021 (TRBV20-1, TRBJ2-3)
CSARLAGTDTQYF

SEQ ID NO: 420043 - protein, 15 aa, Homo sapiens
  CDR3 for alpha chain variable domain of TCR clone 210022 (TRAV8-3, TRAJ11)
SAVGLFNSGYSTLTF

SEQ ID NO: 420044 - protein, 16 aa, Homo sapiens
  CDR3 for beta chain variable domain of TCR clone 210022 (TRBV7-9, TRBJ1-2)
CASSLGFSSGEDGYTF

SEQ ID NO: 420045 - protein, 14 aa, Homo sapiens
  CDR3 for alpha chain variable domain of TCR clone 210023 (TRAV1-2, TRAJ16)
CAVNRFSDGPKLLF

SEQ ID NO: 420046 - protein, 14 aa, Homo sapiens
  CDR3 for beta chain variable domain of TCR clone 210023 (TRBV18, TRBJ2-7)
CASSPRGGAYEQYF

SEQ ID NO: 420047 - protein, 17 aa, Homo sapiens
  CDR3 for alpha chain variable domain of TCR clone 210024 (TRAV36/DV7, TRAJ52)
CAVAQRAGGTSYGKLTF

SEQ ID NO: 420048 - protein, 16 aa, Homo sapiens
  CDR3 for beta chain variable domain of TCR clone 210024 (TRBV27, TRBJ2-2)
CASSLRPGGAPGELFF

SEQ ID NO: 420049 - protein, 14 aa, Homo sapiens
  CDR3 for alpha chain variable domain of TCR clone 210025 (TRAV13-2, TRAJ58)
CAERWLTSGSRLTL

SEQ ID NO: 420050 - protein, 16 aa, Homo sapiens
  CDR3 for beta chain variable domain of TCR clone 210025 (TRBV18, TRBJ1-4)
CASSLQTVATNEKLFF

SEQ ID NO: 420051 - protein, 14 aa, Homo sapiens
  CDR3 for alpha chain variable domain of TCR clone 210026 (TRAV38-1, TRAJ29)
CAFITPSGNTPLVF

SEQ ID NO: 420052 - protein, 11 aa, Homo sapiens
  CDR3 for beta chain variable domain of TCR clone 210026 (TRBV29-1, TRBJ2-5)
CSEDRTGTQYF

SEQ ID NO: 420053 - protein, 14 aa, Homo sapiens
  CDR3 for alpha chain variable domain of TCR clone 210027 (TRAV14/DV4, TRAJ34)
CAMREGRPHRQAHL

SEQ ID NO: 420054 - protein, 11 aa, Homo sapiens
  CDR3 for beta chain variable domain of TCR clone 210027 (TRBV7-8, TRBJ2-7)
CASSLSLEQYF

SEQ ID NO: 420055 - protein, 13 aa, Homo sapiens
  CDR3 for alpha chain variable domain of TCR clone 210028 (TRAV30, TRAJ49)
CGTEPKTGNQFYF

SEQ ID NO: 420056 - protein, 14 aa, Homo sapiens
  CDR3 for beta chain variable domain of TCR clone 210028 (TRBV29-1, TRBJ2-1)
CSVEFRGIPFEQFF

SEQ ID NO: 420057 - protein, 12 aa, Homo sapiens
  CDR3 for alpha chain variable domain of TCR clone 210029 (TRAV12-3, TRAJ17)
CAMTLTGNKLTF

SEQ ID NO: 420058 - protein, 14 aa, Homo sapiens
  CDR3 for beta chain variable domain of TCR clone 210029 (TRBV19, TRBJ1-2)
CASSTGNLPYGYTF

SEQ ID NO: 420059 - protein, 18 aa, Homo sapiens
  CDR3 for alpha chain variable domain of TCR clone 210030 (TRAV26-2, TRAJ45)
CILRVDKYSGGGADGLTF

SEQ ID NO: 420060 - protein, 16 aa, Homo sapiens
  CDR3 for beta chain variable domain of TCR clone 210030 (TRBV6-1, TRBJ2-1)
CASILRQGSSYNEQFF

SEQ ID NO: 420061 - protein, 13 aa, Homo sapiens
  CDR3 for alpha chain variable domain of TCR clone 210031 (TRAV13-1, TRAJ12)
CAASPDSSYKLIF

SEQ ID NO: 420062 - protein, 17 aa, Homo sapiens
  CDR3 for beta chain variable domain of TCR clone 210031 (TRBV13, TRBJ2-3)
CASSLSRVAGGRNTQYF

SEQ ID NO: 420063 - protein, 15 aa, Homo sapiens
  CDR3 for alpha chain variable domain of TCR clone 210032 (TRAV34, TRAJ38)
RGADFTPGNNRKLIW

SEQ ID NO: 420064 - protein, 16 aa, Homo sapiens
  CDR3 for beta chain variable domain of TCR clone 210032 (TRBV12-5, TRBJ2-5)
CASGPRTSGNQETQYF

SEQ ID NO: 420065 - protein, 14 aa, Homo sapiens
  CDR3 for alpha chain variable domain of TCR clone 210033 (TRAV1-2, TRAJ16)
CAVNWFSDGQKLLF

SEQ ID NO: 420066 - protein, 16 aa, Homo sapiens
  CDR3 for beta chain variable domain of TCR clone 210033 (TRBV20-1, TRBJ1-4)
CSAPGQGLLTNEKLFF

SEQ ID NO: 420067 - protein, 14 aa, Homo sapiens
  CDR3 for alpha chain variable domain of TCR clone 210034 (TRAV16, TRAJ42)
CALLAGGSQGNLIF

SEQ ID NO: 420068 - protein, 19 aa, Homo sapiens
  CDR3 for beta chain variable domain of TCR clone 210034 (TRBV25-1, TRBJ2-2)
CAILVYRVDRGRKTGELFF

SEQ ID NO: 420069 - protein, 15 aa, Homo sapiens
  CDR3 for alpha chain variable domain of TCR clone 210035 (TRAV17, TRAJ13)
CATDAGSGGYKNVTF

SEQ ID NO: 420070 - protein, 17 aa, Homo sapiens
  CDR3 for beta chain variable domain of TCR clone 210035 (TRBV11-2, TRBJ2-1)
CASSLYPPGVEYNEQFF

SEQ ID NO: 420071 - protein, 17 aa, Homo sapiens
  CDR3 for alpha chain variable domain of TCR clone 210036 (TRAV23/DV6, TRAJ3)
CSNHFCFGWRSASKIIF

SEQ ID NO: 420072 - protein, 15 aa, Homo sapiens
  CDR3 for beta chain variable domain of TCR clone 210036 (TRBV19, TRBJ1-6)
CASSTQGAVGSPLHF

SEQ ID NO: 420073 - protein, 16 aa, Homo sapiens
  CDR3 for alpha chain variable domain of TCR clone 210037 (TRAV35, TRAJ28)
CAGQRYSGAGGYQLTF

SEQ ID NO: 420074 - protein, 15 aa, Homo sapiens
  CDR3 for beta chain variable domain of TCR clone 210037 (TRBV20-1, TRBJ2-7)
CSARDRVSGMDEQYF

SEQ ID NO: 420075 - protein, 12 aa, Homo sapiens
  CDR3 for alpha chain variable domain of TCR clone 210038 (TRAV12-1, TRAJ40)
CVVYSGTYKYIF

SEQ ID NO: 420076 - protein, 13 aa, Homo sapiens
  CDR3 for beta chain variable domain of TCR clone 210038 (TRBV6-1, TRBJ1-1)
CASSRQGNTEAFF

SEQ ID NO: 420077 - protein, 14 aa, Homo sapiens
  CDR3 for alpha chain variable domain of TCR clone 210039 (TRAV12-1, TRAJ39)
CVVNFNNAGNMRTF

SEQ ID NO: 420078 - protein, 14 aa, Homo sapiens
  CDR3 for beta chain variable domain of TCR clone 210039 (TRBV12-4, TRBJ1-1)
CASSLGTGGTEAFF

SEQ ID NO: 420079 - protein, 13 aa, Homo sapiens
  CDR3 for alpha chain variable domain of TCR clone 210040 (TRAV27, TRAJ40)
CAGPPSGTYKYIF

SEQ ID NO: 420080 - protein, 16 aa, Homo sapiens
  CDR3 for beta chain variable domain of TCR clone 210040 (TRBV20-1, TRBJ1-4)
CSAPGQGLLTNEKLFF

SEQ ID NO: 420081 - protein, 16 aa, Homo sapiens
  CDR3 for alpha chain variable domain of TCR clone 210041 (TRAV12-3, TRAJ53)
CAMSPGSGGSNYKLTF

SEQ ID NO: 420082 - protein, 14 aa, Homo sapiens
  CDR3 for beta chain variable domain of TCR clone 210041 (TRBV4-3, TRBJ2-1)
CASGLDRAYNEQFF

SEQ ID NO: 420083 - protein, 12 aa, Homo sapiens
  CDR3 for alpha chain variable domain of TCR clone 210042 (TRAV2, TRAJ10)
CASTGGGNKLTF

SEQ ID NO: 420084 - protein, 12 aa, Homo sapiens
  CDR3 for beta chain variable domain of TCR clone 210042 (TRBV11-2, TRBJ2-2)
CASSLGGGELFF

SEQ ID NO: 420085 - protein, 12 aa, Homo sapiens
  CDR3 for alpha chain variable domain of TCR clone 210043 (TRAV2, TRAJ31)
RAVEDNNARLMF

SEQ ID NO: 420086 - protein, 12 aa, Homo sapiens
  CDR3 for beta chain variable domain of TCR clone 210043 (TRBV5-5, TRBJ2-5)
CASSYFGETQYF

SEQ ID NO: 420087 - protein, 15 aa, Homo sapiens
  CDR3 for alpha chain variable domain of TCR clone 210044 (TRAV12-3, TRAJ18)
CAMSAEAQPWGGYTL

SEQ ID NO: 420088 - protein, 14 aa, Homo sapiens
  CDR3 for beta chain variable domain of TCR clone 210044 (TRBV19, TRBJ2-1)
CASPTFVLSGEQFF

SEQ ID NO: 420089 - protein, 17 aa, Homo sapiens
  CDR3 for alpha chain variable domain of TCR clone 210045 (TRAV3, TRAJ42)
CAVRDRDYGGSQGNPIF

SEQ ID NO: 420090 - protein, 15 aa, Homo sapiens
  CDR3 for beta chain variable domain of TCR clone 210045 (TRBV6-1, TRBJ2-3)
CASSERGGITDTQYF

SEQ ID NO: 420091 - protein, 14 aa, Homo sapiens
  CDR3 for alpha chain variable domain of TCR clone 210046 (TRAV13-1, TRAJ3)
CAAEGYSSASKIIF

SEQ ID NO: 420092 - protein, 18 aa, Homo sapiens
  CDR3 for beta chain variable domain of TCR clone 210046 (TRBV7-9, TRBJ2-7)
CASSLTTSGSRTWYEQYF

SEQ ID NO: 420093 - protein, 17 aa, Homo sapiens
  CDR3 for alpha chain variable domain of TCR clone 210047 (TRAV26-1, TRAJ22)
CIVRVPSHSGSARQLTF

SEQ ID NO: 420094 - protein, 16 aa, Homo sapiens
  CDR3 for beta chain variable domain of TCR clone 210047 (TRBV28, TRBJ2-1)
FASRRSGRVVGNEQFF

SEQ ID NO: 420095 - protein, 16 aa, Homo sapiens
  CDR3 for alpha chain variable domain of TCR clone 210048 (TRAV30, TRAJ24)
FFTEIVDAYNWGKFQF

SEQ ID NO: 420096 - protein, 14 aa, Homo sapiens
  CDR3 for beta chain variable domain of TCR clone 210048 (TRBV12-5, TRBJ2-5)
CASGSRTHQETQYF

SEQ ID NO: 420097 - protein, 12 aa, Homo sapiens
  CDR3 for alpha chain variable domain of TCR clone 210049 (TRAV2, TRAJ34)
CAVERNTDKLIF

SEQ ID NO: 420098 - protein, 23 aa, Homo sapiens
  CDR3 for beta chain variable domain of TCR clone 210049 (TRBV7-2, TRBJ2-5)
RRTRPCISVPGASLGGGEETQYF

SEQ ID NO: 420099 - protein, 17 aa, Homo sapiens
  CDR3 for alpha chain variable domain of TCR clone 210050 (TRAV8-2, )
CVVNIQNPDPAVYQLSD

SEQ ID NO: 420100 - protein, 15 aa, Homo sapiens
  CDR3 for beta chain variable domain of TCR clone 210050 (TRBV7-8, TRBJ2-1)
CASNLAGGLYNEQFF

SEQ ID NO: 420101 - protein, 13 aa, Homo sapiens
  CDR3 for alpha chain variable domain of TCR clone 210051 (TRAV21, TRAJ27)
CAALTPMQATQPL

SEQ ID NO: 420102 - protein, 14 aa, Homo sapiens
  CDR3 for beta chain variable domain of TCR clone 210051 (TRBV27, TRBJ1-1)
CASSLLSGLSEAFF

SEQ ID NO: 420103 - protein, 13 aa, Homo sapiens
  CDR3 for alpha chain variable domain of TCR clone 210052 (TRAV12-1, TRAJ8)
CVGMGPGFQKLVF

SEQ ID NO: 420104 - protein, 13 aa, Homo sapiens
  CDR3 for beta chain variable domain of TCR clone 210052 (TRBV7-3, TRBJ2-1)
CASSPVAYNEQFF

SEQ ID NO: 420105 - protein, 13 aa, Homo sapiens
  CDR3 for alpha chain variable domain of TCR clone 210053 (TRAV1-2, TRAJ11)
CAVRREGYSTLTF

SEQ ID NO: 420106 - protein, 14 aa, Homo sapiens
  CDR3 for beta chain variable domain of TCR clone 210053 (TRBV25-1, TRBJ1-1)
CASTHLWGNTESFF

SEQ ID NO: 420107 - protein, 12 aa, Homo sapiens
  CDR3 for alpha chain variable domain of TCR clone 210054 (TRAV12-1, TRAJ40)
CVFYSGTYKYIF

SEQ ID NO: 420108 - protein, 15 aa, Homo sapiens
  CDR3 for beta chain variable domain of TCR clone 210054 (TRBV7-2, TRBJ2-7)
CASSFTGQGAQEQYF

SEQ ID NO: 420109 - protein, 14 aa, Homo sapiens
  CDR3 for alpha chain variable domain of TCR clone 210055 (TRAV12-2, TRAJ40)
CAVKIPSGTYQYIF

SEQ ID NO: 420110 - protein, 14 aa, Homo sapiens
  CDR3 for beta chain variable domain of TCR clone 210055 (TRBV20-1, TRBJ1-1)
CSSQTRIGGTEAFF

SEQ ID NO: 420111 - protein, 13 aa, Homo sapiens
  CDR3 for alpha chain variable domain of TCR clone 210056 (TRAV24, TRAJ37)
CAFSPGKTGKLIF

SEQ ID NO: 420112 - protein, 15 aa, Homo sapiens
  CDR3 for beta chain variable domain of TCR clone 210056 (TRBV7-6, TRBJ2-5)
CASSKPTGPQETQYF

SEQ ID NO: 420113 - protein, 17 aa, Homo sapiens
  CDR3 for alpha chain variable domain of TCR clone 210057 (TRAV24, TRAJ42)
CAFRVKNYGGSQGNRIF

SEQ ID NO: 420114 - protein, 15 aa, Homo sapiens
  CDR3 for beta chain variable domain of TCR clone 210057 (TRBV4-3, TRBJ2-7)
CASSQGDWGDYEQYF

SEQ ID NO: 420115 - protein, 13 aa, Homo sapiens
  CDR3 for alpha chain variable domain of TCR clone 210058 (TRAV12-2, TRAJ18)
CAVRGSTLGRLYF

SEQ ID NO: 420116 - protein, 17 aa, Homo sapiens
  CDR3 for beta chain variable domain of TCR clone 210058 (TRBV4-1, TRBJ1-4)
CASSQEGPRGVEEKLFF

SEQ ID NO: 420117 - protein, 17 aa, Homo sapiens
  CDR3 for alpha chain variable domain of TCR clone 210059 (TRAV16, TRAJ37)
CAFWPKNGSSNTGKLIF

SEQ ID NO: 420118 - protein, 14 aa, Homo sapiens
  CDR3 for beta chain variable domain of TCR clone 210059 (TRBV19, TRBJ2-2)
CASSGQGIAGELFF

SEQ ID NO: 420119 - protein, 14 aa, Homo sapiens
  CDR3 for alpha chain variable domain of TCR clone 210060 (TRAV9-2, TRAJ39)
CALYIYNAGNMLTF

SEQ ID NO: 420120 - protein, 15 aa, Homo sapiens
  CDR3 for beta chain variable domain of TCR clone 210060 (TRBV9, TRBJ1-6)
CASSVSGTGDSPLHF

SEQ ID NO: 420121 - protein, 11 aa, Homo sapiens
  CDR3 for alpha chain variable domain of TCR clone 210061 (TRAV12-2, TRAJ33)
CAVTSNYQLIW

SEQ ID NO: 420122 - protein, 13 aa, Homo sapiens
  CDR3 for beta chain variable domain of TCR clone 210061 (TRBV19, TRBJ1-2)
CASSVPGQDGYTF

SEQ ID NO: 420123 - protein, 13 aa, Homo sapiens
  CDR3 for alpha chain variable domain of TCR clone 210062 (TRAV3, TRAJ33)
CAVRDRSNYQLIW

SEQ ID NO: 420124 - protein, 16 aa, Homo sapiens
  CDR3 for beta chain variable domain of TCR clone 210062 (TRBV4-2, TRBJ2-7)
CASSQDGGTSSYEQYF

SEQ ID NO: 420125 - protein, 10 aa, Homo sapiens
  CDR3 for alpha chain variable domain of TCR clone 210063 (TRAV1-2, )
HGAPMLELSS

SEQ ID NO: 420126 - protein, 18 aa, Homo sapiens
  CDR3 for beta chain variable domain of TCR clone 210063 (TRBV12-4, TRBJ2-5)
CASSLILAGTRGQETQYF

SEQ ID NO: 420127 - protein, 13 aa, Homo sapiens
  CDR3 for alpha chain variable domain of TCR clone 210064 (TRAV2, TRAJ15)
CAVASQAGTDLIF

SEQ ID NO: 420128 - protein, 12 aa, Homo sapiens
  CDR3 for beta chain variable domain of TCR clone 210064 (TRBV28, TRBJ2-6)
CASQAGANDLTF

SEQ ID NO: 420129 - protein, 13 aa, Homo sapiens
  CDR3 for alpha chain variable domain of TCR clone 210065 (TRAV8-3, TRAJ44)
CAVVPGTASKLTF

SEQ ID NO: 420130 - protein, 15 aa, Homo sapiens
  CDR3 for beta chain variable domain of TCR clone 210065 (TRBV12-4, TRBJ2-5)
CASTLNSGRGETQYF

SEQ ID NO: 420131 - protein, 14 aa, Homo sapiens
  CDR3 for alpha chain variable domain of TCR clone 210066 (TRAV8-3, TRAJ9)
CAVVYNTGGFKTIF

SEQ ID NO: 420132 - protein, 13 aa, Homo sapiens
  CDR3 for beta chain variable domain of TCR clone 210066 (TRBV2, TRBJ1-1)
CASRWTVNTEAFF

SEQ ID NO: 420133 - protein, 15 aa, Homo sapiens
  CDR3 for alpha chain variable domain of TCR clone 210067 (TRAV12-2, TRAJ53)
CAVNGGGGSNYKLTF

SEQ ID NO: 420134 - protein, 15 aa, Homo sapiens
  CDR3 for beta chain variable domain of TCR clone 210067 (TRBV7-9, TRBJ1-4)
CASSARTGGNEKLFF

SEQ ID NO: 420135 - protein, 16 aa, Homo sapiens
  CDR3 for alpha chain variable domain of TCR clone 210068 (TRAV21, TRAJ52)
CAVTNAGGTSYGKLTF

SEQ ID NO: 420136 - protein, 13 aa, Homo sapiens
  CDR3 for beta chain variable domain of TCR clone 210068 (TRBV12-4, TRBJ2-5)
CASSPGTEETQYF

SEQ ID NO: 420137 - protein, 14 aa, Homo sapiens
  CDR3 for alpha chain variable domain of TCR clone 210069 (TRAV38-1, TRAJ40)
CALRPTSGTYKYIL

SEQ ID NO: 420138 - protein, 14 aa, Homo sapiens
  CDR3 for beta chain variable domain of TCR clone 210069 (TRBV5-4, TRBJ1-1)
CASSLDSRRDEAFF

SEQ ID NO: 420139 - protein, 18 aa, Homo sapiens
  CDR3 for alpha chain variable domain of TCR clone 210070 (TRAV26-2, TRAJ33)
CCVLLHPEEAASNYQLIW

SEQ ID NO: 420140 - protein, 13 aa, Homo sapiens
  CDR3 for beta chain variable domain of TCR clone 210070 (TRBV24-1, TRBJ2-2)
CATSDWSTGELFF

SEQ ID NO: 420141 - protein, 16 aa, Homo sapiens
  CDR3 for alpha chain variable domain of TCR clone 210071 (TRAV21, TRAJ37)
CAVRTAGTSNTGTLIF

SEQ ID NO: 420142 - protein, 13 aa, Homo sapiens
  CDR3 for beta chain variable domain of TCR clone 210071 (TRBV7-9, TRBJ2-5)
CASLPSGRETQYF

SEQ ID NO: 420143 - protein, 15 aa, Homo sapiens
  CDR3 for alpha chain variable domain of TCR clone 210072 (TRAV38-2/DV8, TRAJ47)
CAYRTPLEYGNKLVF

SEQ ID NO: 420144 - protein, 11 aa, Homo sapiens
  CDR3 for beta chain variable domain of TCR clone 210072 (TRBV11-2, TRBJ2-2)
CASSLPGELFF

SEQ ID NO: 420145 - protein, 12 aa, Homo sapiens
  CDR3 for alpha chain variable domain of TCR clone 210073 (TRAV3, TRAJ43)
CAVRDPNNDMRF

SEQ ID NO: 420146 - protein, 13 aa, Homo sapiens
  CDR3 for beta chain variable domain of TCR clone 210073 (TRBV7-2, TRBJ2-7)
CASSSPSGSEQYF

SEQ ID NO: 420147 - protein, 14 aa, Homo sapiens
  CDR3 for alpha chain variable domain of TCR clone 210074 (TRAV3, TRAJ9)
CAVRANTGGFKTIF

SEQ ID NO: 420148 - protein, 15 aa, Homo sapiens
  CDR3 for beta chain variable domain of TCR clone 210074 (TRBV20-1, TRBJ2-7)
CSARDRVSGMDEQYF

SEQ ID NO: 420149 - protein, 13 aa, Homo sapiens
  CDR3 for alpha chain variable domain of TCR clone 210075 (TRAV8-6, TRAJ5)
CAVLDTGRRELTF

SEQ ID NO: 420150 - protein, 12 aa, Homo sapiens
  CDR3 for beta chain variable domain of TCR clone 210075 (TRBV7-9, TRBJ1-6)
CASSASESPLHF

SEQ ID NO: 420151 - protein, 15 aa, Homo sapiens
  CDR3 for alpha chain variable domain of TCR clone 210076 (TRAV17, TRAJ57)
CATGPSQGGSKKLVF

SEQ ID NO: 420152 - protein, 16 aa, Homo sapiens
  CDR3 for beta chain variable domain of TCR clone 210076 (TRBV12-4, TRBJ1-5)
CASSRTVGGSNQPQHF

SEQ ID NO: 420153 - protein, 11 aa, Homo sapiens
  CDR3 for alpha chain variable domain of TCR clone 210077 (TRAV13-2, TRAJ23)
CAESPRGKLIF

SEQ ID NO: 420154 - protein, 14 aa, Homo sapiens
  CDR3 for beta chain variable domain of TCR clone 210077 (TRBV19, TRBJ1-4)
CASAIEAEGEKLFF

SEQ ID NO: 420155 - protein, 12 aa, Homo sapiens
  CDR3 for alpha chain variable domain of TCR clone 210078 (TRAV36/DV7, TRAJ54)
CAVVRGAQKLVF

SEQ ID NO: 420156 - protein, 14 aa, Homo sapiens
  CDR3 for beta chain variable domain of TCR clone 210078 (TRBV4-1, TRBJ2-7)
CASSPVAGGDEQYF

SEQ ID NO: 420157 - protein, 14 aa, Homo sapiens
  CDR3 for alpha chain variable domain of TCR clone 210079 (TRAV12-1, TRAJ29)
CVVNKGSGNTPLVF

SEQ ID NO: 420158 - protein, 13 aa, Homo sapiens
  CDR3 for beta chain variable domain of TCR clone 210079 (TRBV7-9, TRBJ2-3)
CASSPGSTDTQYF

SEQ ID NO: 420159 - protein, 12 aa, Homo sapiens
  CDR3 for alpha chain variable domain of TCR clone 210080 (TRAV12-3, TRAJ17)
CAMTLTGNKLTF

SEQ ID NO: 420160 - protein, 15 aa, Homo sapiens
  CDR3 for beta chain variable domain of TCR clone 210080 (TRBV20-1, TRBJ1-5)
CSATSDRGLVQPQHF

SEQ ID NO: 420161 - protein, 12 aa, Homo sapiens
  CDR3 for alpha chain variable domain of TCR clone 210081 (TRAV21, TRAJ11)
CAVRGGNSTLTF

SEQ ID NO: 420162 - protein, 13 aa, Homo sapiens
  CDR3 for beta chain variable domain of TCR clone 210081 (TRBV28, TRBJ2-7)
CASSLPGFDEQYF

SEQ ID NO: 420163 - protein, 15 aa, Homo sapiens
  CDR3 for alpha chain variable domain of TCR clone 210082 (TRAV20, TRAJ23)
CAVQAVRNQGGKRIF

SEQ ID NO: 420164 - protein, 13 aa, Homo sapiens
  CDR3 for beta chain variable domain of TCR clone 210082 (TRBV9, TRBJ2-7)
CASSASDSYEQYF

SEQ ID NO: 420165 - protein, 21 aa, Homo sapiens
  CDR3 for alpha chain variable domain of TCR clone 210083 (TRAV26-2, TRAJ17)
ERCRCVLLHPAIKAAGNKLTF

SEQ ID NO: 420166 - protein, 15 aa, Homo sapiens
  CDR3 for beta chain variable domain of TCR clone 210083 (TRBV27, TRBJ2-7)
CASSTAGTGSYEQYF

SEQ ID NO: 420167 - protein, 12 aa, Homo sapiens
  CDR3 for alpha chain variable domain of TCR clone 210084 (TRAV23/DV6, TRAJ27)
CAASKSAGKSTF

SEQ ID NO: 420168 - protein, 17 aa, Homo sapiens
  CDR3 for beta chain variable domain of TCR clone 210084 (TRBV7-8, TRBJ2-6)
CASSAGTGGAGANVLTF

SEQ ID NO: 420169 - protein, 12 aa, Homo sapiens
  CDR3 for alpha chain variable domain of TCR clone 210085 (TRAV12-2, TRAJ16)
CAVNLDGQKLLF

SEQ ID NO: 420170 - protein, 14 aa, Homo sapiens
  CDR3 for beta chain variable domain of TCR clone 210085 (TRBV5-8, TRBJ2-3)
CASSLGQGTDTQYF

SEQ ID NO: 420171 - protein, 17 aa, Homo sapiens
  CDR3 for alpha chain variable domain of TCR clone 210086 (TRAV16, TRAJ37)
CAFWPKNGSSNTGKLIF

SEQ ID NO: 420172 - protein, 16 aa, Homo sapiens
  CDR3 for beta chain variable domain of TCR clone 210086 (TRBV12-5, TRBJ2-5)
CASGPRTSGNQETQYF

SEQ ID NO: 420173 - protein, 15 aa, Homo sapiens
  CDR3 for alpha chain variable domain of TCR clone 210087 (TRAV38-1, TRAJ37)
CAFIFGSGNTGKLIF

SEQ ID NO: 420174 - protein, 16 aa, Homo sapiens
  CDR3 for beta chain variable domain of TCR clone 210087 (TRBV11-2, TRBJ2-7)
CASSLAPTGVNYEQYF

SEQ ID NO: 420175 - protein, 13 aa, Homo sapiens
  CDR3 for alpha chain variable domain of TCR clone 210088 (TRAV12-1, TRAJ7)
CVVNMRGNNRLAF

SEQ ID NO: 420176 - protein, 15 aa, Homo sapiens
  CDR3 for beta chain variable domain of TCR clone 210088 (TRBV27, TRBJ2-3)
CASSLGLAATDMQDF

SEQ ID NO: 420177 - protein, 15 aa, Homo sapiens
  CDR3 for alpha chain variable domain of TCR clone 210089 (TRAV35, TRAJ23)
CAGQRGYNQGGKLIF

SEQ ID NO: 420178 - protein, 13 aa, Homo sapiens
  CDR3 for beta chain variable domain of TCR clone 210089 (TRBV4-2, TRBJ1-1)
CASSQAGNTEAFF

SEQ ID NO: 420179 - protein, 12 aa, Homo sapiens
  CDR3 for alpha chain variable domain of TCR clone 210090 (TRAV12-3, TRAJ17)
CAMTLTGNKLTF

SEQ ID NO: 420180 - protein, 13 aa, Homo sapiens
  CDR3 for beta chain variable domain of TCR clone 210090 (TRBV7-7, TRBJ2-2)
CASSLTSAGELFF

SEQ ID NO: 420181 - protein, 12 aa, Homo sapiens
  CDR3 for alpha chain variable domain of TCR clone 210091 (TRAV12-1, TRAJ40)
CVVYSGTYKYIF

SEQ ID NO: 420182 - protein, 13 aa, Homo sapiens
  CDR3 for beta chain variable domain of TCR clone 210091 (TRBV11-2, TRBJ2-1)
CASSLDLVNEQFF

SEQ ID NO: 420183 - protein, 14 aa, Homo sapiens
  CDR3 for alpha chain variable domain of TCR clone 210092 (TRAV12-2, TRAJ17)
CAALFKAAGNKLTF

SEQ ID NO: 420184 - protein, 15 aa, Homo sapiens
  CDR3 for beta chain variable domain of TCR clone 210092 (TRBV18, TRBJ2-3)
CASSPLAGETDTQYV

SEQ ID NO: 420185 - protein, 13 aa, Homo sapiens
  CDR3 for alpha chain variable domain of TCR clone 210093 (TRAV17, TRAJ26)
CATVDNYGLNFVF

SEQ ID NO: 420186 - protein, 16 aa, Homo sapiens
  CDR3 for beta chain variable domain of TCR clone 210093 (TRBV2, TRBJ2-1)
CASSVGGSLSYNEQFF

SEQ ID NO: 420187 - protein, 14 aa, Homo sapiens
  CDR3 for alpha chain variable domain of TCR clone 210094 (TRAV12-2, TRAJ13)
CAVKKTGGDQKVTF

SEQ ID NO: 420188 - protein, 15 aa, Homo sapiens
  CDR3 for beta chain variable domain of TCR clone 210094 (TRBV28, TRBJ2-1)
CASSIIAGGRSEQFF

SEQ ID NO: 420189 - protein, 15 aa, Homo sapiens
  CDR3 for alpha chain variable domain of TCR clone 210095 (TRAV26-2, TRAJ13)
CIPRDLSGGYQKVTF

SEQ ID NO: 420190 - protein, 11 aa, Homo sapiens
  CDR3 for beta chain variable domain of TCR clone 210095 (TRBV7-9, TRBJ2-3)
CASSYTDTQYF

SEQ ID NO: 420191 - protein, 11 aa, Homo sapiens
  CDR3 for alpha chain variable domain of TCR clone 210096 (TRAV17, TRAJ9)
CATTGGFKTFF

SEQ ID NO: 420192 - protein, 14 aa, Homo sapiens
  CDR3 for beta chain variable domain of TCR clone 210096 (TRBV7-9, TRBJ2-2)
CASSGLADTGELFF

SEQ ID NO: 420193 - protein, 12 aa, Homo sapiens
  CDR3 for alpha chain variable domain of TCR clone 210097 (TRAV12-3, TRAJ33)
CAFMDSNYQLIW

SEQ ID NO: 420194 - protein, 13 aa, Homo sapiens
  CDR3 for beta chain variable domain of TCR clone 210097 (TRBV7-9, TRBJ2-1)
CASSLGTVNEQFF

SEQ ID NO: 420195 - protein, 13 aa, Homo sapiens
  CDR3 for alpha chain variable domain of TCR clone 210098 (TRAV3, TRAJ27)
CAVTNTNAGKSTF

SEQ ID NO: 420196 - protein, 13 aa, Homo sapiens
  CDR3 for beta chain variable domain of TCR clone 210098 (TRBV14, TRBJ1-1)
CASSQEAGTEAFF

SEQ ID NO: 420197 - protein, 13 aa, Homo sapiens
  CDR3 for alpha chain variable domain of TCR clone 210099 (TRAV29/DV5, TRAJ47)
CAASAEYGNKLVF

SEQ ID NO: 420198 - protein, 14 aa, Homo sapiens
  CDR3 for beta chain variable domain of TCR clone 210099 (TRBV7-9, TRBJ2-1)
CASSSDRGLDEQFF

SEQ ID NO: 420199 - protein, 12 aa, Homo sapiens
  CDR3 for alpha chain variable domain of TCR clone 210100 (TRAV35, TRAJ39)
LAPNKAGNMLTF

SEQ ID NO: 420200 - protein, 16 aa, Homo sapiens
  CDR3 for beta chain variable domain of TCR clone 210100 (TRBV2, TRBJ2-3)
CASSTSVEGVTDTQYF

SEQ ID NO: 420201 - protein, 15 aa, Homo sapiens
  CDR3 for alpha chain variable domain of TCR clone 210101 (TRAV8-3, TRAJ11)
CAVGLLNSGYSNLTF

SEQ ID NO: 420202 - protein, 23 aa, Homo sapiens
  CDR3 for beta chain variable domain of TCR clone 210101 (TRBV7-9, TRBJ1-2)
EAQLEKSRLLSDRFSSGEDGYTF

SEQ ID NO: 420203 - protein, 15 aa, Homo sapiens
  CDR3 for alpha chain variable domain of TCR clone 210102 (TRAV2, TRAJ9)
CAVEDRGTGGFKTIF

SEQ ID NO: 420204 - protein, 16 aa, Homo sapiens
  CDR3 for beta chain variable domain of TCR clone 210102 (TRBV24-1, TRBJ2-3)
CATSDPGTGGTDTQYF

SEQ ID NO: 420205 - protein, 15 aa, Homo sapiens
  CDR3 for alpha chain variable domain of TCR clone 210103 (TRAV23/DV6, TRAJ37)
CAAGEGSSNTGKLIF

SEQ ID NO: 420206 - protein, 17 aa, Homo sapiens
  CDR3 for beta chain variable domain of TCR clone 210103 (TRBV20-1, TRBJ2-7)
YSATRAGGVAGVEEQYF

SEQ ID NO: 420207 - protein, 14 aa, Homo sapiens
  CDR3 for alpha chain variable domain of TCR clone 210104 (TRAV38-1, TRAJ45)
CAYYSGGGADGLTF

SEQ ID NO: 420208 - protein, 14 aa, Homo sapiens
  CDR3 for beta chain variable domain of TCR clone 210104 (TRBV25-1, TRBJ1-1)
CASTHLEGNTEAFF

SEQ ID NO: 420209 - protein, 14 aa, Homo sapiens
  CDR3 for alpha chain variable domain of TCR clone 210105 (TRAV12-2, TRAJ11)
CAVEGGSGYSTLTF

SEQ ID NO: 420210 - protein, 16 aa, Homo sapiens
  CDR3 for beta chain variable domain of TCR clone 210105 (TRBV6-1, TRBJ1-2)
CASSGAWQGRSHGYTV

SEQ ID NO: 420211 - protein, 16 aa, Homo sapiens
  CDR3 for alpha chain variable domain of TCR clone 210106 (TRAV30, TRAJ24)
CGTEIVDADSWGKFQF

SEQ ID NO: 420212 - protein, 17 aa, Homo sapiens
  CDR3 for beta chain variable domain of TCR clone 210106 (TRBV11-2, TRBJ2-4)
CASGSVGPGGHRNIQYF

SEQ ID NO: 420213 - protein, 16 aa, Homo sapiens
  CDR3 for alpha chain variable domain of TCR clone 210107 (TRAV26-2, TRAJ23)
CILRAMIYNQGGKLIF

SEQ ID NO: 420214 - protein, 15 aa, Homo sapiens
  CDR3 for beta chain variable domain of TCR clone 210107 (TRBV7-9, TRBJ2-7)
CASSLALAEAYEQYF

SEQ ID NO: 420215 - protein, 11 aa, Homo sapiens
  CDR3 for alpha chain variable domain of TCR clone 210108 (TRAV2, TRAJ33)
CAVESNYQLIW

SEQ ID NO: 420216 - protein, 14 aa, Homo sapiens
  CDR3 for beta chain variable domain of TCR clone 210108 (TRBV28, TRBJ1-5)
CASSLFPGVQPQHF

SEQ ID NO: 420217 - protein, 15 aa, Homo sapiens
  CDR3 for alpha chain variable domain of TCR clone 210109 (TRAV20, TRAJ53)
CAVQASGGSNYNLTF

SEQ ID NO: 420218 - protein, 12 aa, Homo sapiens
  CDR3 for beta chain variable domain of TCR clone 210109 (TRBV7-8, TRBJ2-7)
CASSLSDIGQYF

SEQ ID NO: 420219 - protein, 12 aa, Homo sapiens
  CDR3 for alpha chain variable domain of TCR clone 210110 (TRAV25, TRAJ31)
CAGHLNNARLMF

SEQ ID NO: 420220 - protein, 12 aa, Homo sapiens
  CDR3 for beta chain variable domain of TCR clone 210110 (TRBV12-4, TRBJ1-3)
CASSFSGNTIYF

SEQ ID NO: 420221 - protein, 14 aa, Homo sapiens
  CDR3 for alpha chain variable domain of TCR clone 210111 (TRAV2, TRAJ9)
CAVEERRGGFKTIF

SEQ ID NO: 420222 - protein, 12 aa, Homo sapiens
  CDR3 for beta chain variable domain of TCR clone 210111 (TRBV12-4, TRBJ2-4)
CASSSSGNIQYF

SEQ ID NO: 420223 - protein, 10 aa, Homo sapiens
  CDR3 for alpha chain variable domain of TCR clone 210112 (TRAV13-1, TRAJ27)
CAPLARPINL

SEQ ID NO: 420224 - protein, 13 aa, Homo sapiens
  CDR3 for beta chain variable domain of TCR clone 210112 (TRBV28, TRBJ1-1)
CASSKQGWTEAVF

SEQ ID NO: 420225 - protein, 12 aa, Homo sapiens
  CDR3 for alpha chain variable domain of TCR clone 210113 (TRAV1-1, TRAJ43)
CAPRVSSNDMRF

SEQ ID NO: 420226 - protein, 14 aa, Homo sapiens
  CDR3 for beta chain variable domain of TCR clone 210113 (TRBV6-1, TRBJ1-3)
GASVQGGGGNTIYF

SEQ ID NO: 420227 - protein, 11 aa, Homo sapiens
  CDR3 for alpha chain variable domain of TCR clone 210114 (TRAV12-3, TRAJ43)
CAMSVSNDMRF

SEQ ID NO: 420228 - protein, 16 aa, Homo sapiens
  CDR3 for beta chain variable domain of TCR clone 210114 (TRBV2, TRBJ2-3)
CASSTSVEGVTDTQYL

SEQ ID NO: 420229 - protein, 13 aa, Homo sapiens
  CDR3 for alpha chain variable domain of TCR clone 210115 (TRAV8-3, TRAJ40)
CAVGAQYLRNLQI

SEQ ID NO: 420230 - protein, 15 aa, Homo sapiens
  CDR3 for beta chain variable domain of TCR clone 210115 (TRBV11-3, TRBJ2-3)
CASLKDGREGDTQYF

SEQ ID NO: 420231 - protein, 14 aa, Homo sapiens
  CDR3 for alpha chain variable domain of TCR clone 210116 (TRAV8-3, TRAJ31)
CAVGRGLNNARLMF

SEQ ID NO: 420232 - protein, 15 aa, Homo sapiens
  CDR3 for beta chain variable domain of TCR clone 210116 (TRBV7-2, TRBJ2-2)
CASSLAGGLTGQLFF

SEQ ID NO: 420233 - protein, 14 aa, Homo sapiens
  CDR3 for alpha chain variable domain of TCR clone 210117 (TRAV12-3, TRAJ12)
CAMSEVDSGYKLTF

SEQ ID NO: 420234 - protein, 12 aa, Homo sapiens
  CDR3 for beta chain variable domain of TCR clone 210117 (TRBV18, TRBJ1-4)
CASSPSREKLFF

SEQ ID NO: 420235 - protein, 15 aa, Homo sapiens
  CDR3 for alpha chain variable domain of TCR clone 210118 (TRAV8-3, TRAJ11)
CAVGLLNSGYSTLTF

SEQ ID NO: 420236 - protein, 15 aa, Homo sapiens
  CDR3 for beta chain variable domain of TCR clone 210118 (TRBV20-1, TRBJ2-7)
CSAESGTSGAYEQYF

SEQ ID NO: 420237 - protein, 14 aa, Homo sapiens
  CDR3 for alpha chain variable domain of TCR clone 210119 (TRAV12-3, TRAJ10)
SHLPLAGGGNKLTF

SEQ ID NO: 420238 - protein, 13 aa, Homo sapiens
  CDR3 for beta chain variable domain of TCR clone 210119 (TRBV2, TRBJ1-6)
CADSGSYNSPLHF

SEQ ID NO: 420239 - protein, 15 aa, Homo sapiens
  CDR3 for alpha chain variable domain of TCR clone 210120 (TRAV17, TRAJ23)
CATDAEDNQGGKLIF

SEQ ID NO: 420240 - protein, 13 aa, Homo sapiens
  CDR3 for beta chain variable domain of TCR clone 210120 (TRBV7-7, TRBJ2-2)
CASSLTSAGELFF

SEQ ID NO: 420241 - protein, 15 aa, Homo sapiens
  CDR3 for alpha chain variable domain of TCR clone 210121 (TRAV17, TRAJ57)
CATGPSQGGSEKLVF

SEQ ID NO: 420242 - protein, 13 aa, Homo sapiens
  CDR3 for beta chain variable domain of TCR clone 210121 (TRBV12-5, TRBJ2-3)
CASGDRQSDTQYF

SEQ ID NO: 420243 - protein, 17 aa, Homo sapiens
  CDR3 for alpha chain variable domain of TCR clone 210122 (TRAV3, TRAJ6)
CAVRDGPRAGGSSIPTI

SEQ ID NO: 420244 - protein, 14 aa, Homo sapiens
  CDR3 for beta chain variable domain of TCR clone 210122 (TRBV7-2, TRBJ2-7)
CASSPKTSFYEQYF

SEQ ID NO: 420245 - protein, 15 aa, Homo sapiens
  CDR3 for alpha chain variable domain of TCR clone 210123 (TRAV21, TRAJ32)
CAVNSYGGATNNLIF

SEQ ID NO: 420246 - protein, 19 aa, Homo sapiens
  CDR3 for beta chain variable domain of TCR clone 210123 (TRBV25-1, TRBJ2-2)
CAILVYRVDRGRNTGELFF

SEQ ID NO: 420247 - protein, 15 aa, Homo sapiens
  CDR3 for alpha chain variable domain of TCR clone 210124 (TRAV20, TRAJ43)
CAVQAGKSSNNDMRF

SEQ ID NO: 420248 - protein, 14 aa, Homo sapiens
  CDR3 for beta chain variable domain of TCR clone 210124 (TRBV27, TRBJ2-1)
CTSRHLGGGKEQFF

SEQ ID NO: 420249 - protein, 14 aa, Homo sapiens
  CDR3 for alpha chain variable domain of TCR clone 210125 (TRAV8-3, TRAJ4)
CAVGAAGGYHKLIF

SEQ ID NO: 420250 - protein, 15 aa, Homo sapiens
  CDR3 for beta chain variable domain of TCR clone 210125 (TRBV6-5, TRBJ2-1)
CASSYDAGAGNEQLF

SEQ ID NO: 420251 - protein, 16 aa, Homo sapiens
  CDR3 for alpha chain variable domain of TCR clone 210126 (TRAV29/DV5, TRAJ54)
CAARAPLTQGAQKLVF

SEQ ID NO: 420252 - protein, 15 aa, Homo sapiens
  CDR3 for beta chain variable domain of TCR clone 210126 (TRBV6-1, TRBJ1-3)
CASSDFGFSGNTIYC

SEQ ID NO: 420253 - protein, 13 aa, Homo sapiens
  CDR3 for alpha chain variable domain of TCR clone 210127 (TRAV8-3, TRAJ44)
CAVVPGTASKLTF

SEQ ID NO: 420254 - protein, 16 aa, Homo sapiens
  CDR3 for beta chain variable domain of TCR clone 210127 (TRBV7-9, TRBJ2-3)
CASSTWREVGTDTQYF

SEQ ID NO: 420255 - protein, 16 aa, Homo sapiens
  CDR3 for alpha chain variable domain of TCR clone 210128 (TRAV25, TRAJ53)
CGVEGDSGGSNYKLTF

SEQ ID NO: 420256 - protein, 18 aa, Homo sapiens
  CDR3 for beta chain variable domain of TCR clone 210128 (TRBV5-5, TRBJ1-5)
CASSLRQVKGSSNQPQHF

SEQ ID NO: 420257 - protein, 17 aa, Homo sapiens
  CDR3 for alpha chain variable domain of TCR clone 210129 (TRAV26-1, TRAJ11)
CIVRVGQSNSGYSTLTF

SEQ ID NO: 420258 - protein, 15 aa, Homo sapiens
  CDR3 for beta chain variable domain of TCR clone 210129 (TRBV27, TRBJ2-5)
CPSSLIPSGGETQYF

SEQ ID NO: 420259 - protein, 16 aa, Homo sapiens
  CDR3 for alpha chain variable domain of TCR clone 210130 (TRAV14/DV4, TRAJ20)
CAMREGRRRDDYKPSF

SEQ ID NO: 420260 - protein, 17 aa, Homo sapiens
  CDR3 for beta chain variable domain of TCR clone 210130 (TRBV7-9, TRBJ2-5)
CASSPGLAGGGREPQYF

SEQ ID NO: 420261 - protein, 15 aa, Homo sapiens
  CDR3 for alpha chain variable domain of TCR clone 210131 (TRAV3, TRAJ22)
CAVRDRGGSARQLTF

SEQ ID NO: 420262 - protein, 14 aa, Homo sapiens
  CDR3 for beta chain variable domain of TCR clone 210131 (TRBV7-6, TRBJ2-7)
CASSFRQGADEQYF

SEQ ID NO: 420263 - protein, 14 aa, Homo sapiens
  CDR3 for alpha chain variable domain of TCR clone 210132 (TRAV25, TRAJ35)
CARRMEGFGNVRHC

SEQ ID NO: 420264 - protein, 15 aa, Homo sapiens
  CDR3 for beta chain variable domain of TCR clone 210132 (TRBV9, TRBJ2-1)
CASSRAGSSYNEQFF

SEQ ID NO: 420265 - protein, 12 aa, Homo sapiens
  CDR3 for alpha chain variable domain of TCR clone 210133 (TRAV12-2, TRAJ10)
WGVTGGGNKLTF

SEQ ID NO: 420266 - protein, 14 aa, Homo sapiens
  CDR3 for beta chain variable domain of TCR clone 210133 (TRBV20-1, TRBJ2-7)
CSALEWRNRGEQYF

SEQ ID NO: 420267 - protein, 13 aa, Homo sapiens
  CDR3 for alpha chain variable domain of TCR clone 210134 (TRAV12-2, TRAJ9)
CAVKWAVGFKTIF

SEQ ID NO: 420268 - protein, 13 aa, Homo sapiens
  CDR3 for beta chain variable domain of TCR clone 210134 (TRBV7-3, TRBJ1-1)
CASSQDWGAEAFF

SEQ ID NO: 420269 - protein, 13 aa, Homo sapiens
  CDR3 for alpha chain variable domain of TCR clone 210135 (TRAV12-1, TRAJ22)
CVVYYGSARQLTF

SEQ ID NO: 420270 - protein, 10 aa, Homo sapiens
  CDR3 for beta chain variable domain of TCR clone 210135 (TRBV6-3, TRBJ2-2)
CASRDGELFF

SEQ ID NO: 420271 - protein, 12 aa, Homo sapiens
  CDR3 for alpha chain variable domain of TCR clone 210136 (TRAV12-1, TRAJ40)
CVVYSGTYKYIF

SEQ ID NO: 420272 - protein, 13 aa, Homo sapiens
  CDR3 for beta chain variable domain of TCR clone 210136 (TRBV12-5, TRBJ2-1)
CASGLGRGNEQFF

SEQ ID NO: 420273 - protein, 15 aa, Homo sapiens
  CDR3 for alpha chain variable domain of TCR clone 210137 (TRAV26-1, TRAJ38)
CIVRAEGGNNRKLIW

SEQ ID NO: 420274 - protein, 13 aa, Homo sapiens
  CDR3 for beta chain variable domain of TCR clone 210137 (TRBV7-6, TRBJ2-5)
CQQLPSGSETQYF

SEQ ID NO: 420275 - protein, 11 aa, Homo sapiens
  CDR3 for alpha chain variable domain of TCR clone 210138 (TRAV20, TRAJ31)
CAVQMRARLMF

SEQ ID NO: 420276 - protein, 16 aa, Homo sapiens
  CDR3 for beta chain variable domain of TCR clone 210138 (TRBV11-2, TRBJ1-4)
CASSLGGLVKNCFLAV

SEQ ID NO: 420277 - protein, 16 aa, Homo sapiens
  CDR3 for alpha chain variable domain of TCR clone 210139 (TRAV3, TRAJ10)
RAVRDMRAGGGNKITF

SEQ ID NO: 420278 - protein, 13 aa, Homo sapiens
  CDR3 for beta chain variable domain of TCR clone 210139 (TRBV4-2, TRBJ1-1)
CASSQAGNTEAFF

SEQ ID NO: 420279 - protein, 13 aa, Homo sapiens
  CDR3 for alpha chain variable domain of TCR clone 210140 (TRAV8-6, TRAJ49)
CAVITNTGNQFYF

SEQ ID NO: 420280 - protein, 17 aa, Homo sapiens
  CDR3 for beta chain variable domain of TCR clone 210140 (TRBV28, TRBJ2-1)
CASSFIPGGSSYNEQFF

SEQ ID NO: 420281 - protein, 18 aa, Homo sapiens
  CDR3 for alpha chain variable domain of TCR clone 210141 (TRAV8-4, TRAJ52)
CAVTRANAGGTSYRKLTF

SEQ ID NO: 420282 - protein, 20 aa, Homo sapiens
  CDR3 for beta chain variable domain of TCR clone 210141 (TRBV19, TRBJ2-1)
CASSMSRTVTSTRLNNEQFF

SEQ ID NO: 420283 - protein, 11 aa, Homo sapiens
  CDR3 for alpha chain variable domain of TCR clone 210142 (TRAV12-3, TRAJ49)
CAMSSGNQFYF

SEQ ID NO: 420284 - protein, 17 aa, Homo sapiens
  CDR3 for beta chain variable domain of TCR clone 210142 (TRBV5-7, TRBJ2-7)
CASSLWRVLAGSCEQYF

SEQ ID NO: 420285 - protein, 14 aa, Homo sapiens
  CDR3 for alpha chain variable domain of TCR clone 210143 (TRAV12-2, TRAJ45)
CAVNIGGGADGLTF

SEQ ID NO: 420286 - protein, 11 aa, Homo sapiens
  CDR3 for beta chain variable domain of TCR clone 210143 (TRBV7-2, TRBJ2-3)
CASSSSDTQYF

SEQ ID NO: 420287 - protein, 13 aa, Homo sapiens
  CDR3 for alpha chain variable domain of TCR clone 210144 (TRAV12-1, TRAJ9)
CVVLNTGGFKTIF

SEQ ID NO: 420288 - protein, 13 aa, Homo sapiens
  CDR3 for beta chain variable domain of TCR clone 210144 (TRBV20-1, TRBJ1-1)
CSARGGGNTESFF

SEQ ID NO: 420289 - protein, 13 aa, Homo sapiens
  CDR3 for alpha chain variable domain of TCR clone 210145 (TRAV29/DV5, TRAJ31)
CAASRNNNARLMF

SEQ ID NO: 420290 - protein, 16 aa, Homo sapiens
  CDR3 for beta chain variable domain of TCR clone 210145 (TRBV4-1, TRBJ2-7)
CASSQEWTSGPLEQYF

SEQ ID NO: 420291 - protein, 13 aa, Homo sapiens
  CDR3 for alpha chain variable domain of TCR clone 210146 (TRAV1-1, TRAJ23)
CAVVANQGGQLIF

SEQ ID NO: 420292 - protein, 16 aa, Homo sapiens
  CDR3 for beta chain variable domain of TCR clone 210146 (TRBV5-5, TRBJ1-2)
CASSPTWGRGLYGYTF

SEQ ID NO: 420293 - protein, 15 aa, Homo sapiens
  CDR3 for alpha chain variable domain of TCR clone 210147 (TRAV38-1, TRAJ37)
CAFIFGSGNIGKLIF

SEQ ID NO: 420294 - protein, 12 aa, Homo sapiens
  CDR3 for beta chain variable domain of TCR clone 210147 (TRBV7-9, TRBJ2-7)
CASSLEGYEQYF

SEQ ID NO: 420295 - protein, 14 aa, Homo sapiens
  CDR3 for alpha chain variable domain of TCR clone 210148 (TRAV12-2, TRAJ3)
CAVSLYSSASKIIF

SEQ ID NO: 420296 - protein, 14 aa, Homo sapiens
  CDR3 for beta chain variable domain of TCR clone 210148 (TRBV27, TRBJ2-1)
CACSIAETYNEQFF

SEQ ID NO: 420297 - protein, 14 aa, Homo sapiens
  CDR3 for alpha chain variable domain of TCR clone 210149 (TRAV8-1, TRAJ5)
CAVRTDTGRRALTF

SEQ ID NO: 420298 - protein, 15 aa, Homo sapiens
  CDR3 for beta chain variable domain of TCR clone 210149 (TRBV7-3, TRBJ2-1)
CASSPTGGGEDEQFF

SEQ ID NO: 420299 - protein, 11 aa, Homo sapiens
  CDR3 for alpha chain variable domain of TCR clone 210150 (TRAV13-1, TRAJ24)
CAASGWGKLQF

SEQ ID NO: 420300 - protein, 18 aa, Homo sapiens
  CDR3 for beta chain variable domain of TCR clone 210150 (TRBV7-8, TRBJ2-1)
CASSPYLGQRGSNNEQFF

SEQ ID NO: 420301 - protein, 15 aa, Homo sapiens
  CDR3 for alpha chain variable domain of TCR clone 210151 (TRAV26-1, TRAJ23)
CIVRVAGYQGGKRIF

SEQ ID NO: 420302 - protein, 12 aa, Homo sapiens
  CDR3 for beta chain variable domain of TCR clone 210151 (TRBV7-2, TRBJ2-5)
CASSQYQETQYF

SEQ ID NO: 420303 - protein, 12 aa, Homo sapiens
  CDR3 for alpha chain variable domain of TCR clone 210152 (TRAV3, TRAJ43)
CAVRDPNNVMRF

SEQ ID NO: 420304 - protein, 14 aa, Homo sapiens
  CDR3 for beta chain variable domain of TCR clone 210152 (TRBV19, TRBJ2-5)
CASSMTGQQETQYF

SEQ ID NO: 420305 - protein, 13 aa, Homo sapiens
  CDR3 for alpha chain variable domain of TCR clone 210153 (TRAV13-1, TRAJ21)
CAASIYNFNKFYF

SEQ ID NO: 420306 - protein, 15 aa, Homo sapiens
  CDR3 for beta chain variable domain of TCR clone 210153 (TRBV7-8, TRBJ1-5)
CASSLVGQPNQPQHF

SEQ ID NO: 420307 - protein, 14 aa, Homo sapiens
  CDR3 for alpha chain variable domain of TCR clone 210154 (TRAV17, TRAJ57)
CATDPQGGSEKLVF

SEQ ID NO: 420308 - protein, 15 aa, Homo sapiens
  CDR3 for beta chain variable domain of TCR clone 210154 (TRBV5-1, TRBJ2-7)
CASSLDLTSAYEQYF

SEQ ID NO: 420309 - protein, 10 aa, Homo sapiens
  CDR3 for alpha chain variable domain of TCR clone 210155 (TRAV1-2, TRAJ31)
CAFFDARLMF

SEQ ID NO: 420310 - protein, 14 aa, Homo sapiens
  CDR3 for beta chain variable domain of TCR clone 210155 (TRBV11-2, TRBJ2-7)
CASSLGAGAYEQYF

SEQ ID NO: 420311 - protein, 13 aa, Homo sapiens
  CDR3 for alpha chain variable domain of TCR clone 210156 (TRAV8-3, TRAJ36)
CAVGATGANNLFF

SEQ ID NO: 420312 - protein, 12 aa, Homo sapiens
  CDR3 for beta chain variable domain of TCR clone 210156 (TRBV12-4, TRBJ1-2)
CQQLRQGKGYTF

SEQ ID NO: 420313 - protein, 15 aa, Homo sapiens
  CDR3 for alpha chain variable domain of TCR clone 210157 (TRAV34, TRAJ38)
CGADFTPGNNRKLIG

SEQ ID NO: 420314 - protein, 16 aa, Homo sapiens
  CDR3 for beta chain variable domain of TCR clone 210157 (TRBV12-5, TRBJ2-5)
CASGPRTSGNQETQYF

SEQ ID NO: 420315 - protein, 14 aa, Homo sapiens
  CDR3 for alpha chain variable domain of TCR clone 210158 (TRAV17, TRAJ35)
CAKDRPGFGNVLHC

SEQ ID NO: 420316 - protein, 19 aa, Homo sapiens
  CDR3 for beta chain variable domain of TCR clone 210158 (TRBV11-3, TRBJ2-2)
CASSTRPGAKTTNTGELFF

SEQ ID NO: 420317 - protein, 14 aa, Homo sapiens
  CDR3 for alpha chain variable domain of TCR clone 210159 (TRAV13-1, TRAJ44)
CAAKATGTASKLTF

SEQ ID NO: 420318 - protein, 13 aa, Homo sapiens
  CDR3 for beta chain variable domain of TCR clone 210159 (TRBV5-5, TRBJ1-2)
CAISFWRGEDYTF

SEQ ID NO: 420319 - protein, 12 aa, Homo sapiens
  CDR3 for alpha chain variable domain of TCR clone 210160 (TRAV23/DV6, TRAJ30)
CAASKGDDKIIF

SEQ ID NO: 420320 - protein, 17 aa, Homo sapiens
  CDR3 for beta chain variable domain of TCR clone 210160 (TRBV13, TRBJ2-3)
CANSLSRVAGGRNTQYF

SEQ ID NO: 420321 - protein, 23 aa, Homo sapiens
  CDR3 for alpha chain variable domain of TCR clone 210161 (TRAV26-1, TRAJ38)
CIADNAGNNHIQNPDPAVYQLRD

SEQ ID NO: 420322 - protein, 15 aa, Homo sapiens
  CDR3 for beta chain variable domain of TCR clone 210161 (TRBV7-8, TRBJ1-1)
CASSLGDSRNTEAFF

SEQ ID NO: 420323 - protein, 12 aa, Homo sapiens
  CDR3 for alpha chain variable domain of TCR clone 210162 (TRAV12-2, TRAJ31)
CAVNTPDAILMF

SEQ ID NO: 420324 - protein, 15 aa, Homo sapiens
  CDR3 for beta chain variable domain of TCR clone 210162 (TRBV4-2, TRBJ1-1)
CASSQDQGLNTEAFF

SEQ ID NO: 420325 - protein, 12 aa, Homo sapiens
  CDR3 for alpha chain variable domain of TCR clone 210163 (TRAV16, TRAJ10)
CSRTGGGNKLTF

SEQ ID NO: 420326 - protein, 15 aa, Homo sapiens
  CDR3 for beta chain variable domain of TCR clone 210163 (TRBV4-2, TRBJ1-2)
CASSQRTGGRDGYTF

SEQ ID NO: 420327 - protein, 16 aa, Homo sapiens
  CDR3 for alpha chain variable domain of TCR clone 210164 (TRAV35, TRAJ42)
GRMESYYGGSQGNLIF

SEQ ID NO: 420328 - protein, 15 aa, Homo sapiens
  CDR3 for beta chain variable domain of TCR clone 210164 (TRBV6-1, TRBJ2-7)
CASSDWDKPNYEQYF

SEQ ID NO: 420329 - protein, 17 aa, Homo sapiens
  CDR3 for alpha chain variable domain of TCR clone 210165 (TRAV8-3, TRAJ42)
CCGAGMNYGGSQGNLIF

SEQ ID NO: 420330 - protein, 11 aa, Homo sapiens
  CDR3 for beta chain variable domain of TCR clone 210165 (TRBV7-2, TRBJ2-3)
CASRSSDTQYF

SEQ ID NO: 420331 - protein, 14 aa, Homo sapiens
  CDR3 for alpha chain variable domain of TCR clone 210166 (TRAV35, TRAJ53)
CAVNSGGSNYKLTF

SEQ ID NO: 420332 - protein, 11 aa, Homo sapiens
  CDR3 for beta chain variable domain of TCR clone 210166 (TRBV4-1, TRBJ1-4)
CASKENEKLFF

SEQ ID NO: 420333 - protein, 14 aa, Homo sapiens
  CDR3 for alpha chain variable domain of TCR clone 210167 (TRAV12-2, TRAJ24)
CAVTPADSRGKLQF

SEQ ID NO: 420334 - protein, 20 aa, Homo sapiens
  CDR3 for beta chain variable domain of TCR clone 210167 (TRBV28, TRBJ2-1)
CASTPIGRSPGLAGGNEQFF

SEQ ID NO: 420335 - protein, 13 aa, Homo sapiens
  CDR3 for alpha chain variable domain of TCR clone 210168 (TRAV1-2, TRAJ20)
CAVRDGNDYKLSF

SEQ ID NO: 420336 - protein, 15 aa, Homo sapiens
  CDR3 for beta chain variable domain of TCR clone 210168 (TRBV7-2, TRBJ2-3)
CASSLGGGGRDTQCF

SEQ ID NO: 420337 - protein, 12 aa, Homo sapiens
  CDR3 for alpha chain variable domain of TCR clone 210169 (TRAV12-1, TRAJ40)
CVFYSRTSKYIF

SEQ ID NO: 420338 - protein, 18 aa, Homo sapiens
  CDR3 for beta chain variable domain of TCR clone 210169 (TRBV12-4, TRBJ2-2)
CASSLVAGTRGRTGELFF

SEQ ID NO: 420339 - protein, 15 aa, Homo sapiens
  CDR3 for alpha chain variable domain of TCR clone 210170 (TRAV12-1, TRAJ44)
CVVFVNTGTASKLTF

SEQ ID NO: 420340 - protein, 15 aa, Homo sapiens
  CDR3 for beta chain variable domain of TCR clone 210170 (TRBV7-3, TRBJ2-2)
CASSETGQGTGELFF

SEQ ID NO: 420341 - protein, 14 aa, Homo sapiens
  CDR3 for alpha chain variable domain of TCR clone 210171 (TRAV29/DV5, TRAJ49)
CAASLSNTGNQFYF

SEQ ID NO: 420342 - protein, 15 aa, Homo sapiens
  CDR3 for beta chain variable domain of TCR clone 210171 (TRBV11-3, TRBJ2-2)
CASSYFSTGTGELFF

SEQ ID NO: 420343 - protein, 16 aa, Homo sapiens
  CDR3 for alpha chain variable domain of TCR clone 210172 (TRAV30, TRAJ24)
CGTESVDADSWGKFQF

SEQ ID NO: 420344 - protein, 16 aa, Homo sapiens
  CDR3 for beta chain variable domain of TCR clone 210172 (TRBV7-3, TRBJ2-2)
CASSLKRGTLSGELFF

SEQ ID NO: 420345 - protein, 17 aa, Homo sapiens
  CDR3 for alpha chain variable domain of TCR clone 210173 (TRAV13-1, TRAJ28)
CAASPPYSGAGSYQLTF

SEQ ID NO: 420346 - protein, 12 aa, Homo sapiens
  CDR3 for beta chain variable domain of TCR clone 210173 (TRBV11-2, TRBJ2-2)
CASRLPTGELFF

SEQ ID NO: 420347 - protein, 15 aa, Homo sapiens
  CDR3 for alpha chain variable domain of TCR clone 210174 (TRAV3, TRAJ5)
CAVRDLDTGRRALTF

SEQ ID NO: 420348 - protein, 15 aa, Homo sapiens
  CDR3 for beta chain variable domain of TCR clone 210174 (TRBV5-1, TRBJ2-2)
CASSLAAGGSGELFF

SEQ ID NO: 420349 - protein, 16 aa, Homo sapiens
  CDR3 for alpha chain variable domain of TCR clone 210175 (TRAV30, TRAJ24)
CGTEIVDADSWGKFQF

SEQ ID NO: 420350 - protein, 13 aa, Homo sapiens
  CDR3 for beta chain variable domain of TCR clone 210175 (TRBV19, TRBJ2-1)
CQSDFRLSGEQFF

SEQ ID NO: 420351 - protein, 13 aa, Homo sapiens
  CDR3 for alpha chain variable domain of TCR clone 210176 (TRAV13-2, TRAJ16)
CAEWDSDGQKLLF

SEQ ID NO: 420352 - protein, 14 aa, Homo sapiens
  CDR3 for beta chain variable domain of TCR clone 210176 (TRBV12-5, TRBJ2-5)
CASGSRTHQETQYF

SEQ ID NO: 420353 - protein, 15 aa, Homo sapiens
  CDR3 for alpha chain variable domain of TCR clone 210177 (TRAV8-6, TRAJ6)
CAVSGESGGSYIPTF

SEQ ID NO: 420354 - protein, 14 aa, Homo sapiens
  CDR3 for beta chain variable domain of TCR clone 210177 (TRBV12-4, TRBJ1-1)
CASSLGTGGTEAFF

SEQ ID NO: 420355 - protein, 14 aa, Homo sapiens
  CDR3 for alpha chain variable domain of TCR clone 210178 (TRAV9-2, TRAJ53)
CALFSGGSNYKLTF

SEQ ID NO: 420356 - protein, 16 aa, Homo sapiens
  CDR3 for beta chain variable domain of TCR clone 210178 (TRBV10-3, TRBJ2-1)
CAISGVGDGGGGEQFF

SEQ ID NO: 420357 - protein, 17 aa, Homo sapiens
  CDR3 for alpha chain variable domain of TCR clone 210179 (TRAV13-1, TRAJ31)
CAPRDRLMFGDGTQLVV

SEQ ID NO: 420358 - protein, 15 aa, Homo sapiens
  CDR3 for beta chain variable domain of TCR clone 210179 (TRBV7-9, TRBJ1-4)
CASSRTGGFNEKLFF

SEQ ID NO: 420359 - protein, 15 aa, Homo sapiens
  CDR3 for alpha chain variable domain of TCR clone 210180 (TRAV17, TRAJ57)
CATGPSQGGSEKLVF

SEQ ID NO: 420360 - protein, 13 aa, Homo sapiens
  CDR3 for beta chain variable domain of TCR clone 210180 (TRBV12-5, TRBJ2-5)
SSGPRTHQETQYF

SEQ ID NO: 420361 - protein, 13 aa, Homo sapiens
  CDR3 for alpha chain variable domain of TCR clone 210181 (TRAV8-6, TRAJ54)
CDVSDQGAQKLVF

SEQ ID NO: 420362 - protein, 17 aa, Homo sapiens
  CDR3 for beta chain variable domain of TCR clone 210181 (TRBV19, TRBJ1-1)
CASSIAGRGLMNTEAFF

SEQ ID NO: 420363 - protein, 15 aa, Homo sapiens
  CDR3 for alpha chain variable domain of TCR clone 210182 (TRAV8-4, TRAJ40)
CAVSDDTSGPYKYIF

SEQ ID NO: 420364 - protein, 11 aa, Homo sapiens
  CDR3 for beta chain variable domain of TCR clone 210182 (TRBV19, TRBJ1-2)
CASSISSGYTF

SEQ ID NO: 420365 - protein, 14 aa, Homo sapiens
  CDR3 for alpha chain variable domain of TCR clone 210183 (TRAV8-6, TRAJ9)
CAVSSYTGGFKTIF

SEQ ID NO: 420366 - protein, 16 aa, Homo sapiens
  CDR3 for beta chain variable domain of TCR clone 210183 (TRBV12-5, TRBJ2-5)
CASGPRTSGNQETQYF

SEQ ID NO: 420367 - protein, 16 aa, Homo sapiens
  CDR3 for alpha chain variable domain of TCR clone 210184 (TRAV30, TRAJ24)
CGTEIVDADSWGKFKF

SEQ ID NO: 420368 - protein, 14 aa, Homo sapiens
  CDR3 for beta chain variable domain of TCR clone 210184 (TRBV12-5, TRBJ2-5)
CASGSRTHEETQYF

SEQ ID NO: 420369 - protein, 15 aa, Homo sapiens
  CDR3 for alpha chain variable domain of TCR clone 210185 (TRAV26-2, TRAJ50)
CILRDEETSYDKVIF

SEQ ID NO: 420370 - protein, 12 aa, Homo sapiens
  CDR3 for beta chain variable domain of TCR clone 210185 (TRBV5-7, TRBJ1-2)
CASSDGPYGDTF

SEQ ID NO: 420371 - protein, 14 aa, Homo sapiens
  CDR3 for alpha chain variable domain of TCR clone 210186 (TRAV12-2, TRAJ13)
CAVKKTGGYQKVTF

SEQ ID NO: 420372 - protein, 13 aa, Homo sapiens
  CDR3 for beta chain variable domain of TCR clone 210186 (TRBV6-4, TRBJ1-5)
CASSADLNQPQHF

SEQ ID NO: 420373 - protein, 16 aa, Homo sapiens
  CDR3 for alpha chain variable domain of TCR clone 210187 (TRAV4, TRAJ9)
CLVGDPNRPGGFKTIF

SEQ ID NO: 420374 - protein, 13 aa, Homo sapiens
  CDR3 for beta chain variable domain of TCR clone 210187 (TRBV5-5, TRBJ1-2)
CASSFGRGEDYTF

SEQ ID NO: 420375 - protein, 15 aa, Homo sapiens
  CDR3 for alpha chain variable domain of TCR clone 210188 (TRAV2, TRAJ15)
CAVEDREQAGTALIF

SEQ ID NO: 420376 - protein, 13 aa, Homo sapiens
  CDR3 for beta chain variable domain of TCR clone 210188 (TRBV15, TRBJ1-6)
CATSGGLNSPLHF

SEQ ID NO: 420377 - protein, 14 aa, Homo sapiens
  CDR3 for alpha chain variable domain of TCR clone 210189 (TRAV12-1, TRAJ22)
CVVTTSGSARQLTF

SEQ ID NO: 420378 - protein, 17 aa, Homo sapiens
  CDR3 for beta chain variable domain of TCR clone 210189 (TRBV11-2, TRBJ2-1)
CASSLYPPGVEYNEQFF

SEQ ID NO: 420379 - protein, 15 aa, Homo sapiens
  CDR3 for alpha chain variable domain of TCR clone 210190 (TRAV8-2, TRAJ21)
CVVITGKGNFNKFYF

SEQ ID NO: 420380 - protein, 14 aa, Homo sapiens
  CDR3 for beta chain variable domain of TCR clone 210190 (TRBV19, TRBJ2-1)
CASPTFVLSGEQFF

SEQ ID NO: 420381 - protein, 15 aa, Homo sapiens
  CDR3 for alpha chain variable domain of TCR clone 210191 (TRAV4, TRAJ26)
CLVGDMNNYGQNFVF

SEQ ID NO: 420382 - protein, 16 aa, Homo sapiens
  CDR3 for beta chain variable domain of TCR clone 210191 (TRBV5-1, TRBJ2-1)
CASSMRTGTEHNEQFF

SEQ ID NO: 420383 - protein, 14 aa, Homo sapiens
  CDR3 for alpha chain variable domain of TCR clone 210192 (TRAV12-2, TRAJ5)
CAVNRSTGRRAFTF

SEQ ID NO: 420384 - protein, 12 aa, Homo sapiens
  CDR3 for beta chain variable domain of TCR clone 210192 (TRBV19, TRBJ1-5)
CASSIAQQPQHF

SEQ ID NO: 420385 - protein, 12 aa, Homo sapiens
  CDR3 for alpha chain variable domain of TCR clone 210193 (TRAV8-6, TRAJ21)
CAVRPNFNKFYF

SEQ ID NO: 420386 - protein, 14 aa, Homo sapiens
  CDR3 for beta chain variable domain of TCR clone 210193 (TRBV25-1, TRBJ1-1)
CASTHLGGNTEAFF

SEQ ID NO: 420387 - protein, 12 aa, Homo sapiens
  CDR3 for alpha chain variable domain of TCR clone 210194 (TRAV8-6, TRAJ43)
CAVSHNNNGIRF

SEQ ID NO: 420388 - protein, 13 aa, Homo sapiens
  CDR3 for beta chain variable domain of TCR clone 210194 (TRBV7-3, TRBJ1-1)
CASSQDWGAEAFF

SEQ ID NO: 420389 - protein, 11 aa, Homo sapiens
  CDR3 for alpha chain variable domain of TCR clone 210195 (TRAV17, TRAJ36)
CAPTGANNLFF

SEQ ID NO: 420390 - protein, 13 aa, Homo sapiens
  CDR3 for beta chain variable domain of TCR clone 210195 (TRBV12-4, TRBJ2-7)
CASSPTATYEQYF

SEQ ID NO: 420391 - protein, 13 aa, Homo sapiens
  CDR3 for alpha chain variable domain of TCR clone 210196 (TRAV20, TRAJ21)
CAVEGYNFNKFYF

SEQ ID NO: 420392 - protein, 16 aa, Homo sapiens
  CDR3 for beta chain variable domain of TCR clone 210196 (TRBV29-1, TRBJ2-7)
CSVEVVGTSGSYEQYF

SEQ ID NO: 420393 - protein, 11 aa, Homo sapiens
  CDR3 for alpha chain variable domain of TCR clone 210197 (TRAV27, TRAJ47)
CAGAYGNKLVF

SEQ ID NO: 420394 - protein, 13 aa, Homo sapiens
  CDR3 for beta chain variable domain of TCR clone 210197 (TRBV19, TRBJ1-2)
CASSVPGQDGYTF

SEQ ID NO: 420395 - protein, 13 aa, Homo sapiens
  CDR3 for alpha chain variable domain of TCR clone 210198 (TRAV17, TRAJ9)
CATDYTGGFKTIF

SEQ ID NO: 420396 - protein, 15 aa, Homo sapiens
  CDR3 for beta chain variable domain of TCR clone 210198 (TRBV20-1, TRBJ2-7)
CSARDRVSGMDEQYF

SEQ ID NO: 420397 - protein, 13 aa, Homo sapiens
  CDR3 for alpha chain variable domain of TCR clone 210199 (TRAV12-2, TRAJ4)
CAVRSGGCNKLIF

SEQ ID NO: 420398 - protein, 15 aa, Homo sapiens
  CDR3 for beta chain variable domain of TCR clone 210199 (TRBV10-3, TRBJ2-1)
CAISDGQDRAYEQFF

SEQ ID NO: 420399 - protein, 10 aa, Homo sapiens
  CDR3 for alpha chain variable domain of TCR clone 210200 (TRAV1-2, TRAJ31)
CVSEDARLMF

SEQ ID NO: 420400 - protein, 14 aa, Homo sapiens
  CDR3 for beta chain variable domain of TCR clone 210200 (TRBV2, TRBJ2-3)
CASTAQTSTDTQYF

SEQ ID NO: 420401 - protein, 13 aa, Homo sapiens
  CDR3 for alpha chain variable domain of TCR clone 210201 (TRAV20, TRAJ21)
CAVEGCNFNKFYF

SEQ ID NO: 420402 - protein, 14 aa, Homo sapiens
  CDR3 for beta chain variable domain of TCR clone 210201 (TRBV3-1, TRBJ2-5)
CASSQGPDQETQYF

SEQ ID NO: 420403 - protein, 16 aa, Homo sapiens
  CDR3 for alpha chain variable domain of TCR clone 210202 (TRAV27, TRAJ48)
TAAQPGDTGLYLPLTF

SEQ ID NO: 420404 - protein, 15 aa, Homo sapiens
  CDR3 for beta chain variable domain of TCR clone 210202 (TRBV19, TRBJ1-5)
CASSIVWADNQPQHF

SEQ ID NO: 420405 - protein, 12 aa, Homo sapiens
  CDR3 for alpha chain variable domain of TCR clone 210203 (TRAV4, TRAJ6)
CLAPGGSYIPTF

SEQ ID NO: 420406 - protein, 15 aa, Homo sapiens
  CDR3 for beta chain variable domain of TCR clone 210203 (TRBV20-1, TRBJ2-7)
RSARDRVSGMDEQYF

SEQ ID NO: 420407 - protein, 15 aa, Homo sapiens
  CDR3 for alpha chain variable domain of TCR clone 210204 (TRAV12-1, TRAJ9)
CVVSFGDPGGFKTIF

SEQ ID NO: 420408 - protein, 19 aa, Homo sapiens
  CDR3 for beta chain variable domain of TCR clone 210204 (TRBV25-1, TRBJ2-2)
CAILVYRVDRGRKTGELFF

SEQ ID NO: 420409 - protein, 13 aa, Homo sapiens
  CDR3 for alpha chain variable domain of TCR clone 210205 (TRAV8-3, TRAJ48)
CRGCNFGNEKLTF

SEQ ID NO: 420410 - protein, 12 aa, Homo sapiens
  CDR3 for beta chain variable domain of TCR clone 210205 (TRBV7-2, TRBJ2-5)
CASSQYQETQYF

SEQ ID NO: 420411 - protein, 14 aa, Homo sapiens
  CDR3 for alpha chain variable domain of TCR clone 210206 (TRAV12-2, TRAJ5)
CAVNRSTGRRALTF

SEQ ID NO: 420412 - protein, 13 aa, Homo sapiens
  CDR3 for beta chain variable domain of TCR clone 210206 (TRBV19, TRBJ1-2)
CASSISSATPSVR

SEQ ID NO: 420413 - protein, 16 aa, Homo sapiens
  CDR3 for alpha chain variable domain of TCR clone 210207 (TRAV3, TRAJ21)
CAVRDIERGNFKKFYF

SEQ ID NO: 420414 - protein, 13 aa, Homo sapiens
  CDR3 for beta chain variable domain of TCR clone 210207 (TRBV4-2, TRBJ1-1)
CASSQAGNTEAFF

SEQ ID NO: 420415 - protein, 12 aa, Homo sapiens
  CDR3 for alpha chain variable domain of TCR clone 210208 (TRAV25, TRAJ11)
CAGYSGYSTLTF

SEQ ID NO: 420416 - protein, 12 aa, Homo sapiens
  CDR3 for beta chain variable domain of TCR clone 210208 (TRBV14, TRBJ2-7)
CASSLYKDEQYF

SEQ ID NO: 420417 - protein, 12 aa, Homo sapiens
  CDR3 for alpha chain variable domain of TCR clone 210209 (TRAV2, TRAJ10)
CASTGGGNKLTF

SEQ ID NO: 420418 - protein, 12 aa, Homo sapiens
  CDR3 for beta chain variable domain of TCR clone 210209 (TRBV19, TRBJ2-1)
CASSRQGAEQFF

SEQ ID NO: 420419 - protein, 15 aa, Homo sapiens
  CDR3 for alpha chain variable domain of TCR clone 210210 (TRAV27, TRAJ38)
CAGRFNAGNNRKLIW

SEQ ID NO: 420420 - protein, 13 aa, Homo sapiens
  CDR3 for beta chain variable domain of TCR clone 210210 (TRBV15, TRBJ2-7)
CATSTTGHYEQYF

SEQ ID NO: 420421 - protein, 14 aa, Homo sapiens
  CDR3 for alpha chain variable domain of TCR clone 210211 (TRAV23/DV6, )
CAATALIPDIQNPD

SEQ ID NO: 420422 - protein, 16 aa, Homo sapiens
  CDR3 for beta chain variable domain of TCR clone 210211 (TRBV10-3, TRBJ2-7)
CAISPRGQEQTYEQYF

SEQ ID NO: 420423 - protein, 15 aa, Homo sapiens
  CDR3 for alpha chain variable domain of TCR clone 210212 (TRAV21, TRAJ52)
CAVRGGGTRYGKLTF

SEQ ID NO: 420424 - protein, 15 aa, Homo sapiens
  CDR3 for beta chain variable domain of TCR clone 210212 (TRBV18, TRBJ1-5)
CASSPSDRSNQPQHF

SEQ ID NO: 420425 - protein, 12 aa, Homo sapiens
  CDR3 for alpha chain variable domain of TCR clone 210213 (TRAV3, TRAJ26)
CAVRDYGQNFVF

SEQ ID NO: 420426 - protein, 16 aa, Homo sapiens
  CDR3 for beta chain variable domain of TCR clone 210213 (TRBV11-2, TRBJ1-2)
SASSPSGREANYGYSF

SEQ ID NO: 420427 - protein, 16 aa, Homo sapiens
  CDR3 for alpha chain variable domain of TCR clone 210214 (TRAV30, TRAJ24)
CGTYIVDADSWGKFQF

SEQ ID NO: 420428 - protein, 14 aa, Homo sapiens
  CDR3 for beta chain variable domain of TCR clone 210214 (TRBV12-5, TRBJ2-5)
CASGSRTHQETQYF

SEQ ID NO: 420429 - protein, 14 aa, Homo sapiens
  CDR3 for alpha chain variable domain of TCR clone 210215 (TRAV2, TRAJ22)
CAVGRGGSARQLTF

SEQ ID NO: 420430 - protein, 12 aa, Homo sapiens
  CDR3 for beta chain variable domain of TCR clone 210215 (TRBV19, TRBJ2-1)
CASSRQGAEQFF

SEQ ID NO: 420431 - protein, 17 aa, Homo sapiens
  CDR3 for alpha chain variable domain of TCR clone 210216 (TRAV17, TRAJ24)
CATANSMTTDSWGKLQF

SEQ ID NO: 420432 - protein, 15 aa, Homo sapiens
  CDR3 for beta chain variable domain of TCR clone 210216 (TRBV20-1, TRBJ2-7)
CSARDRVSGMDEQYF

SEQ ID NO: 420433 - protein, 12 aa, Homo sapiens
  CDR3 for alpha chain variable domain of TCR clone 210217 (TRAV17, TRAJ20)
CATDANDYKLSF

SEQ ID NO: 420434 - protein, 14 aa, Homo sapiens
  CDR3 for beta chain variable domain of TCR clone 210217 (TRBV7-7, TRBJ2-2)
CATRQDSDTGELFF

SEQ ID NO: 420435 - protein, 12 aa, Homo sapiens
  CDR3 for alpha chain variable domain of TCR clone 210218 (TRAV12-2, TRAJ10)
WGVTGGGNKLTF

SEQ ID NO: 420436 - protein, 12 aa, Homo sapiens
  CDR3 for beta chain variable domain of TCR clone 210218 (TRBV4-1, TRBJ2-3)
CASSQGTDTQYF

SEQ ID NO: 420437 - protein, 16 aa, Homo sapiens
  CDR3 for alpha chain variable domain of TCR clone 210219 (TRAV3, TRAJ10)
CAVRDMRAGGGNKLTF

SEQ ID NO: 420438 - protein, 13 aa, Homo sapiens
  CDR3 for beta chain variable domain of TCR clone 210219 (TRBV19, TRBJ1-5)
CASSIGGNQPQHF

SEQ ID NO: 420439 - protein, 14 aa, Homo sapiens
  CDR3 for alpha chain variable domain of TCR clone 210220 (TRAV1-2, TRAJ16)
CAVNRFSDGQKLLF

SEQ ID NO: 420440 - protein, 14 aa, Homo sapiens
  CDR3 for beta chain variable domain of TCR clone 210220 (TRBV19, TRBJ2-2)
CASSTLHRSGELFL

SEQ ID NO: 420441 - protein, 12 aa, Homo sapiens
  CDR3 for alpha chain variable domain of TCR clone 210221 (TRAV12-3, TRAJ13)
CNELWGYQEVTF

SEQ ID NO: 420442 - protein, 13 aa, Homo sapiens
  CDR3 for beta chain variable domain of TCR clone 210221 (TRBV20-1, TRBJ1-1)
CSAPPGGHTEAFF

SEQ ID NO: 420443 - protein, 16 aa, Homo sapiens
  CDR3 for alpha chain variable domain of TCR clone 210222 (TRAV3, TRAJ37)
CAVRGKGSGNTGKLIF

SEQ ID NO: 420444 - protein, 12 aa, Homo sapiens
  CDR3 for beta chain variable domain of TCR clone 210222 (TRBV11-2, TRBJ2-2)
CASSLGGGELFF

SEQ ID NO: 420445 - protein, 12 aa, Homo sapiens
  CDR3 for alpha chain variable domain of TCR clone 210223 (TRAV1-1, TRAJ8)
CAGGTGFQKLVF

SEQ ID NO: 420446 - protein, 15 aa, Homo sapiens
  CDR3 for beta chain variable domain of TCR clone 210223 (TRBV7-9, TRBJ1-4)
CASSRTGGFNEKLFY

SEQ ID NO: 420447 - protein, 14 aa, Homo sapiens
  CDR3 for alpha chain variable domain of TCR clone 210224 (TRAV2, TRAJ9)
CAVEDRSGGFKTIF

SEQ ID NO: 420448 - protein, 13 aa, Homo sapiens
  CDR3 for beta chain variable domain of TCR clone 210224 (TRBV7-9, TRBJ1-2)
CASSLKQNYGDTF

SEQ ID NO: 420449 - protein, 16 aa, Homo sapiens
  CDR3 for alpha chain variable domain of TCR clone 210225 (TRAV3, TRAJ23)
CAVEPLIYNQGGKLIF

SEQ ID NO: 420450 - protein, 12 aa, Homo sapiens
  CDR3 for beta chain variable domain of TCR clone 210225 (TRBV24-1, TRBJ1-1)
CATLYPDTEAFF

SEQ ID NO: 420451 - protein, 15 aa, Homo sapiens
  CDR3 for alpha chain variable domain of TCR clone 210226 (TRAV23/DV6, TRAJ33)
CAASNSGGANYPLIW

SEQ ID NO: 420452 - protein, 14 aa, Homo sapiens
  CDR3 for beta chain variable domain of TCR clone 210226 (TRBV7-2, TRBJ2-7)
CASSLYPGRYEQYF

SEQ ID NO: 420453 - protein, 14 aa, Homo sapiens
  CDR3 for alpha chain variable domain of TCR clone 210227 (TRAV1-2, TRAJ8)
CAVREDTGFLKLVF

SEQ ID NO: 420454 - protein, 13 aa, Homo sapiens
  CDR3 for beta chain variable domain of TCR clone 210227 (TRBV10-3, TRBJ2-7)
CASKLAVNYEQYF

SEQ ID NO: 420455 - protein, 18 aa, Homo sapiens
  CDR3 for alpha chain variable domain of TCR clone 210228 (TRAV21, TRAJ52)
CAVRPSPAGGTSFGKLTF

SEQ ID NO: 420456 - protein, 13 aa, Homo sapiens
  CDR3 for beta chain variable domain of TCR clone 210228 (TRBV27, TRBJ1-1)
CASSLSIGAEAFF

SEQ ID NO: 420457 - protein, 13 aa, Homo sapiens
  CDR3 for alpha chain variable domain of TCR clone 210229 (TRAV3, TRAJ21)
CAVREPDSNKFYF

SEQ ID NO: 420458 - protein, 13 aa, Homo sapiens
  CDR3 for beta chain variable domain of TCR clone 210229 (TRBV9, TRBJ2-1)
CAGSPSGGNEQFF

SEQ ID NO: 420459 - protein, 13 aa, Homo sapiens
  CDR3 for alpha chain variable domain of TCR clone 210230 (TRAV12-2, TRAJ37)
CAGGSGNTGKLIF

SEQ ID NO: 420460 - protein, 13 aa, Homo sapiens
  CDR3 for beta chain variable domain of TCR clone 210230 (TRBV6-1, TRBJ1-1)
CASSRQGNTEAFF

SEQ ID NO: 420461 - protein, 13 aa, Homo sapiens
  CDR3 for alpha chain variable domain of TCR clone 210231 (TRAV2, TRAJ40)
CAVVTSGTYKDIF

SEQ ID NO: 420462 - protein, 14 aa, Homo sapiens
  CDR3 for beta chain variable domain of TCR clone 210231 (TRBV19, TRBJ2-1)
CASPTFVLSGEQFL

SEQ ID NO: 420463 - protein, 12 aa, Homo sapiens
  CDR3 for alpha chain variable domain of TCR clone 210232 (TRAV27, TRAJ9)
CAGESGGFTPIF

SEQ ID NO: 420464 - protein, 14 aa, Homo sapiens
  CDR3 for beta chain variable domain of TCR clone 210232 (TRBV6-1, TRBJ2-1)
CASAKDRFYNEHFF

SEQ ID NO: 420465 - protein, 14 aa, Homo sapiens
  CDR3 for alpha chain variable domain of TCR clone 210233 (TRAV12-3, TRAJ10)
SHLPLTGGGNKLTF

SEQ ID NO: 420466 - protein, 12 aa, Homo sapiens
  CDR3 for beta chain variable domain of TCR clone 210233 (TRBV6-6, TRBJ2-3)
CASSARGDTQYF

SEQ ID NO: 420467 - protein, 14 aa, Homo sapiens
  CDR3 for alpha chain variable domain of TCR clone 210234 (TRAV26-1, TRAJ39)
CIVFTNNAGNMLTF

SEQ ID NO: 420468 - protein, 15 aa, Homo sapiens
  CDR3 for beta chain variable domain of TCR clone 210234 (TRBV15, TRBJ1-3)
CATSRDRGPGNTIYF

SEQ ID NO: 420469 - protein, 15 aa, Homo sapiens
  CDR3 for alpha chain variable domain of TCR clone 210235 (TRAV8-3, TRAJ7)
CAVGSISYGNNRLAF

SEQ ID NO: 420470 - protein, 15 aa, Homo sapiens
  CDR3 for beta chain variable domain of TCR clone 210235 (TRBV4-2, TRBJ1-1)
CASRQEDRPRTEAFF

SEQ ID NO: 420471 - protein, 14 aa, Homo sapiens
  CDR3 for alpha chain variable domain of TCR clone 210236 (TRAV1-2, TRAJ16)
CAVNRFSDGHKLLF

SEQ ID NO: 420472 - protein, 12 aa, Homo sapiens
  CDR3 for beta chain variable domain of TCR clone 210236 (TRBV7-6, TRBJ2-7)
CASSLADSEQYF

SEQ ID NO: 420473 - protein, 14 aa, Homo sapiens
  CDR3 for alpha chain variable domain of TCR clone 210237 (TRAV21, TRAJ21)
CAVGVEDNFNKFYF

SEQ ID NO: 420474 - protein, 15 aa, Homo sapiens
  CDR3 for beta chain variable domain of TCR clone 210237 (TRBV2, TRBJ2-7)
CASTLLGSGATEQYF

SEQ ID NO: 420475 - protein, 18 aa, Homo sapiens
  CDR3 for alpha chain variable domain of TCR clone 210238 (TRAV26-1, TRAJ52)
CIVRVEGAGGTSYGKLTF

SEQ ID NO: 420476 - protein, 14 aa, Homo sapiens
  CDR3 for beta chain variable domain of TCR clone 210238 (TRBV11-2, TRBJ2-5)
CASSRTGGIETQYF

SEQ ID NO: 420477 - protein, 13 aa, Homo sapiens
  CDR3 for alpha chain variable domain of TCR clone 210239 (TRAV12-3, TRAJ33)
CAMSLNSNYQLIW

SEQ ID NO: 420478 - protein, 13 aa, Homo sapiens
  CDR3 for beta chain variable domain of TCR clone 210239 (TRBV7-2, TRBJ2-2)
CASSLAVTGELVF

SEQ ID NO: 420479 - protein, 15 aa, Homo sapiens
  CDR3 for alpha chain variable domain of TCR clone 210240 (TRAV1-2, TRAJ32)
CAVRGHGGATNKLIF

SEQ ID NO: 420480 - protein, 15 aa, Homo sapiens
  CDR3 for beta chain variable domain of TCR clone 210240 (TRBV25-1, TRBJ2-5)
CASSDTGTHQETQYF

SEQ ID NO: 420481 - protein, 13 aa, Homo sapiens
  CDR3 for alpha chain variable domain of TCR clone 210241 (TRAV1-1, TRAJ9)
CAAKNTGGFKTIF

SEQ ID NO: 420482 - protein, 18 aa, Homo sapiens
  CDR3 for beta chain variable domain of TCR clone 210241 (TRBV7-9, TRBJ2-7)
CASSLTTSGSRTWYEQYF

SEQ ID NO: 420483 - protein, 14 aa, Homo sapiens
  CDR3 for alpha chain variable domain of TCR clone 210242 (TRAV1-2, TRAJ16)
CAVNRLSDGQKLLF

SEQ ID NO: 420484 - protein, 20 aa, Homo sapiens
  CDR3 for beta chain variable domain of TCR clone 210242 (TRBV7-8, TRBJ2-2)
CASSHLFPGPTIHITGELFF

SEQ ID NO: 420485 - protein, 13 aa, Homo sapiens
  CDR3 for alpha chain variable domain of TCR clone 210243 (TRAV21, TRAJ15)
CAVANQAGTALIF

SEQ ID NO: 420486 - protein, 15 aa, Homo sapiens
  CDR3 for beta chain variable domain of TCR clone 210243 (TRBV7-2, TRBJ2-1)
CASTHGTGIYNEQFF

SEQ ID NO: 420487 - protein, 13 aa, Homo sapiens
  CDR3 for alpha chain variable domain of TCR clone 210244 (TRAV3, TRAJ43)
CAVKARNNNDMRF

SEQ ID NO: 420488 - protein, 16 aa, Homo sapiens
  CDR3 for beta chain variable domain of TCR clone 210244 (TRBV7-9, TRBJ2-3)
CPSSFSVAGGTDTQYF

SEQ ID NO: 420489 - protein, 16 aa, Homo sapiens
  CDR3 for alpha chain variable domain of TCR clone 210245 (TRAV1-2, TRAJ10)
CAVRGVLTGGGNKLTF

SEQ ID NO: 420490 - protein, 15 aa, Homo sapiens
  CDR3 for beta chain variable domain of TCR clone 210245 (TRBV19, TRBJ2-7)
CASSIGGGLVNEQYF

SEQ ID NO: 420491 - protein, 11 aa, Homo sapiens
  CDR3 for alpha chain variable domain of TCR clone 210246 (TRAV21, TRAJ34)
CAVTNTDKLIF

SEQ ID NO: 420492 - protein, 18 aa, Homo sapiens
  CDR3 for beta chain variable domain of TCR clone 210246 (TRBV11-2, TRBJ2-3)
CASSLGAASRGAPNTQYF

SEQ ID NO: 420493 - protein, 14 aa, Homo sapiens
  CDR3 for alpha chain variable domain of TCR clone 210247 (TRAV2, TRAJ9)
CAVEDRSGGFKTIF

SEQ ID NO: 420494 - protein, 17 aa, Homo sapiens
  CDR3 for beta chain variable domain of TCR clone 210247 (TRBV27, TRBJ2-6)
CASSLTGFASGANVLTF

SEQ ID NO: 420495 - protein, 15 aa, Homo sapiens
  CDR3 for alpha chain variable domain of TCR clone 210248 (TRAV13-1, TRAJ10)
CVAEVVTGGGNKLTF

SEQ ID NO: 420496 - protein, 13 aa, Homo sapiens
  CDR3 for beta chain variable domain of TCR clone 210248 (TRBV28, TRBJ2-5)
CAGVSRGEETQYL

SEQ ID NO: 420497 - protein, 15 aa, Homo sapiens
  CDR3 for alpha chain variable domain of TCR clone 210249 (TRAV4, TRAJ28)
CLVERSGAGSYQLTF

SEQ ID NO: 420498 - protein, 15 aa, Homo sapiens
  CDR3 for beta chain variable domain of TCR clone 210249 (TRBV9, TRBJ2-3)
CASSVRGLAVDTQYF

SEQ ID NO: 420499 - protein, 16 aa, Homo sapiens
  CDR3 for alpha chain variable domain of TCR clone 210250 (TRAV3, TRAJ37)
CAVRPPGSGNTGKLIF

SEQ ID NO: 420500 - protein, 17 aa, Homo sapiens
  CDR3 for beta chain variable domain of TCR clone 210250 (TRBV20-1, TRBJ2-1)
CSASSSGLAGSYNEQFF

SEQ ID NO: 420501 - protein, 15 aa, Homo sapiens
  CDR3 for alpha chain variable domain of TCR clone 210251 (TRAV27, TRAJ38)
CAAHRNAGNNRKLTW

SEQ ID NO: 420502 - protein, 15 aa, Homo sapiens
  CDR3 for beta chain variable domain of TCR clone 210251 (TRBV5-1, TRBJ2-1)
CASSPPRAPYNEQFF

SEQ ID NO: 420503 - protein, 14 aa, Homo sapiens
  CDR3 for alpha chain variable domain of TCR clone 210252 (TRAV13-2, TRAJ5)
CAETAGHGQESTYF

SEQ ID NO: 420504 - protein, 16 aa, Homo sapiens
  CDR3 for beta chain variable domain of TCR clone 210252 (TRBV20-1, TRBJ1-4)
CSAPGQGLLTNEKLFF

SEQ ID NO: 420505 - protein, 14 aa, Homo sapiens
  CDR3 for alpha chain variable domain of TCR clone 210253 (TRAV8-2, TRAJ37)
CVVSISGNTGKLIF

SEQ ID NO: 420506 - protein, 11 aa, Homo sapiens
  CDR3 for beta chain variable domain of TCR clone 210253 (TRBV18, TRBJ2-5)
RASSPRETQYF

SEQ ID NO: 420507 - protein, 15 aa, Homo sapiens
  CDR3 for alpha chain variable domain of TCR clone 210254 (TRAV17, TRAJ56)
CATEPFTGATSKLTF

SEQ ID NO: 420508 - protein, 14 aa, Homo sapiens
  CDR3 for beta chain variable domain of TCR clone 210254 (TRBV19, TRBJ2-1)
CASPTFVLSGEQFF

SEQ ID NO: 420509 - protein, 17 aa, Homo sapiens
  CDR3 for alpha chain variable domain of TCR clone 210255 (TRAV3, TRAJ6)
CGVSRRTDTGGSYIPTF

SEQ ID NO: 420510 - protein, 18 aa, Homo sapiens
  CDR3 for beta chain variable domain of TCR clone 210255 (TRBV7-2, TRBJ2-3)
CASSLETSRGRKADTQYF

SEQ ID NO: 420511 - protein, 13 aa, Homo sapiens
  CDR3 for alpha chain variable domain of TCR clone 210256 (TRAV8-4, TRAJ27)
CAVSPRNAGKSTY

SEQ ID NO: 420512 - protein, 17 aa, Homo sapiens
  CDR3 for beta chain variable domain of TCR clone 210256 (TRBV19, TRBJ2-3)
CASSIDPAGGGTDTQYF

SEQ ID NO: 420513 - protein, 13 aa, Homo sapiens
  CDR3 for alpha chain variable domain of TCR clone 210257 (TRAV12-3, TRAJ53)
CAMCGGSNYKLTF

SEQ ID NO: 420514 - protein, 15 aa, Homo sapiens
  CDR3 for beta chain variable domain of TCR clone 210257 (TRBV2, TRBJ2-1)
CATQARLVMIGEQFF

SEQ ID NO: 420515 - protein, 15 aa, Homo sapiens
  CDR3 for alpha chain variable domain of TCR clone 210258 (TRAV3, TRAJ42)
CAVRGGTGSQGNLIF

SEQ ID NO: 420516 - protein, 16 aa, Homo sapiens
  CDR3 for beta chain variable domain of TCR clone 210258 (TRBV12-5, TRBJ2-5)
CASGPRTSGNQETQYF

SEQ ID NO: 420517 - protein, 15 aa, Homo sapiens
  CDR3 for alpha chain variable domain of TCR clone 210259 (TRAV2, TRAJ9)
CAVEDRGTGGFKTIF

SEQ ID NO: 420518 - protein, 15 aa, Homo sapiens
  CDR3 for beta chain variable domain of TCR clone 210259 (TRBV7-2, TRBJ2-1)
CPSSSGLAGGNEQFF

SEQ ID NO: 420519 - protein, 14 aa, Homo sapiens
  CDR3 for alpha chain variable domain of TCR clone 210260 (TRAV30, TRAJ33)
CGTVAPRSNYQLIW

SEQ ID NO: 420520 - protein, 14 aa, Homo sapiens
  CDR3 for beta chain variable domain of TCR clone 210260 (TRBV5-5, TRBJ1-5)
CASSGQGVDRPQHF

SEQ ID NO: 420521 - protein, 11 aa, Homo sapiens
  CDR3 for alpha chain variable domain of TCR clone 210261 (TRAV21, TRAJ34)
CAVTNTDKLIF

SEQ ID NO: 420522 - protein, 15 aa, Homo sapiens
  CDR3 for beta chain variable domain of TCR clone 210261 (TRBV5-5, TRBJ2-7)
CASSLAAPLSYEQYF

SEQ ID NO: 420523 - protein, 13 aa, Homo sapiens
  CDR3 for alpha chain variable domain of TCR clone 210262 (TRAV17, TRAJ5)
CAPMDTGRRALTF

SEQ ID NO: 420524 - protein, 16 aa, Homo sapiens
  CDR3 for beta chain variable domain of TCR clone 210262 (TRBV7-7, TRBJ2-1)
CASSLASGTSYNEQFF

SEQ ID NO: 420525 - protein, 17 aa, Homo sapiens
  CDR3 for alpha chain variable domain of TCR clone 210263 (TRAV17, TRAJ52)
CATERHSGGTSYGKLTF

SEQ ID NO: 420526 - protein, 13 aa, Homo sapiens
  CDR3 for beta chain variable domain of TCR clone 210263 (TRBV7-9, TRBJ1-2)
CASSLKQNYGYTF

SEQ ID NO: 420527 - protein, 17 aa, Homo sapiens
  CDR3 for alpha chain variable domain of TCR clone 210264 (TRAV4, TRAJ42)
CLVGVLNYGGSQGNLIL

SEQ ID NO: 420528 - protein, 12 aa, Homo sapiens
  CDR3 for beta chain variable domain of TCR clone 210264 (TRBV20-1, TRBJ2-1)
CSAQYTYNEQFL

SEQ ID NO: 420529 - protein, 18 aa, Homo sapiens
  CDR3 for alpha chain variable domain of TCR clone 210265 (TRAV12-3, TRAJ52)
CAMSRTNAGGTSYGKLTF

SEQ ID NO: 420530 - protein, 15 aa, Homo sapiens
  CDR3 for beta chain variable domain of TCR clone 210265 (TRBV19, TRBJ1-2)
CASSVGQVLNYGDTF

SEQ ID NO: 420531 - protein, 14 aa, Homo sapiens
  CDR3 for alpha chain variable domain of TCR clone 210266 (TRAV12-2, TRAJ5)
CAVNRSTGRRALTF

SEQ ID NO: 420532 - protein, 12 aa, Homo sapiens
  CDR3 for beta chain variable domain of TCR clone 210266 (TRBV19, TRBJ1-5)
CASSIAQQPQHF

SEQ ID NO: 420533 - protein, 17 aa, Homo sapiens
  CDR3 for alpha chain variable domain of TCR clone 210267 (TRAV26-2, TRAJ28)
CILRPLLIVAGCYQLTF

SEQ ID NO: 420534 - protein, 16 aa, Homo sapiens
  CDR3 for beta chain variable domain of TCR clone 210267 (TRBV6-4, TRBJ1-4)
CASSETGQDPNEKLFF

SEQ ID NO: 420535 - protein, 18 aa, Homo sapiens
  CDR3 for alpha chain variable domain of TCR clone 210268 (TRAV12-3, TRAJ52)
CAMSVGGAGGASYGKLTF

SEQ ID NO: 420536 - protein, 13 aa, Homo sapiens
  CDR3 for beta chain variable domain of TCR clone 210268 (TRBV20-1, TRBJ1-1)
CSAPLGGGTEAFF

SEQ ID NO: 420537 - protein, 17 aa, Homo sapiens
  CDR3 for alpha chain variable domain of TCR clone 210269 (TRAV29/DV5, TRAJ10)
CSVLLGRDTGGGNKLTF

SEQ ID NO: 420538 - protein, 12 aa, Homo sapiens
  CDR3 for beta chain variable domain of TCR clone 210269 (TRBV5-1, TRBJ1-2)
CASSQDTYGYTF

SEQ ID NO: 420539 - protein, 15 aa, Homo sapiens
  CDR3 for alpha chain variable domain of TCR clone 210270 (TRAV23/DV6, TRAJ30)
CAAGSQESRDDKIIF

SEQ ID NO: 420540 - protein, 16 aa, Homo sapiens
  CDR3 for beta chain variable domain of TCR clone 210270 (TRBV2, TRBJ2-4)
CASSEAPGGEQNIQYF

SEQ ID NO: 420541 - protein, 15 aa, Homo sapiens
  CDR3 for alpha chain variable domain of TCR clone 210271 (TRAV2, TRAJ22)
CAVPSRGCSARQLAF

SEQ ID NO: 420542 - protein, 11 aa, Homo sapiens
  CDR3 for beta chain variable domain of TCR clone 210271 (TRBV27, TRBJ2-3)
CASSLGDTQYF

SEQ ID NO: 420543 - protein, 12 aa, Homo sapiens
  CDR3 for alpha chain variable domain of TCR clone 210272 (TRAV25, TRAJ5)
CAGGGAGEHLLL

SEQ ID NO: 420544 - protein, 15 aa, Homo sapiens
  CDR3 for beta chain variable domain of TCR clone 210272 (TRBV20-1, TRBJ2-7)
CSARDRVSGMDEQYF

SEQ ID NO: 420545 - protein, 14 aa, Homo sapiens
  CDR3 for alpha chain variable domain of TCR clone 210273 (TRAV12-1, TRAJ26)
CVVKGSNYGQNFVF

SEQ ID NO: 420546 - protein, 12 aa, Homo sapiens
  CDR3 for beta chain variable domain of TCR clone 210273 (TRBV12-5, TRBJ2-5)
CASGQGVETQYF

SEQ ID NO: 420547 - protein, 12 aa, Homo sapiens
  CDR3 for alpha chain variable domain of TCR clone 210274 (TRAV30, TRAJ43)
CGTEERGNDLRF

SEQ ID NO: 420548 - protein, 13 aa, Homo sapiens
  CDR3 for beta chain variable domain of TCR clone 210274 (TRBV27, TRBJ2-7)
CASSFSQGYEQYF

SEQ ID NO: 420549 - protein, 14 aa, Homo sapiens
  CDR3 for alpha chain variable domain of TCR clone 210275 (TRAV26-1, TRAJ44)
CISPLPGTASKLTF

SEQ ID NO: 420550 - protein, 16 aa, Homo sapiens
  CDR3 for beta chain variable domain of TCR clone 210275 (TRBV19, TRBJ2-1)
CASSKAGPSSYNEQFL

SEQ ID NO: 420551 - protein, 13 aa, Homo sapiens
  CDR3 for alpha chain variable domain of TCR clone 210276 (TRAV36/DV7, TRAJ49)
CAGDSNTGNQFYF

SEQ ID NO: 420552 - protein, 14 aa, Homo sapiens
  CDR3 for beta chain variable domain of TCR clone 210276 (TRBV20-1, TRBJ2-3)
CSARGGTSTDTQYF

SEQ ID NO: 420553 - protein, 18 aa, Homo sapiens
  CDR3 for alpha chain variable domain of TCR clone 210277 (TRAV13-1, TRAJ52)
CAAKNPNAGGTSYGKLKF

SEQ ID NO: 420554 - protein, 14 aa, Homo sapiens
  CDR3 for beta chain variable domain of TCR clone 210277 (TRBV7-3, TRBJ2-1)
CASSLAGGTNEQFF

SEQ ID NO: 420555 - protein, 14 aa, Homo sapiens
  CDR3 for alpha chain variable domain of TCR clone 210278 (TRAV12-3, TRAJ29)
CAMTLLSGNTPLVF

SEQ ID NO: 420556 - protein, 16 aa, Homo sapiens
  CDR3 for beta chain variable domain of TCR clone 210278 (TRBV28, TRBJ2-7)
CASSSGTSGRGYEQYF

SEQ ID NO: 420557 - protein, 15 aa, Homo sapiens
  CDR3 for alpha chain variable domain of TCR clone 210279 (TRAV21, TRAJ53)
CATLNSGGSNYKLTF

SEQ ID NO: 420558 - protein, 15 aa, Homo sapiens
  CDR3 for beta chain variable domain of TCR clone 210279 (TRBV11-3, TRBJ2-3)
CASSAGTVVTNTQYF

SEQ ID NO: 420559 - protein, 16 aa, Homo sapiens
  CDR3 for alpha chain variable domain of TCR clone 210280 (TRAV30, TRAJ24)
CGPEIVDADSWGKFQF

SEQ ID NO: 420560 - protein, 17 aa, Homo sapiens
  CDR3 for beta chain variable domain of TCR clone 210280 (TRBV20-1, TRBJ2-1)
CSARDRRRASSYNEQFF

SEQ ID NO: 420561 - protein, 12 aa, Homo sapiens
  CDR3 for alpha chain variable domain of TCR clone 210281 (TRAV26-1, TRAJ36)
CIVRVRADNLFF

SEQ ID NO: 420562 - protein, 12 aa, Homo sapiens
  CDR3 for beta chain variable domain of TCR clone 210281 (TRBV12-4, TRBJ2-7)
CASSLGGYEQYF

SEQ ID NO: 420563 - protein, 18 aa, Homo sapiens
  CDR3 for alpha chain variable domain of TCR clone 210282 (TRAV29/DV5, TRAJ52)
CAAGFRGSGGTSYGKLTF

SEQ ID NO: 420564 - protein, 14 aa, Homo sapiens
  CDR3 for beta chain variable domain of TCR clone 210282 (TRBV20-1, TRBJ2-7)
CSAKRGRSSYEQYF

SEQ ID NO: 420565 - protein, 14 aa, Homo sapiens
  CDR3 for alpha chain variable domain of TCR clone 210283 (TRAV12-2, TRAJ17)
CAALFKAAGNKLTF

SEQ ID NO: 420566 - protein, 16 aa, Homo sapiens
  CDR3 for beta chain variable domain of TCR clone 210283 (TRBV7-3, TRBJ2-1)
CASSPGAGTYYNEQFF

SEQ ID NO: 420567 - protein, 11 aa, Homo sapiens
  CDR3 for alpha chain variable domain of TCR clone 210284 (TRAV1-1, TRAJ5)
CAVRVRRALAF

SEQ ID NO: 420568 - protein, 14 aa, Homo sapiens
  CDR3 for beta chain variable domain of TCR clone 210284 (TRBV4-1, TRBJ2-2)
CASSQAVNTGELFF

SEQ ID NO: 420569 - protein, 13 aa, Homo sapiens
  CDR3 for alpha chain variable domain of TCR clone 210285 (TRAV8-3, TRAJ48)
CAVVPFGNEELTF

SEQ ID NO: 420570 - protein, 19 aa, Homo sapiens
  CDR3 for beta chain variable domain of TCR clone 210285 (TRBV25-1, TRBJ2-2)
CAILVYRVDRGRKTGELFF

SEQ ID NO: 420571 - protein, 16 aa, Homo sapiens
  CDR3 for alpha chain variable domain of TCR clone 210286 (TRAV26-1, TRAJ37)
CIVRGDGSGNTGKLIF

SEQ ID NO: 420572 - protein, 13 aa, Homo sapiens
  CDR3 for beta chain variable domain of TCR clone 210286 (TRBV19, TRBJ2-2)
CASKVSAAGELFF

SEQ ID NO: 420573 - protein, 12 aa, Homo sapiens
  CDR3 for alpha chain variable domain of TCR clone 210287 (TRAV16, TRAJ21)
CALLGNFNKFYF

SEQ ID NO: 420574 - protein, 16 aa, Homo sapiens
  CDR3 for beta chain variable domain of TCR clone 210287 (TRBV24-1, TRBJ2-3)
CATSDPGTGATDTQYF

SEQ ID NO: 420575 - protein, 16 aa, Homo sapiens
  CDR3 for alpha chain variable domain of TCR clone 210288 (TRAV35, TRAJ28)
CAGYLYSGAGSYQLTF

SEQ ID NO: 420576 - protein, 16 aa, Homo sapiens
  CDR3 for beta chain variable domain of TCR clone 210288 (TRBV5-1, TRBJ2-1)
CASSHGLAGRQNEQFF

SEQ ID NO: 420577 - protein, 15 aa, Homo sapiens
  CDR3 for alpha chain variable domain of TCR clone 210289 (TRAV2, TRAJ15)
CAVEDSNQAGTALIF

SEQ ID NO: 420578 - protein, 13 aa, Homo sapiens
  CDR3 for beta chain variable domain of TCR clone 210289 (TRBV10-2, TRBJ2-1)
CASGASGDAKQFF

SEQ ID NO: 420579 - protein, 23 aa, Homo sapiens
  CDR3 for alpha chain variable domain of TCR clone 210290 (TRAV26-1, TRAJ38)
CIADNAGNNHIQNPDPAVYQLSD

SEQ ID NO: 420580 - protein, 20 aa, Homo sapiens
  CDR3 for beta chain variable domain of TCR clone 210290 (TRBV28, TRBJ2-1)
CASTPIGRSPGLAGGNEQFF

SEQ ID NO: 420581 - protein, 14 aa, Homo sapiens
  CDR3 for alpha chain variable domain of TCR clone 210291 (TRAV26-1, TRAJ39)
CIVRGSRAGNMLTF

SEQ ID NO: 420582 - protein, 16 aa, Homo sapiens
  CDR3 for beta chain variable domain of TCR clone 210291 (TRBV11-2, TRBJ2-7)
CASSTVTAPKTYEQYF

SEQ ID NO: 420583 - protein, 12 aa, Homo sapiens
  CDR3 for alpha chain variable domain of TCR clone 210292 (TRAV13-1, TRAJ15)
CAASQAGTAMIF

SEQ ID NO: 420584 - protein, 18 aa, Homo sapiens
  CDR3 for beta chain variable domain of TCR clone 210292 (TRBV7-9, TRBJ2-3)
CASSLPINGQISTDTQYF

SEQ ID NO: 420585 - protein, 14 aa, Homo sapiens
  CDR3 for alpha chain variable domain of TCR clone 210293 (TRAV17, TRAJ57)
CATDPQGGSEKLVF

SEQ ID NO: 420586 - protein, 16 aa, Homo sapiens
  CDR3 for beta chain variable domain of TCR clone 210293 (TRBV11-2, TRBJ2-1)
CASSPRLAGVYNEQFF

SEQ ID NO: 420587 - protein, 11 aa, Homo sapiens
  CDR3 for alpha chain variable domain of TCR clone 210294 (TRAV12-2, TRAJ31)
CSVTRWARLKF

SEQ ID NO: 420588 - protein, 15 aa, Homo sapiens
  CDR3 for beta chain variable domain of TCR clone 210294 (TRBV19, TRBJ2-7)
CASSIGGGLVNEQYF

SEQ ID NO: 420589 - protein, 11 aa, Homo sapiens
  CDR3 for alpha chain variable domain of TCR clone 210295 (TRAV1-1, TRAJ23)
CAVRQVGKLIF

SEQ ID NO: 420590 - protein, 20 aa, Homo sapiens
  CDR3 for beta chain variable domain of TCR clone 210295 (TRBV7-8, TRBJ2-2)
CASSHLFPGPTIHITGELVF

SEQ ID NO: 420591 - protein, 10 aa, Homo sapiens
  CDR3 for alpha chain variable domain of TCR clone 210296 (TRAV26-1, TRAJ52)
CGTSYGKLTF

SEQ ID NO: 420592 - protein, 15 aa, Homo sapiens
  CDR3 for beta chain variable domain of TCR clone 210296 (TRBV29-1, TRBJ2-1)
CSGRDRKSSYNEQFF

SEQ ID NO: 420593 - protein, 12 aa, Homo sapiens
  CDR3 for alpha chain variable domain of TCR clone 210297 (TRAV12-3, TRAJ52)
AAGGTSYGKLTF

SEQ ID NO: 420594 - protein, 13 aa, Homo sapiens
  CDR3 for beta chain variable domain of TCR clone 210297 (TRBV20-1, TRBJ2-5)
CSARGDYQETQYF

SEQ ID NO: 420595 - protein, 17 aa, Homo sapiens
  CDR3 for alpha chain variable domain of TCR clone 210298 (TRAV1-2, TRAJ8)
CAVRDPDEKTGFQKLIF

SEQ ID NO: 420596 - protein, 16 aa, Homo sapiens
  CDR3 for beta chain variable domain of TCR clone 210298 (TRBV7-9, TRBJ2-2)
CASSGFGGANTGELFF

SEQ ID NO: 420597 - protein, 12 aa, Homo sapiens
  CDR3 for alpha chain variable domain of TCR clone 210299 (TRAV8-3, TRAJ43)
CAVGAGNNDMRF

SEQ ID NO: 420598 - protein, 14 aa, Homo sapiens
  CDR3 for beta chain variable domain of TCR clone 210299 (TRBV4-2, TRBJ1-5)
CASSRDRGNQSQHF

SEQ ID NO: 420599 - protein, 14 aa, Homo sapiens
  CDR3 for alpha chain variable domain of TCR clone 210300 (TRAV26-1, TRAJ34)
CIVRVAYNSDKLIF

SEQ ID NO: 420600 - protein, 19 aa, Homo sapiens
  CDR3 for beta chain variable domain of TCR clone 210300 (TRBV25-1, TRBJ2-2)
CAILVYRVDRGRKTGELFF

SEQ ID NO: 420601 - protein, 13 aa, Homo sapiens
  CDR3 for alpha chain variable domain of TCR clone 210301 (TRAV8-3, TRAJ28)
CAVGAVGSYQLTF

SEQ ID NO: 420602 - protein, 16 aa, Homo sapiens
  CDR3 for beta chain variable domain of TCR clone 210301 (TRBV7-3, TRBJ2-1)
CASSSIRRAPTMSSSS

SEQ ID NO: 420603 - protein, 16 aa, Homo sapiens
  CDR3 for alpha chain variable domain of TCR clone 210302 (TRAV12-2, TRAJ32)
CAVTLGQGGATNKLIF

SEQ ID NO: 420604 - protein, 15 aa, Homo sapiens
  CDR3 for beta chain variable domain of TCR clone 210302 (TRBV27, TRBJ2-1)
CASSNGGGSSNEQFF

SEQ ID NO: 420605 - protein, 14 aa, Homo sapiens
  CDR3 for alpha chain variable domain of TCR clone 210303 (TRAV3, TRAJ8)
CAVSLNTGSQKLVF

SEQ ID NO: 420606 - protein, 15 aa, Homo sapiens
  CDR3 for beta chain variable domain of TCR clone 210303 (TRBV6-6, TRBJ1-1)
CASSPRGDVETEAFF

SEQ ID NO: 420607 - protein, 11 aa, Homo sapiens
  CDR3 for alpha chain variable domain of TCR clone 210304 (TRAV3, TRAJ21)
CAMCNFNKFYF

SEQ ID NO: 420608 - protein, 16 aa, Homo sapiens
  CDR3 for beta chain variable domain of TCR clone 210304 (TRBV19, TRBJ2-1)
CASGKAGPSSYNEQFF

SEQ ID NO: 420609 - protein, 14 aa, Homo sapiens
  CDR3 for alpha chain variable domain of TCR clone 210305 (TRAV3, TRAJ37)
CAVKESGKTGKLIF

SEQ ID NO: 420610 - protein, 14 aa, Homo sapiens
  CDR3 for beta chain variable domain of TCR clone 210305 (TRBV20-1, TRBJ2-7)
CSAKRGRSSYEQYF

SEQ ID NO: 420611 - protein, 15 aa, Homo sapiens
  CDR3 for alpha chain variable domain of TCR clone 210306 (TRAV8-1, TRAJ6)
CAVNAGAGGSYIPAF

SEQ ID NO: 420612 - protein, 14 aa, Homo sapiens
  CDR3 for beta chain variable domain of TCR clone 210306 (TRBV25-1, TRBJ1-6)
CASSLSADISPLHF

SEQ ID NO: 420613 - protein, 15 aa, Homo sapiens
  CDR3 for alpha chain variable domain of TCR clone 210307 (TRAV13-1, TRAJ15)
CAASIEREAGTALIF

SEQ ID NO: 420614 - protein, 13 aa, Homo sapiens
  CDR3 for beta chain variable domain of TCR clone 210307 (TRBV5-1, TRBJ2-7)
CASSATGGNEQYF

SEQ ID NO: 420615 - protein, 12 aa, Homo sapiens
  CDR3 for alpha chain variable domain of TCR clone 210308 (TRAV4, TRAJ21)
CLVGDNFNKFYF

SEQ ID NO: 420616 - protein, 17 aa, Homo sapiens
  CDR3 for beta chain variable domain of TCR clone 210308 (TRBV3-1, TRBJ2-7)
CASSQGLTGLSSYEQYF

SEQ ID NO: 420617 - protein, 15 aa, Homo sapiens
  CDR3 for alpha chain variable domain of TCR clone 210309 (TRAV27, TRAJ38)
CAARRNAGDNRKPIW

SEQ ID NO: 420618 - protein, 13 aa, Homo sapiens
  CDR3 for beta chain variable domain of TCR clone 210309 (TRBV12-5, TRBJ2-3)
CASGDRQSDTQYF

SEQ ID NO: 420619 - protein, 18 aa, Homo sapiens
  CDR3 for alpha chain variable domain of TCR clone 210310 (TRAV8-6, TRAJ39)
CAVTPQGLIDNAVNMLTF

SEQ ID NO: 420620 - protein, 15 aa, Homo sapiens
  CDR3 for beta chain variable domain of TCR clone 210310 (TRBV9, TRBJ2-1)
CASSVGSGFYNEQFF

SEQ ID NO: 420621 - protein, 14 aa, Homo sapiens
  CDR3 for alpha chain variable domain of TCR clone 210311 (TRAV20, TRAJ10)
CAVRVEGGRNKLTF

SEQ ID NO: 420622 - protein, 18 aa, Homo sapiens
  CDR3 for beta chain variable domain of TCR clone 210311 (TRBV24-1, TRBJ2-1)
CATSDLMFLGRGVHEQSF

SEQ ID NO: 420623 - protein, 14 aa, Homo sapiens
  CDR3 for alpha chain variable domain of TCR clone 210312 (TRAV8-2, TRAJ4)
CVVSPSGGYNKLIF

SEQ ID NO: 420624 - protein, 14 aa, Homo sapiens
  CDR3 for beta chain variable domain of TCR clone 210312 (TRBV25-1, TRBJ1-1)
CASTHLGGNTEAFV

SEQ ID NO: 420625 - protein, 16 aa, Homo sapiens
  CDR3 for alpha chain variable domain of TCR clone 210313 (TRAV26-1, TRAJ36)
CIVRVPDQTGANNLFF

SEQ ID NO: 420626 - protein, 14 aa, Homo sapiens
  CDR3 for beta chain variable domain of TCR clone 210313 (TRBV7-2, TRBJ2-7)
CASSLYPGCYEQYF

SEQ ID NO: 420627 - protein, 15 aa, Homo sapiens
  CDR3 for alpha chain variable domain of TCR clone 210314 (TRAV1-2, TRAJ30)
CAVRPHGNRDDKIIF

SEQ ID NO: 420628 - protein, 13 aa, Homo sapiens
  CDR3 for beta chain variable domain of TCR clone 210314 (TRBV4-1, TRBJ2-7)
CASSQGHANEQYF

SEQ ID NO: 420629 - protein, 16 aa, Homo sapiens
  CDR3 for alpha chain variable domain of TCR clone 210315 (TRAV12-2, TRAJ6)
CAAPLAGSGGSYIPTF

SEQ ID NO: 420630 - protein, 13 aa, Homo sapiens
  CDR3 for beta chain variable domain of TCR clone 210315 (TRBV7-3, TRBJ1-1)
CASSQDWGAEASF

SEQ ID NO: 420631 - protein, 11 aa, Homo sapiens
  CDR3 for alpha chain variable domain of TCR clone 210316 (TRAV13-1, TRAJ20)
CSPHGLYKLSF

SEQ ID NO: 420632 - protein, 15 aa, Homo sapiens
  CDR3 for beta chain variable domain of TCR clone 210316 (TRBV27, TRBJ1-6)
CASSFDRGLGSPLHF

SEQ ID NO: 420633 - protein, 15 aa, Homo sapiens
  CDR3 for alpha chain variable domain of TCR clone 210317 (TRAV8-3, TRAJ23)
CAVGAPYNQGGKLIF

SEQ ID NO: 420634 - protein, 12 aa, Homo sapiens
  CDR3 for beta chain variable domain of TCR clone 210317 (TRBV11-2, TRBJ2-5)
CASSLGQETQYF

SEQ ID NO: 420635 - protein, 13 aa, Homo sapiens
  CDR3 for alpha chain variable domain of TCR clone 210318 (TRAV20, TRAJ42)
CAVQGGSQGNLIL

SEQ ID NO: 420636 - protein, 15 aa, Homo sapiens
  CDR3 for beta chain variable domain of TCR clone 210318 (TRBV10-1, TRBJ2-1)
CASSEWRGTYNEQFF

SEQ ID NO: 420637 - protein, 14 aa, Homo sapiens
  CDR3 for alpha chain variable domain of TCR clone 210319 (TRAV9-2, TRAJ39)
CALYIYNAGNMLTF

SEQ ID NO: 420638 - protein, 14 aa, Homo sapiens
  CDR3 for beta chain variable domain of TCR clone 210319 (TRBV29-1, TRBJ2-5)
CSVETSGSGETQYF

SEQ ID NO: 420639 - protein, 15 aa, Homo sapiens
  CDR3 for alpha chain variable domain of TCR clone 210320 (TRAV13-2, TRAJ45)
CAENNSGGGADGLTF

SEQ ID NO: 420640 - protein, 16 aa, Homo sapiens
  CDR3 for beta chain variable domain of TCR clone 210320 (TRBV19, TRBJ2-1)
CASSKAGPSSYNEQFF

SEQ ID NO: 420641 - protein, 14 aa, Homo sapiens
  CDR3 for alpha chain variable domain of TCR clone 210321 (TRAV9-2, TRAJ39)
CALYIYNAGNMLTF

SEQ ID NO: 420642 - protein, 14 aa, Homo sapiens
  CDR3 for beta chain variable domain of TCR clone 210321 (TRBV11-2, TRBJ1-5)
CASSLDRGRQPQHF

SEQ ID NO: 420643 - protein, 14 aa, Homo sapiens
  CDR3 for alpha chain variable domain of TCR clone 210322 (TRAV20, TRAJ22)
CAVQGAGSARQLTF

SEQ ID NO: 420644 - protein, 17 aa, Homo sapiens
  CDR3 for beta chain variable domain of TCR clone 210322 (TRBV13, TRBJ2-3)
CASSLSRVAGGRNTQYF

SEQ ID NO: 420645 - protein, 16 aa, Homo sapiens
  CDR3 for alpha chain variable domain of TCR clone 210323 (TRAV3, TRAJ37)
CAVRPHGSGNTGKLIF

SEQ ID NO: 420646 - protein, 17 aa, Homo sapiens
  CDR3 for beta chain variable domain of TCR clone 210323 (TRBV20-1, TRBJ2-2)
CSASGSGQGGLTGELFF

SEQ ID NO: 420647 - protein, 10 aa, Homo sapiens
  CDR3 for alpha chain variable domain of TCR clone 210324 (TRAV36/DV7, TRAJ49)
CALTGNQFYF

SEQ ID NO: 420648 - protein, 14 aa, Homo sapiens
  CDR3 for beta chain variable domain of TCR clone 210324 (TRBV4-2, TRBJ2-5)
CASSKDRGRETQYF

SEQ ID NO: 420649 - protein, 18 aa, Homo sapiens
  CDR3 for alpha chain variable domain of TCR clone 210325 (TRAV21, TRAJ52)
CAVRPSPAGGTSYGKLTF

SEQ ID NO: 420650 - protein, 17 aa, Homo sapiens
  CDR3 for beta chain variable domain of TCR clone 210325 (TRBV13, TRBJ2-3)
CASSPSRVAGGGNTQYF

SEQ ID NO: 420651 - protein, 13 aa, Homo sapiens
  CDR3 for alpha chain variable domain of TCR clone 210326 (TRAV35, TRAJ36)
CAGPRIGANNLFF

SEQ ID NO: 420652 - protein, 15 aa, Homo sapiens
  CDR3 for beta chain variable domain of TCR clone 210326 (TRBV28, TRBJ2-5)
CASSPPWSYQKTQYF

SEQ ID NO: 420653 - protein, 16 aa, Homo sapiens
  CDR3 for alpha chain variable domain of TCR clone 210327 (TRAV30, TRAJ24)
CGTEIVDADSWGKFPF

SEQ ID NO: 420654 - protein, 14 aa, Homo sapiens
  CDR3 for beta chain variable domain of TCR clone 210327 (TRBV5-1, TRBJ2-7)
CASSRGESLYEQYF

SEQ ID NO: 420655 - protein, 11 aa, Homo sapiens
  CDR3 for alpha chain variable domain of TCR clone 210328 (TRAV21, TRAJ34)
CAVTTTDKLIF

SEQ ID NO: 420656 - protein, 13 aa, Homo sapiens
  CDR3 for beta chain variable domain of TCR clone 210328 (TRBV5-5, TRBJ1-2)
CASSFWRGEDYTF

SEQ ID NO: 420657 - protein, 15 aa, Homo sapiens
  CDR3 for alpha chain variable domain of TCR clone 210329 (TRAV25, TRAJ52)
CAGRPGGTSYGKLTF

SEQ ID NO: 420658 - protein, 17 aa, Homo sapiens
  CDR3 for beta chain variable domain of TCR clone 210329 (TRBV2, TRBJ2-1)
CASILLGGSSSYNEQFF

SEQ ID NO: 420659 - protein, 14 aa, Homo sapiens
  CDR3 for alpha chain variable domain of TCR clone 210330 (TRAV26-1, TRAJ38)
CIADNAGNNRKLIW

SEQ ID NO: 420660 - protein, 17 aa, Homo sapiens
  CDR3 for beta chain variable domain of TCR clone 210330 (TRBV13, TRBJ2-3)
CASNLSRVAGGRNTQYF

SEQ ID NO: 420661 - protein, 14 aa, Homo sapiens
  CDR3 for alpha chain variable domain of TCR clone 210331 (TRAV17, TRAJ22)
CATSPSGSARQLTF

SEQ ID NO: 420662 - protein, 15 aa, Homo sapiens
  CDR3 for beta chain variable domain of TCR clone 210331 (TRBV4-1, TRBJ2-5)
CASSHWDLSQETQYF

SEQ ID NO: 420663 - protein, 13 aa, Homo sapiens
  CDR3 for alpha chain variable domain of TCR clone 210332 (TRAV3, TRAJ21)
CAVREPDFNKLYF

SEQ ID NO: 420664 - protein, 15 aa, Homo sapiens
  CDR3 for beta chain variable domain of TCR clone 210332 (TRBV6-1, TRBJ2-3)
CASSERGGITDTQYF

SEQ ID NO: 420665 - protein, 14 aa, Homo sapiens
  CDR3 for alpha chain variable domain of TCR clone 210333 (TRAV1-2, TRAJ16)
CAVNRLSDGQKLLF

SEQ ID NO: 420666 - protein, 15 aa, Homo sapiens
  CDR3 for beta chain variable domain of TCR clone 210333 (TRBV9, TRBJ1-6)
CAGSVAGTGDSPLHF

SEQ ID NO: 420667 - protein, 12 aa, Homo sapiens
  CDR3 for alpha chain variable domain of TCR clone 210334 (TRAV8-6, TRAJ20)
CAVDFNDYKLSF

SEQ ID NO: 420668 - protein, 13 aa, Homo sapiens
  CDR3 for beta chain variable domain of TCR clone 210334 (TRBV5-7, TRBJ2-3)
CASSLGRTDTQYF

SEQ ID NO: 420669 - protein, 12 aa, Homo sapiens
  CDR3 for alpha chain variable domain of TCR clone 210335 (TRAV12-2, TRAJ9)
CAVYNGGFKTIF

SEQ ID NO: 420670 - protein, 13 aa, Homo sapiens
  CDR3 for beta chain variable domain of TCR clone 210335 (TRBV7-3, TRBJ2-5)
CASSCRGGETQYF

SEQ ID NO: 420671 - protein, 17 aa, Homo sapiens
  CDR3 for alpha chain variable domain of TCR clone 210336 (TRAV3, TRAJ37)
CAVRDMRTPGNTGKLIF

SEQ ID NO: 420672 - protein, 20 aa, Homo sapiens
  CDR3 for beta chain variable domain of TCR clone 210336 (TRBV7-8, TRBJ2-2)
CASSHLFPGPTIHITGELFF

SEQ ID NO: 420673 - protein, 13 aa, Homo sapiens
  CDR3 for alpha chain variable domain of TCR clone 210337 (TRAV17, TRAJ4)
CATKSGGYNKLIF

SEQ ID NO: 420674 - protein, 11 aa, Homo sapiens
  CDR3 for beta chain variable domain of TCR clone 210337 (TRBV6-3, TRBJ2-3)
CATGQADTQYF

SEQ ID NO: 420675 - protein, 13 aa, Homo sapiens
  CDR3 for alpha chain variable domain of TCR clone 210338 (TRAV25, TRAJ30)
CAGRVDRDDKIIF

SEQ ID NO: 420676 - protein, 17 aa, Homo sapiens
  CDR3 for beta chain variable domain of TCR clone 210338 (TRBV7-9, TRBJ2-6)
CASSFGAGYFGANDLTF

SEQ ID NO: 420677 - protein, 16 aa, Homo sapiens
  CDR3 for alpha chain variable domain of TCR clone 210339 (TRAV17, TRAJ28)
CATASVSGAGGYQLPF

SEQ ID NO: 420678 - protein, 11 aa, Homo sapiens
  CDR3 for beta chain variable domain of TCR clone 210339 (TRBV7-9, TRBJ2-5)
CASSLGETQYF

SEQ ID NO: 420679 - protein, 12 aa, Homo sapiens
  CDR3 for alpha chain variable domain of TCR clone 210340 (TRAV27, TRAJ35)
CAGADFGNVLHC

SEQ ID NO: 420680 - protein, 11 aa, Homo sapiens
  CDR3 for beta chain variable domain of TCR clone 210340 (TRBV11-2, TRBJ2-2)
CASSLPGELFF

SEQ ID NO: 420681 - protein, 23 aa, Homo sapiens
  CDR3 for alpha chain variable domain of TCR clone 210341 (TRAV41, TRAJ32)
CAVRIMVVLQTSSSLELALCLLS

SEQ ID NO: 420682 - protein, 14 aa, Homo sapiens
  CDR3 for beta chain variable domain of TCR clone 210341 (TRBV7-2, TRBJ2-7)
CASRSQGAAYEQYF

SEQ ID NO: 420683 - protein, 14 aa, Homo sapiens
  CDR3 for alpha chain variable domain of TCR clone 210342 (TRAV2, TRAJ29)
CAGPFQYGNTPLVF

SEQ ID NO: 420684 - protein, 18 aa, Homo sapiens
  CDR3 for beta chain variable domain of TCR clone 210342 (TRBV6-1, TRBJ1-6)
RASSGSDGRRINNSPLHF

SEQ ID NO: 420685 - protein, 16 aa, Homo sapiens
  CDR3 for alpha chain variable domain of TCR clone 210343 (TRAV12-1, TRAJ48)
CVVNMVSNFGNEKLTF

SEQ ID NO: 420686 - protein, 18 aa, Homo sapiens
  CDR3 for beta chain variable domain of TCR clone 210343 (TRBV11-2, TRBJ2-6)
CASSLNPFRGTGANVLTF

SEQ ID NO: 420687 - protein, 10 aa, Homo sapiens
  CDR3 for alpha chain variable domain of TCR clone 210344 (TRAV13-1, TRAJ26)
CAPYGQNFVF

SEQ ID NO: 420688 - protein, 15 aa, Homo sapiens
  CDR3 for beta chain variable domain of TCR clone 210344 (TRBV28, TRBJ2-3)
CASSRELGGTDTQYF

SEQ ID NO: 420689 - protein, 18 aa, Homo sapiens
  CDR3 for alpha chain variable domain of TCR clone 210345 (TRAV21, TRAJ52)
CAVGPSPAGGTNYGKLTF

SEQ ID NO: 420690 - protein, 17 aa, Homo sapiens
  CDR3 for beta chain variable domain of TCR clone 210345 (TRBV13, TRBJ2-3)
CASSLSRVAGGRNTQYF

SEQ ID NO: 420691 - protein, 11 aa, Homo sapiens
  CDR3 for alpha chain variable domain of TCR clone 210346 (TRAV21, TRAJ34)
CAVTNTDKLIF

SEQ ID NO: 420692 - protein, 13 aa, Homo sapiens
  CDR3 for beta chain variable domain of TCR clone 210346 (TRBV12-4, TRBJ2-7)
CASSPTETYEQYF

SEQ ID NO: 420693 - protein, 14 aa, Homo sapiens
  CDR3 for alpha chain variable domain of TCR clone 210347 (TRAV1-2, TRAJ8)
CAVREDTGFQRLVF

SEQ ID NO: 420694 - protein, 12 aa, Homo sapiens
  CDR3 for beta chain variable domain of TCR clone 210347 (TRBV11-2, TRBJ2-2)
RASSLPTGELFF

SEQ ID NO: 420695 - protein, 14 aa, Homo sapiens
  CDR3 for alpha chain variable domain of TCR clone 210348 (TRAV4, TRAJ22)
CLARLSGSARQLTF

SEQ ID NO: 420696 - protein, 13 aa, Homo sapiens
  CDR3 for beta chain variable domain of TCR clone 210348 (TRBV15, TRBJ1-6)
CATSGGLNSPLHF

SEQ ID NO: 420697 - protein, 17 aa, Homo sapiens
  CDR3 for alpha chain variable domain of TCR clone 210349 (TRAV12-2, TRAJ22)
CAVNRIPFSGSARQLTF

SEQ ID NO: 420698 - protein, 13 aa, Homo sapiens
  CDR3 for beta chain variable domain of TCR clone 210349 (TRBV11-3, TRBJ1-1)
CASSSNRDTEAFL

SEQ ID NO: 420699 - protein, 14 aa, Homo sapiens
  CDR3 for alpha chain variable domain of TCR clone 210350 (TRAV36/DV7, TRAJ57)
CAVGFPGGSEKLVF

SEQ ID NO: 420700 - protein, 12 aa, Homo sapiens
  CDR3 for beta chain variable domain of TCR clone 210350 (TRBV19, TRBJ2-7)
RASTSGTYEQYF

SEQ ID NO: 420701 - protein, 11 aa, Homo sapiens
  CDR3 for alpha chain variable domain of TCR clone 210351 (TRAV17, TRAJ36)
CAPTGANNLFF

SEQ ID NO: 420702 - protein, 20 aa, Homo sapiens
  CDR3 for beta chain variable domain of TCR clone 210351 (TRBV7-8, TRBJ2-2)
CASSHLFPGPTIHITGELFF

SEQ ID NO: 420703 - protein, 14 aa, Homo sapiens
  CDR3 for alpha chain variable domain of TCR clone 210352 (TRAV1-2, TRAJ8)
CAVREDTGFQKLVF

SEQ ID NO: 420704 - protein, 14 aa, Homo sapiens
  CDR3 for beta chain variable domain of TCR clone 210352 (TRBV18, TRBJ2-3)
CASSGLADTDTQYF

SEQ ID NO: 420705 - protein, 10 aa, Homo sapiens
  CDR3 for alpha chain variable domain of TCR clone 210353 (TRAV17, TRAJ20)
CATNDYKLSF

SEQ ID NO: 420706 - protein, 11 aa, Homo sapiens
  CDR3 for beta chain variable domain of TCR clone 210353 (TRBV13, TRBJ2-2)
CASSQSGELFF

SEQ ID NO: 420707 - protein, 13 aa, Homo sapiens
  CDR3 for alpha chain variable domain of TCR clone 210354 (TRAV1-2, TRAJ9)
CAALNTGGFKTIF

SEQ ID NO: 420708 - protein, 14 aa, Homo sapiens
  CDR3 for beta chain variable domain of TCR clone 210354 (TRBV7-3, TRBJ2-1)
CASSVAGGTNEQFF

SEQ ID NO: 420709 - protein, 11 aa, Homo sapiens
  CDR3 for alpha chain variable domain of TCR clone 210355 (TRAV35, TRAJ30)
WAGERDDKIIF

SEQ ID NO: 420710 - protein, 14 aa, Homo sapiens
  CDR3 for beta chain variable domain of TCR clone 210355 (TRBV15, TRBJ2-5)
CATSGDRGQETQYF

SEQ ID NO: 420711 - protein, 12 aa, Homo sapiens
  CDR3 for alpha chain variable domain of TCR clone 210356 (TRAV13-1, TRAJ21)
CAAKEGFNKFYF

SEQ ID NO: 420712 - protein, 14 aa, Homo sapiens
  CDR3 for beta chain variable domain of TCR clone 210356 (TRBV6-6, TRBJ1-5)
CASSYGPANQPQHF

SEQ ID NO: 420713 - protein, 13 aa, Homo sapiens
  CDR3 for alpha chain variable domain of TCR clone 210357 (TRAV12-2, TRAJ10)
CAVPTGGGNKLTF

SEQ ID NO: 420714 - protein, 16 aa, Homo sapiens
  CDR3 for beta chain variable domain of TCR clone 210357 (TRBV7-3, TRBJ2-2)
CASSLKRGTLSGELFF

SEQ ID NO: 420715 - protein, 18 aa, Homo sapiens
  CDR3 for alpha chain variable domain of TCR clone 210358 (TRAV13-1, TRAJ28)
CAASPVPILWGCELPTHF

SEQ ID NO: 420716 - protein, 13 aa, Homo sapiens
  CDR3 for beta chain variable domain of TCR clone 210358 (TRBV15, TRBJ2-7)
CATSTTGHYEQYF

SEQ ID NO: 420717 - protein, 16 aa, Homo sapiens
  CDR3 for alpha chain variable domain of TCR clone 210359 (TRAV4, TRAJ22)
CLVGDLYSGSARQLTF

SEQ ID NO: 420718 - protein, 13 aa, Homo sapiens
  CDR3 for beta chain variable domain of TCR clone 210359 (TRBV12-4, TRBJ1-2)
CASSLRQGKGYTF

SEQ ID NO: 420719 - protein, 16 aa, Homo sapiens
  CDR3 for alpha chain variable domain of TCR clone 210360 (TRAV3, TRAJ37)
FAVRPHGSGNTGKLIF

SEQ ID NO: 420720 - protein, 11 aa, Homo sapiens
  CDR3 for beta chain variable domain of TCR clone 210360 (TRBV10-3, TRBJ2-7)
CAISEGLEQYF

SEQ ID NO: 420721 - protein, 14 aa, Homo sapiens
  CDR3 for alpha chain variable domain of TCR clone 210361 (TRAV8-4, TRAJ40)
CAVIPTSGTYKYIF

SEQ ID NO: 420722 - protein, 15 aa, Homo sapiens
  CDR3 for beta chain variable domain of TCR clone 210361 (TRBV7-2, TRBJ2-1)
CASMSASGDYNEQFF

SEQ ID NO: 420723 - protein, 15 aa, Homo sapiens
  CDR3 for alpha chain variable domain of TCR clone 210362 (TRAV8-1, TRAJ4)
CAVIDVSGGYNKLIL

SEQ ID NO: 420724 - protein, 14 aa, Homo sapiens
  CDR3 for beta chain variable domain of TCR clone 210362 (TRBV5-1, TRBJ1-1)
CASSFTGRNTEAFF

SEQ ID NO: 420725 - protein, 14 aa, Homo sapiens
  CDR3 for alpha chain variable domain of TCR clone 210363 (TRAV12-1, TRAJ13)
CVVIDSGGYQKVPF

SEQ ID NO: 420726 - protein, 12 aa, Homo sapiens
  CDR3 for beta chain variable domain of TCR clone 210363 (TRBV29-1, TRBJ2-3)
CSVTGGADTQYF

SEQ ID NO: 420727 - protein, 13 aa, Homo sapiens
  CDR3 for alpha chain variable domain of TCR clone 210364 (TRAV27, TRAJ29)
CAGAHSGNTPLVF

SEQ ID NO: 420728 - protein, 17 aa, Homo sapiens
  CDR3 for beta chain variable domain of TCR clone 210364 (TRBV11-3, TRBJ2-1)
CASSLYPPGVEYNEQFF

SEQ ID NO: 420729 - protein, 12 aa, Homo sapiens
  CDR3 for alpha chain variable domain of TCR clone 210365 (TRAV16, TRAJ26)
CASKDGDQNFVF

SEQ ID NO: 420730 - protein, 13 aa, Homo sapiens
  CDR3 for beta chain variable domain of TCR clone 210365 (TRBV25-1, TRBJ1-1)
CASSDRGRAEAFF

SEQ ID NO: 420731 - protein, 11 aa, Homo sapiens
  CDR3 for alpha chain variable domain of TCR clone 210366 (TRAV21, TRAJ34)
CAVTNTEKLIF

SEQ ID NO: 420732 - protein, 17 aa, Homo sapiens
  CDR3 for beta chain variable domain of TCR clone 210366 (TRBV20-1, TRBJ2-1)
CSARSPSGGPPTMSSSS

SEQ ID NO: 420733 - protein, 16 aa, Homo sapiens
  CDR3 for alpha chain variable domain of TCR clone 210367 (TRAV2, TRAJ4)
CAVENRFSGGYNKLIF

SEQ ID NO: 420734 - protein, 13 aa, Homo sapiens
  CDR3 for beta chain variable domain of TCR clone 210367 (TRBV7-7, TRBJ2-5)
CASSRSGQETQYF

SEQ ID NO: 420735 - protein, 15 aa, Homo sapiens
  CDR3 for alpha chain variable domain of TCR clone 210368 (TRAV13-1, TRAJ18)
CAASGGGSTLGRLYF

SEQ ID NO: 420736 - protein, 13 aa, Homo sapiens
  CDR3 for beta chain variable domain of TCR clone 210368 (TRBV18, TRBJ2-1)
CASGLAANNEQFF

SEQ ID NO: 420737 - protein, 13 aa, Homo sapiens
  CDR3 for alpha chain variable domain of TCR clone 210369 (TRAV27, TRAJ54)
CAGAGQGAQELVF

SEQ ID NO: 420738 - protein, 15 aa, Homo sapiens
  CDR3 for beta chain variable domain of TCR clone 210369 (TRBV18, TRBJ2-6)
CASSSSYAGANVLTF

SEQ ID NO: 420739 - protein, 12 aa, Homo sapiens
  CDR3 for alpha chain variable domain of TCR clone 210370 (TRAV17, TRAJ4)
CAVSVGYNKLIF

SEQ ID NO: 420740 - protein, 13 aa, Homo sapiens
  CDR3 for beta chain variable domain of TCR clone 210370 (TRBV6-1, TRBJ1-1)
CASSEGWGTEDFF

SEQ ID NO: 420741 - protein, 18 aa, Homo sapiens
  CDR3 for alpha chain variable domain of TCR clone 210371 (TRAV29/DV5, TRAJ52)
CAAGFRGAGGPSYGTLTF

SEQ ID NO: 420742 - protein, 12 aa, Homo sapiens
  CDR3 for beta chain variable domain of TCR clone 210371 (TRBV11-2, TRBJ2-2)
CASSLPTGELFF

SEQ ID NO: 420743 - protein, 18 aa, Homo sapiens
  CDR3 for alpha chain variable domain of TCR clone 210372 (TRAV13-1, TRAJ52)
CAAKNPNAGGTSYGKLTF

SEQ ID NO: 420744 - protein, 15 aa, Homo sapiens
  CDR3 for beta chain variable domain of TCR clone 210372 (TRBV27, TRBJ1-6)
CASSFDRGLGSPLHF

SEQ ID NO: 420745 - protein, 16 aa, Homo sapiens
  CDR3 for alpha chain variable domain of TCR clone 210373 (TRAV30, TRAJ24)
CGTEIVDADSWGKFQF

SEQ ID NO: 420746 - protein, 16 aa, Homo sapiens
  CDR3 for beta chain variable domain of TCR clone 210373 (TRBV10-3, TRBJ1-6)
CAISERRGQGNSPLHF

SEQ ID NO: 420747 - protein, 14 aa, Homo sapiens
  CDR3 for alpha chain variable domain of TCR clone 210374 (TRAV17, TRAJ57)
CATDSQGGSEKLVF

SEQ ID NO: 420748 - protein, 14 aa, Homo sapiens
  CDR3 for beta chain variable domain of TCR clone 210374 (TRBV7-8, TRBJ2-7)
CASSPRDRVYEQYF

SEQ ID NO: 420749 - protein, 11 aa, Homo sapiens
  CDR3 for alpha chain variable domain of TCR clone 210375 (TRAV22, TRAJ27)
CAVLNAGKSTF

SEQ ID NO: 420750 - protein, 11 aa, Homo sapiens
  CDR3 for beta chain variable domain of TCR clone 210375 (TRBV19, TRBJ2-2)
CASGYSGELFF

SEQ ID NO: 420751 - protein, 11 aa, Homo sapiens
  CDR3 for alpha chain variable domain of TCR clone 210376 (TRAV12-1, TRAJ21)
CVVYTFNKFYF

SEQ ID NO: 420752 - protein, 14 aa, Homo sapiens
  CDR3 for beta chain variable domain of TCR clone 210376 (TRBV19, TRBJ2-7)
CASSMGQGAIEQYF

SEQ ID NO: 420753 - protein, 15 aa, Homo sapiens
  CDR3 for alpha chain variable domain of TCR clone 210377 (TRAV8-4, TRAJ40)
CAASDDTSGTYKYIF

SEQ ID NO: 420754 - protein, 15 aa, Homo sapiens
  CDR3 for beta chain variable domain of TCR clone 210377 (TRBV6-5, TRBJ2-1)
CASSYDAGAGNEQFF

SEQ ID NO: 420755 - protein, 15 aa, Homo sapiens
  CDR3 for alpha chain variable domain of TCR clone 210378 (TRAV8-3, TRAJ27)
CAVGPSKTNAGKSTF

SEQ ID NO: 420756 - protein, 14 aa, Homo sapiens
  CDR3 for beta chain variable domain of TCR clone 210378 (TRBV5-1, TRBJ2-7)
CASRWDWQFHEQYF

SEQ ID NO: 420757 - protein, 13 aa, Homo sapiens
  CDR3 for alpha chain variable domain of TCR clone 210379 (TRAV13-1, TRAJ10)
CAATAGGGNKLTF

SEQ ID NO: 420758 - protein, 12 aa, Homo sapiens
  CDR3 for beta chain variable domain of TCR clone 210379 (TRBV7-3, TRBJ2-1)
CGSSFQSGPQFF

SEQ ID NO: 420759 - protein, 16 aa, Homo sapiens
  CDR3 for alpha chain variable domain of TCR clone 210380 (TRAV12-2, TRAJ18)
CAVTTDRGSTLGRLSF

SEQ ID NO: 420760 - protein, 14 aa, Homo sapiens
  CDR3 for beta chain variable domain of TCR clone 210380 (TRBV4-2, TRBJ1-5)
CASSQDSINQTQHF

SEQ ID NO: 420761 - protein, 16 aa, Homo sapiens
  CDR3 for alpha chain variable domain of TCR clone 210381 (TRAV21, TRAJ45)
CAVSWGSGGGADGLTF

SEQ ID NO: 420762 - protein, 14 aa, Homo sapiens
  CDR3 for beta chain variable domain of TCR clone 210381 (TRBV10-3, TRBJ2-1)
CAISDRGGVTEQFF

SEQ ID NO: 420763 - protein, 14 aa, Homo sapiens
  CDR3 for alpha chain variable domain of TCR clone 210382 (TRAV17, TRAJ6)
CSTDERRGSYIPTF

SEQ ID NO: 420764 - protein, 13 aa, Homo sapiens
  CDR3 for beta chain variable domain of TCR clone 210382 (TRBV27, TRBJ2-1)
CASSLGRIWGQFF

SEQ ID NO: 420765 - protein, 13 aa, Homo sapiens
  CDR3 for alpha chain variable domain of TCR clone 210383 (TRAV2, TRAJ29)
CAAVGPGNTPLVF

SEQ ID NO: 420766 - protein, 13 aa, Homo sapiens
  CDR3 for beta chain variable domain of TCR clone 210383 (TRBV14, TRBJ1-2)
CASSEDRRYGYTF

SEQ ID NO: 420767 - protein, 15 aa, Homo sapiens
  CDR3 for alpha chain variable domain of TCR clone 210384 (TRAV29/DV5, TRAJ40)
CAAREGTSGTYKYIF

SEQ ID NO: 420768 - protein, 15 aa, Homo sapiens
  CDR3 for beta chain variable domain of TCR clone 210384 (TRBV27, TRBJ1-5)
CASKIQGAGNQPQHF

SEQ ID NO: 420769 - protein, 13 aa, Homo sapiens
  CDR3 for alpha chain variable domain of TCR clone 210385 (TRAV14/DV4, TRAJ22)
CAMRDLSARQLTF

SEQ ID NO: 420770 - protein, 18 aa, Homo sapiens
  CDR3 for beta chain variable domain of TCR clone 210385 (TRBV19, TRBJ1-5)
CASSKGQVSIHSNQHQHF

SEQ ID NO: 420771 - protein, 16 aa, Homo sapiens
  CDR3 for alpha chain variable domain of TCR clone 210386 (TRAV3, TRAJ37)
CAVRGRGSGNAGKLLF

SEQ ID NO: 420772 - protein, 13 aa, Homo sapiens
  CDR3 for beta chain variable domain of TCR clone 210386 (TRBV14, TRBJ2-7)
CASSQDRRGEQYF

SEQ ID NO: 420773 - protein, 12 aa, Homo sapiens
  CDR3 for alpha chain variable domain of TCR clone 210387 (TRAV30, TRAJ43)
CGTQERGNDMRF

SEQ ID NO: 420774 - protein, 13 aa, Homo sapiens
  CDR3 for beta chain variable domain of TCR clone 210387 (TRBV27, TRBJ2-7)
CASSFSQGYEQYF

SEQ ID NO: 420775 - protein, 17 aa, Homo sapiens
  CDR3 for alpha chain variable domain of TCR clone 210388 (TRAV17, TRAJ28)
CATDPRRGWAGSYQLTF

SEQ ID NO: 420776 - protein, 16 aa, Homo sapiens
  CDR3 for beta chain variable domain of TCR clone 210388 (TRBV25-1, TRBJ1-1)
CASSGDRDRGRIDAFF

SEQ ID NO: 420777 - protein, 14 aa, Homo sapiens
  CDR3 for alpha chain variable domain of TCR clone 210389 (TRAV13-1, TRAJ44)
CAAKSTGTASKLTF

SEQ ID NO: 420778 - protein, 14 aa, Homo sapiens
  CDR3 for beta chain variable domain of TCR clone 210389 (TRBV19, TRBJ2-1)
CASPTFVLSGEQFF

SEQ ID NO: 420779 - protein, 10 aa, Homo sapiens
  CDR3 for alpha chain variable domain of TCR clone 210390 (TRAV26-1, TRAJ22)
CIAGSGQLTF

SEQ ID NO: 420780 - protein, 18 aa, Homo sapiens
  CDR3 for beta chain variable domain of TCR clone 210390 (TRBV3-1, TRBJ2-5)
CASSQAGTSGGGRETQYF

SEQ ID NO: 420781 - protein, 17 aa, Homo sapiens
  CDR3 for alpha chain variable domain of TCR clone 210391 (TRAV13-1, TRAJ52)
CAAGRNAGGTSYGKLTF

SEQ ID NO: 420782 - protein, 13 aa, Homo sapiens
  CDR3 for beta chain variable domain of TCR clone 210391 (TRBV7-3, TRBJ2-1)
CASSPVAYNEQFF

SEQ ID NO: 420783 - protein, 16 aa, Homo sapiens
  CDR3 for alpha chain variable domain of TCR clone 210392 (TRAV12-1, TRAJ12)
CVVNTLLMDSSYKLIF

SEQ ID NO: 420784 - protein, 13 aa, Homo sapiens
  CDR3 for beta chain variable domain of TCR clone 210392 (TRBV7-9, TRBJ2-5)
CASLPSGRETQYF

SEQ ID NO: 420785 - protein, 12 aa, Homo sapiens
  CDR3 for alpha chain variable domain of TCR clone 210393 (TRAV13-1, TRAJ15)
CAASQAGTALIF

SEQ ID NO: 420786 - protein, 13 aa, Homo sapiens
  CDR3 for beta chain variable domain of TCR clone 210393 (TRBV19, TRBJ1-2)
CASSIGQVYGYTF

SEQ ID NO: 420787 - protein, 12 aa, Homo sapiens
  CDR3 for alpha chain variable domain of TCR clone 210394 (TRAV16, TRAJ56)
CAPTGANSKLTF

SEQ ID NO: 420788 - protein, 19 aa, Homo sapiens
  CDR3 for beta chain variable domain of TCR clone 210394 (TRBV12-4, TRBJ2-1)
CASTLAFDPRDKEANEQFF

SEQ ID NO: 420789 - protein, 13 aa, Homo sapiens
  CDR3 for alpha chain variable domain of TCR clone 210395 (TRAV24, TRAJ15)
CAFKDQAGTAPIF

SEQ ID NO: 420790 - protein, 14 aa, Homo sapiens
  CDR3 for beta chain variable domain of TCR clone 210395 (TRBV2, TRBJ2-1)
CASGLSGSQGEQFF

SEQ ID NO: 420791 - protein, 15 aa, Homo sapiens
  CDR3 for alpha chain variable domain of TCR clone 210396 (TRAV16, TRAJ16)
CALQGGGSDGQKLLF

SEQ ID NO: 420792 - protein, 16 aa, Homo sapiens
  CDR3 for beta chain variable domain of TCR clone 210396 (TRBV7-9, TRBJ2-1)
CASSLVSGPSYNEQFF

SEQ ID NO: 420793 - protein, 15 aa, Homo sapiens
  CDR3 for alpha chain variable domain of TCR clone 210397 (TRAV17, TRAJ16)
CATALRFSDVQKLLF

SEQ ID NO: 420794 - protein, 12 aa, Homo sapiens
  CDR3 for beta chain variable domain of TCR clone 210397 (TRBV2, TRBJ2-7)
CASSDPDYEQYF

SEQ ID NO: 420795 - protein, 14 aa, Homo sapiens
  CDR3 for alpha chain variable domain of TCR clone 210398 (TRAV12-2, TRAJ40)
CAVKIPSGTYKYIF

SEQ ID NO: 420796 - protein, 14 aa, Homo sapiens
  CDR3 for beta chain variable domain of TCR clone 210398 (TRBV20-1, TRBJ1-1)
CSAQTRIGRTEAFF

SEQ ID NO: 420797 - protein, 15 aa, Homo sapiens
  CDR3 for alpha chain variable domain of TCR clone 210399 (TRAV4, TRAJ31)
CLVGGFLNNNARLMF

SEQ ID NO: 420798 - protein, 14 aa, Homo sapiens
  CDR3 for beta chain variable domain of TCR clone 210399 (TRBV4-1, TRBJ2-2)
CASSQAVNTGELFF

SEQ ID NO: 420799 - protein, 14 aa, Homo sapiens
  CDR3 for alpha chain variable domain of TCR clone 210400 (TRAV13-2, TRAJ37)
CAEKISGNTGKLIY

SEQ ID NO: 420800 - protein, 14 aa, Homo sapiens
  CDR3 for beta chain variable domain of TCR clone 210400 (TRBV7-7, TRBJ2-2)
CASSKGENTGELFF

SEQ ID NO: 420801 - protein, 16 aa, Homo sapiens
  CDR3 for alpha chain variable domain of TCR clone 210401 (TRAV30, TRAJ24)
CGTEIVDADSWGKFQF

SEQ ID NO: 420802 - protein, 10 aa, Homo sapiens
  CDR3 for beta chain variable domain of TCR clone 210401 (TRBV15, TRBJ2-7)
AETGGYEQYF

SEQ ID NO: 420803 - protein, 13 aa, Homo sapiens
  CDR3 for alpha chain variable domain of TCR clone 210402 (TRAV12-1, TRAJ31)
CVENMNNNARLMF

SEQ ID NO: 420804 - protein, 15 aa, Homo sapiens
  CDR3 for beta chain variable domain of TCR clone 210402 (TRBV4-1, TRBJ1-2)
CASSQGQGAAYGYTF

SEQ ID NO: 420805 - protein, 16 aa, Homo sapiens
  CDR3 for alpha chain variable domain of TCR clone 210403 (TRAV8-3, TRAJ10)
CAVGPILTGGGNKLTF

SEQ ID NO: 420806 - protein, 15 aa, Homo sapiens
  CDR3 for beta chain variable domain of TCR clone 210403 (TRBV7-2, TRBJ2-2)
CASRRPGQNTGELLF

SEQ ID NO: 420807 - protein, 14 aa, Homo sapiens
  CDR3 for alpha chain variable domain of TCR clone 210404 (TRAV4, TRAJ17)
CLVGDMAAGNKLTF

SEQ ID NO: 420808 - protein, 13 aa, Homo sapiens
  CDR3 for beta chain variable domain of TCR clone 210404 (TRBV18, TRBJ2-7)
CASQSGGGYDQYF

SEQ ID NO: 420809 - protein, 14 aa, Homo sapiens
  CDR3 for alpha chain variable domain of TCR clone 210405 (TRAV12-2, TRAJ5)
CAVNRSTCRRALTF

SEQ ID NO: 420810 - protein, 12 aa, Homo sapiens
  CDR3 for beta chain variable domain of TCR clone 210405 (TRBV19, TRBJ1-5)
CASSIAQQTQHF

SEQ ID NO: 420811 - protein, 14 aa, Homo sapiens
  CDR3 for alpha chain variable domain of TCR clone 210406 (TRAV35, TRAJ22)
CAGLRPGSARQLTF

SEQ ID NO: 420812 - protein, 14 aa, Homo sapiens
  CDR3 for beta chain variable domain of TCR clone 210406 (TRBV18, TRBJ1-1)
CASSPGFQGVEAFF

SEQ ID NO: 420813 - protein, 14 aa, Homo sapiens
  CDR3 for alpha chain variable domain of TCR clone 210407 (TRAV16, TRAJ30)
CAPPSLNRDDKIIF

SEQ ID NO: 420814 - protein, 13 aa, Homo sapiens
  CDR3 for beta chain variable domain of TCR clone 210407 (TRBV11-2, TRBJ2-7)
CASSGTRPYEQYF

SEQ ID NO: 420815 - protein, 15 aa, Homo sapiens
  CDR3 for alpha chain variable domain of TCR clone 210408 (TRAV25, TRAJ10)
CAGPLLTGGGNKLTF

SEQ ID NO: 420816 - protein, 17 aa, Homo sapiens
  CDR3 for beta chain variable domain of TCR clone 210408 (TRBV13, TRBJ2-3)
CASSLSRVAGGRNTQYF

SEQ ID NO: 420817 - protein, 14 aa, Homo sapiens
  CDR3 for alpha chain variable domain of TCR clone 210409 (TRAV12-2, TRAJ44)
CAVNPAGTASKLTF

SEQ ID NO: 420818 - protein, 15 aa, Homo sapiens
  CDR3 for beta chain variable domain of TCR clone 210409 (TRBV5-1, TRBJ2-1)
CASSPPRAPYNEQFV

SEQ ID NO: 420819 - protein, 13 aa, Homo sapiens
  CDR3 for alpha chain variable domain of TCR clone 210410 (TRAV2, TRAJ40)
CAVVTSGTYKYIF

SEQ ID NO: 420820 - protein, 16 aa, Homo sapiens
  CDR3 for beta chain variable domain of TCR clone 210410 (TRBV11-2, TRBJ2-1)
CASARGSYSHHNEQFF

SEQ ID NO: 420821 - protein, 11 aa, Homo sapiens
  CDR3 for alpha chain variable domain of TCR clone 210411 (TRAV2, TRAJ31)
CAAGTPARLMF

SEQ ID NO: 420822 - protein, 13 aa, Homo sapiens
  CDR3 for beta chain variable domain of TCR clone 210411 (TRBV4-1, TRBJ2-3)
CASSQPPTDTQYF

SEQ ID NO: 420823 - protein, 14 aa, Homo sapiens
  CDR3 for alpha chain variable domain of TCR clone 210412 (TRAV17, TRAJ8)
CATDLNTGFQKLVF

SEQ ID NO: 420824 - protein, 15 aa, Homo sapiens
  CDR3 for beta chain variable domain of TCR clone 210412 (TRBV11-2, TRBJ1-6)
CASTGFGTAVSPLHF

SEQ ID NO: 420825 - protein, 16 aa, Homo sapiens
  CDR3 for alpha chain variable domain of TCR clone 210413 (TRAV12-2, TRAJ37)
CAVKEKGSSNTGKLIF

SEQ ID NO: 420826 - protein, 12 aa, Homo sapiens
  CDR3 for beta chain variable domain of TCR clone 210413 (TRBV10-1, TRBJ1-5)
CASSVSNQPQHF

SEQ ID NO: 420827 - protein, 14 aa, Homo sapiens
  CDR3 for alpha chain variable domain of TCR clone 210414 (TRAV23/DV6, TRAJ4)
CAANLSGGYKKLLF

SEQ ID NO: 420828 - protein, 11 aa, Homo sapiens
  CDR3 for beta chain variable domain of TCR clone 210414 (TRBV7-9, TRBJ2-3)
CASSPTDTQYF

SEQ ID NO: 420829 - protein, 11 aa, Homo sapiens
  CDR3 for alpha chain variable domain of TCR clone 210415 (TRAV21, TRAJ34)
CAVTNTDKLIF

SEQ ID NO: 420830 - protein, 16 aa, Homo sapiens
  CDR3 for beta chain variable domain of TCR clone 210415 (TRBV18, TRBJ1-1)
CASSPGVGERGGEAFF

SEQ ID NO: 420831 - protein, 14 aa, Homo sapiens
  CDR3 for alpha chain variable domain of TCR clone 210416 (TRAV17, TRAJ49)
SATDARDTGNQYYF

SEQ ID NO: 420832 - protein, 14 aa, Homo sapiens
  CDR3 for beta chain variable domain of TCR clone 210416 (TRBV5-5, TRBJ1-2)
CASSFGQINYGYTF

SEQ ID NO: 420833 - protein, 19 aa, Homo sapiens
  CDR3 for alpha chain variable domain of TCR clone 210417 (TRAV1-2, TRAJ16)
SVLNVLDGLEEKDGQKLLF

SEQ ID NO: 420834 - protein, 14 aa, Homo sapiens
  CDR3 for beta chain variable domain of TCR clone 210417 (TRBV7-2, TRBJ2-3)
CQQLRGGGRDTQYF

SEQ ID NO: 420835 - protein, 15 aa, Homo sapiens
  CDR3 for alpha chain variable domain of TCR clone 210418 (TRAV23/DV6, TRAJ13)
CAAWPGGGGYQKVTF

SEQ ID NO: 420836 - protein, 14 aa, Homo sapiens
  CDR3 for beta chain variable domain of TCR clone 210418 (TRBV5-5, TRBJ1-5)
CASSGQGVDQPQHF

SEQ ID NO: 420837 - protein, 13 aa, Homo sapiens
  CDR3 for alpha chain variable domain of TCR clone 210419 (TRAV8-2, TRAJ49)
CVVSPSTGNQFYL

SEQ ID NO: 420838 - protein, 14 aa, Homo sapiens
  CDR3 for beta chain variable domain of TCR clone 210419 (TRBV11-2, TRBJ2-7)
CASSRSGGAGEQYF

SEQ ID NO: 420839 - protein, 12 aa, Homo sapiens
  CDR3 for alpha chain variable domain of TCR clone 210420 (TRAV3, TRAJ39)
CTVIEWSNMLTF

SEQ ID NO: 420840 - protein, 14 aa, Homo sapiens
  CDR3 for beta chain variable domain of TCR clone 210420 (TRBV7-8, TRBJ2-3)
CANSFPDGQDTQYF

SEQ ID NO: 420841 - protein, 14 aa, Homo sapiens
  CDR3 for alpha chain variable domain of TCR clone 210421 (TRAV35, TRAJ33)
CAGSSQDSNYQLIW

SEQ ID NO: 420842 - protein, 15 aa, Homo sapiens
  CDR3 for beta chain variable domain of TCR clone 210421 (TRBV20-1, TRBJ2-7)
CSAESGTSGAYAQYF

SEQ ID NO: 420843 - protein, 15 aa, Homo sapiens
  CDR3 for alpha chain variable domain of TCR clone 210422 (TRAV20, TRAJ53)
CAVQASGCSNYKLTF

SEQ ID NO: 420844 - protein, 14 aa, Homo sapiens
  CDR3 for beta chain variable domain of TCR clone 210422 (TRBV7-2, TRBJ1-2)
CASSQTGSTYGYTF

SEQ ID NO: 420845 - protein, 14 aa, Homo sapiens
  CDR3 for alpha chain variable domain of TCR clone 210423 (TRAV16, TRAJ54)
CALSLIQGAQKLLV

SEQ ID NO: 420846 - protein, 17 aa, Homo sapiens
  CDR3 for beta chain variable domain of TCR clone 210423 (TRBV11-2, TRBJ2-4)
CASSSVGPGGHRNIQYF

SEQ ID NO: 420847 - protein, 17 aa, Homo sapiens
  CDR3 for alpha chain variable domain of TCR clone 210424 (TRAV3, TRAJ6)
CAVRDGPRAGGSYIPTF

SEQ ID NO: 420848 - protein, 21 aa, Homo sapiens
  CDR3 for beta chain variable domain of TCR clone 210424 (TRBV7-2, TRBJ2-7)
RRTRPCISVPAALRLVSKQYF

SEQ ID NO: 420849 - protein, 14 aa, Homo sapiens
  CDR3 for alpha chain variable domain of TCR clone 210425 (TRAV12-2, TRAJ44)
CAVNPAGTASKLTF

SEQ ID NO: 420850 - protein, 15 aa, Homo sapiens
  CDR3 for beta chain variable domain of TCR clone 210425 (TRBV5-1, TRBJ2-1)
CASSPRGPPTMSSSS

SEQ ID NO: 420851 - protein, 13 aa, Homo sapiens
  CDR3 for alpha chain variable domain of TCR clone 210426 (TRAV21, TRAJ24)
GLMTTDSWGKLQF

SEQ ID NO: 420852 - protein, 12 aa, Homo sapiens
  CDR3 for beta chain variable domain of TCR clone 210426 (TRBV11-2, TRBJ2-7)
CASSTPADEQYF

SEQ ID NO: 420853 - protein, 13 aa, Homo sapiens
  CDR3 for alpha chain variable domain of TCR clone 210427 (TRAV21, TRAJ11)
CAVPNSGYSTLTF

SEQ ID NO: 420854 - protein, 14 aa, Homo sapiens
  CDR3 for beta chain variable domain of TCR clone 210427 (TRBV20-1, TRBJ2-1)
CSAQIGGSANEQFF

SEQ ID NO: 420855 - protein, 16 aa, Homo sapiens
  CDR3 for alpha chain variable domain of TCR clone 210428 (TRAV30, TRAJ24)
CGTEMVDADSWGKFQF

SEQ ID NO: 420856 - protein, 14 aa, Homo sapiens
  CDR3 for beta chain variable domain of TCR clone 210428 (TRBV12-5, TRBJ2-5)
CASGSRTHQETKYF

SEQ ID NO: 420857 - protein, 15 aa, Homo sapiens
  CDR3 for alpha chain variable domain of TCR clone 210429 (TRAV4, TRAJ39)
FLVGPNNNAGNMLTF

SEQ ID NO: 420858 - protein, 14 aa, Homo sapiens
  CDR3 for beta chain variable domain of TCR clone 210429 (TRBV19, TRBJ2-7)
CASNFRDTFTGMYF

SEQ ID NO: 420859 - protein, 13 aa, Homo sapiens
  CDR3 for alpha chain variable domain of TCR clone 210430 (TRAV3, TRAJ15)
CAVRDQAGTALIF

SEQ ID NO: 420860 - protein, 13 aa, Homo sapiens
  CDR3 for beta chain variable domain of TCR clone 210430 (TRBV5-1, TRBJ1-5)
CASSLAQDQPQHF

SEQ ID NO: 420861 - protein, 17 aa, Homo sapiens
  CDR3 for alpha chain variable domain of TCR clone 210431 (TRAV38-1, TRAJ43)
CAFMKHNSGRHALCSRD

SEQ ID NO: 420862 - protein, 11 aa, Homo sapiens
  CDR3 for beta chain variable domain of TCR clone 210431 (TRBV7-9, TRBJ2-3)
CASSYTDTQYF

SEQ ID NO: 420863 - protein, 13 aa, Homo sapiens
  CDR3 for alpha chain variable domain of TCR clone 210432 (TRAV27, TRAJ49)
CAPRPDTGNQFYF

SEQ ID NO: 420864 - protein, 18 aa, Homo sapiens
  CDR3 for beta chain variable domain of TCR clone 210432 (TRBV7-3, TRBJ2-5)
CASSLGGAAQGRWETQYF

SEQ ID NO: 420865 - protein, 15 aa, Homo sapiens
  CDR3 for alpha chain variable domain of TCR clone 210433 (TRAV17, TRAJ28)
FATVDSGAGSYQLTF

SEQ ID NO: 420866 - protein, 13 aa, Homo sapiens
  CDR3 for beta chain variable domain of TCR clone 210433 (TRBV5-4, TRBJ2-5)
CASSRQEGETQYF

SEQ ID NO: 420867 - protein, 14 aa, Homo sapiens
  CDR3 for alpha chain variable domain of TCR clone 210434 (TRAV35, TRAJ42)
CAGLYGGSQGNLIF

SEQ ID NO: 420868 - protein, 15 aa, Homo sapiens
  CDR3 for beta chain variable domain of TCR clone 210434 (TRBV7-9, TRBJ2-1)
CASSLGWGRANEQFF

SEQ ID NO: 420869 - protein, 15 aa, Homo sapiens
  CDR3 for alpha chain variable domain of TCR clone 210435 (TRAV2, TRAJ37)
CAVEDGSSNTGKLIL

SEQ ID NO: 420870 - protein, 13 aa, Homo sapiens
  CDR3 for beta chain variable domain of TCR clone 210435 (TRBV20-1, TRBJ1-6)
CSTFREGNSPLHF

SEQ ID NO: 420871 - protein, 16 aa, Homo sapiens
  CDR3 for alpha chain variable domain of TCR clone 210436 (TRAV12-2, TRAJ43)
RAGDDMRFGAGTRLTV

SEQ ID NO: 420872 - protein, 16 aa, Homo sapiens
  CDR3 for beta chain variable domain of TCR clone 210436 (TRBV2, TRBJ2-4)
CASSEAPGGEQNIQYF

SEQ ID NO: 420873 - protein, 14 aa, Homo sapiens
  CDR3 for alpha chain variable domain of TCR clone 210437 (TRAV8-1, TRAJ34)
CAVITTYNTDELIF

SEQ ID NO: 420874 - protein, 14 aa, Homo sapiens
  CDR3 for beta chain variable domain of TCR clone 210437 (TRBV11-3, TRBJ1-3)
CASSHNGQGNTIYF

SEQ ID NO: 420875 - protein, 14 aa, Homo sapiens
  CDR3 for alpha chain variable domain of TCR clone 210438 (TRAV17, TRAJ39)
CATDPVRAGNMPTF

SEQ ID NO: 420876 - protein, 15 aa, Homo sapiens
  CDR3 for beta chain variable domain of TCR clone 210438 (TRBV13, TRBJ1-5)
CASRFGQGGVQPQHF

SEQ ID NO: 420877 - protein, 14 aa, Homo sapiens
  CDR3 for alpha chain variable domain of TCR clone 210439 (TRAV12-1, TRAJ17)
CVVNYKAAGNKLTF

SEQ ID NO: 420878 - protein, 13 aa, Homo sapiens
  CDR3 for beta chain variable domain of TCR clone 210439 (TRBV20-1, TRBJ1-1)
CSARGGGNTEAFC

SEQ ID NO: 420879 - protein, 14 aa, Homo sapiens
  CDR3 for alpha chain variable domain of TCR clone 210440 (TRAV13-1, TRAJ44)
CAAKATGTASILTF

SEQ ID NO: 420880 - protein, 14 aa, Homo sapiens
  CDR3 for beta chain variable domain of TCR clone 210440 (TRBV19, TRBJ2-2)
CASSTLHRSGELFF

SEQ ID NO: 420881 - protein, 15 aa, Homo sapiens
  CDR3 for alpha chain variable domain of TCR clone 210441 (TRAV10, TRAJ6)
CVVRPRTAGSYIPTF

SEQ ID NO: 420882 - protein, 14 aa, Homo sapiens
  CDR3 for beta chain variable domain of TCR clone 210441 (TRBV20-1, TRBJ2-4)
CSASGRVGENIQYF

SEQ ID NO: 420883 - protein, 18 aa, Homo sapiens
  CDR3 for alpha chain variable domain of TCR clone 210442 (TRAV21, TRAJ52)
CAVRPSPAGGTSYGKLTF

SEQ ID NO: 420884 - protein, 17 aa, Homo sapiens
  CDR3 for beta chain variable domain of TCR clone 210442 (TRBV13, TRBJ2-3)
CASILSRVAGGEEYAVF

SEQ ID NO: 420885 - protein, 16 aa, Homo sapiens
  CDR3 for alpha chain variable domain of TCR clone 210443 (TRAV12-3, TRAJ53)
CAMSPGSGGSNYKLAF

SEQ ID NO: 420886 - protein, 16 aa, Homo sapiens
  CDR3 for beta chain variable domain of TCR clone 210443 (TRBV19, TRBJ2-1)
RASSKAGPSSYNEQFF

SEQ ID NO: 420887 - protein, 14 aa, Homo sapiens
  CDR3 for alpha chain variable domain of TCR clone 210444 (TRAV12-2, TRAJ8)
CAVKENTGFQKLVF

SEQ ID NO: 420888 - protein, 13 aa, Homo sapiens
  CDR3 for beta chain variable domain of TCR clone 210444 (TRBV18, TRBJ1-2)
CASSASATEGYIF

SEQ ID NO: 420889 - protein, 14 aa, Homo sapiens
  CDR3 for alpha chain variable domain of TCR clone 210445 (TRAV13-1, TRAJ13)
CAASRVGGYQKVTF

SEQ ID NO: 420890 - protein, 17 aa, Homo sapiens
  CDR3 for beta chain variable domain of TCR clone 210445 (TRBV15, TRBJ1-5)
CATSRAAPGTRDQPQHF

SEQ ID NO: 420891 - protein, 14 aa, Homo sapiens
  CDR3 for alpha chain variable domain of TCR clone 210446 (TRAV2, TRAJ44)
CCGGNTGTASKLIF

SEQ ID NO: 420892 - protein, 15 aa, Homo sapiens
  CDR3 for beta chain variable domain of TCR clone 210446 (TRBV11-2, TRBJ2-1)
CASSPAGQSLNEQFF

SEQ ID NO: 420893 - protein, 11 aa, Homo sapiens
  CDR3 for alpha chain variable domain of TCR clone 210447 (TRAV12-3, TRAJ27)
CAMANAGKSTF

SEQ ID NO: 420894 - protein, 13 aa, Homo sapiens
  CDR3 for beta chain variable domain of TCR clone 210447 (TRBV20-1, TRBJ1-1)
SAVLVGGNTEAFF

SEQ ID NO: 420895 - protein, 13 aa, Homo sapiens
  CDR3 for alpha chain variable domain of TCR clone 210448 (TRAV23/DV6, TRAJ31)
CAARRGNNARLMF

SEQ ID NO: 420896 - protein, 14 aa, Homo sapiens
  CDR3 for beta chain variable domain of TCR clone 210448 (TRBV7-2, TRBJ1-3)
CASSLGTAGNTIYF

SEQ ID NO: 420897 - protein, 12 aa, Homo sapiens
  CDR3 for alpha chain variable domain of TCR clone 210449 (TRAV12-3, TRAJ17)
CAMTLTGNKLTF

SEQ ID NO: 420898 - protein, 15 aa, Homo sapiens
  CDR3 for beta chain variable domain of TCR clone 210449 (TRBV20-1, TRBJ2-7)
CSARDLVSGMDEQHF

SEQ ID NO: 420899 - protein, 13 aa, Homo sapiens
  CDR3 for alpha chain variable domain of TCR clone 210450 (TRAV17, TRAJ9)
CATDYPGGFKTIF

SEQ ID NO: 420900 - protein, 15 aa, Homo sapiens
  CDR3 for beta chain variable domain of TCR clone 210450 (TRBV6-5, TRBJ1-2)
CASSYSQAFNYGYTF

SEQ ID NO: 420901 - protein, 17 aa, Homo sapiens
  CDR3 for alpha chain variable domain of TCR clone 210451 (TRAV3, TRAJ6)
CAVRDGPKAGGIYIPTF

SEQ ID NO: 420902 - protein, 14 aa, Homo sapiens
  CDR3 for beta chain variable domain of TCR clone 210451 (TRBV7-2, TRBJ2-7)
CASSPKTSFYEQYF

SEQ ID NO: 420903 - protein, 15 aa, Homo sapiens
  CDR3 for alpha chain variable domain of TCR clone 210452 (TRAV4, TRAJ42)
CLVGGYGGSQGNRIC

SEQ ID NO: 420904 - protein, 16 aa, Homo sapiens
  CDR3 for beta chain variable domain of TCR clone 210452 (TRBV27, TRBJ1-1)
CASSTRTGGVGTEAFF

SEQ ID NO: 420905 - protein, 15 aa, Homo sapiens
  CDR3 for alpha chain variable domain of TCR clone 210453 (TRAV3, TRAJ22)
CAVRDRGGYARQMNF

SEQ ID NO: 420906 - protein, 13 aa, Homo sapiens
  CDR3 for beta chain variable domain of TCR clone 210453 (TRBV7-3, TRBJ2-5)
CASSFRGGETQYF

SEQ ID NO: 420907 - protein, 15 aa, Homo sapiens
  CDR3 for alpha chain variable domain of TCR clone 210454 (TRAV25, TRAJ53)
CAATGGGGSNYKLTF

SEQ ID NO: 420908 - protein, 15 aa, Homo sapiens
  CDR3 for beta chain variable domain of TCR clone 210454 (TRBV5-5, TRBJ2-1)
CASSPEAETYNEQFF

SEQ ID NO: 420909 - protein, 11 aa, Homo sapiens
  CDR3 for alpha chain variable domain of TCR clone 210455 (TRAV12-1, TRAJ21)
CVVNNFNKFYF

SEQ ID NO: 420910 - protein, 19 aa, Homo sapiens
  CDR3 for beta chain variable domain of TCR clone 210455 (TRBV25-1, TRBJ2-2)
CAILVYRVDRGRKTGELFF

SEQ ID NO: 420911 - protein, 14 aa, Homo sapiens
  CDR3 for alpha chain variable domain of TCR clone 210456 (TRAV26-1, TRAJ40)
CCVLLHRGTYKYIF

SEQ ID NO: 420912 - protein, 15 aa, Homo sapiens
  CDR3 for beta chain variable domain of TCR clone 210456 (TRBV19, TRBJ2-1)
CASSSPGVPLDEQFF

SEQ ID NO: 420913 - protein, 14 aa, Homo sapiens
  CDR3 for alpha chain variable domain of TCR clone 210457 (TRAV26-1, TRAJ45)
CIEVTGGGADGLTF

SEQ ID NO: 420914 - protein, 17 aa, Homo sapiens
  CDR3 for beta chain variable domain of TCR clone 210457 (TRBV5-1, TRBJ2-3)
CASSKIGLADRTDTQYF

SEQ ID NO: 420915 - protein, 13 aa, Homo sapiens
  CDR3 for alpha chain variable domain of TCR clone 210458 (TRAV8-4, TRAJ30)
CAASVNRDDKSIF

SEQ ID NO: 420916 - protein, 13 aa, Homo sapiens
  CDR3 for beta chain variable domain of TCR clone 210458 (TRBV3-1, TRBJ2-2)
CASLARGSGELFF

SEQ ID NO: 420917 - protein, 12 aa, Homo sapiens
  CDR3 for alpha chain variable domain of TCR clone 210459 (TRAV10, TRAJ31)
CVVRAHSARLMF

SEQ ID NO: 420918 - protein, 13 aa, Homo sapiens
  CDR3 for beta chain variable domain of TCR clone 210459 (TRBV7-3, TRBJ2-7)
CASSKRRGGEQYF

SEQ ID NO: 420919 - protein, 15 aa, Homo sapiens
  CDR3 for alpha chain variable domain of TCR clone 210460 (TRAV12-3, TRAJ27)
CAMRAYNTNAGKSTF

SEQ ID NO: 420920 - protein, 13 aa, Homo sapiens
  CDR3 for beta chain variable domain of TCR clone 210460 (TRBV11-2, TRBJ2-5)
CASSRGPSDTQYF

SEQ ID NO: 420921 - protein, 22 aa, Homo sapiens
  CDR3 for alpha chain variable domain of TCR clone 210461 (TRAV13-1, TRAJ9)
CAASALLEASKLSLEQEQDYLL

SEQ ID NO: 420922 - protein, 13 aa, Homo sapiens
  CDR3 for beta chain variable domain of TCR clone 210461 (TRBV20-1, TRBJ1-1)
CSAGTVGNTEAFF

SEQ ID NO: 420923 - protein, 16 aa, Homo sapiens
  CDR3 for alpha chain variable domain of TCR clone 210462 (TRAV4, TRAJ22)
FPVGDLYSGSARQLTF

SEQ ID NO: 420924 - protein, 16 aa, Homo sapiens
  CDR3 for beta chain variable domain of TCR clone 210462 (TRBV7-9, TRBJ2-1)
CASSDVAGGSYNEQFF

SEQ ID NO: 420925 - protein, 15 aa, Homo sapiens
  CDR3 for alpha chain variable domain of TCR clone 210463 (TRAV12-3, TRAJ6)
CAMSATTGGSYIPTF

SEQ ID NO: 420926 - protein, 16 aa, Homo sapiens
  CDR3 for beta chain variable domain of TCR clone 210463 (TRBV13, TRBJ2-2)
CASSPRTGEHTGELVF

SEQ ID NO: 420927 - protein, 16 aa, Homo sapiens
  CDR3 for alpha chain variable domain of TCR clone 210464 (TRAV26-1, TRAJ23)
CIVRVHPYHQGGKLIF

SEQ ID NO: 420928 - protein, 13 aa, Homo sapiens
  CDR3 for beta chain variable domain of TCR clone 210464 (TRBV20-1, TRBJ2-5)
CSARGDYQETQYF

SEQ ID NO: 420929 - protein, 12 aa, Homo sapiens
  CDR3 for alpha chain variable domain of TCR clone 210465 (TRAV12-3, TRAJ43)
CAISSNNNDMRF

SEQ ID NO: 420930 - protein, 15 aa, Homo sapiens
  CDR3 for beta chain variable domain of TCR clone 210465 (TRBV28, TRBJ1-5)
CASSLPQQGEQPQHF

SEQ ID NO: 420931 - protein, 14 aa, Homo sapiens
  CDR3 for alpha chain variable domain of TCR clone 210466 (TRAV12-2, TRAJ13)
CAVKRTGGYPKVTF

SEQ ID NO: 420932 - protein, 16 aa, Homo sapiens
  CDR3 for beta chain variable domain of TCR clone 210466 (TRBV4-2, TRBJ2-4)
CASSQELRRAKNIQYF

SEQ ID NO: 420933 - protein, 18 aa, Homo sapiens
  CDR3 for alpha chain variable domain of TCR clone 210467 (TRAV26-1, TRAJ22)
SIVRVALISSGSARQLTF

SEQ ID NO: 420934 - protein, 13 aa, Homo sapiens
  CDR3 for beta chain variable domain of TCR clone 210467 (TRBV13, TRBJ2-5)
CASSPEVGETQYF

SEQ ID NO: 420935 - protein, 15 aa, Homo sapiens
  CDR3 for alpha chain variable domain of TCR clone 210468 (TRAV1-2, TRAJ12)
CAVIPEVDGSYKLIF

SEQ ID NO: 420936 - protein, 12 aa, Homo sapiens
  CDR3 for beta chain variable domain of TCR clone 210468 (TRBV11-3, TRBJ2-2)
CASSLPTGELFF

SEQ ID NO: 420937 - protein, 16 aa, Homo sapiens
  CDR3 for alpha chain variable domain of TCR clone 210469 (TRAV30, TRAJ24)
CGTEIVDADSWGKFQF

SEQ ID NO: 420938 - protein, 15 aa, Homo sapiens
  CDR3 for beta chain variable domain of TCR clone 210469 (TRBV18, TRBJ2-1)
CASSPDRGRDNEQFF

SEQ ID NO: 420939 - protein, 19 aa, Homo sapiens
  CDR3 for alpha chain variable domain of TCR clone 210470 (TRAV17, TRAJ57)
CFLLLCYGPLQGGSEKLVF

SEQ ID NO: 420940 - protein, 13 aa, Homo sapiens
  CDR3 for beta chain variable domain of TCR clone 210470 (TRBV27, TRBJ1-4)
CASSLMGDEKLFF

SEQ ID NO: 420941 - protein, 13 aa, Homo sapiens
  CDR3 for alpha chain variable domain of TCR clone 210471 (TRAV20, TRAJ40)
CAVPFSGTYKYIF

SEQ ID NO: 420942 - protein, 17 aa, Homo sapiens
  CDR3 for beta chain variable domain of TCR clone 210471 (TRBV13, TRBJ2-3)
WASSLSRVAGGRNTQYF

SEQ ID NO: 420943 - protein, 13 aa, Homo sapiens
  CDR3 for alpha chain variable domain of TCR clone 210472 (TRAV12-2, TRAJ12)
CAVNWDSSYKLIF

SEQ ID NO: 420944 - protein, 13 aa, Homo sapiens
  CDR3 for beta chain variable domain of TCR clone 210472 (TRBV7-2, TRBJ1-5)
CASSLAPDQPQHF

SEQ ID NO: 420945 - protein, 15 aa, Homo sapiens
  CDR3 for alpha chain variable domain of TCR clone 210473 (TRAV27, TRAJ38)
CAARRNAGNTRKRIW

SEQ ID NO: 420946 - protein, 14 aa, Homo sapiens
  CDR3 for beta chain variable domain of TCR clone 210473 (TRBV7-8, TRBJ2-3)
CASSLEAGTDTQYF

SEQ ID NO: 420947 - protein, 13 aa, Homo sapiens
  CDR3 for alpha chain variable domain of TCR clone 210474 (TRAV8-6, TRAJ5)
CAVLDTGRRALTF

SEQ ID NO: 420948 - protein, 14 aa, Homo sapiens
  CDR3 for beta chain variable domain of TCR clone 210474 (TRBV7-8, TRBJ2-3)
CASSFPDGQDTQYF

SEQ ID NO: 420949 - protein, 10 aa, Homo sapiens
  CDR3 for alpha chain variable domain of TCR clone 210475 (TRAV36/DV7, TRAJ48)
CAVGNEKLTF

SEQ ID NO: 420950 - protein, 15 aa, Homo sapiens
  CDR3 for beta chain variable domain of TCR clone 210475 (TRBV27, TRBJ1-6)
CASSFDRGLGSPLHF

SEQ ID NO: 420951 - protein, 19 aa, Homo sapiens
  CDR3 for alpha chain variable domain of TCR clone 210476 (TRAV2, TRAJ20)
ILQVREADAAVYRDCKLSF

SEQ ID NO: 420952 - protein, 17 aa, Homo sapiens
  CDR3 for beta chain variable domain of TCR clone 210476 (TRBV7-3, TRBJ2-3)
CASSPGGLAGFGDTQYF

SEQ ID NO: 420953 - protein, 12 aa, Homo sapiens
  CDR3 for alpha chain variable domain of TCR clone 210477 (TRAV1-1, TRAJ20)
CAVREDDYKLGF

SEQ ID NO: 420954 - protein, 14 aa, Homo sapiens
  CDR3 for beta chain variable domain of TCR clone 210477 (TRBV7-2, TRBJ2-7)
CASSPKTSFYEQYF

SEQ ID NO: 420955 - protein, 12 aa, Homo sapiens
  CDR3 for alpha chain variable domain of TCR clone 210478 (TRAV16, TRAJ56)
CSYTGANSKLTF

SEQ ID NO: 420956 - protein, 14 aa, Homo sapiens
  CDR3 for beta chain variable domain of TCR clone 210478 (TRBV11-2, TRBJ2-7)
CASSLGAGAYEQYF

SEQ ID NO: 420957 - protein, 13 aa, Homo sapiens
  CDR3 for alpha chain variable domain of TCR clone 210479 (TRAV13-1, TRAJ33)
CAASRAGNYPLIW

SEQ ID NO: 420958 - protein, 15 aa, Homo sapiens
  CDR3 for beta chain variable domain of TCR clone 210479 (TRBV2, TRBJ2-7)
EDSAMYFCASSEQYF

SEQ ID NO: 420959 - protein, 17 aa, Homo sapiens
  CDR3 for alpha chain variable domain of TCR clone 210480 (TRAV3, TRAJ42)
CDVRDRDYGGSQGNLIF

SEQ ID NO: 420960 - protein, 14 aa, Homo sapiens
  CDR3 for beta chain variable domain of TCR clone 210480 (TRBV25-1, TRBJ1-1)
CASTHLGGNTEAFF

SEQ ID NO: 420961 - protein, 14 aa, Homo sapiens
  CDR3 for alpha chain variable domain of TCR clone 210481 (TRAV17, TRAJ4)
CATAPLGGYNKLIF

SEQ ID NO: 420962 - protein, 13 aa, Homo sapiens
  CDR3 for beta chain variable domain of TCR clone 210481 (TRBV12-4, TRBJ1-3)
CASSLASGNTIYF

SEQ ID NO: 420963 - protein, 17 aa, Homo sapiens
  CDR3 for alpha chain variable domain of TCR clone 210482 (TRAV12-2, TRAJ52)
CAVNKGAGGTSYGKLTF

SEQ ID NO: 420964 - protein, 13 aa, Homo sapiens
  CDR3 for beta chain variable domain of TCR clone 210482 (TRBV20-1, TRBJ1-1)
CSARGGGNTEAFF

SEQ ID NO: 420965 - protein, 17 aa, Homo sapiens
  CDR3 for alpha chain variable domain of TCR clone 210483 (TRAV4, TRAJ13)
CLVGVQGSSGGYQKVTF

SEQ ID NO: 420966 - protein, 14 aa, Homo sapiens
  CDR3 for beta chain variable domain of TCR clone 210483 (TRBV11-1, TRBJ2-7)
CASSFRQGSYEQYF

SEQ ID NO: 420967 - protein, 14 aa, Homo sapiens
  CDR3 for alpha chain variable domain of TCR clone 210484 (TRAV2, TRAJ9)
CAVEDHSGGFKTIF

SEQ ID NO: 420968 - protein, 17 aa, Homo sapiens
  CDR3 for beta chain variable domain of TCR clone 210484 (TRBV20-1, TRBJ2-7)
CSATRAGGVAGVEEQYF

SEQ ID NO: 420969 - protein, 13 aa, Homo sapiens
  CDR3 for alpha chain variable domain of TCR clone 210485 (TRAV12-3, TRAJ33)
CAMSVNSNYQLIW

SEQ ID NO: 420970 - protein, 13 aa, Homo sapiens
  CDR3 for beta chain variable domain of TCR clone 210485 (TRBV7-2, TRBJ2-2)
CASSLAVIGELFL

SEQ ID NO: 420971 - protein, 15 aa, Homo sapiens
  CDR3 for alpha chain variable domain of TCR clone 210486 (TRAV13-2, TRAJ10)
CAENRDTGGGNKLTF

SEQ ID NO: 420972 - protein, 13 aa, Homo sapiens
  CDR3 for beta chain variable domain of TCR clone 210486 (TRBV28, TRBJ2-7)
CASRSSGVYEQYF

SEQ ID NO: 420973 - protein, 13 aa, Homo sapiens
  CDR3 for alpha chain variable domain of TCR clone 210487 (TRAV12-2, TRAJ4)
CAVRSGGYNKLIF

SEQ ID NO: 420974 - protein, 15 aa, Homo sapiens
  CDR3 for beta chain variable domain of TCR clone 210487 (TRBV10-3, TRBJ2-1)
CAISAVQDRAYEQFF

SEQ ID NO: 420975 - protein, 16 aa, Homo sapiens
  CDR3 for alpha chain variable domain of TCR clone 210488 (TRAV23/DV6, TRAJ48)
CSASGVVNFGNEKLTF

SEQ ID NO: 420976 - protein, 15 aa, Homo sapiens
  CDR3 for beta chain variable domain of TCR clone 210488 (TRBV7-9, TRBJ2-1)
CASSLGWGRANEQFF

SEQ ID NO: 420977 - protein, 14 aa, Homo sapiens
  CDR3 for alpha chain variable domain of TCR clone 210489 (TRAV12-2, TRAJ11)
CAVEGGSGYSTLTF

SEQ ID NO: 420978 - protein, 15 aa, Homo sapiens
  CDR3 for beta chain variable domain of TCR clone 210489 (TRBV7-9, TRBJ1-4)
CASSARTGGNEKLFF

SEQ ID NO: 420979 - protein, 13 aa, Homo sapiens
  CDR3 for alpha chain variable domain of TCR clone 210490 (TRAV21, TRAJ37)
CAVSSGNTGKLIF

SEQ ID NO: 420980 - protein, 14 aa, Homo sapiens
  CDR3 for beta chain variable domain of TCR clone 210490 (TRBV11-2, TRBJ2-7)
CASSLGAGAYEQYF

SEQ ID NO: 420981 - protein, 17 aa, Homo sapiens
  CDR3 for alpha chain variable domain of TCR clone 210491 (TRAV16, TRAJ42)
CALSPKLYGGSQGNLIF

SEQ ID NO: 420982 - protein, 13 aa, Homo sapiens
  CDR3 for beta chain variable domain of TCR clone 210491 (TRBV19, TRBJ1-5)
CASSTRRGQPQHC

SEQ ID NO: 420983 - protein, 12 aa, Homo sapiens
  CDR3 for alpha chain variable domain of TCR clone 210492 (TRAV29/DV5, TRAJ34)
CAASGNTDQLIF

SEQ ID NO: 420984 - protein, 15 aa, Homo sapiens
  CDR3 for beta chain variable domain of TCR clone 210492 (TRBV10-2, TRBJ2-6)
CASSEQGTGANVLTF

SEQ ID NO: 420985 - protein, 14 aa, Homo sapiens
  CDR3 for alpha chain variable domain of TCR clone 210493 (TRAV17, TRAJ6)
CATDASGGSYIPTF

SEQ ID NO: 420986 - protein, 19 aa, Homo sapiens
  CDR3 for beta chain variable domain of TCR clone 210493 (TRBV4-3, TRBJ2-7)
CASSQDFIGWEVTPYEQYF

SEQ ID NO: 420987 - protein, 14 aa, Homo sapiens
  CDR3 for alpha chain variable domain of TCR clone 210494 (TRAV1-2, TRAJ8)
WAVREDTGFQKLVF

SEQ ID NO: 420988 - protein, 17 aa, Homo sapiens
  CDR3 for beta chain variable domain of TCR clone 210494 (TRBV11-3, TRBJ2-3)
CASSPGSSGGRTDTQYF

SEQ ID NO: 420989 - protein, 12 aa, Homo sapiens
  CDR3 for alpha chain variable domain of TCR clone 210495 (TRAV13-1, TRAJ21)
CAAKEGFIKFYF

SEQ ID NO: 420990 - protein, 14 aa, Homo sapiens
  CDR3 for beta chain variable domain of TCR clone 210495 (TRBV7-2, TRBJ2-7)
CASSPKTSFYEQYF

SEQ ID NO: 420991 - protein, 14 aa, Homo sapiens
  CDR3 for alpha chain variable domain of TCR clone 210496 (TRAV12-1, TRAJ37)
CVVTGSSNTGKLIF

SEQ ID NO: 420992 - protein, 20 aa, Homo sapiens
  CDR3 for beta chain variable domain of TCR clone 210496 (TRBV23-1, TRBJ2-5)
CTSAPAVPERVLLIQETQYF

SEQ ID NO: 420993 - protein, 15 aa, Homo sapiens
  CDR3 for alpha chain variable domain of TCR clone 210497 (TRAV12-2, TRAJ9)
CAVNNERTEGFKTIF

SEQ ID NO: 420994 - protein, 14 aa, Homo sapiens
  CDR3 for beta chain variable domain of TCR clone 210497 (TRBV4-1, TRBJ1-4)
CASSQERKNEKLFF

SEQ ID NO: 420995 - protein, 16 aa, Homo sapiens
  CDR3 for alpha chain variable domain of TCR clone 210498 (TRAV23/DV6, TRAJ23)
CAASHGEPGRKAYLRT

SEQ ID NO: 420996 - protein, 12 aa, Homo sapiens
  CDR3 for beta chain variable domain of TCR clone 210498 (TRBV11-2, TRBJ2-5)
CASSLGQETQYF

SEQ ID NO: 420997 - protein, 13 aa, Homo sapiens
  CDR3 for alpha chain variable domain of TCR clone 210499 (TRAV20, TRAJ34)
CAVRSYNTDKLIF

SEQ ID NO: 420998 - protein, 12 aa, Homo sapiens
  CDR3 for beta chain variable domain of TCR clone 210499 (TRBV11-2, TRBJ2-1)
CASSPGNSEQFF

SEQ ID NO: 420999 - protein, 13 aa, Homo sapiens
  CDR3 for alpha chain variable domain of TCR clone 210500 (TRAV13-2, TRAJ15)
CAEKNQAGTALIF

SEQ ID NO: 421000 - protein, 15 aa, Homo sapiens
  CDR3 for beta chain variable domain of TCR clone 210500 (TRBV29-1, TRBJ2-5)
CSVAPGQGARETQYF

SEQ ID NO: 421001 - protein, 14 aa, Homo sapiens
  CDR3 for alpha chain variable domain of TCR clone 210501 (TRAV26-1, TRAJ40)
CIVRLLSGTYKYIF

SEQ ID NO: 421002 - protein, 16 aa, Homo sapiens
  CDR3 for beta chain variable domain of TCR clone 210501 (TRBV27, TRBJ2-2)
CASSSSGVSNTGELFF

SEQ ID NO: 421003 - protein, 14 aa, Homo sapiens
  CDR3 for alpha chain variable domain of TCR clone 210502 (TRAV20, TRAJ10)
CAVRVEEGGNKLTF

SEQ ID NO: 421004 - protein, 18 aa, Homo sapiens
  CDR3 for beta chain variable domain of TCR clone 210502 (TRBV24-1, TRBJ2-1)
CATSDLMFLGRGVHEQFF

SEQ ID NO: 421005 - protein, 16 aa, Homo sapiens
  CDR3 for alpha chain variable domain of TCR clone 210503 (TRAV3, TRAJ10)
CAVRDMRAGGGNKLTF

SEQ ID NO: 421006 - protein, 14 aa, Homo sapiens
  CDR3 for beta chain variable domain of TCR clone 210503 (TRBV7-2, TRBJ2-7)
CASSLPPGQGPQYF

SEQ ID NO: 421007 - protein, 12 aa, Homo sapiens
  CDR3 for alpha chain variable domain of TCR clone 210504 (TRAV27, TRAJ35)
CAGAHFGSVLHC

SEQ ID NO: 421008 - protein, 16 aa, Homo sapiens
  CDR3 for beta chain variable domain of TCR clone 210504 (TRBV6-1, TRBJ2-1)
CASISRQGSSYNEQFF

SEQ ID NO: 421009 - protein, 15 aa, Homo sapiens
  CDR3 for alpha chain variable domain of TCR clone 210505 (TRAV1-2, TRAJ36)
CAASAAQPGANNLFF

SEQ ID NO: 421010 - protein, 15 aa, Homo sapiens
  CDR3 for beta chain variable domain of TCR clone 210505 (TRBV5-1, TRBJ2-7)
CASSFSTDSVYEQYF

SEQ ID NO: 421011 - protein, 11 aa, Homo sapiens
  CDR3 for alpha chain variable domain of TCR clone 210506 (TRAV29/DV5, TRAJ49)
CAAVPGNQFYF

SEQ ID NO: 421012 - protein, 13 aa, Homo sapiens
  CDR3 for beta chain variable domain of TCR clone 210506 (TRBV12-5, TRBJ2-3)
CASGDRQSDTQYF

SEQ ID NO: 421013 - protein, 12 aa, Homo sapiens
  CDR3 for alpha chain variable domain of TCR clone 210507 (TRAV21, TRAJ30)
CAVMNRDDKIIF

SEQ ID NO: 421014 - protein, 17 aa, Homo sapiens
  CDR3 for beta chain variable domain of TCR clone 210507 (TRBV5-1, TRBJ1-1)
CASRPIRTGGVNTEAFI

SEQ ID NO: 421015 - protein, 11 aa, Homo sapiens
  CDR3 for alpha chain variable domain of TCR clone 210508 (TRAV13-2, TRAJ39)
CAENAGNMLTF

SEQ ID NO: 421016 - protein, 14 aa, Homo sapiens
  CDR3 for beta chain variable domain of TCR clone 210508 (TRBV7-9, TRBJ2-7)
CASSLDRPTDEQYF

SEQ ID NO: 421017 - protein, 11 aa, Homo sapiens
  CDR3 for alpha chain variable domain of TCR clone 210509 (TRAV2, TRAJ20)
CAVADDYKLSF

SEQ ID NO: 421018 - protein, 16 aa, Homo sapiens
  CDR3 for beta chain variable domain of TCR clone 210509 (TRBV7-3, TRBJ2-2)
CASSLKRGTLSGELFF

SEQ ID NO: 421019 - protein, 14 aa, Homo sapiens
  CDR3 for alpha chain variable domain of TCR clone 210510 (TRAV26-1, TRAJ38)
CIADNAGNNRKLIW

SEQ ID NO: 421020 - protein, 13 aa, Homo sapiens
  CDR3 for beta chain variable domain of TCR clone 210510 (TRBV11-3, TRBJ2-7)
CASSLDKLYEQYF

SEQ ID NO: 421021 - protein, 13 aa, Homo sapiens
  CDR3 for alpha chain variable domain of TCR clone 210511 (TRAV1-1, TRAJ31)
CATYLNNNARLMF

SEQ ID NO: 421022 - protein, 14 aa, Homo sapiens
  CDR3 for beta chain variable domain of TCR clone 210511 (TRBV4-1, TRBJ2-5)
CASSRSGSGETQYF

SEQ ID NO: 421023 - protein, 13 aa, Homo sapiens
  CDR3 for alpha chain variable domain of TCR clone 210512 (TRAV21, TRAJ27)
CAARPGDAGKSTF

SEQ ID NO: 421024 - protein, 14 aa, Homo sapiens
  CDR3 for beta chain variable domain of TCR clone 210512 (TRBV20-1, TRBJ2-1)
CSAAGSGEYNEQFF

SEQ ID NO: 421025 - protein, 13 aa, Homo sapiens
  CDR3 for alpha chain variable domain of TCR clone 210513 (TRAV2, TRAJ15)
CAVASQAETALIF

SEQ ID NO: 421026 - protein, 15 aa, Homo sapiens
  CDR3 for beta chain variable domain of TCR clone 210513 (TRBV27, TRBJ2-5)
CASSLYPRGGETQYF

SEQ ID NO: 421027 - protein, 12 aa, Homo sapiens
  CDR3 for alpha chain variable domain of TCR clone 210514 (TRAV17, TRAJ12)
CATLRSSYKLIF

SEQ ID NO: 421028 - protein, 16 aa, Homo sapiens
  CDR3 for beta chain variable domain of TCR clone 210514 (TRBV28, TRBJ2-7)
CASILFFETGSPEQYF

SEQ ID NO: 421029 - protein, 14 aa, Homo sapiens
  CDR3 for alpha chain variable domain of TCR clone 210515 (TRAV20, TRAJ29)
CAVQESFRKHTSCL

SEQ ID NO: 421030 - protein, 15 aa, Homo sapiens
  CDR3 for beta chain variable domain of TCR clone 210515 (TRBV6-6, TRBJ2-5)
CASSPGGGLEETQYF

SEQ ID NO: 421031 - protein, 13 aa, Homo sapiens
  CDR3 for alpha chain variable domain of TCR clone 210516 (TRAV17, TRAJ40)
CSGALGGTYKYIF

SEQ ID NO: 421032 - protein, 16 aa, Homo sapiens
  CDR3 for beta chain variable domain of TCR clone 210516 (TRBV7-2, TRBJ1-4)
CASSLAPGRRDEKLFF

SEQ ID NO: 421033 - protein, 15 aa, Homo sapiens
  CDR3 for alpha chain variable domain of TCR clone 210517 (TRAV3, TRAJ3)
CAVRDRRSSASKIIF

SEQ ID NO: 421034 - protein, 14 aa, Homo sapiens
  CDR3 for beta chain variable domain of TCR clone 210517 (TRBV12-5, TRBJ2-5)
CASGSRTHQETQYF

SEQ ID NO: 421035 - protein, 14 aa, Homo sapiens
  CDR3 for alpha chain variable domain of TCR clone 210518 (TRAV12-3, TRAJ29)
CAMSPYSGNTPLVF

SEQ ID NO: 421036 - protein, 17 aa, Homo sapiens
  CDR3 for beta chain variable domain of TCR clone 210518 (TRBV11-2, TRBJ2-1)
CASSLYPPGVEYNEQFF

SEQ ID NO: 421037 - protein, 16 aa, Homo sapiens
  CDR3 for alpha chain variable domain of TCR clone 210519 (TRAV12-3, TRAJ53)
CAMSPGSGGSNYKLTF

SEQ ID NO: 421038 - protein, 16 aa, Homo sapiens
  CDR3 for beta chain variable domain of TCR clone 210519 (TRBV7-6, TRBJ1-6)
CASSSLPAGEYSPLHF

SEQ ID NO: 421039 - protein, 15 aa, Homo sapiens
  CDR3 for alpha chain variable domain of TCR clone 210520 (TRAV3, TRAJ9)
CAVRARNTGGFKTIF

SEQ ID NO: 421040 - protein, 18 aa, Homo sapiens
  CDR3 for beta chain variable domain of TCR clone 210520 (TRBV11-2, TRBJ1-3)
CASTPRVTTLGSGNTIYF

SEQ ID NO: 421041 - protein, 14 aa, Homo sapiens
  CDR3 for alpha chain variable domain of TCR clone 210521 (TRAV17, TRAJ56)
CATVPAGANSTLTF

SEQ ID NO: 421042 - protein, 13 aa, Homo sapiens
  CDR3 for beta chain variable domain of TCR clone 210521 (TRBV12-4, TRBJ2-2)
CASSITGSGELFF

SEQ ID NO: 421043 - protein, 22 aa, Homo sapiens
  CDR3 for alpha chain variable domain of TCR clone 210522 (TRAV24, TRAJ42)
CAFNGAKEISSLEKVLNSLLNQ

SEQ ID NO: 421044 - protein, 15 aa, Homo sapiens
  CDR3 for beta chain variable domain of TCR clone 210522 (TRBV5-5, TRBJ1-5)
CASSSTPGSNQPQHF

SEQ ID NO: 421045 - protein, 12 aa, Homo sapiens
  CDR3 for alpha chain variable domain of TCR clone 210523 (TRAV2, TRAJ33)
CAVEDSNYQLIW

SEQ ID NO: 421046 - protein, 14 aa, Homo sapiens
  CDR3 for beta chain variable domain of TCR clone 210523 (TRBV7-2, TRBJ1-2)
CASSQTGSTYGYTF

SEQ ID NO: 421047 - protein, 13 aa, Homo sapiens
  CDR3 for alpha chain variable domain of TCR clone 210524 (TRAV8-3, TRAJ48)
CAVVPFGNEKLTF

SEQ ID NO: 421048 - protein, 14 aa, Homo sapiens
  CDR3 for beta chain variable domain of TCR clone 210524 (TRBV12-5, TRBJ2-3)
CASEGIPSTDTQYF

SEQ ID NO: 421049 - protein, 14 aa, Homo sapiens
  CDR3 for alpha chain variable domain of TCR clone 210525 (TRAV13-1, TRAJ3)
CAASKSSSASKIIF

SEQ ID NO: 421050 - protein, 13 aa, Homo sapiens
  CDR3 for beta chain variable domain of TCR clone 210525 (TRBV25-1, TRBJ2-5)
CASRESGRETQYF

SEQ ID NO: 421051 - protein, 14 aa, Homo sapiens
  CDR3 for alpha chain variable domain of TCR clone 210526 (TRAV12-3, TRAJ10)
SHLPLTGGGNKLTF

SEQ ID NO: 421052 - protein, 15 aa, Homo sapiens
  CDR3 for beta chain variable domain of TCR clone 210526 (TRBV18, TRBJ2-1)
CASSPPSASDNEQFF

SEQ ID NO: 421053 - protein, 14 aa, Homo sapiens
  CDR3 for alpha chain variable domain of TCR clone 210527 (TRAV12-2, TRAJ13)
CAVKKTGGYQKVTF

SEQ ID NO: 421054 - protein, 15 aa, Homo sapiens
  CDR3 for beta chain variable domain of TCR clone 210527 (TRBV27, TRBJ2-7)
CASSPYRGRVYEQYF

SEQ ID NO: 421055 - protein, 14 aa, Homo sapiens
  CDR3 for alpha chain variable domain of TCR clone 210528 (TRAV1-2, TRAJ24)
CAVLTTDSWGKFQF

SEQ ID NO: 421056 - protein, 13 aa, Homo sapiens
  CDR3 for beta chain variable domain of TCR clone 210528 (TRBV7-9, TRBJ1-2)
CASSLKQNYGYTF

SEQ ID NO: 421057 - protein, 13 aa, Homo sapiens
  CDR3 for alpha chain variable domain of TCR clone 210529 (TRAV30, TRAJ29)
CGTEDSGNTPLVF

SEQ ID NO: 421058 - protein, 12 aa, Homo sapiens
  CDR3 for beta chain variable domain of TCR clone 210529 (TRBV11-2, TRBJ2-2)
CASSLGGGELFF

SEQ ID NO: 421059 - protein, 16 aa, Homo sapiens
  CDR3 for alpha chain variable domain of TCR clone 210530 (TRAV21, TRAJ52)
CAVTNAGGTSFGKLTF

SEQ ID NO: 421060 - protein, 11 aa, Homo sapiens
  CDR3 for beta chain variable domain of TCR clone 210530 (TRBV2, TRBJ1-1)
CASREGTEAFF

SEQ ID NO: 421061 - protein, 14 aa, Homo sapiens
  CDR3 for alpha chain variable domain of TCR clone 210531 (TRAV3, TRAJ28)
CAVRRGAGSYQRTF

SEQ ID NO: 421062 - protein, 16 aa, Homo sapiens
  CDR3 for beta chain variable domain of TCR clone 210531 (TRBV4-1, TRBJ2-7)
CASSQEWTSGPLEQFF

SEQ ID NO: 421063 - protein, 11 aa, Homo sapiens
  CDR3 for alpha chain variable domain of TCR clone 210532 (TRAV12-2, TRAJ49)
CALQGGNQFYL

SEQ ID NO: 421064 - protein, 13 aa, Homo sapiens
  CDR3 for beta chain variable domain of TCR clone 210532 (TRBV4-1, TRBJ1-1)
CASSQLGTGEAFF

SEQ ID NO: 421065 - protein, 14 aa, Homo sapiens
  CDR3 for alpha chain variable domain of TCR clone 210533 (TRAV12-3, TRAJ22)
CAMSLFGSARQLTF

SEQ ID NO: 421066 - protein, 14 aa, Homo sapiens
  CDR3 for beta chain variable domain of TCR clone 210533 (TRBV4-2, TRBJ2-1)
CASGLDRAYNEQFF

SEQ ID NO: 421067 - protein, 15 aa, Homo sapiens
  CDR3 for alpha chain variable domain of TCR clone 210534 (TRAV12-3, TRAJ42)
CAMSGHGGSQGNLIF

SEQ ID NO: 421068 - protein, 13 aa, Homo sapiens
  CDR3 for beta chain variable domain of TCR clone 210534 (TRBV19, TRBJ2-5)
CASSGRAGETRYF

SEQ ID NO: 421069 - protein, 11 aa, Homo sapiens
  CDR3 for alpha chain variable domain of TCR clone 210535 (TRAV16, TRAJ29)
WAPSGNTPLVF

SEQ ID NO: 421070 - protein, 15 aa, Homo sapiens
  CDR3 for beta chain variable domain of TCR clone 210535 (TRBV5-7, TRBJ2-7)
CASSPYFEGAYEQYF

SEQ ID NO: 421071 - protein, 13 aa, Homo sapiens
  CDR3 for alpha chain variable domain of TCR clone 210536 (TRAV12-2, TRAJ42)
CAVKRGSQGNIIF

SEQ ID NO: 421072 - protein, 13 aa, Homo sapiens
  CDR3 for beta chain variable domain of TCR clone 210536 (TRBV7-3, TRBJ1-1)
CASSQDWGAEAFF

SEQ ID NO: 421073 - protein, 11 aa, Homo sapiens
  CDR3 for alpha chain variable domain of TCR clone 210537 (TRAV3, TRAJ21)
CAVGNFNKFYF

SEQ ID NO: 421074 - protein, 15 aa, Homo sapiens
  CDR3 for beta chain variable domain of TCR clone 210537 (TRBV20-1, TRBJ2-7)
FSARDRVSGMDEQYF

SEQ ID NO: 421075 - protein, 11 aa, Homo sapiens
  CDR3 for alpha chain variable domain of TCR clone 210538 (TRAV17, TRAJ9)
CATTGGLKTIF

SEQ ID NO: 421076 - protein, 14 aa, Homo sapiens
  CDR3 for beta chain variable domain of TCR clone 210538 (TRBV19, TRBJ2-1)
CASPTFVLSGEQFF

SEQ ID NO: 421077 - protein, 13 aa, Homo sapiens
  CDR3 for alpha chain variable domain of TCR clone 210539 (TRAV19, TRAJ20)
CALSEAPRVRTTT

SEQ ID NO: 421078 - protein, 15 aa, Homo sapiens
  CDR3 for beta chain variable domain of TCR clone 210539 (TRBV10-3, TRBJ2-3)
CAISLTSGGTDTQYF

SEQ ID NO: 421079 - protein, 14 aa, Homo sapiens
  CDR3 for alpha chain variable domain of TCR clone 210540 (TRAV21, TRAJ35)
CAVMPIGFGNVLHF

SEQ ID NO: 421080 - protein, 12 aa, Homo sapiens
  CDR3 for beta chain variable domain of TCR clone 210540 (TRBV7-9, TRBJ2-7)
CASSIKREEQYC

SEQ ID NO: 421081 - protein, 11 aa, Homo sapiens
  CDR3 for alpha chain variable domain of TCR clone 210541 (TRAV12-1, TRAJ15)
WVVNAGTALIF

SEQ ID NO: 421082 - protein, 16 aa, Homo sapiens
  CDR3 for beta chain variable domain of TCR clone 210541 (TRBV28, TRBJ2-1)
CASSSRVRDSYNEQFF

SEQ ID NO: 421083 - protein, 15 aa, Homo sapiens
  CDR3 for alpha chain variable domain of TCR clone 210542 (TRAV29/DV5, TRAJ42)
CAAKTDGGSQGNRVF

SEQ ID NO: 421084 - protein, 15 aa, Homo sapiens
  CDR3 for beta chain variable domain of TCR clone 210542 (TRBV5-1, TRBJ2-2)
CASSSQGGNTGELFF

SEQ ID NO: 421085 - protein, 16 aa, Homo sapiens
  CDR3 for alpha chain variable domain of TCR clone 210543 (TRAV16, TRAJ37)
CSKWPDGSSNKGKLIF

SEQ ID NO: 421086 - protein, 13 aa, Homo sapiens
  CDR3 for beta chain variable domain of TCR clone 210543 (TRBV7-2, TRBJ2-2)
CASSLAVTGELFF

SEQ ID NO: 421087 - protein, 13 aa, Homo sapiens
  CDR3 for alpha chain variable domain of TCR clone 210544 (TRAV13-1, TRAJ11)
CAASIRGYSTLTF

SEQ ID NO: 421088 - protein, 17 aa, Homo sapiens
  CDR3 for beta chain variable domain of TCR clone 210544 (TRBV4-3, TRBJ1-2)
FASSSRLQAGGSVGYTF

SEQ ID NO: 421089 - protein, 14 aa, Homo sapiens
  CDR3 for alpha chain variable domain of TCR clone 210545 (TRAV35, TRAJ22)
CAGLRPGSTRQLTF

SEQ ID NO: 421090 - protein, 13 aa, Homo sapiens
  CDR3 for beta chain variable domain of TCR clone 210545 (TRBV6-1, TRBJ2-1)
CAGMDPTNNEQFF

SEQ ID NO: 421091 - protein, 15 aa, Homo sapiens
  CDR3 for alpha chain variable domain of TCR clone 210546 (TRAV38-1, TRAJ37)
CAFIFGSGNTGKLIF

SEQ ID NO: 421092 - protein, 12 aa, Homo sapiens
  CDR3 for beta chain variable domain of TCR clone 210546 (TRBV7-9, TRBJ2-7)
CASSSLKGEQYF

SEQ ID NO: 421093 - protein, 14 aa, Homo sapiens
  CDR3 for alpha chain variable domain of TCR clone 210547 (TRAV12-1, TRAJ12)
CVVTKMDSSYKLIF

SEQ ID NO: 421094 - protein, 13 aa, Homo sapiens
  CDR3 for beta chain variable domain of TCR clone 210547 (TRBV20-1, TRBJ1-1)
CSARGGGNTEAFF

SEQ ID NO: 421095 - protein, 12 aa, Homo sapiens
  CDR3 for alpha chain variable domain of TCR clone 210548 (TRAV13-2, TRAJ23)
CAERHRGGKLIF

SEQ ID NO: 421096 - protein, 16 aa, Homo sapiens
  CDR3 for beta chain variable domain of TCR clone 210548 (TRBV9, TRBJ1-2)
CASSVELGGTGYGYTF

SEQ ID NO: 421097 - protein, 13 aa, Homo sapiens
  CDR3 for alpha chain variable domain of TCR clone 210549 (TRAV35, TRAJ43)
CAGYPYNNNDMRF

SEQ ID NO: 421098 - protein, 15 aa, Homo sapiens
  CDR3 for beta chain variable domain of TCR clone 210549 (TRBV25-1, TRBJ1-4)
CASSKMIATNEKLFF

SEQ ID NO: 421099 - protein, 13 aa, Homo sapiens
  CDR3 for alpha chain variable domain of TCR clone 210550 (TRAV8-3, TRAJ47)
CAVGASRGNKLVL

SEQ ID NO: 421100 - protein, 15 aa, Homo sapiens
  CDR3 for beta chain variable domain of TCR clone 210550 (TRBV7-9, TRBJ1-4)
CASSARTGGNEKLFF

SEQ ID NO: 421101 - protein, 14 aa, Homo sapiens
  CDR3 for alpha chain variable domain of TCR clone 210551 (TRAV20, TRAJ22)
CAVALGGTARQLTF

SEQ ID NO: 421102 - protein, 15 aa, Homo sapiens
  CDR3 for beta chain variable domain of TCR clone 210551 (TRBV7-2, TRBJ1-1)
CASSFAGDRDTEAFF

SEQ ID NO: 421103 - protein, 16 aa, Homo sapiens
  CDR3 for alpha chain variable domain of TCR clone 210552 (TRAV30, TRAJ24)
CGTAIVDADSWGKFQF

SEQ ID NO: 421104 - protein, 14 aa, Homo sapiens
  CDR3 for beta chain variable domain of TCR clone 210552 (TRBV7-2, TRBJ2-7)
CASSPKTSFYEQYF

SEQ ID NO: 421105 - protein, 11 aa, Homo sapiens
  CDR3 for alpha chain variable domain of TCR clone 210553 (TRAV12-1, TRAJ43)
CVEYDNNDMRF

SEQ ID NO: 421106 - protein, 13 aa, Homo sapiens
  CDR3 for beta chain variable domain of TCR clone 210553 (TRBV24-1, TRBJ2-1)
CATSAGPYNEQFF

SEQ ID NO: 421107 - protein, 12 aa, Homo sapiens
  CDR3 for alpha chain variable domain of TCR clone 210554 (TRAV13-1, TRAJ39)
CAANNAGNMLTF

SEQ ID NO: 421108 - protein, 13 aa, Homo sapiens
  CDR3 for beta chain variable domain of TCR clone 210554 (TRBV7-9, TRBJ1-2)
CASSLKQNYGYTF

SEQ ID NO: 421109 - protein, 15 aa, Homo sapiens
  CDR3 for alpha chain variable domain of TCR clone 210555 (TRAV8-1, TRAJ37)
CAVKKGSGNTGKRIF

SEQ ID NO: 421110 - protein, 17 aa, Homo sapiens
  CDR3 for beta chain variable domain of TCR clone 210555 (TRBV12-4, TRBJ1-1)
CASSLSGFRTMNTEAFF

SEQ ID NO: 421111 - protein, 17 aa, Homo sapiens
  CDR3 for alpha chain variable domain of TCR clone 210556 (TRAV3, TRAJ6)
CAVRDGPRAGGSYIPTF

SEQ ID NO: 421112 - protein, 14 aa, Homo sapiens
  CDR3 for beta chain variable domain of TCR clone 210556 (TRBV7-3, TRBJ1-1)
CASSLGTGYTEAFF

SEQ ID NO: 421113 - protein, 13 aa, Homo sapiens
  CDR3 for alpha chain variable domain of TCR clone 210557 (TRAV14/DV4, TRAJ20)
CAMRESNDYKLSF

SEQ ID NO: 421114 - protein, 14 aa, Homo sapiens
  CDR3 for beta chain variable domain of TCR clone 210557 (TRBV4-2, TRBJ1-4)
CASSQGATNEKLFL

SEQ ID NO: 421115 - protein, 12 aa, Homo sapiens
  CDR3 for alpha chain variable domain of TCR clone 210558 (TRAV21, TRAJ3)
CCFYSSASKIIF

SEQ ID NO: 421116 - protein, 16 aa, Homo sapiens
  CDR3 for beta chain variable domain of TCR clone 210558 (TRBV19, TRBJ2-1)
CASSKSGPSSYNEQFF

SEQ ID NO: 421117 - protein, 16 aa, Homo sapiens
  CDR3 for alpha chain variable domain of TCR clone 210559 (TRAV30, TRAJ24)
CGTEIVDADSWGKFQF

SEQ ID NO: 421118 - protein, 15 aa, Homo sapiens
  CDR3 for beta chain variable domain of TCR clone 210559 (TRBV7-2, TRBJ1-5)
CASSPGTGADQPQHF

SEQ ID NO: 421119 - protein, 10 aa, Homo sapiens
  CDR3 for alpha chain variable domain of TCR clone 210560 (TRAV26-1, TRAJ22)
RSGSARQMTF

SEQ ID NO: 421120 - protein, 13 aa, Homo sapiens
  CDR3 for beta chain variable domain of TCR clone 210560 (TRBV7-9, TRBJ1-2)
CASSLKQNYGYTF

SEQ ID NO: 421121 - protein, 16 aa, Homo sapiens
  CDR3 for alpha chain variable domain of TCR clone 210561 (TRAV3, TRAJ10)
CAVRDMRSGGGNKLTF

SEQ ID NO: 421122 - protein, 15 aa, Homo sapiens
  CDR3 for beta chain variable domain of TCR clone 210561 (TRBV7-2, TRBJ1-5)
CASSRGQGDNQAQHF

SEQ ID NO: 421123 - protein, 12 aa, Homo sapiens
  CDR3 for alpha chain variable domain of TCR clone 210562 (TRAV3, TRAJ20)
CAVRDPDYKLSF

SEQ ID NO: 421124 - protein, 12 aa, Homo sapiens
  CDR3 for beta chain variable domain of TCR clone 210562 (TRBV12-4, TRBJ2-7)
CASSLGGYEQYF

SEQ ID NO: 421125 - protein, 19 aa, Homo sapiens
  CDR3 for alpha chain variable domain of TCR clone 210563 (TRAV2, TRAJ20)
ILQVREADAAVYRDCKLSF

SEQ ID NO: 421126 - protein, 14 aa, Homo sapiens
  CDR3 for beta chain variable domain of TCR clone 210563 (TRBV7-8, TRBJ2-3)
CASSLEAGTDTQYF

SEQ ID NO: 421127 - protein, 14 aa, Homo sapiens
  CDR3 for alpha chain variable domain of TCR clone 210564 (TRAV35, TRAJ22)
CAGLRPGSARQLTF

SEQ ID NO: 421128 - protein, 11 aa, Homo sapiens
  CDR3 for beta chain variable domain of TCR clone 210564 (TRBV12-4, TRBJ2-2)
CASSSAGELFF

SEQ ID NO: 421129 - protein, 15 aa, Homo sapiens
  CDR3 for alpha chain variable domain of TCR clone 210565 (TRAV14/DV4, TRAJ47)
CAMREAMEYGNKLVF

SEQ ID NO: 421130 - protein, 13 aa, Homo sapiens
  CDR3 for beta chain variable domain of TCR clone 210565 (TRBV7-9, TRBJ1-2)
CASSLKQNYGYTF

SEQ ID NO: 421131 - protein, 17 aa, Homo sapiens
  CDR3 for alpha chain variable domain of TCR clone 210566 (TRAV3, TRAJ6)
CAVRDGTRAGGSYIPTF

SEQ ID NO: 421132 - protein, 19 aa, Homo sapiens
  CDR3 for beta chain variable domain of TCR clone 210566 (TRBV25-1, TRBJ2-2)
CAILVYRVDRGRKTGELFF

SEQ ID NO: 421133 - protein, 13 aa, Homo sapiens
  CDR3 for alpha chain variable domain of TCR clone 210567 (TRAV12-3, TRAJ33)
CAMSVDSNYQLIW

SEQ ID NO: 421134 - protein, 17 aa, Homo sapiens
  CDR3 for beta chain variable domain of TCR clone 210567 (TRBV7-6, TRBJ2-1)
CSSPRTSGMSSYNEQFF

SEQ ID NO: 421135 - protein, 15 aa, Homo sapiens
  CDR3 for alpha chain variable domain of TCR clone 210568 (TRAV3, TRAJ5)
CAVGDLHTVRRALTF

SEQ ID NO: 421136 - protein, 13 aa, Homo sapiens
  CDR3 for beta chain variable domain of TCR clone 210568 (TRBV12-4, TRBJ2-7)
CASSPTETYEQYF

SEQ ID NO: 421137 - protein, 15 aa, Homo sapiens
  CDR3 for alpha chain variable domain of TCR clone 210569 (TRAV8-3, TRAJ27)
CAVGPSKTNAGKSTF

SEQ ID NO: 421138 - protein, 14 aa, Homo sapiens
  CDR3 for beta chain variable domain of TCR clone 210569 (TRBV7-2, TRBJ2-1)
CQQLRLAGGNEQFF

SEQ ID NO: 421139 - protein, 14 aa, Homo sapiens
  CDR3 for alpha chain variable domain of TCR clone 210570 (TRAV8-3, TRAJ4)
CAVEASGGYNKLIF

SEQ ID NO: 421140 - protein, 16 aa, Homo sapiens
  CDR3 for beta chain variable domain of TCR clone 210570 (TRBV19, TRBJ2-2)
CASSPSGGLNTGELFF

SEQ ID NO: 421141 - protein, 13 aa, Homo sapiens
  CDR3 for alpha chain variable domain of TCR clone 210571 (TRAV17, TRAJ34)
CATVPYNTDKLIF

SEQ ID NO: 421142 - protein, 17 aa, Homo sapiens
  CDR3 for beta chain variable domain of TCR clone 210571 (TRBV13, TRBJ2-3)
CASSLSRVAGGRNTQYF

SEQ ID NO: 421143 - protein, 15 aa, Homo sapiens
  CDR3 for alpha chain variable domain of TCR clone 210572 (TRAV34, TRAJ38)
CGADFTPGNNRKLIW

SEQ ID NO: 421144 - protein, 15 aa, Homo sapiens
  CDR3 for beta chain variable domain of TCR clone 210572 (TRBV4-1, TRBJ1-2)
CASSQDPGRAYGYTF

SEQ ID NO: 421145 - protein, 15 aa, Homo sapiens
  CDR3 for alpha chain variable domain of TCR clone 210573 (TRAV26-1, TRAJ29)
CIVRVEGSGNTPLVF

SEQ ID NO: 421146 - protein, 15 aa, Homo sapiens
  CDR3 for beta chain variable domain of TCR clone 210573 (TRBV28, TRBJ2-5)
CASSPGQGSIENQYF

SEQ ID NO: 421147 - protein, 15 aa, Homo sapiens
  CDR3 for alpha chain variable domain of TCR clone 210574 (TRAV12-1, TRAJ42)
CVVTRDGGTQGNLIF

SEQ ID NO: 421148 - protein, 14 aa, Homo sapiens
  CDR3 for beta chain variable domain of TCR clone 210574 (TRBV11-2, TRBJ2-3)
CASSLGGGANTQYF

SEQ ID NO: 421149 - protein, 16 aa, Homo sapiens
  CDR3 for alpha chain variable domain of TCR clone 210575 (TRAV3, TRAJ28)
CAVLPRSGAGSYQLTF

SEQ ID NO: 421150 - protein, 14 aa, Homo sapiens
  CDR3 for beta chain variable domain of TCR clone 210575 (TRBV19, TRBJ2-7)
CASNFRDTFTGMYF

SEQ ID NO: 421151 - protein, 13 aa, Homo sapiens
  CDR3 for alpha chain variable domain of TCR clone 210576 (TRAV24, TRAJ42)
CAFSTGSQGNLIF

SEQ ID NO: 421152 - protein, 13 aa, Homo sapiens
  CDR3 for beta chain variable domain of TCR clone 210576 (TRBV10-3, TRBJ2-7)
CASKLAVNYEQYF

SEQ ID NO: 421153 - protein, 14 aa, Homo sapiens
  CDR3 for alpha chain variable domain of TCR clone 210577 (TRAV35, TRAJ13)
CAGSPSGGYQKVTF

SEQ ID NO: 421154 - protein, 20 aa, Homo sapiens
  CDR3 for beta chain variable domain of TCR clone 210577 (TRBV18, TRBJ1-5)
CASSPPAGSVKIISPSILVM

SEQ ID NO: 421155 - protein, 13 aa, Homo sapiens
  CDR3 for alpha chain variable domain of TCR clone 210578 (TRAV21, TRAJ27)
CAARPGNAGKSTF

SEQ ID NO: 421156 - protein, 13 aa, Homo sapiens
  CDR3 for beta chain variable domain of TCR clone 210578 (TRBV7-3, TRBJ2-7)
CASSQAGGYEQYF

SEQ ID NO: 421157 - protein, 10 aa, Homo sapiens
  CDR3 for alpha chain variable domain of TCR clone 210579 (TRAV1-2, TRAJ20)
CALNDYKLSF

SEQ ID NO: 421158 - protein, 15 aa, Homo sapiens
  CDR3 for beta chain variable domain of TCR clone 210579 (TRBV15, TRBJ1-1)
CATSLQRGRNTEAFF

SEQ ID NO: 421159 - protein, 13 aa, Homo sapiens
  CDR3 for alpha chain variable domain of TCR clone 210580 (TRAV2, TRAJ40)
CAVVTSGTYKYIF

SEQ ID NO: 421160 - protein, 13 aa, Homo sapiens
  CDR3 for beta chain variable domain of TCR clone 210580 (TRBV7-3, TRBJ1-1)
CASSQDWGAEALF

SEQ ID NO: 421161 - protein, 15 aa, Homo sapiens
  CDR3 for alpha chain variable domain of TCR clone 210581 (TRAV12-1, TRAJ8)
CVVNVENTGFQKLVF

SEQ ID NO: 421162 - protein, 17 aa, Homo sapiens
  CDR3 for beta chain variable domain of TCR clone 210581 (TRBV11-2, TRBJ2-1)
CASSLYPPGVEYNEQFF

SEQ ID NO: 421163 - protein, 11 aa, Homo sapiens
  CDR3 for alpha chain variable domain of TCR clone 210582 (TRAV21, TRAJ7)
CAAYGNNRLAF

SEQ ID NO: 421164 - protein, 16 aa, Homo sapiens
  CDR3 for beta chain variable domain of TCR clone 210582 (TRBV12-5, TRBJ2-5)
CASGPRTSGNQETQYF

SEQ ID NO: 421165 - protein, 17 aa, Homo sapiens
  CDR3 for alpha chain variable domain of TCR clone 210583 (TRAV17, TRAJ7)
CATLGRLAFGKGNQVVV

SEQ ID NO: 421166 - protein, 13 aa, Homo sapiens
  CDR3 for beta chain variable domain of TCR clone 210583 (TRBV12-4, TRBJ2-7)
CASSLERVREQSF

SEQ ID NO: 421167 - protein, 16 aa, Homo sapiens
  CDR3 for alpha chain variable domain of TCR clone 210584 (TRAV26-1, TRAJ44)
IASSESRTGTASKLTF

SEQ ID NO: 421168 - protein, 13 aa, Homo sapiens
  CDR3 for beta chain variable domain of TCR clone 210584 (TRBV7-2, TRBJ1-5)
CASSFARNQHQHF

SEQ ID NO: 421169 - protein, 10 aa, Homo sapiens
  CDR3 for alpha chain variable domain of TCR clone 210585 (TRAV1-2, TRAJ31)
CVSEDSRLMF

SEQ ID NO: 421170 - protein, 14 aa, Homo sapiens
  CDR3 for beta chain variable domain of TCR clone 210585 (TRBV19, TRBJ2-1)
CASPTFVLSGEQFF

SEQ ID NO: 421171 - protein, 14 aa, Homo sapiens
  CDR3 for alpha chain variable domain of TCR clone 210586 (TRAV16, TRAJ33)
CALSAMDSNYQVIW

SEQ ID NO: 421172 - protein, 16 aa, Homo sapiens
  CDR3 for beta chain variable domain of TCR clone 210586 (TRBV12-4, TRBJ2-3)
CASSFPSNTNTDTQYF

SEQ ID NO: 421173 - protein, 13 aa, Homo sapiens
  CDR3 for alpha chain variable domain of TCR clone 210587 (TRAV8-6, TRAJ49)
CAVITNTGNQFYF

SEQ ID NO: 421174 - protein, 14 aa, Homo sapiens
  CDR3 for beta chain variable domain of TCR clone 210587 (TRBV19, TRBJ2-1)
CASRDPGLANEQFF

SEQ ID NO: 421175 - protein, 14 aa, Homo sapiens
  CDR3 for alpha chain variable domain of TCR clone 210588 (TRAV12-3, TRAJ10)
SHLPLTGGGNKLNF

SEQ ID NO: 421176 - protein, 14 aa, Homo sapiens
  CDR3 for beta chain variable domain of TCR clone 210588 (TRBV19, TRBJ2-1)
CASPTFVLSGEQFF

SEQ ID NO: 421177 - protein, 14 aa, Homo sapiens
  CDR3 for alpha chain variable domain of TCR clone 210589 (TRAV12-1, TRAJ6)
CVVARIRRTLHTYI

SEQ ID NO: 421178 - protein, 15 aa, Homo sapiens
  CDR3 for beta chain variable domain of TCR clone 210589 (TRBV7-3, TRBJ2-1)
CASSLKASEYNERFF

SEQ ID NO: 421179 - protein, 16 aa, Homo sapiens
  CDR3 for alpha chain variable domain of TCR clone 210590 (TRAV23/DV6, TRAJ9)
CAASIGGTTGGFKTLF

SEQ ID NO: 421180 - protein, 14 aa, Homo sapiens
  CDR3 for beta chain variable domain of TCR clone 210590 (TRBV9, TRBJ2-7)
CASSVGVGSYEQYF

SEQ ID NO: 421181 - protein, 14 aa, Homo sapiens
  CDR3 for alpha chain variable domain of TCR clone 210591 (TRAV12-3, TRAJ54)
CAMSALQRAQKLVF

SEQ ID NO: 421182 - protein, 15 aa, Homo sapiens
  CDR3 for beta chain variable domain of TCR clone 210591 (TRBV19, TRBJ2-4)
CASSTPGIAKNIQYF

SEQ ID NO: 421183 - protein, 12 aa, Homo sapiens
  CDR3 for alpha chain variable domain of TCR clone 210592 (TRAV3, TRAJ20)
CSVRDADYKLSF

SEQ ID NO: 421184 - protein, 15 aa, Homo sapiens
  CDR3 for beta chain variable domain of TCR clone 210592 (TRBV7-9, TRBJ1-5)
CASSQGHRPNQPQHF

SEQ ID NO: 421185 - protein, 14 aa, Homo sapiens
  CDR3 for alpha chain variable domain of TCR clone 210593 (TRAV17, TRAJ39)
CATDPVRAGNMLTF

SEQ ID NO: 421186 - protein, 13 aa, Homo sapiens
  CDR3 for beta chain variable domain of TCR clone 210593 (TRBV10-3, TRBJ2-7)
CASKLAVNYEQYF

SEQ ID NO: 421187 - protein, 18 aa, Homo sapiens
  CDR3 for alpha chain variable domain of TCR clone 210594 (TRAV21, TRAJ52)
CAVRPSPAGGTSYGKLTF

SEQ ID NO: 421188 - protein, 17 aa, Homo sapiens
  CDR3 for beta chain variable domain of TCR clone 210594 (TRBV5-1, TRBJ2-2)
CASSLAGLSGGTGELFF

SEQ ID NO: 421189 - protein, 16 aa, Homo sapiens
  CDR3 for alpha chain variable domain of TCR clone 210595 (TRAV26-2, TRAJ52)
CIRGPAGGTSFGKLTF

SEQ ID NO: 421190 - protein, 15 aa, Homo sapiens
  CDR3 for beta chain variable domain of TCR clone 210595 (TRBV20-1, TRBJ1-1)
CSASRGVTGNTEAFF

SEQ ID NO: 421191 - protein, 15 aa, Homo sapiens
  CDR3 for alpha chain variable domain of TCR clone 210596 (TRAV8-3, TRAJ27)
CAVGPSKTNAGTSTF

SEQ ID NO: 421192 - protein, 15 aa, Homo sapiens
  CDR3 for beta chain variable domain of TCR clone 210596 (TRBV7-6, TRBJ1-5)
CASSQSSGINQPQHF

SEQ ID NO: 421193 - protein, 15 aa, Homo sapiens
  CDR3 for alpha chain variable domain of TCR clone 210597 (TRAV35, TRAJ23)
CAGPLGNNQGGKLIF

SEQ ID NO: 421194 - protein, 14 aa, Homo sapiens
  CDR3 for beta chain variable domain of TCR clone 210597 (TRBV7-9, TRBJ1-1)
CARTPLQSYTEAFF

SEQ ID NO: 421195 - protein, 17 aa, Homo sapiens
  CDR3 for alpha chain variable domain of TCR clone 210598 (TRAV26-1, TRAJ53)
CIVRVDDSGGSNYKLTF

SEQ ID NO: 421196 - protein, 15 aa, Homo sapiens
  CDR3 for beta chain variable domain of TCR clone 210598 (TRBV20-1, TRBJ2-7)
CSARVPAADFYEQYF

SEQ ID NO: 421197 - protein, 14 aa, Homo sapiens
  CDR3 for alpha chain variable domain of TCR clone 210599 (TRAV4, TRAJ30)
RLVGDMNRDDKIIF

SEQ ID NO: 421198 - protein, 14 aa, Homo sapiens
  CDR3 for beta chain variable domain of TCR clone 210599 (TRBV7-2, TRBJ2-7)
CASSPKTSFYEQYF

SEQ ID NO: 421199 - protein, 15 aa, Homo sapiens
  CDR3 for alpha chain variable domain of TCR clone 210600 (TRAV12-3, TRAJ6)
CAMSAASGGSYIPTF

SEQ ID NO: 421200 - protein, 15 aa, Homo sapiens
  CDR3 for beta chain variable domain of TCR clone 210600 (TRBV7-2, TRBJ2-7)
CASSWGQGAIYEQYF

SEQ ID NO: 421201 - protein, 21 aa, Homo sapiens
  CDR3 for alpha chain variable domain of TCR clone 210601 (TRAV1-1, TRAJ30)
CLLLLRCEREGGENIDDKIIF

SEQ ID NO: 421202 - protein, 14 aa, Homo sapiens
  CDR3 for beta chain variable domain of TCR clone 210601 (TRBV9, TRBJ2-7)
CASSVGVGSYEQYF

SEQ ID NO: 421203 - protein, 13 aa, Homo sapiens
  CDR3 for alpha chain variable domain of TCR clone 210602 (TRAV12-3, TRAJ41)
CAIAPNSGYALNF

SEQ ID NO: 421204 - protein, 13 aa, Homo sapiens
  CDR3 for beta chain variable domain of TCR clone 210602 (TRBV6-5, TRBJ2-2)
CASSLPGVGELFF

SEQ ID NO: 421205 - protein, 16 aa, Homo sapiens
  CDR3 for alpha chain variable domain of TCR clone 210603 (TRAV12-1, TRAJ28)
CVVIAYSGAGSYQLPF

SEQ ID NO: 421206 - protein, 15 aa, Homo sapiens
  CDR3 for beta chain variable domain of TCR clone 210603 (TRBV14, TRBJ1-1)
CASSQEGMGFTEAFF

SEQ ID NO: 421207 - protein, 18 aa, Homo sapiens
  CDR3 for alpha chain variable domain of TCR clone 210604 (TRAV13-1, TRAJ52)
CAAKNHNAGGTSYGKLTF

SEQ ID NO: 421208 - protein, 15 aa, Homo sapiens
  CDR3 for beta chain variable domain of TCR clone 210604 (TRBV6-1, TRBJ2-3)
CVSSERGGITDTQYF

SEQ ID NO: 421209 - protein, 13 aa, Homo sapiens
  CDR3 for alpha chain variable domain of TCR clone 210605 (TRAV36/DV7, TRAJ37)
CAVFSSNAGKLIF

SEQ ID NO: 421210 - protein, 12 aa, Homo sapiens
  CDR3 for beta chain variable domain of TCR clone 210605 (TRBV11-2, TRBJ2-2)
CASSLGGGELFF

SEQ ID NO: 421211 - protein, 14 aa, Homo sapiens
  CDR3 for alpha chain variable domain of TCR clone 210606 (TRAV8-4, TRAJ34)
CAVSDPGDTDKLIF

SEQ ID NO: 421212 - protein, 15 aa, Homo sapiens
  CDR3 for beta chain variable domain of TCR clone 210606 (TRBV6-6, TRBJ1-1)
CASSPRGDVETEAFF

SEQ ID NO: 421213 - protein, 11 aa, Homo sapiens
  CDR3 for alpha chain variable domain of TCR clone 210607 (TRAV21, TRAJ34)
CAVYNTDKLIF

SEQ ID NO: 421214 - protein, 16 aa, Homo sapiens
  CDR3 for beta chain variable domain of TCR clone 210607 (TRBV18, TRBJ1-5)
CASSPSTGNSNQPQHF

SEQ ID NO: 421215 - protein, 13 aa, Homo sapiens
  CDR3 for alpha chain variable domain of TCR clone 210608 (TRAV8-3, TRAJ47)
CAVSMEYGNKLVF

SEQ ID NO: 421216 - protein, 12 aa, Homo sapiens
  CDR3 for beta chain variable domain of TCR clone 210608 (TRBV11-2, TRBJ2-2)
CASSLPTGELFF

SEQ ID NO: 421217 - protein, 12 aa, Homo sapiens
  CDR3 for alpha chain variable domain of TCR clone 210609 (TRAV2, TRAJ9)
CAVGAGSFKTIF

SEQ ID NO: 421218 - protein, 16 aa, Homo sapiens
  CDR3 for beta chain variable domain of TCR clone 210609 (TRBV13, TRBJ2-2)
CASSPRTGEHTVELFF

SEQ ID NO: 421219 - protein, 15 aa, Homo sapiens
  CDR3 for alpha chain variable domain of TCR clone 210610 (TRAV21, TRAJ53)
CATLNSGGSNYKLKF

SEQ ID NO: 421220 - protein, 14 aa, Homo sapiens
  CDR3 for beta chain variable domain of TCR clone 210610 (TRBV15, TRBJ1-2)
CATSRASVNYGYTF

SEQ ID NO: 421221 - protein, 15 aa, Homo sapiens
  CDR3 for alpha chain variable domain of TCR clone 210611 (TRAV26-1, TRAJ44)
CIVRIGTGTASKLTF

SEQ ID NO: 421222 - protein, 18 aa, Homo sapiens
  CDR3 for beta chain variable domain of TCR clone 210611 (TRBV12-4, TRBJ2-2)
CASSLVAGTRGRTGELFF

SEQ ID NO: 421223 - protein, 16 aa, Homo sapiens
  CDR3 for alpha chain variable domain of TCR clone 210612 (TRAV3, TRAJ37)
CAVRGKGAGNTGKIIF

SEQ ID NO: 421224 - protein, 15 aa, Homo sapiens
  CDR3 for beta chain variable domain of TCR clone 210612 (TRBV7-2, TRBJ2-7)
CASSLGIGNDYEQYF

SEQ ID NO: 421225 - protein, 10 aa, Homo sapiens
  CDR3 for alpha chain variable domain of TCR clone 210613 (TRAV1-2, TRAJ31)
CVSEDARLMF

SEQ ID NO: 421226 - protein, 15 aa, Homo sapiens
  CDR3 for beta chain variable domain of TCR clone 210613 (TRBV11-3, TRBJ2-3)
CASMKDGREGDTQYF

SEQ ID NO: 421227 - protein, 12 aa, Homo sapiens
  CDR3 for alpha chain variable domain of TCR clone 210614 (TRAV12-2, TRAJ16)
CAVAPDGQKLLF

SEQ ID NO: 421228 - protein, 15 aa, Homo sapiens
  CDR3 for beta chain variable domain of TCR clone 210614 (TRBV29-1, TRBJ2-7)
CSVEFFDRGSYEQYF

SEQ ID NO: 421229 - protein, 15 aa, Homo sapiens
  CDR3 for alpha chain variable domain of TCR clone 210615 (TRAV2, TRAJ9)
CAVAALNTGGFKTIF

SEQ ID NO: 421230 - protein, 14 aa, Homo sapiens
  CDR3 for beta chain variable domain of TCR clone 210615 (TRBV28, TRBJ2-3)
CASSWRGRADTQYF

SEQ ID NO: 421231 - protein, 16 aa, Homo sapiens
  CDR3 for alpha chain variable domain of TCR clone 210616 (TRAV8-1, TRAJ42)
CAVTSRYGGSQGNLIV

SEQ ID NO: 421232 - protein, 12 aa, Homo sapiens
  CDR3 for beta chain variable domain of TCR clone 210616 (TRBV6-3, TRBJ2-7)
CASSLGRRGLYF

SEQ ID NO: 421233 - protein, 15 aa, Homo sapiens
  CDR3 for alpha chain variable domain of TCR clone 210617 (TRAV4, TRAJ10)
FLVGDGSGGGNKLTF

SEQ ID NO: 421234 - protein, 15 aa, Homo sapiens
  CDR3 for beta chain variable domain of TCR clone 210617 (TRBV27, TRBJ2-3)
CASSSLAGVIDTQYF

SEQ ID NO: 421235 - protein, 13 aa, Homo sapiens
  CDR3 for alpha chain variable domain of TCR clone 210618 (TRAV27, TRAJ6)
CAGGTRGSYIPTF

SEQ ID NO: 421236 - protein, 13 aa, Homo sapiens
  CDR3 for beta chain variable domain of TCR clone 210618 (TRBV4-1, TRBJ2-2)
CASSQENTGELFS

SEQ ID NO: 421237 - protein, 14 aa, Homo sapiens
  CDR3 for alpha chain variable domain of TCR clone 210619 (TRAV17, TRAJ16)
CATADFSDGQMLLS

SEQ ID NO: 421238 - protein, 15 aa, Homo sapiens
  CDR3 for beta chain variable domain of TCR clone 210619 (TRBV18, TRBJ2-1)
CASSPPSASYNEQFF

SEQ ID NO: 421239 - protein, 17 aa, Homo sapiens
  CDR3 for alpha chain variable domain of TCR clone 210620 (TRAV26-1, TRAJ37)
CIVRVITVSSNTRKLIF

SEQ ID NO: 421240 - protein, 14 aa, Homo sapiens
  CDR3 for beta chain variable domain of TCR clone 210620 (TRBV7-7, TRBJ2-2)
CATRQDSDTGELFF

SEQ ID NO: 421241 - protein, 14 aa, Homo sapiens
  CDR3 for alpha chain variable domain of TCR clone 210621 (TRAV12-2, TRAJ44)
CAVNPAGTASKLTF

SEQ ID NO: 421242 - protein, 16 aa, Homo sapiens
  CDR3 for beta chain variable domain of TCR clone 210621 (TRBV2, TRBJ2-6)
CASREVGGAGANVLTF

SEQ ID NO: 421243 - protein, 13 aa, Homo sapiens
  CDR3 for alpha chain variable domain of TCR clone 210622 (TRAV12-1, TRAJ22)
CVVYSGSARHLTF

SEQ ID NO: 421244 - protein, 15 aa, Homo sapiens
  CDR3 for beta chain variable domain of TCR clone 210622 (TRBV20-1, TRBJ2-7)
CSASDRVSGMDEQYF

SEQ ID NO: 421245 - protein, 12 aa, Homo sapiens
  CDR3 for alpha chain variable domain of TCR clone 210623 (TRAV12-2, TRAJ31)
CAVNTPDARLMF

SEQ ID NO: 421246 - protein, 13 aa, Homo sapiens
  CDR3 for beta chain variable domain of TCR clone 210623 (TRBV11-2, TRBJ2-5)
CASSFSSQETQYF

SEQ ID NO: 421247 - protein, 14 aa, Homo sapiens
  CDR3 for alpha chain variable domain of TCR clone 210624 (TRAV1-2, TRAJ8)
CAVREDTGFQKLVF

SEQ ID NO: 421248 - protein, 14 aa, Homo sapiens
  CDR3 for beta chain variable domain of TCR clone 210624 (TRBV6-5, TRBJ1-1)
CASSFGQGLTEAFF

SEQ ID NO: 421249 - protein, 14 aa, Homo sapiens
  CDR3 for alpha chain variable domain of TCR clone 210625 (TRAV13-1, TRAJ35)
CAASKGGFGNVLHC

SEQ ID NO: 421250 - protein, 13 aa, Homo sapiens
  CDR3 for beta chain variable domain of TCR clone 210625 (TRBV7-8, TRBJ1-1)
CASSQDWGAEAFF

SEQ ID NO: 421251 - protein, 15 aa, Homo sapiens
  CDR3 for alpha chain variable domain of TCR clone 210626 (TRAV26-1, TRAJ29)
CIVRAEGSGNTPLVF

SEQ ID NO: 421252 - protein, 15 aa, Homo sapiens
  CDR3 for beta chain variable domain of TCR clone 210626 (TRBV7-9, TRBJ1-5)
CASSQGHQPNQTQHF

SEQ ID NO: 421253 - protein, 14 aa, Homo sapiens
  CDR3 for alpha chain variable domain of TCR clone 210627 (TRAV12-3, TRAJ22)
CAMSLFGSARQLTF

SEQ ID NO: 421254 - protein, 17 aa, Homo sapiens
  CDR3 for beta chain variable domain of TCR clone 210627 (TRBV7-9, TRBJ2-3)
CASSLEEAGAYPDTQYF

SEQ ID NO: 421255 - protein, 10 aa, Homo sapiens
  CDR3 for alpha chain variable domain of TCR clone 210628 (TRAV13-2, TRAJ40)
CAKGKYIFGT

SEQ ID NO: 421256 - protein, 18 aa, Homo sapiens
  CDR3 for beta chain variable domain of TCR clone 210628 (TRBV6-6, TRBJ2-5)
CASSYSWLQGALRETQYC

SEQ ID NO: 421257 - protein, 16 aa, Homo sapiens
  CDR3 for alpha chain variable domain of TCR clone 210629 (TRAV21, TRAJ37)
CAVRTAGSSNTGKLIF

SEQ ID NO: 421258 - protein, 16 aa, Homo sapiens
  CDR3 for beta chain variable domain of TCR clone 210629 (TRBV7-9, TRBJ2-3)
CASSPWREVGTDTQYF

SEQ ID NO: 421259 - protein, 12 aa, Homo sapiens
  CDR3 for alpha chain variable domain of TCR clone 210630 (TRAV29/DV5, TRAJ15)
CASNQAGTALIF

SEQ ID NO: 421260 - protein, 16 aa, Homo sapiens
  CDR3 for beta chain variable domain of TCR clone 210630 (TRBV10-3, TRBJ2-1)
CAISGVGDGGGGEQFF

SEQ ID NO: 421261 - protein, 13 aa, Homo sapiens
  CDR3 for alpha chain variable domain of TCR clone 210631 (TRAV12-1, TRAJ6)
CVVFPRGSYIPTF

SEQ ID NO: 421262 - protein, 14 aa, Homo sapiens
  CDR3 for beta chain variable domain of TCR clone 210631 (TRBV20-1, TRBJ1-3)
CSASPTGAGNTIYF

SEQ ID NO: 421263 - protein, 11 aa, Homo sapiens
  CDR3 for alpha chain variable domain of TCR clone 210632 (TRAV17, TRAJ9)
CATTGGFKTIF

SEQ ID NO: 421264 - protein, 14 aa, Homo sapiens
  CDR3 for beta chain variable domain of TCR clone 210632 (TRBV7-9, TRBJ2-2)
CASSGLADTGELIF

SEQ ID NO: 421265 - protein, 16 aa, Homo sapiens
  CDR3 for alpha chain variable domain of TCR clone 210633 (TRAV26-1, TRAJ11)
CIVRVVLGFRIQHPHL

SEQ ID NO: 421266 - protein, 16 aa, Homo sapiens
  CDR3 for beta chain variable domain of TCR clone 210633 (TRBV4-3, TRBJ2-2)
CASSHLQGSGTGELFF

SEQ ID NO: 421267 - protein, 10 aa, Homo sapiens
  CDR3 for alpha chain variable domain of TCR clone 210634 (TRAV36/DV7, TRAJ48)
CAVGNEKLTF

SEQ ID NO: 421268 - protein, 16 aa, Homo sapiens
  CDR3 for beta chain variable domain of TCR clone 210634 (TRBV15, TRBJ2-3)
CATRLSGGRAPDTQYV

SEQ ID NO: 421269 - protein, 16 aa, Homo sapiens
  CDR3 for alpha chain variable domain of TCR clone 210635 (TRAV26-1, TRAJ32)
CIVRTNYGGATNKLIF

SEQ ID NO: 421270 - protein, 15 aa, Homo sapiens
  CDR3 for beta chain variable domain of TCR clone 210635 (TRBV5-1, TRBJ2-1)
CASSPPRAPYNEQFF

SEQ ID NO: 421271 - protein, 14 aa, Homo sapiens
  CDR3 for alpha chain variable domain of TCR clone 210636 (TRAV8-1, TRAJ39)
CAVNASNAGNMLTF

SEQ ID NO: 421272 - protein, 14 aa, Homo sapiens
  CDR3 for beta chain variable domain of TCR clone 210636 (TRBV4-2, TRBJ2-1)
CASGLDRAYNEQFF

SEQ ID NO: 421273 - protein, 12 aa, Homo sapiens
  CDR3 for alpha chain variable domain of TCR clone 210637 (TRAV12-3, TRAJ17)
RAMTLTGNKLTF

SEQ ID NO: 421274 - protein, 15 aa, Homo sapiens
  CDR3 for beta chain variable domain of TCR clone 210637 (TRBV20-1, TRBJ2-7)
CSARDRVFGIDEQYF

SEQ ID NO: 421275 - protein, 14 aa, Homo sapiens
  CDR3 for alpha chain variable domain of TCR clone 210638 (TRAV9-2, TRAJ39)
CALYIYNAGNMLTF

SEQ ID NO: 421276 - protein, 16 aa, Homo sapiens
  CDR3 for beta chain variable domain of TCR clone 210638 (TRBV15, TRBJ2-3)
CATSRDLGIVTDTQYF

SEQ ID NO: 421277 - protein, 14 aa, Homo sapiens
  CDR3 for alpha chain variable domain of TCR clone 210639 (TRAV17, TRAJ35)
CATDRPGFGDVLHF

SEQ ID NO: 421278 - protein, 15 aa, Homo sapiens
  CDR3 for beta chain variable domain of TCR clone 210639 (TRBV28, TRBJ2-5)
CASSSGRVIQETQYF

SEQ ID NO: 421279 - protein, 12 aa, Homo sapiens
  CDR3 for alpha chain variable domain of TCR clone 210640 (TRAV17, TRAJ12)
CATLRSSYKLIF

SEQ ID NO: 421280 - protein, 18 aa, Homo sapiens
  CDR3 for beta chain variable domain of TCR clone 210640 (TRBV25-1, TRBJ1-2)
CASSGLQNGQGLIFGYTF

SEQ ID NO: 421281 - protein, 14 aa, Homo sapiens
  CDR3 for alpha chain variable domain of TCR clone 210641 (TRAV16, TRAJ32)
CALKSGGATNKLIF

SEQ ID NO: 421282 - protein, 13 aa, Homo sapiens
  CDR3 for beta chain variable domain of TCR clone 210641 (TRBV15, TRBJ1-6)
CATSGGLNSPLNF

SEQ ID NO: 421283 - protein, 16 aa, Homo sapiens
  CDR3 for alpha chain variable domain of TCR clone 210642 (TRAV30, TRAJ24)
CGTEIVDADSWGKFQF

SEQ ID NO: 421284 - protein, 13 aa, Homo sapiens
  CDR3 for beta chain variable domain of TCR clone 210642 (TRBV7-2, TRBJ1-4)
CASNVAGLEKLFF

SEQ ID NO: 421285 - protein, 12 aa, Homo sapiens
  CDR3 for alpha chain variable domain of TCR clone 210643 (TRAV14/DV4, TRAJ37)
CNSSGNTGKLIF

SEQ ID NO: 421286 - protein, 15 aa, Homo sapiens
  CDR3 for beta chain variable domain of TCR clone 210643 (TRBV7-2, TRBJ1-1)
CASSFAGDRDTEAFF

SEQ ID NO: 421287 - protein, 13 aa, Homo sapiens
  CDR3 for alpha chain variable domain of TCR clone 210644 (TRAV20, TRAJ20)
CAVRDFNDYKLSF

SEQ ID NO: 421288 - protein, 12 aa, Homo sapiens
  CDR3 for beta chain variable domain of TCR clone 210644 (TRBV9, TRBJ2-1)
CASRITYNEQFF

SEQ ID NO: 421289 - protein, 11 aa, Homo sapiens
  CDR3 for alpha chain variable domain of TCR clone 210645 (TRAV3, TRAJ21)
CAVGNFNKFYF

SEQ ID NO: 421290 - protein, 15 aa, Homo sapiens
  CDR3 for beta chain variable domain of TCR clone 210645 (TRBV12-4, TRBJ2-1)
CASSLLATGDNEQFF

SEQ ID NO: 421291 - protein, 11 aa, Homo sapiens
  CDR3 for alpha chain variable domain of TCR clone 210646 (TRAV12-2, TRAJ43)
CAAYNNNDMRF

SEQ ID NO: 421292 - protein, 14 aa, Homo sapiens
  CDR3 for beta chain variable domain of TCR clone 210646 (TRBV7-8, TRBJ2-7)
CASSPKTSFYEQYF

SEQ ID NO: 421293 - protein, 14 aa, Homo sapiens
  CDR3 for alpha chain variable domain of TCR clone 210647 (TRAV29/DV5, TRAJ36)
CAARRKTGANNLFF

SEQ ID NO: 421294 - protein, 12 aa, Homo sapiens
  CDR3 for beta chain variable domain of TCR clone 210647 (TRBV12-5, TRBJ2-5)
CASGQGVETQYC

SEQ ID NO: 421295 - protein, 14 aa, Homo sapiens
  CDR3 for alpha chain variable domain of TCR clone 210648 (TRAV1-2, TRAJ16)
CAVNRFSAGQKLLF

SEQ ID NO: 421296 - protein, 16 aa, Homo sapiens
  CDR3 for beta chain variable domain of TCR clone 210648 (TRBV20-1, TRBJ1-2)
CSASMGQGVANYGYTF

SEQ ID NO: 421297 - protein, 14 aa, Homo sapiens
  CDR3 for alpha chain variable domain of TCR clone 210649 (TRAV23/DV6, TRAJ5)
CAAKSPAGRRALTF

SEQ ID NO: 421298 - protein, 13 aa, Homo sapiens
  CDR3 for beta chain variable domain of TCR clone 210649 (TRBV25-1, TRBJ2-7)
CASSEDGDYEQYF

SEQ ID NO: 421299 - protein, 16 aa, Homo sapiens
  CDR3 for alpha chain variable domain of TCR clone 210650 (TRAV3, TRAJ10)
CAVRDMRGGGGNKLTF

SEQ ID NO: 421300 - protein, 16 aa, Homo sapiens
  CDR3 for beta chain variable domain of TCR clone 210650 (TRBV12-4, TRBJ1-5)
CASSRPVGGSNQPQHF

SEQ ID NO: 421301 - protein, 19 aa, Homo sapiens
  CDR3 for alpha chain variable domain of TCR clone 210651 (TRAV1-2, TRAJ26)
CLLPLCCERPDNYGQNFVF

SEQ ID NO: 421302 - protein, 14 aa, Homo sapiens
  CDR3 for beta chain variable domain of TCR clone 210651 (TRBV28, TRBJ2-1)
YASSLNGRNNEQFF

SEQ ID NO: 421303 - protein, 15 aa, Homo sapiens
  CDR3 for alpha chain variable domain of TCR clone 210652 (TRAV12-1, TRAJ44)
CVVDTPKGPASKLTF

SEQ ID NO: 421304 - protein, 14 aa, Homo sapiens
  CDR3 for beta chain variable domain of TCR clone 210652 (TRBV7-9, TRBJ2-1)
CASSPRDSLYEQFF

SEQ ID NO: 421305 - protein, 13 aa, Homo sapiens
  CDR3 for alpha chain variable domain of TCR clone 210653 (TRAV12-1, TRAJ7)
CVVNMRGNNRLAF

SEQ ID NO: 421306 - protein, 14 aa, Homo sapiens
  CDR3 for beta chain variable domain of TCR clone 210653 (TRBV6-3, TRBJ1-1)
CASRYTGESTEAFF

SEQ ID NO: 421307 - protein, 16 aa, Homo sapiens
  CDR3 for alpha chain variable domain of TCR clone 210654 (TRAV12-2, TRAJ18)
CAVTTDRGSTLGRLYF

SEQ ID NO: 421308 - protein, 14 aa, Homo sapiens
  CDR3 for beta chain variable domain of TCR clone 210654 (TRBV4-2, TRBJ1-5)
CASSQDSVNQPQHF

SEQ ID NO: 421309 - protein, 13 aa, Homo sapiens
  CDR3 for alpha chain variable domain of TCR clone 210655 (TRAV17, TRAJ40)
CATAFSGTYKYIF

SEQ ID NO: 421310 - protein, 18 aa, Homo sapiens
  CDR3 for beta chain variable domain of TCR clone 210655 (TRBV28, TRBJ2-1)
CASSSGLAGGGYYNEQFF

SEQ ID NO: 421311 - protein, 16 aa, Homo sapiens
  CDR3 for alpha chain variable domain of TCR clone 210656 (TRAV39, TRAJ45)
CAVDRSAGGGADGLPF

SEQ ID NO: 421312 - protein, 14 aa, Homo sapiens
  CDR3 for beta chain variable domain of TCR clone 210656 (TRBV28, TRBJ1-3)
CASSFRDRVNTIYF

SEQ ID NO: 421313 - protein, 14 aa, Homo sapiens
  CDR3 for alpha chain variable domain of TCR clone 210657 (TRAV3, TRAJ37)
CAVKESGNTGKLIF

SEQ ID NO: 421314 - protein, 13 aa, Homo sapiens
  CDR3 for beta chain variable domain of TCR clone 210657 (TRBV24-1, TRBJ2-2)
CATSDWSTGELFF

SEQ ID NO: 421315 - protein, 18 aa, Homo sapiens
  CDR3 for alpha chain variable domain of TCR clone 210658 (TRAV26-2, TRAJ45)
CILRLWGYSGGGADGLTF

SEQ ID NO: 421316 - protein, 16 aa, Homo sapiens
  CDR3 for beta chain variable domain of TCR clone 210658 (TRBV19, TRBJ2-1)
CASSSKGTRSYNEQFF

SEQ ID NO: 421317 - protein, 13 aa, Homo sapiens
  CDR3 for alpha chain variable domain of TCR clone 210659 (TRAV2, TRAJ21)
CAVEDLNFNKFYF

SEQ ID NO: 421318 - protein, 15 aa, Homo sapiens
  CDR3 for beta chain variable domain of TCR clone 210659 (TRBV28, TRBJ2-5)
CASSPGQGSIETQDF

SEQ ID NO: 421319 - protein, 12 aa, Homo sapiens
  CDR3 for alpha chain variable domain of TCR clone 210660 (TRAV3, TRAJ43)
CCERGRNNDMRF

SEQ ID NO: 421320 - protein, 16 aa, Homo sapiens
  CDR3 for beta chain variable domain of TCR clone 210660 (TRBV13, TRBJ2-2)
CASSEVFGANTGELFF

SEQ ID NO: 421321 - protein, 16 aa, Homo sapiens
  CDR3 for alpha chain variable domain of TCR clone 210661 (TRAV8-3, TRAJ44)
CAVGTLMAGTASKLTF

SEQ ID NO: 421322 - protein, 15 aa, Homo sapiens
  CDR3 for beta chain variable domain of TCR clone 210661 (TRBV10-2, TRBJ2-6)
CASSEQGTGANVLTF

SEQ ID NO: 421323 - protein, 15 aa, Homo sapiens
  CDR3 for alpha chain variable domain of TCR clone 210662 (TRAV29/DV5, TRAJ44)
CAASAGTGTASKPTF

SEQ ID NO: 421324 - protein, 12 aa, Homo sapiens
  CDR3 for beta chain variable domain of TCR clone 210662 (TRBV11-2, TRBJ2-2)
CASSLGGGELFF

SEQ ID NO: 421325 - protein, 13 aa, Homo sapiens
  CDR3 for alpha chain variable domain of TCR clone 210663 (TRAV21, TRAJ20)
CAVGLRVDYKLSF

SEQ ID NO: 421326 - protein, 13 aa, Homo sapiens
  CDR3 for beta chain variable domain of TCR clone 210663 (TRBV9, TRBJ2-1)
CASSPSGGNEQFF

SEQ ID NO: 421327 - protein, 13 aa, Homo sapiens
  CDR3 for alpha chain variable domain of TCR clone 210664 (TRAV20, TRAJ48)
CAVHLFGTEKLTF

SEQ ID NO: 421328 - protein, 15 aa, Homo sapiens
  CDR3 for beta chain variable domain of TCR clone 210664 (TRBV6-5, TRBJ2-6)
CASSQWEAGANVLTF

SEQ ID NO: 421329 - protein, 12 aa, Homo sapiens
  CDR3 for alpha chain variable domain of TCR clone 210665 (TRAV26-1, TRAJ36)
RIVRVRADNLFF

SEQ ID NO: 421330 - protein, 13 aa, Homo sapiens
  CDR3 for beta chain variable domain of TCR clone 210665 (TRBV11-2, TRBJ2-5)
CGSSRGPSETQYF

SEQ ID NO: 421331 - protein, 15 aa, Homo sapiens
  CDR3 for alpha chain variable domain of TCR clone 210666 (TRAV3, TRAJ45)
CAVRTPWGGADGLTF

SEQ ID NO: 421332 - protein, 16 aa, Homo sapiens
  CDR3 for beta chain variable domain of TCR clone 210666 (TRBV6-1, TRBJ2-2)
CASSIGQGANTGELLF

SEQ ID NO: 421333 - protein, 13 aa, Homo sapiens
  CDR3 for alpha chain variable domain of TCR clone 210667 (TRAV8-1, TRAJ28)
CAVSGAGSYQLTF

SEQ ID NO: 421334 - protein, 14 aa, Homo sapiens
  CDR3 for beta chain variable domain of TCR clone 210667 (TRBV7-2, TRBJ2-2)
CASRGRGAAGELFF

SEQ ID NO: 421335 - protein, 13 aa, Homo sapiens
  CDR3 for alpha chain variable domain of TCR clone 210668 (TRAV19, TRAJ57)
CALLQGGSEKLVV

SEQ ID NO: 421336 - protein, 16 aa, Homo sapiens
  CDR3 for beta chain variable domain of TCR clone 210668 (TRBV7-7, TRBJ2-3)
CASSPGTSGSTDTQYF

SEQ ID NO: 421337 - protein, 15 aa, Homo sapiens
  CDR3 for alpha chain variable domain of TCR clone 210669 (TRAV12-1, TRAJ44)
CVVDEYTGTASKLTF

SEQ ID NO: 421338 - protein, 14 aa, Homo sapiens
  CDR3 for beta chain variable domain of TCR clone 210669 (TRBV5-1, TRBJ1-2)
CASSLEPVKYGYTF

SEQ ID NO: 421339 - protein, 14 aa, Homo sapiens
  CDR3 for alpha chain variable domain of TCR clone 210670 (TRAV1-2, TRAJ16)
CAVNRFSDGQKPLF

SEQ ID NO: 421340 - protein, 17 aa, Homo sapiens
  CDR3 for beta chain variable domain of TCR clone 210670 (TRBV13, TRBJ2-3)
CASSLSRVAGGRNTQYF

SEQ ID NO: 421341 - protein, 15 aa, Homo sapiens
  CDR3 for alpha chain variable domain of TCR clone 210671 (TRAV26-2, TRAJ28)
CILVESGAGSYQLTF

SEQ ID NO: 421342 - protein, 14 aa, Homo sapiens
  CDR3 for beta chain variable domain of TCR clone 210671 (TRBV7-3, TRBJ2-2)
CASSPDPSGRELFF

SEQ ID NO: 421343 - protein, 11 aa, Homo sapiens
  CDR3 for alpha chain variable domain of TCR clone 210672 (TRAV2, TRAJ13)
CASVGYRKVTF

SEQ ID NO: 421344 - protein, 16 aa, Homo sapiens
  CDR3 for beta chain variable domain of TCR clone 210672 (TRBV12-5, TRBJ2-5)
CASGPRTSGNQETQYF

SEQ ID NO: 421345 - protein, 17 aa, Homo sapiens
  CDR3 for alpha chain variable domain of TCR clone 210673 (TRAV38-1, TRAJ28)
CAFMKPTSGAGSSQLTF

SEQ ID NO: 421346 - protein, 15 aa, Homo sapiens
  CDR3 for beta chain variable domain of TCR clone 210673 (TRBV5-1, TRBJ2-4)
CASSLGGGGSYIQYF

SEQ ID NO: 421347 - protein, 13 aa, Homo sapiens
  CDR3 for alpha chain variable domain of TCR clone 210674 (TRAV2, TRAJ40)
CAVVTSGTYKYIF

SEQ ID NO: 421348 - protein, 12 aa, Homo sapiens
  CDR3 for beta chain variable domain of TCR clone 210674 (TRBV12-4, TRBJ2-3)
CASSTLPDTQYL

SEQ ID NO: 421349 - protein, 13 aa, Homo sapiens
  CDR3 for alpha chain variable domain of TCR clone 210675 (TRAV21, TRAJ57)
CAVTQGGSEKLVF

SEQ ID NO: 421350 - protein, 20 aa, Homo sapiens
  CDR3 for beta chain variable domain of TCR clone 210675 (TRBV4-3, TRBJ2-4)
CASSQGRWTGGLRSLNIQYF

SEQ ID NO: 421351 - protein, 13 aa, Homo sapiens
  CDR3 for alpha chain variable domain of TCR clone 210676 (TRAV9-2, TRAJ53)
CALSGGSNYKLTF

SEQ ID NO: 421352 - protein, 16 aa, Homo sapiens
  CDR3 for beta chain variable domain of TCR clone 210676 (TRBV7-3, TRBJ2-2)
CASSLKRGNLSGELFF

SEQ ID NO: 421353 - protein, 12 aa, Homo sapiens
  CDR3 for alpha chain variable domain of TCR clone 210677 (TRAV13-1, TRAJ49)
CAAPNTGNQFYF

SEQ ID NO: 421354 - protein, 17 aa, Homo sapiens
  CDR3 for beta chain variable domain of TCR clone 210677 (TRBV25-1, TRBJ2-7)
CASSDVRVVFSSYEQYF

SEQ ID NO: 421355 - protein, 16 aa, Homo sapiens
  CDR3 for alpha chain variable domain of TCR clone 210678 (TRAV1-2, TRAJ10)
CAVRGVLTGGGTKLTF

SEQ ID NO: 421356 - protein, 17 aa, Homo sapiens
  CDR3 for beta chain variable domain of TCR clone 210678 (TRBV15, TRBJ1-5)
CATSRAPPGTRNQPQHF

SEQ ID NO: 421357 - protein, 12 aa, Homo sapiens
  CDR3 for alpha chain variable domain of TCR clone 210679 (TRAV8-3, TRAJ26)
CAGDNYGQNFVF

SEQ ID NO: 421358 - protein, 14 aa, Homo sapiens
  CDR3 for beta chain variable domain of TCR clone 210679 (TRBV4-1, TRBJ2-7)
CASRLTSGSYEQYF

SEQ ID NO: 421359 - protein, 15 aa, Homo sapiens
  CDR3 for alpha chain variable domain of TCR clone 210680 (TRAV4, TRAJ12)
CLVGDLMDSSYKLIF

SEQ ID NO: 421360 - protein, 14 aa, Homo sapiens
  CDR3 for beta chain variable domain of TCR clone 210680 (TRBV7-2, TRBJ2-7)
CASSPKTSFYEQYF

SEQ ID NO: 421361 - protein, 13 aa, Homo sapiens
  CDR3 for alpha chain variable domain of TCR clone 210681 (TRAV12-1, TRAJ6)
CVVYPGGSYIPTF

SEQ ID NO: 421362 - protein, 13 aa, Homo sapiens
  CDR3 for beta chain variable domain of TCR clone 210681 (TRBV4-2, TRBJ1-1)
CASSQAGNTEAFC

SEQ ID NO: 421363 - protein, 11 aa, Homo sapiens
  CDR3 for alpha chain variable domain of TCR clone 210682 (TRAV13-1, TRAJ39)
CASHAGNMLTF

SEQ ID NO: 421364 - protein, 14 aa, Homo sapiens
  CDR3 for beta chain variable domain of TCR clone 210682 (TRBV11-2, TRBJ1-5)
CASSLDRGRQPHHF

SEQ ID NO: 421365 - protein, 12 aa, Homo sapiens
  CDR3 for alpha chain variable domain of TCR clone 210683 (TRAV20, TRAJ4)
CRASGGYNKLIF

SEQ ID NO: 421366 - protein, 18 aa, Homo sapiens
  CDR3 for beta chain variable domain of TCR clone 210683 (TRBV19, TRBJ1-5)
CASSKVQVSIHSNQPQHF

SEQ ID NO: 421367 - protein, 18 aa, Homo sapiens
  CDR3 for alpha chain variable domain of TCR clone 210684 (TRAV26-2, TRAJ45)
CILRLWGYSGGGADGLTF

SEQ ID NO: 421368 - protein, 14 aa, Homo sapiens
  CDR3 for beta chain variable domain of TCR clone 210684 (TRBV6-1, TRBJ1-3)
CASVQGGGGNTIYF

SEQ ID NO: 421369 - protein, 13 aa, Homo sapiens
  CDR3 for alpha chain variable domain of TCR clone 210685 (TRAV20, TRAJ54)
CALTFEGAQKLVF

SEQ ID NO: 421370 - protein, 12 aa, Homo sapiens
  CDR3 for beta chain variable domain of TCR clone 210685 (TRBV5-1, TRBJ2-5)
CASSFCWETQYF

SEQ ID NO: 421371 - protein, 15 aa, Homo sapiens
  CDR3 for alpha chain variable domain of TCR clone 210686 (TRAV12-2, TRAJ53)
CAVNGGGGSNYKRTF

SEQ ID NO: 421372 - protein, 15 aa, Homo sapiens
  CDR3 for beta chain variable domain of TCR clone 210686 (TRBV5-1, TRBJ2-7)
CASSLNGGPAREQYF

SEQ ID NO: 421373 - protein, 14 aa, Homo sapiens
  CDR3 for alpha chain variable domain of TCR clone 210687 (TRAV1-2, TRAJ16)
CAVNRFSDGQKLLF

SEQ ID NO: 421374 - protein, 15 aa, Homo sapiens
  CDR3 for beta chain variable domain of TCR clone 210687 (TRBV7-9, TRBJ2-2)
CASSPETGAGGGLFF

SEQ ID NO: 421375 - protein, 16 aa, Homo sapiens
  CDR3 for alpha chain variable domain of TCR clone 210688 (TRAV17, TRAJ28)
CATASVSGAGSYQLTF

SEQ ID NO: 421376 - protein, 11 aa, Homo sapiens
  CDR3 for beta chain variable domain of TCR clone 210688 (TRBV7-9, TRBJ2-5)
CASSLGETQYC

SEQ ID NO: 421377 - protein, 13 aa, Homo sapiens
  CDR3 for alpha chain variable domain of TCR clone 210689 (TRAV1-2, TRAJ9)
CAALNTGGFKTIF

SEQ ID NO: 421378 - protein, 13 aa, Homo sapiens
  CDR3 for beta chain variable domain of TCR clone 210689 (TRBV20-1, TRBJ2-2)
CSASAAGTGELFF

SEQ ID NO: 421379 - protein, 13 aa, Homo sapiens
  CDR3 for alpha chain variable domain of TCR clone 210690 (TRAV12-3, TRAJ33)
CAMIVNSNYQLIW

SEQ ID NO: 421380 - protein, 13 aa, Homo sapiens
  CDR3 for beta chain variable domain of TCR clone 210690 (TRBV4-1, TRBJ2-2)
CASSQENTGELFF

SEQ ID NO: 421381 - protein, 16 aa, Homo sapiens
  CDR3 for alpha chain variable domain of TCR clone 210691 (TRAV3, TRAJ10)
CAVRDMRAGGGNKLTF

SEQ ID NO: 421382 - protein, 15 aa, Homo sapiens
  CDR3 for beta chain variable domain of TCR clone 210691 (TRBV5-1, TRBJ2-1)
FASSPPRAPYNEQFF

SEQ ID NO: 421383 - protein, 16 aa, Homo sapiens
  CDR3 for alpha chain variable domain of TCR clone 210692 (TRAV1-2, TRAJ35)
CAVRGLTIGFGNVLHC

SEQ ID NO: 421384 - protein, 13 aa, Homo sapiens
  CDR3 for beta chain variable domain of TCR clone 210692 (TRBV19, TRBJ1-5)
CASSIGGEQPQHF

SEQ ID NO: 421385 - protein, 14 aa, Homo sapiens
  CDR3 for alpha chain variable domain of TCR clone 210693 (TRAV1-2, TRAJ24)
CAVLTTDSWGKFQF

SEQ ID NO: 421386 - protein, 15 aa, Homo sapiens
  CDR3 for beta chain variable domain of TCR clone 210693 (TRBV6-6, TRBJ2-7)
CASSYSYGGSYEQYL

SEQ ID NO: 421387 - protein, 23 aa, Homo sapiens
  CDR3 for alpha chain variable domain of TCR clone 210694 (TRAV13-2, TRAJ35)
CAESPNIGFGNVLHCGSGPPVIV

SEQ ID NO: 421388 - protein, 13 aa, Homo sapiens
  CDR3 for beta chain variable domain of TCR clone 210694 (TRBV10-2, TRBJ2-5)
CASSTLARETQYF

SEQ ID NO: 421389 - protein, 14 aa, Homo sapiens
  CDR3 for alpha chain variable domain of TCR clone 210695 (TRAV26-2, TRAJ32)
CILFRGGATNKLIF

SEQ ID NO: 421390 - protein, 15 aa, Homo sapiens
  CDR3 for beta chain variable domain of TCR clone 210695 (TRBV2, TRBJ2-2)
CASSGFGAGTGELFV

SEQ ID NO: 421391 - protein, 15 aa, Homo sapiens
  CDR3 for alpha chain variable domain of TCR clone 210696 (TRAV17, TRAJ54)
CATEKLGQGAEKLVF

SEQ ID NO: 421392 - protein, 14 aa, Homo sapiens
  CDR3 for beta chain variable domain of TCR clone 210696 (TRBV7-3, TRBJ1-1)
CQQLRGQMNTEAFF

SEQ ID NO: 421393 - protein, 12 aa, Homo sapiens
  CDR3 for alpha chain variable domain of TCR clone 210697 (TRAV2, TRAJ33)
CAVEDCNYQLIW

SEQ ID NO: 421394 - protein, 14 aa, Homo sapiens
  CDR3 for beta chain variable domain of TCR clone 210697 (TRBV19, TRBJ1-4)
CASSINRGGEKLFF

SEQ ID NO: 421395 - protein, 16 aa, Homo sapiens
  CDR3 for alpha chain variable domain of TCR clone 210698 (TRAV12-3, TRAJ53)
CAMSPGSGGSNYKLTI

SEQ ID NO: 421396 - protein, 13 aa, Homo sapiens
  CDR3 for beta chain variable domain of TCR clone 210698 (TRBV7-2, TRBJ2-5)
CASSQTSVETQYF

SEQ ID NO: 421397 - protein, 15 aa, Homo sapiens
  CDR3 for alpha chain variable domain of TCR clone 210699 (TRAV29/DV5, TRAJ29)
CAASERSSGNTPLVF

SEQ ID NO: 421398 - protein, 15 aa, Homo sapiens
  CDR3 for beta chain variable domain of TCR clone 210699 (TRBV4-1, TRBJ1-4)
CASSDTGGTNEKLFF

SEQ ID NO: 421399 - protein, 19 aa, Homo sapiens
  CDR3 for alpha chain variable domain of TCR clone 210700 (TRAV17, TRAJ37)
CFLLLCYGRGSSNTGKLIF

SEQ ID NO: 421400 - protein, 15 aa, Homo sapiens
  CDR3 for beta chain variable domain of TCR clone 210700 (TRBV28, TRBJ2-5)
CASSSGRTIQETQYF

SEQ ID NO: 421401 - protein, 12 aa, Homo sapiens
  CDR3 for alpha chain variable domain of TCR clone 210701 (TRAV30, TRAJ39)
CGRGNAGNMLTF

SEQ ID NO: 421402 - protein, 14 aa, Homo sapiens
  CDR3 for beta chain variable domain of TCR clone 210701 (TRBV12-4, TRBJ1-1)
CASSLGTGGTEAFF

SEQ ID NO: 421403 - protein, 15 aa, Homo sapiens
  CDR3 for alpha chain variable domain of TCR clone 210702 (TRAV12-3, TRAJ10)
CASYILTGGGNKLTF

SEQ ID NO: 421404 - protein, 15 aa, Homo sapiens
  CDR3 for beta chain variable domain of TCR clone 210702 (TRBV7-2, TRBJ1-6)
CASSLGADRGMPLHF

SEQ ID NO: 421405 - protein, 13 aa, Homo sapiens
  CDR3 for alpha chain variable domain of TCR clone 210703 (TRAV17, TRAJ29)
CATFGSGNTPLVF

SEQ ID NO: 421406 - protein, 15 aa, Homo sapiens
  CDR3 for beta chain variable domain of TCR clone 210703 (TRBV20-1, TRBJ2-7)
CSARDRVSGMDEQYF

SEQ ID NO: 421407 - protein, 12 aa, Homo sapiens
  CDR3 for alpha chain variable domain of TCR clone 210704 (TRAV8-3, TRAJ4)
PAFSGGYNKLIF

SEQ ID NO: 421408 - protein, 13 aa, Homo sapiens
  CDR3 for beta chain variable domain of TCR clone 210704 (TRBV20-1, TRBJ1-3)
CSAGAYAGNTIYF

SEQ ID NO: 421409 - protein, 14 aa, Homo sapiens
  CDR3 for alpha chain variable domain of TCR clone 210705 (TRAV27, TRAJ13)
CTSSNSGGYQKVTF

SEQ ID NO: 421410 - protein, 16 aa, Homo sapiens
  CDR3 for beta chain variable domain of TCR clone 210705 (TRBV7-6, TRBJ2-1)
CIAVPAAWGGADEQFF

SEQ ID NO: 421411 - protein, 13 aa, Homo sapiens
  CDR3 for alpha chain variable domain of TCR clone 210706 (TRAV2, TRAJ40)
CAVVTSGTYKYVF

SEQ ID NO: 421412 - protein, 14 aa, Homo sapiens
  CDR3 for beta chain variable domain of TCR clone 210706 (TRBV19, TRBJ2-1)
CASPTVVLSGEQFF

SEQ ID NO: 421413 - protein, 13 aa, Homo sapiens
  CDR3 for alpha chain variable domain of TCR clone 210707 (TRAV14/DV4, TRAJ49)
CAMVENTGNQFYF

SEQ ID NO: 421414 - protein, 15 aa, Homo sapiens
  CDR3 for beta chain variable domain of TCR clone 210707 (TRBV4-1, TRBJ2-5)
CASSQWDLYQETQYF

SEQ ID NO: 421415 - protein, 20 aa, Homo sapiens
  CDR3 for alpha chain variable domain of TCR clone 210708 (TRAV12-1, TRAJ42)
SSVIQPPTSVKGGSQGNLIF

SEQ ID NO: 421416 - protein, 15 aa, Homo sapiens
  CDR3 for beta chain variable domain of TCR clone 210708 (TRBV29-1, TRBJ2-1)
CSGRDRKSSYNEQFF

SEQ ID NO: 421417 - protein, 16 aa, Homo sapiens
  CDR3 for alpha chain variable domain of TCR clone 210709 (TRAV12-2, TRAJ32)
CAVNLGQGGATNKPIF

SEQ ID NO: 421418 - protein, 13 aa, Homo sapiens
  CDR3 for beta chain variable domain of TCR clone 210709 (TRBV9, TRBJ2-2)
CASSPRPAGELFL

SEQ ID NO: 421419 - protein, 14 aa, Homo sapiens
  CDR3 for alpha chain variable domain of TCR clone 210710 (TRAV12-1, TRAJ37)
CVVNRSGNTGKLIF

SEQ ID NO: 421420 - protein, 13 aa, Homo sapiens
  CDR3 for beta chain variable domain of TCR clone 210710 (TRBV15, TRBJ1-6)
CATSGGLNSPLHF

SEQ ID NO: 421421 - protein, 16 aa, Homo sapiens
  CDR3 for alpha chain variable domain of TCR clone 210711 (TRAV30, TRAJ24)
CGTEIVDADSWGKFQF

SEQ ID NO: 421422 - protein, 13 aa, Homo sapiens
  CDR3 for beta chain variable domain of TCR clone 210711 (TRBV5-5, TRBJ2-3)
CASSWTGGDTQYF

SEQ ID NO: 421423 - protein, 13 aa, Homo sapiens
  CDR3 for alpha chain variable domain of TCR clone 210712 (TRAV3, TRAJ21)
CAVIEPDFNKFYF

SEQ ID NO: 421424 - protein, 15 aa, Homo sapiens
  CDR3 for beta chain variable domain of TCR clone 210712 (TRBV9, TRBJ1-6)
CASSVAGTGDSPLHF

SEQ ID NO: 421425 - protein, 18 aa, Homo sapiens
  CDR3 for alpha chain variable domain of TCR clone 210713 (TRAV26-1, TRAJ22)
CIVRVALISSGSARQRTF

SEQ ID NO: 421426 - protein, 13 aa, Homo sapiens
  CDR3 for beta chain variable domain of TCR clone 210713 (TRBV13, TRBJ2-5)
CASSPEVGETQYF

SEQ ID NO: 421427 - protein, 15 aa, Homo sapiens
  CDR3 for alpha chain variable domain of TCR clone 210714 (TRAV4, TRAJ39)
CLVGPTNNAGNMLPF

SEQ ID NO: 421428 - protein, 14 aa, Homo sapiens
  CDR3 for beta chain variable domain of TCR clone 210714 (TRBV19, TRBJ2-1)
CASPTFVLSGEQFF

SEQ ID NO: 421429 - protein, 16 aa, Homo sapiens
  CDR3 for alpha chain variable domain of TCR clone 210715 (TRAV12-2, TRAJ28)
CAVITDSGAGSYQLTF

SEQ ID NO: 421430 - protein, 14 aa, Homo sapiens
  CDR3 for beta chain variable domain of TCR clone 210715 (TRBV25-1, TRBJ1-1)
CASTHLGGNTEAFC

SEQ ID NO: 421431 - protein, 13 aa, Homo sapiens
  CDR3 for alpha chain variable domain of TCR clone 210716 (TRAV36/DV7, TRAJ54)
CAVDIQGAQKLVF

SEQ ID NO: 421432 - protein, 14 aa, Homo sapiens
  CDR3 for beta chain variable domain of TCR clone 210716 (TRBV19, TRBJ2-7)
CSSNFRDTFTGLYF

SEQ ID NO: 421433 - protein, 14 aa, Homo sapiens
  CDR3 for alpha chain variable domain of TCR clone 210717 (TRAV13-2, TRAJ11)
CAETGNSGYSTLTF

SEQ ID NO: 421434 - protein, 12 aa, Homo sapiens
  CDR3 for beta chain variable domain of TCR clone 210717 (TRBV12-4, TRBJ1-3)
CASSFSGNTIYF

SEQ ID NO: 421435 - protein, 12 aa, Homo sapiens
  CDR3 for alpha chain variable domain of TCR clone 210718 (TRAV12-1, TRAJ40)
CVVYSGTYKYIF

SEQ ID NO: 421436 - protein, 18 aa, Homo sapiens
  CDR3 for beta chain variable domain of TCR clone 210718 (TRBV5-5, TRBJ1-5)
CASSLRQVKGSSNQPQHF

SEQ ID NO: 421437 - protein, 11 aa, Homo sapiens
  CDR3 for alpha chain variable domain of TCR clone 210719 (TRAV12-3, TRAJ41)
WAMNAREALNF

SEQ ID NO: 421438 - protein, 16 aa, Homo sapiens
  CDR3 for beta chain variable domain of TCR clone 210719 (TRBV7-8, TRBJ2-3)
CASSTEGQRETDTQYF

SEQ ID NO: 421439 - protein, 15 aa, Homo sapiens
  CDR3 for alpha chain variable domain of TCR clone 210720 (TRAV12-2, TRAJ43)
CAFDMRFGAGTRLTI

SEQ ID NO: 421440 - protein, 15 aa, Homo sapiens
  CDR3 for beta chain variable domain of TCR clone 210720 (TRBV7-3, TRBJ2-2)
CASSETGQGTGELFF

SEQ ID NO: 421441 - protein, 15 aa, Homo sapiens
  CDR3 for alpha chain variable domain of TCR clone 210721 (TRAV12-2, TRAJ50)
CAVNGLETSYDKVIF

SEQ ID NO: 421442 - protein, 16 aa, Homo sapiens
  CDR3 for beta chain variable domain of TCR clone 210721 (TRBV6-5, TRBJ2-7)
CASSSDPTSEFYEQYF

SEQ ID NO: 421443 - protein, 13 aa, Homo sapiens
  CDR3 for alpha chain variable domain of TCR clone 210722 (TRAV12-2, TRAJ7)
CAVSLYGSNRLAF

SEQ ID NO: 421444 - protein, 18 aa, Homo sapiens
  CDR3 for beta chain variable domain of TCR clone 210722 (TRBV4-2, TRBJ2-1)
CASSQQGLAASSYNEQFF

SEQ ID NO: 421445 - protein, 13 aa, Homo sapiens
  CDR3 for alpha chain variable domain of TCR clone 210723 (TRAV25, TRAJ26)
CAGMDNYGQNFVF

SEQ ID NO: 421446 - protein, 15 aa, Homo sapiens
  CDR3 for beta chain variable domain of TCR clone 210723 (TRBV6-1, TRBJ2-4)
CASSEAVWTINIQYF

SEQ ID NO: 421447 - protein, 18 aa, Homo sapiens
  CDR3 for alpha chain variable domain of TCR clone 210724 (TRAV21, TRAJ52)
CAVRPSPVGGTSYGKLTF

SEQ ID NO: 421448 - protein, 15 aa, Homo sapiens
  CDR3 for beta chain variable domain of TCR clone 210724 (TRBV7-9, TRBJ2-7)
CASSSSGLAVYEQYF

SEQ ID NO: 421449 - protein, 13 aa, Homo sapiens
  CDR3 for alpha chain variable domain of TCR clone 210725 (TRAV12-2, TRAJ37)
YAGGSGNTGKLIF

SEQ ID NO: 421450 - protein, 14 aa, Homo sapiens
  CDR3 for beta chain variable domain of TCR clone 210725 (TRBV6-1, TRBJ2-6)
CASQQGAGANVLTF

SEQ ID NO: 421451 - protein, 15 aa, Homo sapiens
  CDR3 for alpha chain variable domain of TCR clone 210726 (TRAV8-3, TRAJ27)
CPVGPSKTNAGKSTF

SEQ ID NO: 421452 - protein, 15 aa, Homo sapiens
  CDR3 for beta chain variable domain of TCR clone 210726 (TRBV7-2, TRBJ2-1)
CASSSGLAGGNEQFF

SEQ ID NO: 421453 - protein, 12 aa, Homo sapiens
  CDR3 for alpha chain variable domain of TCR clone 210727 (TRAV3, TRAJ20)
CAVRDPDYKLSF

SEQ ID NO: 421454 - protein, 14 aa, Homo sapiens
  CDR3 for beta chain variable domain of TCR clone 210727 (TRBV4-2, TRBJ2-1)
CASGLDRAYNERFF

SEQ ID NO: 421455 - protein, 11 aa, Homo sapiens
  CDR3 for alpha chain variable domain of TCR clone 210728 (TRAV1-1, TRAJ23)
CAVRQGGKLIF

SEQ ID NO: 421456 - protein, 13 aa, Homo sapiens
  CDR3 for beta chain variable domain of TCR clone 210728 (TRBV20-1, TRBJ1-1)
CSARLGQGTEAFF

SEQ ID NO: 421457 - protein, 16 aa, Homo sapiens
  CDR3 for alpha chain variable domain of TCR clone 210729 (TRAV8-3, TRAJ10)
CAVGPILTGGGNRLTF

SEQ ID NO: 421458 - protein, 16 aa, Homo sapiens
  CDR3 for beta chain variable domain of TCR clone 210729 (TRBV7-2, TRBJ2-5)
CASSSKWLSGQETQYF

SEQ ID NO: 421459 - protein, 10 aa, Homo sapiens
  CDR3 for alpha chain variable domain of TCR clone 210730 (TRAV12-2, TRAJ22)
CAVNETRLTF

SEQ ID NO: 421460 - protein, 12 aa, Homo sapiens
  CDR3 for beta chain variable domain of TCR clone 210730 (TRBV29-1, TRBJ2-3)
CSVTGGADTQYF

SEQ ID NO: 421461 - protein, 14 aa, Homo sapiens
  CDR3 for alpha chain variable domain of TCR clone 210731 (TRAV12-2, TRAJ33)
CAVKRARSNYQLIW

SEQ ID NO: 421462 - protein, 14 aa, Homo sapiens
  CDR3 for beta chain variable domain of TCR clone 210731 (TRBV7-3, TRBJ2-2)
CASSSGGYTGELFF

SEQ ID NO: 421463 - protein, 19 aa, Homo sapiens
  CDR3 for alpha chain variable domain of TCR clone 210732 (TRAV1-2, TRAJ26)
CLLPLCCERPDNYGQNFVF

SEQ ID NO: 421464 - protein, 14 aa, Homo sapiens
  CDR3 for beta chain variable domain of TCR clone 210732 (TRBV6-1, TRBJ1-5)
CASSEARSYQPQHF

SEQ ID NO: 421465 - protein, 14 aa, Homo sapiens
  CDR3 for alpha chain variable domain of TCR clone 210733 (TRAV17, TRAJ39)
CVTDPVRAGNMLTF

SEQ ID NO: 421466 - protein, 15 aa, Homo sapiens
  CDR3 for beta chain variable domain of TCR clone 210733 (TRBV13, TRBJ1-5)
CASSFGQGGVQPQHF

SEQ ID NO: 421467 - protein, 14 aa, Homo sapiens
  CDR3 for alpha chain variable domain of TCR clone 210734 (TRAV3, TRAJ9)
CAVRLNTGGFKTIF

SEQ ID NO: 421468 - protein, 16 aa, Homo sapiens
  CDR3 for beta chain variable domain of TCR clone 210734 (TRBV24-1, TRBJ2-3)
CAASDRRQDLTDTQYF

SEQ ID NO: 421469 - protein, 14 aa, Homo sapiens
  CDR3 for alpha chain variable domain of TCR clone 210735 (TRAV1-2, TRAJ16)
CAVNRFSDGQKLLF

SEQ ID NO: 421470 - protein, 11 aa, Homo sapiens
  CDR3 for beta chain variable domain of TCR clone 210735 (TRBV29-1, TRBJ2-5)
CSEHRTGTQYF

SEQ ID NO: 421471 - protein, 16 aa, Homo sapiens
  CDR3 for alpha chain variable domain of TCR clone 210736 (TRAV30, TRAJ24)
CGTEIGDADSWGKFQV

SEQ ID NO: 421472 - protein, 14 aa, Homo sapiens
  CDR3 for beta chain variable domain of TCR clone 210736 (TRBV12-5, TRBJ2-5)
CASGSRTHQETQYF

SEQ ID NO: 421473 - protein, 15 aa, Homo sapiens
  CDR3 for alpha chain variable domain of TCR clone 210737 (TRAV38-1, TRAJ37)
CAFIFGSGNTGKLIF

SEQ ID NO: 421474 - protein, 15 aa, Homo sapiens
  CDR3 for beta chain variable domain of TCR clone 210737 (TRBV5-1, TRBJ2-1)
CASSPPGAPYNEQFF

SEQ ID NO: 421475 - protein, 11 aa, Homo sapiens
  CDR3 for alpha chain variable domain of TCR clone 210738 (TRAV16, TRAJ54)
CALSLIQGAQA

SEQ ID NO: 421476 - protein, 17 aa, Homo sapiens
  CDR3 for beta chain variable domain of TCR clone 210738 (TRBV11-2, TRBJ2-4)
CASSSVGPGGHRNIQYF

SEQ ID NO: 421477 - protein, 10 aa, Homo sapiens
  CDR3 for alpha chain variable domain of TCR clone 210739 (TRAV30, TRAJ48)
CGMGNEKLTF

SEQ ID NO: 421478 - protein, 15 aa, Homo sapiens
  CDR3 for beta chain variable domain of TCR clone 210739 (TRBV25-1, TRBJ1-4)
CASSPGDSTNEKLFF

SEQ ID NO: 421479 - protein, 15 aa, Homo sapiens
  CDR3 for alpha chain variable domain of TCR clone 210740 (TRAV36/DV7, TRAJ42)
CAVERYGGSQGNLIF

SEQ ID NO: 421480 - protein, 12 aa, Homo sapiens
  CDR3 for beta chain variable domain of TCR clone 210740 (TRBV7-3, TRBJ2-1)
CASSFQSGPQFF

SEQ ID NO: 421481 - protein, 14 aa, Homo sapiens
  CDR3 for alpha chain variable domain of TCR clone 210741 (TRAV8-6, TRAJ52)
CAVIGGTSYGKLTF

SEQ ID NO: 421482 - protein, 15 aa, Homo sapiens
  CDR3 for beta chain variable domain of TCR clone 210741 (TRBV11-2, TRBJ2-5)
CASSLGAGGVETQYL

SEQ ID NO: 421483 - protein, 17 aa, Homo sapiens
  CDR3 for alpha chain variable domain of TCR clone 210742 (TRAV3, TRAJ42)
CAVRDRDYGGSQGIRIF

SEQ ID NO: 421484 - protein, 15 aa, Homo sapiens
  CDR3 for beta chain variable domain of TCR clone 210742 (TRBV6-6, TRBJ2-7)
CASSYSYGGSYEQYF

SEQ ID NO: 421485 - protein, 13 aa, Homo sapiens
  CDR3 for alpha chain variable domain of TCR clone 210743 (TRAV1-2, TRAJ9)
CAVLNTGGFATIF

SEQ ID NO: 421486 - protein, 14 aa, Homo sapiens
  CDR3 for beta chain variable domain of TCR clone 210743 (TRBV20-1, TRBJ2-3)
CSARGGTSTDTQYF

SEQ ID NO: 421487 - protein, 12 aa, Homo sapiens
  CDR3 for alpha chain variable domain of TCR clone 210744 (TRAV13-1, TRAJ49)
CAASIRSNQFYF

SEQ ID NO: 421488 - protein, 17 aa, Homo sapiens
  CDR3 for beta chain variable domain of TCR clone 210744 (TRBV7-8, TRBJ2-6)
CASSAGTGGAGANVLTF

SEQ ID NO: 421489 - protein, 13 aa, Homo sapiens
  CDR3 for alpha chain variable domain of TCR clone 210745 (TRAV21, TRAJ20)
CAVGLRVDYKLSF

SEQ ID NO: 421490 - protein, 18 aa, Homo sapiens
  CDR3 for beta chain variable domain of TCR clone 210745 (TRBV7-3, TRBJ2-5)
CASSLGGAAQGRWETQYF

SEQ ID NO: 421491 - protein, 12 aa, Homo sapiens
  CDR3 for alpha chain variable domain of TCR clone 210746 (TRAV27, TRAJ13)
CAGVWGYQKVTF

SEQ ID NO: 421492 - protein, 16 aa, Homo sapiens
  CDR3 for beta chain variable domain of TCR clone 210746 (TRBV28, TRBJ2-1)
CASSSSYSGSLNEQFF

SEQ ID NO: 421493 - protein, 13 aa, Homo sapiens
  CDR3 for alpha chain variable domain of TCR clone 210747 (TRAV38-2/DV8, TRAJ34)
CAYRNYNTDNLIF

SEQ ID NO: 421494 - protein, 15 aa, Homo sapiens
  CDR3 for beta chain variable domain of TCR clone 210747 (TRBV20-1, TRBJ2-5)
CSAEGTGGLQETQYF

SEQ ID NO: 421495 - protein, 14 aa, Homo sapiens
  CDR3 for alpha chain variable domain of TCR clone 210748 (TRAV29/DV5, TRAJ36)
CAARRKTGATNLFF

SEQ ID NO: 421496 - protein, 15 aa, Homo sapiens
  CDR3 for beta chain variable domain of TCR clone 210748 (TRBV27, TRBJ2-1)
CASSNGGGSSNEQFF

SEQ ID NO: 421497 - protein, 14 aa, Homo sapiens
  CDR3 for alpha chain variable domain of TCR clone 210749 (TRAV29/DV5, TRAJ49)
CAASLSNTGKQFYF

SEQ ID NO: 421498 - protein, 15 aa, Homo sapiens
  CDR3 for beta chain variable domain of TCR clone 210749 (TRBV20-1, TRBJ2-1)
CSARGIGGTYNEQFF

SEQ ID NO: 421499 - protein, 14 aa, Homo sapiens
  CDR3 for alpha chain variable domain of TCR clone 210750 (TRAV4, TRAJ12)
CLVGYMDSSYKLVF

SEQ ID NO: 421500 - protein, 14 aa, Homo sapiens
  CDR3 for beta chain variable domain of TCR clone 210750 (TRBV27, TRBJ1-1)
CASSPGGGATEAFF

SEQ ID NO: 421501 - protein, 17 aa, Homo sapiens
  CDR3 for alpha chain variable domain of TCR clone 210751 (TRAV13-1, TRAJ31)
CAPRDRLMFGDGTQLVV

SEQ ID NO: 421502 - protein, 12 aa, Homo sapiens
  CDR3 for beta chain variable domain of TCR clone 210751 (TRBV7-9, TRBJ2-7)
CASSLEGCEGYF

SEQ ID NO: 421503 - protein, 13 aa, Homo sapiens
  CDR3 for alpha chain variable domain of TCR clone 210752 (TRAV1-2, TRAJ31)
CAVRPNNNARLMF

SEQ ID NO: 421504 - protein, 14 aa, Homo sapiens
  CDR3 for beta chain variable domain of TCR clone 210752 (TRBV11-2, TRBJ2-1)
CGSSLSGPYNEQFF

SEQ ID NO: 421505 - protein, 14 aa, Homo sapiens
  CDR3 for alpha chain variable domain of TCR clone 210753 (TRAV20, TRAJ56)
CAVQFGGANSKLAF

SEQ ID NO: 421506 - protein, 14 aa, Homo sapiens
  CDR3 for beta chain variable domain of TCR clone 210753 (TRBV20-1, TRBJ2-7)
CSAKRGGSSYEQYF

SEQ ID NO: 421507 - protein, 14 aa, Homo sapiens
  CDR3 for alpha chain variable domain of TCR clone 210754 (TRAV17, TRAJ22)
CATSPSGSARQLTF

SEQ ID NO: 421508 - protein, 15 aa, Homo sapiens
  CDR3 for beta chain variable domain of TCR clone 210754 (TRBV4-1, TRBJ2-5)
CASSQWDLFQETQYF

SEQ ID NO: 421509 - protein, 14 aa, Homo sapiens
  CDR3 for alpha chain variable domain of TCR clone 210755 (TRAV12-2, TRAJ13)
CAVKKTGGYQKVTF

SEQ ID NO: 421510 - protein, 15 aa, Homo sapiens
  CDR3 for beta chain variable domain of TCR clone 210755 (TRBV11-2, TRBJ2-2)
CASSSDRVNAGELFF

SEQ ID NO: 421511 - protein, 12 aa, Homo sapiens
  CDR3 for alpha chain variable domain of TCR clone 210756 (TRAV17, TRAJ20)
CATTLNDYELSF

SEQ ID NO: 421512 - protein, 12 aa, Homo sapiens
  CDR3 for beta chain variable domain of TCR clone 210756 (TRBV10-3, TRBJ2-7)
CAHGADSGEQYF

SEQ ID NO: 421513 - protein, 15 aa, Homo sapiens
  CDR3 for alpha chain variable domain of TCR clone 210757 (TRAV38-1, TRAJ37)
CAFIHGSGNTGKLIF

SEQ ID NO: 421514 - protein, 12 aa, Homo sapiens
  CDR3 for beta chain variable domain of TCR clone 210757 (TRBV7-9, TRBJ2-7)
GASSFGSYEQYF

SEQ ID NO: 421515 - protein, 14 aa, Homo sapiens
  CDR3 for alpha chain variable domain of TCR clone 210758 (TRAV21, TRAJ21)
CAVKGFGNFNKFYF

SEQ ID NO: 421516 - protein, 16 aa, Homo sapiens
  CDR3 for beta chain variable domain of TCR clone 210758 (TRBV12-4, TRBJ1-5)
CASRQGSGLGNQHQHF

SEQ ID NO: 421517 - protein, 13 aa, Homo sapiens
  CDR3 for alpha chain variable domain of TCR clone 210759 (TRAV29/DV5, TRAJ31)
CAASRNNNARLML

SEQ ID NO: 421518 - protein, 14 aa, Homo sapiens
  CDR3 for beta chain variable domain of TCR clone 210759 (TRBV18, TRBJ2-5)
CASSPPGHQETQYF

SEQ ID NO: 421519 - protein, 15 aa, Homo sapiens
  CDR3 for alpha chain variable domain of TCR clone 210760 (TRAV17, TRAJ35)
CATAFVIGFGNVLHC

SEQ ID NO: 421520 - protein, 14 aa, Homo sapiens
  CDR3 for beta chain variable domain of TCR clone 210760 (TRBV19, TRBJ1-1)
CASSIRGTGTEAFF

SEQ ID NO: 421521 - protein, 15 aa, Homo sapiens
  CDR3 for alpha chain variable domain of TCR clone 210761 (TRAV12-3, TRAJ27)
CAMRAYNTNAAKQPF

SEQ ID NO: 421522 - protein, 13 aa, Homo sapiens
  CDR3 for beta chain variable domain of TCR clone 210761 (TRBV11-2, TRBJ2-5)
CASSRGPSETQYF

SEQ ID NO: 421523 - protein, 11 aa, Homo sapiens
  CDR3 for alpha chain variable domain of TCR clone 210762 (TRAV12-2, TRAJ43)
CAAYNNNNMRF

SEQ ID NO: 421524 - protein, 14 aa, Homo sapiens
  CDR3 for beta chain variable domain of TCR clone 210762 (TRBV7-8, TRBJ1-2)
CASSAGTAIYGDTF

SEQ ID NO: 421525 - protein, 13 aa, Homo sapiens
  CDR3 for alpha chain variable domain of TCR clone 210763 (TRAV1-1, TRAJ15)
CAVVDQAGTALIF

SEQ ID NO: 421526 - protein, 14 aa, Homo sapiens
  CDR3 for beta chain variable domain of TCR clone 210763 (TRBV5-4, TRBJ1-6)
CASSLWSYNSPLHF

SEQ ID NO: 421527 - protein, 16 aa, Homo sapiens
  CDR3 for alpha chain variable domain of TCR clone 210764 (TRAV8-3, TRAJ10)
CAVGSGVTGGGNKLTF

SEQ ID NO: 421528 - protein, 13 aa, Homo sapiens
  CDR3 for beta chain variable domain of TCR clone 210764 (TRBV18, TRBJ1-1)
CASSPGPSGEAFL

SEQ ID NO: 421529 - protein, 14 aa, Homo sapiens
  CDR3 for alpha chain variable domain of TCR clone 210765 (TRAV8-1, TRAJ15)
CAVNGQQAGTALIF

SEQ ID NO: 421530 - protein, 12 aa, Homo sapiens
  CDR3 for beta chain variable domain of TCR clone 210765 (TRBV7-8, TRBJ2-5)
CASSLRAETQYF

SEQ ID NO: 421531 - protein, 13 aa, Homo sapiens
  CDR3 for alpha chain variable domain of TCR clone 210766 (TRAV16, TRAJ26)
CITVLCLGQNFVF

SEQ ID NO: 421532 - protein, 12 aa, Homo sapiens
  CDR3 for beta chain variable domain of TCR clone 210766 (TRBV11-2, TRBJ2-1)
CASSPGDNEQFF

SEQ ID NO: 421533 - protein, 18 aa, Homo sapiens
  CDR3 for alpha chain variable domain of TCR clone 210767 (TRAV13-1, TRAJ52)
CAASKRSAGGTSYGKLTF

SEQ ID NO: 421534 - protein, 13 aa, Homo sapiens
  CDR3 for beta chain variable domain of TCR clone 210767 (TRBV2, TRBJ1-1)
CARNPTGGFHAFF

SEQ ID NO: 421535 - protein, 14 aa, Homo sapiens
  CDR3 for alpha chain variable domain of TCR clone 210768 (TRAV35, TRAJ13)
CAGRSPGGYQQVTF

SEQ ID NO: 421536 - protein, 14 aa, Homo sapiens
  CDR3 for beta chain variable domain of TCR clone 210768 (TRBV19, TRBJ2-2)
CASSMVGLSGELFF

SEQ ID NO: 421537 - protein, 15 aa, Homo sapiens
  CDR3 for alpha chain variable domain of TCR clone 210769 (TRAV8-3, TRAJ27)
CAEGPSKTNAGKSTF

SEQ ID NO: 421538 - protein, 15 aa, Homo sapiens
  CDR3 for beta chain variable domain of TCR clone 210769 (TRBV7-2, TRBJ2-1)
CASSSGLAGGNEQFF

SEQ ID NO: 421539 - protein, 15 aa, Homo sapiens
  CDR3 for alpha chain variable domain of TCR clone 210770 (TRAV17, TRAJ42)
CATEHYGGSQGNLIF

SEQ ID NO: 421540 - protein, 15 aa, Homo sapiens
  CDR3 for beta chain variable domain of TCR clone 210770 (TRBV5-1, TRBJ2-2)
CASSSQGGNTGELFF

SEQ ID NO: 421541 - protein, 13 aa, Homo sapiens
  CDR3 for alpha chain variable domain of TCR clone 210771 (TRAV2, TRAJ15)
CAVASQAGTALIF

SEQ ID NO: 421542 - protein, 14 aa, Homo sapiens
  CDR3 for beta chain variable domain of TCR clone 210771 (TRBV25-1, TRBJ1-1)
CASTHLGGNTETFF

SEQ ID NO: 421543 - protein, 15 aa, Homo sapiens
  CDR3 for alpha chain variable domain of TCR clone 210772 (TRAV12-1, TRAJ44)
CVADLPTGTSSKLPF

SEQ ID NO: 421544 - protein, 13 aa, Homo sapiens
  CDR3 for beta chain variable domain of TCR clone 210772 (TRBV6-5, TRBJ2-5)
CASSPQGGETQYF

SEQ ID NO: 421545 - protein, 16 aa, Homo sapiens
  CDR3 for alpha chain variable domain of TCR clone 210773 (TRAV30, TRAJ24)
CGTEIVDADSWGKFQF

SEQ ID NO: 421546 - protein, 15 aa, Homo sapiens
  CDR3 for beta chain variable domain of TCR clone 210773 (TRBV4-1, TRBJ1-4)
CASSDTGGTDEKLFF

SEQ ID NO: 421547 - protein, 13 aa, Homo sapiens
  CDR3 for alpha chain variable domain of TCR clone 210774 (TRAV13-1, TRAJ21)
CAASIYNFNKFYF

SEQ ID NO: 421548 - protein, 10 aa, Homo sapiens
  CDR3 for beta chain variable domain of TCR clone 210774 (TRBV28, TRBJ1-2)
CASSSDRAVF

SEQ ID NO: 421549 - protein, 11 aa, Homo sapiens
  CDR3 for alpha chain variable domain of TCR clone 210775 (TRAV26-1, TRAJ27)
CIDPNAGKSTF

SEQ ID NO: 421550 - protein, 19 aa, Homo sapiens
  CDR3 for beta chain variable domain of TCR clone 210775 (TRBV25-1, TRBJ2-2)
CAILVYRVDGGRKTGELFF

SEQ ID NO: 421551 - protein, 13 aa, Homo sapiens
  CDR3 for alpha chain variable domain of TCR clone 210776 (TRAV1-2, TRAJ36)
CAVDQTGANNLFS

SEQ ID NO: 421552 - protein, 14 aa, Homo sapiens
  CDR3 for beta chain variable domain of TCR clone 210776 (TRBV20-1, TRBJ2-5)
CSAREMTKQETQYF

SEQ ID NO: 421553 - protein, 10 aa, Homo sapiens
  CDR3 for alpha chain variable domain of TCR clone 210777 (TRAV16, TRAJ39)
CSSTGNMLTF

SEQ ID NO: 421554 - protein, 14 aa, Homo sapiens
  CDR3 for beta chain variable domain of TCR clone 210777 (TRBV27, TRBJ1-4)
CASSLDGGWEKLFV

SEQ ID NO: 421555 - protein, 15 aa, Homo sapiens
  CDR3 for alpha chain variable domain of TCR clone 210778 (TRAV12-3, TRAJ6)
CAMSATTGGSYIPTF

SEQ ID NO: 421556 - protein, 15 aa, Homo sapiens
  CDR3 for beta chain variable domain of TCR clone 210778 (TRBV28, TRBJ2-5)
CGSSPPWSYQETQYF

SEQ ID NO: 421557 - protein, 12 aa, Homo sapiens
  CDR3 for alpha chain variable domain of TCR clone 210779 (TRAV8-3, TRAJ20)
CAVGGGDHKLSF

SEQ ID NO: 421558 - protein, 14 aa, Homo sapiens
  CDR3 for beta chain variable domain of TCR clone 210779 (TRBV5-1, TRBJ2-7)
CASSRGEPLYEQYF

SEQ ID NO: 421559 - protein, 14 aa, Homo sapiens
  CDR3 for alpha chain variable domain of TCR clone 210780 (TRAV1-2, TRAJ16)
CAVNRFSVGQKLLF

SEQ ID NO: 421560 - protein, 15 aa, Homo sapiens
  CDR3 for beta chain variable domain of TCR clone 210780 (TRBV5-8, TRBJ1-1)
CASSFSGTSLKGAFF

SEQ ID NO: 421561 - protein, 11 aa, Homo sapiens
  CDR3 for alpha chain variable domain of TCR clone 210781 (TRAV3, TRAJ21)
CAVGNFNKFYF

SEQ ID NO: 421562 - protein, 18 aa, Homo sapiens
  CDR3 for beta chain variable domain of TCR clone 210781 (TRBV6-6, TRBJ1-3)
CASSYSKWDSISGNTIYF

SEQ ID NO: 421563 - protein, 14 aa, Homo sapiens
  CDR3 for alpha chain variable domain of TCR clone 210782 (TRAV8-4, TRAJ13)
CAVTLSGGYQKVTF

SEQ ID NO: 421564 - protein, 16 aa, Homo sapiens
  CDR3 for beta chain variable domain of TCR clone 210782 (TRBV5-7, TRBJ1-4)
CASSPSGGLKTEELFF

SEQ ID NO: 421565 - protein, 12 aa, Homo sapiens
  CDR3 for alpha chain variable domain of TCR clone 210783 (TRAV30, TRAJ43)
CGTEERGNDMRF

SEQ ID NO: 421566 - protein, 13 aa, Homo sapiens
  CDR3 for beta chain variable domain of TCR clone 210783 (TRBV27, TRBJ2-7)
CASSFAQGYEQYC

SEQ ID NO: 421567 - protein, 12 aa, Homo sapiens
  CDR3 for alpha chain variable domain of TCR clone 210784 (TRAV12-2, TRAJ7)
CAVMRGNNRLPF

SEQ ID NO: 421568 - protein, 17 aa, Homo sapiens
  CDR3 for beta chain variable domain of TCR clone 210784 (TRBV7-9, TRBJ2-3)
CASSPTVAGDLTDTQYF

SEQ ID NO: 421569 - protein, 15 aa, Homo sapiens
  CDR3 for alpha chain variable domain of TCR clone 210785 (TRAV30, TRAJ32)
CGTEILGGATNKLIF

SEQ ID NO: 421570 - protein, 17 aa, Homo sapiens
  CDR3 for beta chain variable domain of TCR clone 210785 (TRBV5-4, TRBJ2-1)
CASSSAGGRGHYNEQFF

SEQ ID NO: 421571 - protein, 12 aa, Homo sapiens
  CDR3 for alpha chain variable domain of TCR clone 210786 (TRAV8-3, TRAJ40)
CAVTSGTYKYIF

SEQ ID NO: 421572 - protein, 13 aa, Homo sapiens
  CDR3 for beta chain variable domain of TCR clone 210786 (TRBV4-2, TRBJ1-1)
CASSQAGNTEAFF

SEQ ID NO: 421573 - protein, 14 aa, Homo sapiens
  CDR3 for alpha chain variable domain of TCR clone 210787 (TRAV26-1, TRAJ48)
RIVRVGFGNEKLTF

SEQ ID NO: 421574 - protein, 13 aa, Homo sapiens
  CDR3 for beta chain variable domain of TCR clone 210787 (TRBV11-3, TRBJ2-3)
CASSHDTKDTQYF

SEQ ID NO: 421575 - protein, 11 aa, Homo sapiens
  CDR3 for alpha chain variable domain of TCR clone 210788 (TRAV2, TRAJ13)
CASGGYQKVTF

SEQ ID NO: 421576 - protein, 16 aa, Homo sapiens
  CDR3 for beta chain variable domain of TCR clone 210788 (TRBV19, TRBJ2-1)
CASSKAGPSSYYEQFF

SEQ ID NO: 421577 - protein, 11 aa, Homo sapiens
  CDR3 for alpha chain variable domain of TCR clone 210789 (TRAV21, TRAJ34)
CAVTNTDKLIF

SEQ ID NO: 421578 - protein, 13 aa, Homo sapiens
  CDR3 for beta chain variable domain of TCR clone 210789 (TRBV7-3, TRBJ2-5)
CASSFRGGETQYF

SEQ ID NO: 421579 - protein, 14 aa, Homo sapiens
  CDR3 for alpha chain variable domain of TCR clone 210790 (TRAV35, TRAJ54)
CAGYLIKGAQKLVF

SEQ ID NO: 421580 - protein, 14 aa, Homo sapiens
  CDR3 for beta chain variable domain of TCR clone 210790 (TRBV7-2, TRBJ2-5)
CASSVGWAEETQYF

SEQ ID NO: 421581 - protein, 17 aa, Homo sapiens
  CDR3 for alpha chain variable domain of TCR clone 210791 (TRAV3, TRAJ6)
CAVRDRPRAGGSYIPTF

SEQ ID NO: 421582 - protein, 20 aa, Homo sapiens
  CDR3 for beta chain variable domain of TCR clone 210791 (TRBV28, TRBJ2-1)
CASTPIGRSPGLAGGNEQFL

SEQ ID NO: 421583 - protein, 12 aa, Homo sapiens
  CDR3 for alpha chain variable domain of TCR clone 210792 (TRAV1-1, TRAJ39)
CAVPVVGNMLTF

SEQ ID NO: 421584 - protein, 18 aa, Homo sapiens
  CDR3 for beta chain variable domain of TCR clone 210792 (TRBV7-9, TRBJ2-7)
CASSLTTSGSRKWYEQYF

SEQ ID NO: 421585 - protein, 15 aa, Homo sapiens
  CDR3 for alpha chain variable domain of TCR clone 210793 (TRAV13-1, TRAJ15)
CAASIERQAGTALIF

SEQ ID NO: 421586 - protein, 16 aa, Homo sapiens
  CDR3 for beta chain variable domain of TCR clone 210793 (TRBV12-4, TRBJ2-5)
CASSFFVRGRQETQYF

SEQ ID NO: 421587 - protein, 18 aa, Homo sapiens
  CDR3 for alpha chain variable domain of TCR clone 210794 (TRAV3, TRAJ17)
CAVRDGPPKAAAGNKLTF

SEQ ID NO: 421588 - protein, 17 aa, Homo sapiens
  CDR3 for beta chain variable domain of TCR clone 210794 (TRBV20-1, TRBJ2-2)
CSASGSGQGGLTGELFF

SEQ ID NO: 421589 - protein, 14 aa, Homo sapiens
  CDR3 for alpha chain variable domain of TCR clone 210795 (TRAV12-2, TRAJ32)
CAHPDSGDTNKLIF

SEQ ID NO: 421590 - protein, 14 aa, Homo sapiens
  CDR3 for beta chain variable domain of TCR clone 210795 (TRBV4-2, TRBJ2-3)
CASRETRAPGMQYF

SEQ ID NO: 421591 - protein, 14 aa, Homo sapiens
  CDR3 for alpha chain variable domain of TCR clone 210796 (TRAV1-2, TRAJ16)
CAVNRFSDGQKLLF

SEQ ID NO: 421592 - protein, 15 aa, Homo sapiens
  CDR3 for beta chain variable domain of TCR clone 210796 (TRBV28, TRBJ2-7)
CASRPWDRFSYEQYF

SEQ ID NO: 421593 - protein, 14 aa, Homo sapiens
  CDR3 for alpha chain variable domain of TCR clone 210797 (TRAV16, TRAJ42)
CALSGMGSQGNLIF

SEQ ID NO: 421594 - protein, 13 aa, Homo sapiens
  CDR3 for beta chain variable domain of TCR clone 210797 (TRBV10-3, TRBJ2-7)
CASKLAGNYEQYF

SEQ ID NO: 421595 - protein, 14 aa, Homo sapiens
  CDR3 for alpha chain variable domain of TCR clone 210798 (TRAV16, TRAJ33)
CALSAMDSNYQLIW

SEQ ID NO: 421596 - protein, 19 aa, Homo sapiens
  CDR3 for beta chain variable domain of TCR clone 210798 (TRBV25-1, TRBJ2-2)
CAILVYRVDRGRKTGELFF

SEQ ID NO: 421597 - protein, 13 aa, Homo sapiens
  CDR3 for alpha chain variable domain of TCR clone 210799 (TRAV12-2, TRAJ40)
CAVAPSGTYNYIF

SEQ ID NO: 421598 - protein, 13 aa, Homo sapiens
  CDR3 for beta chain variable domain of TCR clone 210799 (TRBV11-3, TRBJ2-5)
CASSSGLQETQYF

SEQ ID NO: 421599 - protein, 14 aa, Homo sapiens
  CDR3 for alpha chain variable domain of TCR clone 210800 (TRAV8-3, TRAJ13)
CAVGARGGYQNVTF

SEQ ID NO: 421600 - protein, 16 aa, Homo sapiens
  CDR3 for beta chain variable domain of TCR clone 210800 (TRBV27, TRBJ2-7)
CASSLGSGTGPYEQYF

SEQ ID NO: 421601 - protein, 12 aa, Homo sapiens
  CDR3 for alpha chain variable domain of TCR clone 210801 (TRAV3, TRAJ31)
CAAQRANARLMF

SEQ ID NO: 421602 - protein, 15 aa, Homo sapiens
  CDR3 for beta chain variable domain of TCR clone 210801 (TRBV7-3, TRBJ2-2)
CQQLKAGTLSGELFF

SEQ ID NO: 421603 - protein, 13 aa, Homo sapiens
  CDR3 for alpha chain variable domain of TCR clone 210802 (TRAV13-2, TRAJ41)
CAESINSGYALNF

SEQ ID NO: 421604 - protein, 14 aa, Homo sapiens
  CDR3 for beta chain variable domain of TCR clone 210802 (TRBV2, TRBJ2-1)
CASSGALDGNEQFF

SEQ ID NO: 421605 - protein, 13 aa, Homo sapiens
  CDR3 for alpha chain variable domain of TCR clone 210803 (TRAV8-6, TRAJ49)
CAVITNTGNQFYF

SEQ ID NO: 421606 - protein, 15 aa, Homo sapiens
  CDR3 for beta chain variable domain of TCR clone 210803 (TRBV9, TRBJ2-1)
CASSLAGSSYNEQFF

SEQ ID NO: 421607 - protein, 11 aa, Homo sapiens
  CDR3 for alpha chain variable domain of TCR clone 210804 (TRAV12-1, TRAJ31)
CVGRVQCQTHV

SEQ ID NO: 421608 - protein, 14 aa, Homo sapiens
  CDR3 for beta chain variable domain of TCR clone 210804 (TRBV7-9, TRBJ2-2)
CASSGLADTGELFF

SEQ ID NO: 421609 - protein, 15 aa, Homo sapiens
  CDR3 for alpha chain variable domain of TCR clone 210805 (TRAV6, TRAJ10)
CALDLLTGGGNKLTF

SEQ ID NO: 421610 - protein, 15 aa, Homo sapiens
  CDR3 for beta chain variable domain of TCR clone 210805 (TRBV6-1, TRBJ2-3)
CASSERGGITDTQYF

SEQ ID NO: 421611 - protein, 15 aa, Homo sapiens
  CDR3 for alpha chain variable domain of TCR clone 210806 (TRAV26-2, TRAJ50)
CILRDEETSYDKVLF

SEQ ID NO: 421612 - protein, 12 aa, Homo sapiens
  CDR3 for beta chain variable domain of TCR clone 210806 (TRBV5-7, TRBJ1-2)
CASSDGPYGYTF

SEQ ID NO: 421613 - protein, 14 aa, Homo sapiens
  CDR3 for alpha chain variable domain of TCR clone 210807 (TRAV12-2, TRAJ13)
CAVKKTGGYQKVTF

SEQ ID NO: 421614 - protein, 15 aa, Homo sapiens
  CDR3 for beta chain variable domain of TCR clone 210807 (TRBV20-1, TRBJ2-7)
CSARGRVSGMDEQYF

SEQ ID NO: 421615 - protein, 14 aa, Homo sapiens
  CDR3 for alpha chain variable domain of TCR clone 210808 (TRAV13-1, TRAJ44)
CAAKATGTASNLTF

SEQ ID NO: 421616 - protein, 13 aa, Homo sapiens
  CDR3 for beta chain variable domain of TCR clone 210808 (TRBV5-5, TRBJ1-2)
CASSFWRGEDDTF

SEQ ID NO: 421617 - protein, 15 aa, Homo sapiens
  CDR3 for alpha chain variable domain of TCR clone 210809 (TRAV3, TRAJ5)
CAVRDRKTGRRALTF

SEQ ID NO: 421618 - protein, 15 aa, Homo sapiens
  CDR3 for beta chain variable domain of TCR clone 210809 (TRBV7-8, TRBJ2-1)
CASSLADSIYNEQFF

SEQ ID NO: 421619 - protein, 14 aa, Homo sapiens
  CDR3 for alpha chain variable domain of TCR clone 210810 (TRAV12-2, TRAJ40)
CAVKIPSGTYKYIF

SEQ ID NO: 421620 - protein, 15 aa, Homo sapiens
  CDR3 for beta chain variable domain of TCR clone 210810 (TRBV27, TRBJ2-7)
RASSTAGTGSYEQYF

SEQ ID NO: 421621 - protein, 15 aa, Homo sapiens
  CDR3 for alpha chain variable domain of TCR clone 210811 (TRAV26-1, TRAJ15)
CIVRMANQAGTALIF

SEQ ID NO: 421622 - protein, 15 aa, Homo sapiens
  CDR3 for beta chain variable domain of TCR clone 210811 (TRBV20-1, TRBJ2-7)
CSARDRVSGMDEQYF

SEQ ID NO: 421623 - protein, 12 aa, Homo sapiens
  CDR3 for alpha chain variable domain of TCR clone 210812 (TRAV21, TRAJ3)
CCFYSSTSKIIF

SEQ ID NO: 421624 - protein, 16 aa, Homo sapiens
  CDR3 for beta chain variable domain of TCR clone 210812 (TRBV19, TRBJ2-1)
CASSKAGPSSYNEQFF

SEQ ID NO: 421625 - protein, 14 aa, Homo sapiens
  CDR3 for alpha chain variable domain of TCR clone 210813 (TRAV3, TRAJ9)
CAVRLNTGGFKTIF

SEQ ID NO: 421626 - protein, 13 aa, Homo sapiens
  CDR3 for beta chain variable domain of TCR clone 210813 (TRBV11-2, TRBJ2-1)
CASSLDLVNEQFF

SEQ ID NO: 421627 - protein, 15 aa, Homo sapiens
  CDR3 for alpha chain variable domain of TCR clone 210814 (TRAV26-1, TRAJ40)
CIVRVTTSGTYKYIF

SEQ ID NO: 421628 - protein, 13 aa, Homo sapiens
  CDR3 for beta chain variable domain of TCR clone 210814 (TRBV10-3, TRBJ2-7)
CASKLAVNYEQYF

SEQ ID NO: 421629 - protein, 14 aa, Homo sapiens
  CDR3 for alpha chain variable domain of TCR clone 210815 (TRAV1-1, TRAJ30)
CAVRSLNRDDKIIF

SEQ ID NO: 421630 - protein, 18 aa, Homo sapiens
  CDR3 for beta chain variable domain of TCR clone 210815 (TRBV11-2, TRBJ2-3)
CASSLGGASRGAPNTQYF

SEQ ID NO: 421631 - protein, 14 aa, Homo sapiens
  CDR3 for alpha chain variable domain of TCR clone 210816 (TRAV13-1, TRAJ6)
CAASITGGSSIPTF

SEQ ID NO: 421632 - protein, 14 aa, Homo sapiens
  CDR3 for beta chain variable domain of TCR clone 210816 (TRBV6-3, TRBJ2-1)
CASLHSAYYNEQFF

SEQ ID NO: 421633 - protein, 14 aa, Homo sapiens
  CDR3 for alpha chain variable domain of TCR clone 210817 (TRAV26-1, TRAJ38)
CIADNAGNNRKLIW

SEQ ID NO: 421634 - protein, 14 aa, Homo sapiens
  CDR3 for beta chain variable domain of TCR clone 210817 (TRBV25-1, TRBJ2-7)
CASFGGGDSYEQYF

SEQ ID NO: 421635 - protein, 11 aa, Homo sapiens
  CDR3 for alpha chain variable domain of TCR clone 210818 (TRAV12-1, TRAJ40)
CVVPGTYKYIF

SEQ ID NO: 421636 - protein, 12 aa, Homo sapiens
  CDR3 for beta chain variable domain of TCR clone 210818 (TRBV11-2, TRBJ2-2)
CASSLGGGELFF

SEQ ID NO: 421637 - protein, 16 aa, Homo sapiens
  CDR3 for alpha chain variable domain of TCR clone 210819 (TRAV3, TRAJ37)
CALRPHGSGNTAKLIF

SEQ ID NO: 421638 - protein, 14 aa, Homo sapiens
  CDR3 for beta chain variable domain of TCR clone 210819 (TRBV2, TRBJ2-1)
CASSYRAYYNEQFF

SEQ ID NO: 421639 - protein, 15 aa, Homo sapiens
  CDR3 for alpha chain variable domain of TCR clone 210820 (TRAV21, TRAJ24)
CAARSSTYSWGKLQF

SEQ ID NO: 421640 - protein, 20 aa, Homo sapiens
  CDR3 for beta chain variable domain of TCR clone 210820 (TRBV7-8, TRBJ2-2)
CASSHLFPGPTIHITGELFF

SEQ ID NO: 421641 - protein, 12 aa, Homo sapiens
  CDR3 for alpha chain variable domain of TCR clone 210821 (TRAV29/DV5, TRAJ49)
CAATDTGNQFYF

SEQ ID NO: 421642 - protein, 16 aa, Homo sapiens
  CDR3 for beta chain variable domain of TCR clone 210821 (TRBV7-3, TRBJ2-3)
CASSSLGGGSRDTQYF

SEQ ID NO: 421643 - protein, 14 aa, Homo sapiens
  CDR3 for alpha chain variable domain of TCR clone 210822 (TRAV16, TRAJ37)
CALDISGNTGTLIF

SEQ ID NO: 421644 - protein, 14 aa, Homo sapiens
  CDR3 for beta chain variable domain of TCR clone 210822 (TRBV7-6, TRBJ2-7)
CASSFRQGADEQYF

SEQ ID NO: 421645 - protein, 17 aa, Homo sapiens
  CDR3 for alpha chain variable domain of TCR clone 210823 (TRAV38-2/DV8, TRAJ56)
CAYRSEVGTGANSKLTV

SEQ ID NO: 421646 - protein, 14 aa, Homo sapiens
  CDR3 for beta chain variable domain of TCR clone 210823 (TRBV11-1, TRBJ1-1)
CASSLEHPNTEAFF

SEQ ID NO: 421647 - protein, 12 aa, Homo sapiens
  CDR3 for alpha chain variable domain of TCR clone 210824 (TRAV21, TRAJ33)
CAVQDSAYQLIW

SEQ ID NO: 421648 - protein, 14 aa, Homo sapiens
  CDR3 for beta chain variable domain of TCR clone 210824 (TRBV28, TRBJ2-1)
CASSPGEGGNEQFF

SEQ ID NO: 421649 - protein, 13 aa, Homo sapiens
  CDR3 for alpha chain variable domain of TCR clone 210825 (TRAV2, TRAJ29)
CAAQNSGNTPLVF

SEQ ID NO: 421650 - protein, 15 aa, Homo sapiens
  CDR3 for beta chain variable domain of TCR clone 210825 (TRBV5-1, TRBJ2-3)
CASSVTSGSTDTQYF

SEQ ID NO: 421651 - protein, 15 aa, Homo sapiens
  CDR3 for alpha chain variable domain of TCR clone 210826 (TRAV2, TRAJ15)
CAVEDRGQGGTALIF

SEQ ID NO: 421652 - protein, 13 aa, Homo sapiens
  CDR3 for beta chain variable domain of TCR clone 210826 (TRBV10-2, TRBJ2-7)
CASGASGGYEQYF

SEQ ID NO: 421653 - protein, 15 aa, Homo sapiens
  CDR3 for alpha chain variable domain of TCR clone 210827 (TRAV8-2, TRAJ40)
CVVLGTTSGTSNNIF

SEQ ID NO: 421654 - protein, 16 aa, Homo sapiens
  CDR3 for beta chain variable domain of TCR clone 210827 (TRBV7-3, TRBJ2-1)
CAGSLEGYRSYNEQFF

SEQ ID NO: 421655 - protein, 14 aa, Homo sapiens
  CDR3 for alpha chain variable domain of TCR clone 210828 (TRAV12-1, TRAJ23)
CVVMIYNQGGKLIF

SEQ ID NO: 421656 - protein, 23 aa, Homo sapiens
  CDR3 for beta chain variable domain of TCR clone 210828 (TRBV7-3, TRBJ1-6)
CASSLTSRDEASDPSSYNSTLHF

SEQ ID NO: 421657 - protein, 14 aa, Homo sapiens
  CDR3 for alpha chain variable domain of TCR clone 210829 (TRAV12-1, TRAJ17)
CVVNYKAAGNKLTF

SEQ ID NO: 421658 - protein, 12 aa, Homo sapiens
  CDR3 for beta chain variable domain of TCR clone 210829 (TRBV12-4, TRBJ2-7)
CASSVGGYEQYF

SEQ ID NO: 421659 - protein, 16 aa, Homo sapiens
  CDR3 for alpha chain variable domain of TCR clone 210830 (TRAV26-2, TRAJ52)
CIRGPAGGTSYGKLTF

SEQ ID NO: 421660 - protein, 16 aa, Homo sapiens
  CDR3 for beta chain variable domain of TCR clone 210830 (TRBV19, TRBJ2-2)
CASSTARASNTGELFF

SEQ ID NO: 421661 - protein, 13 aa, Homo sapiens
  CDR3 for alpha chain variable domain of TCR clone 210831 (TRAV12-1, TRAJ26)
CVVRRNYGQNFVF

SEQ ID NO: 421662 - protein, 16 aa, Homo sapiens
  CDR3 for beta chain variable domain of TCR clone 210831 (TRBV11-2, TRBJ1-2)
CASSLDTGGADYGYTF

SEQ ID NO: 421663 - protein, 15 aa, Homo sapiens
  CDR3 for alpha chain variable domain of TCR clone 210832 (TRAV35, TRAJ34)
CAGTSIVRNTYKLIF

SEQ ID NO: 421664 - protein, 15 aa, Homo sapiens
  CDR3 for beta chain variable domain of TCR clone 210832 (TRBV6-1, TRBJ1-5)
CASSELREGNQPQHF

SEQ ID NO: 421665 - protein, 14 aa, Homo sapiens
  CDR3 for alpha chain variable domain of TCR clone 210833 (TRAV26-1, TRAJ49)
CIVRLTNTGNQFYF

SEQ ID NO: 421666 - protein, 13 aa, Homo sapiens
  CDR3 for beta chain variable domain of TCR clone 210833 (TRBV4-1, TRBJ2-7)
CTSSQGQAYEQYF

SEQ ID NO: 421667 - protein, 13 aa, Homo sapiens
  CDR3 for alpha chain variable domain of TCR clone 210834 (TRAV17, TRAJ26)
CATVDNYGQNFVF

SEQ ID NO: 421668 - protein, 13 aa, Homo sapiens
  CDR3 for beta chain variable domain of TCR clone 210834 (TRBV7-2, TRBJ1-1)
CASSFGGNTEAFF

SEQ ID NO: 421669 - protein, 21 aa, Homo sapiens
  CDR3 for alpha chain variable domain of TCR clone 210835 (TRAV3, )
CAVRPTPDIQNPDPAVYQLRD

SEQ ID NO: 421670 - protein, 18 aa, Homo sapiens
  CDR3 for beta chain variable domain of TCR clone 210835 (TRBV11-3, TRBJ2-3)
CASSLGGASRGAPNTQYF

SEQ ID NO: 421671 - protein, 11 aa, Homo sapiens
  CDR3 for alpha chain variable domain of TCR clone 210836 (TRAV12-1, TRAJ33)
CVVNMNYQLIW

SEQ ID NO: 421672 - protein, 16 aa, Homo sapiens
  CDR3 for beta chain variable domain of TCR clone 210836 (TRBV7-3, TRBJ2-2)
CASSLRRGTLSGELFF

SEQ ID NO: 421673 - protein, 15 aa, Homo sapiens
  CDR3 for alpha chain variable domain of TCR clone 210837 (TRAV13-1, TRAJ15)
CAASIERQAGTALIF

SEQ ID NO: 421674 - protein, 13 aa, Homo sapiens
  CDR3 for beta chain variable domain of TCR clone 210837 (TRBV5-1, TRBJ2-7)
CASSATGGNEQYF

SEQ ID NO: 421675 - protein, 16 aa, Homo sapiens
  CDR3 for alpha chain variable domain of TCR clone 210838 (TRAV12-2, TRAJ43)
CAGADIRFGAGTRLTV

SEQ ID NO: 421676 - protein, 16 aa, Homo sapiens
  CDR3 for beta chain variable domain of TCR clone 210838 (TRBV2, TRBJ2-4)
CASSEAPGGEQNIQYF

SEQ ID NO: 421677 - protein, 13 aa, Homo sapiens
  CDR3 for alpha chain variable domain of TCR clone 210839 (TRAV8-6, TRAJ49)
CAVITNTGNQFYF

SEQ ID NO: 421678 - protein, 16 aa, Homo sapiens
  CDR3 for beta chain variable domain of TCR clone 210839 (TRBV19, TRBJ2-1)
CASSSKGTRSYNEQFF

SEQ ID NO: 421679 - protein, 14 aa, Homo sapiens
  CDR3 for alpha chain variable domain of TCR clone 210840 (TRAV4, TRAJ43)
CLVGPMYNNNDMRF

SEQ ID NO: 421680 - protein, 21 aa, Homo sapiens
  CDR3 for beta chain variable domain of TCR clone 210840 (TRBV11-1, TRBJ2-1)
CASSARERLRPEGPSYNEQFL

SEQ ID NO: 421681 - protein, 11 aa, Homo sapiens
  CDR3 for alpha chain variable domain of TCR clone 210841 (TRAV2, TRAJ33)
CAVESNYQLIW

SEQ ID NO: 421682 - protein, 15 aa, Homo sapiens
  CDR3 for beta chain variable domain of TCR clone 210841 (TRBV19, TRBJ1-1)
CASTSGQIQKTEAFF

SEQ ID NO: 421683 - protein, 13 aa, Homo sapiens
  CDR3 for alpha chain variable domain of TCR clone 210842 (TRAV16, TRAJ34)
CARISYNTDKLII

SEQ ID NO: 421684 - protein, 15 aa, Homo sapiens
  CDR3 for beta chain variable domain of TCR clone 210842 (TRBV6-3, TRBJ2-7)
CASSSPGTVFYEQYF

SEQ ID NO: 421685 - protein, 14 aa, Homo sapiens
  CDR3 for alpha chain variable domain of TCR clone 210843 (TRAV1-2, TRAJ16)
CAVTRFSDGQKLLF

SEQ ID NO: 421686 - protein, 17 aa, Homo sapiens
  CDR3 for beta chain variable domain of TCR clone 210843 (TRBV20-1, TRBJ2-2)
CSASGSGQGGLTGELFF

SEQ ID NO: 421687 - protein, 12 aa, Homo sapiens
  CDR3 for alpha chain variable domain of TCR clone 210844 (TRAV17, TRAJ57)
CATDGGSEKLVF

SEQ ID NO: 421688 - protein, 11 aa, Homo sapiens
  CDR3 for beta chain variable domain of TCR clone 210844 (TRBV7-8, TRBJ2-7)
CASSLSLEQYF

SEQ ID NO: 421689 - protein, 15 aa, Homo sapiens
  CDR3 for alpha chain variable domain of TCR clone 210845 (TRAV2, TRAJ9)
CAAEDRGTGGCKTIF

SEQ ID NO: 421690 - protein, 16 aa, Homo sapiens
  CDR3 for beta chain variable domain of TCR clone 210845 (TRBV24-1, TRBJ2-3)
CATSDPGTGATDTQYF

SEQ ID NO: 421691 - protein, 12 aa, Homo sapiens
  CDR3 for alpha chain variable domain of TCR clone 210846 (TRAV17, TRAJ4)
CATDGGYIKLIF

SEQ ID NO: 421692 - protein, 13 aa, Homo sapiens
  CDR3 for beta chain variable domain of TCR clone 210846 (TRBV29-1, TRBJ2-2)
CSTTGVNTGELFF

SEQ ID NO: 421693 - protein, 13 aa, Homo sapiens
  CDR3 for alpha chain variable domain of TCR clone 210847 (TRAV27, TRAJ41)
CAGEGNSGYALNV

SEQ ID NO: 421694 - protein, 14 aa, Homo sapiens
  CDR3 for beta chain variable domain of TCR clone 210847 (TRBV25-1, TRBJ1-1)
CASTHLGGNTEAFF

SEQ ID NO: 421695 - protein, 13 aa, Homo sapiens
  CDR3 for alpha chain variable domain of TCR clone 210848 (TRAV12-3, TRAJ39)
CAMIDNAGNMLTF

SEQ ID NO: 421696 - protein, 13 aa, Homo sapiens
  CDR3 for beta chain variable domain of TCR clone 210848 (TRBV29-1, TRBJ1-1)
CSVGDSRNTEAFF

SEQ ID NO: 421697 - protein, 13 aa, Homo sapiens
  CDR3 for alpha chain variable domain of TCR clone 210849 (TRAV1-1, TRAJ33)
CAVRRDSNYQLIG

SEQ ID NO: 421698 - protein, 16 aa, Homo sapiens
  CDR3 for beta chain variable domain of TCR clone 210849 (TRBV6-1, TRBJ2-2)
CASSAFRGGDTGELFF

SEQ ID NO: 421699 - protein, 14 aa, Homo sapiens
  CDR3 for alpha chain variable domain of TCR clone 210850 (TRAV12-2, TRAJ40)
CAVKIPSGTYKYSF

SEQ ID NO: 421700 - protein, 12 aa, Homo sapiens
  CDR3 for beta chain variable domain of TCR clone 210850 (TRBV11-2, TRBJ2-1)
CASSPGNNEQFF

SEQ ID NO: 421701 - protein, 15 aa, Homo sapiens
  CDR3 for alpha chain variable domain of TCR clone 210851 (TRAV2, TRAJ37)
CAVEDGSSNTGKLIF

SEQ ID NO: 421702 - protein, 18 aa, Homo sapiens
  CDR3 for beta chain variable domain of TCR clone 210851 (TRBV4-1, TRBJ1-5)
CASSQDPPGQGLNQPQHF

SEQ ID NO: 421703 - protein, 14 aa, Homo sapiens
  CDR3 for alpha chain variable domain of TCR clone 210852 (TRAV12-2, TRAJ13)
CAVKKTGGYQNVTF

SEQ ID NO: 421704 - protein, 15 aa, Homo sapiens
  CDR3 for beta chain variable domain of TCR clone 210852 (TRBV6-3, TRBJ2-2)
CASSFLATLTGELFF

SEQ ID NO: 421705 - protein, 14 aa, Homo sapiens
  CDR3 for alpha chain variable domain of TCR clone 210853 (TRAV21, TRAJ45)
CAVISGGGADGLTF

SEQ ID NO: 421706 - protein, 15 aa, Homo sapiens
  CDR3 for beta chain variable domain of TCR clone 210853 (TRBV6-1, TRBJ2-4)
CASSEAVWTINIQYF

SEQ ID NO: 421707 - protein, 13 aa, Homo sapiens
  CDR3 for alpha chain variable domain of TCR clone 210854 (TRAV13-1, TRAJ11)
CAAVLAGYSTLTF

SEQ ID NO: 421708 - protein, 17 aa, Homo sapiens
  CDR3 for beta chain variable domain of TCR clone 210854 (TRBV7-8, TRBJ2-6)
CASSAGTGGAGANVLTF

SEQ ID NO: 421709 - protein, 14 aa, Homo sapiens
  CDR3 for alpha chain variable domain of TCR clone 210855 (TRAV8-2, TRAJ4)
CVVSPSGGYNKLIF

SEQ ID NO: 421710 - protein, 15 aa, Homo sapiens
  CDR3 for beta chain variable domain of TCR clone 210855 (TRBV28, TRBJ2-1)
CASSIIAGGRSEQFF

SEQ ID NO: 421711 - protein, 13 aa, Homo sapiens
  CDR3 for alpha chain variable domain of TCR clone 210856 (TRAV8-3, TRAJ36)
CAVGATGENNLFF

SEQ ID NO: 421712 - protein, 13 aa, Homo sapiens
  CDR3 for beta chain variable domain of TCR clone 210856 (TRBV6-1, TRBJ1-1)
CASSRQGNTEAFF

SEQ ID NO: 421713 - protein, 14 aa, Homo sapiens
  CDR3 for alpha chain variable domain of TCR clone 210857 (TRAV8-3, TRAJ4)
RAVGAAGSYNKLIF

SEQ ID NO: 421714 - protein, 15 aa, Homo sapiens
  CDR3 for beta chain variable domain of TCR clone 210857 (TRBV6-5, TRBJ2-1)
CASSYDAGAGNEQFF

SEQ ID NO: 421715 - protein, 14 aa, Homo sapiens
  CDR3 for alpha chain variable domain of TCR clone 210858 (TRAV1-2, TRAJ16)
CAVNRFSDVQKLLF

SEQ ID NO: 421716 - protein, 14 aa, Homo sapiens
  CDR3 for beta chain variable domain of TCR clone 210858 (TRBV19, TRBJ2-7)
CASSVDSESYEQYF

SEQ ID NO: 421717 - protein, 15 aa, Homo sapiens
  CDR3 for alpha chain variable domain of TCR clone 210859 (TRAV3, TRAJ7)
CAVRDKDNGNNRLAV

SEQ ID NO: 421718 - protein, 19 aa, Homo sapiens
  CDR3 for beta chain variable domain of TCR clone 210859 (TRBV5-8, TRBJ2-3)
CASSFLGTSGSHRTDTQYF

SEQ ID NO: 421719 - protein, 17 aa, Homo sapiens
  CDR3 for alpha chain variable domain of TCR clone 210860 (TRAV8-6, TRAJ58)
CAVSSWVGETSGSRLTF

SEQ ID NO: 421720 - protein, 12 aa, Homo sapiens
  CDR3 for beta chain variable domain of TCR clone 210860 (TRBV12-4, TRBJ1-3)
CASSFSGNTIYF

SEQ ID NO: 421721 - protein, 15 aa, Homo sapiens
  CDR3 for alpha chain variable domain of TCR clone 210861 (TRAV8-3, TRAJ45)
RASSYSGEGADGLTF

SEQ ID NO: 421722 - protein, 13 aa, Homo sapiens
  CDR3 for beta chain variable domain of TCR clone 210861 (TRBV10-3, TRBJ2-7)
CASKLAVNYEQYF

SEQ ID NO: 421723 - protein, 12 aa, Homo sapiens
  CDR3 for alpha chain variable domain of TCR clone 210862 (TRAV13-1, TRAJ21)
CAAKEGFNEFYF

SEQ ID NO: 421724 - protein, 13 aa, Homo sapiens
  CDR3 for beta chain variable domain of TCR clone 210862 (TRBV19, TRBJ1-2)
CASSVPGQDGYTF

SEQ ID NO: 421725 - protein, 10 aa, Homo sapiens
  CDR3 for alpha chain variable domain of TCR clone 210863 (TRAV23/DV6, TRAJ43)
CAAAVAALEQ

SEQ ID NO: 421726 - protein, 16 aa, Homo sapiens
  CDR3 for beta chain variable domain of TCR clone 210863 (TRBV7-6, TRBJ2-1)
CDSSAPGPSSYNEQFF

SEQ ID NO: 421727 - protein, 15 aa, Homo sapiens
  CDR3 for alpha chain variable domain of TCR clone 210864 (TRAV3, TRAJ36)
CAVRASQTGANNLFF

SEQ ID NO: 421728 - protein, 15 aa, Homo sapiens
  CDR3 for beta chain variable domain of TCR clone 210864 (TRBV3-1, TRBJ2-1)
CASSQDYTTRGEQFF

SEQ ID NO: 421729 - protein, 14 aa, Homo sapiens
  CDR3 for alpha chain variable domain of TCR clone 210865 (TRAV13-1, TRAJ15)
CAASKTQAGTALIF

SEQ ID NO: 421730 - protein, 14 aa, Homo sapiens
  CDR3 for beta chain variable domain of TCR clone 210865 (TRBV6-6, TRBJ1-2)
CASSGGQGTYGYTF

SEQ ID NO: 421731 - protein, 12 aa, Homo sapiens
  CDR3 for alpha chain variable domain of TCR clone 210866 (TRAV13-1, TRAJ21)
CAAKEGSNKFYF

SEQ ID NO: 421732 - protein, 17 aa, Homo sapiens
  CDR3 for beta chain variable domain of TCR clone 210866 (TRBV19, TRBJ2-7)
CASSISFYDSYPYEQYV

SEQ ID NO: 421733 - protein, 14 aa, Homo sapiens
  CDR3 for alpha chain variable domain of TCR clone 210867 (TRAV8-3, TRAJ30)
CAVGDMNRDDKIIF

SEQ ID NO: 421734 - protein, 16 aa, Homo sapiens
  CDR3 for beta chain variable domain of TCR clone 210867 (TRBV29-1, TRBJ2-7)
CSVDDAEDGTAYEQYF

SEQ ID NO: 421735 - protein, 10 aa, Homo sapiens
  CDR3 for alpha chain variable domain of TCR clone 210868 (TRAV12-1, TRAJ23)
CVVSGGKLIF

SEQ ID NO: 421736 - protein, 15 aa, Homo sapiens
  CDR3 for beta chain variable domain of TCR clone 210868 (TRBV7-9, TRBJ1-6)
CASSSPGGGNSPQHF

SEQ ID NO: 421737 - protein, 12 aa, Homo sapiens
  CDR3 for alpha chain variable domain of TCR clone 210869 (TRAV25, TRAJ11)
CAGASVYSTLTF

SEQ ID NO: 421738 - protein, 14 aa, Homo sapiens
  CDR3 for beta chain variable domain of TCR clone 210869 (TRBV5-8, TRBJ2-3)
CASSVGQGTDTQYF

SEQ ID NO: 421739 - protein, 14 aa, Homo sapiens
  CDR3 for alpha chain variable domain of TCR clone 210870 (TRAV1-1, TRAJ28)
CAGPSGAGSYQLTF

SEQ ID NO: 421740 - protein, 15 aa, Homo sapiens
  CDR3 for beta chain variable domain of TCR clone 210870 (TRBV7-2, TRBJ1-2)
CASSLVSGGDYGYTF

SEQ ID NO: 421741 - protein, 18 aa, Homo sapiens
  CDR3 for alpha chain variable domain of TCR clone 210871 (TRAV21, TRAJ18)
CAAQSTSDRGSTLGRLYF

SEQ ID NO: 421742 - protein, 14 aa, Homo sapiens
  CDR3 for beta chain variable domain of TCR clone 210871 (TRBV11-2, TRBJ1-4)
CASSFEATNEKLFF

SEQ ID NO: 421743 - protein, 11 aa, Homo sapiens
  CDR3 for alpha chain variable domain of TCR clone 210872 (TRAV1-2, TRAJ40)
CAVPGTYKYIF

SEQ ID NO: 421744 - protein, 15 aa, Homo sapiens
  CDR3 for beta chain variable domain of TCR clone 210872 (TRBV5-7, TRBJ1-5)
CASSYGELWDQTQHF

SEQ ID NO: 421745 - protein, 13 aa, Homo sapiens
  CDR3 for alpha chain variable domain of TCR clone 210873 (TRAV27, TRAJ49)
CAPRPYTGNQFYF

SEQ ID NO: 421746 - protein, 13 aa, Homo sapiens
  CDR3 for beta chain variable domain of TCR clone 210873 (TRBV5-1, TRBJ2-2)
CASIVARTGELFF

SEQ ID NO: 421747 - protein, 11 aa, Homo sapiens
  CDR3 for alpha chain variable domain of TCR clone 210874 (TRAV17, TRAJ49)
CATDAGNQFYF

SEQ ID NO: 421748 - protein, 21 aa, Homo sapiens
  CDR3 for beta chain variable domain of TCR clone 210874 (TRBV27, TRBJ2-7)
EPRREGLRPSGRHKGPYEQYF

SEQ ID NO: 421749 - protein, 14 aa, Homo sapiens
  CDR3 for alpha chain variable domain of TCR clone 210875 (TRAV29/DV5, TRAJ36)
CAARRKTGANTLFF

SEQ ID NO: 421750 - protein, 12 aa, Homo sapiens
  CDR3 for beta chain variable domain of TCR clone 210875 (TRBV11-2, TRBJ2-2)
CASSLGGGELFF

SEQ ID NO: 421751 - protein, 16 aa, Homo sapiens
  CDR3 for alpha chain variable domain of TCR clone 210876 (TRAV12-3, TRAJ53)
CATSPGSGGSNYKITF

SEQ ID NO: 421752 - protein, 11 aa, Homo sapiens
  CDR3 for beta chain variable domain of TCR clone 210876 (TRBV29-1, TRBJ2-5)
CSEDRTGTQYF

SEQ ID NO: 421753 - protein, 14 aa, Homo sapiens
  CDR3 for alpha chain variable domain of TCR clone 210877 (TRAV8-3, TRAJ13)
CAVGPSGGYQKVTF

SEQ ID NO: 421754 - protein, 15 aa, Homo sapiens
  CDR3 for beta chain variable domain of TCR clone 210877 (TRBV11-3, TRBJ2-7)
CASSPGPASPYEQYF

SEQ ID NO: 421755 - protein, 13 aa, Homo sapiens
  CDR3 for alpha chain variable domain of TCR clone 210878 (TRAV23/DV6, TRAJ16)
CAASGSDGQKLLF

SEQ ID NO: 421756 - protein, 14 aa, Homo sapiens
  CDR3 for beta chain variable domain of TCR clone 210878 (TRBV9, TRBJ2-3)
CASSRQPYTDTQYF

SEQ ID NO: 421757 - protein, 15 aa, Homo sapiens
  CDR3 for alpha chain variable domain of TCR clone 210879 (TRAV12-3, TRAJ6)
CAMSAASGGSYIPTF

SEQ ID NO: 421758 - protein, 13 aa, Homo sapiens
  CDR3 for beta chain variable domain of TCR clone 210879 (TRBV7-9, TRBJ2-3)
CASSPGSTDTQYF

SEQ ID NO: 421759 - protein, 13 aa, Homo sapiens
  CDR3 for alpha chain variable domain of TCR clone 210880 (TRAV1-2, TRAJ9)
CAALNTGGFKTIF

SEQ ID NO: 421760 - protein, 15 aa, Homo sapiens
  CDR3 for beta chain variable domain of TCR clone 210880 (TRBV18, TRBJ2-4)
CASSPGPDRGNIRYF

SEQ ID NO: 421761 - protein, 12 aa, Homo sapiens
  CDR3 for alpha chain variable domain of TCR clone 210881 (TRAV9-2, TRAJ36)
CALKKGANNLFF

SEQ ID NO: 421762 - protein, 13 aa, Homo sapiens
  CDR3 for beta chain variable domain of TCR clone 210881 (TRBV27, TRBJ1-1)
CDSSLSIGAEAFF

SEQ ID NO: 421763 - protein, 13 aa, Homo sapiens
  CDR3 for alpha chain variable domain of TCR clone 210882 (TRAV13-1, TRAJ10)
CAATAGGGNTLTF

SEQ ID NO: 421764 - protein, 14 aa, Homo sapiens
  CDR3 for beta chain variable domain of TCR clone 210882 (TRBV12-4, TRBJ2-7)
CASSPAGLKYEQYF

SEQ ID NO: 421765 - protein, 13 aa, Homo sapiens
  CDR3 for alpha chain variable domain of TCR clone 210883 (TRAV3, TRAJ20)
CAVRDTPRYKLSF

SEQ ID NO: 421766 - protein, 17 aa, Homo sapiens
  CDR3 for beta chain variable domain of TCR clone 210883 (TRBV7-3, TRBJ2-3)
CASSLMKRMRGADTQYF

SEQ ID NO: 421767 - protein, 12 aa, Homo sapiens
  CDR3 for alpha chain variable domain of TCR clone 210884 (TRAV13-2, TRAJ8)
CAPWLGFQKLVF

SEQ ID NO: 421768 - protein, 14 aa, Homo sapiens
  CDR3 for beta chain variable domain of TCR clone 210884 (TRBV12-5, TRBJ2-5)
CASGSRTHQVTQYF

SEQ ID NO: 421769 - protein, 15 aa, Homo sapiens
  CDR3 for alpha chain variable domain of TCR clone 210885 (TRAV12-3, TRAJ6)
CAMSATTGGSYIPTF

SEQ ID NO: 421770 - protein, 12 aa, Homo sapiens
  CDR3 for beta chain variable domain of TCR clone 210885 (TRBV14, TRBJ2-7)
CASSLNQRGQYF

SEQ ID NO: 421771 - protein, 17 aa, Homo sapiens
  CDR3 for alpha chain variable domain of TCR clone 210886 (TRAV16, TRAJ37)
CAFWPKNGSSNTGKLIF

SEQ ID NO: 421772 - protein, 14 aa, Homo sapiens
  CDR3 for beta chain variable domain of TCR clone 210886 (TRBV19, TRBJ2-7)
CASSMGQGAIEQYF

SEQ ID NO: 421773 - protein, 12 aa, Homo sapiens
  CDR3 for alpha chain variable domain of TCR clone 210887 (TRAV23/DV6, TRAJ12)
CAAIDLGAMDSS

SEQ ID NO: 421774 - protein, 12 aa, Homo sapiens
  CDR3 for beta chain variable domain of TCR clone 210887 (TRBV10-3, TRBJ2-2)
CAIRENTGELFF

SEQ ID NO: 421775 - protein, 14 aa, Homo sapiens
  CDR3 for alpha chain variable domain of TCR clone 210888 (TRAV12-3, TRAJ7)
CAMSEIGGNNRLPF

SEQ ID NO: 421776 - protein, 12 aa, Homo sapiens
  CDR3 for beta chain variable domain of TCR clone 210888 (TRBV5-4, TRBJ1-1)
CASSLDRREAFF

SEQ ID NO: 421777 - protein, 16 aa, Homo sapiens
  CDR3 for alpha chain variable domain of TCR clone 210889 (TRAV30, TRAJ24)
CVAEIVDADSWGKFQF

SEQ ID NO: 421778 - protein, 14 aa, Homo sapiens
  CDR3 for beta chain variable domain of TCR clone 210889 (TRBV12-5, TRBJ2-5)
CASGSRTHQETQYF

SEQ ID NO: 421779 - protein, 14 aa, Homo sapiens
  CDR3 for alpha chain variable domain of TCR clone 210890 (TRAV16, TRAJ31)
CSLSGRNNNARLMF

SEQ ID NO: 421780 - protein, 12 aa, Homo sapiens
  CDR3 for beta chain variable domain of TCR clone 210890 (TRBV11-2, TRBJ1-2)
CASSREGDGYTF

SEQ ID NO: 421781 - protein, 14 aa, Homo sapiens
  CDR3 for alpha chain variable domain of TCR clone 210891 (TRAV13-1, TRAJ48)
CAASRSFGHEKLTF

SEQ ID NO: 421782 - protein, 15 aa, Homo sapiens
  CDR3 for beta chain variable domain of TCR clone 210891 (TRBV7-2, TRBJ2-3)
CASSLAGAFIDTQYF

SEQ ID NO: 421783 - protein, 13 aa, Homo sapiens
  CDR3 for alpha chain variable domain of TCR clone 210892 (TRAV17, TRAJ5)
CALRGTGRRAPTF

SEQ ID NO: 421784 - protein, 13 aa, Homo sapiens
  CDR3 for beta chain variable domain of TCR clone 210892 (TRBV4-2, TRBJ1-1)
CASSQAGNTEAFF

SEQ ID NO: 421785 - protein, 13 aa, Homo sapiens
  CDR3 for alpha chain variable domain of TCR clone 210893 (TRAV20, TRAJ21)
CAVEGYNFNKFYF

SEQ ID NO: 421786 - protein, 16 aa, Homo sapiens
  CDR3 for beta chain variable domain of TCR clone 210893 (TRBV7-2, TRBJ1-2)
CASSSNQDRRGHGYAF

SEQ ID NO: 421787 - protein, 13 aa, Homo sapiens
  CDR3 for alpha chain variable domain of TCR clone 210894 (TRAV13-1, TRAJ5)
CSASDTGSRALTF

SEQ ID NO: 421788 - protein, 12 aa, Homo sapiens
  CDR3 for beta chain variable domain of TCR clone 210894 (TRBV28, TRBJ2-3)
CASSLYRDTQYF

SEQ ID NO: 421789 - protein, 16 aa, Homo sapiens
  CDR3 for alpha chain variable domain of TCR clone 210895 (TRAV27, TRAJ13)
CAGAKSDSGGYQKVTF

SEQ ID NO: 421790 - protein, 16 aa, Homo sapiens
  CDR3 for beta chain variable domain of TCR clone 210895 (TRBV7-9, TRBJ2-1)
CASSDVAGGSYNEQFF

SEQ ID NO: 421791 - protein, 12 aa, Homo sapiens
  CDR3 for alpha chain variable domain of TCR clone 210896 (TRAV13-1, TRAJ42)
SVLRGSPGNLIF

SEQ ID NO: 421792 - protein, 13 aa, Homo sapiens
  CDR3 for beta chain variable domain of TCR clone 210896 (TRBV2, TRBJ1-4)
CASSELGAEELFF

SEQ ID NO: 421793 - protein, 13 aa, Homo sapiens
  CDR3 for alpha chain variable domain of TCR clone 210897 (TRAV17, TRAJ5)
CAPMGTGRRALTF

SEQ ID NO: 421794 - protein, 15 aa, Homo sapiens
  CDR3 for beta chain variable domain of TCR clone 210897 (TRBV6-6, TRBJ2-5)
CASSPGGGLEETQYF

SEQ ID NO: 421795 - protein, 16 aa, Homo sapiens
  CDR3 for alpha chain variable domain of TCR clone 210898 (TRAV20, TRAJ53)
CAVWRGSGGSNYKLTF

SEQ ID NO: 421796 - protein, 12 aa, Homo sapiens
  CDR3 for beta chain variable domain of TCR clone 210898 (TRBV29-1, TRBJ2-3)
CSVVLGADTQYF

SEQ ID NO: 421797 - protein, 16 aa, Homo sapiens
  CDR3 for alpha chain variable domain of TCR clone 210899 (TRAV26-1, TRAJ23)
CIVRVHPYNQGGKLIF

SEQ ID NO: 421798 - protein, 15 aa, Homo sapiens
  CDR3 for beta chain variable domain of TCR clone 210899 (TRBV5-7, TRBJ2-7)
CASSLYFEGSYEQYF

SEQ ID NO: 421799 - protein, 12 aa, Homo sapiens
  CDR3 for alpha chain variable domain of TCR clone 210900 (TRAV2, TRAJ5)
CALDTGRRALTF

SEQ ID NO: 421800 - protein, 15 aa, Homo sapiens
  CDR3 for beta chain variable domain of TCR clone 210900 (TRBV4-1, TRBJ2-7)
CASSQQGQGFDEQYF

SEQ ID NO: 421801 - protein, 13 aa, Homo sapiens
  CDR3 for alpha chain variable domain of TCR clone 210901 (TRAV13-1, TRAJ40)
CAARTSGTYKYIY

SEQ ID NO: 421802 - protein, 17 aa, Homo sapiens
  CDR3 for beta chain variable domain of TCR clone 210901 (TRBV4-1, TRBJ2-3)
CASSQGYVSGGTDTQYF

SEQ ID NO: 421803 - protein, 13 aa, Homo sapiens
  CDR3 for alpha chain variable domain of TCR clone 210902 (TRAV26-1, TRAJ40)
CIVRGTGTYKYIF

SEQ ID NO: 421804 - protein, 16 aa, Homo sapiens
  CDR3 for beta chain variable domain of TCR clone 210902 (TRBV12-5, TRBJ2-5)
CASGPRTSGNQETQYF

SEQ ID NO: 421805 - protein, 14 aa, Homo sapiens
  CDR3 for alpha chain variable domain of TCR clone 210903 (TRAV26-1, TRAJ8)
CIVRVDTGFQKLVF

SEQ ID NO: 421806 - protein, 14 aa, Homo sapiens
  CDR3 for beta chain variable domain of TCR clone 210903 (TRBV4-3, TRBJ2-7)
CASSQDVAGGEQYF

SEQ ID NO: 421807 - protein, 15 aa, Homo sapiens
  CDR3 for alpha chain variable domain of TCR clone 210904 (TRAV13-1, TRAJ27)
CAARELNTNAGKSTF

SEQ ID NO: 421808 - protein, 15 aa, Homo sapiens
  CDR3 for beta chain variable domain of TCR clone 210904 (TRBV9, TRBJ2-1)
CASSLAGSSYNEQFF

SEQ ID NO: 421809 - protein, 12 aa, Homo sapiens
  CDR3 for alpha chain variable domain of TCR clone 210905 (TRAV41, TRAJ58)
CAVETSGSRLTF

SEQ ID NO: 421810 - protein, 14 aa, Homo sapiens
  CDR3 for beta chain variable domain of TCR clone 210905 (TRBV7-2, TRBJ2-7)
CASSPKTSFYEQYF

SEQ ID NO: 421811 - protein, 17 aa, Homo sapiens
  CDR3 for alpha chain variable domain of TCR clone 210906 (TRAV26-1, TRAJ28)
CIVRALYSGAGSYQLPF

SEQ ID NO: 421812 - protein, 12 aa, Homo sapiens
  CDR3 for beta chain variable domain of TCR clone 210906 (TRBV12-4, TRBJ2-1)
CARRQTENEQFF

SEQ ID NO: 421813 - protein, 15 aa, Homo sapiens
  CDR3 for alpha chain variable domain of TCR clone 210907 (TRAV3, TRAJ47)
CAVRDIGEYGNKMVF

SEQ ID NO: 421814 - protein, 14 aa, Homo sapiens
  CDR3 for beta chain variable domain of TCR clone 210907 (TRBV13, TRBJ2-5)
CASSLERVGETQYS

SEQ ID NO: 421815 - protein, 13 aa, Homo sapiens
  CDR3 for alpha chain variable domain of TCR clone 210908 (TRAV8-3, TRAJ44)
CAVVPGTASKLTF

SEQ ID NO: 421816 - protein, 15 aa, Homo sapiens
  CDR3 for beta chain variable domain of TCR clone 210908 (TRBV7-3, TRBJ2-2)
CASSETGQGTGELFF

SEQ ID NO: 421817 - protein, 13 aa, Homo sapiens
  CDR3 for alpha chain variable domain of TCR clone 210909 (TRAV26-2, TRAJ33)
CILTLDSNYQLIW

SEQ ID NO: 421818 - protein, 12 aa, Homo sapiens
  CDR3 for beta chain variable domain of TCR clone 210909 (TRBV12-4, TRBJ2-7)
CASSLGGYEQYF

SEQ ID NO: 421819 - protein, 13 aa, Homo sapiens
  CDR3 for alpha chain variable domain of TCR clone 210910 (TRAV12-3, TRAJ5)
CAMIYTGRRALTF

SEQ ID NO: 421820 - protein, 12 aa, Homo sapiens
  CDR3 for beta chain variable domain of TCR clone 210910 (TRBV18, TRBJ1-4)
CASSPSRERLFF

SEQ ID NO: 421821 - protein, 13 aa, Homo sapiens
  CDR3 for alpha chain variable domain of TCR clone 210911 (TRAV4, TRAJ28)
CLFIWGWELPTHF

SEQ ID NO: 421822 - protein, 16 aa, Homo sapiens
  CDR3 for beta chain variable domain of TCR clone 210911 (TRBV27, TRBJ1-5)
CASSLSGGASNQPQHF

SEQ ID NO: 421823 - protein, 14 aa, Homo sapiens
  CDR3 for alpha chain variable domain of TCR clone 210912 (TRAV1-2, TRAJ8)
CAVREDTGFQQLVF

SEQ ID NO: 421824 - protein, 15 aa, Homo sapiens
  CDR3 for beta chain variable domain of TCR clone 210912 (TRBV5-7, TRBJ2-3)
CASSPGLATTDTQYF

SEQ ID NO: 421825 - protein, 13 aa, Homo sapiens
  CDR3 for alpha chain variable domain of TCR clone 210913 (TRAV2, TRAJ11)
CAVEEMGYSTLTF

SEQ ID NO: 421826 - protein, 17 aa, Homo sapiens
  CDR3 for beta chain variable domain of TCR clone 210913 (TRBV7-2, TRBJ2-1)
CASSRGTSGAVGWEQFF

SEQ ID NO: 421827 - protein, 12 aa, Homo sapiens
  CDR3 for alpha chain variable domain of TCR clone 210914 (TRAV17, TRAJ57)
CVSQGGSEKLVF

SEQ ID NO: 421828 - protein, 16 aa, Homo sapiens
  CDR3 for beta chain variable domain of TCR clone 210914 (TRBV13, TRBJ2-2)
CASSEVFGANTGELFF

SEQ ID NO: 421829 - protein, 12 aa, Homo sapiens
  CDR3 for alpha chain variable domain of TCR clone 210915 (TRAV23/DV6, TRAJ3)
CAARAPQQCFQD

SEQ ID NO: 421830 - protein, 14 aa, Homo sapiens
  CDR3 for beta chain variable domain of TCR clone 210915 (TRBV7-2, TRBJ2-7)
CASSPKTSFYEQYF

SEQ ID NO: 421831 - protein, 12 aa, Homo sapiens
  CDR3 for alpha chain variable domain of TCR clone 210916 (TRAV1-2, TRAJ29)
CAVPSGNTPLVF

SEQ ID NO: 421832 - protein, 16 aa, Homo sapiens
  CDR3 for beta chain variable domain of TCR clone 210916 (TRBV4-1, TRBJ2-1)
CASSQDWADTLNEQFF

SEQ ID NO: 421833 - protein, 15 aa, Homo sapiens
  CDR3 for alpha chain variable domain of TCR clone 210917 (TRAV26-1, TRAJ29)
CIVRVEGSGNTPLVF

SEQ ID NO: 421834 - protein, 12 aa, Homo sapiens
  CDR3 for beta chain variable domain of TCR clone 210917 (TRBV19, TRBJ1-1)
CASSIGTEEAFF

SEQ ID NO: 421835 - protein, 15 aa, Homo sapiens
  CDR3 for alpha chain variable domain of TCR clone 210918 (TRAV5, TRAJ33)
CAEAPAMDSNYQLIW

SEQ ID NO: 421836 - protein, 13 aa, Homo sapiens
  CDR3 for beta chain variable domain of TCR clone 210918 (TRBV7-3, TRBJ1-1)
CASSQDWGAEAFF

SEQ ID NO: 421837 - protein, 14 aa, Homo sapiens
  CDR3 for alpha chain variable domain of TCR clone 210919 (TRAV13-1, TRAJ50)
CAARSKNSYDKVIF

SEQ ID NO: 421838 - protein, 17 aa, Homo sapiens
  CDR3 for beta chain variable domain of TCR clone 210919 (TRBV13, TRBJ2-3)
CASSLSRVAGGRNTQYF

SEQ ID NO: 421839 - protein, 14 aa, Homo sapiens
  CDR3 for alpha chain variable domain of TCR clone 210920 (TRAV8-3, TRAJ13)
CAVGGTFGYQKVTF

SEQ ID NO: 421840 - protein, 17 aa, Homo sapiens
  CDR3 for beta chain variable domain of TCR clone 210920 (TRBV7-9, TRBJ2-1)
CASSVGTLGRSYNEQFF

SEQ ID NO: 421841 - protein, 12 aa, Homo sapiens
  CDR3 for alpha chain variable domain of TCR clone 210921 (TRAV35, TRAJ39)
LAPNNAGNMLTF

SEQ ID NO: 421842 - protein, 17 aa, Homo sapiens
  CDR3 for beta chain variable domain of TCR clone 210921 (TRBV2, TRBJ2-3)
CASSLMKRMRGADTQYF

SEQ ID NO: 421843 - protein, 16 aa, Homo sapiens
  CDR3 for alpha chain variable domain of TCR clone 210922 (TRAV13-1, TRAJ48)
CVASIFGNFGNEKLTF

SEQ ID NO: 421844 - protein, 14 aa, Homo sapiens
  CDR3 for beta chain variable domain of TCR clone 210922 (TRBV7-3, TRBJ1-1)
CASSLKGGNTEAFF

SEQ ID NO: 421845 - protein, 12 aa, Homo sapiens
  CDR3 for alpha chain variable domain of TCR clone 210923 (TRAV35, TRAJ30)
CAGLNRDDKIIF

SEQ ID NO: 421846 - protein, 15 aa, Homo sapiens
  CDR3 for beta chain variable domain of TCR clone 210923 (TRBV9, TRBJ1-6)
CASIVAGTGDSPLHF

SEQ ID NO: 421847 - protein, 14 aa, Homo sapiens
  CDR3 for alpha chain variable domain of TCR clone 210924 (TRAV12-2, TRAJ13)
CSVKKTGGYQKVTF

SEQ ID NO: 421848 - protein, 12 aa, Homo sapiens
  CDR3 for beta chain variable domain of TCR clone 210924 (TRBV7-9, TRBJ1-5)
CASSPQGQPQHF

SEQ ID NO: 421849 - protein, 14 aa, Homo sapiens
  CDR3 for alpha chain variable domain of TCR clone 210925 (TRAV1-2, TRAJ8)
CAVREDTGFQKLVF

SEQ ID NO: 421850 - protein, 15 aa, Homo sapiens
  CDR3 for beta chain variable domain of TCR clone 210925 (TRBV7-3, TRBJ2-2)
CASSLYGGDTGELFF

SEQ ID NO: 421851 - protein, 15 aa, Homo sapiens
  CDR3 for alpha chain variable domain of TCR clone 210926 (TRAV3, TRAJ7)
CAVRDKDNGNNRLAF

SEQ ID NO: 421852 - protein, 19 aa, Homo sapiens
  CDR3 for beta chain variable domain of TCR clone 210926 (TRBV5-8, TRBJ2-3)
CASSFLGTSRSHRTDTQYF

SEQ ID NO: 421853 - protein, 10 aa, Homo sapiens
  CDR3 for alpha chain variable domain of TCR clone 210927 (TRAV13-1, TRAJ30)
CAARDDKIIF

SEQ ID NO: 421854 - protein, 15 aa, Homo sapiens
  CDR3 for beta chain variable domain of TCR clone 210927 (TRBV7-9, TRBJ1-2)
CASSLDREPNYGYIF

SEQ ID NO: 421855 - protein, 16 aa, Homo sapiens
  CDR3 for alpha chain variable domain of TCR clone 210928 (TRAV3, TRAJ18)
CAVRDGRGATLGRLYF

SEQ ID NO: 421856 - protein, 15 aa, Homo sapiens
  CDR3 for beta chain variable domain of TCR clone 210928 (TRBV7-9, TRBJ1-6)
CASSSPGRGNSTLHF

SEQ ID NO: 421857 - protein, 14 aa, Homo sapiens
  CDR3 for alpha chain variable domain of TCR clone 210929 (TRAV1-2, TRAJ8)
CAVREDTGFQKLVF

SEQ ID NO: 421858 - protein, 13 aa, Homo sapiens
  CDR3 for beta chain variable domain of TCR clone 210929 (TRBV7-6, TRBJ1-2)
CASSLVADYGDAF

SEQ ID NO: 421859 - protein, 12 aa, Homo sapiens
  CDR3 for alpha chain variable domain of TCR clone 210930 (TRAV12-3, TRAJ17)
CAMTLTGNKLTF

SEQ ID NO: 421860 - protein, 13 aa, Homo sapiens
  CDR3 for beta chain variable domain of TCR clone 210930 (TRBV4-2, TRBJ2-3)
CASSLTSTDTQYF

SEQ ID NO: 421861 - protein, 17 aa, Homo sapiens
  CDR3 for alpha chain variable domain of TCR clone 210931 (TRAV8-6, TRAJ58)
CAVSSWVGETSGSRLTF

SEQ ID NO: 421862 - protein, 17 aa, Homo sapiens
  CDR3 for beta chain variable domain of TCR clone 210931 (TRBV4-1, TRBJ1-4)
CASSQEGPRWVEEKLFF

SEQ ID NO: 421863 - protein, 10 aa, Homo sapiens
  CDR3 for alpha chain variable domain of TCR clone 210932 (TRAV36/DV7, TRAJ48)
CAVGNEKLTF

SEQ ID NO: 421864 - protein, 14 aa, Homo sapiens
  CDR3 for beta chain variable domain of TCR clone 210932 (TRBV7-2, TRBJ2-1)
CASIPKTSFYEQYF

SEQ ID NO: 421865 - protein, 18 aa, Homo sapiens
  CDR3 for alpha chain variable domain of TCR clone 210933 (TRAV12-3, TRAJ52)
CAMIVGGAGGTSYGKLTF

SEQ ID NO: 421866 - protein, 17 aa, Homo sapiens
  CDR3 for beta chain variable domain of TCR clone 210933 (TRBV13, TRBJ2-3)
CASSLSRVAGGRNTQYF

SEQ ID NO: 421867 - protein, 14 aa, Homo sapiens
  CDR3 for alpha chain variable domain of TCR clone 210934 (TRAV16, TRAJ15)
CALSFNQAGTALIF

SEQ ID NO: 421868 - protein, 16 aa, Homo sapiens
  CDR3 for beta chain variable domain of TCR clone 210934 (TRBV9, TRBJ2-7)
CASSAGPDRSPYEQYV

SEQ ID NO: 421869 - protein, 15 aa, Homo sapiens
  CDR3 for alpha chain variable domain of TCR clone 210935 (TRAV12-1, TRAJ44)
CVVDEYTGTASKLTF

SEQ ID NO: 421870 - protein, 15 aa, Homo sapiens
  CDR3 for beta chain variable domain of TCR clone 210935 (TRBV7-9, TRBJ2-7)
CASSLRTSGSYEQYF

SEQ ID NO: 421871 - protein, 17 aa, Homo sapiens
  CDR3 for alpha chain variable domain of TCR clone 210936 (TRAV36/DV7, TRAJ52)
CAVAQRAGGTSYGKLTF

SEQ ID NO: 421872 - protein, 15 aa, Homo sapiens
  CDR3 for beta chain variable domain of TCR clone 210936 (TRBV7-2, TRBJ2-1)
CASSSGLAGGNEQFF

SEQ ID NO: 421873 - protein, 12 aa, Homo sapiens
  CDR3 for alpha chain variable domain of TCR clone 210937 (TRAV8-3, TRAJ26)
CAGDNYGQNFVF

SEQ ID NO: 421874 - protein, 16 aa, Homo sapiens
  CDR3 for beta chain variable domain of TCR clone 210937 (TRBV20-1, TRBJ1-4)
CSAPGQGLLTNEKLLF

SEQ ID NO: 421875 - protein, 14 aa, Homo sapiens
  CDR3 for alpha chain variable domain of TCR clone 210938 (TRAV29/DV5, TRAJ36)
CAARRKTGSNKLFF

SEQ ID NO: 421876 - protein, 14 aa, Homo sapiens
  CDR3 for beta chain variable domain of TCR clone 210938 (TRBV12-5, TRBJ2-5)
CASGSRTHQETQYF

SEQ ID NO: 421877 - protein, 16 aa, Homo sapiens
  CDR3 for alpha chain variable domain of TCR clone 210939 (TRAV16, TRAJ52)
CALLNAGGTSYGKLTF

SEQ ID NO: 421878 - protein, 14 aa, Homo sapiens
  CDR3 for beta chain variable domain of TCR clone 210939 (TRBV11-2, TRBJ1-2)
CASSLGTANYGYTF

SEQ ID NO: 421879 - protein, 14 aa, Homo sapiens
  CDR3 for alpha chain variable domain of TCR clone 210940 (TRAV12-3, TRAJ10)
SYLPLTGGGNKLTF

SEQ ID NO: 421880 - protein, 14 aa, Homo sapiens
  CDR3 for beta chain variable domain of TCR clone 210940 (TRBV6-1, TRBJ1-3)
CASVQGGGGNTIYF

SEQ ID NO: 421881 - protein, 14 aa, Homo sapiens
  CDR3 for alpha chain variable domain of TCR clone 210941 (TRAV12-2, TRAJ13)
CAVKKTGGYQKVTF

SEQ ID NO: 421882 - protein, 14 aa, Homo sapiens
  CDR3 for beta chain variable domain of TCR clone 210941 (TRBV7-2, TRBJ2-7)
CASSTKTSFYEQYF

SEQ ID NO: 421883 - protein, 12 aa, Homo sapiens
  CDR3 for alpha chain variable domain of TCR clone 210942 (TRAV13-1, TRAJ49)
FAASPMGNQFYF

SEQ ID NO: 421884 - protein, 16 aa, Homo sapiens
  CDR3 for beta chain variable domain of TCR clone 210942 (TRBV5-1, TRBJ1-1)
CASSSGGNSLNTEAFF

SEQ ID NO: 421885 - protein, 12 aa, Homo sapiens
  CDR3 for alpha chain variable domain of TCR clone 210943 (TRAV13-1, TRAJ48)
CAANFGNEKLTF

SEQ ID NO: 421886 - protein, 12 aa, Homo sapiens
  CDR3 for beta chain variable domain of TCR clone 210943 (TRBV7-8, TRBJ2-7)
CASSLGDREQFF

SEQ ID NO: 421887 - protein, 15 aa, Homo sapiens
  CDR3 for alpha chain variable domain of TCR clone 210944 (TRAV21, TRAJ22)
CAVRLFFWFCKATDL

SEQ ID NO: 421888 - protein, 14 aa, Homo sapiens
  CDR3 for beta chain variable domain of TCR clone 210944 (TRBV11-1, TRBJ2-7)
CASSFRQGSYEQYF

SEQ ID NO: 421889 - protein, 16 aa, Homo sapiens
  CDR3 for alpha chain variable domain of TCR clone 210945 (TRAV12-2, TRAJ32)
CAVNLGQGRATNKLIF

SEQ ID NO: 421890 - protein, 15 aa, Homo sapiens
  CDR3 for beta chain variable domain of TCR clone 210945 (TRBV20-1, TRBJ2-7)
CSARGPLAGGREQYF

SEQ ID NO: 421891 - protein, 12 aa, Homo sapiens
  CDR3 for alpha chain variable domain of TCR clone 210946 (TRAV13-1, TRAJ42)
SVLRGSQGNLIF

SEQ ID NO: 421892 - protein, 16 aa, Homo sapiens
  CDR3 for beta chain variable domain of TCR clone 210946 (TRBV24-1, TRBJ2-3)
CATSDPGTGATDTQYF

SEQ ID NO: 421893 - protein, 15 aa, Homo sapiens
  CDR3 for alpha chain variable domain of TCR clone 210947 (TRAV17, TRAJ40)
CATVSSTSGTYKYFF

SEQ ID NO: 421894 - protein, 13 aa, Homo sapiens
  CDR3 for beta chain variable domain of TCR clone 210947 (TRBV2, TRBJ1-5)
CATAGPGNQPQHF

SEQ ID NO: 421895 - protein, 13 aa, Homo sapiens
  CDR3 for alpha chain variable domain of TCR clone 210948 (TRAV25, TRAJ30)
CAGRVDRADKIIF

SEQ ID NO: 421896 - protein, 17 aa, Homo sapiens
  CDR3 for beta chain variable domain of TCR clone 210948 (TRBV7-9, TRBJ2-6)
CASSFGAGYSGANVLTF

SEQ ID NO: 421897 - protein, 13 aa, Homo sapiens
  CDR3 for alpha chain variable domain of TCR clone 210949 (TRAV2, TRAJ40)
CAVVTSGTYKYIF

SEQ ID NO: 421898 - protein, 13 aa, Homo sapiens
  CDR3 for beta chain variable domain of TCR clone 210949 (TRBV7-3, TRBJ1-1)
CASSQDWGAEAFL

SEQ ID NO: 421899 - protein, 14 aa, Homo sapiens
  CDR3 for alpha chain variable domain of TCR clone 210950 (TRAV35, TRAJ22)
CAGLRPGSARQLAF

SEQ ID NO: 421900 - protein, 14 aa, Homo sapiens
  CDR3 for beta chain variable domain of TCR clone 210950 (TRBV4-1, TRBJ2-7)
CASSPVAGGDEQYF

SEQ ID NO: 421901 - protein, 14 aa, Homo sapiens
  CDR3 for alpha chain variable domain of TCR clone 210951 (TRAV3, TRAJ20)
CAVRDSFNDYKPSF

SEQ ID NO: 421902 - protein, 14 aa, Homo sapiens
  CDR3 for beta chain variable domain of TCR clone 210951 (TRBV12-4, TRBJ2-5)
CASSYSGYFETQYF

SEQ ID NO: 421903 - protein, 14 aa, Homo sapiens
  CDR3 for alpha chain variable domain of TCR clone 210952 (TRAV13-1, TRAJ40)
CAASMTSGTYKYIF

SEQ ID NO: 421904 - protein, 15 aa, Homo sapiens
  CDR3 for beta chain variable domain of TCR clone 210952 (TRBV4-2, TRBJ1-3)
CASSQDGAQGNTIYF

SEQ ID NO: 421905 - protein, 11 aa, Homo sapiens
  CDR3 for alpha chain variable domain of TCR clone 210953 (TRAV2, TRAJ33)
CPVDSNYQLIW

SEQ ID NO: 421906 - protein, 15 aa, Homo sapiens
  CDR3 for beta chain variable domain of TCR clone 210953 (TRBV19, TRBJ1-2)
CANSVGQVLNYGYTF

SEQ ID NO: 421907 - protein, 12 aa, Homo sapiens
  CDR3 for alpha chain variable domain of TCR clone 210954 (TRAV8-6, TRAJ20)
CAVSSNDYKLSF

SEQ ID NO: 421908 - protein, 15 aa, Homo sapiens
  CDR3 for beta chain variable domain of TCR clone 210954 (TRBV6-5, TRBJ2-1)
CASSYDAGAGNEQFF

SEQ ID NO: 421909 - protein, 11 aa, Homo sapiens
  CDR3 for alpha chain variable domain of TCR clone 210955 (TRAV9-2, TRAJ49)
CALSAGNQFYF

SEQ ID NO: 421910 - protein, 16 aa, Homo sapiens
  CDR3 for beta chain variable domain of TCR clone 210955 (TRBV28, TRBJ2-6)
CASSNRRGSGANDLTF

SEQ ID NO: 421911 - protein, 18 aa, Homo sapiens
  CDR3 for alpha chain variable domain of TCR clone 210956 (TRAV12-2, )
CAVEDIQNPDPAVYQLRD

SEQ ID NO: 421912 - protein, 15 aa, Homo sapiens
  CDR3 for beta chain variable domain of TCR clone 210956 (TRBV11-1, TRBJ2-7)
CASSLNYGASYGQYF

SEQ ID NO: 421913 - protein, 13 aa, Homo sapiens
  CDR3 for alpha chain variable domain of TCR clone 210957 (TRAV8-6, TRAJ50)
CAVIKTSYDKVIF

SEQ ID NO: 421914 - protein, 14 aa, Homo sapiens
  CDR3 for beta chain variable domain of TCR clone 210957 (TRBV4-1, TRBJ2-2)
CASSQAVNTGELFF

SEQ ID NO: 421915 - protein, 14 aa, Homo sapiens
  CDR3 for alpha chain variable domain of TCR clone 210958 (TRAV16, TRAJ39)
CALSKNNAGNMLTF

SEQ ID NO: 421916 - protein, 15 aa, Homo sapiens
  CDR3 for beta chain variable domain of TCR clone 210958 (TRBV7-9, TRBJ1-6)
CASSSPGRGNSPLHF

SEQ ID NO: 421917 - protein, 20 aa, Homo sapiens
  CDR3 for alpha chain variable domain of TCR clone 210959 (TRAV14/DV4, TRAJ22)
CAMREGPFSISSGSARHLTF

SEQ ID NO: 421918 - protein, 13 aa, Homo sapiens
  CDR3 for beta chain variable domain of TCR clone 210959 (TRBV4-2, TRBJ2-3)
CASSQDWQHTKYF

SEQ ID NO: 421919 - protein, 13 aa, Homo sapiens
  CDR3 for alpha chain variable domain of TCR clone 210960 (TRAV21, TRAJ27)
CAARPGNAGKSTF

SEQ ID NO: 421920 - protein, 15 aa, Homo sapiens
  CDR3 for beta chain variable domain of TCR clone 210960 (TRBV6-3, TRBJ2-7)
CASSSPGTVFYEKYF

SEQ ID NO: 421921 - protein, 17 aa, Homo sapiens
  CDR3 for alpha chain variable domain of TCR clone 210961 (TRAV12-2, TRAJ52)
CAVNPYAGGTSYGKLTF

SEQ ID NO: 421922 - protein, 15 aa, Homo sapiens
  CDR3 for beta chain variable domain of TCR clone 210961 (TRBV10-3, TRBJ2-3)
CAISLTSGGTDTQYF

SEQ ID NO: 421923 - protein, 14 aa, Homo sapiens
  CDR3 for alpha chain variable domain of TCR clone 210962 (TRAV12-2, TRAJ52)
CAVPGGTSYGKLTF

SEQ ID NO: 421924 - protein, 15 aa, Homo sapiens
  CDR3 for beta chain variable domain of TCR clone 210962 (TRBV4-3, TRBJ2-1)
CASSQGLAGSNEQFF

SEQ ID NO: 421925 - protein, 10 aa, Homo sapiens
  CDR3 for alpha chain variable domain of TCR clone 210963 (TRAV25, TRAJ20)
CAVNDYKLSF

SEQ ID NO: 421926 - protein, 13 aa, Homo sapiens
  CDR3 for beta chain variable domain of TCR clone 210963 (TRBV6-3, TRBJ2-7)
CASSFSGGYEEYF

SEQ ID NO: 421927 - protein, 12 aa, Homo sapiens
  CDR3 for alpha chain variable domain of TCR clone 210964 (TRAV12-3, TRAJ17)
CAMTLTGNKPTF

SEQ ID NO: 421928 - protein, 15 aa, Homo sapiens
  CDR3 for beta chain variable domain of TCR clone 210964 (TRBV20-1, TRBJ2-7)
CSARDRVSGMDEPYF

SEQ ID NO: 421929 - protein, 14 aa, Homo sapiens
  CDR3 for alpha chain variable domain of TCR clone 210965 (TRAV16, TRAJ17)
CALSGRAAGNKLTF

SEQ ID NO: 421930 - protein, 17 aa, Homo sapiens
  CDR3 for beta chain variable domain of TCR clone 210965 (TRBV18, TRBJ2-6)
CASSPRQVAVGANVLTF

SEQ ID NO: 421931 - protein, 17 aa, Homo sapiens
  CDR3 for alpha chain variable domain of TCR clone 210966 (TRAV4, TRAJ42)
CLVGVLNYGGSQGNLIF

SEQ ID NO: 421932 - protein, 18 aa, Homo sapiens
  CDR3 for beta chain variable domain of TCR clone 210966 (TRBV27, TRBJ2-1)
CASGNRAVGVGSKNEQFF

SEQ ID NO: 421933 - protein, 17 aa, Homo sapiens
  CDR3 for alpha chain variable domain of TCR clone 210967 (TRAV27, TRAJ32)
CAGGRGNYGGATNKLIF

SEQ ID NO: 421934 - protein, 14 aa, Homo sapiens
  CDR3 for beta chain variable domain of TCR clone 210967 (TRBV12-5, TRBJ2-5)
CASGSRTHQETQYF

SEQ ID NO: 421935 - protein, 14 aa, Homo sapiens
  CDR3 for alpha chain variable domain of TCR clone 210968 (TRAV17, TRAJ31)
CAKVPLSGNARLMF

SEQ ID NO: 421936 - protein, 15 aa, Homo sapiens
  CDR3 for beta chain variable domain of TCR clone 210968 (TRBV15, TRBJ2-2)
CATSGTGGRVGELFF

SEQ ID NO: 421937 - protein, 14 aa, Homo sapiens
  CDR3 for alpha chain variable domain of TCR clone 210969 (TRAV8-4, TRAJ40)
CAVIPTSGTYKSIF

SEQ ID NO: 421938 - protein, 15 aa, Homo sapiens
  CDR3 for beta chain variable domain of TCR clone 210969 (TRBV7-2, TRBJ2-1)
CASTSASGEYNEQFF

SEQ ID NO: 421939 - protein, 14 aa, Homo sapiens
  CDR3 for alpha chain variable domain of TCR clone 210970 (TRAV13-1, TRAJ5)
CAASPDTGRRALTF

SEQ ID NO: 421940 - protein, 18 aa, Homo sapiens
  CDR3 for beta chain variable domain of TCR clone 210970 (TRBV20-1, TRBJ2-5)
CSAKTGTTTNLYQETQYF

SEQ ID NO: 421941 - protein, 14 aa, Homo sapiens
  CDR3 for alpha chain variable domain of TCR clone 210971 (TRAV12-2, TRAJ13)
CAVKKTGGYQKVTV

SEQ ID NO: 421942 - protein, 12 aa, Homo sapiens
  CDR3 for beta chain variable domain of TCR clone 210971 (TRBV12-4, TRBJ1-2)
CASSFIWLHLRF

SEQ ID NO: 421943 - protein, 14 aa, Homo sapiens
  CDR3 for alpha chain variable domain of TCR clone 210972 (TRAV1-2, TRAJ16)
CAVNRFSDGQKLLF

SEQ ID NO: 421944 - protein, 13 aa, Homo sapiens
  CDR3 for beta chain variable domain of TCR clone 210972 (TRBV4-2, TRBJ1-1)
CASSQAGNNEAFF

SEQ ID NO: 421945 - protein, 17 aa, Homo sapiens
  CDR3 for alpha chain variable domain of TCR clone 210973 (TRAV1-1, TRAJ32)
CAVRVDELWWCYKQAHL

SEQ ID NO: 421946 - protein, 14 aa, Homo sapiens
  CDR3 for beta chain variable domain of TCR clone 210973 (TRBV25-1, TRBJ1-1)
CASTHLGGNTEAFF

SEQ ID NO: 421947 - protein, 14 aa, Homo sapiens
  CDR3 for alpha chain variable domain of TCR clone 210974 (TRAV1-2, TRAJ16)
CAVNRFSDGQKLLF

SEQ ID NO: 421948 - protein, 16 aa, Homo sapiens
  CDR3 for beta chain variable domain of TCR clone 210974 (TRBV7-9, TRBJ1-2)
CASSLGLCWGGGGYVF

SEQ ID NO: 421949 - protein, 15 aa, Homo sapiens
  CDR3 for alpha chain variable domain of TCR clone 210975 (TRAV30, TRAJ32)
CGTEILGGATNKLIF

SEQ ID NO: 421950 - protein, 17 aa, Homo sapiens
  CDR3 for beta chain variable domain of TCR clone 210975 (TRBV13, TRBJ2-3)
CASSLSRVAGGRNTQYF

SEQ ID NO: 421951 - protein, 14 aa, Homo sapiens
  CDR3 for alpha chain variable domain of TCR clone 210976 (TRAV12-2, TRAJ45)
CAVYSGGGADGLTF

SEQ ID NO: 421952 - protein, 14 aa, Homo sapiens
  CDR3 for beta chain variable domain of TCR clone 210976 (TRBV12-4, TRBJ1-1)
CASSFDRVNTEAFF

SEQ ID NO: 421953 - protein, 15 aa, Homo sapiens
  CDR3 for alpha chain variable domain of TCR clone 210977 (TRAV26-1, TRAJ29)
CIVRVEGSGNTPLVF

SEQ ID NO: 421954 - protein, 15 aa, Homo sapiens
  CDR3 for beta chain variable domain of TCR clone 210977 (TRBV7-9, TRBJ1-5)
CASSQGHRRNQPQHF

SEQ ID NO: 421955 - protein, 14 aa, Homo sapiens
  CDR3 for alpha chain variable domain of TCR clone 210978 (TRAV8-6, TRAJ35)
CAVSEKALGMCCIA

SEQ ID NO: 421956 - protein, 15 aa, Homo sapiens
  CDR3 for beta chain variable domain of TCR clone 210978 (TRBV28, TRBJ2-1)
CASSIIAGGRSEQFF

SEQ ID NO: 421957 - protein, 12 aa, Homo sapiens
  CDR3 for alpha chain variable domain of TCR clone 210979 (TRAV16, TRAJ10)
CSRTGGGNKLTF

SEQ ID NO: 421958 - protein, 19 aa, Homo sapiens
  CDR3 for beta chain variable domain of TCR clone 210979 (TRBV6-1, TRBJ1-3)
CASVQGGGWKHHIFWRGKL

SEQ ID NO: 421959 - protein, 14 aa, Homo sapiens
  CDR3 for alpha chain variable domain of TCR clone 210980 (TRAV21, TRAJ28)
CAVGSGAGSYQLTF

SEQ ID NO: 421960 - protein, 13 aa, Homo sapiens
  CDR3 for beta chain variable domain of TCR clone 210980 (TRBV12-4, TRBJ1-2)
CASSSGLTVISTF

SEQ ID NO: 421961 - protein, 14 aa, Homo sapiens
  CDR3 for alpha chain variable domain of TCR clone 210981 (TRAV27, TRAJ23)
CAGLSYNQGGKLIF

SEQ ID NO: 421962 - protein, 15 aa, Homo sapiens
  CDR3 for beta chain variable domain of TCR clone 210981 (TRBV19, TRBJ2-2)
CASRLNRGVTGELFF

SEQ ID NO: 421963 - protein, 18 aa, Homo sapiens
  CDR3 for alpha chain variable domain of TCR clone 210982 (TRAV21, TRAJ52)
CAVRPSPAGGTSYGKLTF

SEQ ID NO: 421964 - protein, 13 aa, Homo sapiens
  CDR3 for beta chain variable domain of TCR clone 210982 (TRBV13, TRBJ2-3)
LSRVAGGRNTQYF

SEQ ID NO: 421965 - protein, 17 aa, Homo sapiens
  CDR3 for alpha chain variable domain of TCR clone 210983 (TRAV3, TRAJ6)
CSVRDGPRSGGSYIPTF

SEQ ID NO: 421966 - protein, 14 aa, Homo sapiens
  CDR3 for beta chain variable domain of TCR clone 210983 (TRBV7-2, TRBJ2-7)
CASSPKTSFYEQYF

SEQ ID NO: 421967 - protein, 11 aa, Homo sapiens
  CDR3 for alpha chain variable domain of TCR clone 210984 (TRAV27, TRAJ45)
GGGGGADGLTF

SEQ ID NO: 421968 - protein, 13 aa, Homo sapiens
  CDR3 for beta chain variable domain of TCR clone 210984 (TRBV20-1, TRBJ1-1)
CSAPEGGNTEAFF

SEQ ID NO: 421969 - protein, 15 aa, Homo sapiens
  CDR3 for alpha chain variable domain of TCR clone 210985 (TRAV3, TRAJ9)
CAVRARNTGGFKTIF

SEQ ID NO: 421970 - protein, 14 aa, Homo sapiens
  CDR3 for beta chain variable domain of TCR clone 210985 (TRBV5-1, TRBJ2-7)
CASSLTSGGYEQYF

SEQ ID NO: 421971 - protein, 18 aa, Homo sapiens
  CDR3 for alpha chain variable domain of TCR clone 210986 (TRAV21, TRAJ45)
CCGGPQGGSGGGADGLTF

SEQ ID NO: 421972 - protein, 10 aa, Homo sapiens
  CDR3 for beta chain variable domain of TCR clone 210986 (TRBV4-1, TRBJ2-7)
SRGDRNEQYF

SEQ ID NO: 421973 - protein, 12 aa, Homo sapiens
  CDR3 for alpha chain variable domain of TCR clone 210987 (TRAV12-3, TRAJ20)
CAMVRGDYKLSS

SEQ ID NO: 421974 - protein, 14 aa, Homo sapiens
  CDR3 for beta chain variable domain of TCR clone 210987 (TRBV5-5, TRBJ1-5)
CASSGQGVDQPQHF

SEQ ID NO: 421975 - protein, 16 aa, Homo sapiens
  CDR3 for alpha chain variable domain of TCR clone 210988 (TRAV3, TRAJ40)
CAVRDRISSGTYKYIF

SEQ ID NO: 421976 - protein, 16 aa, Homo sapiens
  CDR3 for beta chain variable domain of TCR clone 210988 (TRBV6-1, TRBJ1-2)
CASSEANSIINYGYTF

SEQ ID NO: 421977 - protein, 19 aa, Homo sapiens
  CDR3 for alpha chain variable domain of TCR clone 210989 (TRAV2, TRAJ32)
TTVLSTPPSQGGATNKLIF

SEQ ID NO: 421978 - protein, 13 aa, Homo sapiens
  CDR3 for beta chain variable domain of TCR clone 210989 (TRBV12-4, TRBJ1-5)
CASSPDRAQPQHF

SEQ ID NO: 421979 - protein, 12 aa, Homo sapiens
  CDR3 for alpha chain variable domain of TCR clone 210990 (TRAV25, TRAJ38)
CAGTGNNRKLIW

SEQ ID NO: 421980 - protein, 14 aa, Homo sapiens
  CDR3 for beta chain variable domain of TCR clone 210990 (TRBV5-4, TRBJ1-1)
CASTLDSRRDEAFF

SEQ ID NO: 421981 - protein, 14 aa, Homo sapiens
  CDR3 for alpha chain variable domain of TCR clone 210991 (TRAV12-2, TRAJ5)
CAVNRSTGRRELTF

SEQ ID NO: 421982 - protein, 12 aa, Homo sapiens
  CDR3 for beta chain variable domain of TCR clone 210991 (TRBV19, TRBJ1-5)
CASSIAQQPEHF

SEQ ID NO: 421983 - protein, 18 aa, Homo sapiens
  CDR3 for alpha chain variable domain of TCR clone 210992 (TRAV12-3, TRAJ52)
CEMSVGGAGGTSYGKLTF

SEQ ID NO: 421984 - protein, 17 aa, Homo sapiens
  CDR3 for beta chain variable domain of TCR clone 210992 (TRBV13, TRBJ2-3)
CASSLSRVAGGRNTQYF

SEQ ID NO: 421985 - protein, 12 aa, Homo sapiens
  CDR3 for alpha chain variable domain of TCR clone 210993 (TRAV23/DV6, TRAJ16)
CAVRGRGQKLLF

SEQ ID NO: 421986 - protein, 14 aa, Homo sapiens
  CDR3 for beta chain variable domain of TCR clone 210993 (TRBV4-1, TRBJ1-1)
CASSRSGQSFEAFF

SEQ ID NO: 421987 - protein, 11 aa, Homo sapiens
  CDR3 for alpha chain variable domain of TCR clone 210994 (TRAV12-2, TRAJ31)
CAVTRWARLMF

SEQ ID NO: 421988 - protein, 15 aa, Homo sapiens
  CDR3 for beta chain variable domain of TCR clone 210994 (TRBV19, TRBJ2-7)
CASSIAGGLVNEQYF

SEQ ID NO: 421989 - protein, 11 aa, Homo sapiens
  CDR3 for alpha chain variable domain of TCR clone 210995 (TRAV21, TRAJ34)
CAVTNTDKLIF

SEQ ID NO: 421990 - protein, 13 aa, Homo sapiens
  CDR3 for beta chain variable domain of TCR clone 210995 (TRBV7-8, TRBJ1-5)
CASSQGENQPQHF

SEQ ID NO: 421991 - protein, 14 aa, Homo sapiens
  CDR3 for alpha chain variable domain of TCR clone 210996 (TRAV12-2, TRAJ17)
CAVLFKAAGNKLTF

SEQ ID NO: 421992 - protein, 14 aa, Homo sapiens
  CDR3 for beta chain variable domain of TCR clone 210996 (TRBV19, TRBJ1-1)
CASSIEVSGGSAFF

SEQ ID NO: 421993 - protein, 14 aa, Homo sapiens
  CDR3 for alpha chain variable domain of TCR clone 210997 (TRAV12-2, TRAJ11)
CAVEGGSGYSTLTF

SEQ ID NO: 421994 - protein, 19 aa, Homo sapiens
  CDR3 for beta chain variable domain of TCR clone 210997 (TRBV25-1, TRBJ2-2)
CAILVYRVDRGRKTGELFF

SEQ ID NO: 421995 - protein, 15 aa, Homo sapiens
  CDR3 for alpha chain variable domain of TCR clone 210998 (TRAV3, TRAJ4)
CAVRDGTGGYNKLIF

SEQ ID NO: 421996 - protein, 16 aa, Homo sapiens
  CDR3 for beta chain variable domain of TCR clone 210998 (TRBV27, TRBJ2-2)
CASSSSGISNTGELFF

SEQ ID NO: 421997 - protein, 15 aa, Homo sapiens
  CDR3 for alpha chain variable domain of TCR clone 210999 (TRAV26-1, TRAJ44)
CIVRIGTGTASKLTF

SEQ ID NO: 421998 - protein, 16 aa, Homo sapiens
  CDR3 for beta chain variable domain of TCR clone 210999 (TRBV28, TRBJ2-7)
CASSLFFETGGPEQYF

SEQ ID NO: 421999 - protein, 16 aa, Homo sapiens
  CDR3 for alpha chain variable domain of TCR clone 211000 (TRAV1-2, TRAJ16)
CAVNRFQMARSGSLQG

SEQ ID NO: 422000 - protein, 16 aa, Homo sapiens
  CDR3 for beta chain variable domain of TCR clone 211000 (TRBV7-3, TRBJ2-2)
CASSLKRGTLSGELFF

SEQ ID NO: 422001 - protein, 14 aa, Homo sapiens
  CDR3 for alpha chain variable domain of TCR clone 211001 (TRAV21, TRAJ45)
CAVHSGGGADGLTF

SEQ ID NO: 422002 - protein, 15 aa, Homo sapiens
  CDR3 for beta chain variable domain of TCR clone 211001 (TRBV20-1, TRBJ2-7)
CSARDRVSGMDEQYF

SEQ ID NO: 422003 - protein, 14 aa, Homo sapiens
  CDR3 for alpha chain variable domain of TCR clone 211002 (TRAV12-3, TRAJ41)
CAMSAGNSGYALTF

SEQ ID NO: 422004 - protein, 11 aa, Homo sapiens
  CDR3 for beta chain variable domain of TCR clone 211002 (TRBV7-2, TRBJ2-3)
CASSASDTQYF

SEQ ID NO: 422005 - protein, 14 aa, Homo sapiens
  CDR3 for alpha chain variable domain of TCR clone 211003 (TRAV12-1, TRAJ42)
CVVIYGGSQRNLIF

SEQ ID NO: 422006 - protein, 17 aa, Homo sapiens
  CDR3 for beta chain variable domain of TCR clone 211003 (TRBV3-1, TRBJ2-6)
CASSPNTGPAGANVLTF

SEQ ID NO: 422007 - protein, 15 aa, Homo sapiens
  CDR3 for alpha chain variable domain of TCR clone 211004 (TRAV12-3, TRAJ49)
CAMAVTPNTGNQLSF

SEQ ID NO: 422008 - protein, 14 aa, Homo sapiens
  CDR3 for beta chain variable domain of TCR clone 211004 (TRBV7-8, TRBJ2-3)
CASSLEAGTDTQYF

SEQ ID NO: 422009 - protein, 14 aa, Homo sapiens
  CDR3 for alpha chain variable domain of TCR clone 211005 (TRAV3, TRAJ9)
CAVRLNTGGFKTIF

SEQ ID NO: 422010 - protein, 14 aa, Homo sapiens
  CDR3 for beta chain variable domain of TCR clone 211005 (TRBV6-1, TRBJ1-3)
CASVQGGGGNTIYF

SEQ ID NO: 422011 - protein, 16 aa, Homo sapiens
  CDR3 for alpha chain variable domain of TCR clone 211006 (TRAV35, TRAJ28)
CAGRRGGWELPTHFRA

SEQ ID NO: 422012 - protein, 13 aa, Homo sapiens
  CDR3 for beta chain variable domain of TCR clone 211006 (TRBV9, TRBJ2-1)
CASSPSGGSEQFF

SEQ ID NO: 422013 - protein, 10 aa, Homo sapiens
  CDR3 for alpha chain variable domain of TCR clone 211007 (TRAV23/DV6, TRAJ31)
CARGGARLVF

SEQ ID NO: 422014 - protein, 14 aa, Homo sapiens
  CDR3 for beta chain variable domain of TCR clone 211007 (TRBV12-4, TRBJ1-1)
CASSLGTGGTEAFF

SEQ ID NO: 422015 - protein, 14 aa, Homo sapiens
  CDR3 for alpha chain variable domain of TCR clone 211008 (TRAV12-2, TRAJ53)
CAVKGGGSNYKLTF

SEQ ID NO: 422016 - protein, 16 aa, Homo sapiens
  CDR3 for beta chain variable domain of TCR clone 211008 (TRBV2, TRBJ2-3)
CANSTSVEGVTDTQYF

SEQ ID NO: 422017 - protein, 13 aa, Homo sapiens
  CDR3 for alpha chain variable domain of TCR clone 211009 (TRAV13-1, TRAJ9)
CAASGTGGFKTIF

SEQ ID NO: 422018 - protein, 12 aa, Homo sapiens
  CDR3 for beta chain variable domain of TCR clone 211009 (TRBV12-4, TRBJ2-7)
CQQLERVREQYF

SEQ ID NO: 422019 - protein, 16 aa, Homo sapiens
  CDR3 for alpha chain variable domain of TCR clone 211010 (TRAV21, TRAJ52)
CAVTNAGGTSYGKLTF

SEQ ID NO: 422020 - protein, 15 aa, Homo sapiens
  CDR3 for beta chain variable domain of TCR clone 211010 (TRBV18, TRBJ2-7)
CASSPLQGRTYEQYF

SEQ ID NO: 422021 - protein, 15 aa, Homo sapiens
  CDR3 for alpha chain variable domain of TCR clone 211011 (TRAV14/DV4, TRAJ15)
CAMREGWQAGTALIF

SEQ ID NO: 422022 - protein, 15 aa, Homo sapiens
  CDR3 for beta chain variable domain of TCR clone 211011 (TRBV7-3, TRBJ2-1)
CASSLAGAGADEQFF

SEQ ID NO: 422023 - protein, 12 aa, Homo sapiens
  CDR3 for alpha chain variable domain of TCR clone 211012 (TRAV12-2, TRAJ10)
WGVTGGGNKLTF

SEQ ID NO: 422024 - protein, 14 aa, Homo sapiens
  CDR3 for beta chain variable domain of TCR clone 211012 (TRBV19, TRBJ2-7)
CASSIFAGTYEQYF

SEQ ID NO: 422025 - protein, 13 aa, Homo sapiens
  CDR3 for alpha chain variable domain of TCR clone 211013 (TRAV2, TRAJ40)
CAVVTSGTYKSIF

SEQ ID NO: 422026 - protein, 15 aa, Homo sapiens
  CDR3 for beta chain variable domain of TCR clone 211013 (TRBV18, TRBJ2-1)
CASSPPSASYNEQFF

SEQ ID NO: 422027 - protein, 14 aa, Homo sapiens
  CDR3 for alpha chain variable domain of TCR clone 211014 (TRAV23/DV6, TRAJ27)
CAASRDTNAGKSTF

SEQ ID NO: 422028 - protein, 13 aa, Homo sapiens
  CDR3 for beta chain variable domain of TCR clone 211014 (TRBV20-1, TRBJ1-5)
CSASWRGNQPQHF

SEQ ID NO: 422029 - protein, 13 aa, Homo sapiens
  CDR3 for alpha chain variable domain of TCR clone 211015 (TRAV13-1, TRAJ5)
CAARVTGRRALTF

SEQ ID NO: 422030 - protein, 14 aa, Homo sapiens
  CDR3 for beta chain variable domain of TCR clone 211015 (TRBV7-9, TRBJ2-7)
CSSPGGGLTYEQYF

SEQ ID NO: 422031 - protein, 16 aa, Homo sapiens
  CDR3 for alpha chain variable domain of TCR clone 211016 (TRAV8-3, TRAJ44)
CAMGTLMTGTASKLTF

SEQ ID NO: 422032 - protein, 15 aa, Homo sapiens
  CDR3 for beta chain variable domain of TCR clone 211016 (TRBV10-2, TRBJ2-6)
CASSEQGTGANVLTF

SEQ ID NO: 422033 - protein, 13 aa, Homo sapiens
  CDR3 for alpha chain variable domain of TCR clone 211017 (TRAV35, TRAJ20)
CAGPLSNDYKLNF

SEQ ID NO: 422034 - protein, 14 aa, Homo sapiens
  CDR3 for beta chain variable domain of TCR clone 211017 (TRBV9, TRBJ2-7)
CASSVGVGSYEQYF

SEQ ID NO: 422035 - protein, 17 aa, Homo sapiens
  CDR3 for alpha chain variable domain of TCR clone 211018 (TRAV13-1, TRAJ31)
CAPRDRPMFGDGNQLVV

SEQ ID NO: 422036 - protein, 12 aa, Homo sapiens
  CDR3 for beta chain variable domain of TCR clone 211018 (TRBV7-9, TRBJ2-7)
CASSLEGYEQYF

SEQ ID NO: 422037 - protein, 15 aa, Homo sapiens
  CDR3 for alpha chain variable domain of TCR clone 211019 (TRAV35, TRAJ58)
CAGRRQETSGSRLTF

SEQ ID NO: 422038 - protein, 15 aa, Homo sapiens
  CDR3 for beta chain variable domain of TCR clone 211019 (TRBV5-5, TRBJ1-5)
CASSSTPGSNQPQHF

SEQ ID NO: 422039 - protein, 13 aa, Homo sapiens
  CDR3 for alpha chain variable domain of TCR clone 211020 (TRAV8-3, TRAJ43)
GAVVPYNNNDMRF

SEQ ID NO: 422040 - protein, 16 aa, Homo sapiens
  CDR3 for beta chain variable domain of TCR clone 211020 (TRBV7-2, TRBJ2-5)
CASSAFPTGGEETQYF

SEQ ID NO: 422041 - protein, 17 aa, Homo sapiens
  CDR3 for alpha chain variable domain of TCR clone 211021 (TRAV3, TRAJ38)
CAVRDCINAGNNRKLIW

SEQ ID NO: 422042 - protein, 13 aa, Homo sapiens
  CDR3 for beta chain variable domain of TCR clone 211021 (TRBV23-1, TRBJ1-4)
CASRGKFNEKLFF

SEQ ID NO: 422043 - protein, 14 aa, Homo sapiens
  CDR3 for alpha chain variable domain of TCR clone 211022 (TRAV13-1, TRAJ30)
CAASPQNRDDKIIF

SEQ ID NO: 422044 - protein, 14 aa, Homo sapiens
  CDR3 for beta chain variable domain of TCR clone 211022 (TRBV19, TRBJ2-1)
CASPTFVLSGEQFF

SEQ ID NO: 422045 - protein, 13 aa, Homo sapiens
  CDR3 for alpha chain variable domain of TCR clone 211023 (TRAV12-3, TRAJ13)
CSMTSGGHQKVTF

SEQ ID NO: 422046 - protein, 13 aa, Homo sapiens
  CDR3 for beta chain variable domain of TCR clone 211023 (TRBV20-1, TRBJ2-2)
CSALSGGAGELFF

SEQ ID NO: 422047 - protein, 11 aa, Homo sapiens
  CDR3 for alpha chain variable domain of TCR clone 211024 (TRAV1-2, TRAJ20)
CAVANDYKLSF

SEQ ID NO: 422048 - protein, 13 aa, Homo sapiens
  CDR3 for beta chain variable domain of TCR clone 211024 (TRBV2, TRBJ1-1)
CASRWTVNTEAFF

SEQ ID NO: 422049 - protein, 14 aa, Homo sapiens
  CDR3 for alpha chain variable domain of TCR clone 211025 (TRAV38-1, TRAJ45)
CASHSGGGADGLTF

SEQ ID NO: 422050 - protein, 14 aa, Homo sapiens
  CDR3 for beta chain variable domain of TCR clone 211025 (TRBV2, TRBJ1-5)
CASSENRGGQPQHF

SEQ ID NO: 422051 - protein, 14 aa, Homo sapiens
  CDR3 for alpha chain variable domain of TCR clone 211026 (TRAV21, TRAJ35)
CAVMPIGFGNVLHC

SEQ ID NO: 422052 - protein, 12 aa, Homo sapiens
  CDR3 for beta chain variable domain of TCR clone 211026 (TRBV7-9, TRBJ2-7)
CASSIKLEEQYF

SEQ ID NO: 422053 - protein, 13 aa, Homo sapiens
  CDR3 for alpha chain variable domain of TCR clone 211027 (TRAV2, TRAJ40)
CAVVTSGTYKYIF

SEQ ID NO: 422054 - protein, 14 aa, Homo sapiens
  CDR3 for beta chain variable domain of TCR clone 211027 (TRBV10-2, TRBJ1-5)
CVSSSTGRNQPQHF

SEQ ID NO: 422055 - protein, 16 aa, Homo sapiens
  CDR3 for alpha chain variable domain of TCR clone 211028 (TRAV30, TRAJ24)
CGTEIVDADSWGRFQF

SEQ ID NO: 422056 - protein, 14 aa, Homo sapiens
  CDR3 for beta chain variable domain of TCR clone 211028 (TRBV9, TRBJ2-4)
CASSPSGTSGFQYF

SEQ ID NO: 422057 - protein, 17 aa, Homo sapiens
  CDR3 for alpha chain variable domain of TCR clone 211029 (TRAV3, TRAJ6)
CAVRDCPRAGGSYIPTF

SEQ ID NO: 422058 - protein, 16 aa, Homo sapiens
  CDR3 for beta chain variable domain of TCR clone 211029 (TRBV7-8, TRBJ2-3)
CASSTEGQRETDTQYF

SEQ ID NO: 422059 - protein, 12 aa, Homo sapiens
  CDR3 for alpha chain variable domain of TCR clone 211030 (TRAV1-2, TRAJ9)
CAGYTGGFKTIF

SEQ ID NO: 422060 - protein, 15 aa, Homo sapiens
  CDR3 for beta chain variable domain of TCR clone 211030 (TRBV7-3, TRBJ2-1)
CASSPTGGGEVEQFF

SEQ ID NO: 422061 - protein, 16 aa, Homo sapiens
  CDR3 for alpha chain variable domain of TCR clone 211031 (TRAV20, TRAJ10)
CAVLRGLTGGGNKLTF

SEQ ID NO: 422062 - protein, 13 aa, Homo sapiens
  CDR3 for beta chain variable domain of TCR clone 211031 (TRBV5-4, TRBJ1-5)
CASSLGGDQPQHF

SEQ ID NO: 422063 - protein, 14 aa, Homo sapiens
  CDR3 for alpha chain variable domain of TCR clone 211032 (TRAV12-2, TRAJ15)
CAPHTGQAGTALIF

SEQ ID NO: 422064 - protein, 15 aa, Homo sapiens
  CDR3 for beta chain variable domain of TCR clone 211032 (TRBV6-3, TRBJ2-7)
CASSSPGTVFYEQYF

SEQ ID NO: 422065 - protein, 14 aa, Homo sapiens
  CDR3 for alpha chain variable domain of TCR clone 211033 (TRAV21, TRAJ38)
CAVMGAGNNRKPIW

SEQ ID NO: 422066 - protein, 13 aa, Homo sapiens
  CDR3 for beta chain variable domain of TCR clone 211033 (TRBV7-3, TRBJ2-5)
CASSIGFFEAQYF

SEQ ID NO: 422067 - protein, 14 aa, Homo sapiens
  CDR3 for alpha chain variable domain of TCR clone 211034 (TRAV17, TRAJ24)
CATLTTDSWGNSSL

SEQ ID NO: 422068 - protein, 16 aa, Homo sapiens
  CDR3 for beta chain variable domain of TCR clone 211034 (TRBV4-2, TRBJ2-7)
CASSQDGGSLRGEQYF

SEQ ID NO: 422069 - protein, 16 aa, Homo sapiens
  CDR3 for alpha chain variable domain of TCR clone 211035 (TRAV12-2, TRAJ45)
CAVKRNPGGGAEGLTF

SEQ ID NO: 422070 - protein, 12 aa, Homo sapiens
  CDR3 for beta chain variable domain of TCR clone 211035 (TRBV6-1, TRBJ2-5)
CASSEGRETQYF

SEQ ID NO: 422071 - protein, 18 aa, Homo sapiens
  CDR3 for alpha chain variable domain of TCR clone 211036 (TRAV13-1, TRAJ52)
CAATTPNAGGTSYGKLTF

SEQ ID NO: 422072 - protein, 14 aa, Homo sapiens
  CDR3 for beta chain variable domain of TCR clone 211036 (TRBV6-5, TRBJ1-1)
CASSFGQGLTEAFF

SEQ ID NO: 422073 - protein, 13 aa, Homo sapiens
  CDR3 for alpha chain variable domain of TCR clone 211037 (TRAV21, TRAJ37)
CAVSSGNTGKLIF

SEQ ID NO: 422074 - protein, 16 aa, Homo sapiens
  CDR3 for beta chain variable domain of TCR clone 211037 (TRBV10-3, TRBJ2-7)
CAISADFADRPYERYF

SEQ ID NO: 422075 - protein, 11 aa, Homo sapiens
  CDR3 for alpha chain variable domain of TCR clone 211038 (TRAV34, TRAJ44)
QATGTASKLTF

SEQ ID NO: 422076 - protein, 16 aa, Homo sapiens
  CDR3 for beta chain variable domain of TCR clone 211038 (TRBV12-4, TRBJ2-7)
CASSLIGGTGTYEQYF

SEQ ID NO: 422077 - protein, 15 aa, Homo sapiens
  CDR3 for alpha chain variable domain of TCR clone 211039 (TRAV3, TRAJ3)
CAVRDRDSSASKIIF

SEQ ID NO: 422078 - protein, 15 aa, Homo sapiens
  CDR3 for beta chain variable domain of TCR clone 211039 (TRBV19, TRBJ2-1)
CASSSPGVTLDEQFF

SEQ ID NO: 422079 - protein, 14 aa, Homo sapiens
  CDR3 for alpha chain variable domain of TCR clone 211040 (TRAV8-3, TRAJ39)
CAVGANNAGNMLTF

SEQ ID NO: 422080 - protein, 15 aa, Homo sapiens
  CDR3 for beta chain variable domain of TCR clone 211040 (TRBV4-3, TRBJ1-1)
RASSQELGRGTEAFF

SEQ ID NO: 422081 - protein, 13 aa, Homo sapiens
  CDR3 for alpha chain variable domain of TCR clone 211041 (TRAV13-1, TRAJ5)
CAARVTGRRALTF

SEQ ID NO: 422082 - protein, 14 aa, Homo sapiens
  CDR3 for beta chain variable domain of TCR clone 211041 (TRBV19, TRBJ2-7)
CASSMGQGAIEQYF

SEQ ID NO: 422083 - protein, 12 aa, Homo sapiens
  CDR3 for alpha chain variable domain of TCR clone 211042 (TRAV8-3, TRAJ41)
CAVALSGYALNF

SEQ ID NO: 422084 - protein, 17 aa, Homo sapiens
  CDR3 for beta chain variable domain of TCR clone 211042 (TRBV13, TRBJ2-3)
CASSLSRVAGGRNTQYF

SEQ ID NO: 422085 - protein, 14 aa, Homo sapiens
  CDR3 for alpha chain variable domain of TCR clone 211043 (TRAV12-1, TRAJ17)
CVVNYKAAGNKLTF

SEQ ID NO: 422086 - protein, 15 aa, Homo sapiens
  CDR3 for beta chain variable domain of TCR clone 211043 (TRBV6-1, TRBJ2-4)
CASSEAVWTINIQYF

SEQ ID NO: 422087 - protein, 15 aa, Homo sapiens
  CDR3 for alpha chain variable domain of TCR clone 211044 (TRAV2, TRAJ28)
CAVPYSGAGSYQLTF

SEQ ID NO: 422088 - protein, 17 aa, Homo sapiens
  CDR3 for beta chain variable domain of TCR clone 211044 (TRBV20-1, TRBJ2-4)
CSARDWASGGRENIQYL

SEQ ID NO: 422089 - protein, 17 aa, Homo sapiens
  CDR3 for alpha chain variable domain of TCR clone 211045 (TRAV8-6, TRAJ58)
CAVSSWVGETSGSRLTF

SEQ ID NO: 422090 - protein, 13 aa, Homo sapiens
  CDR3 for beta chain variable domain of TCR clone 211045 (TRBV14, TRBJ2-7)
CASSKDRRYEQYF

SEQ ID NO: 422091 - protein, 15 aa, Homo sapiens
  CDR3 for alpha chain variable domain of TCR clone 211046 (TRAV26-2, TRAJ13)
CILRDLSGGDQKGTF

SEQ ID NO: 422092 - protein, 11 aa, Homo sapiens
  CDR3 for beta chain variable domain of TCR clone 211046 (TRBV7-9, TRBJ2-5)
CASSLSATQYF

SEQ ID NO: 422093 - protein, 15 aa, Homo sapiens
  CDR3 for alpha chain variable domain of TCR clone 211047 (TRAV20, TRAJ43)
CAVQAGKSSNNDMRF

SEQ ID NO: 422094 - protein, 13 aa, Homo sapiens
  CDR3 for beta chain variable domain of TCR clone 211047 (TRBV20-1, TRBJ2-7)
CSATHTSGYEQYF

SEQ ID NO: 422095 - protein, 14 aa, Homo sapiens
  CDR3 for alpha chain variable domain of TCR clone 211048 (TRAV1-2, TRAJ16)
CAVNRFSDGQKLHF

SEQ ID NO: 422096 - protein, 15 aa, Homo sapiens
  CDR3 for beta chain variable domain of TCR clone 211048 (TRBV9, TRBJ2-1)
CASCLAGSSYNEQFF

SEQ ID NO: 422097 - protein, 14 aa, Homo sapiens
  CDR3 for alpha chain variable domain of TCR clone 211049 (TRAV1-2, TRAJ6)
CAGSLSGGSYIPTF

SEQ ID NO: 422098 - protein, 15 aa, Homo sapiens
  CDR3 for beta chain variable domain of TCR clone 211049 (TRBV28, TRBJ2-7)
CASSPGGRGFYEQYF

SEQ ID NO: 422099 - protein, 12 aa, Homo sapiens
  CDR3 for alpha chain variable domain of TCR clone 211050 (TRAV12-3, TRAJ34)
CAMGYNTDKLIF

SEQ ID NO: 422100 - protein, 22 aa, Homo sapiens
  CDR3 for beta chain variable domain of TCR clone 211050 (TRBV11-2, TRBJ1-4)
CASSLDITRRGIPRKDNEKLFF

SEQ ID NO: 422101 - protein, 13 aa, Homo sapiens
  CDR3 for alpha chain variable domain of TCR clone 211051 (TRAV35, TRAJ44)
CAGLSGTASKLTF

SEQ ID NO: 422102 - protein, 15 aa, Homo sapiens
  CDR3 for beta chain variable domain of TCR clone 211051 (TRBV19, TRBJ2-5)
CASHGLAGAQETQYF

SEQ ID NO: 422103 - protein, 13 aa, Homo sapiens
  CDR3 for alpha chain variable domain of TCR clone 211052 (TRAV36/DV7, TRAJ37)
CAVFSSNTGKLTF

SEQ ID NO: 422104 - protein, 18 aa, Homo sapiens
  CDR3 for beta chain variable domain of TCR clone 211052 (TRBV11-2, TRBJ2-3)
CASSFGGASRGAPNTQYF

SEQ ID NO: 422105 - protein, 19 aa, Homo sapiens
  CDR3 for alpha chain variable domain of TCR clone 211053 (TRAV2, TRAJ20)
ILQVRVADAAVYRDCKLSF

SEQ ID NO: 422106 - protein, 12 aa, Homo sapiens
  CDR3 for beta chain variable domain of TCR clone 211053 (TRBV11-2, TRBJ2-2)
CASSLGGGELFF

SEQ ID NO: 422107 - protein, 18 aa, Homo sapiens
  CDR3 for alpha chain variable domain of TCR clone 211054 (TRAV26-1, TRAJ5)
CIVRVVPPRDTGRRALTF

SEQ ID NO: 422108 - protein, 17 aa, Homo sapiens
  CDR3 for beta chain variable domain of TCR clone 211054 (TRBV7-9, TRBJ2-7)
CASSLPWDRQTSSTSGR

SEQ ID NO: 422109 - protein, 14 aa, Homo sapiens
  CDR3 for alpha chain variable domain of TCR clone 211055 (TRAV17, TRAJ42)
CATDNGGSQGNLIF

SEQ ID NO: 422110 - protein, 12 aa, Homo sapiens
  CDR3 for beta chain variable domain of TCR clone 211055 (TRBV14, TRBJ2-7)
CASSSLKGEQYF

SEQ ID NO: 422111 - protein, 14 aa, Homo sapiens
  CDR3 for alpha chain variable domain of TCR clone 211056 (TRAV26-1, TRAJ21)
CIVRVVYNFNKFYF

SEQ ID NO: 422112 - protein, 17 aa, Homo sapiens
  CDR3 for beta chain variable domain of TCR clone 211056 (TRBV4-1, TRBJ1-4)
CASSQEGPRGVEEKLFF

SEQ ID NO: 422113 - protein, 14 aa, Homo sapiens
  CDR3 for alpha chain variable domain of TCR clone 211057 (TRAV1-2, TRAJ16)
CAVNRFSDGQKLLF

SEQ ID NO: 422114 - protein, 14 aa, Homo sapiens
  CDR3 for beta chain variable domain of TCR clone 211057 (TRBV2, TRBJ2-1)
CASSEALDGNEQFF

SEQ ID NO: 422115 - protein, 14 aa, Homo sapiens
  CDR3 for alpha chain variable domain of TCR clone 211058 (TRAV38-2/DV8, TRAJ30)
CAYMDGLGGDKIIF

SEQ ID NO: 422116 - protein, 15 aa, Homo sapiens
  CDR3 for beta chain variable domain of TCR clone 211058 (TRBV7-9, TRBJ2-2)
CASRPADGDTGELFF

SEQ ID NO: 422117 - protein, 14 aa, Homo sapiens
  CDR3 for alpha chain variable domain of TCR clone 211059 (TRAV12-2, TRAJ13)
CAVKKTGGYQKVTF

SEQ ID NO: 422118 - protein, 14 aa, Homo sapiens
  CDR3 for beta chain variable domain of TCR clone 211059 (TRBV19, TRBJ1-5)
CASSKMTGPQPQHF

SEQ ID NO: 422119 - protein, 12 aa, Homo sapiens
  CDR3 for alpha chain variable domain of TCR clone 211060 (TRAV17, TRAJ12)
CAGGDSSSKLIF

SEQ ID NO: 422120 - protein, 12 aa, Homo sapiens
  CDR3 for beta chain variable domain of TCR clone 211060 (TRBV29-1, TRBJ1-1)
CSESDGNTEAFF

SEQ ID NO: 422121 - protein, 14 aa, Homo sapiens
  CDR3 for alpha chain variable domain of TCR clone 211061 (TRAV1-2, TRAJ8)
RAVREDTGFQKLVF

SEQ ID NO: 422122 - protein, 15 aa, Homo sapiens
  CDR3 for beta chain variable domain of TCR clone 211061 (TRBV7-3, TRBJ2-2)
CASSETGQGTGELFF

SEQ ID NO: 422123 - protein, 14 aa, Homo sapiens
  CDR3 for alpha chain variable domain of TCR clone 211062 (TRAV17, TRAJ16)
CATADFSDGQKLLF

SEQ ID NO: 422124 - protein, 16 aa, Homo sapiens
  CDR3 for beta chain variable domain of TCR clone 211062 (TRBV19, TRBJ2-2)
CASRSPGTGATGELFF

SEQ ID NO: 422125 - protein, 14 aa, Homo sapiens
  CDR3 for alpha chain variable domain of TCR clone 211063 (TRAV4, TRAJ17)
CLVGDMAAGNKLTF

SEQ ID NO: 422126 - protein, 13 aa, Homo sapiens
  CDR3 for beta chain variable domain of TCR clone 211063 (TRBV18, TRBJ2-7)
CASQSGGGYEQYI

SEQ ID NO: 422127 - protein, 19 aa, Homo sapiens
  CDR3 for alpha chain variable domain of TCR clone 211064 (TRAV2, TRAJ20)
ILQVREADAAVYRDCKLSF

SEQ ID NO: 422128 - protein, 17 aa, Homo sapiens
  CDR3 for beta chain variable domain of TCR clone 211064 (TRBV20-1, TRBJ2-2)
CSANGSGQGGLTGELFF

SEQ ID NO: 422129 - protein, 18 aa, Homo sapiens
  CDR3 for alpha chain variable domain of TCR clone 211065 (TRAV26-2, TRAJ45)
CILRVDKYSGGGADGLTF

SEQ ID NO: 422130 - protein, 12 aa, Homo sapiens
  CDR3 for beta chain variable domain of TCR clone 211065 (TRBV2, TRBJ1-4)
LLQGATNEKLFF

SEQ ID NO: 422131 - protein, 14 aa, Homo sapiens
  CDR3 for alpha chain variable domain of TCR clone 211066 (TRAV12-3, TRAJ10)
SHLPLTGGGNKLTF

SEQ ID NO: 422132 - protein, 14 aa, Homo sapiens
  CDR3 for beta chain variable domain of TCR clone 211066 (TRBV19, TRBJ2-1)
CASPTFVLSGEQFL

SEQ ID NO: 422133 - protein, 14 aa, Homo sapiens
  CDR3 for alpha chain variable domain of TCR clone 211067 (TRAV17, TRAJ6)
CATDASGGSYIPTF

SEQ ID NO: 422134 - protein, 14 aa, Homo sapiens
  CDR3 for beta chain variable domain of TCR clone 211067 (TRBV7-8, TRBJ2-5)
CASSATGGQETQYF

SEQ ID NO: 422135 - protein, 16 aa, Homo sapiens
  CDR3 for alpha chain variable domain of TCR clone 211068 (TRAV20, TRAJ28)
CAVRDPSGAGSYQLTF

SEQ ID NO: 422136 - protein, 18 aa, Homo sapiens
  CDR3 for beta chain variable domain of TCR clone 211068 (TRBV5-5, TRBJ1-5)
CASSLRQVKGSSNQPQHF

SEQ ID NO: 422137 - protein, 12 aa, Homo sapiens
  CDR3 for alpha chain variable domain of TCR clone 211069 (TRAV17, TRAJ26)
CATVGYGQNFVF

SEQ ID NO: 422138 - protein, 16 aa, Homo sapiens
  CDR3 for beta chain variable domain of TCR clone 211069 (TRBV27, TRBJ2-2)
CASSFRGLVRTGELFF

SEQ ID NO: 422139 - protein, 12 aa, Homo sapiens
  CDR3 for alpha chain variable domain of TCR clone 211070 (TRAV23/DV6, TRAJ53)
CAASKLGSGVSN

SEQ ID NO: 422140 - protein, 12 aa, Homo sapiens
  CDR3 for beta chain variable domain of TCR clone 211070 (TRBV7-9, TRBJ1-1)
CASSVWVEEAFF

SEQ ID NO: 422141 - protein, 15 aa, Homo sapiens
  CDR3 for alpha chain variable domain of TCR clone 211071 (TRAV8-3, TRAJ45)
CASSYSGGGADGLTF

SEQ ID NO: 422142 - protein, 14 aa, Homo sapiens
  CDR3 for beta chain variable domain of TCR clone 211071 (TRBV10-2, TRBJ2-7)
CASSFGSEGYEQYF

SEQ ID NO: 422143 - protein, 14 aa, Homo sapiens
  CDR3 for alpha chain variable domain of TCR clone 211072 (TRAV4, TRAJ6)
CLVGEAGGSYIPTF

SEQ ID NO: 422144 - protein, 13 aa, Homo sapiens
  CDR3 for beta chain variable domain of TCR clone 211072 (TRBV7-3, TRBJ1-1)
CASSQDWGTEAFF

SEQ ID NO: 422145 - protein, 16 aa, Homo sapiens
  CDR3 for alpha chain variable domain of TCR clone 211073 (TRAV23/DV6, TRAJ9)
CAASIGGNTGGFKTIF

SEQ ID NO: 422146 - protein, 15 aa, Homo sapiens
  CDR3 for beta chain variable domain of TCR clone 211073 (TRBV11-2, TRBJ2-2)
CASRGLAANTGELFF

SEQ ID NO: 422147 - protein, 17 aa, Homo sapiens
  CDR3 for alpha chain variable domain of TCR clone 211074 (TRAV4, TRAJ13)
CIVGVQGSSGGYQKVTF

SEQ ID NO: 422148 - protein, 18 aa, Homo sapiens
  CDR3 for beta chain variable domain of TCR clone 211074 (TRBV15, TRBJ2-3)
CATSRDGARRWDTDTQYF

SEQ ID NO: 422149 - protein, 13 aa, Homo sapiens
  CDR3 for alpha chain variable domain of TCR clone 211075 (TRAV2, TRAJ39)
TTVHNNAGNVLTF

SEQ ID NO: 422150 - protein, 16 aa, Homo sapiens
  CDR3 for beta chain variable domain of TCR clone 211075 (TRBV24-1, TRBJ2-3)
CATSGYRDRDTDTQYF

SEQ ID NO: 422151 - protein, 11 aa, Homo sapiens
  CDR3 for alpha chain variable domain of TCR clone 211076 (TRAV23/DV6, TRAJ9)
CFHTGGFKTIF

SEQ ID NO: 422152 - protein, 13 aa, Homo sapiens
  CDR3 for beta chain variable domain of TCR clone 211076 (TRBV7-3, TRBJ1-1)
CASSQDWGAEAFF

SEQ ID NO: 422153 - protein, 14 aa, Homo sapiens
  CDR3 for alpha chain variable domain of TCR clone 211077 (TRAV20, TRAJ10)
CSVRVEGGGNKLTF

SEQ ID NO: 422154 - protein, 18 aa, Homo sapiens
  CDR3 for beta chain variable domain of TCR clone 211077 (TRBV24-1, TRBJ2-1)
CATSDLMFLGRGVHEQFF

SEQ ID NO: 422155 - protein, 15 aa, Homo sapiens
  CDR3 for alpha chain variable domain of TCR clone 211078 (TRAV13-1, TRAJ16)
CAARYQMARSCSLQG

SEQ ID NO: 422156 - protein, 13 aa, Homo sapiens
  CDR3 for beta chain variable domain of TCR clone 211078 (TRBV4-1, TRBJ2-1)
CASSQAWGDEQFF

SEQ ID NO: 422157 - protein, 14 aa, Homo sapiens
  CDR3 for alpha chain variable domain of TCR clone 211079 (TRAV8-1, TRAJ5)
CAVRTDTGRRARTF

SEQ ID NO: 422158 - protein, 14 aa, Homo sapiens
  CDR3 for beta chain variable domain of TCR clone 211079 (TRBV5-5, TRBJ1-2)
CASSLDPHNYGYTF

SEQ ID NO: 422159 - protein, 18 aa, Homo sapiens
  CDR3 for alpha chain variable domain of TCR clone 211080 (TRAV13-1, TRAJ52)
CAASKRSAGGTSYGKLTF

SEQ ID NO: 422160 - protein, 13 aa, Homo sapiens
  CDR3 for beta chain variable domain of TCR clone 211080 (TRBV12-4, TRBJ1-2)
CASSVRQGKDHSF

SEQ ID NO: 422161 - protein, 14 aa, Homo sapiens
  CDR3 for alpha chain variable domain of TCR clone 211081 (TRAV35, TRAJ40)
CAGSTTSGTYKYIF

SEQ ID NO: 422162 - protein, 14 aa, Homo sapiens
  CDR3 for beta chain variable domain of TCR clone 211081 (TRBV7-9, TRBJ1-6)
CASSVMTDYSPLHF

SEQ ID NO: 422163 - protein, 13 aa, Homo sapiens
  CDR3 for alpha chain variable domain of TCR clone 211082 (TRAV13-1, TRAJ5)
CAASDTGRRALTF

SEQ ID NO: 422164 - protein, 14 aa, Homo sapiens
  CDR3 for beta chain variable domain of TCR clone 211082 (TRBV19, TRBJ1-5)
CASSIGGGGQPQHF

SEQ ID NO: 422165 - protein, 15 aa, Homo sapiens
  CDR3 for alpha chain variable domain of TCR clone 211083 (TRAV2, TRAJ37)
CAVGDGSSNTGKLIF

SEQ ID NO: 422166 - protein, 13 aa, Homo sapiens
  CDR3 for beta chain variable domain of TCR clone 211083 (TRBV12-4, TRBJ2-5)
CASSLGGSRTQYF

SEQ ID NO: 422167 - protein, 11 aa, Homo sapiens
  CDR3 for alpha chain variable domain of TCR clone 211084 (TRAV8-1, TRAJ8)
CAMTGFQKLVF

SEQ ID NO: 422168 - protein, 14 aa, Homo sapiens
  CDR3 for beta chain variable domain of TCR clone 211084 (TRBV5-4, TRBJ1-2)
CGSTRQTDNYGYTF

SEQ ID NO: 422169 - protein, 14 aa, Homo sapiens
  CDR3 for alpha chain variable domain of TCR clone 211085 (TRAV2, TRAJ37)
CAVDFTSNTGKLIF

SEQ ID NO: 422170 - protein, 11 aa, Homo sapiens
  CDR3 for beta chain variable domain of TCR clone 211085 (TRBV11-2, TRBJ1-1)
CASSINTEAFF

SEQ ID NO: 422171 - protein, 12 aa, Homo sapiens
  CDR3 for alpha chain variable domain of TCR clone 211086 (TRAV12-3, TRAJ17)
CAMTLTGNKLTF

SEQ ID NO: 422172 - protein, 15 aa, Homo sapiens
  CDR3 for beta chain variable domain of TCR clone 211086 (TRBV20-1, TRBJ2-7)
CSARDRVYGMDDQYF

SEQ ID NO: 422173 - protein, 13 aa, Homo sapiens
  CDR3 for alpha chain variable domain of TCR clone 211087 (TRAV20, TRAJ26)
CAVPTSYGQNFVF

SEQ ID NO: 422174 - protein, 16 aa, Homo sapiens
  CDR3 for beta chain variable domain of TCR clone 211087 (TRBV28, TRBJ2-7)
CASSSPLGRDVYEQYF

SEQ ID NO: 422175 - protein, 15 aa, Homo sapiens
  CDR3 for alpha chain variable domain of TCR clone 211088 (TRAV3, TRAJ3)
CAVRDGHSSAYKIIF

SEQ ID NO: 422176 - protein, 14 aa, Homo sapiens
  CDR3 for beta chain variable domain of TCR clone 211088 (TRBV28, TRBJ1-4)
CASSFGTFDEKLFF

SEQ ID NO: 422177 - protein, 14 aa, Homo sapiens
  CDR3 for alpha chain variable domain of TCR clone 211089 (TRAV12-3, TRAJ9)
CAMSPNTGGFQTIF

SEQ ID NO: 422178 - protein, 12 aa, Homo sapiens
  CDR3 for beta chain variable domain of TCR clone 211089 (TRBV19, TRBJ1-5)
CASSIAQQPQHF

SEQ ID NO: 422179 - protein, 12 aa, Homo sapiens
  CDR3 for alpha chain variable domain of TCR clone 211090 (TRAV12-3, TRAJ40)
CAMSLGTYKYIF

SEQ ID NO: 422180 - protein, 20 aa, Homo sapiens
  CDR3 for beta chain variable domain of TCR clone 211090 (TRBV7-8, TRBJ2-2)
CASSHLFPGPTIHITGELFF

SEQ ID NO: 422181 - protein, 13 aa, Homo sapiens
  CDR3 for alpha chain variable domain of TCR clone 211091 (TRAV12-1, TRAJ26)
CVVRRNYGKNFVF

SEQ ID NO: 422182 - protein, 14 aa, Homo sapiens
  CDR3 for beta chain variable domain of TCR clone 211091 (TRBV6-3, TRBJ1-1)
CASRYTGESTEAFF

SEQ ID NO: 422183 - protein, 15 aa, Homo sapiens
  CDR3 for alpha chain variable domain of TCR clone 211092 (TRAV8-3, TRAJ21)
CAVGALPPRGYKFYF

SEQ ID NO: 422184 - protein, 18 aa, Homo sapiens
  CDR3 for beta chain variable domain of TCR clone 211092 (TRBV25-1, TRBJ1-2)
CASSGLQNGQGLIFGYTC

SEQ ID NO: 422185 - protein, 12 aa, Homo sapiens
  CDR3 for alpha chain variable domain of TCR clone 211093 (TRAV10, TRAJ6)
CVVSEGSYIPTF

SEQ ID NO: 422186 - protein, 14 aa, Homo sapiens
  CDR3 for beta chain variable domain of TCR clone 211093 (TRBV5-1, TRBJ2-7)
CASGAGASSYEQYF

SEQ ID NO: 422187 - protein, 17 aa, Homo sapiens
  CDR3 for alpha chain variable domain of TCR clone 211094 (TRAV3, TRAJ42)
CAGRDRDYGGSQGNLIF

SEQ ID NO: 422188 - protein, 15 aa, Homo sapiens
  CDR3 for beta chain variable domain of TCR clone 211094 (TRBV2, TRBJ2-7)
CASSEGLARSYEQYF

SEQ ID NO: 422189 - protein, 14 aa, Homo sapiens
  CDR3 for alpha chain variable domain of TCR clone 211095 (TRAV12-2, TRAJ17)
CAVLFKAAGNKLTF

SEQ ID NO: 422190 - protein, 14 aa, Homo sapiens
  CDR3 for beta chain variable domain of TCR clone 211095 (TRBV7-2, TRBJ2-7)
GASRSQGAAYEQYF

SEQ ID NO: 422191 - protein, 14 aa, Homo sapiens
  CDR3 for alpha chain variable domain of TCR clone 211096 (TRAV26-1, TRAJ57)
CIRAGQGGSERLVF

SEQ ID NO: 422192 - protein, 13 aa, Homo sapiens
  CDR3 for beta chain variable domain of TCR clone 211096 (TRBV19, TRBJ2-7)
CGSSLTTSYEQYF

SEQ ID NO: 422193 - protein, 14 aa, Homo sapiens
  CDR3 for alpha chain variable domain of TCR clone 211097 (TRAV12-2, TRAJ13)
CAVKKTGGYQKVTF

SEQ ID NO: 422194 - protein, 16 aa, Homo sapiens
  CDR3 for beta chain variable domain of TCR clone 211097 (TRBV24-1, TRBJ2-1)
CATSDLAGPTYNEQFF

SEQ ID NO: 422195 - protein, 13 aa, Homo sapiens
  CDR3 for alpha chain variable domain of TCR clone 211098 (TRAV36/DV7, TRAJ49)
CAGDSNTGNQFYF

SEQ ID NO: 422196 - protein, 16 aa, Homo sapiens
  CDR3 for beta chain variable domain of TCR clone 211098 (TRBV7-3, TRBJ2-2)
CASSLKRGTLSGELFF

SEQ ID NO: 422197 - protein, 13 aa, Homo sapiens
  CDR3 for alpha chain variable domain of TCR clone 211099 (TRAV27, TRAJ41)
CAGEGNSGYALNF

SEQ ID NO: 422198 - protein, 17 aa, Homo sapiens
  CDR3 for beta chain variable domain of TCR clone 211099 (TRBV25-1, TRBJ2-7)
CASSDARVVFSSYEQYF

SEQ ID NO: 422199 - protein, 13 aa, Homo sapiens
  CDR3 for alpha chain variable domain of TCR clone 211100 (TRAV3, TRAJ4)
CAVRDGGYNKLVF

SEQ ID NO: 422200 - protein, 12 aa, Homo sapiens
  CDR3 for beta chain variable domain of TCR clone 211100 (TRBV11-2, TRBJ2-2)
CASSLGGGELFF

SEQ ID NO: 422201 - protein, 14 aa, Homo sapiens
  CDR3 for alpha chain variable domain of TCR clone 211101 (TRAV23/DV6, TRAJ8)
CAASKATGFQNIVF

SEQ ID NO: 422202 - protein, 15 aa, Homo sapiens
  CDR3 for beta chain variable domain of TCR clone 211101 (TRBV28, TRBJ2-3)
CASSPDRQGANTQYF

SEQ ID NO: 422203 - protein, 13 aa, Homo sapiens
  CDR3 for alpha chain variable domain of TCR clone 211102 (TRAV12-2, TRAJ20)
CAVYPSNDYKLSF

SEQ ID NO: 422204 - protein, 15 aa, Homo sapiens
  CDR3 for beta chain variable domain of TCR clone 211102 (TRBV6-1, TRBJ2-5)
CASSEGWGVQEAQYF

SEQ ID NO: 422205 - protein, 14 aa, Homo sapiens
  CDR3 for alpha chain variable domain of TCR clone 211103 (TRAV1-2, TRAJ16)
CAVNRFSDGQKLLF

SEQ ID NO: 422206 - protein, 17 aa, Homo sapiens
  CDR3 for beta chain variable domain of TCR clone 211103 (TRBV7-3, TRBJ2-3)
CASSLMKRMRGSDTQYF

SEQ ID NO: 422207 - protein, 13 aa, Homo sapiens
  CDR3 for alpha chain variable domain of TCR clone 211104 (TRAV24, TRAJ43)
CAFTRNNNNDMRF

SEQ ID NO: 422208 - protein, 15 aa, Homo sapiens
  CDR3 for beta chain variable domain of TCR clone 211104 (TRBV20-1, TRBJ2-7)
CSARDRVSGMDEQYF

SEQ ID NO: 422209 - protein, 13 aa, Homo sapiens
  CDR3 for alpha chain variable domain of TCR clone 211105 (TRAV1-2, TRAJ9)
GAALDTGGFKTIF

SEQ ID NO: 422210 - protein, 13 aa, Homo sapiens
  CDR3 for beta chain variable domain of TCR clone 211105 (TRBV19, TRBJ1-2)
CARSVPGQDGYTF

SEQ ID NO: 422211 - protein, 14 aa, Homo sapiens
  CDR3 for alpha chain variable domain of TCR clone 211106 (TRAV1-2, TRAJ16)
CAVNRFSDGQKLLF

SEQ ID NO: 422212 - protein, 15 aa, Homo sapiens
  CDR3 for beta chain variable domain of TCR clone 211106 (TRBV7-9, TRBJ1-4)
CASSARTGGNEELFF

SEQ ID NO: 422213 - protein, 14 aa, Homo sapiens
  CDR3 for alpha chain variable domain of TCR clone 211107 (TRAV12-3, TRAJ10)
IHLPLTGGGNKLTF

SEQ ID NO: 422214 - protein, 16 aa, Homo sapiens
  CDR3 for beta chain variable domain of TCR clone 211107 (TRBV7-3, TRBJ2-2)
CASSLKRGTLSGELFF

SEQ ID NO: 422215 - protein, 17 aa, Homo sapiens
  CDR3 for alpha chain variable domain of TCR clone 211108 (TRAV36/DV7, TRAJ52)
CAVAQRAGGTSYGKLTF

SEQ ID NO: 422216 - protein, 20 aa, Homo sapiens
  CDR3 for beta chain variable domain of TCR clone 211108 (TRBV7-8, TRBJ2-1)
CASSLAHRLAGVRSYNEQSF

SEQ ID NO: 422217 - protein, 14 aa, Homo sapiens
  CDR3 for alpha chain variable domain of TCR clone 211109 (TRAV8-4, TRAJ23)
CAVSAPGSGGKLIF

SEQ ID NO: 422218 - protein, 17 aa, Homo sapiens
  CDR3 for beta chain variable domain of TCR clone 211109 (TRBV4-3, TRBJ2-3)
CATSQDPLAGAVDTQYF

SEQ ID NO: 422219 - protein, 12 aa, Homo sapiens
  CDR3 for alpha chain variable domain of TCR clone 211110 (TRAV17, TRAJ12)
CATLRSSYKLIF

SEQ ID NO: 422220 - protein, 14 aa, Homo sapiens
  CDR3 for beta chain variable domain of TCR clone 211110 (TRBV19, TRBJ2-1)
CARGARSFQWEQYF

SEQ ID NO: 422221 - protein, 13 aa, Homo sapiens
  CDR3 for alpha chain variable domain of TCR clone 211111 (TRAV1-2, TRAJ31)
CAVRPNNNARLMF

SEQ ID NO: 422222 - protein, 14 aa, Homo sapiens
  CDR3 for beta chain variable domain of TCR clone 211111 (TRBV11-2, TRBJ2-1)
CASSLSGAYNEQFF

SEQ ID NO: 422223 - protein, 15 aa, Homo sapiens
  CDR3 for alpha chain variable domain of TCR clone 211112 (TRAV20, TRAJ6)
CAVRLQSGGSYIPTF

SEQ ID NO: 422224 - protein, 14 aa, Homo sapiens
  CDR3 for beta chain variable domain of TCR clone 211112 (TRBV12-4, TRBJ2-7)
CASSASGCWYEQYF

SEQ ID NO: 422225 - protein, 14 aa, Homo sapiens
  CDR3 for alpha chain variable domain of TCR clone 211113 (TRAV23/DV6, TRAJ13)
CAAMYSGGSRKVTF

SEQ ID NO: 422226 - protein, 14 aa, Homo sapiens
  CDR3 for beta chain variable domain of TCR clone 211113 (TRBV7-9, TRBJ2-1)
CASSPRDSLYEQFF

SEQ ID NO: 422227 - protein, 14 aa, Homo sapiens
  CDR3 for alpha chain variable domain of TCR clone 211114 (TRAV12-1, TRAJ17)
CVVNYKAAGNQQTF

SEQ ID NO: 422228 - protein, 17 aa, Homo sapiens
  CDR3 for beta chain variable domain of TCR clone 211114 (TRBV20-1, TRBJ2-1)
CSASSSGLAGSYNEQFF

SEQ ID NO: 422229 - protein, 14 aa, Homo sapiens
  CDR3 for alpha chain variable domain of TCR clone 211115 (TRAV17, TRAJ5)
CATVALTGRRALPF

SEQ ID NO: 422230 - protein, 14 aa, Homo sapiens
  CDR3 for beta chain variable domain of TCR clone 211115 (TRBV28, TRBJ2-7)
CASSPYGMAYEQYF

SEQ ID NO: 422231 - protein, 14 aa, Homo sapiens
  CDR3 for alpha chain variable domain of TCR clone 211116 (TRAV12-2, TRAJ13)
CAVKKTGGYQKVTF

SEQ ID NO: 422232 - protein, 15 aa, Homo sapiens
  CDR3 for beta chain variable domain of TCR clone 211116 (TRBV20-1, TRBJ1-5)
CSAKPPGQGPQPQHF

SEQ ID NO: 422233 - protein, 17 aa, Homo sapiens
  CDR3 for alpha chain variable domain of TCR clone 211117 (TRAV23/DV6, TRAJ57)
CAASSTLSQGGPGKLVF

SEQ ID NO: 422234 - protein, 14 aa, Homo sapiens
  CDR3 for beta chain variable domain of TCR clone 211117 (TRBV25-1, TRBJ1-1)
CASTHLGGNTEAFF

SEQ ID NO: 422235 - protein, 14 aa, Homo sapiens
  CDR3 for alpha chain variable domain of TCR clone 211118 (TRAV35, TRAJ42)
CCVPYGGSQGNLIF

SEQ ID NO: 422236 - protein, 18 aa, Homo sapiens
  CDR3 for beta chain variable domain of TCR clone 211118 (TRBV13, TRBJ2-6)
CASSPMTSGGSGANDLTC

SEQ ID NO: 422237 - protein, 16 aa, Homo sapiens
  CDR3 for alpha chain variable domain of TCR clone 211119 (TRAV23/DV6, TRAJ9)
CAASIGGNTGGFKTIF

SEQ ID NO: 422238 - protein, 15 aa, Homo sapiens
  CDR3 for beta chain variable domain of TCR clone 211119 (TRBV19, TRBJ1-1)
CASTSGQIQNTEAFF

SEQ ID NO: 422239 - protein, 12 aa, Homo sapiens
  CDR3 for alpha chain variable domain of TCR clone 211120 (TRAV30, TRAJ43)
CGTEERGNDMRF

SEQ ID NO: 422240 - protein, 11 aa, Homo sapiens
  CDR3 for beta chain variable domain of TCR clone 211120 (TRBV7-9, TRBJ2-3)
CASSPTDTQYF

SEQ ID NO: 422241 - protein, 12 aa, Homo sapiens
  CDR3 for alpha chain variable domain of TCR clone 211121 (TRAV13-2, TRAJ23)
CAERHRGGKLIF

SEQ ID NO: 422242 - protein, 15 aa, Homo sapiens
  CDR3 for beta chain variable domain of TCR clone 211121 (TRBV6-5, TRBJ2-6)
CASSQWEAGANVLTF

SEQ ID NO: 422243 - protein, 11 aa, Homo sapiens
  CDR3 for alpha chain variable domain of TCR clone 211122 (TRAV2, TRAJ33)
YAVDSNYRLIW

SEQ ID NO: 422244 - protein, 15 aa, Homo sapiens
  CDR3 for beta chain variable domain of TCR clone 211122 (TRBV19, TRBJ1-2)
CASSVGQVLNYGYTF

SEQ ID NO: 422245 - protein, 15 aa, Homo sapiens
  CDR3 for alpha chain variable domain of TCR clone 211123 (TRAV3, TRAJ26)
CAVRDGDNYGQNFVF

SEQ ID NO: 422246 - protein, 14 aa, Homo sapiens
  CDR3 for beta chain variable domain of TCR clone 211123 (TRBV18, TRBJ2-7)
CASSPRGGAYEQYF

SEQ ID NO: 422247 - protein, 12 aa, Homo sapiens
  CDR3 for alpha chain variable domain of TCR clone 211124 (TRAV13-1, TRAJ21)
CAAKEGFNKFYF

SEQ ID NO: 422248 - protein, 15 aa, Homo sapiens
  CDR3 for beta chain variable domain of TCR clone 211124 (TRBV2, TRBJ2-1)
CPSSELAGSYNEQFF

SEQ ID NO: 422249 - protein, 11 aa, Homo sapiens
  CDR3 for alpha chain variable domain of TCR clone 211125 (TRAV17, TRAJ9)
CATTGGFKTIF

SEQ ID NO: 422250 - protein, 14 aa, Homo sapiens
  CDR3 for beta chain variable domain of TCR clone 211125 (TRBV10-3, TRBJ2-1)
CAISAVSSYNEQFF

SEQ ID NO: 422251 - protein, 16 aa, Homo sapiens
  CDR3 for alpha chain variable domain of TCR clone 211126 (TRAV30, TRAJ24)
CGTEIVDADSWGKFQF

SEQ ID NO: 422252 - protein, 14 aa, Homo sapiens
  CDR3 for beta chain variable domain of TCR clone 211126 (TRBV19, TRBJ2-1)
CATSQGDTYNEQFF

SEQ ID NO: 422253 - protein, 11 aa, Homo sapiens
  CDR3 for alpha chain variable domain of TCR clone 211127 (TRAV1-2, TRAJ20)
CAVANDYKLRF

SEQ ID NO: 422254 - protein, 18 aa, Homo sapiens
  CDR3 for beta chain variable domain of TCR clone 211127 (TRBV20-1, TRBJ2-6)
CSAETTPTPGSGANVLTF

SEQ ID NO: 422255 - protein, 14 aa, Homo sapiens
  CDR3 for alpha chain variable domain of TCR clone 211128 (TRAV23/DV6, TRAJ53)
CAARRGGSNYKLTF

SEQ ID NO: 422256 - protein, 12 aa, Homo sapiens
  CDR3 for beta chain variable domain of TCR clone 211128 (TRBV11-2, TRBJ2-2)
CASRLGGGELFF

SEQ ID NO: 422257 - protein, 12 aa, Homo sapiens
  CDR3 for alpha chain variable domain of TCR clone 211129 (TRAV23/DV6, TRAJ37)
CAASMNTGKLIF

SEQ ID NO: 422258 - protein, 16 aa, Homo sapiens
  CDR3 for beta chain variable domain of TCR clone 211129 (TRBV12-4, TRBJ1-5)
CASSRPVGGSNQPQHF

SEQ ID NO: 422259 - protein, 15 aa, Homo sapiens
  CDR3 for alpha chain variable domain of TCR clone 211130 (TRAV14/DV4, TRAJ12)
CAMREERDSSYKLIF

SEQ ID NO: 422260 - protein, 12 aa, Homo sapiens
  CDR3 for beta chain variable domain of TCR clone 211130 (TRBV28, TRBJ2-6)
CAIQAGANVLTF

SEQ ID NO: 422261 - protein, 11 aa, Homo sapiens
  CDR3 for alpha chain variable domain of TCR clone 211131 (TRAV2, TRAJ13)
CASGGYQKATF

SEQ ID NO: 422262 - protein, 12 aa, Homo sapiens
  CDR3 for beta chain variable domain of TCR clone 211131 (TRBV7-8, TRBJ2-7)
CASSLGDREQYF

SEQ ID NO: 422263 - protein, 15 aa, Homo sapiens
  CDR3 for alpha chain variable domain of TCR clone 211132 (TRAV3, TRAJ22)
CAVRDRGGSARQLTL

SEQ ID NO: 422264 - protein, 17 aa, Homo sapiens
  CDR3 for beta chain variable domain of TCR clone 211132 (TRBV13, TRBJ2-3)
CASSLSRVAGGRNTQYF

SEQ ID NO: 422265 - protein, 15 aa, Homo sapiens
  CDR3 for alpha chain variable domain of TCR clone 211133 (TRAV12-1, TRAJ8)
CVVNVENTGFQKLVF

SEQ ID NO: 422266 - protein, 12 aa, Homo sapiens
  CDR3 for beta chain variable domain of TCR clone 211133 (TRBV7-2, TRBJ2-5)
CASSEYQETQYF

SEQ ID NO: 422267 - protein, 11 aa, Homo sapiens
  CDR3 for alpha chain variable domain of TCR clone 211134 (TRAV3, TRAJ17)
CAEAAGNKLTF

SEQ ID NO: 422268 - protein, 15 aa, Homo sapiens
  CDR3 for beta chain variable domain of TCR clone 211134 (TRBV12-4, TRBJ2-7)
CASSLGSGGPYEQYI

SEQ ID NO: 422269 - protein, 14 aa, Homo sapiens
  CDR3 for alpha chain variable domain of TCR clone 211135 (TRAV38-1, TRAJ45)
CASHSGGGSDGLTF

SEQ ID NO: 422270 - protein, 14 aa, Homo sapiens
  CDR3 for beta chain variable domain of TCR clone 211135 (TRBV20-1, TRBJ1-1)
CSAQTRIGGTEAFF

SEQ ID NO: 422271 - protein, 12 aa, Homo sapiens
  CDR3 for alpha chain variable domain of TCR clone 211136 (TRAV14/DV4, TRAJ9)
CAMNPGGFKTIF

SEQ ID NO: 422272 - protein, 16 aa, Homo sapiens
  CDR3 for beta chain variable domain of TCR clone 211136 (TRBV28, TRBJ2-5)
CASSFSPAGGWETKYF

SEQ ID NO: 422273 - protein, 16 aa, Homo sapiens
  CDR3 for alpha chain variable domain of TCR clone 211137 (TRAV30, TRAJ24)
CGTDIVDADSWGKFQF

SEQ ID NO: 422274 - protein, 14 aa, Homo sapiens
  CDR3 for beta chain variable domain of TCR clone 211137 (TRBV12-5, TRBJ2-5)
CACGSRTHQETQYF

SEQ ID NO: 422275 - protein, 14 aa, Homo sapiens
  CDR3 for alpha chain variable domain of TCR clone 211138 (TRAV8-1, TRAJ5)
CAVRTDTGRGELTF

SEQ ID NO: 422276 - protein, 14 aa, Homo sapiens
  CDR3 for beta chain variable domain of TCR clone 211138 (TRBV5-5, TRBJ1-2)
CASSLDPYNYGYTF

SEQ ID NO: 422277 - protein, 14 aa, Homo sapiens
  CDR3 for alpha chain variable domain of TCR clone 211139 (TRAV12-3, TRAJ9)
CAMSPNNGGFKTTF

SEQ ID NO: 422278 - protein, 12 aa, Homo sapiens
  CDR3 for beta chain variable domain of TCR clone 211139 (TRBV19, TRBJ1-5)
CASSIAQQHQHF

SEQ ID NO: 422279 - protein, 16 aa, Homo sapiens
  CDR3 for alpha chain variable domain of TCR clone 211140 (TRAV30, TRAJ24)
CGTEIVDADSWGKFRF

SEQ ID NO: 422280 - protein, 14 aa, Homo sapiens
  CDR3 for beta chain variable domain of TCR clone 211140 (TRBV19, TRBJ2-2)
CASSTLHRSGELFF

SEQ ID NO: 422281 - protein, 14 aa, Homo sapiens
  CDR3 for alpha chain variable domain of TCR clone 211141 (TRAV16, TRAJ17)
CSPRIKAAGNKLTF

SEQ ID NO: 422282 - protein, 12 aa, Homo sapiens
  CDR3 for beta chain variable domain of TCR clone 211141 (TRBV11-2, TRBJ2-2)
CASSLGGGELFF

SEQ ID NO: 422283 - protein, 14 aa, Homo sapiens
  CDR3 for alpha chain variable domain of TCR clone 211142 (TRAV12-2, TRAJ24)
CAVTPADSWGKLQF

SEQ ID NO: 422284 - protein, 14 aa, Homo sapiens
  CDR3 for beta chain variable domain of TCR clone 211142 (TRBV6-6, TRBJ2-7)
CASSDSGAGYEQYF

SEQ ID NO: 422285 - protein, 15 aa, Homo sapiens
  CDR3 for alpha chain variable domain of TCR clone 211143 (TRAV8-3, TRAJ40)
CAAPSLGSGTYRYIF

SEQ ID NO: 422286 - protein, 12 aa, Homo sapiens
  CDR3 for beta chain variable domain of TCR clone 211143 (TRBV11-3, TRBJ2-2)
CASSLGGGELFF

SEQ ID NO: 422287 - protein, 13 aa, Homo sapiens
  CDR3 for alpha chain variable domain of TCR clone 211144 (TRAV3, TRAJ27)
CAVRPLGAGKSTF

SEQ ID NO: 422288 - protein, 16 aa, Homo sapiens
  CDR3 for beta chain variable domain of TCR clone 211144 (TRBV10-3, TRBJ2-1)
CAISLTSGNSYNAQFF

SEQ ID NO: 422289 - protein, 16 aa, Homo sapiens
  CDR3 for alpha chain variable domain of TCR clone 211145 (TRAV30, TRAJ24)
CGPEIVDADSWGKFQF

SEQ ID NO: 422290 - protein, 17 aa, Homo sapiens
  CDR3 for beta chain variable domain of TCR clone 211145 (TRBV6-1, TRBJ1-2)
CASSGTHSQRGNYGDTF

SEQ ID NO: 422291 - protein, 23 aa, Homo sapiens
  CDR3 for alpha chain variable domain of TCR clone 211146 (TRAV26-1, )
CIVRPLNAGKNHIQNPDPPVYQL

SEQ ID NO: 422292 - protein, 13 aa, Homo sapiens
  CDR3 for beta chain variable domain of TCR clone 211146 (TRBV20-1, TRBJ1-1)
CSARGGGNTEAFF

SEQ ID NO: 422293 - protein, 16 aa, Homo sapiens
  CDR3 for alpha chain variable domain of TCR clone 211147 (TRAV3, TRAJ37)
CAVRPHGSGNTGTLLF

SEQ ID NO: 422294 - protein, 14 aa, Homo sapiens
  CDR3 for beta chain variable domain of TCR clone 211147 (TRBV25-1, TRBJ1-1)
CASTHLGGNTEAFF

SEQ ID NO: 422295 - protein, 10 aa, Homo sapiens
  CDR3 for alpha chain variable domain of TCR clone 211148 (TRAV8-4, TRAJ43)
CAVSADDMRF

SEQ ID NO: 422296 - protein, 14 aa, Homo sapiens
  CDR3 for beta chain variable domain of TCR clone 211148 (TRBV7-9, TRBJ1-6)
CASSLGLATGPLHF

SEQ ID NO: 422297 - protein, 15 aa, Homo sapiens
  CDR3 for alpha chain variable domain of TCR clone 211149 (TRAV8-2, TRAJ16)
CVVSDGFSDGQKLLF

SEQ ID NO: 422298 - protein, 16 aa, Homo sapiens
  CDR3 for beta chain variable domain of TCR clone 211149 (TRBV7-2, TRBJ2-7)
CASSLGLAGGAYEQYF

SEQ ID NO: 422299 - protein, 15 aa, Homo sapiens
  CDR3 for alpha chain variable domain of TCR clone 211150 (TRAV14/DV4, TRAJ26)
CAMREGQNYGQNFVF

SEQ ID NO: 422300 - protein, 15 aa, Homo sapiens
  CDR3 for beta chain variable domain of TCR clone 211150 (TRBV7-2, TRBJ2-1)
CASSFQADEYNEQFF

SEQ ID NO: 422301 - protein, 13 aa, Homo sapiens
  CDR3 for alpha chain variable domain of TCR clone 211151 (TRAV1-2, TRAJ12)
CAVSMDSSDKLIF

SEQ ID NO: 422302 - protein, 15 aa, Homo sapiens
  CDR3 for beta chain variable domain of TCR clone 211151 (TRBV27, TRBJ2-5)
CASSLIPSGGETQYF

SEQ ID NO: 422303 - protein, 15 aa, Homo sapiens
  CDR3 for alpha chain variable domain of TCR clone 211152 (TRAV12-2, TRAJ53)
CAVNGGGGSNYKLTF

SEQ ID NO: 422304 - protein, 16 aa, Homo sapiens
  CDR3 for beta chain variable domain of TCR clone 211152 (TRBV12-4, TRBJ1-5)
CASSRPVGGSNQPQHF

SEQ ID NO: 422305 - protein, 14 aa, Homo sapiens
  CDR3 for alpha chain variable domain of TCR clone 211153 (TRAV17, TRAJ32)
CATDPGGATNKLIF

SEQ ID NO: 422306 - protein, 13 aa, Homo sapiens
  CDR3 for beta chain variable domain of TCR clone 211153 (TRBV7-3, TRBJ2-7)
CPSSQAGGYEQYF

SEQ ID NO: 422307 - protein, 13 aa, Homo sapiens
  CDR3 for alpha chain variable domain of TCR clone 211154 (TRAV27, TRAJ45)
CRSSGGGADGLTF

SEQ ID NO: 422308 - protein, 17 aa, Homo sapiens
  CDR3 for beta chain variable domain of TCR clone 211154 (TRBV2, TRBJ1-4)
CASNEWQGRRSGRKLFF

SEQ ID NO: 422309 - protein, 12 aa, Homo sapiens
  CDR3 for alpha chain variable domain of TCR clone 211155 (TRAV13-1, TRAJ21)
CAAKEGFNKFYS

SEQ ID NO: 422310 - protein, 15 aa, Homo sapiens
  CDR3 for beta chain variable domain of TCR clone 211155 (TRBV2, TRBJ2-1)
CASSELAGSYNEQFF

SEQ ID NO: 422311 - protein, 14 aa, Homo sapiens
  CDR3 for alpha chain variable domain of TCR clone 211156 (TRAV12-3, TRAJ57)
CARALEGGSEKLVF

SEQ ID NO: 422312 - protein, 16 aa, Homo sapiens
  CDR3 for beta chain variable domain of TCR clone 211156 (TRBV12-4, TRBJ1-5)
CASSRPVGGSNQPQHF

SEQ ID NO: 422313 - protein, 12 aa, Homo sapiens
  CDR3 for alpha chain variable domain of TCR clone 211157 (TRAV2, TRAJ24)
CAATDSWGKFQF

SEQ ID NO: 422314 - protein, 14 aa, Homo sapiens
  CDR3 for beta chain variable domain of TCR clone 211157 (TRBV28, TRBJ2-1)
CASSLNGRNNEQFF

SEQ ID NO: 422315 - protein, 14 aa, Homo sapiens
  CDR3 for alpha chain variable domain of TCR clone 211158 (TRAV21, TRAJ58)
CAVRRGRSGSRLTF

SEQ ID NO: 422316 - protein, 17 aa, Homo sapiens
  CDR3 for beta chain variable domain of TCR clone 211158 (TRBV7-9, TRBJ2-3)
CASSPTVAGDLTDTQYF

SEQ ID NO: 422317 - protein, 11 aa, Homo sapiens
  CDR3 for alpha chain variable domain of TCR clone 211159 (TRAV17, TRAJ9)
CGFTGGFKTIF

SEQ ID NO: 422318 - protein, 12 aa, Homo sapiens
  CDR3 for beta chain variable domain of TCR clone 211159 (TRBV29-1, TRBJ2-3)
RSVTGGADTQYF

SEQ ID NO: 422319 - protein, 12 aa, Homo sapiens
  CDR3 for alpha chain variable domain of TCR clone 211160 (TRAV21, TRAJ37)
CAVRGNTGKLIF

SEQ ID NO: 422320 - protein, 14 aa, Homo sapiens
  CDR3 for beta chain variable domain of TCR clone 211160 (TRBV19, TRBJ2-1)
CASEMTGARNEQFF

SEQ ID NO: 422321 - protein, 14 aa, Homo sapiens
  CDR3 for alpha chain variable domain of TCR clone 211161 (TRAV8-3, TRAJ17)
CCGCGKAAGNKLTF

SEQ ID NO: 422322 - protein, 14 aa, Homo sapiens
  CDR3 for beta chain variable domain of TCR clone 211161 (TRBV4-2, TRBJ1-2)
CASSQVGQNYGDTF

SEQ ID NO: 422323 - protein, 13 aa, Homo sapiens
  CDR3 for alpha chain variable domain of TCR clone 211162 (TRAV2, TRAJ40)
CAVVTSGTYKYIF

SEQ ID NO: 422324 - protein, 17 aa, Homo sapiens
  CDR3 for beta chain variable domain of TCR clone 211162 (TRBV5-5, TRBJ1-2)
CASSLGSLDGQSEGYTF

SEQ ID NO: 422325 - protein, 14 aa, Homo sapiens
  CDR3 for alpha chain variable domain of TCR clone 211163 (TRAV8-3, TRAJ44)
CAVGLTGTASKLTF

SEQ ID NO: 422326 - protein, 12 aa, Homo sapiens
  CDR3 for beta chain variable domain of TCR clone 211163 (TRBV7-3, TRBJ2-1)
CASSLGSNEQFF

SEQ ID NO: 422327 - protein, 15 aa, Homo sapiens
  CDR3 for alpha chain variable domain of TCR clone 211164 (TRAV12-1, TRAJ26)
CVVNREDNYGQNFVF

SEQ ID NO: 422328 - protein, 12 aa, Homo sapiens
  CDR3 for beta chain variable domain of TCR clone 211164 (TRBV11-2, TRBJ2-2)
CASSLGGGELFF

SEQ ID NO: 422329 - protein, 13 aa, Homo sapiens
  CDR3 for alpha chain variable domain of TCR clone 211165 (TRAV27, TRAJ39)
CAGAQGAGNMLTF

SEQ ID NO: 422330 - protein, 14 aa, Homo sapiens
  CDR3 for beta chain variable domain of TCR clone 211165 (TRBV12-5, TRBJ2-5)
CASGSRTHQETQYF

SEQ ID NO: 422331 - protein, 14 aa, Homo sapiens
  CDR3 for alpha chain variable domain of TCR clone 211166 (TRAV8-3, TRAJ35)
CAVGARGFGNVLHC

SEQ ID NO: 422332 - protein, 15 aa, Homo sapiens
  CDR3 for beta chain variable domain of TCR clone 211166 (TRBV20-1, TRBJ2-7)
CSARDRVSGMDEQYF

SEQ ID NO: 422333 - protein, 14 aa, Homo sapiens
  CDR3 for alpha chain variable domain of TCR clone 211167 (TRAV8-1, TRAJ43)
CAVTPGYNNNDMRF

SEQ ID NO: 422334 - protein, 14 aa, Homo sapiens
  CDR3 for beta chain variable domain of TCR clone 211167 (TRBV28, TRBJ2-7)
CASSYRTGSYEQYF

SEQ ID NO: 422335 - protein, 13 aa, Homo sapiens
  CDR3 for alpha chain variable domain of TCR clone 211168 (TRAV2, TRAJ40)
CAVVTSGTCKYIF

SEQ ID NO: 422336 - protein, 14 aa, Homo sapiens
  CDR3 for beta chain variable domain of TCR clone 211168 (TRBV6-3, TRBJ2-1)
CASLHSAYHNEQFF

SEQ ID NO: 422337 - protein, 13 aa, Homo sapiens
  CDR3 for alpha chain variable domain of TCR clone 211169 (TRAV26-1, TRAJ48)
CIVRVVGDEKLTF

SEQ ID NO: 422338 - protein, 13 aa, Homo sapiens
  CDR3 for beta chain variable domain of TCR clone 211169 (TRBV7-8, TRBJ2-7)
CASSLTGGREQYF

SEQ ID NO: 422339 - protein, 19 aa, Homo sapiens
  CDR3 for alpha chain variable domain of TCR clone 211170 (TRAV13-1, TRAJ52)
CAASPYQTAGGTSYGKLTF

SEQ ID NO: 422340 - protein, 14 aa, Homo sapiens
  CDR3 for beta chain variable domain of TCR clone 211170 (TRBV19, TRBJ2-7)
CASTVQGRPYEQYF

SEQ ID NO: 422341 - protein, 16 aa, Homo sapiens
  CDR3 for alpha chain variable domain of TCR clone 211171 (TRAV16, TRAJ52)
CALSAAGGTSYGKLTF

SEQ ID NO: 422342 - protein, 14 aa, Homo sapiens
  CDR3 for beta chain variable domain of TCR clone 211171 (TRBV7-2, TRBJ2-7)
CASRSQGAAYEQYF

SEQ ID NO: 422343 - protein, 13 aa, Homo sapiens
  CDR3 for alpha chain variable domain of TCR clone 211172 (TRAV17, TRAJ9)
CATFLTGGFKTIF

SEQ ID NO: 422344 - protein, 13 aa, Homo sapiens
  CDR3 for beta chain variable domain of TCR clone 211172 (TRBV3-1, TRBJ1-5)
CAITRRDGQPQHF

SEQ ID NO: 422345 - protein, 13 aa, Homo sapiens
  CDR3 for alpha chain variable domain of TCR clone 211173 (TRAV20, TRAJ48)
CAVQGVGNEKLTF

SEQ ID NO: 422346 - protein, 13 aa, Homo sapiens
  CDR3 for beta chain variable domain of TCR clone 211173 (TRBV20-1, TRBJ2-5)
CSAATELQETQYF

SEQ ID NO: 422347 - protein, 14 aa, Homo sapiens
  CDR3 for alpha chain variable domain of TCR clone 211174 (TRAV13-1, TRAJ4)
CAATLPSGYIKLIF

SEQ ID NO: 422348 - protein, 14 aa, Homo sapiens
  CDR3 for beta chain variable domain of TCR clone 211174 (TRBV19, TRBJ2-1)
CASPTFVLSGEQFF

SEQ ID NO: 422349 - protein, 15 aa, Homo sapiens
  CDR3 for alpha chain variable domain of TCR clone 211175 (TRAV17, TRAJ56)
CATDANTGANSKLTF

SEQ ID NO: 422350 - protein, 16 aa, Homo sapiens
  CDR3 for beta chain variable domain of TCR clone 211175 (TRBV3-1, TRBJ1-6)
CASSQEFQGSYSPLHF

SEQ ID NO: 422351 - protein, 18 aa, Homo sapiens
  CDR3 for alpha chain variable domain of TCR clone 211176 (TRAV12-3, TRAJ10)
SPVIQPPTSDGGGNKLTF

SEQ ID NO: 422352 - protein, 12 aa, Homo sapiens
  CDR3 for beta chain variable domain of TCR clone 211176 (TRBV7-3, TRBJ2-5)
CASSSPGGTQYF

SEQ ID NO: 422353 - protein, 15 aa, Homo sapiens
  CDR3 for alpha chain variable domain of TCR clone 211177 (TRAV3, TRAJ22)
CAVRDRGGSARQLTF

SEQ ID NO: 422354 - protein, 18 aa, Homo sapiens
  CDR3 for beta chain variable domain of TCR clone 211177 (TRBV28, TRBJ2-1)
CDSSSTSGRANSYNEQFF

SEQ ID NO: 422355 - protein, 14 aa, Homo sapiens
  CDR3 for alpha chain variable domain of TCR clone 211178 (TRAV4, TRAJ26)
CLVGPHNYGQNFVF

SEQ ID NO: 422356 - protein, 14 aa, Homo sapiens
  CDR3 for beta chain variable domain of TCR clone 211178 (TRBV7-3, TRBJ2-1)
CASSLAGGTNEQFF

SEQ ID NO: 422357 - protein, 14 aa, Homo sapiens
  CDR3 for alpha chain variable domain of TCR clone 211179 (TRAV16, TRAJ58)
CALFKETSGSRLTF

SEQ ID NO: 422358 - protein, 13 aa, Homo sapiens
  CDR3 for beta chain variable domain of TCR clone 211179 (TRBV20-1, TRBJ1-1)
CSARGGGNTEAFF

SEQ ID NO: 422359 - protein, 14 aa, Homo sapiens
  CDR3 for alpha chain variable domain of TCR clone 211180 (TRAV1-2, TRAJ16)
CAVNRFSDGQELLF

SEQ ID NO: 422360 - protein, 13 aa, Homo sapiens
  CDR3 for beta chain variable domain of TCR clone 211180 (TRBV7-3, TRBJ1-1)
CASSLTQGTEAFF

SEQ ID NO: 422361 - protein, 14 aa, Homo sapiens
  CDR3 for alpha chain variable domain of TCR clone 211181 (TRAV12-3, TRAJ10)
SHLPLTGGGNKLTF

SEQ ID NO: 422362 - protein, 15 aa, Homo sapiens
  CDR3 for beta chain variable domain of TCR clone 211181 (TRBV13, TRBJ2-1)
CASSFLSGLNNEQFF

SEQ ID NO: 422363 - protein, 16 aa, Homo sapiens
  CDR3 for alpha chain variable domain of TCR clone 211182 (TRAV35, TRAJ37)
CWAFLRGSSNTGKLIF

SEQ ID NO: 422364 - protein, 14 aa, Homo sapiens
  CDR3 for beta chain variable domain of TCR clone 211182 (TRBV4-2, TRBJ1-2)
CASSPGGSNYGYTF

SEQ ID NO: 422365 - protein, 12 aa, Homo sapiens
  CDR3 for alpha chain variable domain of TCR clone 211183 (TRAV12-3, TRAJ17)
CAMTLTGNKLTF

SEQ ID NO: 422366 - protein, 14 aa, Homo sapiens
  CDR3 for beta chain variable domain of TCR clone 211183 (TRBV18, TRBJ2-7)
CASSPRVGAYEQYF

SEQ ID NO: 422367 - protein, 13 aa, Homo sapiens
  CDR3 for alpha chain variable domain of TCR clone 211184 (TRAV2, TRAJ40)
CAVVTSGTYKYIF

SEQ ID NO: 422368 - protein, 15 aa, Homo sapiens
  CDR3 for beta chain variable domain of TCR clone 211184 (TRBV7-2, TRBJ2-1)
CASSLVGSSYNEQFF

SEQ ID NO: 422369 - protein, 13 aa, Homo sapiens
  CDR3 for alpha chain variable domain of TCR clone 211185 (TRAV13-2, TRAJ15)
CAESNQAGTALIF

SEQ ID NO: 422370 - protein, 15 aa, Homo sapiens
  CDR3 for beta chain variable domain of TCR clone 211185 (TRBV6-3, TRBJ2-7)
CASSSPGTVFYEQYF

SEQ ID NO: 422371 - protein, 15 aa, Homo sapiens
  CDR3 for alpha chain variable domain of TCR clone 211186 (TRAV13-1, TRAJ44)
CAASRGGGTASKLTF

SEQ ID NO: 422372 - protein, 13 aa, Homo sapiens
  CDR3 for beta chain variable domain of TCR clone 211186 (TRBV10-2, TRBJ2-7)
CASGASGGYEQYF

SEQ ID NO: 422373 - protein, 10 aa, Homo sapiens
  CDR3 for alpha chain variable domain of TCR clone 211187 (TRAV36/DV7, TRAJ38)
CAANNRKLIW

SEQ ID NO: 422374 - protein, 14 aa, Homo sapiens
  CDR3 for beta chain variable domain of TCR clone 211187 (TRBV7-2, TRBJ2-7)
CASSPKTSFYEQYF

SEQ ID NO: 422375 - protein, 13 aa, Homo sapiens
  CDR3 for alpha chain variable domain of TCR clone 211188 (TRAV3, TRAJ27)
CAVRPLGAGKSTF

SEQ ID NO: 422376 - protein, 15 aa, Homo sapiens
  CDR3 for beta chain variable domain of TCR clone 211188 (TRBV5-1, TRBJ2-7)
CASSLDLTSSYEQYF

SEQ ID NO: 422377 - protein, 11 aa, Homo sapiens
  CDR3 for alpha chain variable domain of TCR clone 211189 (TRAV2, TRAJ13)
CASVGYQKVTF

SEQ ID NO: 422378 - protein, 14 aa, Homo sapiens
  CDR3 for beta chain variable domain of TCR clone 211189 (TRBV12-5, TRBJ2-5)
CASGSRTHQETQYF

SEQ ID NO: 422379 - protein, 15 aa, Homo sapiens
  CDR3 for alpha chain variable domain of TCR clone 211190 (TRAV12-2, TRAJ8)
CAVREENTGFQQLVF

SEQ ID NO: 422380 - protein, 15 aa, Homo sapiens
  CDR3 for beta chain variable domain of TCR clone 211190 (TRBV28, TRBJ2-4)
CAAGSGTLLMGIQYF

SEQ ID NO: 422381 - protein, 15 aa, Homo sapiens
  CDR3 for alpha chain variable domain of TCR clone 211191 (TRAV13-1, TRAJ5)
CAASPRGHGQESTYF

SEQ ID NO: 422382 - protein, 17 aa, Homo sapiens
  CDR3 for beta chain variable domain of TCR clone 211191 (TRBV3-1, TRBJ2-2)
CASSQFRDKVDSGELFF

SEQ ID NO: 422383 - protein, 14 aa, Homo sapiens
  CDR3 for alpha chain variable domain of TCR clone 211192 (TRAV12-2, TRAJ45)
CAVPERGGADGLTF

SEQ ID NO: 422384 - protein, 14 aa, Homo sapiens
  CDR3 for beta chain variable domain of TCR clone 211192 (TRBV18, TRBJ1-5)
CASSPGNSNQPQHF

SEQ ID NO: 422385 - protein, 13 aa, Homo sapiens
  CDR3 for alpha chain variable domain of TCR clone 211193 (TRAV2, TRAJ15)
CAVASQAGTALIF

SEQ ID NO: 422386 - protein, 16 aa, Homo sapiens
  CDR3 for beta chain variable domain of TCR clone 211193 (TRBV18, TRBJ1-5)
CASSPYMVEGNQPQHF

SEQ ID NO: 422387 - protein, 17 aa, Homo sapiens
  CDR3 for alpha chain variable domain of TCR clone 211194 (TRAV3, TRAJ38)
CAVRDCLNAGNNHIQNH

SEQ ID NO: 422388 - protein, 19 aa, Homo sapiens
  CDR3 for beta chain variable domain of TCR clone 211194 (TRBV7-2, TRBJ2-3)
CASSFLSRNWGGGTDTQYF

SEQ ID NO: 422389 - protein, 15 aa, Homo sapiens
  CDR3 for alpha chain variable domain of TCR clone 211195 (TRAV13-1, TRAJ57)
CAASNTQGGSEKLVF

SEQ ID NO: 422390 - protein, 13 aa, Homo sapiens
  CDR3 for beta chain variable domain of TCR clone 211195 (TRBV7-6, TRBJ1-5)
CASSQGPNRHQHF

SEQ ID NO: 422391 - protein, 14 aa, Homo sapiens
  CDR3 for alpha chain variable domain of TCR clone 211196 (TRAV1-2, TRAJ16)
CAVNRFSGGQKLLF

SEQ ID NO: 422392 - protein, 17 aa, Homo sapiens
  CDR3 for beta chain variable domain of TCR clone 211196 (TRBV28, TRBJ2-5)
CASSTPEGDALQETQYF

SEQ ID NO: 422393 - protein, 12 aa, Homo sapiens
  CDR3 for alpha chain variable domain of TCR clone 211197 (TRAV21, TRAJ33)
CAKMDSNYQLIW

SEQ ID NO: 422394 - protein, 15 aa, Homo sapiens
  CDR3 for beta chain variable domain of TCR clone 211197 (TRBV11-2, TRBJ2-1)
CASSLGTSGLNEQFF

SEQ ID NO: 422395 - protein, 14 aa, Homo sapiens
  CDR3 for alpha chain variable domain of TCR clone 211198 (TRAV3, TRAJ36)
CAVRDGTGANNLFF

SEQ ID NO: 422396 - protein, 16 aa, Homo sapiens
  CDR3 for beta chain variable domain of TCR clone 211198 (TRBV20-1, TRBJ2-1)
CSARDFSGRIGDEQFF

SEQ ID NO: 422397 - protein, 15 aa, Homo sapiens
  CDR3 for alpha chain variable domain of TCR clone 211199 (TRAV4, TRAJ39)
CLVGPNNNAGNMLTF

SEQ ID NO: 422398 - protein, 16 aa, Homo sapiens
  CDR3 for beta chain variable domain of TCR clone 211199 (TRBV19, TRBJ2-1)
CANSKAGPSSYNEQFF

SEQ ID NO: 422399 - protein, 17 aa, Homo sapiens
  CDR3 for alpha chain variable domain of TCR clone 211200 (TRAV12-1, TRAJ6)
CAVRDGPRAGGSYIPTF

SEQ ID NO: 422400 - protein, 14 aa, Homo sapiens
  CDR3 for beta chain variable domain of TCR clone 211200 (TRBV7-2, TRBJ2-7)
CASSPKTSFYEQYF

SEQ ID NO: 422401 - protein, 16 aa, Homo sapiens
  CDR3 for alpha chain variable domain of TCR clone 211201 (TRAV3, TRAJ37)
CAVRVRGSGNPGKRIF

SEQ ID NO: 422402 - protein, 16 aa, Homo sapiens
  CDR3 for beta chain variable domain of TCR clone 211201 (TRBV19, TRBJ2-1)
CASSKAGPSSYNEQFF

SEQ ID NO: 422403 - protein, 18 aa, Homo sapiens
  CDR3 for alpha chain variable domain of TCR clone 211202 (TRAV12-3, TRAJ52)
CAMSVGGAGGTSYGKLTF

SEQ ID NO: 422404 - protein, 15 aa, Homo sapiens
  CDR3 for beta chain variable domain of TCR clone 211202 (TRBV7-2, TRBJ2-1)
CASSSGLAGGNEQFF

SEQ ID NO: 422405 - protein, 10 aa, Homo sapiens
  CDR3 for alpha chain variable domain of TCR clone 211203 (TRAV8-3, TRAJ33)
CAVGAIATIS

SEQ ID NO: 422406 - protein, 16 aa, Homo sapiens
  CDR3 for beta chain variable domain of TCR clone 211203 (TRBV4-2, TRBJ1-1)
CASSQAGFGMNTEAFF

SEQ ID NO: 422407 - protein, 12 aa, Homo sapiens
  CDR3 for alpha chain variable domain of TCR clone 211204 (TRAV16, TRAJ10)
CSRTGGGNKLTF

SEQ ID NO: 422408 - protein, 13 aa, Homo sapiens
  CDR3 for beta chain variable domain of TCR clone 211204 (TRBV7-3, TRBJ1-1)
CASSQDWGAESFF

SEQ ID NO: 422409 - protein, 14 aa, Homo sapiens
  CDR3 for alpha chain variable domain of TCR clone 211205 (TRAV34, TRAJ44)
CGADGTGTASKLTF

SEQ ID NO: 422410 - protein, 12 aa, Homo sapiens
  CDR3 for beta chain variable domain of TCR clone 211205 (TRBV11-2, TRBJ2-2)
CASSLGVGELFF

SEQ ID NO: 422411 - protein, 13 aa, Homo sapiens
  CDR3 for alpha chain variable domain of TCR clone 211206 (TRAV2, TRAJ20)
CAVEDPSEYKLSF

SEQ ID NO: 422412 - protein, 11 aa, Homo sapiens
  CDR3 for beta chain variable domain of TCR clone 211206 (TRBV27, TRBJ2-3)
CASSLGDTQYF

SEQ ID NO: 422413 - protein, 17 aa, Homo sapiens
  CDR3 for alpha chain variable domain of TCR clone 211207 (TRAV35, TRAJ47)
GLLDCRTHTEYGNKLVF

SEQ ID NO: 422414 - protein, 11 aa, Homo sapiens
  CDR3 for beta chain variable domain of TCR clone 211207 (TRBV29-1, TRBJ1-1)
CSVVVGTRTFF

SEQ ID NO: 422415 - protein, 15 aa, Homo sapiens
  CDR3 for alpha chain variable domain of TCR clone 211208 (TRAV17, TRAJ16)
CATALRFSDGQKLLF

SEQ ID NO: 422416 - protein, 15 aa, Homo sapiens
  CDR3 for beta chain variable domain of TCR clone 211208 (TRBV13, TRBJ1-5)
CASSFGQGGVQPQHC

SEQ ID NO: 422417 - protein, 12 aa, Homo sapiens
  CDR3 for alpha chain variable domain of TCR clone 211209 (TRAV13-2, TRAJ23)
CAERHRGGKLIF

SEQ ID NO: 422418 - protein, 15 aa, Homo sapiens
  CDR3 for beta chain variable domain of TCR clone 211209 (TRBV6-6, TRBJ2-7)
CASSYPYGGSYEQYF

SEQ ID NO: 422419 - protein, 17 aa, Homo sapiens
  CDR3 for alpha chain variable domain of TCR clone 211210 (TRAV12-3, TRAJ6)
CAMSARGGAGGSYIPPF

SEQ ID NO: 422420 - protein, 12 aa, Homo sapiens
  CDR3 for beta chain variable domain of TCR clone 211210 (TRBV12-4, TRBJ2-3)
CASSTLLDTQYF

SEQ ID NO: 422421 - protein, 11 aa, Homo sapiens
  CDR3 for alpha chain variable domain of TCR clone 211211 (TRAV27, TRAJ40)
SLTSGTYKCIF

SEQ ID NO: 422422 - protein, 13 aa, Homo sapiens
  CDR3 for beta chain variable domain of TCR clone 211211 (TRBV2, TRBJ2-5)
CASGTPYQETQYF

SEQ ID NO: 422423 - protein, 13 aa, Homo sapiens
  CDR3 for alpha chain variable domain of TCR clone 211212 (TRAV12-2, TRAJ40)
CAVKRTGTYKYIF

SEQ ID NO: 422424 - protein, 15 aa, Homo sapiens
  CDR3 for beta chain variable domain of TCR clone 211212 (TRBV12-4, TRBJ1-2)
CASSPSTGGGYGYTF

SEQ ID NO: 422425 - protein, 14 aa, Homo sapiens
  CDR3 for alpha chain variable domain of TCR clone 211213 (TRAV8-3, TRAJ4)
CAVGAAGGYNKLIF

SEQ ID NO: 422426 - protein, 16 aa, Homo sapiens
  CDR3 for beta chain variable domain of TCR clone 211213 (TRBV5-1, TRBJ2-1)
CASSIRSGGSYNEQFF

SEQ ID NO: 422427 - protein, 13 aa, Homo sapiens
  CDR3 for alpha chain variable domain of TCR clone 211214 (TRAV2, TRAJ27)
CAVEAPMQANQPL

SEQ ID NO: 422428 - protein, 15 aa, Homo sapiens
  CDR3 for beta chain variable domain of TCR clone 211214 (TRBV5-8, TRBJ2-2)
CASSLDRGATGELFF

SEQ ID NO: 422429 - protein, 13 aa, Homo sapiens
  CDR3 for alpha chain variable domain of TCR clone 211215 (TRAV8-6, TRAJ24)
CAVSSDSWGKLQF

SEQ ID NO: 422430 - protein, 11 aa, Homo sapiens
  CDR3 for beta chain variable domain of TCR clone 211215 (TRBV11-2, TRBJ2-2)
CASSLPGELFF

SEQ ID NO: 422431 - protein, 16 aa, Homo sapiens
  CDR3 for alpha chain variable domain of TCR clone 211216 (TRAV23/DV6, TRAJ13)
CAASFSFSGGYQKVTF

SEQ ID NO: 422432 - protein, 13 aa, Homo sapiens
  CDR3 for beta chain variable domain of TCR clone 211216 (TRBV5-4, TRBJ1-2)
CASSFRNNYGYTF

SEQ ID NO: 422433 - protein, 12 aa, Homo sapiens
  CDR3 for alpha chain variable domain of TCR clone 211217 (TRAV2, TRAJ9)
CAVGAGGFKTIF

SEQ ID NO: 422434 - protein, 13 aa, Homo sapiens
  CDR3 for beta chain variable domain of TCR clone 211217 (TRBV12-4, TRBJ2-7)
CASSLERVREQYF

SEQ ID NO: 422435 - protein, 13 aa, Homo sapiens
  CDR3 for alpha chain variable domain of TCR clone 211218 (TRAV12-2, TRAJ47)
CAVFMEYGNKLVF

SEQ ID NO: 422436 - protein, 13 aa, Homo sapiens
  CDR3 for beta chain variable domain of TCR clone 211218 (TRBV7-3, TRBJ1-1)
CASSQDWGAEAFF

SEQ ID NO: 422437 - protein, 16 aa, Homo sapiens
  CDR3 for alpha chain variable domain of TCR clone 211219 (TRAV30, TRAJ26)
CGTEPVGVNYGQNFVF

SEQ ID NO: 422438 - protein, 13 aa, Homo sapiens
  CDR3 for beta chain variable domain of TCR clone 211219 (TRBV19, TRBJ1-2)
CASSISEDYGYTF

SEQ ID NO: 422439 - protein, 17 aa, Homo sapiens
  CDR3 for alpha chain variable domain of TCR clone 211220 (TRAV3, TRAJ12)
CAVRDGGRMDSSYKWIF

SEQ ID NO: 422440 - protein, 13 aa, Homo sapiens
  CDR3 for beta chain variable domain of TCR clone 211220 (TRBV15, TRBJ1-6)
CATSGGLNSPLHF

SEQ ID NO: 422441 - protein, 19 aa, Homo sapiens
  CDR3 for alpha chain variable domain of TCR clone 211221 (TRAV26-1, TRAJ28)
CIVRVAHAYSGAGSYQLTF

SEQ ID NO: 422442 - protein, 17 aa, Homo sapiens
  CDR3 for beta chain variable domain of TCR clone 211221 (TRBV5-1, TRBJ1-3)
CASSSKTGLETPYILER

SEQ ID NO: 422443 - protein, 15 aa, Homo sapiens
  CDR3 for alpha chain variable domain of TCR clone 211222 (TRAV8-1, TRAJ42)
CAVRSYGGSQGNLIF

SEQ ID NO: 422444 - protein, 16 aa, Homo sapiens
  CDR3 for beta chain variable domain of TCR clone 211222 (TRBV4-3, TRBJ2-1)
CASSPALDRGVNEQFF

SEQ ID NO: 422445 - protein, 14 aa, Homo sapiens
  CDR3 for alpha chain variable domain of TCR clone 211223 (TRAV21, TRAJ45)
CAVSSGGGADGLTF

SEQ ID NO: 422446 - protein, 16 aa, Homo sapiens
  CDR3 for beta chain variable domain of TCR clone 211223 (TRBV7-3, TRBJ2-1)
CASSLEGYRSYNEQFF

SEQ ID NO: 422447 - protein, 14 aa, Homo sapiens
  CDR3 for alpha chain variable domain of TCR clone 211224 (TRAV13-1, TRAJ13)
CAASRVGGYQKVTF

SEQ ID NO: 422448 - protein, 17 aa, Homo sapiens
  CDR3 for beta chain variable domain of TCR clone 211224 (TRBV15, TRBJ1-5)
CATSRVPPGTRNQPQHF

SEQ ID NO: 422449 - protein, 13 aa, Homo sapiens
  CDR3 for alpha chain variable domain of TCR clone 211225 (TRAV1-1, TRAJ9)
CAAKNTGGFKTIF

SEQ ID NO: 422450 - protein, 14 aa, Homo sapiens
  CDR3 for beta chain variable domain of TCR clone 211225 (TRBV12-5, TRBJ2-5)
CASGSRTHQETQYV

SEQ ID NO: 422451 - protein, 16 aa, Homo sapiens
  CDR3 for alpha chain variable domain of TCR clone 211226 (TRAV30, TRAJ24)
CGTEIVDADSWGKFQF

SEQ ID NO: 422452 - protein, 14 aa, Homo sapiens
  CDR3 for beta chain variable domain of TCR clone 211226 (TRBV12-5, TRBJ2-5)
CASGSRTSQETQYF

SEQ ID NO: 422453 - protein, 13 aa, Homo sapiens
  CDR3 for alpha chain variable domain of TCR clone 211227 (TRAV22, TRAJ26)
CAVEGNYGQNFVF

SEQ ID NO: 422454 - protein, 13 aa, Homo sapiens
  CDR3 for beta chain variable domain of TCR clone 211227 (TRBV20-1, TRBJ2-5)
CSARGDYQETQYF

SEQ ID NO: 422455 - protein, 15 aa, Homo sapiens
  CDR3 for alpha chain variable domain of TCR clone 211228 (TRAV13-2, TRAJ5)
YAENPHWTGRRALTF

SEQ ID NO: 422456 - protein, 14 aa, Homo sapiens
  CDR3 for beta chain variable domain of TCR clone 211228 (TRBV5-7, TRBJ2-7)
CASSFKGATGEQYF

SEQ ID NO: 422457 - protein, 13 aa, Homo sapiens
  CDR3 for alpha chain variable domain of TCR clone 211229 (TRAV8-3, TRAJ36)
CAVGATGASNLFF

SEQ ID NO: 422458 - protein, 17 aa, Homo sapiens
  CDR3 for beta chain variable domain of TCR clone 211229 (TRBV4-2, TRBJ1-1)
CASTQFGGGSGNTEAFF

SEQ ID NO: 422459 - protein, 15 aa, Homo sapiens
  CDR3 for alpha chain variable domain of TCR clone 211230 (TRAV21, TRAJ52)
CALRGGGTSYGKLTF

SEQ ID NO: 422460 - protein, 13 aa, Homo sapiens
  CDR3 for beta chain variable domain of TCR clone 211230 (TRBV6-5, TRBJ2-5)
CATAPSPQETQYF

SEQ ID NO: 422461 - protein, 12 aa, Homo sapiens
  CDR3 for alpha chain variable domain of TCR clone 211231 (TRAV12-1, TRAJ20)
CVAHFNDYKLSF

SEQ ID NO: 422462 - protein, 14 aa, Homo sapiens
  CDR3 for beta chain variable domain of TCR clone 211231 (TRBV3-1, TRBJ2-2)
CASSRPDNTGELFF

SEQ ID NO: 422463 - protein, 13 aa, Homo sapiens
  CDR3 for alpha chain variable domain of TCR clone 211232 (TRAV21, TRAJ27)
CAARPGNAGKSTF

SEQ ID NO: 422464 - protein, 21 aa, Homo sapiens
  CDR3 for beta chain variable domain of TCR clone 211232 (TRBV7-6, TRBJ2-1)
SGTRPGIAVPAAWGGADEQFF

SEQ ID NO: 422465 - protein, 14 aa, Homo sapiens
  CDR3 for alpha chain variable domain of TCR clone 211233 (TRAV12-3, TRAJ42)
CAMNYGGSQGNLIF

SEQ ID NO: 422466 - protein, 15 aa, Homo sapiens
  CDR3 for beta chain variable domain of TCR clone 211233 (TRBV20-1, TRBJ2-7)
CSARDRVSGMDEQYF

SEQ ID NO: 422467 - protein, 14 aa, Homo sapiens
  CDR3 for alpha chain variable domain of TCR clone 211234 (TRAV12-3, TRAJ9)
CAMSPNTGGFKTIF

SEQ ID NO: 422468 - protein, 17 aa, Homo sapiens
  CDR3 for beta chain variable domain of TCR clone 211234 (TRBV13, TRBJ2-3)
CAGSRSRVAGGRNTQYF

SEQ ID NO: 422469 - protein, 13 aa, Homo sapiens
  CDR3 for alpha chain variable domain of TCR clone 211235 (TRAV29/DV5, TRAJ31)
CAAIRNNNARLMF

SEQ ID NO: 422470 - protein, 14 aa, Homo sapiens
  CDR3 for beta chain variable domain of TCR clone 211235 (TRBV20-1, TRBJ1-5)
CSARDVTGFQPQHF

SEQ ID NO: 422471 - protein, 11 aa, Homo sapiens
  CDR3 for alpha chain variable domain of TCR clone 211236 (TRAV1-2, TRAJ10)
CFTGGGNKLAF

SEQ ID NO: 422472 - protein, 13 aa, Homo sapiens
  CDR3 for beta chain variable domain of TCR clone 211236 (TRBV27, TRBJ2-1)
CASRTLGVGEQFF

SEQ ID NO: 422473 - protein, 13 aa, Homo sapiens
  CDR3 for alpha chain variable domain of TCR clone 211237 (TRAV12-2, TRAJ42)
CAVKRGSQGNLIF

SEQ ID NO: 422474 - protein, 16 aa, Homo sapiens
  CDR3 for beta chain variable domain of TCR clone 211237 (TRBV28, TRBJ1-2)
CASSHGQGVYKDGYTF

SEQ ID NO: 422475 - protein, 13 aa, Homo sapiens
  CDR3 for alpha chain variable domain of TCR clone 211238 (TRAV8-3, TRAJ28)
CAVGAVGSYRLTF

SEQ ID NO: 422476 - protein, 14 aa, Homo sapiens
  CDR3 for beta chain variable domain of TCR clone 211238 (TRBV25-1, TRBJ1-1)
CASTHLGWNTEAFF

SEQ ID NO: 422477 - protein, 17 aa, Homo sapiens
  CDR3 for alpha chain variable domain of TCR clone 211239 (TRAV8-3, TRAJ50)
CAVGAVDTETSYDKVIF

SEQ ID NO: 422478 - protein, 13 aa, Homo sapiens
  CDR3 for beta chain variable domain of TCR clone 211239 (TRBV7-9, TRBJ2-2)
CARSSAGTGELFF

SEQ ID NO: 422479 - protein, 16 aa, Homo sapiens
  CDR3 for alpha chain variable domain of TCR clone 211240 (TRAV30, TRAJ24)
CGTEIVDADSWGKFQF

SEQ ID NO: 422480 - protein, 15 aa, Homo sapiens
  CDR3 for beta chain variable domain of TCR clone 211240 (TRBV20-1, TRBJ2-6)
CSARDRGPRANVLTF

SEQ ID NO: 422481 - protein, 17 aa, Homo sapiens
  CDR3 for alpha chain variable domain of TCR clone 211241 (TRAV4, TRAJ18)
CLVVAAVRGSTLGRLYF

SEQ ID NO: 422482 - protein, 17 aa, Homo sapiens
  CDR3 for beta chain variable domain of TCR clone 211241 (TRBV28, TRBJ2-2)
CASSLATGMGDAGELFF

SEQ ID NO: 422483 - protein, 14 aa, Homo sapiens
  CDR3 for alpha chain variable domain of TCR clone 211242 (TRAV25, TRAJ9)
CAGPGNTGGFKTIF

SEQ ID NO: 422484 - protein, 13 aa, Homo sapiens
  CDR3 for beta chain variable domain of TCR clone 211242 (TRBV19, TRBJ2-7)
CASRKAGGSEQYF

SEQ ID NO: 422485 - protein, 13 aa, Homo sapiens
  CDR3 for alpha chain variable domain of TCR clone 211243 (TRAV26-1, TRAJ39)
CIVRVVAGNLLTF

SEQ ID NO: 422486 - protein, 14 aa, Homo sapiens
  CDR3 for beta chain variable domain of TCR clone 211243 (TRBV20-1, TRBJ2-5)
CSARRQGIRETQYF

SEQ ID NO: 422487 - protein, 13 aa, Homo sapiens
  CDR3 for alpha chain variable domain of TCR clone 211244 (TRAV21, TRAJ27)
CAARPGNAGKSTF

SEQ ID NO: 422488 - protein, 17 aa, Homo sapiens
  CDR3 for beta chain variable domain of TCR clone 211244 (TRBV4-3, TRBJ2-1)
CASSQFSSGRASGEQFF

SEQ ID NO: 422489 - protein, 17 aa, Homo sapiens
  CDR3 for alpha chain variable domain of TCR clone 211245 (TRAV3, TRAJ38)
CAVRDCLNAGNNRKLIW

SEQ ID NO: 422490 - protein, 14 aa, Homo sapiens
  CDR3 for beta chain variable domain of TCR clone 211245 (TRBV5-5, TRBJ1-5)
CTSSGQGVDQPQHF

SEQ ID NO: 422491 - protein, 12 aa, Homo sapiens
  CDR3 for alpha chain variable domain of TCR clone 211246 (TRAV35, TRAJ39)
LAPNNAGNMLTF

SEQ ID NO: 422492 - protein, 17 aa, Homo sapiens
  CDR3 for beta chain variable domain of TCR clone 211246 (TRBV19, TRBJ2-7)
CASSISFYDSYPYEQYF

SEQ ID NO: 422493 - protein, 15 aa, Homo sapiens
  CDR3 for alpha chain variable domain of TCR clone 211247 (TRAV26-1, TRAJ9)
CIVRVAGTGGFKTIF

SEQ ID NO: 422494 - protein, 16 aa, Homo sapiens
  CDR3 for beta chain variable domain of TCR clone 211247 (TRBV24-1, TRBJ1-5)
CATSDAAEFSNQPQHF

SEQ ID NO: 422495 - protein, 16 aa, Homo sapiens
  CDR3 for alpha chain variable domain of TCR clone 211248 (TRAV16, TRAJ57)
CAPYLITQGGSERLVF

SEQ ID NO: 422496 - protein, 17 aa, Homo sapiens
  CDR3 for beta chain variable domain of TCR clone 211248 (TRBV24-1, TRBJ2-4)
CATSDGEARGVRNIQYF

SEQ ID NO: 422497 - protein, 13 aa, Homo sapiens
  CDR3 for alpha chain variable domain of TCR clone 211249 (TRAV26-2, TRAJ43)
CILRAVNNNDMRF

SEQ ID NO: 422498 - protein, 17 aa, Homo sapiens
  CDR3 for beta chain variable domain of TCR clone 211249 (TRBV13, TRBJ2-3)
CASSLSRVAGGRNTQYF

SEQ ID NO: 422499 - protein, 13 aa, Homo sapiens
  CDR3 for alpha chain variable domain of TCR clone 211250 (TRAV8-6, TRAJ33)
CAVSEGSNYQLIW

SEQ ID NO: 422500 - protein, 13 aa, Homo sapiens
  CDR3 for beta chain variable domain of TCR clone 211250 (TRBV5-7, TRBJ2-3)
CASSLCRTDTQYF

SEQ ID NO: 422501 - protein, 14 aa, Homo sapiens
  CDR3 for alpha chain variable domain of TCR clone 211251 (TRAV8-2, TRAJ23)
GVVSDDNQGGKLIF

SEQ ID NO: 422502 - protein, 16 aa, Homo sapiens
  CDR3 for beta chain variable domain of TCR clone 211251 (TRBV4-2, TRBJ2-5)
CASSQELVGSQETQYF

SEQ ID NO: 422503 - protein, 15 aa, Homo sapiens
  CDR3 for alpha chain variable domain of TCR clone 211252 (TRAV12-1, TRAJ44)
CVADLPTGTASKLTF

SEQ ID NO: 422504 - protein, 13 aa, Homo sapiens
  CDR3 for beta chain variable domain of TCR clone 211252 (TRBV6-5, TRBJ2-5)
CASSPQGVETQYF

SEQ ID NO: 422505 - protein, 14 aa, Homo sapiens
  CDR3 for alpha chain variable domain of TCR clone 211253 (TRAV13-1, TRAJ9)
CAASALTGGFKTNF

SEQ ID NO: 422506 - protein, 16 aa, Homo sapiens
  CDR3 for beta chain variable domain of TCR clone 211253 (TRBV7-8, TRBJ2-4)
CASSAERTLAKNIQYF

SEQ ID NO: 422507 - protein, 19 aa, Homo sapiens
  CDR3 for alpha chain variable domain of TCR clone 211254 (TRAV2, TRAJ20)
ILQVREADAAVYRDCKLSF

SEQ ID NO: 422508 - protein, 13 aa, Homo sapiens
  CDR3 for beta chain variable domain of TCR clone 211254 (TRBV4-1, TRBJ2-2)
CASSQENTGELFF

SEQ ID NO: 422509 - protein, 14 aa, Homo sapiens
  CDR3 for alpha chain variable domain of TCR clone 211255 (TRAV23/DV6, TRAJ13)
CAAMYSGGYQKVTF

SEQ ID NO: 422510 - protein, 13 aa, Homo sapiens
  CDR3 for beta chain variable domain of TCR clone 211255 (TRBV7-3, TRBJ2-1)
CASSLDSYNEQFF

SEQ ID NO: 422511 - protein, 15 aa, Homo sapiens
  CDR3 for alpha chain variable domain of TCR clone 211256 (TRAV20, TRAJ53)
CAVQASGGSNYKLTF

SEQ ID NO: 422512 - protein, 12 aa, Homo sapiens
  CDR3 for beta chain variable domain of TCR clone 211256 (TRBV7-6, TRBJ2-5)
CASSLSQETRYF

SEQ ID NO: 422513 - protein, 14 aa, Homo sapiens
  CDR3 for alpha chain variable domain of TCR clone 211257 (TRAV12-2, TRAJ15)
CAPHTGQAGTALIF

SEQ ID NO: 422514 - protein, 11 aa, Homo sapiens
  CDR3 for beta chain variable domain of TCR clone 211257 (TRBV27, TRBJ2-3)
CASSLGDTQYF

SEQ ID NO: 422515 - protein, 14 aa, Homo sapiens
  CDR3 for alpha chain variable domain of TCR clone 211258 (TRAV3, TRAJ7)
CAVREEQREQQTRF

SEQ ID NO: 422516 - protein, 12 aa, Homo sapiens
  CDR3 for beta chain variable domain of TCR clone 211258 (TRBV7-8, TRBJ2-7)
CASSLGDREQYF

SEQ ID NO: 422517 - protein, 15 aa, Homo sapiens
  CDR3 for alpha chain variable domain of TCR clone 211259 (TRAV3, TRAJ9)
CALRDSNTGGFKTIF

SEQ ID NO: 422518 - protein, 16 aa, Homo sapiens
  CDR3 for beta chain variable domain of TCR clone 211259 (TRBV15, TRBJ2-5)
CATSPTTGQGMETQYF

SEQ ID NO: 422519 - protein, 16 aa, Homo sapiens
  CDR3 for alpha chain variable domain of TCR clone 211260 (TRAV30, TRAJ24)
CGTEIVDADSSGKFQF

SEQ ID NO: 422520 - protein, 14 aa, Homo sapiens
  CDR3 for beta chain variable domain of TCR clone 211260 (TRBV12-5, TRBJ2-5)
CASGSRTQQETQYF

SEQ ID NO: 422521 - protein, 13 aa, Homo sapiens
  CDR3 for alpha chain variable domain of TCR clone 211261 (TRAV2, TRAJ40)
CAVVPSGTYKYIF

SEQ ID NO: 422522 - protein, 14 aa, Homo sapiens
  CDR3 for beta chain variable domain of TCR clone 211261 (TRBV12-4, TRBJ1-1)
CASSSARGYTEAFF

SEQ ID NO: 422523 - protein, 22 aa, Homo sapiens
  CDR3 for alpha chain variable domain of TCR clone 211262 (TRAV21, )
CAVRHDAGNNHIQNPDPAVYQL

SEQ ID NO: 422524 - protein, 16 aa, Homo sapiens
  CDR3 for beta chain variable domain of TCR clone 211262 (TRBV4-2, TRBJ1-1)
CASRPLDGGGDTEAFF

SEQ ID NO: 422525 - protein, 17 aa, Homo sapiens
  CDR3 for alpha chain variable domain of TCR clone 211263 (TRAV3, TRAJ6)
CAVRDGPRAGGSYIPTF

SEQ ID NO: 422526 - protein, 20 aa, Homo sapiens
  CDR3 for beta chain variable domain of TCR clone 211263 (TRBV28, TRBJ2-1)
CASIPIGRSPGLVGGNEQFF

SEQ ID NO: 422527 - protein, 13 aa, Homo sapiens
  CDR3 for alpha chain variable domain of TCR clone 211264 (TRAV3, TRAJ21)
CAVREPDLNKFYF

SEQ ID NO: 422528 - protein, 16 aa, Homo sapiens
  CDR3 for beta chain variable domain of TCR clone 211264 (TRBV5-1, TRBJ2-3)
CASSLGLAVYTDTQYF

SEQ ID NO: 422529 - protein, 14 aa, Homo sapiens
  CDR3 for alpha chain variable domain of TCR clone 211265 (TRAV12-3, TRAJ56)
CAMSLTGANSKLTF

SEQ ID NO: 422530 - protein, 17 aa, Homo sapiens
  CDR3 for beta chain variable domain of TCR clone 211265 (TRBV20-1, TRBJ2-3)
CSASLLGRGGSADTQYF

SEQ ID NO: 422531 - protein, 15 aa, Homo sapiens
  CDR3 for alpha chain variable domain of TCR clone 211266 (TRAV8-3, TRAJ23)
CAVGDRYNQGGKLIF

SEQ ID NO: 422532 - protein, 22 aa, Homo sapiens
  CDR3 for beta chain variable domain of TCR clone 211266 (TRBV29-1, TRBJ2-5)
TVSNMSPEDSSIYLCSEGTQYF

SEQ ID NO: 422533 - protein, 15 aa, Homo sapiens
  CDR3 for alpha chain variable domain of TCR clone 211267 (TRAV3, TRAJ22)
FAVRDRGGSARQLTF

SEQ ID NO: 422534 - protein, 14 aa, Homo sapiens
  CDR3 for beta chain variable domain of TCR clone 211267 (TRBV19, TRBJ1-5)
CASSLGLIGQPQHF

SEQ ID NO: 422535 - protein, 14 aa, Homo sapiens
  CDR3 for alpha chain variable domain of TCR clone 211268 (TRAV12-2, TRAJ44)
CAVNPAGTASKLTF

SEQ ID NO: 422536 - protein, 13 aa, Homo sapiens
  CDR3 for beta chain variable domain of TCR clone 211268 (TRBV20-1, TRBJ1-6)
CSAPLGVGSPLNF

SEQ ID NO: 422537 - protein, 12 aa, Homo sapiens
  CDR3 for alpha chain variable domain of TCR clone 211269 (TRAV27, TRAJ13)
CAGAGGYQKVTF

SEQ ID NO: 422538 - protein, 15 aa, Homo sapiens
  CDR3 for beta chain variable domain of TCR clone 211269 (TRBV27, TRBJ1-6)
CASSFDRGLGSPLHF

SEQ ID NO: 422539 - protein, 19 aa, Homo sapiens
  CDR3 for alpha chain variable domain of TCR clone 211270 (TRAV8-3, TRAJ34)
LSTSVLWVWGLRNTDKLIF

SEQ ID NO: 422540 - protein, 13 aa, Homo sapiens
  CDR3 for beta chain variable domain of TCR clone 211270 (TRBV13, TRBJ2-5)
CASSLGGEETQYF

SEQ ID NO: 422541 - protein, 11 aa, Homo sapiens
  CDR3 for alpha chain variable domain of TCR clone 211271 (TRAV2, TRAJ33)
CAVERNYQLIW

SEQ ID NO: 422542 - protein, 15 aa, Homo sapiens
  CDR3 for beta chain variable domain of TCR clone 211271 (TRBV19, TRBJ1-1)
CASTSGQIQDTEAFF

SEQ ID NO: 422543 - protein, 15 aa, Homo sapiens
  CDR3 for alpha chain variable domain of TCR clone 211272 (TRAV2, TRAJ22)
CAVPSRGGSARQLTF

SEQ ID NO: 422544 - protein, 14 aa, Homo sapiens
  CDR3 for beta chain variable domain of TCR clone 211272 (TRBV5-1, TRBJ2-7)
CASSLTGSGYEQYF

SEQ ID NO: 422545 - protein, 13 aa, Homo sapiens
  CDR3 for alpha chain variable domain of TCR clone 211273 (TRAV12-3, TRAJ7)
CAMSASGNNRLAF

SEQ ID NO: 422546 - protein, 14 aa, Homo sapiens
  CDR3 for beta chain variable domain of TCR clone 211273 (TRBV13, TRBJ2-5)
CASSLGRRGETQYF

SEQ ID NO: 422547 - protein, 13 aa, Homo sapiens
  CDR3 for alpha chain variable domain of TCR clone 211274 (TRAV27, TRAJ45)
CRSSGGGADGLTF

SEQ ID NO: 422548 - protein, 15 aa, Homo sapiens
  CDR3 for beta chain variable domain of TCR clone 211274 (TRBV12-5, TRBJ2-2)
CASGRLGGNTGELFF

SEQ ID NO: 422549 - protein, 14 aa, Homo sapiens
  CDR3 for alpha chain variable domain of TCR clone 211275 (TRAV12-2, TRAJ22)
CAVRFSGSARQLPF

SEQ ID NO: 422550 - protein, 13 aa, Homo sapiens
  CDR3 for beta chain variable domain of TCR clone 211275 (TRBV6-1, TRBJ2-1)
CASTGTGLNEQFF

SEQ ID NO: 422551 - protein, 12 aa, Homo sapiens
  CDR3 for alpha chain variable domain of TCR clone 211276 (TRAV12-1, TRAJ40)
CVVYSGTYKYIF

SEQ ID NO: 422552 - protein, 17 aa, Homo sapiens
  CDR3 for beta chain variable domain of TCR clone 211276 (TRBV7-6, TRBJ2-1)
CIAVPAAWGGGADEQFF

SEQ ID NO: 422553 - protein, 16 aa, Homo sapiens
  CDR3 for alpha chain variable domain of TCR clone 211277 (TRAV12-1, TRAJ43)
CVVNPHRFGAGTRLTV

SEQ ID NO: 422554 - protein, 12 aa, Homo sapiens
  CDR3 for beta chain variable domain of TCR clone 211277 (TRBV14, TRBJ2-7)
CASSSLKGEQYF

SEQ ID NO: 422555 - protein, 13 aa, Homo sapiens
  CDR3 for alpha chain variable domain of TCR clone 211278 (TRAV2, TRAJ12)
CAVGADSRYKLIF

SEQ ID NO: 422556 - protein, 13 aa, Homo sapiens
  CDR3 for beta chain variable domain of TCR clone 211278 (TRBV20-1, TRBJ2-1)
CSARSSPRDEQFF

SEQ ID NO: 422557 - protein, 14 aa, Homo sapiens
  CDR3 for alpha chain variable domain of TCR clone 211279 (TRAV8-2, TRAJ4)
CVVSPSGGYNKLIF

SEQ ID NO: 422558 - protein, 14 aa, Homo sapiens
  CDR3 for beta chain variable domain of TCR clone 211279 (TRBV10-3, TRBJ2-2)
RAISEVSHSGELFF

SEQ ID NO: 422559 - protein, 11 aa, Homo sapiens
  CDR3 for alpha chain variable domain of TCR clone 211280 (TRAV12-1, TRAJ43)
CVEYDNNDMGF

SEQ ID NO: 422560 - protein, 13 aa, Homo sapiens
  CDR3 for beta chain variable domain of TCR clone 211280 (TRBV7-9, TRBJ1-2)
CASSLKQNYGYTF

SEQ ID NO: 422561 - protein, 20 aa, Homo sapiens
  CDR3 for alpha chain variable domain of TCR clone 211281 (TRAV12-1, TRAJ42)
SSVIQPPTSVKGGSQGNLIF

SEQ ID NO: 422562 - protein, 18 aa, Homo sapiens
  CDR3 for beta chain variable domain of TCR clone 211281 (TRBV11-2, TRBJ2-3)
CASSLGWASRGAPNTQYF

SEQ ID NO: 422563 - protein, 14 aa, Homo sapiens
  CDR3 for alpha chain variable domain of TCR clone 211282 (TRAV1-1, TRAJ27)
CAVIYNTNSGKSTF

SEQ ID NO: 422564 - protein, 15 aa, Homo sapiens
  CDR3 for beta chain variable domain of TCR clone 211282 (TRBV7-2, TRBJ2-1)
CASSSGRAGGNEQFF

SEQ ID NO: 422565 - protein, 13 aa, Homo sapiens
  CDR3 for alpha chain variable domain of TCR clone 211283 (TRAV13-2, TRAJ13)
CAERPGGYQKVTF

SEQ ID NO: 422566 - protein, 16 aa, Homo sapiens
  CDR3 for beta chain variable domain of TCR clone 211283 (TRBV18, TRBJ2-5)
CASSPPLSGGAKTQYF

SEQ ID NO: 422567 - protein, 17 aa, Homo sapiens
  CDR3 for alpha chain variable domain of TCR clone 211284 (TRAV3, TRAJ42)
CAVRDRDYGGSQGNLLF

SEQ ID NO: 422568 - protein, 14 aa, Homo sapiens
  CDR3 for beta chain variable domain of TCR clone 211284 (TRBV25-1, TRBJ1-1)
CASTHLGGNTEAFF

SEQ ID NO: 422569 - protein, 16 aa, Homo sapiens
  CDR3 for alpha chain variable domain of TCR clone 211285 (TRAV26-1, TRAJ38)
CIVRVSGAGNNRKLIC

SEQ ID NO: 422570 - protein, 13 aa, Homo sapiens
  CDR3 for beta chain variable domain of TCR clone 211285 (TRBV14, TRBJ1-2)
CASSQDRRRGYTF

SEQ ID NO: 422571 - protein, 11 aa, Homo sapiens
  CDR3 for alpha chain variable domain of TCR clone 211286 (TRAV17, TRAJ31)
CATSNNARLMF

SEQ ID NO: 422572 - protein, 16 aa, Homo sapiens
  CDR3 for beta chain variable domain of TCR clone 211286 (TRBV15, TRBJ2-1)
CHPQRVGLAGNNEQFF

SEQ ID NO: 422573 - protein, 18 aa, Homo sapiens
  CDR3 for alpha chain variable domain of TCR clone 211287 (TRAV12-3, TRAJ52)
CAMSRTKAGSTSYGKLTF

SEQ ID NO: 422574 - protein, 17 aa, Homo sapiens
  CDR3 for beta chain variable domain of TCR clone 211287 (TRBV7-3, TRBJ2-3)
CASSLMKRMRGADTQYF

SEQ ID NO: 422575 - protein, 14 aa, Homo sapiens
  CDR3 for alpha chain variable domain of TCR clone 211288 (TRAV8-4, TRAJ16)
CAVSPVGRWPDAAL

SEQ ID NO: 422576 - protein, 15 aa, Homo sapiens
  CDR3 for beta chain variable domain of TCR clone 211288 (TRBV7-3, TRBJ1-6)
CASSLGRGAGSPLHF

SEQ ID NO: 422577 - protein, 12 aa, Homo sapiens
  CDR3 for alpha chain variable domain of TCR clone 211289 (TRAV12-3, TRAJ17)
CAMTLTGNKLTF

SEQ ID NO: 422578 - protein, 12 aa, Homo sapiens
  CDR3 for beta chain variable domain of TCR clone 211289 (TRBV7-2, TRBJ2-2)
CATQIVTGELFF

SEQ ID NO: 422579 - protein, 12 aa, Homo sapiens
  CDR3 for alpha chain variable domain of TCR clone 211290 (TRAV13-1, TRAJ53)
AASGGSNYKLTF

SEQ ID NO: 422580 - protein, 13 aa, Homo sapiens
  CDR3 for beta chain variable domain of TCR clone 211290 (TRBV7-3, TRBJ2-1)
CASSLDSYNEQFF

SEQ ID NO: 422581 - protein, 15 aa, Homo sapiens
  CDR3 for alpha chain variable domain of TCR clone 211291 (TRAV25, TRAJ53)
CPTSNSGGSNYKLTF

SEQ ID NO: 422582 - protein, 13 aa, Homo sapiens
  CDR3 for beta chain variable domain of TCR clone 211291 (TRBV11-2, TRBJ2-3)
CASSRLGTDTQYF

SEQ ID NO: 422583 - protein, 10 aa, Homo sapiens
  CDR3 for alpha chain variable domain of TCR clone 211292 (TRAV38-1, TRAJ53)
CAFMKRGLES

SEQ ID NO: 422584 - protein, 13 aa, Homo sapiens
  CDR3 for beta chain variable domain of TCR clone 211292 (TRBV19, TRBJ2-7)
CASSPRQSYEQYF

SEQ ID NO: 422585 - protein, 15 aa, Homo sapiens
  CDR3 for alpha chain variable domain of TCR clone 211293 (TRAV26-1, TRAJ22)
CIVRVSFWFCKANEL

SEQ ID NO: 422586 - protein, 13 aa, Homo sapiens
  CDR3 for beta chain variable domain of TCR clone 211293 (TRBV7-9, TRBJ1-2)
CASSLKQNYGYTF

SEQ ID NO: 422587 - protein, 22 aa, Homo sapiens
  CDR3 for alpha chain variable domain of TCR clone 211294 (TRAV27, TRAJ38)
CAGRFNAGNNHIQNPDPAVYQL

SEQ ID NO: 422588 - protein, 13 aa, Homo sapiens
  CDR3 for beta chain variable domain of TCR clone 211294 (TRBV7-2, TRBJ2-7)
CASSSPSGSEQYF

SEQ ID NO: 422589 - protein, 15 aa, Homo sapiens
  CDR3 for alpha chain variable domain of TCR clone 211295 (TRAV6, TRAJ4)
CALGGFSGGYNTLIF

SEQ ID NO: 422590 - protein, 13 aa, Homo sapiens
  CDR3 for beta chain variable domain of TCR clone 211295 (TRBV19, TRBJ1-2)
CASSVPGQDGYTF

SEQ ID NO: 422591 - protein, 10 aa, Homo sapiens
  CDR3 for alpha chain variable domain of TCR clone 211296 (TRAV13-1, TRAJ27)
CAPLARQINL

SEQ ID NO: 422592 - protein, 17 aa, Homo sapiens
  CDR3 for beta chain variable domain of TCR clone 211296 (TRBV7-8, TRBJ2-6)
CASSAGTGGAGANVLTF

SEQ ID NO: 422593 - protein, 14 aa, Homo sapiens
  CDR3 for alpha chain variable domain of TCR clone 211297 (TRAV8-2, TRAJ4)
CVVSPSGGYNKLIF

SEQ ID NO: 422594 - protein, 17 aa, Homo sapiens
  CDR3 for beta chain variable domain of TCR clone 211297 (TRBV25-1, TRBJ2-1)
CASSAYGQGRGVYEQFF

SEQ ID NO: 422595 - protein, 13 aa, Homo sapiens
  CDR3 for alpha chain variable domain of TCR clone 211298 (TRAV12-1, TRAJ33)
CGDAPDSNYQLIW

SEQ ID NO: 422596 - protein, 13 aa, Homo sapiens
  CDR3 for beta chain variable domain of TCR clone 211298 (TRBV7-2, TRBJ2-5)
CASGQTSVETQYF

SEQ ID NO: 422597 - protein, 15 aa, Homo sapiens
  CDR3 for alpha chain variable domain of TCR clone 211299 (TRAV27, TRAJ38)
CAARRNAGNNCKLIW

SEQ ID NO: 422598 - protein, 17 aa, Homo sapiens
  CDR3 for beta chain variable domain of TCR clone 211299 (TRBV20-1, TRBJ2-2)
CSASGSGQGGLTGELFF

SEQ ID NO: 422599 - protein, 21 aa, Homo sapiens
  CDR3 for alpha chain variable domain of TCR clone 211300 (TRAV8-3, TRAJ10)
CAVVHTHGRRKQTHLWDRHSA

SEQ ID NO: 422600 - protein, 10 aa, Homo sapiens
  CDR3 for beta chain variable domain of TCR clone 211300 (TRBV20-1, TRBJ2-5)
CSARFETQYF

SEQ ID NO: 422601 - protein, 15 aa, Homo sapiens
  CDR3 for alpha chain variable domain of TCR clone 211301 (TRAV12-3, TRAJ5)
CAMSGLGTGRRALTF

SEQ ID NO: 422602 - protein, 16 aa, Homo sapiens
  CDR3 for beta chain variable domain of TCR clone 211301 (TRBV20-1, TRBJ2-3)
CSARLQSAGAIDTQYF

SEQ ID NO: 422603 - protein, 13 aa, Homo sapiens
  CDR3 for alpha chain variable domain of TCR clone 211302 (TRAV12-1, TRAJ34)
CGEPLRNTDKLIF

SEQ ID NO: 422604 - protein, 20 aa, Homo sapiens
  CDR3 for beta chain variable domain of TCR clone 211302 (TRBV19, TRBJ2-1)
CASSISRTVTSPRLNNEQFF

SEQ ID NO: 422605 - protein, 16 aa, Homo sapiens
  CDR3 for alpha chain variable domain of TCR clone 211303 (TRAV1-2, TRAJ10)
CAVRGVLTGGGNKLTF

SEQ ID NO: 422606 - protein, 12 aa, Homo sapiens
  CDR3 for beta chain variable domain of TCR clone 211303 (TRBV12-4, TRBJ2-3)
CASSSTTDTQYF

SEQ ID NO: 422607 - protein, 15 aa, Homo sapiens
  CDR3 for alpha chain variable domain of TCR clone 211304 (TRAV8-4, TRAJ8)
CAVSDLNTGFQKLVF

SEQ ID NO: 422608 - protein, 17 aa, Homo sapiens
  CDR3 for beta chain variable domain of TCR clone 211304 (TRBV13, TRBJ2-3)
CASSLSRVAGGRNTQYF

SEQ ID NO: 422609 - protein, 13 aa, Homo sapiens
  CDR3 for alpha chain variable domain of TCR clone 211305 (TRAV12-1, TRAJ6)
CVVFPGGSYIPTF

SEQ ID NO: 422610 - protein, 18 aa, Homo sapiens
  CDR3 for beta chain variable domain of TCR clone 211305 (TRBV28, TRBJ1-2)
CASRQQQGKRGSNYGYTF

SEQ ID NO: 422611 - protein, 13 aa, Homo sapiens
  CDR3 for alpha chain variable domain of TCR clone 211306 (TRAV21, TRAJ20)
CAVGLRVDYKLSF

SEQ ID NO: 422612 - protein, 16 aa, Homo sapiens
  CDR3 for beta chain variable domain of TCR clone 211306 (TRBV10-3, TRBJ2-7)
CAISADFADRPYEQYF

SEQ ID NO: 422613 - protein, 15 aa, Homo sapiens
  CDR3 for alpha chain variable domain of TCR clone 211307 (TRAV14/DV4, TRAJ12)
CAMREERDRSYKLIF

SEQ ID NO: 422614 - protein, 16 aa, Homo sapiens
  CDR3 for beta chain variable domain of TCR clone 211307 (TRBV11-2, TRBJ1-2)
CASSLDTGGADYGYTF

SEQ ID NO: 422615 - protein, 13 aa, Homo sapiens
  CDR3 for alpha chain variable domain of TCR clone 211308 (TRAV35, TRAJ42)
CAGFPGSQGNLIF

SEQ ID NO: 422616 - protein, 14 aa, Homo sapiens
  CDR3 for beta chain variable domain of TCR clone 211308 (TRBV19, TRBJ2-1)
CASPTFVLSGEEFF

SEQ ID NO: 422617 - protein, 13 aa, Homo sapiens
  CDR3 for alpha chain variable domain of TCR clone 211309 (TRAV21, TRAJ20)
CAVGLRVDYKLSF

SEQ ID NO: 422618 - protein, 14 aa, Homo sapiens
  CDR3 for beta chain variable domain of TCR clone 211309 (TRBV7-9, TRBJ2-5)
CASSLDTAQETQYF

SEQ ID NO: 422619 - protein, 13 aa, Homo sapiens
  CDR3 for alpha chain variable domain of TCR clone 211310 (TRAV12-1, TRAJ26)
CVVRRNYGQNFVF

SEQ ID NO: 422620 - protein, 14 aa, Homo sapiens
  CDR3 for beta chain variable domain of TCR clone 211310 (TRBV7-9, TRBJ2-5)
CASSLDTAQETQYF

SEQ ID NO: 422621 - protein, 14 aa, Homo sapiens
  CDR3 for alpha chain variable domain of TCR clone 211311 (TRAV23/DV6, TRAJ37)
CAASTSSNTGKLFF

SEQ ID NO: 422622 - protein, 13 aa, Homo sapiens
  CDR3 for beta chain variable domain of TCR clone 211311 (TRBV7-7, TRBJ1-1)
CASSLGANTEAFF

SEQ ID NO: 422623 - protein, 13 aa, Homo sapiens
  CDR3 for alpha chain variable domain of TCR clone 211312 (TRAV29/DV5, TRAJ31)
YAASRNNNARLMF

SEQ ID NO: 422624 - protein, 12 aa, Homo sapiens
  CDR3 for beta chain variable domain of TCR clone 211312 (TRBV14, TRBJ2-7)
CASSLYKDEQYF

SEQ ID NO: 422625 - protein, 14 aa, Homo sapiens
  CDR3 for alpha chain variable domain of TCR clone 211313 (TRAV13-1, TRAJ24)
CAASRTDSWGKLQF

SEQ ID NO: 422626 - protein, 17 aa, Homo sapiens
  CDR3 for beta chain variable domain of TCR clone 211313 (TRBV7-9, TRBJ2-3)
CASSPTVAGDLTDTQYF

SEQ ID NO: 422627 - protein, 16 aa, Homo sapiens
  CDR3 for alpha chain variable domain of TCR clone 211314 (TRAV12-3, TRAJ28)
CAMRANSGAGSYQLTF

SEQ ID NO: 422628 - protein, 13 aa, Homo sapiens
  CDR3 for beta chain variable domain of TCR clone 211314 (TRBV12-4, TRBJ1-2)
CASSLRQGKGYTF

SEQ ID NO: 422629 - protein, 16 aa, Homo sapiens
  CDR3 for alpha chain variable domain of TCR clone 211315 (TRAV30, TRAJ24)
CGTEILDADSWGKFQF

SEQ ID NO: 422630 - protein, 15 aa, Homo sapiens
  CDR3 for beta chain variable domain of TCR clone 211315 (TRBV7-9, TRBJ1-4)
CASSARTGGNEKLFF

SEQ ID NO: 422631 - protein, 17 aa, Homo sapiens
  CDR3 for alpha chain variable domain of TCR clone 211316 (TRAV3, TRAJ6)
CAVRDGPRAGGSYIPTF

SEQ ID NO: 422632 - protein, 16 aa, Homo sapiens
  CDR3 for beta chain variable domain of TCR clone 211316 (TRBV5-1, TRBJ1-1)
CAGSKTGTEVGTEAFF

SEQ ID NO: 422633 - protein, 13 aa, Homo sapiens
  CDR3 for alpha chain variable domain of TCR clone 211317 (TRAV12-2, TRAJ42)
CAVKRGSQGNLIF

SEQ ID NO: 422634 - protein, 15 aa, Homo sapiens
  CDR3 for beta chain variable domain of TCR clone 211317 (TRBV28, TRBJ2-1)
CASSIIAGGRSEQFF

SEQ ID NO: 422635 - protein, 12 aa, Homo sapiens
  CDR3 for alpha chain variable domain of TCR clone 211318 (TRAV1-1, TRAJ39)
CAVPVVGNMLTF

SEQ ID NO: 422636 - protein, 13 aa, Homo sapiens
  CDR3 for beta chain variable domain of TCR clone 211318 (TRBV7-9, TRBJ2-1)
CASSSSKFNEQFF

SEQ ID NO: 422637 - protein, 14 aa, Homo sapiens
  CDR3 for alpha chain variable domain of TCR clone 211319 (TRAV13-1, TRAJ35)
CAASKGGSGNVLHC

SEQ ID NO: 422638 - protein, 16 aa, Homo sapiens
  CDR3 for beta chain variable domain of TCR clone 211319 (TRBV2, TRBJ1-4)
CASNLLQGATNEKLFF

SEQ ID NO: 422639 - protein, 15 aa, Homo sapiens
  CDR3 for alpha chain variable domain of TCR clone 211320 (TRAV26-1, TRAJ56)
CIVRVDNGANSKLTF

SEQ ID NO: 422640 - protein, 15 aa, Homo sapiens
  CDR3 for beta chain variable domain of TCR clone 211320 (TRBV20-1, TRBJ2-7)
CSASDPTEVGHEQYF

SEQ ID NO: 422641 - protein, 16 aa, Homo sapiens
  CDR3 for alpha chain variable domain of TCR clone 211321 (TRAV30, TRAJ24)
CGTEIVDADSWGKFQF

SEQ ID NO: 422642 - protein, 12 aa, Homo sapiens
  CDR3 for beta chain variable domain of TCR clone 211321 (TRBV29-1, TRBJ1-3)
CSTRDSGNTIYF

SEQ ID NO: 422643 - protein, 15 aa, Homo sapiens
  CDR3 for alpha chain variable domain of TCR clone 211322 (TRAV3, TRAJ4)
CAVRDGTGGYNKLMF

SEQ ID NO: 422644 - protein, 13 aa, Homo sapiens
  CDR3 for beta chain variable domain of TCR clone 211322 (TRBV12-5, TRBJ1-2)
CASGVRTGNGYTF

SEQ ID NO: 422645 - protein, 14 aa, Homo sapiens
  CDR3 for alpha chain variable domain of TCR clone 211323 (TRAV23/DV6, TRAJ37)
CAASTSSNTGKLIF

SEQ ID NO: 422646 - protein, 14 aa, Homo sapiens
  CDR3 for beta chain variable domain of TCR clone 211323 (TRBV5-1, TRBJ2-3)
CASRGQTSTDTQYL

SEQ ID NO: 422647 - protein, 13 aa, Homo sapiens
  CDR3 for alpha chain variable domain of TCR clone 211324 (TRAV38-2/DV8, TRAJ34)
CAYRTWNTDKLIF

SEQ ID NO: 422648 - protein, 12 aa, Homo sapiens
  CDR3 for beta chain variable domain of TCR clone 211324 (TRBV7-9, TRBJ2-7)
CASSIKREEQYF

SEQ ID NO: 422649 - protein, 18 aa, Homo sapiens
  CDR3 for alpha chain variable domain of TCR clone 211325 (TRAV21, TRAJ52)
RAVRPSPAGGTSYGKLTF

SEQ ID NO: 422650 - protein, 17 aa, Homo sapiens
  CDR3 for beta chain variable domain of TCR clone 211325 (TRBV13, TRBJ2-3)
CASSLSRVAGGRNTKYF

SEQ ID NO: 422651 - protein, 13 aa, Homo sapiens
  CDR3 for alpha chain variable domain of TCR clone 211326 (TRAV2, TRAJ47)
CAVDREYGNKLVF

SEQ ID NO: 422652 - protein, 17 aa, Homo sapiens
  CDR3 for beta chain variable domain of TCR clone 211326 (TRBV15, TRBJ1-5)
CATSRVKGVYSNQPQHF

SEQ ID NO: 422653 - protein, 14 aa, Homo sapiens
  CDR3 for alpha chain variable domain of TCR clone 211327 (TRAV17, TRAJ34)
CATDSLEGTDKLIF

SEQ ID NO: 422654 - protein, 14 aa, Homo sapiens
  CDR3 for beta chain variable domain of TCR clone 211327 (TRBV12-5, TRBJ2-5)
CASGSRAHQETQYF

SEQ ID NO: 422655 - protein, 11 aa, Homo sapiens
  CDR3 for alpha chain variable domain of TCR clone 211328 (TRAV2, TRAJ37)
CGVDNTGKLIF

SEQ ID NO: 422656 - protein, 16 aa, Homo sapiens
  CDR3 for beta chain variable domain of TCR clone 211328 (TRBV9, TRBJ2-1)
CASSVGGGGNYNEQFF

SEQ ID NO: 422657 - protein, 14 aa, Homo sapiens
  CDR3 for alpha chain variable domain of TCR clone 211329 (TRAV26-1, TRAJ22)
CIVRVYGSARQLTF

SEQ ID NO: 422658 - protein, 17 aa, Homo sapiens
  CDR3 for beta chain variable domain of TCR clone 211329 (TRBV7-3, TRBJ2-3)
CASSPGGLAGFGDTQHF

SEQ ID NO: 422659 - protein, 11 aa, Homo sapiens
  CDR3 for alpha chain variable domain of TCR clone 211330 (TRAV3, TRAJ21)
CAVGNFNKFYF

SEQ ID NO: 422660 - protein, 16 aa, Homo sapiens
  CDR3 for beta chain variable domain of TCR clone 211330 (TRBV7-6, TRBJ2-1)
CASSAPGPSSYNAQFF

SEQ ID NO: 422661 - protein, 16 aa, Homo sapiens
  CDR3 for alpha chain variable domain of TCR clone 211331 (TRAV4, TRAJ37)
CLVGWFGSSNTGKLIF

SEQ ID NO: 422662 - protein, 12 aa, Homo sapiens
  CDR3 for beta chain variable domain of TCR clone 211331 (TRBV12-4, TRBJ1-2)
CASSFIWLHLRF

SEQ ID NO: 422663 - protein, 12 aa, Homo sapiens
  CDR3 for alpha chain variable domain of TCR clone 211332 (TRAV12-2, TRAJ48)
CAVYFGNEKLTF

SEQ ID NO: 422664 - protein, 15 aa, Homo sapiens
  CDR3 for beta chain variable domain of TCR clone 211332 (TRBV5-1, TRBJ1-2)
CASSPGDRGSYGYTF

SEQ ID NO: 422665 - protein, 16 aa, Homo sapiens
  CDR3 for alpha chain variable domain of TCR clone 211333 (TRAV3, TRAJ37)
CAVRPHGSGNTGQLIF

SEQ ID NO: 422666 - protein, 11 aa, Homo sapiens
  CDR3 for beta chain variable domain of TCR clone 211333 (TRBV10-3, TRBJ2-7)
CAISEGLEQYF

SEQ ID NO: 422667 - protein, 14 aa, Homo sapiens
  CDR3 for alpha chain variable domain of TCR clone 211334 (TRAV12-2, TRAJ40)
CAVKIPSGTYKYIF

SEQ ID NO: 422668 - protein, 17 aa, Homo sapiens
  CDR3 for beta chain variable domain of TCR clone 211334 (TRBV20-1, TRBJ1-5)
CSASLSPGQGGNQPQHF

SEQ ID NO: 422669 - protein, 14 aa, Homo sapiens
  CDR3 for alpha chain variable domain of TCR clone 211335 (TRAV9-2, TRAJ39)
CALYIYNSGNMLTF

SEQ ID NO: 422670 - protein, 12 aa, Homo sapiens
  CDR3 for beta chain variable domain of TCR clone 211335 (TRBV29-1, TRBJ2-3)
CSVTGGADTQYF

SEQ ID NO: 422671 - protein, 13 aa, Homo sapiens
  CDR3 for alpha chain variable domain of TCR clone 211336 (TRAV20, TRAJ20)
CAVRWVRDYKLSF

SEQ ID NO: 422672 - protein, 13 aa, Homo sapiens
  CDR3 for beta chain variable domain of TCR clone 211336 (TRBV19, TRBJ2-2)
CQYGHGEHRELFF

SEQ ID NO: 422673 - protein, 14 aa, Homo sapiens
  CDR3 for alpha chain variable domain of TCR clone 211337 (TRAV2, TRAJ9)
CAVEDRSGGFKTIF

SEQ ID NO: 422674 - protein, 13 aa, Homo sapiens
  CDR3 for beta chain variable domain of TCR clone 211337 (TRBV12-4, TRBJ2-2)
CASSPLPPGELFF

SEQ ID NO: 422675 - protein, 13 aa, Homo sapiens
  CDR3 for alpha chain variable domain of TCR clone 211338 (TRAV38-2/DV8, TRAJ45)
CASVGGGADGLTF

SEQ ID NO: 422676 - protein, 13 aa, Homo sapiens
  CDR3 for beta chain variable domain of TCR clone 211338 (TRBV29-1, TRBJ2-1)
CSVEGGRVNEQFF

SEQ ID NO: 422677 - protein, 11 aa, Homo sapiens
  CDR3 for alpha chain variable domain of TCR clone 211339 (TRAV1-1, TRAJ23)
CVVRQGGKLIF

SEQ ID NO: 422678 - protein, 20 aa, Homo sapiens
  CDR3 for beta chain variable domain of TCR clone 211339 (TRBV7-8, TRBJ2-2)
CARSHLFPGPTIHITGELFF

SEQ ID NO: 422679 - protein, 15 aa, Homo sapiens
  CDR3 for alpha chain variable domain of TCR clone 211340 (TRAV25, TRAJ53)
CSTSNSGGSNYKLTF

SEQ ID NO: 422680 - protein, 14 aa, Homo sapiens
  CDR3 for beta chain variable domain of TCR clone 211340 (TRBV11-2, TRBJ2-3)
CASSRLASTDTQYF

SEQ ID NO: 422681 - protein, 11 aa, Homo sapiens
  CDR3 for alpha chain variable domain of TCR clone 211341 (TRAV1-2, TRAJ21)
CALYNFNKFYF

SEQ ID NO: 422682 - protein, 14 aa, Homo sapiens
  CDR3 for beta chain variable domain of TCR clone 211341 (TRBV7-2, TRBJ1-1)
CASSFLTGTTEAFF

SEQ ID NO: 422683 - protein, 11 aa, Homo sapiens
  CDR3 for alpha chain variable domain of TCR clone 211342 (TRAV3, TRAJ21)
CAVGNFNKFYF

SEQ ID NO: 422684 - protein, 13 aa, Homo sapiens
  CDR3 for beta chain variable domain of TCR clone 211342 (TRBV20-1, TRBJ2-5)
SAVLEAFQETQYF

SEQ ID NO: 422685 - protein, 14 aa, Homo sapiens
  CDR3 for alpha chain variable domain of TCR clone 211343 (TRAV12-3, TRAJ10)
SHLPLTGGGNKLTF

SEQ ID NO: 422686 - protein, 13 aa, Homo sapiens
  CDR3 for beta chain variable domain of TCR clone 211343 (TRBV11-2, TRBJ1-4)
CASSLRPNEKLFF

SEQ ID NO: 422687 - protein, 12 aa, Homo sapiens
  CDR3 for alpha chain variable domain of TCR clone 211344 (TRAV12-3, TRAJ5)
CAMDTGRRALTF

SEQ ID NO: 422688 - protein, 17 aa, Homo sapiens
  CDR3 for beta chain variable domain of TCR clone 211344 (TRBV5-1, TRBJ2-5)
CASSPVALGQNQETQYF

SEQ ID NO: 422689 - protein, 11 aa, Homo sapiens
  CDR3 for alpha chain variable domain of TCR clone 211345 (TRAV13-1, TRAJ40)
CAASGLRNLQI

SEQ ID NO: 422690 - protein, 13 aa, Homo sapiens
  CDR3 for beta chain variable domain of TCR clone 211345 (TRBV7-9, TRBJ2-3)
CASSPGSTDTQYF

SEQ ID NO: 422691 - protein, 16 aa, Homo sapiens
  CDR3 for alpha chain variable domain of TCR clone 211346 (TRAV26-1, TRAJ45)
CIVEKYSGGGADGLTF

SEQ ID NO: 422692 - protein, 12 aa, Homo sapiens
  CDR3 for beta chain variable domain of TCR clone 211346 (TRBV11-2, TRBJ2-2)
CASSLPTGELFF

SEQ ID NO: 422693 - protein, 11 aa, Homo sapiens
  CDR3 for alpha chain variable domain of TCR clone 211347 (TRAV12-3, TRAJ43)
FAMSVSNDMRF

SEQ ID NO: 422694 - protein, 16 aa, Homo sapiens
  CDR3 for beta chain variable domain of TCR clone 211347 (TRBV20-1, TRBJ2-1)
CSARDSLGAVYNEQFF

SEQ ID NO: 422695 - protein, 12 aa, Homo sapiens
  CDR3 for alpha chain variable domain of TCR clone 211348 (TRAV20, TRAJ20)
CCANPHDYKLSF

SEQ ID NO: 422696 - protein, 12 aa, Homo sapiens
  CDR3 for beta chain variable domain of TCR clone 211348 (TRBV18, TRBJ2-7)
CASSPNNNAQYF

SEQ ID NO: 422697 - protein, 16 aa, Homo sapiens
  CDR3 for alpha chain variable domain of TCR clone 211349 (TRAV1-1, TRAJ29)
CAVRSTRNSRNTPLVF

SEQ ID NO: 422698 - protein, 16 aa, Homo sapiens
  CDR3 for beta chain variable domain of TCR clone 211349 (TRBV27, TRBJ1-1)
CASSSRGRTGYTEAFF

SEQ ID NO: 422699 - protein, 10 aa, Homo sapiens
  CDR3 for alpha chain variable domain of TCR clone 211350 (TRAV2, TRAJ34)
CAVVDDKLIF

SEQ ID NO: 422700 - protein, 13 aa, Homo sapiens
  CDR3 for beta chain variable domain of TCR clone 211350 (TRBV7-3, TRBJ1-1)
CASSLTQGTEAFF

SEQ ID NO: 422701 - protein, 17 aa, Homo sapiens
  CDR3 for alpha chain variable domain of TCR clone 211351 (TRAV17, TRAJ52)
CATDRNVGGTSYGKLTF

SEQ ID NO: 422702 - protein, 16 aa, Homo sapiens
  CDR3 for beta chain variable domain of TCR clone 211351 (TRBV6-1, TRBJ2-5)
CASSETLDRGAETQYF

SEQ ID NO: 422703 - protein, 16 aa, Homo sapiens
  CDR3 for alpha chain variable domain of TCR clone 211352 (TRAV27, TRAJ48)
TAAQPGDTGLYLPLTF

SEQ ID NO: 422704 - protein, 15 aa, Homo sapiens
  CDR3 for beta chain variable domain of TCR clone 211352 (TRBV20-1, TRBJ2-7)
CSAESGTSGAYEQYF

SEQ ID NO: 422705 - protein, 11 aa, Homo sapiens
  CDR3 for alpha chain variable domain of TCR clone 211353 (TRAV24, TRAJ43)
CAFSNNNDMRF

SEQ ID NO: 422706 - protein, 15 aa, Homo sapiens
  CDR3 for beta chain variable domain of TCR clone 211353 (TRBV27, TRBJ1-5)
CASIFNRGSNQPQHF

SEQ ID NO: 422707 - protein, 11 aa, Homo sapiens
  CDR3 for alpha chain variable domain of TCR clone 211354 (TRAV17, TRAJ9)
CATTGGFKTIF

SEQ ID NO: 422708 - protein, 13 aa, Homo sapiens
  CDR3 for beta chain variable domain of TCR clone 211354 (TRBV7-2, TRBJ2-2)
CASSLAVTGELFF

SEQ ID NO: 422709 - protein, 16 aa, Homo sapiens
  CDR3 for alpha chain variable domain of TCR clone 211355 (TRAV38-1, TRAJ56)
CAFMKRQTGANSKLTF

SEQ ID NO: 422710 - protein, 13 aa, Homo sapiens
  CDR3 for beta chain variable domain of TCR clone 211355 (TRBV7-9, TRBJ2-3)
CASSPGSTDTQYF

SEQ ID NO: 422711 - protein, 18 aa, Homo sapiens
  CDR3 for alpha chain variable domain of TCR clone 211356 (TRAV12-3, TRAJ52)
CAMSVGGAGGTSYGKLTF

SEQ ID NO: 422712 - protein, 14 aa, Homo sapiens
  CDR3 for beta chain variable domain of TCR clone 211356 (TRBV12-4, TRBJ2-1)
CASSLGQGASEQFF

SEQ ID NO: 422713 - protein, 10 aa, Homo sapiens
  CDR3 for alpha chain variable domain of TCR clone 211357 (TRAV13-2, TRAJ49)
CADTGNQFYF

SEQ ID NO: 422714 - protein, 13 aa, Homo sapiens
  CDR3 for beta chain variable domain of TCR clone 211357 (TRBV10-3, TRBJ1-2)
CASSERDSYGYTF

SEQ ID NO: 422715 - protein, 22 aa, Homo sapiens
  CDR3 for alpha chain variable domain of TCR clone 211358 (TRAV21, )
CAVRQDAGNNHIQKPDPAVYQL

SEQ ID NO: 422716 - protein, 16 aa, Homo sapiens
  CDR3 for beta chain variable domain of TCR clone 211358 (TRBV4-2, TRBJ1-1)
CVSRPLDGGGDTEAFF

SEQ ID NO: 422717 - protein, 11 aa, Homo sapiens
  CDR3 for alpha chain variable domain of TCR clone 211359 (TRAV29/DV5, TRAJ43)
CVAKTNNDMRF

SEQ ID NO: 422718 - protein, 14 aa, Homo sapiens
  CDR3 for beta chain variable domain of TCR clone 211359 (TRBV11-2, TRBJ2-7)
CASSPSTTSYEQYF

SEQ ID NO: 422719 - protein, 14 aa, Homo sapiens
  CDR3 for alpha chain variable domain of TCR clone 211360 (TRAV12-1, TRAJ17)
CVVNYKAAGNKLTF

SEQ ID NO: 422720 - protein, 13 aa, Homo sapiens
  CDR3 for beta chain variable domain of TCR clone 211360 (TRBV11-2, TRBJ2-5)
CASSFSSQETQYF

SEQ ID NO: 422721 - protein, 12 aa, Homo sapiens
  CDR3 for alpha chain variable domain of TCR clone 211361 (TRAV12-1, TRAJ40)
CVVYSGTYKYIF

SEQ ID NO: 422722 - protein, 16 aa, Homo sapiens
  CDR3 for beta chain variable domain of TCR clone 211361 (TRBV15, TRBJ1-2)
CATSRGPRTGGGGYTF

SEQ ID NO: 422723 - protein, 15 aa, Homo sapiens
  CDR3 for alpha chain variable domain of TCR clone 211362 (TRAV21, TRAJ40)
CPVRPQTSGTYKYIF

SEQ ID NO: 422724 - protein, 13 aa, Homo sapiens
  CDR3 for beta chain variable domain of TCR clone 211362 (TRBV7-2, TRBJ2-2)
CASSSVRAGELFF

SEQ ID NO: 422725 - protein, 14 aa, Homo sapiens
  CDR3 for alpha chain variable domain of TCR clone 211363 (TRAV8-4, TRAJ38)
CARLNAGNNRKLIW

SEQ ID NO: 422726 - protein, 16 aa, Homo sapiens
  CDR3 for beta chain variable domain of TCR clone 211363 (TRBV12-4, TRBJ2-5)
CASSSFVRGRQETQYF

SEQ ID NO: 422727 - protein, 11 aa, Homo sapiens
  CDR3 for alpha chain variable domain of TCR clone 211364 (TRAV1-1, TRAJ23)
CAVRQGGKLIF

SEQ ID NO: 422728 - protein, 16 aa, Homo sapiens
  CDR3 for beta chain variable domain of TCR clone 211364 (TRBV11-2, TRBJ2-7)
CASSLAPTGVNYEQYF

SEQ ID NO: 422729 - protein, 15 aa, Homo sapiens
  CDR3 for alpha chain variable domain of TCR clone 211365 (TRAV17, TRAJ10)
CATVLLTGGGNKLPF

SEQ ID NO: 422730 - protein, 16 aa, Homo sapiens
  CDR3 for beta chain variable domain of TCR clone 211365 (TRBV7-9, TRBJ2-1)
CASSDVAGGSYNEQFF

SEQ ID NO: 422731 - protein, 11 aa, Homo sapiens
  CDR3 for alpha chain variable domain of TCR clone 211366 (TRAV1-2, TRAJ20)
CAVSNDYKLSF

SEQ ID NO: 422732 - protein, 16 aa, Homo sapiens
  CDR3 for beta chain variable domain of TCR clone 211366 (TRBV29-1, TRBJ2-6)
CSVEDITYSGANVLTV

SEQ ID NO: 422733 - protein, 12 aa, Homo sapiens
  CDR3 for alpha chain variable domain of TCR clone 211367 (TRAV2, TRAJ9)
CAVGAGGFNTIF

SEQ ID NO: 422734 - protein, 16 aa, Homo sapiens
  CDR3 for beta chain variable domain of TCR clone 211367 (TRBV13, TRBJ2-2)
CASSPRTGEHTGELVF

SEQ ID NO: 422735 - protein, 16 aa, Homo sapiens
  CDR3 for alpha chain variable domain of TCR clone 211368 (TRAV16, TRAJ4)
CALSRMFSGGYNKLIF

SEQ ID NO: 422736 - protein, 14 aa, Homo sapiens
  CDR3 for beta chain variable domain of TCR clone 211368 (TRBV4-1, TRBJ2-2)
CASSQAANTGELFF

SEQ ID NO: 422737 - protein, 14 aa, Homo sapiens
  CDR3 for alpha chain variable domain of TCR clone 211369 (TRAV8-3, TRAJ4)
CAVGASGGYNKLIF

SEQ ID NO: 422738 - protein, 13 aa, Homo sapiens
  CDR3 for beta chain variable domain of TCR clone 211369 (TRBV5-7, TRBJ1-1)
CASSLFQNTEAFF

SEQ ID NO: 422739 - protein, 13 aa, Homo sapiens
  CDR3 for alpha chain variable domain of TCR clone 211370 (TRAV36/DV7, TRAJ33)
CAVDMDSNYQLIW

SEQ ID NO: 422740 - protein, 16 aa, Homo sapiens
  CDR3 for beta chain variable domain of TCR clone 211370 (TRBV15, TRBJ2-3)
RATRLSGGRAPDTQYF

SEQ ID NO: 422741 - protein, 14 aa, Homo sapiens
  CDR3 for alpha chain variable domain of TCR clone 211371 (TRAV38-1, TRAJ29)
CAFITPSGTTPLVF

SEQ ID NO: 422742 - protein, 14 aa, Homo sapiens
  CDR3 for beta chain variable domain of TCR clone 211371 (TRBV18, TRBJ2-7)
CASSPRRGAYEQYF

SEQ ID NO: 422743 - protein, 17 aa, Homo sapiens
  CDR3 for alpha chain variable domain of TCR clone 211372 (TRAV4, )
CLVDIQNPDPAVYQLRD

SEQ ID NO: 422744 - protein, 16 aa, Homo sapiens
  CDR3 for beta chain variable domain of TCR clone 211372 (TRBV19, TRBJ1-3)
CASSMDRALPGNTIYF

SEQ ID NO: 422745 - protein, 16 aa, Homo sapiens
  CDR3 for alpha chain variable domain of TCR clone 211373 (TRAV12-2, TRAJ10)
FAVNRVLTGGGNKLTF

SEQ ID NO: 422746 - protein, 14 aa, Homo sapiens
  CDR3 for beta chain variable domain of TCR clone 211373 (TRBV9, TRBJ2-1)
CASSVALAVNEQFF

SEQ ID NO: 422747 - protein, 12 aa, Homo sapiens
  CDR3 for alpha chain variable domain of TCR clone 211374 (TRAV3, TRAJ27)
CAVRDGAGKSTC

SEQ ID NO: 422748 - protein, 13 aa, Homo sapiens
  CDR3 for beta chain variable domain of TCR clone 211374 (TRBV10-3, TRBJ1-2)
CATNADLNYGYTF

SEQ ID NO: 422749 - protein, 13 aa, Homo sapiens
  CDR3 for alpha chain variable domain of TCR clone 211375 (TRAV12-3, TRAJ33)
CAMSVNSNYQLIW

SEQ ID NO: 422750 - protein, 15 aa, Homo sapiens
  CDR3 for beta chain variable domain of TCR clone 211375 (TRBV11-3, TRBJ2-5)
CASSDTSGGIKAQYF

SEQ ID NO: 422751 - protein, 15 aa, Homo sapiens
  CDR3 for alpha chain variable domain of TCR clone 211376 (TRAV23/DV6, TRAJ45)
CAASARGGGADGLTF

SEQ ID NO: 422752 - protein, 14 aa, Homo sapiens
  CDR3 for beta chain variable domain of TCR clone 211376 (TRBV4-1, TRBJ2-7)
CASRLTSGSYEQYF

SEQ ID NO: 422753 - protein, 15 aa, Homo sapiens
  CDR3 for alpha chain variable domain of TCR clone 211377 (TRAV8-3, TRAJ11)
CAVGLLNSGYSTLTF

SEQ ID NO: 422754 - protein, 15 aa, Homo sapiens
  CDR3 for beta chain variable domain of TCR clone 211377 (TRBV7-9, TRBJ2-2)
CASSPETGAGGELFF

SEQ ID NO: 422755 - protein, 14 aa, Homo sapiens
  CDR3 for alpha chain variable domain of TCR clone 211378 (TRAV9-2, TRAJ6)
CALSDPGGSYIPTF

SEQ ID NO: 422756 - protein, 15 aa, Homo sapiens
  CDR3 for beta chain variable domain of TCR clone 211378 (TRBV11-3, TRBJ2-3)
CASLKDGREGDTQYF

SEQ ID NO: 422757 - protein, 13 aa, Homo sapiens
  CDR3 for alpha chain variable domain of TCR clone 211379 (TRAV20, TRAJ21)
CAVEGYNFNKFYF

SEQ ID NO: 422758 - protein, 14 aa, Homo sapiens
  CDR3 for beta chain variable domain of TCR clone 211379 (TRBV10-2, TRBJ1-5)
CASSSTGRNQPQHF

SEQ ID NO: 422759 - protein, 13 aa, Homo sapiens
  CDR3 for alpha chain variable domain of TCR clone 211380 (TRAV21, TRAJ27)
CAARPGNAGKSTF

SEQ ID NO: 422760 - protein, 14 aa, Homo sapiens
  CDR3 for beta chain variable domain of TCR clone 211380 (TRBV6-1, TRBJ1-3)
CASVQGGGGNTIYF

SEQ ID NO: 422761 - protein, 11 aa, Homo sapiens
  CDR3 for alpha chain variable domain of TCR clone 211381 (TRAV12-1, TRAJ27)
CVVNNAGKSTF

SEQ ID NO: 422762 - protein, 13 aa, Homo sapiens
  CDR3 for beta chain variable domain of TCR clone 211381 (TRBV15, TRBJ1-6)
CATSGGLNSPLHF

SEQ ID NO: 422763 - protein, 11 aa, Homo sapiens
  CDR3 for alpha chain variable domain of TCR clone 211382 (TRAV1-1, TRAJ23)
CAVRQGGKLIF

SEQ ID NO: 422764 - protein, 15 aa, Homo sapiens
  CDR3 for beta chain variable domain of TCR clone 211382 (TRBV7-2, TRBJ2-1)
YASSFQADEYNEQFF

SEQ ID NO: 422765 - protein, 13 aa, Homo sapiens
  CDR3 for alpha chain variable domain of TCR clone 211383 (TRAV27, TRAJ41)
YAGEGNSGYALNF

SEQ ID NO: 422766 - protein, 14 aa, Homo sapiens
  CDR3 for beta chain variable domain of TCR clone 211383 (TRBV25-1, TRBJ1-1)
CASTHLGGNTEAFF

SEQ ID NO: 422767 - protein, 17 aa, Homo sapiens
  CDR3 for alpha chain variable domain of TCR clone 211384 (TRAV8-6, TRAJ58)
CAVSSWVGETSGARLTF

SEQ ID NO: 422768 - protein, 14 aa, Homo sapiens
  CDR3 for beta chain variable domain of TCR clone 211384 (TRBV4-2, TRBJ2-1)
CASGLDRAYNEQFL

SEQ ID NO: 422769 - protein, 15 aa, Homo sapiens
  CDR3 for alpha chain variable domain of TCR clone 211385 (TRAV13-1, TRAJ10)
CAASPRTGGGNKLTL

SEQ ID NO: 422770 - protein, 13 aa, Homo sapiens
  CDR3 for beta chain variable domain of TCR clone 211385 (TRBV11-2, TRBJ2-5)
CASTRDRGETQYF

SEQ ID NO: 422771 - protein, 14 aa, Homo sapiens
  CDR3 for alpha chain variable domain of TCR clone 211386 (TRAV13-2, TRAJ43)
FAEIPTYNKNDIRF

SEQ ID NO: 422772 - protein, 15 aa, Homo sapiens
  CDR3 for beta chain variable domain of TCR clone 211386 (TRBV7-9, TRBJ2-2)
CASGPLDTFPGELFF

SEQ ID NO: 422773 - protein, 13 aa, Homo sapiens
  CDR3 for alpha chain variable domain of TCR clone 211387 (TRAV17, TRAJ13)
CATDSGGYQKVTF

SEQ ID NO: 422774 - protein, 12 aa, Homo sapiens
  CDR3 for beta chain variable domain of TCR clone 211387 (TRBV28, TRBJ2-3)
CASSLYRDTQYF

SEQ ID NO: 422775 - protein, 13 aa, Homo sapiens
  CDR3 for alpha chain variable domain of TCR clone 211388 (TRAV2, TRAJ5)
CAVPDTGRRALTF

SEQ ID NO: 422776 - protein, 15 aa, Homo sapiens
  CDR3 for beta chain variable domain of TCR clone 211388 (TRBV7-3, TRBJ2-1)
CASRPTGGGEVEQFF

SEQ ID NO: 422777 - protein, 13 aa, Homo sapiens
  CDR3 for alpha chain variable domain of TCR clone 211389 (TRAV2, TRAJ15)
CAVASQAGTALIF

SEQ ID NO: 422778 - protein, 16 aa, Homo sapiens
  CDR3 for beta chain variable domain of TCR clone 211389 (TRBV18, TRBJ1-5)
CASSPYRVEGNHPQHF

SEQ ID NO: 422779 - protein, 13 aa, Homo sapiens
  CDR3 for alpha chain variable domain of TCR clone 211390 (TRAV27, TRAJ45)
CRSSGGGADGLTF

SEQ ID NO: 422780 - protein, 17 aa, Homo sapiens
  CDR3 for beta chain variable domain of TCR clone 211390 (TRBV11-2, TRBJ2-1)
GASSLSPPGVEYNEQFF

SEQ ID NO: 422781 - protein, 15 aa, Homo sapiens
  CDR3 for alpha chain variable domain of TCR clone 211391 (TRAV8-3, TRAJ41)
CAVGSSSNSGYALNF

SEQ ID NO: 422782 - protein, 14 aa, Homo sapiens
  CDR3 for beta chain variable domain of TCR clone 211391 (TRBV7-6, TRBJ2-3)
CASSLGTVTDTQYF

SEQ ID NO: 422783 - protein, 14 aa, Homo sapiens
  CDR3 for alpha chain variable domain of TCR clone 211392 (TRAV1-2, TRAJ29)
CAVRELTSATPPVF

SEQ ID NO: 422784 - protein, 14 aa, Homo sapiens
  CDR3 for beta chain variable domain of TCR clone 211392 (TRBV3-1, TRBJ2-5)
CASSQGPDQETQYF

SEQ ID NO: 422785 - protein, 14 aa, Homo sapiens
  CDR3 for alpha chain variable domain of TCR clone 211393 (TRAV17, TRAJ31)
CATDAEDNNARLMF

SEQ ID NO: 422786 - protein, 12 aa, Homo sapiens
  CDR3 for beta chain variable domain of TCR clone 211393 (TRBV11-2, TRBJ2-1)
CASSPGNNEQFF

SEQ ID NO: 422787 - protein, 16 aa, Homo sapiens
  CDR3 for alpha chain variable domain of TCR clone 211394 (TRAV21, TRAJ33)
CAVSPASMDSNYPLIW

SEQ ID NO: 422788 - protein, 17 aa, Homo sapiens
  CDR3 for beta chain variable domain of TCR clone 211394 (TRBV2, TRBJ1-4)
CASSKRELTQGEEKLFF

SEQ ID NO: 422789 - protein, 14 aa, Homo sapiens
  CDR3 for alpha chain variable domain of TCR clone 211395 (TRAV8-3, TRAJ39)
CAVGAINAGNMLTF

SEQ ID NO: 422790 - protein, 16 aa, Homo sapiens
  CDR3 for beta chain variable domain of TCR clone 211395 (TRBV6-1, TRBJ2-5)
CASSETLDRGAETQYF

SEQ ID NO: 422791 - protein, 14 aa, Homo sapiens
  CDR3 for alpha chain variable domain of TCR clone 211396 (TRAV12-1, TRAJ9)
CVVTLNTGGFKTIF

SEQ ID NO: 422792 - protein, 11 aa, Homo sapiens
  CDR3 for beta chain variable domain of TCR clone 211396 (TRBV5-1, TRBJ2-1)
CASSIGQEQFF

SEQ ID NO: 422793 - protein, 13 aa, Homo sapiens
  CDR3 for alpha chain variable domain of TCR clone 211397 (TRAV20, TRAJ9)
CPVPDTGGFKTIF

SEQ ID NO: 422794 - protein, 12 aa, Homo sapiens
  CDR3 for beta chain variable domain of TCR clone 211397 (TRBV28, TRBJ2-3)
CASSLYRDTQYF

SEQ ID NO: 422795 - protein, 14 aa, Homo sapiens
  CDR3 for alpha chain variable domain of TCR clone 211398 (TRAV9-2, TRAJ39)
CALYIYNAGNMITF

SEQ ID NO: 422796 - protein, 14 aa, Homo sapiens
  CDR3 for beta chain variable domain of TCR clone 211398 (TRBV12-5, TRBJ2-5)
CASGSRTHQETQYF

SEQ ID NO: 422797 - protein, 14 aa, Homo sapiens
  CDR3 for alpha chain variable domain of TCR clone 211399 (TRAV8-3, TRAJ30)
CAVGDMNRDDKIIF

SEQ ID NO: 422798 - protein, 17 aa, Homo sapiens
  CDR3 for beta chain variable domain of TCR clone 211399 (TRBV19, TRBJ2-2)
CASSRNPGGFGTGGLFF

SEQ ID NO: 422799 - protein, 15 aa, Homo sapiens
  CDR3 for alpha chain variable domain of TCR clone 211400 (TRAV20, TRAJ23)
CAAQAVRNQGGKLIF

SEQ ID NO: 422800 - protein, 16 aa, Homo sapiens
  CDR3 for beta chain variable domain of TCR clone 211400 (TRBV27, TRBJ2-7)
CAISKQGRGWAYEQYF

SEQ ID NO: 422801 - protein, 13 aa, Homo sapiens
  CDR3 for alpha chain variable domain of TCR clone 211401 (TRAV3, TRAJ4)
CAVRDGGYNKLIF

SEQ ID NO: 422802 - protein, 15 aa, Homo sapiens
  CDR3 for beta chain variable domain of TCR clone 211401 (TRBV5-1, TRBJ2-1)
CASSPPRAHYNEQFF

SEQ ID NO: 422803 - protein, 14 aa, Homo sapiens
  CDR3 for alpha chain variable domain of TCR clone 211402 (TRAV29/DV5, TRAJ34)
CAASASRETDKLIF

SEQ ID NO: 422804 - protein, 15 aa, Homo sapiens
  CDR3 for beta chain variable domain of TCR clone 211402 (TRBV7-8, TRBJ2-7)
CASSLERAGSYDQYF

SEQ ID NO: 422805 - protein, 17 aa, Homo sapiens
  CDR3 for alpha chain variable domain of TCR clone 211403 (TRAV3, TRAJ6)
CAVRDGPRAGGRYIPTF

SEQ ID NO: 422806 - protein, 15 aa, Homo sapiens
  CDR3 for beta chain variable domain of TCR clone 211403 (TRBV27, TRBJ2-1)
CASSNGGGSSNEQFF

SEQ ID NO: 422807 - protein, 13 aa, Homo sapiens
  CDR3 for alpha chain variable domain of TCR clone 211404 (TRAV22, TRAJ26)
CAVEHNYGQNFVF

SEQ ID NO: 422808 - protein, 13 aa, Homo sapiens
  CDR3 for beta chain variable domain of TCR clone 211404 (TRBV12-4, TRBJ1-1)
CASSPGTGFEAFF

SEQ ID NO: 422809 - protein, 14 aa, Homo sapiens
  CDR3 for alpha chain variable domain of TCR clone 211405 (TRAV12-3, TRAJ28)
CATNSGAGSYQLTF

SEQ ID NO: 422810 - protein, 13 aa, Homo sapiens
  CDR3 for beta chain variable domain of TCR clone 211405 (TRBV12-4, TRBJ2-7)
CASSPTETYEQYF

SEQ ID NO: 422811 - protein, 16 aa, Homo sapiens
  CDR3 for alpha chain variable domain of TCR clone 211406 (TRAV12-1, TRAJ12)
CVVNTLLMDSSYKLIF

SEQ ID NO: 422812 - protein, 13 aa, Homo sapiens
  CDR3 for beta chain variable domain of TCR clone 211406 (TRBV11-2, TRBJ2-1)
CASSSEAYKEQFF

SEQ ID NO: 422813 - protein, 12 aa, Homo sapiens
  CDR3 for alpha chain variable domain of TCR clone 211407 (TRAV13-2, TRAJ23)
CAERHRGGKLIF

SEQ ID NO: 422814 - protein, 14 aa, Homo sapiens
  CDR3 for beta chain variable domain of TCR clone 211407 (TRBV6-1, TRBJ1-3)
CASVQGGGGNTIYF

SEQ ID NO: 422815 - protein, 11 aa, Homo sapiens
  CDR3 for alpha chain variable domain of TCR clone 211408 (TRAV21, TRAJ41)
CAVRSGYALNF

SEQ ID NO: 422816 - protein, 19 aa, Homo sapiens
  CDR3 for beta chain variable domain of TCR clone 211408 (TRBV7-2, TRBJ2-3)
CASSFLSRNWGGGTDTQYF

SEQ ID NO: 422817 - protein, 14 aa, Homo sapiens
  CDR3 for alpha chain variable domain of TCR clone 211409 (TRAV12-2, TRAJ13)
CAVKKTGGYQKVTF

SEQ ID NO: 422818 - protein, 15 aa, Homo sapiens
  CDR3 for beta chain variable domain of TCR clone 211409 (TRBV7-2, TRBJ2-1)
CASTHGTRIYNEQFF

SEQ ID NO: 422819 - protein, 12 aa, Homo sapiens
  CDR3 for alpha chain variable domain of TCR clone 211410 (TRAV3, TRAJ20)
CAVSDPDYKLSF

SEQ ID NO: 422820 - protein, 14 aa, Homo sapiens
  CDR3 for beta chain variable domain of TCR clone 211410 (TRBV2, TRBJ2-7)
CASSLTSGGYEQYF

SEQ ID NO: 422821 - protein, 14 aa, Homo sapiens
  CDR3 for alpha chain variable domain of TCR clone 211411 (TRAV4, TRAJ9)
CLVGSGTGGFKTIF

SEQ ID NO: 422822 - protein, 13 aa, Homo sapiens
  CDR3 for beta chain variable domain of TCR clone 211411 (TRBV19, TRBJ2-7)
CASSPRQSYEQYF

SEQ ID NO: 422823 - protein, 11 aa, Homo sapiens
  CDR3 for alpha chain variable domain of TCR clone 211412 (TRAV12-1, TRAJ21)
CVVYNFNKFYF

SEQ ID NO: 422824 - protein, 17 aa, Homo sapiens
  CDR3 for beta chain variable domain of TCR clone 211412 (TRBV25-1, TRBJ2-7)
CASSDARVVFSSYEQYF

SEQ ID NO: 422825 - protein, 14 aa, Homo sapiens
  CDR3 for alpha chain variable domain of TCR clone 211413 (TRAV12-3, TRAJ9)
CAMSPNTGGFKTIF

SEQ ID NO: 422826 - protein, 15 aa, Homo sapiens
  CDR3 for beta chain variable domain of TCR clone 211413 (TRBV7-3, TRBJ2-1)
CASSPTGGGEVEQFF

SEQ ID NO: 422827 - protein, 11 aa, Homo sapiens
  CDR3 for alpha chain variable domain of TCR clone 211414 (TRAV12-3, TRAJ27)
CAMANAGKSTF

SEQ ID NO: 422828 - protein, 13 aa, Homo sapiens
  CDR3 for beta chain variable domain of TCR clone 211414 (TRBV19, TRBJ1-5)
CASSIGGEQPQHF

SEQ ID NO: 422829 - protein, 14 aa, Homo sapiens
  CDR3 for alpha chain variable domain of TCR clone 211415 (TRAV1-2, TRAJ16)
CAVNRFSDGQKLLF

SEQ ID NO: 422830 - protein, 12 aa, Homo sapiens
  CDR3 for beta chain variable domain of TCR clone 211415 (TRBV7-3, TRBJ1-3)
CASSLGGNTIYF

SEQ ID NO: 422831 - protein, 17 aa, Homo sapiens
  CDR3 for alpha chain variable domain of TCR clone 211416 (TRAV3, TRAJ6)
CAVRDGPRAGESYIPTF

SEQ ID NO: 422832 - protein, 15 aa, Homo sapiens
  CDR3 for beta chain variable domain of TCR clone 211416 (TRBV5-8, TRBJ2-2)
CASSLDRGATGELFF

SEQ ID NO: 422833 - protein, 18 aa, Homo sapiens
  CDR3 for alpha chain variable domain of TCR clone 211417 (TRAV26-2, TRAJ54)
CILRDVEVGIQGAQKLVF

SEQ ID NO: 422834 - protein, 15 aa, Homo sapiens
  CDR3 for beta chain variable domain of TCR clone 211417 (TRBV20-1, TRBJ2-7)
CSARDRVSGMDEQYF

SEQ ID NO: 422835 - protein, 13 aa, Homo sapiens
  CDR3 for alpha chain variable domain of TCR clone 211418 (TRAV35, TRAJ33)
CAGQLYGVYQLIW

SEQ ID NO: 422836 - protein, 14 aa, Homo sapiens
  CDR3 for beta chain variable domain of TCR clone 211418 (TRBV7-2, TRBJ1-1)
CASSLGGAGTEAFS

SEQ ID NO: 422837 - protein, 14 aa, Homo sapiens
  CDR3 for alpha chain variable domain of TCR clone 211419 (TRAV35, TRAJ13)
FAGSPSGGYQRVTF

SEQ ID NO: 422838 - protein, 13 aa, Homo sapiens
  CDR3 for beta chain variable domain of TCR clone 211419 (TRBV29-1, TRBJ1-1)
CSVGDSRNTEAFF

SEQ ID NO: 422839 - protein, 15 aa, Homo sapiens
  CDR3 for alpha chain variable domain of TCR clone 211420 (TRAV9-2, TRAJ23)
CALSDLYNQGGKLIF

SEQ ID NO: 422840 - protein, 14 aa, Homo sapiens
  CDR3 for beta chain variable domain of TCR clone 211420 (TRBV7-9, TRBJ2-3)
CASSLEDGTDTQYF

SEQ ID NO: 422841 - protein, 16 aa, Homo sapiens
  CDR3 for alpha chain variable domain of TCR clone 211421 (TRAV8-3, TRAJ13)
CAVGAYSSGGYQKVTF

SEQ ID NO: 422842 - protein, 14 aa, Homo sapiens
  CDR3 for beta chain variable domain of TCR clone 211421 (TRBV18, TRBJ2-5)
CASSPRASSETQYF

SEQ ID NO: 422843 - protein, 11 aa, Homo sapiens
  CDR3 for alpha chain variable domain of TCR clone 211422 (TRAV1-2, TRAJ20)
CAVANAYKLSF

SEQ ID NO: 422844 - protein, 18 aa, Homo sapiens
  CDR3 for beta chain variable domain of TCR clone 211422 (TRBV20-1, TRBJ2-6)
CSPETTPTHGSGANVLTF

SEQ ID NO: 422845 - protein, 16 aa, Homo sapiens
  CDR3 for alpha chain variable domain of TCR clone 211423 (TRAV3, TRAJ37)
CAVRGKGSGNTCKLIF

SEQ ID NO: 422846 - protein, 21 aa, Homo sapiens
  CDR3 for beta chain variable domain of TCR clone 211423 (TRBV15, TRBJ2-1)
AWGTQPCTCVPPAEVDTARFF

SEQ ID NO: 422847 - protein, 11 aa, Homo sapiens
  CDR3 for alpha chain variable domain of TCR clone 211424 (TRAV17, TRAJ21)
CATGNFNKFYF

SEQ ID NO: 422848 - protein, 16 aa, Homo sapiens
  CDR3 for beta chain variable domain of TCR clone 211424 (TRBV2, TRBJ2-1)
CASSANPRDWQEEQFF

SEQ ID NO: 422849 - protein, 12 aa, Homo sapiens
  CDR3 for alpha chain variable domain of TCR clone 211425 (TRAV3, TRAJ20)
CAVRDGDYKLSF

SEQ ID NO: 422850 - protein, 16 aa, Homo sapiens
  CDR3 for beta chain variable domain of TCR clone 211425 (TRBV2, TRBJ2-7)
FASSEPWTGPSYEQYF

SEQ ID NO: 422851 - protein, 11 aa, Homo sapiens
  CDR3 for alpha chain variable domain of TCR clone 211426 (TRAV21, TRAJ34)
CAQYNTDKLIF

SEQ ID NO: 422852 - protein, 13 aa, Homo sapiens
  CDR3 for beta chain variable domain of TCR clone 211426 (TRBV7-6, TRBJ1-2)
CASSLVADYGDTF

SEQ ID NO: 422853 - protein, 14 aa, Homo sapiens
  CDR3 for alpha chain variable domain of TCR clone 211427 (TRAV14/DV4, TRAJ54)
CAMSPIQGAQKLVF

SEQ ID NO: 422854 - protein, 13 aa, Homo sapiens
  CDR3 for beta chain variable domain of TCR clone 211427 (TRBV7-9, TRBJ2-3)
CASSPGSTDTQYF

SEQ ID NO: 422855 - protein, 12 aa, Homo sapiens
  CDR3 for alpha chain variable domain of TCR clone 211428 (TRAV12-3, TRAJ17)
CAMTLTGNKLTF

SEQ ID NO: 422856 - protein, 14 aa, Homo sapiens
  CDR3 for beta chain variable domain of TCR clone 211428 (TRBV11-2, TRBJ1-2)
CASSLGTANYGDTF

SEQ ID NO: 422857 - protein, 15 aa, Homo sapiens
  CDR3 for alpha chain variable domain of TCR clone 211429 (TRAV8-6, TRAJ42)
CAVRGRKPRKSHLWK

SEQ ID NO: 422858 - protein, 15 aa, Homo sapiens
  CDR3 for beta chain variable domain of TCR clone 211429 (TRBV11-2, TRBJ2-2)
CASSPSGGGTGELFF

SEQ ID NO: 422859 - protein, 12 aa, Homo sapiens
  CDR3 for alpha chain variable domain of TCR clone 211430 (TRAV12-1, TRAJ31)
CVSWNNNARLMF

SEQ ID NO: 422860 - protein, 17 aa, Homo sapiens
  CDR3 for beta chain variable domain of TCR clone 211430 (TRBV4-1, TRBJ2-3)
CASSQGYVSGGTDTQYF

SEQ ID NO: 422861 - protein, 16 aa, Homo sapiens
  CDR3 for alpha chain variable domain of TCR clone 211431 (TRAV13-1, TRAJ18)
CAASRMRGSTLGRLYF

SEQ ID NO: 422862 - protein, 16 aa, Homo sapiens
  CDR3 for beta chain variable domain of TCR clone 211431 (TRBV4-3, TRBJ2-1)
CASSPALDRGVNEQFF

SEQ ID NO: 422863 - protein, 14 aa, Homo sapiens
  CDR3 for alpha chain variable domain of TCR clone 211432 (TRAV1-2, TRAJ16)
CAVNRFSDGQTLLS

SEQ ID NO: 422864 - protein, 15 aa, Homo sapiens
  CDR3 for beta chain variable domain of TCR clone 211432 (TRBV2, TRBJ2-1)
CASSEEREGDNEQFF

SEQ ID NO: 422865 - protein, 18 aa, Homo sapiens
  CDR3 for alpha chain variable domain of TCR clone 211433 (TRAV1-2, TRAJ18)
CAVRDMGDRGSTLGRVYF

SEQ ID NO: 422866 - protein, 16 aa, Homo sapiens
  CDR3 for beta chain variable domain of TCR clone 211433 (TRBV29-1, TRBJ1-2)
CSVEANRDIANYGYTF

SEQ ID NO: 422867 - protein, 16 aa, Homo sapiens
  CDR3 for alpha chain variable domain of TCR clone 211434 (TRAV3, TRAJ37)
CAVRPHGPGNTGKLIF

SEQ ID NO: 422868 - protein, 14 aa, Homo sapiens
  CDR3 for beta chain variable domain of TCR clone 211434 (TRBV20-1, TRBJ2-1)
CSARGGSSYNEQFF

SEQ ID NO: 422869 - protein, 14 aa, Homo sapiens
  CDR3 for alpha chain variable domain of TCR clone 211435 (TRAV12-3, TRAJ10)
SHLPLTGGGNKLTF

SEQ ID NO: 422870 - protein, 15 aa, Homo sapiens
  CDR3 for beta chain variable domain of TCR clone 211435 (TRBV7-6, TRBJ1-5)
CASSQSSGIKQPQHF

SEQ ID NO: 422871 - protein, 13 aa, Homo sapiens
  CDR3 for alpha chain variable domain of TCR clone 211436 (TRAV12-1, TRAJ26)
CAVRRNYGHNFVF

SEQ ID NO: 422872 - protein, 14 aa, Homo sapiens
  CDR3 for beta chain variable domain of TCR clone 211436 (TRBV12-4, TRBJ1-1)
CASTWTGHDTEAFF

SEQ ID NO: 422873 - protein, 15 aa, Homo sapiens
  CDR3 for alpha chain variable domain of TCR clone 211437 (TRAV26-1, TRAJ56)
CIVRVATGANSQLTF

SEQ ID NO: 422874 - protein, 15 aa, Homo sapiens
  CDR3 for beta chain variable domain of TCR clone 211437 (TRBV27, TRBJ2-7)
CASSPQREGQREQYF

SEQ ID NO: 422875 - protein, 10 aa, Homo sapiens
  CDR3 for alpha chain variable domain of TCR clone 211438 (TRAV21, TRAJ43)
CAVRIGDMRF

SEQ ID NO: 422876 - protein, 13 aa, Homo sapiens
  CDR3 for beta chain variable domain of TCR clone 211438 (TRBV20-1, TRBJ2-7)
CSATGLADYEQYF

SEQ ID NO: 422877 - protein, 14 aa, Homo sapiens
  CDR3 for alpha chain variable domain of TCR clone 211439 (TRAV22, TRAJ6)
CAGVGPGGSYIPTF

SEQ ID NO: 422878 - protein, 13 aa, Homo sapiens
  CDR3 for beta chain variable domain of TCR clone 211439 (TRBV12-4, TRBJ1-2)
CASSLRQGKGYTF

SEQ ID NO: 422879 - protein, 17 aa, Homo sapiens
  CDR3 for alpha chain variable domain of TCR clone 211440 (TRAV3, TRAJ42)
CAVRDRDYGGSQGNLIF

SEQ ID NO: 422880 - protein, 16 aa, Homo sapiens
  CDR3 for beta chain variable domain of TCR clone 211440 (TRBV7-3, TRBJ2-2)
CASSLKRGTLSGELFS

SEQ ID NO: 422881 - protein, 15 aa, Homo sapiens
  CDR3 for alpha chain variable domain of TCR clone 211441 (TRAV4, TRAJ8)
CLVGEQHTGFQKLVF

SEQ ID NO: 422882 - protein, 17 aa, Homo sapiens
  CDR3 for beta chain variable domain of TCR clone 211441 (TRBV7-3, TRBJ2-3)
CASSLMKRMRGADTQYF

SEQ ID NO: 422883 - protein, 15 aa, Homo sapiens
  CDR3 for alpha chain variable domain of TCR clone 211442 (TRAV8-4, TRAJ7)
SAVSGGNYGNNRLAF

SEQ ID NO: 422884 - protein, 11 aa, Homo sapiens
  CDR3 for beta chain variable domain of TCR clone 211442 (TRBV20-1, TRBJ2-1)
CSLSSGSEQFF

SEQ ID NO: 422885 - protein, 13 aa, Homo sapiens
  CDR3 for alpha chain variable domain of TCR clone 211443 (TRAV12-3, TRAJ36)
CALRRPGANNLFF

SEQ ID NO: 422886 - protein, 18 aa, Homo sapiens
  CDR3 for beta chain variable domain of TCR clone 211443 (TRBV11-1, TRBJ2-2)
CASSREAGGPGNTGELFF

SEQ ID NO: 422887 - protein, 10 aa, Homo sapiens
  CDR3 for alpha chain variable domain of TCR clone 211444 (TRAV26-1, TRAJ40)
CITGTYKYIF

SEQ ID NO: 422888 - protein, 15 aa, Homo sapiens
  CDR3 for beta chain variable domain of TCR clone 211444 (TRBV19, TRBJ2-1)
CASSSPGVPLDGQFF

SEQ ID NO: 422889 - protein, 15 aa, Homo sapiens
  CDR3 for alpha chain variable domain of TCR clone 211445 (TRAV38-2/DV8, TRAJ57)
CAYKSGLGGSEKLVF

SEQ ID NO: 422890 - protein, 12 aa, Homo sapiens
  CDR3 for beta chain variable domain of TCR clone 211445 (TRBV11-2, TRBJ2-1)
CASSPGNNEQFF

SEQ ID NO: 422891 - protein, 16 aa, Homo sapiens
  CDR3 for alpha chain variable domain of TCR clone 211446 (TRAV30, TRAJ24)
CGTEIVDADSWGKFQF

SEQ ID NO: 422892 - protein, 13 aa, Homo sapiens
  CDR3 for beta chain variable domain of TCR clone 211446 (TRBV20-1, TRBJ1-1)
CSAGTVGNAEAFF

SEQ ID NO: 422893 - protein, 16 aa, Homo sapiens
  CDR3 for alpha chain variable domain of TCR clone 211447 (TRAV3, TRAJ37)
CAVRGKGSGNTGKLIF

SEQ ID NO: 422894 - protein, 16 aa, Homo sapiens
  CDR3 for beta chain variable domain of TCR clone 211447 (TRBV7-2, TRBJ1-2)
CASSSNQDRRGHGYTF

SEQ ID NO: 422895 - protein, 11 aa, Homo sapiens
  CDR3 for alpha chain variable domain of TCR clone 211448 (TRAV2, TRAJ33)
CAVDINYQLIW

SEQ ID NO: 422896 - protein, 17 aa, Homo sapiens
  CDR3 for beta chain variable domain of TCR clone 211448 (TRBV12-4, TRBJ2-3)
CASSGPGLAGGADTQYF

SEQ ID NO: 422897 - protein, 13 aa, Homo sapiens
  CDR3 for alpha chain variable domain of TCR clone 211449 (TRAV8-6, TRAJ50)
CAVIKTSYNKVIF

SEQ ID NO: 422898 - protein, 15 aa, Homo sapiens
  CDR3 for beta chain variable domain of TCR clone 211449 (TRBV7-2, TRBJ2-2)
CASRRPGQNTGELFF

SEQ ID NO: 422899 - protein, 15 aa, Homo sapiens
  CDR3 for alpha chain variable domain of TCR clone 211450 (TRAV38-1, TRAJ37)
CAFIFGSGNTGKLIF

SEQ ID NO: 422900 - protein, 14 aa, Homo sapiens
  CDR3 for beta chain variable domain of TCR clone 211450 (TRBV27, TRBJ2-7)
CASATGTERREQYF

SEQ ID NO: 422901 - protein, 16 aa, Homo sapiens
  CDR3 for alpha chain variable domain of TCR clone 211451 (TRAV30, TRAJ24)
CGTEIVDADSWGKFQV

SEQ ID NO: 422902 - protein, 13 aa, Homo sapiens
  CDR3 for beta chain variable domain of TCR clone 211451 (TRBV10-3, TRBJ1-2)
CAISERDSYGYTF

SEQ ID NO: 422903 - protein, 11 aa, Homo sapiens
  CDR3 for alpha chain variable domain of TCR clone 211452 (TRAV1-1, TRAJ23)
CAVRQGGKLIF

SEQ ID NO: 422904 - protein, 13 aa, Homo sapiens
  CDR3 for beta chain variable domain of TCR clone 211452 (TRBV7-9, TRBJ1-2)
CASSLKQNYGDTF

SEQ ID NO: 422905 - protein, 15 aa, Homo sapiens
  CDR3 for alpha chain variable domain of TCR clone 211453 (TRAV13-1, TRAJ18)
CAASGGGSTLGRLYF

SEQ ID NO: 422906 - protein, 15 aa, Homo sapiens
  CDR3 for beta chain variable domain of TCR clone 211453 (TRBV7-9, TRBJ1-6)
CASSSPGRGNSPLHF

SEQ ID NO: 422907 - protein, 17 aa, Homo sapiens
  CDR3 for alpha chain variable domain of TCR clone 211454 (TRAV23/DV6, TRAJ57)
CAASSTLPQGESEKLVF

SEQ ID NO: 422908 - protein, 14 aa, Homo sapiens
  CDR3 for beta chain variable domain of TCR clone 211454 (TRBV25-1, TRBJ1-1)
CASTHLGGNTEAFF

SEQ ID NO: 422909 - protein, 15 aa, Homo sapiens
  CDR3 for alpha chain variable domain of TCR clone 211455 (TRAV8-3, TRAJ11)
CAVGLLNSGYSTLTF

SEQ ID NO: 422910 - protein, 15 aa, Homo sapiens
  CDR3 for beta chain variable domain of TCR clone 211455 (TRBV7-9, TRBJ1-4)
CASSRTGGFNEKLFF

SEQ ID NO: 422911 - protein, 13 aa, Homo sapiens
  CDR3 for alpha chain variable domain of TCR clone 211456 (TRAV12-3, TRAJ7)
CAMTPYGKNRLAF

SEQ ID NO: 422912 - protein, 16 aa, Homo sapiens
  CDR3 for beta chain variable domain of TCR clone 211456 (TRBV20-1, TRBJ1-4)
CSARPYGEELNEKLFF

SEQ ID NO: 422913 - protein, 14 aa, Homo sapiens
  CDR3 for alpha chain variable domain of TCR clone 211457 (TRAV13-1, TRAJ44)
CAAKATGTASKPAF

SEQ ID NO: 422914 - protein, 17 aa, Homo sapiens
  CDR3 for beta chain variable domain of TCR clone 211457 (TRBV7-3, TRBJ2-3)
CASSLMKRMRGADTQYF

SEQ ID NO: 422915 - protein, 13 aa, Homo sapiens
  CDR3 for alpha chain variable domain of TCR clone 211458 (TRAV36/DV7, TRAJ37)
CAVFSSNAGKLIF

SEQ ID NO: 422916 - protein, 14 aa, Homo sapiens
  CDR3 for beta chain variable domain of TCR clone 211458 (TRBV7-2, TRBJ2-7)
CASSPKTSFYEQYF

SEQ ID NO: 422917 - protein, 17 aa, Homo sapiens
  CDR3 for alpha chain variable domain of TCR clone 211459 (TRAV23/DV6, TRAJ52)
CAASPNAGGTSYGKLTF

SEQ ID NO: 422918 - protein, 16 aa, Homo sapiens
  CDR3 for beta chain variable domain of TCR clone 211459 (TRBV20-1, TRBJ2-1)
CSARDLKQGMNNEQFF

SEQ ID NO: 422919 - protein, 14 aa, Homo sapiens
  CDR3 for alpha chain variable domain of TCR clone 211460 (TRAV1-2, TRAJ16)
CAVNRFSDGQKLLF

SEQ ID NO: 422920 - protein, 13 aa, Homo sapiens
  CDR3 for beta chain variable domain of TCR clone 211460 (TRBV7-9, TRBJ1-2)
CASSLKQIYGYTF

SEQ ID NO: 422921 - protein, 12 aa, Homo sapiens
  CDR3 for alpha chain variable domain of TCR clone 211461 (TRAV21, TRAJ3)
CCFYSNASKIIF

SEQ ID NO: 422922 - protein, 16 aa, Homo sapiens
  CDR3 for beta chain variable domain of TCR clone 211461 (TRBV19, TRBJ2-1)
CASSKAGPSSYNEQFF

SEQ ID NO: 422923 - protein, 12 aa, Homo sapiens
  CDR3 for alpha chain variable domain of TCR clone 211462 (TRAV12-2, TRAJ20)
CAVRPSDYKPSF

SEQ ID NO: 422924 - protein, 13 aa, Homo sapiens
  CDR3 for beta chain variable domain of TCR clone 211462 (TRBV28, TRBJ2-2)
CASIRESTGELFF

SEQ ID NO: 422925 - protein, 13 aa, Homo sapiens
  CDR3 for alpha chain variable domain of TCR clone 211463 (TRAV1-1, TRAJ23)
CAVVANQGVKLIF

SEQ ID NO: 422926 - protein, 16 aa, Homo sapiens
  CDR3 for beta chain variable domain of TCR clone 211463 (TRBV5-5, TRBJ1-2)
CASSPTWGRGLYGYTF

SEQ ID NO: 422927 - protein, 14 aa, Homo sapiens
  CDR3 for alpha chain variable domain of TCR clone 211464 (TRAV8-1, TRAJ5)
CAVSMDTGRRALTF

SEQ ID NO: 422928 - protein, 13 aa, Homo sapiens
  CDR3 for beta chain variable domain of TCR clone 211464 (TRBV19, TRBJ1-5)
CASSIGGNQPQHF

SEQ ID NO: 422929 - protein, 13 aa, Homo sapiens
  CDR3 for alpha chain variable domain of TCR clone 211465 (TRAV23/DV6, TRAJ16)
CAASISDGQELLF

SEQ ID NO: 422930 - protein, 15 aa, Homo sapiens
  CDR3 for beta chain variable domain of TCR clone 211465 (TRBV2, TRBJ2-2)
CASSRETVGTGELFF

SEQ ID NO: 422931 - protein, 13 aa, Homo sapiens
  CDR3 for alpha chain variable domain of TCR clone 211466 (TRAV17, TRAJ54)
CATVIQGAQKLVF

SEQ ID NO: 422932 - protein, 15 aa, Homo sapiens
  CDR3 for beta chain variable domain of TCR clone 211466 (TRBV13, TRBJ2-1)
CASSLISGLNNEQFF

SEQ ID NO: 422933 - protein, 16 aa, Homo sapiens
  CDR3 for alpha chain variable domain of TCR clone 211467 (TRAV8-3, TRAJ10)
CAVGPGVTGGGNKLTF

SEQ ID NO: 422934 - protein, 14 aa, Homo sapiens
  CDR3 for beta chain variable domain of TCR clone 211467 (TRBV18, TRBJ2-2)
CASSPPSLPGELFF

SEQ ID NO: 422935 - protein, 13 aa, Homo sapiens
  CDR3 for alpha chain variable domain of TCR clone 211468 (TRAV8-1, TRAJ28)
CAVSGAGSYQLTF

SEQ ID NO: 422936 - protein, 13 aa, Homo sapiens
  CDR3 for beta chain variable domain of TCR clone 211468 (TRBV7-2, TRBJ2-2)
CARGQGAAGELFF

SEQ ID NO: 422937 - protein, 13 aa, Homo sapiens
  CDR3 for alpha chain variable domain of TCR clone 211469 (TRAV35, TRAJ32)
CAGVGGATNKLIF

SEQ ID NO: 422938 - protein, 14 aa, Homo sapiens
  CDR3 for beta chain variable domain of TCR clone 211469 (TRBV20-1, TRBJ2-5)
CSARDGRAGETQYF

SEQ ID NO: 422939 - protein, 14 aa, Homo sapiens
  CDR3 for alpha chain variable domain of TCR clone 211470 (TRAV12-2, TRAJ13)
CAVQKTGGYQKVTF

SEQ ID NO: 422940 - protein, 16 aa, Homo sapiens
  CDR3 for beta chain variable domain of TCR clone 211470 (TRBV7-9, TRBJ2-1)
CASSDVAGGSYNEQFF

SEQ ID NO: 422941 - protein, 18 aa, Homo sapiens
  CDR3 for alpha chain variable domain of TCR clone 211471 (TRAV13-1, TRAJ52)
CAASKRSAGGASYGKLTF

SEQ ID NO: 422942 - protein, 14 aa, Homo sapiens
  CDR3 for beta chain variable domain of TCR clone 211471 (TRBV11-3, TRBJ2-7)
CASSLGVGDYEQYF

SEQ ID NO: 422943 - protein, 16 aa, Homo sapiens
  CDR3 for alpha chain variable domain of TCR clone 211472 (TRAV20, TRAJ10)
CAVLRGLTGGGNKLTF

SEQ ID NO: 422944 - protein, 14 aa, Homo sapiens
  CDR3 for beta chain variable domain of TCR clone 211472 (TRBV19, TRBJ1-5)
CASRAPDSCLSQHF

SEQ ID NO: 422945 - protein, 15 aa, Homo sapiens
  CDR3 for alpha chain variable domain of TCR clone 211473 (TRAV3, TRAJ22)
CAVRDRGGSARQLTF

SEQ ID NO: 422946 - protein, 14 aa, Homo sapiens
  CDR3 for beta chain variable domain of TCR clone 211473 (TRBV25-1, TRBJ1-1)
CASTHLGGNTEASF

SEQ ID NO: 422947 - protein, 14 aa, Homo sapiens
  CDR3 for alpha chain variable domain of TCR clone 211474 (TRAV1-2, TRAJ8)
CAVREDTGFQQLVF

SEQ ID NO: 422948 - protein, 11 aa, Homo sapiens
  CDR3 for beta chain variable domain of TCR clone 211474 (TRBV10-3, TRBJ2-7)
CAISEGLEQYF

SEQ ID NO: 422949 - protein, 11 aa, Homo sapiens
  CDR3 for alpha chain variable domain of TCR clone 211475 (TRAV4, TRAJ23)
CLVAPGGKLIF

SEQ ID NO: 422950 - protein, 10 aa, Homo sapiens
  CDR3 for beta chain variable domain of TCR clone 211475 (TRBV7-2, TRBJ2-1)
QADEYNEQFF

SEQ ID NO: 422951 - protein, 11 aa, Homo sapiens
  CDR3 for alpha chain variable domain of TCR clone 211476 (TRAV12-1, TRAJ34)
CVVNTGRELIF

SEQ ID NO: 422952 - protein, 12 aa, Homo sapiens
  CDR3 for beta chain variable domain of TCR clone 211476 (TRBV11-2, TRBJ2-2)
CASSLGGGELFF

SEQ ID NO: 422953 - protein, 14 aa, Homo sapiens
  CDR3 for alpha chain variable domain of TCR clone 211477 (TRAV12-2, TRAJ40)
CAAKIPSGTYKYFF

SEQ ID NO: 422954 - protein, 15 aa, Homo sapiens
  CDR3 for beta chain variable domain of TCR clone 211477 (TRBV2, TRBJ2-7)
CASSEGLARSYEQYF

SEQ ID NO: 422955 - protein, 12 aa, Homo sapiens
  CDR3 for alpha chain variable domain of TCR clone 211478 (TRAV1-1, TRAJ39)
CAVPVVGNMHTF

SEQ ID NO: 422956 - protein, 18 aa, Homo sapiens
  CDR3 for beta chain variable domain of TCR clone 211478 (TRBV7-9, TRBJ2-7)
CASSLTTSGSRTWYEQYF

SEQ ID NO: 422957 - protein, 12 aa, Homo sapiens
  CDR3 for alpha chain variable domain of TCR clone 211479 (TRAV20, TRAJ39)
CAGGNAGNMLTF

SEQ ID NO: 422958 - protein, 16 aa, Homo sapiens
  CDR3 for beta chain variable domain of TCR clone 211479 (TRBV15, TRBJ1-2)
CATSRGPRTGGGGYTF

SEQ ID NO: 422959 - protein, 14 aa, Homo sapiens
  CDR3 for alpha chain variable domain of TCR clone 211480 (TRAV17, TRAJ57)
CATDASGGSEKLVF

SEQ ID NO: 422960 - protein, 14 aa, Homo sapiens
  CDR3 for beta chain variable domain of TCR clone 211480 (TRBV4-2, TRBJ2-1)
CDSGLDRAYNEQFF

SEQ ID NO: 422961 - protein, 11 aa, Homo sapiens
  CDR3 for alpha chain variable domain of TCR clone 211481 (TRAV1-2, TRAJ20)
CAVANDYKLSF

SEQ ID NO: 422962 - protein, 15 aa, Homo sapiens
  CDR3 for beta chain variable domain of TCR clone 211481 (TRBV7-2, TRBJ2-7)
CASSLKGALTYEQYF

SEQ ID NO: 422963 - protein, 15 aa, Homo sapiens
  CDR3 for alpha chain variable domain of TCR clone 211482 (TRAV35, TRAJ23)
CAGQRGYNQGGKFIF

SEQ ID NO: 422964 - protein, 16 aa, Homo sapiens
  CDR3 for beta chain variable domain of TCR clone 211482 (TRBV27, TRBJ2-1)
CASSSRLAGNYNEQFF

SEQ ID NO: 422965 - protein, 16 aa, Homo sapiens
  CDR3 for alpha chain variable domain of TCR clone 211483 (TRAV8-3, TRAJ42)
CAVGEGNGGSQGNLTF

SEQ ID NO: 422966 - protein, 14 aa, Homo sapiens
  CDR3 for beta chain variable domain of TCR clone 211483 (TRBV7-2, TRBJ2-1)
CASSRGGARNEQFF

SEQ ID NO: 422967 - protein, 15 aa, Homo sapiens
  CDR3 for alpha chain variable domain of TCR clone 211484 (TRAV3, TRAJ9)
CAVSDSNTVGFKTIF

SEQ ID NO: 422968 - protein, 16 aa, Homo sapiens
  CDR3 for beta chain variable domain of TCR clone 211484 (TRBV15, TRBJ2-5)
CATSPTTGQGMETQYF

SEQ ID NO: 422969 - protein, 15 aa, Homo sapiens
  CDR3 for alpha chain variable domain of TCR clone 211485 (TRAV17, TRAJ23)
CATDAEDNQGGKLIF

SEQ ID NO: 422970 - protein, 13 aa, Homo sapiens
  CDR3 for beta chain variable domain of TCR clone 211485 (TRBV12-5, TRBJ2-3)
CASGDRQSDTQYF

SEQ ID NO: 422971 - protein, 15 aa, Homo sapiens
  CDR3 for alpha chain variable domain of TCR clone 211486 (TRAV13-2, TRAJ16)
CAENDRFSDGQKLLF

SEQ ID NO: 422972 - protein, 14 aa, Homo sapiens
  CDR3 for beta chain variable domain of TCR clone 211486 (TRBV4-2, TRBJ1-5)
CASIRDRGNQPQHF

SEQ ID NO: 422973 - protein, 12 aa, Homo sapiens
  CDR3 for alpha chain variable domain of TCR clone 211487 (TRAV20, TRAJ39)
CAVGNAGNMLTF

SEQ ID NO: 422974 - protein, 17 aa, Homo sapiens
  CDR3 for beta chain variable domain of TCR clone 211487 (TRBV5-1, TRBJ2-5)
CASSLLGLAANQETQYF

SEQ ID NO: 422975 - protein, 14 aa, Homo sapiens
  CDR3 for alpha chain variable domain of TCR clone 211488 (TRAV13-1, TRAJ44)
CAAKATGTASKLTV

SEQ ID NO: 422976 - protein, 16 aa, Homo sapiens
  CDR3 for beta chain variable domain of TCR clone 211488 (TRBV20-1, TRBJ1-4)
CSAPGQGLLTNEKLFF

SEQ ID NO: 422977 - protein, 14 aa, Homo sapiens
  CDR3 for alpha chain variable domain of TCR clone 211489 (TRAV26-1, TRAJ38)
CISDNAGNNRKLIW

SEQ ID NO: 422978 - protein, 13 aa, Homo sapiens
  CDR3 for beta chain variable domain of TCR clone 211489 (TRBV15, TRBJ1-6)
CATSGGLNSPLHF

SEQ ID NO: 422979 - protein, 14 aa, Homo sapiens
  CDR3 for alpha chain variable domain of TCR clone 211490 (TRAV21, TRAJ45)
CAVSSGGGADGLTF

SEQ ID NO: 422980 - protein, 15 aa, Homo sapiens
  CDR3 for beta chain variable domain of TCR clone 211490 (TRBV6-1, TRBJ2-4)
CASNEAVWTINIQYF

SEQ ID NO: 422981 - protein, 14 aa, Homo sapiens
  CDR3 for alpha chain variable domain of TCR clone 211491 (TRAV20, TRAJ22)
CAVQVSGSARQLTF

SEQ ID NO: 422982 - protein, 15 aa, Homo sapiens
  CDR3 for beta chain variable domain of TCR clone 211491 (TRBV7-3, TRBJ2-3)
CASSLGLTLGDTQYF

SEQ ID NO: 422983 - protein, 15 aa, Homo sapiens
  CDR3 for alpha chain variable domain of TCR clone 211492 (TRAV27, TRAJ50)
CAGVGRGTSYDKLIF

SEQ ID NO: 422984 - protein, 14 aa, Homo sapiens
  CDR3 for beta chain variable domain of TCR clone 211492 (TRBV7-2, TRBJ1-1)
CASSFHDLNTEAFF

SEQ ID NO: 422985 - protein, 14 aa, Homo sapiens
  CDR3 for alpha chain variable domain of TCR clone 211493 (TRAV12-2, TRAJ11)
CAVEGGSGYSTLTF

SEQ ID NO: 422986 - protein, 15 aa, Homo sapiens
  CDR3 for beta chain variable domain of TCR clone 211493 (TRBV28, TRBJ2-5)
CASSSGRTIQETQYF

SEQ ID NO: 422987 - protein, 15 aa, Homo sapiens
  CDR3 for alpha chain variable domain of TCR clone 211494 (TRAV3, TRAJ47)
CAVRDIGGYGNKLVF

SEQ ID NO: 422988 - protein, 15 aa, Homo sapiens
  CDR3 for beta chain variable domain of TCR clone 211494 (TRBV7-3, TRBJ2-2)
CASSETGQGTGGLFF

SEQ ID NO: 422989 - protein, 12 aa, Homo sapiens
  CDR3 for alpha chain variable domain of TCR clone 211495 (TRAV12-3, TRAJ34)
CAMGYNTDKLIF

SEQ ID NO: 422990 - protein, 15 aa, Homo sapiens
  CDR3 for beta chain variable domain of TCR clone 211495 (TRBV7-2, TRBJ2-7)
CASSLDPAQGQEQYF

SEQ ID NO: 422991 - protein, 17 aa, Homo sapiens
  CDR3 for alpha chain variable domain of TCR clone 211496 (TRAV13-1, TRAJ5)
CSNPSLSRDTGRRALTF

SEQ ID NO: 422992 - protein, 13 aa, Homo sapiens
  CDR3 for beta chain variable domain of TCR clone 211496 (TRBV12-4, TRBJ2-2)
CASSITGSGELFF

SEQ ID NO: 422993 - protein, 13 aa, Homo sapiens
  CDR3 for alpha chain variable domain of TCR clone 211497 (TRAV13-1, TRAJ6)
CAASSGGSYIPTF

SEQ ID NO: 422994 - protein, 15 aa, Homo sapiens
  CDR3 for beta chain variable domain of TCR clone 211497 (TRBV12-4, TRBJ2-5)
CASSTPTGLQETQYF

SEQ ID NO: 422995 - protein, 12 aa, Homo sapiens
  CDR3 for alpha chain variable domain of TCR clone 211498 (TRAV12-3, TRAJ17)
CAMTLTGNKLTF

SEQ ID NO: 422996 - protein, 12 aa, Homo sapiens
  CDR3 for beta chain variable domain of TCR clone 211498 (TRBV2, TRBJ2-1)
CAYGPPRNEQFF

SEQ ID NO: 422997 - protein, 14 aa, Homo sapiens
  CDR3 for alpha chain variable domain of TCR clone 211499 (TRAV12-2, TRAJ4)
CAEALSGGYNKLIF

SEQ ID NO: 422998 - protein, 13 aa, Homo sapiens
  CDR3 for beta chain variable domain of TCR clone 211499 (TRBV7-9, TRBJ1-2)
CASSLKQNYGYTF

SEQ ID NO: 422999 - protein, 14 aa, Homo sapiens
  CDR3 for alpha chain variable domain of TCR clone 211500 (TRAV8-4, TRAJ48)
CAVSETFGNEKLTF

SEQ ID NO: 423000 - protein, 15 aa, Homo sapiens
  CDR3 for beta chain variable domain of TCR clone 211500 (TRBV4-3, TRBJ1-5)
CASSQEAVGGQPQHF

SEQ ID NO: 423001 - protein, 13 aa, Homo sapiens
  CDR3 for alpha chain variable domain of TCR clone 211501 (TRAV8-3, TRAJ43)
CAVVPYNNNDMRF

SEQ ID NO: 423002 - protein, 15 aa, Homo sapiens
  CDR3 for beta chain variable domain of TCR clone 211501 (TRBV7-2, TRBJ2-5)
CQQPFPTGGEETQYF

SEQ ID NO: 423003 - protein, 17 aa, Homo sapiens
  CDR3 for alpha chain variable domain of TCR clone 211502 (TRAV23/DV6, TRAJ57)
CAASSTLSPGGSEKLVF

SEQ ID NO: 423004 - protein, 14 aa, Homo sapiens
  CDR3 for beta chain variable domain of TCR clone 211502 (TRBV25-1, TRBJ1-1)
CASTHLGGNTEALF

SEQ ID NO: 423005 - protein, 14 aa, Homo sapiens
  CDR3 for alpha chain variable domain of TCR clone 211503 (TRAV16, TRAJ33)
CALSAMDSNYQLIW

SEQ ID NO: 423006 - protein, 17 aa, Homo sapiens
  CDR3 for beta chain variable domain of TCR clone 211503 (TRBV25-1, TRBJ2-7)
WASSDARVVFSSYEQYF

SEQ ID NO: 423007 - protein, 14 aa, Homo sapiens
  CDR3 for alpha chain variable domain of TCR clone 211504 (TRAV1-2, TRAJ16)
CAVNRFSDGQNLPF

SEQ ID NO: 423008 - protein, 15 aa, Homo sapiens
  CDR3 for beta chain variable domain of TCR clone 211504 (TRBV9, TRBJ1-6)
CASSVAGTGDSPLHF

SEQ ID NO: 423009 - protein, 14 aa, Homo sapiens
  CDR3 for alpha chain variable domain of TCR clone 211505 (TRAV8-3, TRAJ35)
CAVVPQGFGNALHC

SEQ ID NO: 423010 - protein, 15 aa, Homo sapiens
  CDR3 for beta chain variable domain of TCR clone 211505 (TRBV6-1, TRBJ2-2)
CASSAGQGYTGELFF

SEQ ID NO: 423011 - protein, 12 aa, Homo sapiens
  CDR3 for alpha chain variable domain of TCR clone 211506 (TRAV4, TRAJ6)
CLAPGGSYIPTF

SEQ ID NO: 423012 - protein, 12 aa, Homo sapiens
  CDR3 for beta chain variable domain of TCR clone 211506 (TRBV6-5, TRBJ2-3)
CASSDTTDTQYC

SEQ ID NO: 423013 - protein, 12 aa, Homo sapiens
  CDR3 for alpha chain variable domain of TCR clone 211507 (TRAV12-3, TRAJ17)
CAMTLTGNELTL

SEQ ID NO: 423014 - protein, 15 aa, Homo sapiens
  CDR3 for beta chain variable domain of TCR clone 211507 (TRBV20-1, TRBJ2-7)
CSARDRVSGMDEQYF

SEQ ID NO: 423015 - protein, 12 aa, Homo sapiens
  CDR3 for alpha chain variable domain of TCR clone 211508 (TRAV4, TRAJ26)
CLVGDYGQNFVF

SEQ ID NO: 423016 - protein, 14 aa, Homo sapiens
  CDR3 for beta chain variable domain of TCR clone 211508 (TRBV7-3, TRBJ2-2)
CASSSGGYTGELFF

SEQ ID NO: 423017 - protein, 13 aa, Homo sapiens
  CDR3 for alpha chain variable domain of TCR clone 211509 (TRAV12-1, TRAJ34)
CVVTGYNTDKLIF

SEQ ID NO: 423018 - protein, 13 aa, Homo sapiens
  CDR3 for beta chain variable domain of TCR clone 211509 (TRBV28, TRBJ2-7)
RASKAGGVYEQYF

SEQ ID NO: 423019 - protein, 14 aa, Homo sapiens
  CDR3 for alpha chain variable domain of TCR clone 211510 (TRAV3, TRAJ36)
CAVRDGTGANSLFF

SEQ ID NO: 423020 - protein, 16 aa, Homo sapiens
  CDR3 for beta chain variable domain of TCR clone 211510 (TRBV20-1, TRBJ2-6)
CSAREGPGVGANVLTF

SEQ ID NO: 423021 - protein, 11 aa, Homo sapiens
  CDR3 for alpha chain variable domain of TCR clone 211511 (TRAV17, TRAJ9)
CGFTGGFKTIF

SEQ ID NO: 423022 - protein, 15 aa, Homo sapiens
  CDR3 for beta chain variable domain of TCR clone 211511 (TRBV6-3, TRBJ2-7)
CASSSPGTVFYEQYF

SEQ ID NO: 423023 - protein, 15 aa, Homo sapiens
  CDR3 for alpha chain variable domain of TCR clone 211512 (TRAV25, TRAJ53)
CPTSNGGGSNYKLTF

SEQ ID NO: 423024 - protein, 17 aa, Homo sapiens
  CDR3 for beta chain variable domain of TCR clone 211512 (TRBV7-8, TRBJ2-1)
CASSPPTGTLAYNEQFF

SEQ ID NO: 423025 - protein, 10 aa, Homo sapiens
  CDR3 for alpha chain variable domain of TCR clone 211513 (TRAV1-2, TRAJ31)
CALFDARLMF

SEQ ID NO: 423026 - protein, 16 aa, Homo sapiens
  CDR3 for beta chain variable domain of TCR clone 211513 (TRBV19, TRBJ2-1)
CASSKAGPSSYNEQFF

SEQ ID NO: 423027 - protein, 14 aa, Homo sapiens
  CDR3 for alpha chain variable domain of TCR clone 211514 (TRAV12-3, TRAJ5)
CAMSTYTGRRALTF

SEQ ID NO: 423028 - protein, 12 aa, Homo sapiens
  CDR3 for beta chain variable domain of TCR clone 211514 (TRBV28, TRBJ2-3)
CQLYGGGDTQYF

SEQ ID NO: 423029 - protein, 14 aa, Homo sapiens
  CDR3 for alpha chain variable domain of TCR clone 211515 (TRAV12-2, TRAJ13)
CAVKKTAGYQKVTF

SEQ ID NO: 423030 - protein, 16 aa, Homo sapiens
  CDR3 for beta chain variable domain of TCR clone 211515 (TRBV12-5, TRBJ2-5)
CASGPRTSGNQETQYF

SEQ ID NO: 423031 - protein, 14 aa, Homo sapiens
  CDR3 for alpha chain variable domain of TCR clone 211516 (TRAV16, TRAJ33)
CALSAMDSNYQLIW

SEQ ID NO: 423032 - protein, 16 aa, Homo sapiens
  CDR3 for beta chain variable domain of TCR clone 211516 (TRBV12-4, TRBJ2-3)
CASSCPSNTNTDTQYF

SEQ ID NO: 423033 - protein, 13 aa, Homo sapiens
  CDR3 for alpha chain variable domain of TCR clone 211517 (TRAV21, TRAJ10)
CAVPTGGGNKLTF

SEQ ID NO: 423034 - protein, 22 aa, Homo sapiens
  CDR3 for beta chain variable domain of TCR clone 211517 (TRBV19, TRBJ2-1)
CASSVRDRVTGTSGGIYNEQFF

SEQ ID NO: 423035 - protein, 16 aa, Homo sapiens
  CDR3 for alpha chain variable domain of TCR clone 211518 (TRAV30, TRAJ24)
CGTEIVDADSWGKFQF

SEQ ID NO: 423036 - protein, 14 aa, Homo sapiens
  CDR3 for beta chain variable domain of TCR clone 211518 (TRBV19, TRBJ2-3)
CASSIDLGGDTQYF

SEQ ID NO: 423037 - protein, 15 aa, Homo sapiens
  CDR3 for alpha chain variable domain of TCR clone 211519 (TRAV2, TRAJ9)
CAVAALNTGGFKTIF

SEQ ID NO: 423038 - protein, 14 aa, Homo sapiens
  CDR3 for beta chain variable domain of TCR clone 211519 (TRBV7-8, TRBJ2-5)
CASSGTGGQETQYF

SEQ ID NO: 423039 - protein, 13 aa, Homo sapiens
  CDR3 for alpha chain variable domain of TCR clone 211520 (TRAV8-1, TRAJ30)
CAVIMNRDDKIIF

SEQ ID NO: 423040 - protein, 15 aa, Homo sapiens
  CDR3 for beta chain variable domain of TCR clone 211520 (TRBV27, TRBJ2-7)
CASSLVGGGAHEQYF

SEQ ID NO: 423041 - protein, 17 aa, Homo sapiens
  CDR3 for alpha chain variable domain of TCR clone 211521 (TRAV2, TRAJ36)
CAVEDRGNWGKQPLLWD

SEQ ID NO: 423042 - protein, 14 aa, Homo sapiens
  CDR3 for beta chain variable domain of TCR clone 211521 (TRBV7-9, TRBJ2-5)
CASSLDTAQVTQYF

SEQ ID NO: 423043 - protein, 15 aa, Homo sapiens
  CDR3 for alpha chain variable domain of TCR clone 211522 (TRAV3, TRAJ9)
CAVRDLNTGGFKTIF

SEQ ID NO: 423044 - protein, 16 aa, Homo sapiens
  CDR3 for beta chain variable domain of TCR clone 211522 (TRBV5-1, TRBJ1-1)
CASSSGGNSLNTEAFF

SEQ ID NO: 423045 - protein, 14 aa, Homo sapiens
  CDR3 for alpha chain variable domain of TCR clone 211523 (TRAV12-3, TRAJ10)
SHLPLTGGGNKLTF

SEQ ID NO: 423046 - protein, 15 aa, Homo sapiens
  CDR3 for beta chain variable domain of TCR clone 211523 (TRBV7-9, TRBJ2-7)
CASSLPMGQANEQYF

SEQ ID NO: 423047 - protein, 14 aa, Homo sapiens
  CDR3 for alpha chain variable domain of TCR clone 211524 (TRAV29/DV5, TRAJ36)
CAARRKTGANNLFF

SEQ ID NO: 423048 - protein, 17 aa, Homo sapiens
  CDR3 for beta chain variable domain of TCR clone 211524 (TRBV20-1, TRBJ2-7)
CSAAGTSGGGSSYEQYF

SEQ ID NO: 423049 - protein, 14 aa, Homo sapiens
  CDR3 for alpha chain variable domain of TCR clone 211525 (TRAV1-2, TRAJ16)
CAVNRFSDGQKLIF

SEQ ID NO: 423050 - protein, 13 aa, Homo sapiens
  CDR3 for beta chain variable domain of TCR clone 211525 (TRBV10-3, TRBJ2-7)
CAISEKGGYEQYF

SEQ ID NO: 423051 - protein, 14 aa, Homo sapiens
  CDR3 for alpha chain variable domain of TCR clone 211526 (TRAV12-2, TRAJ9)
CAVNIEGGGFKTIF

SEQ ID NO: 423052 - protein, 14 aa, Homo sapiens
  CDR3 for beta chain variable domain of TCR clone 211526 (TRBV2, TRBJ2-5)
CASSEVLAQETQYF

SEQ ID NO: 423053 - protein, 12 aa, Homo sapiens
  CDR3 for alpha chain variable domain of TCR clone 211527 (TRAV3, TRAJ20)
CAVRDPDYKLSF

SEQ ID NO: 423054 - protein, 13 aa, Homo sapiens
  CDR3 for beta chain variable domain of TCR clone 211527 (TRBV20-1, TRBJ2-7)
QCSRAGGSREQYF

SEQ ID NO: 423055 - protein, 15 aa, Homo sapiens
  CDR3 for alpha chain variable domain of TCR clone 211528 (TRAV12-1, TRAJ44)
CVADLPTGTASKLTF

SEQ ID NO: 423056 - protein, 13 aa, Homo sapiens
  CDR3 for beta chain variable domain of TCR clone 211528 (TRBV6-5, TRBJ2-5)
YTSSPQGGETQYF

SEQ ID NO: 423057 - protein, 16 aa, Homo sapiens
  CDR3 for alpha chain variable domain of TCR clone 211529 (TRAV30, TRAJ24)
CGTEIVDADRWGKFQF

SEQ ID NO: 423058 - protein, 15 aa, Homo sapiens
  CDR3 for beta chain variable domain of TCR clone 211529 (TRBV7-9, TRBJ1-4)
CASSARTGGNEKLFF

SEQ ID NO: 423059 - protein, 15 aa, Homo sapiens
  CDR3 for alpha chain variable domain of TCR clone 211530 (TRAV13-1, TRAJ50)
CAAKESETSYDKVIF

SEQ ID NO: 423060 - protein, 18 aa, Homo sapiens
  CDR3 for beta chain variable domain of TCR clone 211530 (TRBV10-3, TRBJ2-1)
CTSVPSVSLRGGVDEQFF

SEQ ID NO: 423061 - protein, 11 aa, Homo sapiens
  CDR3 for alpha chain variable domain of TCR clone 211531 (TRAV2, TRAJ40)
CAVEGTYKYIF

SEQ ID NO: 423062 - protein, 11 aa, Homo sapiens
  CDR3 for beta chain variable domain of TCR clone 211531 (TRBV29-1, TRBJ2-5)
CSEDRTGTQYF

SEQ ID NO: 423063 - protein, 17 aa, Homo sapiens
  CDR3 for alpha chain variable domain of TCR clone 211532 (TRAV20, TRAJ45)
CAVQAPDSGGGADGLTF

SEQ ID NO: 423064 - protein, 14 aa, Homo sapiens
  CDR3 for beta chain variable domain of TCR clone 211532 (TRBV12-5, TRBJ2-5)
CASGSRTHQETQYF

SEQ ID NO: 423065 - protein, 15 aa, Homo sapiens
  CDR3 for alpha chain variable domain of TCR clone 211533 (TRAV21, TRAJ40)
CAVRPQTSGTYKYIF

SEQ ID NO: 423066 - protein, 16 aa, Homo sapiens
  CDR3 for beta chain variable domain of TCR clone 211533 (TRBV11-2, TRBJ2-3)
CASSSRTSGGAGTQYF

SEQ ID NO: 423067 - protein, 14 aa, Homo sapiens
  CDR3 for alpha chain variable domain of TCR clone 211534 (TRAV1-2, TRAJ17)
CALRRGAAGNKLTF

SEQ ID NO: 423068 - protein, 13 aa, Homo sapiens
  CDR3 for beta chain variable domain of TCR clone 211534 (TRBV9, TRBJ2-1)
CASGVGQGGEQFF

SEQ ID NO: 423069 - protein, 11 aa, Homo sapiens
  CDR3 for alpha chain variable domain of TCR clone 211535 (TRAV20, TRAJ26)
CAVRYGQNFVF

SEQ ID NO: 423070 - protein, 16 aa, Homo sapiens
  CDR3 for beta chain variable domain of TCR clone 211535 (TRBV25-1, TRBJ1-1)
CASSGDRDRGRIEAFF

SEQ ID NO: 423071 - protein, 11 aa, Homo sapiens
  CDR3 for alpha chain variable domain of TCR clone 211536 (TRAV1-1, TRAJ23)
CAVRQGGKLNF

SEQ ID NO: 423072 - protein, 13 aa, Homo sapiens
  CDR3 for beta chain variable domain of TCR clone 211536 (TRBV11-2, TRBJ2-5)
CASSRGPSETQYF

SEQ ID NO: 423073 - protein, 12 aa, Homo sapiens
  CDR3 for alpha chain variable domain of TCR clone 211537 (TRAV21, TRAJ31)
CAVWGNNARLMF

SEQ ID NO: 423074 - protein, 16 aa, Homo sapiens
  CDR3 for beta chain variable domain of TCR clone 211537 (TRBV27, TRBJ2-5)
CASSYGPGGQRETQYL

SEQ ID NO: 423075 - protein, 17 aa, Homo sapiens
  CDR3 for alpha chain variable domain of TCR clone 211538 (TRAV3, TRAJ6)
CAVRDGPGAGGSYIPTF

SEQ ID NO: 423076 - protein, 20 aa, Homo sapiens
  CDR3 for beta chain variable domain of TCR clone 211538 (TRBV28, TRBJ2-1)
CASTPIGRSPGLAGGNEQFL

SEQ ID NO: 423077 - protein, 16 aa, Homo sapiens
  CDR3 for alpha chain variable domain of TCR clone 211539 (TRAV30, TRAJ42)
CGTEKNYGGSQGNLIF

SEQ ID NO: 423078 - protein, 16 aa, Homo sapiens
  CDR3 for beta chain variable domain of TCR clone 211539 (TRBV19, TRBJ2-2)
CASRSPGTGATGELFF

SEQ ID NO: 423079 - protein, 14 aa, Homo sapiens
  CDR3 for alpha chain variable domain of TCR clone 211540 (TRAV12-3, TRAJ5)
CAMISDTGRRALTF

SEQ ID NO: 423080 - protein, 12 aa, Homo sapiens
  CDR3 for beta chain variable domain of TCR clone 211540 (TRBV5-1, TRBJ2-3)
CASSLAADTQYF

SEQ ID NO: 423081 - protein, 16 aa, Homo sapiens
  CDR3 for alpha chain variable domain of TCR clone 211541 (TRAV3, TRAJ22)
CAVRAIPSGSARQLTF

SEQ ID NO: 423082 - protein, 13 aa, Homo sapiens
  CDR3 for beta chain variable domain of TCR clone 211541 (TRBV7-9, TRBJ1-2)
CASSLKQNYGYTF

SEQ ID NO: 423083 - protein, 16 aa, Homo sapiens
  CDR3 for alpha chain variable domain of TCR clone 211542 (TRAV8-3, TRAJ10)
CAVGPGVTGGGNKFTF

SEQ ID NO: 423084 - protein, 13 aa, Homo sapiens
  CDR3 for beta chain variable domain of TCR clone 211542 (TRBV18, TRBJ1-1)
CASSPGPSGEAFF

SEQ ID NO: 423085 - protein, 11 aa, Homo sapiens
  CDR3 for alpha chain variable domain of TCR clone 211543 (TRAV21, TRAJ9)
CAVPGGFKTIF

SEQ ID NO: 423086 - protein, 12 aa, Homo sapiens
  CDR3 for beta chain variable domain of TCR clone 211543 (TRBV20-1, TRBJ2-3)
CNARVGTDTQYF

SEQ ID NO: 423087 - protein, 11 aa, Homo sapiens
  CDR3 for alpha chain variable domain of TCR clone 211544 (TRAV21, TRAJ34)
CAVTNTDKLIF

SEQ ID NO: 423088 - protein, 15 aa, Homo sapiens
  CDR3 for beta chain variable domain of TCR clone 211544 (TRBV2, TRBJ2-7)
CASSEGLARSYEQYF

SEQ ID NO: 423089 - protein, 14 aa, Homo sapiens
  CDR3 for alpha chain variable domain of TCR clone 211545 (TRAV26-1, TRAJ38)
CIADNAGNNRKLIW

SEQ ID NO: 423090 - protein, 14 aa, Homo sapiens
  CDR3 for beta chain variable domain of TCR clone 211545 (TRBV15, TRBJ1-5)
CATSKAGDNQPQHF

SEQ ID NO: 423091 - protein, 14 aa, Homo sapiens
  CDR3 for alpha chain variable domain of TCR clone 211546 (TRAV26-1, TRAJ45)
CIVRVVGGADGLTF

SEQ ID NO: 423092 - protein, 15 aa, Homo sapiens
  CDR3 for beta chain variable domain of TCR clone 211546 (TRBV11-3, TRBJ2-3)
CASLKDGREGDTQYF

SEQ ID NO: 423093 - protein, 15 aa, Homo sapiens
  CDR3 for alpha chain variable domain of TCR clone 211547 (TRAV8-3, TRAJ27)
CAVGPSKTNAGKSTF

SEQ ID NO: 423094 - protein, 15 aa, Homo sapiens
  CDR3 for beta chain variable domain of TCR clone 211547 (TRBV7-2, TRBJ2-1)
CASSSGLAGGNETFF

SEQ ID NO: 423095 - protein, 15 aa, Homo sapiens
  CDR3 for alpha chain variable domain of TCR clone 211548 (TRAV21, TRAJ24)
CAARSSTDSWGKCSL

SEQ ID NO: 423096 - protein, 13 aa, Homo sapiens
  CDR3 for beta chain variable domain of TCR clone 211548 (TRBV11-2, TRBJ2-5)
CASSSTGEETQYF

SEQ ID NO: 423097 - protein, 13 aa, Homo sapiens
  CDR3 for alpha chain variable domain of TCR clone 211549 (TRAV23/DV6, TRAJ54)
CAASRQGAQKLVF

SEQ ID NO: 423098 - protein, 14 aa, Homo sapiens
  CDR3 for beta chain variable domain of TCR clone 211549 (TRBV7-3, TRBJ2-1)
CASSLAGGTNEQFF

SEQ ID NO: 423099 - protein, 13 aa, Homo sapiens
  CDR3 for alpha chain variable domain of TCR clone 211550 (TRAV27, TRAJ57)
CAGFQGGSEKLVF

SEQ ID NO: 423100 - protein, 14 aa, Homo sapiens
  CDR3 for beta chain variable domain of TCR clone 211550 (TRBV20-1, TRBJ1-2)
CSGRKGGRAYGYTF

SEQ ID NO: 423101 - protein, 15 aa, Homo sapiens
  CDR3 for alpha chain variable domain of TCR clone 211551 (TRAV17, TRAJ57)
CATGPSQGGSEELVF

SEQ ID NO: 423102 - protein, 18 aa, Homo sapiens
  CDR3 for beta chain variable domain of TCR clone 211551 (TRBV7-9, TRBJ2-7)
CASSLTTSGSRTWYEQYF

SEQ ID NO: 423103 - protein, 10 aa, Homo sapiens
  CDR3 for alpha chain variable domain of TCR clone 211552 (TRAV25, TRAJ17)
CQAAGKKITF

SEQ ID NO: 423104 - protein, 13 aa, Homo sapiens
  CDR3 for beta chain variable domain of TCR clone 211552 (TRBV6-5, TRBJ2-2)
CASSLPGVGELFF

SEQ ID NO: 423105 - protein, 15 aa, Homo sapiens
  CDR3 for alpha chain variable domain of TCR clone 211553 (TRAV8-3, TRAJ27)
CAVGPSKTNSGKSTF

SEQ ID NO: 423106 - protein, 15 aa, Homo sapiens
  CDR3 for beta chain variable domain of TCR clone 211553 (TRBV27, TRBJ2-1)
CASSNGGGSSNEQFF

SEQ ID NO: 423107 - protein, 13 aa, Homo sapiens
  CDR3 for alpha chain variable domain of TCR clone 211554 (TRAV12-2, TRAJ6)
CAARGGGSYIPTF

SEQ ID NO: 423108 - protein, 12 aa, Homo sapiens
  CDR3 for beta chain variable domain of TCR clone 211554 (TRBV12-5, TRBJ2-5)
CASGQGVETQYF

SEQ ID NO: 423109 - protein, 14 aa, Homo sapiens
  CDR3 for alpha chain variable domain of TCR clone 211555 (TRAV1-2, TRAJ8)
CAVREDTGFQKLVF

SEQ ID NO: 423110 - protein, 11 aa, Homo sapiens
  CDR3 for beta chain variable domain of TCR clone 211555 (TRBV11-3, TRBJ2-7)
CASSCTYEQYF

SEQ ID NO: 423111 - protein, 16 aa, Homo sapiens
  CDR3 for alpha chain variable domain of TCR clone 211556 (TRAV12-2, TRAJ45)
CAVKRNPGGGADGLTS

SEQ ID NO: 423112 - protein, 12 aa, Homo sapiens
  CDR3 for beta chain variable domain of TCR clone 211556 (TRBV6-1, TRBJ2-5)
CASSEGRETQYF

SEQ ID NO: 423113 - protein, 15 aa, Homo sapiens
  CDR3 for alpha chain variable domain of TCR clone 211557 (TRAV8-3, TRAJ45)
CASSYSGGGADGLTF

SEQ ID NO: 423114 - protein, 17 aa, Homo sapiens
  CDR3 for beta chain variable domain of TCR clone 211557 (TRBV7-8, TRBJ1-2)
CASSVRPLQGHLYGYTF

SEQ ID NO: 423115 - protein, 12 aa, Homo sapiens
  CDR3 for alpha chain variable domain of TCR clone 211558 (TRAV17, TRAJ12)
CATLRSSYKLIF

SEQ ID NO: 423116 - protein, 14 aa, Homo sapiens
  CDR3 for beta chain variable domain of TCR clone 211558 (TRBV4-1, TRBJ2-7)
CASRLTSGSYEQYF

SEQ ID NO: 423117 - protein, 13 aa, Homo sapiens
  CDR3 for alpha chain variable domain of TCR clone 211559 (TRAV12-3, TRAJ33)
CAMSVNSNYQLIW

SEQ ID NO: 423118 - protein, 12 aa, Homo sapiens
  CDR3 for beta chain variable domain of TCR clone 211559 (TRBV5-1, TRBJ2-7)
CASSLDSYEQYF

SEQ ID NO: 423119 - protein, 16 aa, Homo sapiens
  CDR3 for alpha chain variable domain of TCR clone 211560 (TRAV16, TRAJ52)
CALRAAGGTSYGKLTF

SEQ ID NO: 423120 - protein, 16 aa, Homo sapiens
  CDR3 for beta chain variable domain of TCR clone 211560 (TRBV12-4, TRBJ1-5)
CASSRPVGGSNQPQHF

SEQ ID NO: 423121 - protein, 17 aa, Homo sapiens
  CDR3 for alpha chain variable domain of TCR clone 211561 (TRAV27, TRAJ45)
PLPLCMSSGGGADGLAF

SEQ ID NO: 423122 - protein, 17 aa, Homo sapiens
  CDR3 for beta chain variable domain of TCR clone 211561 (TRBV11-2, TRBJ2-1)
CASSLYPPGVEYNKQFF

SEQ ID NO: 423123 - protein, 13 aa, Homo sapiens
  CDR3 for alpha chain variable domain of TCR clone 211562 (TRAV20, TRAJ20)
CAVRCVRDYKLSF

SEQ ID NO: 423124 - protein, 14 aa, Homo sapiens
  CDR3 for beta chain variable domain of TCR clone 211562 (TRBV19, TRBJ2-2)
CASTVTANTGELFF

SEQ ID NO: 423125 - protein, 18 aa, Homo sapiens
  CDR3 for alpha chain variable domain of TCR clone 211563 (TRAV26-2, TRAJ45)
CILRVDKYSGGGADGLTF

SEQ ID NO: 423126 - protein, 14 aa, Homo sapiens
  CDR3 for beta chain variable domain of TCR clone 211563 (TRBV20-1, TRBJ2-7)
CSAWTALSSYEQYF

SEQ ID NO: 423127 - protein, 13 aa, Homo sapiens
  CDR3 for alpha chain variable domain of TCR clone 211564 (TRAV14/DV4, TRAJ23)
CAMREVKGGKLIF

SEQ ID NO: 423128 - protein, 20 aa, Homo sapiens
  CDR3 for beta chain variable domain of TCR clone 211564 (TRBV4-2, TRBJ2-7)
CASSQASGGNLRAVLRAGHQ

SEQ ID NO: 423129 - protein, 15 aa, Homo sapiens
  CDR3 for alpha chain variable domain of TCR clone 211565 (TRAV19, TRAJ9)
CALSLPDNGGFKTIF

SEQ ID NO: 423130 - protein, 17 aa, Homo sapiens
  CDR3 for beta chain variable domain of TCR clone 211565 (TRBV20-1, TRBJ2-1)
CSARDPLAGVWDNEQFF

SEQ ID NO: 423131 - protein, 15 aa, Homo sapiens
  CDR3 for alpha chain variable domain of TCR clone 211566 (TRAV17, TRAJ10)
CATVLLTGGRNKLTF

SEQ ID NO: 423132 - protein, 16 aa, Homo sapiens
  CDR3 for beta chain variable domain of TCR clone 211566 (TRBV7-9, TRBJ2-3)
CASSPWREVGTDTQYF

SEQ ID NO: 423133 - protein, 12 aa, Homo sapiens
  CDR3 for alpha chain variable domain of TCR clone 211567 (TRAV8-6, TRAJ43)
CAVRYNNNDMRF

SEQ ID NO: 423134 - protein, 17 aa, Homo sapiens
  CDR3 for beta chain variable domain of TCR clone 211567 (TRBV13, TRBJ2-3)
CASSLSSVAGGRNTQYF

SEQ ID NO: 423135 - protein, 13 aa, Homo sapiens
  CDR3 for alpha chain variable domain of TCR clone 211568 (TRAV20, TRAJ34)
CAVSSYNTDKLVF

SEQ ID NO: 423136 - protein, 13 aa, Homo sapiens
  CDR3 for beta chain variable domain of TCR clone 211568 (TRBV7-9, TRBJ1-2)
CGSSLKQNYGYTF

SEQ ID NO: 423137 - protein, 14 aa, Homo sapiens
  CDR3 for alpha chain variable domain of TCR clone 211569 (TRAV8-6, TRAJ53)
CAALVLGINYKLTF

SEQ ID NO: 423138 - protein, 15 aa, Homo sapiens
  CDR3 for beta chain variable domain of TCR clone 211569 (TRBV20-1, TRBJ2-3)
CSAEPLAGHGDTQYF

SEQ ID NO: 423139 - protein, 12 aa, Homo sapiens
  CDR3 for alpha chain variable domain of TCR clone 211570 (TRAV27, TRAJ13)
CAGVRGYQKVTF

SEQ ID NO: 423140 - protein, 16 aa, Homo sapiens
  CDR3 for beta chain variable domain of TCR clone 211570 (TRBV28, TRBJ2-1)
CASSSSYSGSINEQFF

SEQ ID NO: 423141 - protein, 16 aa, Homo sapiens
  CDR3 for alpha chain variable domain of TCR clone 211571 (TRAV23/DV6, TRAJ9)
CAASIGGNTGGFKTIF

SEQ ID NO: 423142 - protein, 12 aa, Homo sapiens
  CDR3 for beta chain variable domain of TCR clone 211571 (TRBV11-2, TRBJ2-1)
CASSGQREGQFF

SEQ ID NO: 423143 - protein, 15 aa, Homo sapiens
  CDR3 for alpha chain variable domain of TCR clone 211572 (TRAV21, TRAJ37)
CVVGPTLSNTGKLIF

SEQ ID NO: 423144 - protein, 16 aa, Homo sapiens
  CDR3 for beta chain variable domain of TCR clone 211572 (TRBV24-1, TRBJ2-3)
CATSDRRQDLTDTQYF

SEQ ID NO: 423145 - protein, 18 aa, Homo sapiens
  CDR3 for alpha chain variable domain of TCR clone 211573 (TRAV13-1, TRAJ10)
CAASKGRAVTGGGNKLTV

SEQ ID NO: 423146 - protein, 14 aa, Homo sapiens
  CDR3 for beta chain variable domain of TCR clone 211573 (TRBV18, TRBJ2-7)
CASSPRGGAYEQYF

SEQ ID NO: 423147 - protein, 13 aa, Homo sapiens
  CDR3 for alpha chain variable domain of TCR clone 211574 (TRAV38-1, TRAJ42)
CARWGGSQGNLIF

SEQ ID NO: 423148 - protein, 17 aa, Homo sapiens
  CDR3 for beta chain variable domain of TCR clone 211574 (TRBV20-1, TRBJ2-1)
CSARDPLGGVWDNEQFF

SEQ ID NO: 423149 - protein, 18 aa, Homo sapiens
  CDR3 for alpha chain variable domain of TCR clone 211575 (TRAV21, TRAJ52)
CAVRPSPAGGTSYRKLTF

SEQ ID NO: 423150 - protein, 14 aa, Homo sapiens
  CDR3 for beta chain variable domain of TCR clone 211575 (TRBV5-1, TRBJ1-2)
CASSLEPVNYGYTF

SEQ ID NO: 423151 - protein, 12 aa, Homo sapiens
  CDR3 for alpha chain variable domain of TCR clone 211576 (TRAV30, TRAJ43)
CGTEERGDDMRF

SEQ ID NO: 423152 - protein, 13 aa, Homo sapiens
  CDR3 for beta chain variable domain of TCR clone 211576 (TRBV27, TRBJ2-7)
CASSFSQGYEQYF

SEQ ID NO: 423153 - protein, 14 aa, Homo sapiens
  CDR3 for alpha chain variable domain of TCR clone 211577 (TRAV13-2, TRAJ41)
CAERPDWAGYALNF

SEQ ID NO: 423154 - protein, 16 aa, Homo sapiens
  CDR3 for beta chain variable domain of TCR clone 211577 (TRBV7-7, TRBJ2-1)
CASSLASGTSYNEQFF

SEQ ID NO: 423155 - protein, 13 aa, Homo sapiens
  CDR3 for alpha chain variable domain of TCR clone 211578 (TRAV17, TRAJ9)
CATDYTRGFQTIF

SEQ ID NO: 423156 - protein, 16 aa, Homo sapiens
  CDR3 for beta chain variable domain of TCR clone 211578 (TRBV7-7, TRBJ2-1)
CASSLASGTAYNEHFF

SEQ ID NO: 423157 - protein, 11 aa, Homo sapiens
  CDR3 for alpha chain variable domain of TCR clone 211579 (TRAV17, TRAJ31)
CATSNNARLMF

SEQ ID NO: 423158 - protein, 15 aa, Homo sapiens
  CDR3 for beta chain variable domain of TCR clone 211579 (TRBV7-9, TRBJ1-4)
CASSRTGGFNEKLFF

SEQ ID NO: 423159 - protein, 11 aa, Homo sapiens
  CDR3 for alpha chain variable domain of TCR clone 211580 (TRAV12-1, TRAJ34)
CVVNKGRELIF

SEQ ID NO: 423160 - protein, 14 aa, Homo sapiens
  CDR3 for beta chain variable domain of TCR clone 211580 (TRBV12-4, TRBJ1-1)
CASTWTGHDTEAFF

SEQ ID NO: 423161 - protein, 17 aa, Homo sapiens
  CDR3 for alpha chain variable domain of TCR clone 211581 (TRAV4, TRAJ45)
CLVGDPGSTRGADGLTF

SEQ ID NO: 423162 - protein, 13 aa, Homo sapiens
  CDR3 for beta chain variable domain of TCR clone 211581 (TRBV30, TRBJ2-2)
CAWATSRTGELFF

SEQ ID NO: 423163 - protein, 15 aa, Homo sapiens
  CDR3 for alpha chain variable domain of TCR clone 211582 (TRAV23/DV6, TRAJ32)
CAASKMGGATNKLIF

SEQ ID NO: 423164 - protein, 17 aa, Homo sapiens
  CDR3 for beta chain variable domain of TCR clone 211582 (TRBV10-2, TRBJ1-6)
CASSENRGSSYNSPLHF

SEQ ID NO: 423165 - protein, 16 aa, Homo sapiens
  CDR3 for alpha chain variable domain of TCR clone 211583 (TRAV22, TRAJ45)
CAVARGKRGCADGLTF

SEQ ID NO: 423166 - protein, 17 aa, Homo sapiens
  CDR3 for beta chain variable domain of TCR clone 211583 (TRBV20-1, TRBJ1-5)
CSAREIPQGVGNQPQHF

SEQ ID NO: 423167 - protein, 12 aa, Homo sapiens
  CDR3 for alpha chain variable domain of TCR clone 211584 (TRAV20, TRAJ39)
CAVGNAGNMLTF

SEQ ID NO: 423168 - protein, 16 aa, Homo sapiens
  CDR3 for beta chain variable domain of TCR clone 211584 (TRBV6-1, TRBJ2-5)
CASSETLDRGAETQYF

SEQ ID NO: 423169 - protein, 13 aa, Homo sapiens
  CDR3 for alpha chain variable domain of TCR clone 211585 (TRAV27, TRAJ29)
CAGAHSGNTPLVF

SEQ ID NO: 423170 - protein, 12 aa, Homo sapiens
  CDR3 for beta chain variable domain of TCR clone 211585 (TRBV28, TRBJ2-3)
CASSLYRDTQYF

SEQ ID NO: 423171 - protein, 15 aa, Homo sapiens
  CDR3 for alpha chain variable domain of TCR clone 211586 (TRAV26-1, TRAJ22)
CIVRVSSWFCKATEL

SEQ ID NO: 423172 - protein, 13 aa, Homo sapiens
  CDR3 for beta chain variable domain of TCR clone 211586 (TRBV7-9, TRBJ1-2)
CASSLKQNYGYTF

SEQ ID NO: 423173 - protein, 15 aa, Homo sapiens
  CDR3 for alpha chain variable domain of TCR clone 211587 (TRAV8-2, TRAJ15)
CVVNMGNQAGTALIF

SEQ ID NO: 423174 - protein, 12 aa, Homo sapiens
  CDR3 for beta chain variable domain of TCR clone 211587 (TRBV6-1, TRBJ2-7)
CASSDYSYEQYF

SEQ ID NO: 423175 - protein, 14 aa, Homo sapiens
  CDR3 for alpha chain variable domain of TCR clone 211588 (TRAV17, TRAJ32)
CATEPGGATNKLIF

SEQ ID NO: 423176 - protein, 14 aa, Homo sapiens
  CDR3 for beta chain variable domain of TCR clone 211588 (TRBV12-4, TRBJ1-6)
CASNLQGKGSPLHF

SEQ ID NO: 423177 - protein, 12 aa, Homo sapiens
  CDR3 for alpha chain variable domain of TCR clone 211589 (TRAV21, TRAJ49)
CAVNDGGNQFYF

SEQ ID NO: 423178 - protein, 14 aa, Homo sapiens
  CDR3 for beta chain variable domain of TCR clone 211589 (TRBV18, TRBJ2-7)
CASSPRGGYYEQYF

SEQ ID NO: 423179 - protein, 14 aa, Homo sapiens
  CDR3 for alpha chain variable domain of TCR clone 211590 (TRAV2, TRAJ9)
CAVEDRSGGFKTIF

SEQ ID NO: 423180 - protein, 16 aa, Homo sapiens
  CDR3 for beta chain variable domain of TCR clone 211590 (TRBV10-3, TRBJ2-7)
CAISADFADRPYEQYF

SEQ ID NO: 423181 - protein, 12 aa, Homo sapiens
  CDR3 for alpha chain variable domain of TCR clone 211591 (TRAV3, TRAJ20)
CAVRDPDYKLSF

SEQ ID NO: 423182 - protein, 13 aa, Homo sapiens
  CDR3 for beta chain variable domain of TCR clone 211591 (TRBV28, TRBJ2-2)
CASIRESTGELFF

SEQ ID NO: 423183 - protein, 18 aa, Homo sapiens
  CDR3 for alpha chain variable domain of TCR clone 211592 (TRAV1-2, TRAJ18)
CAVRDMCDRGSTLGRLYF

SEQ ID NO: 423184 - protein, 16 aa, Homo sapiens
  CDR3 for beta chain variable domain of TCR clone 211592 (TRBV29-1, TRBJ1-2)
CSVEANRDIANYGYTC

SEQ ID NO: 423185 - protein, 14 aa, Homo sapiens
  CDR3 for alpha chain variable domain of TCR clone 211593 (TRAV9-2, TRAJ39)
CALYIYNAGNMLTF

SEQ ID NO: 423186 - protein, 11 aa, Homo sapiens
  CDR3 for beta chain variable domain of TCR clone 211593 (TRBV3-1, TRBJ2-7)
CASTSLGEQYF

SEQ ID NO: 423187 - protein, 15 aa, Homo sapiens
  CDR3 for alpha chain variable domain of TCR clone 211594 (TRAV8-4, TRAJ3)
CAVTGENLVQQCFQD

SEQ ID NO: 423188 - protein, 16 aa, Homo sapiens
  CDR3 for beta chain variable domain of TCR clone 211594 (TRBV5-7, TRBJ2-7)
PAATEGGGRGSYEQYF

SEQ ID NO: 423189 - protein, 12 aa, Homo sapiens
  CDR3 for alpha chain variable domain of TCR clone 211595 (TRAV25, TRAJ45)
CAGRGQEEVLTD

SEQ ID NO: 423190 - protein, 17 aa, Homo sapiens
  CDR3 for beta chain variable domain of TCR clone 211595 (TRBV7-8, TRBJ2-6)
CASSAGTGGAGANVLTF

SEQ ID NO: 423191 - protein, 15 aa, Homo sapiens
  CDR3 for alpha chain variable domain of TCR clone 211596 (TRAV12-1, TRAJ36)
CVVNEHPTGANNLFF

SEQ ID NO: 423192 - protein, 14 aa, Homo sapiens
  CDR3 for beta chain variable domain of TCR clone 211596 (TRBV10-3, TRBJ2-5)
CAIRTSGGQETQYF

SEQ ID NO: 423193 - protein, 16 aa, Homo sapiens
  CDR3 for alpha chain variable domain of TCR clone 211597 (TRAV22, TRAJ45)
CAVERGKRGGADGLTF

SEQ ID NO: 423194 - protein, 11 aa, Homo sapiens
  CDR3 for beta chain variable domain of TCR clone 211597 (TRBV29-1, TRBJ2-5)
CSEERTGTQYF

SEQ ID NO: 423195 - protein, 14 aa, Homo sapiens
  CDR3 for alpha chain variable domain of TCR clone 211598 (TRAV12-2, TRAJ17)
CAVLFKAAGNKLTF

SEQ ID NO: 423196 - protein, 16 aa, Homo sapiens
  CDR3 for beta chain variable domain of TCR clone 211598 (TRBV9, TRBJ2-7)
CASSAGPDRSPYEQYF

SEQ ID NO: 423197 - protein, 13 aa, Homo sapiens
  CDR3 for alpha chain variable domain of TCR clone 211599 (TRAV27, TRAJ49)
CAPRPYTGNQFYF

SEQ ID NO: 423198 - protein, 16 aa, Homo sapiens
  CDR3 for beta chain variable domain of TCR clone 211599 (TRBV4-1, TRBJ1-2)
CASSEDAGQVLYGYTF

SEQ ID NO: 423199 - protein, 15 aa, Homo sapiens
  CDR3 for alpha chain variable domain of TCR clone 211600 (TRAV29/DV5, TRAJ42)
CAAKTHGGSQGNLIF

SEQ ID NO: 423200 - protein, 12 aa, Homo sapiens
  CDR3 for beta chain variable domain of TCR clone 211600 (TRBV11-2, TRBJ2-1)
CASSPGNNEQFF

SEQ ID NO: 423201 - protein, 10 aa, Homo sapiens
  CDR3 for alpha chain variable domain of TCR clone 211601 (TRAV36/DV7, TRAJ56)
CAGPALELTF

SEQ ID NO: 423202 - protein, 13 aa, Homo sapiens
  CDR3 for beta chain variable domain of TCR clone 211601 (TRBV7-9, TRBJ2-7)
CASSFWSSYEQYF

SEQ ID NO: 423203 - protein, 13 aa, Homo sapiens
  CDR3 for alpha chain variable domain of TCR clone 211602 (TRAV41, TRAJ44)
CAVISGTASKLTF

SEQ ID NO: 423204 - protein, 17 aa, Homo sapiens
  CDR3 for beta chain variable domain of TCR clone 211602 (TRBV6-3, TRBJ2-1)
CASSYSSGTRGLDEQFF

SEQ ID NO: 423205 - protein, 15 aa, Homo sapiens
  CDR3 for alpha chain variable domain of TCR clone 211603 (TRAV8-6, TRAJ6)
CAVSFKSGGSYIPTF

SEQ ID NO: 423206 - protein, 13 aa, Homo sapiens
  CDR3 for beta chain variable domain of TCR clone 211603 (TRBV29-1, TRBJ2-1)
CSVEGGRVNEQFF

SEQ ID NO: 423207 - protein, 14 aa, Homo sapiens
  CDR3 for alpha chain variable domain of TCR clone 211604 (TRAV8-3, TRAJ44)
CAVGNTGTASKLTF

SEQ ID NO: 423208 - protein, 15 aa, Homo sapiens
  CDR3 for beta chain variable domain of TCR clone 211604 (TRBV28, TRBJ2-7)
CASNFRGQGRYEQYF

SEQ ID NO: 423209 - protein, 17 aa, Homo sapiens
  CDR3 for alpha chain variable domain of TCR clone 211605 (TRAV3, TRAJ6)
CAVRDGTRAGGSYIPTF

SEQ ID NO: 423210 - protein, 16 aa, Homo sapiens
  CDR3 for beta chain variable domain of TCR clone 211605 (TRBV7-8, TRBJ2-3)
CASSTEGQRETDTQYF

SEQ ID NO: 423211 - protein, 14 aa, Homo sapiens
  CDR3 for alpha chain variable domain of TCR clone 211606 (TRAV1-2, TRAJ16)
CAVNRFSDGQKLLF

SEQ ID NO: 423212 - protein, 11 aa, Homo sapiens
  CDR3 for beta chain variable domain of TCR clone 211606 (TRBV4-1, TRBJ2-2)
CSSEHTGELFF

SEQ ID NO: 423213 - protein, 13 aa, Homo sapiens
  CDR3 for alpha chain variable domain of TCR clone 211607 (TRAV17, TRAJ9)
CATDYTGGFKTIF

SEQ ID NO: 423214 - protein, 16 aa, Homo sapiens
  CDR3 for beta chain variable domain of TCR clone 211607 (TRBV7-7, TRBJ2-1)
CASSVASGTSYDEQFF

SEQ ID NO: 423215 - protein, 14 aa, Homo sapiens
  CDR3 for alpha chain variable domain of TCR clone 211608 (TRAV2, TRAJ37)
CAVDFTSNTGKLIF

SEQ ID NO: 423216 - protein, 16 aa, Homo sapiens
  CDR3 for beta chain variable domain of TCR clone 211608 (TRBV19, TRBJ1-5)
CASSIDRGGPRQPQHF

SEQ ID NO: 423217 - protein, 17 aa, Homo sapiens
  CDR3 for alpha chain variable domain of TCR clone 211609 (TRAV8-6, TRAJ58)
CAVSSWVGETSGSRLTF

SEQ ID NO: 423218 - protein, 13 aa, Homo sapiens
  CDR3 for beta chain variable domain of TCR clone 211609 (TRBV11-2, TRBJ2-7)
CASSLEGANEQYF

SEQ ID NO: 423219 - protein, 14 aa, Homo sapiens
  CDR3 for alpha chain variable domain of TCR clone 211610 (TRAV1-2, TRAJ16)
CAVNRFSEGQKLLF

SEQ ID NO: 423220 - protein, 16 aa, Homo sapiens
  CDR3 for beta chain variable domain of TCR clone 211610 (TRBV7-9, TRBJ1-2)
CASSPGGGAINYGYTF

SEQ ID NO: 423221 - protein, 14 aa, Homo sapiens
  CDR3 for alpha chain variable domain of TCR clone 211611 (TRAV4, TRAJ17)
CLVGDMAAGNKLTF

SEQ ID NO: 423222 - protein, 13 aa, Homo sapiens
  CDR3 for beta chain variable domain of TCR clone 211611 (TRBV18, TRBJ2-7)
CTSQSGGGYEQYF

SEQ ID NO: 423223 - protein, 12 aa, Homo sapiens
  CDR3 for alpha chain variable domain of TCR clone 211612 (TRAV12-2, TRAJ31)
CAVNTPDARLMF

SEQ ID NO: 423224 - protein, 14 aa, Homo sapiens
  CDR3 for beta chain variable domain of TCR clone 211612 (TRBV19, TRBJ2-1)
CASPTFVLSGEQFF

SEQ ID NO: 423225 - protein, 14 aa, Homo sapiens
  CDR3 for alpha chain variable domain of TCR clone 211613 (TRAV29/DV5, TRAJ26)
CAASVSPRVRILSF

SEQ ID NO: 423226 - protein, 17 aa, Homo sapiens
  CDR3 for beta chain variable domain of TCR clone 211613 (TRBV20-1, TRBJ2-2)
CSASGSGQGGLTGELFL

SEQ ID NO: 423227 - protein, 12 aa, Homo sapiens
  CDR3 for alpha chain variable domain of TCR clone 211614 (TRAV17, TRAJ36)
CATLTGANNLFF

SEQ ID NO: 423228 - protein, 15 aa, Homo sapiens
  CDR3 for beta chain variable domain of TCR clone 211614 (TRBV19, TRBJ1-2)
CASSTKTDTNYGDTF

SEQ ID NO: 423229 - protein, 11 aa, Homo sapiens
  CDR3 for alpha chain variable domain of TCR clone 211615 (TRAV3, TRAJ21)
CAVGNFNKFYF

SEQ ID NO: 423230 - protein, 13 aa, Homo sapiens
  CDR3 for beta chain variable domain of TCR clone 211615 (TRBV11-1, TRBJ2-5)
CASSFWAQETQYF

SEQ ID NO: 423231 - protein, 16 aa, Homo sapiens
  CDR3 for alpha chain variable domain of TCR clone 211616 (TRAV30, TRAJ24)
CGTEIVDADSWGKSSL

SEQ ID NO: 423232 - protein, 14 aa, Homo sapiens
  CDR3 for beta chain variable domain of TCR clone 211616 (TRBV7-2, TRBJ2-7)
CASSPKTSFYEQYF

SEQ ID NO: 423233 - protein, 14 aa, Homo sapiens
  CDR3 for alpha chain variable domain of TCR clone 211617 (TRAV1-2, TRAJ8)
CAVREDTGFQKLVF

SEQ ID NO: 423234 - protein, 13 aa, Homo sapiens
  CDR3 for beta chain variable domain of TCR clone 211617 (TRBV12-4, TRBJ2-2)
CASSQENTGELFF

SEQ ID NO: 423235 - protein, 14 aa, Homo sapiens
  CDR3 for alpha chain variable domain of TCR clone 211618 (TRAV8-1, TRAJ23)
CAVQAYNQGGKLIF

SEQ ID NO: 423236 - protein, 13 aa, Homo sapiens
  CDR3 for beta chain variable domain of TCR clone 211618 (TRBV5-1, TRBJ2-7)
CASSLEDNQEQYF

SEQ ID NO: 423237 - protein, 13 aa, Homo sapiens
  CDR3 for alpha chain variable domain of TCR clone 211619 (TRAV21, TRAJ13)
CAVNSGGYQKVTF

SEQ ID NO: 423238 - protein, 16 aa, Homo sapiens
  CDR3 for beta chain variable domain of TCR clone 211619 (TRBV20-1, TRBJ1-2)
CSASMGQGVANYGYTF

SEQ ID NO: 423239 - protein, 18 aa, Homo sapiens
  CDR3 for alpha chain variable domain of TCR clone 211620 (TRAV29/DV5, TRAJ53)
CSVLLCSKRGGSNYKLTF

SEQ ID NO: 423240 - protein, 17 aa, Homo sapiens
  CDR3 for beta chain variable domain of TCR clone 211620 (TRBV7-8, TRBJ2-6)
WASSAGTGGAGANVLTF

SEQ ID NO: 423241 - protein, 12 aa, Homo sapiens
  CDR3 for alpha chain variable domain of TCR clone 211621 (TRAV4, TRAJ26)
CLVGDYGQNFVF

SEQ ID NO: 423242 - protein, 14 aa, Homo sapiens
  CDR3 for beta chain variable domain of TCR clone 211621 (TRBV19, TRBJ2-1)
CASSEPGGHGEQFF

SEQ ID NO: 423243 - protein, 13 aa, Homo sapiens
  CDR3 for alpha chain variable domain of TCR clone 211622 (TRAV8-6, TRAJ21)
CAVSPSSLNKFYF

SEQ ID NO: 423244 - protein, 14 aa, Homo sapiens
  CDR3 for beta chain variable domain of TCR clone 211622 (TRBV7-9, TRBJ2-5)
FASSLDTAQETQYF

SEQ ID NO: 423245 - protein, 14 aa, Homo sapiens
  CDR3 for alpha chain variable domain of TCR clone 211623 (TRAV1-2, TRAJ8)
CAVREDTGFQKLVF

SEQ ID NO: 423246 - protein, 18 aa, Homo sapiens
  CDR3 for beta chain variable domain of TCR clone 211623 (TRBV20-1, TRBJ2-2)
CSARVQTARPSGTGELFF

SEQ ID NO: 423247 - protein, 13 aa, Homo sapiens
  CDR3 for alpha chain variable domain of TCR clone 211624 (TRAV21, TRAJ27)
CAARPGTAGKSTL

SEQ ID NO: 423248 - protein, 14 aa, Homo sapiens
  CDR3 for beta chain variable domain of TCR clone 211624 (TRBV7-6, TRBJ2-3)
CASSLGTVTDTQYF

SEQ ID NO: 423249 - protein, 10 aa, Homo sapiens
  CDR3 for alpha chain variable domain of TCR clone 211625 (TRAV36/DV7, TRAJ49)
CASTGNQFYF

SEQ ID NO: 423250 - protein, 14 aa, Homo sapiens
  CDR3 for beta chain variable domain of TCR clone 211625 (TRBV7-9, TRBJ2-2)
CASSLVQDTGELFF

SEQ ID NO: 423251 - protein, 12 aa, Homo sapiens
  CDR3 for alpha chain variable domain of TCR clone 211626 (TRAV21, TRAJ49)
CAVTNTGNQFYF

SEQ ID NO: 423252 - protein, 14 aa, Homo sapiens
  CDR3 for beta chain variable domain of TCR clone 211626 (TRBV25-1, TRBJ1-1)
CASTHLGGNTEAFF

SEQ ID NO: 423253 - protein, 16 aa, Homo sapiens
  CDR3 for alpha chain variable domain of TCR clone 211627 (TRAV1-1, TRAJ37)
CAVRDKALATQANESL

SEQ ID NO: 423254 - protein, 14 aa, Homo sapiens
  CDR3 for beta chain variable domain of TCR clone 211627 (TRBV7-9, TRBJ1-1)
CASTPLQSYTEAFF

SEQ ID NO: 423255 - protein, 13 aa, Homo sapiens
  CDR3 for alpha chain variable domain of TCR clone 211628 (TRAV35, TRAJ21)
CAEQLSNFNKFYF

SEQ ID NO: 423256 - protein, 11 aa, Homo sapiens
  CDR3 for beta chain variable domain of TCR clone 211628 (TRBV7-6, TRBJ2-5)
CASSSQETQYF

SEQ ID NO: 423257 - protein, 12 aa, Homo sapiens
  CDR3 for alpha chain variable domain of TCR clone 211629 (TRAV26-1, TRAJ36)
CIARVRADNLFF

SEQ ID NO: 423258 - protein, 13 aa, Homo sapiens
  CDR3 for beta chain variable domain of TCR clone 211629 (TRBV11-2, TRBJ2-5)
CASSRGPSETQYF

SEQ ID NO: 423259 - protein, 12 aa, Homo sapiens
  CDR3 for alpha chain variable domain of TCR clone 211630 (TRAV4, TRAJ21)
CLVGDNFNKFYF

SEQ ID NO: 423260 - protein, 16 aa, Homo sapiens
  CDR3 for beta chain variable domain of TCR clone 211630 (TRBV5-8, TRBJ2-2)
CASTLASGTNTGELFF

SEQ ID NO: 423261 - protein, 14 aa, Homo sapiens
  CDR3 for alpha chain variable domain of TCR clone 211631 (TRAV13-1, TRAJ44)
CAAKATGTASKLTF

SEQ ID NO: 423262 - protein, 15 aa, Homo sapiens
  CDR3 for beta chain variable domain of TCR clone 211631 (TRBV7-2, TRBJ1-2)
CASSLVSGGDYGYTF

SEQ ID NO: 423263 - protein, 12 aa, Homo sapiens
  CDR3 for alpha chain variable domain of TCR clone 211632 (TRAV16, TRAJ10)
CSRTGGGNKLTF

SEQ ID NO: 423264 - protein, 15 aa, Homo sapiens
  CDR3 for beta chain variable domain of TCR clone 211632 (TRBV7-9, TRBJ1-6)
CTSSSPGRGNSPLHF

SEQ ID NO: 423265 - protein, 11 aa, Homo sapiens
  CDR3 for alpha chain variable domain of TCR clone 211633 (TRAV17, TRAJ21)
CATGNFSKFYF

SEQ ID NO: 423266 - protein, 16 aa, Homo sapiens
  CDR3 for beta chain variable domain of TCR clone 211633 (TRBV2, TRBJ2-1)
CASSANPRDWQAEQFF

SEQ ID NO: 423267 - protein, 15 aa, Homo sapiens
  CDR3 for alpha chain variable domain of TCR clone 211634 (TRAV38-2/DV8, TRAJ48)
CAYRSEGFGNEKLTF

SEQ ID NO: 423268 - protein, 16 aa, Homo sapiens
  CDR3 for beta chain variable domain of TCR clone 211634 (TRBV28, TRBJ2-7)
CASSPWVATGDLSQYF

SEQ ID NO: 423269 - protein, 15 aa, Homo sapiens
  CDR3 for alpha chain variable domain of TCR clone 211635 (TRAV27, TRAJ38)
CAARRNAGNNRKLIW

SEQ ID NO: 423270 - protein, 13 aa, Homo sapiens
  CDR3 for beta chain variable domain of TCR clone 211635 (TRBV12-5, TRBJ2-3)
CASGDRQSETQYF

SEQ ID NO: 423271 - protein, 15 aa, Homo sapiens
  CDR3 for alpha chain variable domain of TCR clone 211636 (TRAV25, TRAJ52)
CAGRPGGTSYGKLTF

SEQ ID NO: 423272 - protein, 17 aa, Homo sapiens
  CDR3 for beta chain variable domain of TCR clone 211636 (TRBV7-8, TRBJ2-6)
CAGSAGTGGAGANDLTF

SEQ ID NO: 423273 - protein, 12 aa, Homo sapiens
  CDR3 for alpha chain variable domain of TCR clone 211637 (TRAV8-4, TRAJ37)
CAKSSNTGKLIF

SEQ ID NO: 423274 - protein, 16 aa, Homo sapiens
  CDR3 for beta chain variable domain of TCR clone 211637 (TRBV7-7, TRBJ2-1)
CASSLASGTSYNEQLF

SEQ ID NO: 423275 - protein, 14 aa, Homo sapiens
  CDR3 for alpha chain variable domain of TCR clone 211638 (TRAV35, TRAJ50)
CAGHRKTSYDKVLF

SEQ ID NO: 423276 - protein, 13 aa, Homo sapiens
  CDR3 for beta chain variable domain of TCR clone 211638 (TRBV7-7, TRBJ2-3)
CASSLSRADTQYF

SEQ ID NO: 423277 - protein, 16 aa, Homo sapiens
  CDR3 for alpha chain variable domain of TCR clone 211639 (TRAV14/DV4, TRAJ20)
CAMREGRSRDDYKLSF

SEQ ID NO: 423278 - protein, 11 aa, Homo sapiens
  CDR3 for beta chain variable domain of TCR clone 211639 (TRBV11-2, TRBJ2-2)
CASSLPGELFF

SEQ ID NO: 423279 - protein, 12 aa, Homo sapiens
  CDR3 for alpha chain variable domain of TCR clone 211640 (TRAV2, TRAJ9)
CAVGAGGFKTIF

SEQ ID NO: 423280 - protein, 13 aa, Homo sapiens
  CDR3 for beta chain variable domain of TCR clone 211640 (TRBV27, TRBJ2-7)
CASSFSQGYEQYF

SEQ ID NO: 423281 - protein, 12 aa, Homo sapiens
  CDR3 for alpha chain variable domain of TCR clone 211641 (TRAV12-3, TRAJ17)
CAMTLKGNKLTF

SEQ ID NO: 423282 - protein, 15 aa, Homo sapiens
  CDR3 for beta chain variable domain of TCR clone 211641 (TRBV11-3, TRBJ2-3)
CASLKDGREGDTQYF

SEQ ID NO: 423283 - protein, 16 aa, Homo sapiens
  CDR3 for alpha chain variable domain of TCR clone 211642 (TRAV26-2, TRAJ57)
CILRDVGAGGSEKLVL

SEQ ID NO: 423284 - protein, 13 aa, Homo sapiens
  CDR3 for beta chain variable domain of TCR clone 211642 (TRBV18, TRBJ2-3)
CASSPGVTDTQYF

SEQ ID NO: 423285 - protein, 14 aa, Homo sapiens
  CDR3 for alpha chain variable domain of TCR clone 211643 (TRAV16, TRAJ54)
CALSLIQGAQQLVF

SEQ ID NO: 423286 - protein, 17 aa, Homo sapiens
  CDR3 for beta chain variable domain of TCR clone 211643 (TRBV11-2, TRBJ2-4)
CASSSVGPGGHRNIQYF

SEQ ID NO: 423287 - protein, 14 aa, Homo sapiens
  CDR3 for alpha chain variable domain of TCR clone 211644 (TRAV12-3, TRAJ58)
CNEVVETSGSRLTF

SEQ ID NO: 423288 - protein, 12 aa, Homo sapiens
  CDR3 for beta chain variable domain of TCR clone 211644 (TRBV7-8, TRBJ2-7)
CASSLGDREQYF

SEQ ID NO: 423289 - protein, 14 aa, Homo sapiens
  CDR3 for alpha chain variable domain of TCR clone 211645 (TRAV12-1, TRAJ17)
CVVNYKAAGNKLTF

SEQ ID NO: 423290 - protein, 16 aa, Homo sapiens
  CDR3 for beta chain variable domain of TCR clone 211645 (TRBV4-3, TRBJ1-2)
CASSQDRGWRLHGYTF

SEQ ID NO: 423291 - protein, 10 aa, Homo sapiens
  CDR3 for alpha chain variable domain of TCR clone 211646 (TRAV9-2, TRAJ34)
CALSDDKLIL

SEQ ID NO: 423292 - protein, 14 aa, Homo sapiens
  CDR3 for beta chain variable domain of TCR clone 211646 (TRBV7-8, TRBJ2-7)
CASSVGQGAYEQYF

SEQ ID NO: 423293 - protein, 17 aa, Homo sapiens
  CDR3 for alpha chain variable domain of TCR clone 211647 (TRAV3, TRAJ38)
CAVRDCLNAGTNRKLIW

SEQ ID NO: 423294 - protein, 14 aa, Homo sapiens
  CDR3 for beta chain variable domain of TCR clone 211647 (TRBV7-3, TRBJ2-1)
CASSLAGGTNEQFF

SEQ ID NO: 423295 - protein, 12 aa, Homo sapiens
  CDR3 for alpha chain variable domain of TCR clone 211648 (TRAV12-1, TRAJ23)
CVVNIPGGKLIF

SEQ ID NO: 423296 - protein, 17 aa, Homo sapiens
  CDR3 for beta chain variable domain of TCR clone 211648 (TRBV13, TRBJ2-3)
CASSSLGTSGLTDTQYF

SEQ ID NO: 423297 - protein, 14 aa, Homo sapiens
  CDR3 for alpha chain variable domain of TCR clone 211649 (TRAV3, TRAJ7)
CAVREEEREQQTRF

SEQ ID NO: 423298 - protein, 12 aa, Homo sapiens
  CDR3 for beta chain variable domain of TCR clone 211649 (TRBV5-1, TRBJ1-2)
CASSQDTYGYTF

SEQ ID NO: 423299 - protein, 14 aa, Homo sapiens
  CDR3 for alpha chain variable domain of TCR clone 211650 (TRAV2, TRAJ42)
CAVVGGGSQGNRIF

SEQ ID NO: 423300 - protein, 15 aa, Homo sapiens
  CDR3 for beta chain variable domain of TCR clone 211650 (TRBV11-3, TRBJ2-3)
CASSFRAAFPDTQYF

SEQ ID NO: 423301 - protein, 12 aa, Homo sapiens
  CDR3 for alpha chain variable domain of TCR clone 211651 (TRAV12-3, TRAJ17)
CAMTLTGNKLTF

SEQ ID NO: 423302 - protein, 15 aa, Homo sapiens
  CDR3 for beta chain variable domain of TCR clone 211651 (TRBV5-5, TRBJ1-5)
CASSLKGGGEQPQHF

SEQ ID NO: 423303 - protein, 21 aa, Homo sapiens
  CDR3 for alpha chain variable domain of TCR clone 211652 (TRAV26-1, TRAJ38)
CIADNAGNNHIQNPDPVVYQL

SEQ ID NO: 423304 - protein, 13 aa, Homo sapiens
  CDR3 for beta chain variable domain of TCR clone 211652 (TRBV20-1, TRBJ1-1)
CSARGGGNTEAFF

SEQ ID NO: 423305 - protein, 16 aa, Homo sapiens
  CDR3 for alpha chain variable domain of TCR clone 211653 (TRAV35, TRAJ20)
CWADPSSGFNDYKLSF

SEQ ID NO: 423306 - protein, 16 aa, Homo sapiens
  CDR3 for beta chain variable domain of TCR clone 211653 (TRBV4-3, TRBJ1-6)
CASSAQPGGECSPLHF

SEQ ID NO: 423307 - protein, 12 aa, Homo sapiens
  CDR3 for alpha chain variable domain of TCR clone 211654 (TRAV13-1, TRAJ49)
CAASPMGNQFYF

SEQ ID NO: 423308 - protein, 15 aa, Homo sapiens
  CDR3 for beta chain variable domain of TCR clone 211654 (TRBV5-1, TRBJ2-2)
CASSSQGGNTGELFF

SEQ ID NO: 423309 - protein, 13 aa, Homo sapiens
  CDR3 for alpha chain variable domain of TCR clone 211655 (TRAV3, TRAJ21)
CAVREPDFNKFYF

SEQ ID NO: 423310 - protein, 16 aa, Homo sapiens
  CDR3 for beta chain variable domain of TCR clone 211655 (TRBV5-1, TRBJ1-1)
CASSSGGNSLNTEAFF

SEQ ID NO: 423311 - protein, 15 aa, Homo sapiens
  CDR3 for alpha chain variable domain of TCR clone 211656 (TRAV3, TRAJ32)
CAVSSYGGSTNKLIF

SEQ ID NO: 423312 - protein, 13 aa, Homo sapiens
  CDR3 for beta chain variable domain of TCR clone 211656 (TRBV7-9, TRBJ1-2)
CASSLKQNYGYTF

SEQ ID NO: 423313 - protein, 12 aa, Homo sapiens
  CDR3 for alpha chain variable domain of TCR clone 211657 (TRAV8-6, TRAJ11)
CAVSSGYSTLTF

SEQ ID NO: 423314 - protein, 11 aa, Homo sapiens
  CDR3 for beta chain variable domain of TCR clone 211657 (TRBV20-1, TRBJ1-5)
CSAQWDQPQHF

SEQ ID NO: 423315 - protein, 17 aa, Homo sapiens
  CDR3 for alpha chain variable domain of TCR clone 211658 (TRAV13-1, TRAJ31)
CAPRDRLMFGDGTQLVV

SEQ ID NO: 423316 - protein, 15 aa, Homo sapiens
  CDR3 for beta chain variable domain of TCR clone 211658 (TRBV4-1, TRBJ1-4)
CASSDTGGTNEKLFF

SEQ ID NO: 423317 - protein, 12 aa, Homo sapiens
  CDR3 for alpha chain variable domain of TCR clone 211659 (TRAV12-1, TRAJ40)
CVLSSGTYKYIF

SEQ ID NO: 423318 - protein, 14 aa, Homo sapiens
  CDR3 for beta chain variable domain of TCR clone 211659 (TRBV20-1, TRBJ2-2)
CSAPDTANTGELFF

SEQ ID NO: 423319 - protein, 13 aa, Homo sapiens
  CDR3 for alpha chain variable domain of TCR clone 211660 (TRAV1-2, TRAJ9)
CAVLNTGGFKPIF

SEQ ID NO: 423320 - protein, 14 aa, Homo sapiens
  CDR3 for beta chain variable domain of TCR clone 211660 (TRBV19, TRBJ2-1)
CASPTFVLSGEQFF

SEQ ID NO: 423321 - protein, 13 aa, Homo sapiens
  CDR3 for alpha chain variable domain of TCR clone 211661 (TRAV23/DV6, TRAJ15)
CSKLHQAGTALIF

SEQ ID NO: 423322 - protein, 16 aa, Homo sapiens
  CDR3 for beta chain variable domain of TCR clone 211661 (TRBV4-2, TRBJ1-1)
CASSQAGFGMNTEAFF

SEQ ID NO: 423323 - protein, 18 aa, Homo sapiens
  CDR3 for alpha chain variable domain of TCR clone 211662 (TRAV26-2, TRAJ32)
CILRAPLNYGGATNKLIF

SEQ ID NO: 423324 - protein, 16 aa, Homo sapiens
  CDR3 for beta chain variable domain of TCR clone 211662 (TRBV13, TRBJ2-2)
CASSPRTGEHTGELFF

SEQ ID NO: 423325 - protein, 20 aa, Homo sapiens
  CDR3 for alpha chain variable domain of TCR clone 211663 (TRAV25, TRAJ21)
TATQTTDVGTYPLSFNKFYF

SEQ ID NO: 423326 - protein, 15 aa, Homo sapiens
  CDR3 for beta chain variable domain of TCR clone 211663 (TRBV4-1, TRBJ2-7)
CASSQQGQGFDEQYF

SEQ ID NO: 423327 - protein, 12 aa, Homo sapiens
  CDR3 for alpha chain variable domain of TCR clone 211664 (TRAV21, TRAJ31)
CVLAGNNARLMF

SEQ ID NO: 423328 - protein, 16 aa, Homo sapiens
  CDR3 for beta chain variable domain of TCR clone 211664 (TRBV7-8, TRBJ2-4)
CASSAERTLAKNIQYF

SEQ ID NO: 423329 - protein, 14 aa, Homo sapiens
  CDR3 for alpha chain variable domain of TCR clone 211665 (TRAV12-1, TRAJ17)
CAVNIKAAGNKLTF

SEQ ID NO: 423330 - protein, 16 aa, Homo sapiens
  CDR3 for beta chain variable domain of TCR clone 211665 (TRBV20-1, TRBJ2-6)
CSASSQGYDGANVLTF

SEQ ID NO: 423331 - protein, 12 aa, Homo sapiens
  CDR3 for alpha chain variable domain of TCR clone 211666 (TRAV21, TRAJ15)
CAVRNQGTALIF

SEQ ID NO: 423332 - protein, 16 aa, Homo sapiens
  CDR3 for beta chain variable domain of TCR clone 211666 (TRBV20-1, TRBJ2-5)
CSPGGTSGGYMETQYF

SEQ ID NO: 423333 - protein, 16 aa, Homo sapiens
  CDR3 for alpha chain variable domain of TCR clone 211667 (TRAV16, TRAJ52)
CALSAAGGTSYGKLTF

SEQ ID NO: 423334 - protein, 16 aa, Homo sapiens
  CDR3 for beta chain variable domain of TCR clone 211667 (TRBV19, TRBJ2-2)
CASSPSGGLNTGELFF

SEQ ID NO: 423335 - protein, 13 aa, Homo sapiens
  CDR3 for alpha chain variable domain of TCR clone 211668 (TRAV30, TRAJ49)
CGTESQPVTSSIL

SEQ ID NO: 423336 - protein, 14 aa, Homo sapiens
  CDR3 for beta chain variable domain of TCR clone 211668 (TRBV25-1, TRBJ1-1)
CASTHLGGNTEAFF

SEQ ID NO: 423337 - protein, 18 aa, Homo sapiens
  CDR3 for alpha chain variable domain of TCR clone 211669 (TRAV21, TRAJ52)
CAVMPSPAGGTSYGKLTF

SEQ ID NO: 423338 - protein, 14 aa, Homo sapiens
  CDR3 for beta chain variable domain of TCR clone 211669 (TRBV7-9, TRBJ2-1)
CASSDNSGYNEQFF

SEQ ID NO: 423339 - protein, 16 aa, Homo sapiens
  CDR3 for alpha chain variable domain of TCR clone 211670 (TRAV30, TRAJ24)
CGPEIVDADSWGKFQF

SEQ ID NO: 423340 - protein, 14 aa, Homo sapiens
  CDR3 for beta chain variable domain of TCR clone 211670 (TRBV25-1, TRBJ1-1)
CASTHLGGNTEAFF

SEQ ID NO: 423341 - protein, 14 aa, Homo sapiens
  CDR3 for alpha chain variable domain of TCR clone 211671 (TRAV12-3, TRAJ10)
SLLPLTGGGNKLTF

SEQ ID NO: 423342 - protein, 14 aa, Homo sapiens
  CDR3 for beta chain variable domain of TCR clone 211671 (TRBV6-1, TRBJ1-3)
CASVQGGGGNTIYF

SEQ ID NO: 423343 - protein, 16 aa, Homo sapiens
  CDR3 for alpha chain variable domain of TCR clone 211672 (TRAV3, TRAJ10)
CAVRDMRAGGGNKITF

SEQ ID NO: 423344 - protein, 12 aa, Homo sapiens
  CDR3 for beta chain variable domain of TCR clone 211672 (TRBV7-8, TRBJ2-7)
CASSLGDREQYF

SEQ ID NO: 423345 - protein, 14 aa, Homo sapiens
  CDR3 for alpha chain variable domain of TCR clone 211673 (TRAV12-3, TRAJ10)
SHLPLTGGENKLTF

SEQ ID NO: 423346 - protein, 12 aa, Homo sapiens
  CDR3 for beta chain variable domain of TCR clone 211673 (TRBV7-3, TRBJ2-5)
CASSSPGGTQYF

SEQ ID NO: 423347 - protein, 14 aa, Homo sapiens
  CDR3 for alpha chain variable domain of TCR clone 211674 (TRAV6, TRAJ37)
CALGSQGNTGKLIF

SEQ ID NO: 423348 - protein, 15 aa, Homo sapiens
  CDR3 for beta chain variable domain of TCR clone 211674 (TRBV2, TRBJ2-1)
CASSEERGGDNEQFF

SEQ ID NO: 423349 - protein, 14 aa, Homo sapiens
  CDR3 for alpha chain variable domain of TCR clone 211675 (TRAV35, TRAJ13)
CAGSPSGGYQNVTF

SEQ ID NO: 423350 - protein, 14 aa, Homo sapiens
  CDR3 for beta chain variable domain of TCR clone 211675 (TRBV12-5, TRBJ2-5)
CASGSRTHQETQYF

SEQ ID NO: 423351 - protein, 12 aa, Homo sapiens
  CDR3 for alpha chain variable domain of TCR clone 211676 (TRAV21, TRAJ13)
PGPSGGYQKVTF

SEQ ID NO: 423352 - protein, 17 aa, Homo sapiens
  CDR3 for beta chain variable domain of TCR clone 211676 (TRBV7-9, TRBJ1-6)
CASSSPGRGNSPLPLGT

SEQ ID NO: 423353 - protein, 12 aa, Homo sapiens
  CDR3 for alpha chain variable domain of TCR clone 211677 (TRAV13-1, TRAJ11)
CAADSGYSTLTF

SEQ ID NO: 423354 - protein, 14 aa, Homo sapiens
  CDR3 for beta chain variable domain of TCR clone 211677 (TRBV7-2, TRBJ2-7)
CASSPKTSFYEQYF

SEQ ID NO: 423355 - protein, 14 aa, Homo sapiens
  CDR3 for alpha chain variable domain of TCR clone 211678 (TRAV36/DV7, TRAJ35)
CAVEDRGFGNVLHC

SEQ ID NO: 423356 - protein, 16 aa, Homo sapiens
  CDR3 for beta chain variable domain of TCR clone 211678 (TRBV19, TRBJ2-2)
CASRSPGTGATGELFF

SEQ ID NO: 423357 - protein, 16 aa, Homo sapiens
  CDR3 for alpha chain variable domain of TCR clone 211679 (TRAV8-2, TRAJ7)
CVVSEGPYYGNNRLAF

SEQ ID NO: 423358 - protein, 15 aa, Homo sapiens
  CDR3 for beta chain variable domain of TCR clone 211679 (TRBV7-2, TRBJ2-2)
CASRRPGQNTGELFF

SEQ ID NO: 423359 - protein, 11 aa, Homo sapiens
  CDR3 for alpha chain variable domain of TCR clone 211680 (TRAV12-3, TRAJ27)
CAMANAGKPTF

SEQ ID NO: 423360 - protein, 13 aa, Homo sapiens
  CDR3 for beta chain variable domain of TCR clone 211680 (TRBV20-1, TRBJ1-1)
CSAPLGGGTEAFF

SEQ ID NO: 423361 - protein, 12 aa, Homo sapiens
  CDR3 for alpha chain variable domain of TCR clone 211681 (TRAV30, TRAJ39)
CGRGNAGNMLTF

SEQ ID NO: 423362 - protein, 12 aa, Homo sapiens
  CDR3 for beta chain variable domain of TCR clone 211681 (TRBV28, TRBJ2-3)
CASSLYRDTQYF

SEQ ID NO: 423363 - protein, 11 aa, Homo sapiens
  CDR3 for alpha chain variable domain of TCR clone 211682 (TRAV2, TRAJ33)
CAVDSNYQLIW

SEQ ID NO: 423364 - protein, 14 aa, Homo sapiens
  CDR3 for beta chain variable domain of TCR clone 211682 (TRBV2, TRBJ2-5)
CASKRDGTTETQYF

SEQ ID NO: 423365 - protein, 11 aa, Homo sapiens
  CDR3 for alpha chain variable domain of TCR clone 211683 (TRAV1-2, TRAJ20)
CAVANDYKLSF

SEQ ID NO: 423366 - protein, 15 aa, Homo sapiens
  CDR3 for beta chain variable domain of TCR clone 211683 (TRBV19, TRBJ1-2)
CASSVGQVLNYGYTF

SEQ ID NO: 423367 - protein, 18 aa, Homo sapiens
  CDR3 for alpha chain variable domain of TCR clone 211684 (TRAV13-1, TRAJ52)
CAAKNPNAGGTSYGTLTF

SEQ ID NO: 423368 - protein, 15 aa, Homo sapiens
  CDR3 for beta chain variable domain of TCR clone 211684 (TRBV20-1, TRBJ2-7)
CSARDRVSGMDEQYF

SEQ ID NO: 423369 - protein, 16 aa, Homo sapiens
  CDR3 for alpha chain variable domain of TCR clone 211685 (TRAV12-3, TRAJ53)
CAMSPGSGGGNDKLTF

SEQ ID NO: 423370 - protein, 15 aa, Homo sapiens
  CDR3 for beta chain variable domain of TCR clone 211685 (TRBV7-2, TRBJ2-1)
CASSSGLAGGNEQFF

SEQ ID NO: 423371 - protein, 12 aa, Homo sapiens
  CDR3 for alpha chain variable domain of TCR clone 211686 (TRAV1-2, TRAJ26)
CAVRYYGQNFVF

SEQ ID NO: 423372 - protein, 15 aa, Homo sapiens
  CDR3 for beta chain variable domain of TCR clone 211686 (TRBV28, TRBJ2-1)
CASTIIAGGRSEQFF

SEQ ID NO: 423373 - protein, 12 aa, Homo sapiens
  CDR3 for alpha chain variable domain of TCR clone 211687 (TRAV1-1, TRAJ39)
CAVPVVGNMLTF

SEQ ID NO: 423374 - protein, 15 aa, Homo sapiens
  CDR3 for beta chain variable domain of TCR clone 211687 (TRBV19, TRBJ1-6)
CASSTPGAVGSPLHF

SEQ ID NO: 423375 - protein, 17 aa, Homo sapiens
  CDR3 for alpha chain variable domain of TCR clone 211688 (TRAV8-6, TRAJ8)
CAVKEGIENTGFQKLVF

SEQ ID NO: 423376 - protein, 14 aa, Homo sapiens
  CDR3 for beta chain variable domain of TCR clone 211688 (TRBV19, TRBJ1-4)
CASKDWPGDCFLAV

SEQ ID NO: 423377 - protein, 14 aa, Homo sapiens
  CDR3 for alpha chain variable domain of TCR clone 211689 (TRAV36/DV7, TRAJ44)
CCGANTGTASKLTF

SEQ ID NO: 423378 - protein, 12 aa, Homo sapiens
  CDR3 for beta chain variable domain of TCR clone 211689 (TRBV24-1, TRBJ1-1)
CATSDSDRGAFF

SEQ ID NO: 423379 - protein, 19 aa, Homo sapiens
  CDR3 for alpha chain variable domain of TCR clone 211690 (TRAV1-2, TRAJ26)
CLLPLCCERPDNYGQNFVF

SEQ ID NO: 423380 - protein, 17 aa, Homo sapiens
  CDR3 for beta chain variable domain of TCR clone 211690 (TRBV24-1, TRBJ2-4)
CATSDAEARGVRNIQYF

SEQ ID NO: 423381 - protein, 12 aa, Homo sapiens
  CDR3 for alpha chain variable domain of TCR clone 211691 (TRAV17, TRAJ45)
CAAGGGADGLTF

SEQ ID NO: 423382 - protein, 15 aa, Homo sapiens
  CDR3 for beta chain variable domain of TCR clone 211691 (TRBV20-1, TRBJ2-7)
SSARDRVSGMDEQYF

SEQ ID NO: 423383 - protein, 16 aa, Homo sapiens
  CDR3 for alpha chain variable domain of TCR clone 211692 (TRAV30, TRAJ24)
CGTEIVDADSWGKFQF

SEQ ID NO: 423384 - protein, 16 aa, Homo sapiens
  CDR3 for beta chain variable domain of TCR clone 211692 (TRBV2, TRBJ1-3)
CASSGGSGRSGHTIYF

SEQ ID NO: 423385 - protein, 13 aa, Homo sapiens
  CDR3 for alpha chain variable domain of TCR clone 211693 (TRAV1-2, TRAJ9)
CAALNTEALKLSL

SEQ ID NO: 423386 - protein, 13 aa, Homo sapiens
  CDR3 for beta chain variable domain of TCR clone 211693 (TRBV19, TRBJ1-2)
CASSVPGQDGYTF

SEQ ID NO: 423387 - protein, 12 aa, Homo sapiens
  CDR3 for alpha chain variable domain of TCR clone 211694 (TRAV13-2, TRAJ23)
CAERHRGGKLIF

SEQ ID NO: 423388 - protein, 14 aa, Homo sapiens
  CDR3 for beta chain variable domain of TCR clone 211694 (TRBV11-2, TRBJ1-2)
CASSLRTANYGYTF

SEQ ID NO: 423389 - protein, 13 aa, Homo sapiens
  CDR3 for alpha chain variable domain of TCR clone 211695 (TRAV12-3, TRAJ7)
CATTPYGNNRLAF

SEQ ID NO: 423390 - protein, 16 aa, Homo sapiens
  CDR3 for beta chain variable domain of TCR clone 211695 (TRBV20-1, TRBJ1-4)
CSARPYGGELNEKLFF

SEQ ID NO: 423391 - protein, 14 aa, Homo sapiens
  CDR3 for alpha chain variable domain of TCR clone 211696 (TRAV12-2, TRAJ40)
CAVKIPSGTYKYIF

SEQ ID NO: 423392 - protein, 17 aa, Homo sapiens
  CDR3 for beta chain variable domain of TCR clone 211696 (TRBV7-9, TRBJ2-3)
CASSLEEAGAYPDTQYF

SEQ ID NO: 423393 - protein, 15 aa, Homo sapiens
  CDR3 for alpha chain variable domain of TCR clone 211697 (TRAV26-2, TRAJ39)
CSLRGNNNAGNMLTF

SEQ ID NO: 423394 - protein, 17 aa, Homo sapiens
  CDR3 for beta chain variable domain of TCR clone 211697 (TRBV7-8, TRBJ2-6)
CASSAGTGGAGANVLTF

SEQ ID NO: 423395 - protein, 13 aa, Homo sapiens
  CDR3 for alpha chain variable domain of TCR clone 211698 (TRAV27, TRAJ41)
CAGEGNSGYALNF

SEQ ID NO: 423396 - protein, 16 aa, Homo sapiens
  CDR3 for beta chain variable domain of TCR clone 211698 (TRBV20-1, TRBJ1-4)
CSAPGQGSLTNEKLFF

SEQ ID NO: 423397 - protein, 11 aa, Homo sapiens
  CDR3 for alpha chain variable domain of TCR clone 211699 (TRAV27, TRAJ47)
SIVEYGNKLVF

SEQ ID NO: 423398 - protein, 18 aa, Homo sapiens
  CDR3 for beta chain variable domain of TCR clone 211699 (TRBV2, TRBJ2-1)
CASRGLAGGPRTYDEQFF

SEQ ID NO: 423399 - protein, 22 aa, Homo sapiens
  CDR3 for alpha chain variable domain of TCR clone 211700 (TRAV8-4, )
CAVRDGNNHIQNPDPAVYQLRD

SEQ ID NO: 423400 - protein, 13 aa, Homo sapiens
  CDR3 for beta chain variable domain of TCR clone 211700 (TRBV7-9, TRBJ2-5)
CASLPSGRETQYF

SEQ ID NO: 423401 - protein, 13 aa, Homo sapiens
  CDR3 for alpha chain variable domain of TCR clone 211701 (TRAV12-1, TRAJ6)
CVVFPGGSYIPTF

SEQ ID NO: 423402 - protein, 13 aa, Homo sapiens
  CDR3 for beta chain variable domain of TCR clone 211701 (TRBV20-1, TRBJ2-5)
CSAATELQETQYF

SEQ ID NO: 423403 - protein, 13 aa, Homo sapiens
  CDR3 for alpha chain variable domain of TCR clone 211702 (TRAV2, TRAJ40)
CAVVTSGTYKYIF

SEQ ID NO: 423404 - protein, 12 aa, Homo sapiens
  CDR3 for beta chain variable domain of TCR clone 211702 (TRBV19, TRBJ2-7)
CASTSGTYEQYF

SEQ ID NO: 423405 - protein, 13 aa, Homo sapiens
  CDR3 for alpha chain variable domain of TCR clone 211703 (TRAV12-2, TRAJ42)
CAVKRGSQGNLIF

SEQ ID NO: 423406 - protein, 15 aa, Homo sapiens
  CDR3 for beta chain variable domain of TCR clone 211703 (TRBV5-1, TRBJ1-1)
CASSLGEGENTEAFF

SEQ ID NO: 423407 - protein, 14 aa, Homo sapiens
  CDR3 for alpha chain variable domain of TCR clone 211704 (TRAV26-1, TRAJ31)
CIVRGGDNNARLMF

SEQ ID NO: 423408 - protein, 13 aa, Homo sapiens
  CDR3 for beta chain variable domain of TCR clone 211704 (TRBV20-1, TRBJ2-7)
CSATHTSGYEQYF

SEQ ID NO: 423409 - protein, 15 aa, Homo sapiens
  CDR3 for alpha chain variable domain of TCR clone 211705 (TRAV27, TRAJ45)
CAPVDSGGGADGLTF

SEQ ID NO: 423410 - protein, 15 aa, Homo sapiens
  CDR3 for beta chain variable domain of TCR clone 211705 (TRBV5-1, TRBJ1-1)
CASSVDRLGNAEAFF

SEQ ID NO: 423411 - protein, 14 aa, Homo sapiens
  CDR3 for alpha chain variable domain of TCR clone 211706 (TRAV8-3, TRAJ4)
CAVGASGGYNKLIF

SEQ ID NO: 423412 - protein, 14 aa, Homo sapiens
  CDR3 for beta chain variable domain of TCR clone 211706 (TRBV19, TRBJ2-1)
CASPTFVLSGEQFF

SEQ ID NO: 423413 - protein, 13 aa, Homo sapiens
  CDR3 for alpha chain variable domain of TCR clone 211707 (TRAV8-6, TRAJ49)
CAVITNTGNQFYF

SEQ ID NO: 423414 - protein, 15 aa, Homo sapiens
  CDR3 for beta chain variable domain of TCR clone 211707 (TRBV10-3, TRBJ2-1)
CAIRNGTSGHNEQFF

SEQ ID NO: 423415 - protein, 14 aa, Homo sapiens
  CDR3 for alpha chain variable domain of TCR clone 211708 (TRAV1-2, TRAJ27)
CAVRSGTTAGKSTF

SEQ ID NO: 423416 - protein, 15 aa, Homo sapiens
  CDR3 for beta chain variable domain of TCR clone 211708 (TRBV18, TRBJ2-7)
CASSPLQGRTYEQYF

SEQ ID NO: 423417 - protein, 13 aa, Homo sapiens
  CDR3 for alpha chain variable domain of TCR clone 211709 (TRAV12-2, TRAJ9)
CAVKWAGGFKTIF

SEQ ID NO: 423418 - protein, 15 aa, Homo sapiens
  CDR3 for beta chain variable domain of TCR clone 211709 (TRBV5-1, TRBJ1-4)
CASSSTADSDEKLFF

SEQ ID NO: 423419 - protein, 15 aa, Homo sapiens
  CDR3 for alpha chain variable domain of TCR clone 211710 (TRAV2, TRAJ24)
CAEVRLKNSWGKLQF

SEQ ID NO: 423420 - protein, 17 aa, Homo sapiens
  CDR3 for beta chain variable domain of TCR clone 211710 (TRBV13, TRBJ2-3)
CASSLSRVAGGRNTQYF

SEQ ID NO: 423421 - protein, 14 aa, Homo sapiens
  CDR3 for alpha chain variable domain of TCR clone 211711 (TRAV27, TRAJ45)
CAGAQEEVLTDLPL

SEQ ID NO: 423422 - protein, 11 aa, Homo sapiens
  CDR3 for beta chain variable domain of TCR clone 211711 (TRBV19, TRBJ1-1)
CASSIGSEAFF

SEQ ID NO: 423423 - protein, 16 aa, Homo sapiens
  CDR3 for alpha chain variable domain of TCR clone 211712 (TRAV8-4, TRAJ18)
CAVTANGGSTLGRLYF

SEQ ID NO: 423424 - protein, 14 aa, Homo sapiens
  CDR3 for beta chain variable domain of TCR clone 211712 (TRBV12-4, TRBJ1-2)
CASSSAGHIYVYTF

SEQ ID NO: 423425 - protein, 11 aa, Homo sapiens
  CDR3 for alpha chain variable domain of TCR clone 211713 (TRAV3, TRAJ21)
CAVGNFNKFYF

SEQ ID NO: 423426 - protein, 15 aa, Homo sapiens
  CDR3 for beta chain variable domain of TCR clone 211713 (TRBV27, TRBJ1-5)
CASTFNRGSNQPQHF

SEQ ID NO: 423427 - protein, 13 aa, Homo sapiens
  CDR3 for alpha chain variable domain of TCR clone 211714 (TRAV17, TRAJ7)
CAMDNYGNNRLAF

SEQ ID NO: 423428 - protein, 16 aa, Homo sapiens
  CDR3 for beta chain variable domain of TCR clone 211714 (TRBV4-1, TRBJ2-5)
CASSQAIAASSATQYF

SEQ ID NO: 423429 - protein, 13 aa, Homo sapiens
  CDR3 for alpha chain variable domain of TCR clone 211715 (TRAV8-1, TRAJ30)
CAVIVNRDDKIIF

SEQ ID NO: 423430 - protein, 14 aa, Homo sapiens
  CDR3 for beta chain variable domain of TCR clone 211715 (TRBV7-2, TRBJ1-6)
CASSLQGANSPLHF

SEQ ID NO: 423431 - protein, 14 aa, Homo sapiens
  CDR3 for alpha chain variable domain of TCR clone 211716 (TRAV17, TRAJ22)
CATVLSGSARQLTF

SEQ ID NO: 423432 - protein, 15 aa, Homo sapiens
  CDR3 for beta chain variable domain of TCR clone 211716 (TRBV5-4, TRBJ2-1)
CASSFSGGSYNEQFF

SEQ ID NO: 423433 - protein, 14 aa, Homo sapiens
  CDR3 for alpha chain variable domain of TCR clone 211717 (TRAV26-1, TRAJ38)
CIADNAGNKRKLIW

SEQ ID NO: 423434 - protein, 17 aa, Homo sapiens
  CDR3 for beta chain variable domain of TCR clone 211717 (TRBV15, TRBJ1-1)
CATSRVGGADGDTEAFF

SEQ ID NO: 423435 - protein, 12 aa, Homo sapiens
  CDR3 for alpha chain variable domain of TCR clone 211718 (TRAV27, TRAJ42)
CRSSRKQGNLIF

SEQ ID NO: 423436 - protein, 15 aa, Homo sapiens
  CDR3 for beta chain variable domain of TCR clone 211718 (TRBV10-3, TRBJ2-2)
CAIRTDREDTGELFF

SEQ ID NO: 423437 - protein, 13 aa, Homo sapiens
  CDR3 for alpha chain variable domain of TCR clone 211719 (TRAV1-2, TRAJ24)
CAVRADSWGKFQF

SEQ ID NO: 423438 - protein, 13 aa, Homo sapiens
  CDR3 for beta chain variable domain of TCR clone 211719 (TRBV20-1, TRBJ2-1)
CRATGLAGDEQFF

SEQ ID NO: 423439 - protein, 12 aa, Homo sapiens
  CDR3 for alpha chain variable domain of TCR clone 211720 (TRAV13-1, TRAJ21)
CAAKEGFNKFYF

SEQ ID NO: 423440 - protein, 19 aa, Homo sapiens
  CDR3 for beta chain variable domain of TCR clone 211720 (TRBV2, TRBJ2-7)
CASSDAETSGRANDYEQYF

SEQ ID NO: 423441 - protein, 18 aa, Homo sapiens
  CDR3 for alpha chain variable domain of TCR clone 211721 (TRAV26-2, TRAJ45)
CILRLWGYSGGGADGLTF

SEQ ID NO: 423442 - protein, 15 aa, Homo sapiens
  CDR3 for beta chain variable domain of TCR clone 211721 (TRBV7-9, TRBJ1-4)
CASSRTGSFNEKLFF

SEQ ID NO: 423443 - protein, 12 aa, Homo sapiens
  CDR3 for alpha chain variable domain of TCR clone 211722 (TRAV27, TRAJ20)
CAGASNDYKLSF

SEQ ID NO: 423444 - protein, 14 aa, Homo sapiens
  CDR3 for beta chain variable domain of TCR clone 211722 (TRBV20-1, TRBJ2-1)
CSAQIGGSANEQFF

SEQ ID NO: 423445 - protein, 14 aa, Homo sapiens
  CDR3 for alpha chain variable domain of TCR clone 211723 (TRAV1-2, TRAJ8)
CAVREYTGFQKLVF

SEQ ID NO: 423446 - protein, 16 aa, Homo sapiens
  CDR3 for beta chain variable domain of TCR clone 211723 (TRBV7-6, TRBJ2-6)
CASSLPGLSWANVLTF

SEQ ID NO: 423447 - protein, 12 aa, Homo sapiens
  CDR3 for alpha chain variable domain of TCR clone 211724 (TRAV8-4, TRAJ37)
CAVRSNTVKLIF

SEQ ID NO: 423448 - protein, 16 aa, Homo sapiens
  CDR3 for beta chain variable domain of TCR clone 211724 (TRBV7-2, TRBJ2-3)
CASSLVGDASTDTRYF

SEQ ID NO: 423449 - protein, 17 aa, Homo sapiens
  CDR3 for alpha chain variable domain of TCR clone 211725 (TRAV13-1, TRAJ28)
CAASPTYSGAGSYQLTF

SEQ ID NO: 423450 - protein, 13 aa, Homo sapiens
  CDR3 for beta chain variable domain of TCR clone 211725 (TRBV12-5, TRBJ2-3)
CASGDRQSDTQYF

SEQ ID NO: 423451 - protein, 12 aa, Homo sapiens
  CDR3 for alpha chain variable domain of TCR clone 211726 (TRAV12-1, TRAJ40)
CVVYSGTYKYIF

SEQ ID NO: 423452 - protein, 14 aa, Homo sapiens
  CDR3 for beta chain variable domain of TCR clone 211726 (TRBV5-4, TRBJ2-1)
CASSLDQGLNEQFF

SEQ ID NO: 423453 - protein, 10 aa, Homo sapiens
  CDR3 for alpha chain variable domain of TCR clone 211727 (TRAV2, TRAJ15)
SGQAGTALIF

SEQ ID NO: 423454 - protein, 12 aa, Homo sapiens
  CDR3 for beta chain variable domain of TCR clone 211727 (TRBV11-2, TRBJ2-2)
CASSLGGGELFF

SEQ ID NO: 423455 - protein, 14 aa, Homo sapiens
  CDR3 for alpha chain variable domain of TCR clone 211728 (TRAV25, TRAJ6)
CAGRESGGSYIPTF

SEQ ID NO: 423456 - protein, 16 aa, Homo sapiens
  CDR3 for beta chain variable domain of TCR clone 211728 (TRBV15, TRBJ1-2)
CATSRGPRTGGGGYTF

SEQ ID NO: 423457 - protein, 15 aa, Homo sapiens
  CDR3 for alpha chain variable domain of TCR clone 211729 (TRAV25, TRAJ53)
CPTSNSGGSYYKLTF

SEQ ID NO: 423458 - protein, 14 aa, Homo sapiens
  CDR3 for beta chain variable domain of TCR clone 211729 (TRBV11-2, TRBJ2-3)
CASSRLARTDTQYF

SEQ ID NO: 423459 - protein, 13 aa, Homo sapiens
  CDR3 for alpha chain variable domain of TCR clone 211730 (TRAV27, TRAJ6)
CAGGTRGSYIPTF

SEQ ID NO: 423460 - protein, 13 aa, Homo sapiens
  CDR3 for beta chain variable domain of TCR clone 211730 (TRBV4-1, TRBJ2-2)
CASSKENTGELFF

SEQ ID NO: 423461 - protein, 21 aa, Homo sapiens
  CDR3 for alpha chain variable domain of TCR clone 211731 (TRAV1-1, TRAJ6)
CLLLLRCERLERTGGSYIPTF

SEQ ID NO: 423462 - protein, 16 aa, Homo sapiens
  CDR3 for beta chain variable domain of TCR clone 211731 (TRBV5-4, TRBJ2-3)
CASQQPGAGGADTQYF

SEQ ID NO: 423463 - protein, 13 aa, Homo sapiens
  CDR3 for alpha chain variable domain of TCR clone 211732 (TRAV12-1, TRAJ22)
CVASGGSARQLTF

SEQ ID NO: 423464 - protein, 20 aa, Homo sapiens
  CDR3 for beta chain variable domain of TCR clone 211732 (TRBV7-8, TRBJ2-2)
CASSHLFPGPTIHITGELFF

SEQ ID NO: 423465 - protein, 14 aa, Homo sapiens
  CDR3 for alpha chain variable domain of TCR clone 211733 (TRAV21, TRAJ37)
CAVKGSSNTGKLIF

SEQ ID NO: 423466 - protein, 17 aa, Homo sapiens
  CDR3 for beta chain variable domain of TCR clone 211733 (TRBV25-1, TRBJ2-5)
CASSRRGGRGGQETQYF

SEQ ID NO: 423467 - protein, 17 aa, Homo sapiens
  CDR3 for alpha chain variable domain of TCR clone 211734 (TRAV12-3, TRAJ4)
CAMTGAGTRRAVHPYIQ

SEQ ID NO: 423468 - protein, 14 aa, Homo sapiens
  CDR3 for beta chain variable domain of TCR clone 211734 (TRBV10-3, TRBJ1-1)
CAISDTDRGVEAFF

SEQ ID NO: 423469 - protein, 15 aa, Homo sapiens
  CDR3 for alpha chain variable domain of TCR clone 211735 (TRAV25, TRAJ53)
CPTSNSGGSKYKLTF

SEQ ID NO: 423470 - protein, 14 aa, Homo sapiens
  CDR3 for beta chain variable domain of TCR clone 211735 (TRBV7-2, TRBJ2-7)
CASSPKTSFYEQYF

SEQ ID NO: 423471 - protein, 16 aa, Homo sapiens
  CDR3 for alpha chain variable domain of TCR clone 211736 (TRAV3, TRAJ5)
CAVRNLMDTGLRALTF

SEQ ID NO: 423472 - protein, 16 aa, Homo sapiens
  CDR3 for beta chain variable domain of TCR clone 211736 (TRBV4-2, TRBJ2-7)
CASSQEGLANSYEQYF

SEQ ID NO: 423473 - protein, 13 aa, Homo sapiens
  CDR3 for alpha chain variable domain of TCR clone 211737 (TRAV29/DV5, TRAJ31)
CAASRNNNARLMF

SEQ ID NO: 423474 - protein, 12 aa, Homo sapiens
  CDR3 for beta chain variable domain of TCR clone 211737 (TRBV14, TRBJ2-5)
CASSHIKETQYF

SEQ ID NO: 423475 - protein, 13 aa, Homo sapiens
  CDR3 for alpha chain variable domain of TCR clone 211738 (TRAV22, TRAJ29)
CAVGGSGNTPLVF

SEQ ID NO: 423476 - protein, 13 aa, Homo sapiens
  CDR3 for beta chain variable domain of TCR clone 211738 (TRBV4-2, TRBJ1-1)
GASSQAGNTEAFF

SEQ ID NO: 423477 - protein, 16 aa, Homo sapiens
  CDR3 for alpha chain variable domain of TCR clone 211739 (TRAV3, TRAJ21)
CAVRDIERGNFNKFYF

SEQ ID NO: 423478 - protein, 13 aa, Homo sapiens
  CDR3 for beta chain variable domain of TCR clone 211739 (TRBV20-1, TRBJ1-1)
CSARGGGNTEAFF

SEQ ID NO: 423479 - protein, 11 aa, Homo sapiens
  CDR3 for alpha chain variable domain of TCR clone 211740 (TRAV1-2, TRAJ31)
CAVNNNARLMF

SEQ ID NO: 423480 - protein, 14 aa, Homo sapiens
  CDR3 for beta chain variable domain of TCR clone 211740 (TRBV28, TRBJ2-1)
CSSIIAGGRSEQFF

SEQ ID NO: 423481 - protein, 14 aa, Homo sapiens
  CDR3 for alpha chain variable domain of TCR clone 211741 (TRAV12-2, TRAJ13)
CAEKKTGGYQKVTF

SEQ ID NO: 423482 - protein, 12 aa, Homo sapiens
  CDR3 for beta chain variable domain of TCR clone 211741 (TRBV12-4, TRBJ1-2)
CASSFIWLHLRF

SEQ ID NO: 423483 - protein, 14 aa, Homo sapiens
  CDR3 for alpha chain variable domain of TCR clone 211742 (TRAV12-2, TRAJ13)
CAVKKTGGYQKVTF

SEQ ID NO: 423484 - protein, 15 aa, Homo sapiens
  CDR3 for beta chain variable domain of TCR clone 211742 (TRBV12-4, TRBJ2-5)
CASSPPTGLQENQYF

SEQ ID NO: 423485 - protein, 15 aa, Homo sapiens
  CDR3 for alpha chain variable domain of TCR clone 211743 (TRAV8-3, TRAJ35)
CAVVATIGFGNVLHC

SEQ ID NO: 423486 - protein, 11 aa, Homo sapiens
  CDR3 for beta chain variable domain of TCR clone 211743 (TRBV24-1, TRBJ2-5)
CATSIGETQYF

SEQ ID NO: 423487 - protein, 16 aa, Homo sapiens
  CDR3 for alpha chain variable domain of TCR clone 211744 (TRAV3, TRAJ37)
CAVRGKGSGNTGKLIF

SEQ ID NO: 423488 - protein, 15 aa, Homo sapiens
  CDR3 for beta chain variable domain of TCR clone 211744 (TRBV19, TRBJ2-3)
CASSVSTTSTDTQYF

SEQ ID NO: 423489 - protein, 17 aa, Homo sapiens
  CDR3 for alpha chain variable domain of TCR clone 211745 (TRAV4, TRAJ18)
CLVGERSVGSTLGRLYF

SEQ ID NO: 423490 - protein, 18 aa, Homo sapiens
  CDR3 for beta chain variable domain of TCR clone 211745 (TRBV11-2, TRBJ2-3)
CASSLGGAARGAPNTQYF

SEQ ID NO: 423491 - protein, 14 aa, Homo sapiens
  CDR3 for alpha chain variable domain of TCR clone 211746 (TRAV12-2, TRAJ53)
CAVKGGGSNYKLTF

SEQ ID NO: 423492 - protein, 14 aa, Homo sapiens
  CDR3 for beta chain variable domain of TCR clone 211746 (TRBV7-7, TRBJ2-2)
CATRRDSDTGELFF

SEQ ID NO: 423493 - protein, 15 aa, Homo sapiens
  CDR3 for alpha chain variable domain of TCR clone 211747 (TRAV21, TRAJ53)
CATLNSGGSNYKLTF

SEQ ID NO: 423494 - protein, 17 aa, Homo sapiens
  CDR3 for beta chain variable domain of TCR clone 211747 (TRBV11-2, TRBJ2-1)
CASSLYPPGIEYNEQFF

SEQ ID NO: 423495 - protein, 16 aa, Homo sapiens
  CDR3 for alpha chain variable domain of TCR clone 211748 (TRAV30, TRAJ24)
CGTEIVDADSWGKFQF

SEQ ID NO: 423496 - protein, 14 aa, Homo sapiens
  CDR3 for beta chain variable domain of TCR clone 211748 (TRBV11-3, TRBJ2-3)
CASSLAASTDTQYF

SEQ ID NO: 423497 - protein, 15 aa, Homo sapiens
  CDR3 for alpha chain variable domain of TCR clone 211749 (TRAV29/DV5, TRAJ29)
CAASERSSGNTPLVF

SEQ ID NO: 423498 - protein, 12 aa, Homo sapiens
  CDR3 for beta chain variable domain of TCR clone 211749 (TRBV7-3, TRBJ2-5)
RASSPGKETQYF

SEQ ID NO: 423499 - protein, 13 aa, Homo sapiens
  CDR3 for alpha chain variable domain of TCR clone 211750 (TRAV17, TRAJ5)
CALRGTGRGALTF

SEQ ID NO: 423500 - protein, 15 aa, Homo sapiens
  CDR3 for beta chain variable domain of TCR clone 211750 (TRBV6-1, TRBJ1-5)
CASSELREGNQPQHF

SEQ ID NO: 423501 - protein, 10 aa, Homo sapiens
  CDR3 for alpha chain variable domain of TCR clone 211751 (TRAV12-1, TRAJ43)
CVVHNNDMRF

SEQ ID NO: 423502 - protein, 15 aa, Homo sapiens
  CDR3 for beta chain variable domain of TCR clone 211751 (TRBV6-6, TRBJ1-5)
CASSSIQGTNQPQHF

SEQ ID NO: 423503 - protein, 13 aa, Homo sapiens
  CDR3 for alpha chain variable domain of TCR clone 211752 (TRAV8-3, TRAJ28)
CAVGAVGSYQLTC

SEQ ID NO: 423504 - protein, 15 aa, Homo sapiens
  CDR3 for beta chain variable domain of TCR clone 211752 (TRBV7-9, TRBJ1-5)
CAISQGHQPNQPQHF

SEQ ID NO: 423505 - protein, 13 aa, Homo sapiens
  CDR3 for alpha chain variable domain of TCR clone 211753 (TRAV23/DV6, TRAJ58)
CAASELGGSRLTF

SEQ ID NO: 423506 - protein, 15 aa, Homo sapiens
  CDR3 for beta chain variable domain of TCR clone 211753 (TRBV19, TRBJ1-1)
CASTSGQIQNTEAFF

SEQ ID NO: 423507 - protein, 18 aa, Homo sapiens
  CDR3 for alpha chain variable domain of TCR clone 211754 (TRAV21, TRAJ52)
CAVRPSPAGGTSYGRLTF

SEQ ID NO: 423508 - protein, 16 aa, Homo sapiens
  CDR3 for beta chain variable domain of TCR clone 211754 (TRBV13, TRBJ2-3)
CQQPLQGSGGRNTQYF

SEQ ID NO: 423509 - protein, 16 aa, Homo sapiens
  CDR3 for alpha chain variable domain of TCR clone 211755 (TRAV8-3, TRAJ45)
CAVGDGSGGGADGLTF

SEQ ID NO: 423510 - protein, 14 aa, Homo sapiens
  CDR3 for beta chain variable domain of TCR clone 211755 (TRBV7-2, TRBJ2-7)
CASRSQGAAYEQYF

SEQ ID NO: 423511 - protein, 13 aa, Homo sapiens
  CDR3 for alpha chain variable domain of TCR clone 211756 (TRAV13-2, TRAJ40)
CAELISGTYKYIF

SEQ ID NO: 423512 - protein, 13 aa, Homo sapiens
  CDR3 for beta chain variable domain of TCR clone 211756 (TRBV2, TRBJ2-1)
CASTRDRNNEQFF

SEQ ID NO: 423513 - protein, 10 aa, Homo sapiens
  CDR3 for alpha chain variable domain of TCR clone 211757 (TRAV23/DV6, TRAJ57)
CAASSTLSQG

SEQ ID NO: 423514 - protein, 13 aa, Homo sapiens
  CDR3 for beta chain variable domain of TCR clone 211757 (TRBV25-1, TRBJ2-5)
CASSPGGVETQYF

SEQ ID NO: 423515 - protein, 17 aa, Homo sapiens
  CDR3 for alpha chain variable domain of TCR clone 211758 (TRAV3, TRAJ42)
CAVRDMDNGGSQGNLIF

SEQ ID NO: 423516 - protein, 12 aa, Homo sapiens
  CDR3 for beta chain variable domain of TCR clone 211758 (TRBV11-2, TRBJ2-1)
CASSPGNNEQFF

SEQ ID NO: 423517 - protein, 12 aa, Homo sapiens
  CDR3 for alpha chain variable domain of TCR clone 211759 (TRAV12-3, TRAJ17)
CAMTLTGNKLTF

SEQ ID NO: 423518 - protein, 13 aa, Homo sapiens
  CDR3 for beta chain variable domain of TCR clone 211759 (TRBV29-1, TRBJ2-5)
CSVEATAQGTQYF

SEQ ID NO: 423519 - protein, 15 aa, Homo sapiens
  CDR3 for alpha chain variable domain of TCR clone 211760 (TRAV26-1, TRAJ5)
CIVRAQHTGRRALTF

SEQ ID NO: 423520 - protein, 12 aa, Homo sapiens
  CDR3 for beta chain variable domain of TCR clone 211760 (TRBV11-2, TRBJ2-2)
CASSLGGGELFF

SEQ ID NO: 423521 - protein, 13 aa, Homo sapiens
  CDR3 for alpha chain variable domain of TCR clone 211761 (TRAV12-3, TRAJ48)
CALPSSGNEKLTF

SEQ ID NO: 423522 - protein, 13 aa, Homo sapiens
  CDR3 for beta chain variable domain of TCR clone 211761 (TRBV7-9, TRBJ1-2)
CASSLKRNYGYTF

SEQ ID NO: 423523 - protein, 11 aa, Homo sapiens
  CDR3 for alpha chain variable domain of TCR clone 211762 (TRAV8-1, TRAJ43)
CAVTNDMRFGA

SEQ ID NO: 423524 - protein, 13 aa, Homo sapiens
  CDR3 for beta chain variable domain of TCR clone 211762 (TRBV10-2, TRBJ1-1)
CASNDQMNTEAFF

SEQ ID NO: 423525 - protein, 16 aa, Homo sapiens
  CDR3 for alpha chain variable domain of TCR clone 211763 (TRAV26-1, TRAJ53)
CIVRVATGGSNYKLAF

SEQ ID NO: 423526 - protein, 12 aa, Homo sapiens
  CDR3 for beta chain variable domain of TCR clone 211763 (TRBV7-9, TRBJ1-5)
CASSPQGQPQHF

SEQ ID NO: 423527 - protein, 14 aa, Homo sapiens
  CDR3 for alpha chain variable domain of TCR clone 211764 (TRAV2, TRAJ22)
CAVGRGGSARQLTF

SEQ ID NO: 423528 - protein, 12 aa, Homo sapiens
  CDR3 for beta chain variable domain of TCR clone 211764 (TRBV19, TRBJ2-1)
WASSMQDTEQFF

SEQ ID NO: 423529 - protein, 11 aa, Homo sapiens
  CDR3 for alpha chain variable domain of TCR clone 211765 (TRAV4, TRAJ23)
CLVGRKAYLRT

SEQ ID NO: 423530 - protein, 14 aa, Homo sapiens
  CDR3 for beta chain variable domain of TCR clone 211765 (TRBV7-3, TRBJ1-1)
CASSLKGGNTEAFF

SEQ ID NO: 423531 - protein, 15 aa, Homo sapiens
  CDR3 for alpha chain variable domain of TCR clone 211766 (TRAV17, TRAJ57)
CATGPSQGGPEKLVF

SEQ ID NO: 423532 - protein, 16 aa, Homo sapiens
  CDR3 for beta chain variable domain of TCR clone 211766 (TRBV12-4, TRBJ1-5)
CASSRPVGGSNQPQHF

SEQ ID NO: 423533 - protein, 13 aa, Homo sapiens
  CDR3 for alpha chain variable domain of TCR clone 211767 (TRAV2, TRAJ40)
CAVVTSGTYKYIF

SEQ ID NO: 423534 - protein, 16 aa, Homo sapiens
  CDR3 for beta chain variable domain of TCR clone 211767 (TRBV7-2, TRBJ1-2)
CASSSNQDRRGHGYAF

SEQ ID NO: 423535 - protein, 13 aa, Homo sapiens
  CDR3 for alpha chain variable domain of TCR clone 211768 (TRAV16, TRAJ34)
CALTGYNTDKLIF

SEQ ID NO: 423536 - protein, 13 aa, Homo sapiens
  CDR3 for beta chain variable domain of TCR clone 211768 (TRBV6-1, TRBJ2-1)
CPSREDGGHEQFF

SEQ ID NO: 423537 - protein, 14 aa, Homo sapiens
  CDR3 for alpha chain variable domain of TCR clone 211769 (TRAV30, TRAJ26)
CGTEIGSYGQNFVF

SEQ ID NO: 423538 - protein, 13 aa, Homo sapiens
  CDR3 for beta chain variable domain of TCR clone 211769 (TRBV7-3, TRBJ1-1)
CASSQDWGAEAFF

SEQ ID NO: 423539 - protein, 14 aa, Homo sapiens
  CDR3 for alpha chain variable domain of TCR clone 211770 (TRAV12-1, TRAJ3)
CVVNPGSSASKIIF

SEQ ID NO: 423540 - protein, 15 aa, Homo sapiens
  CDR3 for beta chain variable domain of TCR clone 211770 (TRBV5-7, TRBJ1-2)
CAGSSPGEGNYGYTF

SEQ ID NO: 423541 - protein, 14 aa, Homo sapiens
  CDR3 for alpha chain variable domain of TCR clone 211771 (TRAV8-3, TRAJ10)
CAVGTAGGGNKLTF

SEQ ID NO: 423542 - protein, 16 aa, Homo sapiens
  CDR3 for beta chain variable domain of TCR clone 211771 (TRBV11-2, TRBJ1-2)
CASSLDTGGADYGYTF

SEQ ID NO: 423543 - protein, 12 aa, Homo sapiens
  CDR3 for alpha chain variable domain of TCR clone 211772 (TRAV12-1, TRAJ40)
CVFYSGTYKYIF

SEQ ID NO: 423544 - protein, 14 aa, Homo sapiens
  CDR3 for beta chain variable domain of TCR clone 211772 (TRBV7-2, TRBJ2-5)
CASSFTQGQETQYF

SEQ ID NO: 423545 - protein, 14 aa, Homo sapiens
  CDR3 for alpha chain variable domain of TCR clone 211773 (TRAV23/DV6, TRAJ40)
CAASLTSGTNKYIF

SEQ ID NO: 423546 - protein, 14 aa, Homo sapiens
  CDR3 for beta chain variable domain of TCR clone 211773 (TRBV5-1, TRBJ2-3)
CASSRGQGGGTQYF

SEQ ID NO: 423547 - protein, 15 aa, Homo sapiens
  CDR3 for alpha chain variable domain of TCR clone 211774 (TRAV17, TRAJ57)
CATGPSQGGSEKLGV

SEQ ID NO: 423548 - protein, 16 aa, Homo sapiens
  CDR3 for beta chain variable domain of TCR clone 211774 (TRBV12-4, TRBJ1-5)
CASSRPVGGSNQPQHL

SEQ ID NO: 423549 - protein, 13 aa, Homo sapiens
  CDR3 for alpha chain variable domain of TCR clone 211775 (TRAV3, TRAJ21)
CAVGNFNKFYLGF

SEQ ID NO: 423550 - protein, 16 aa, Homo sapiens
  CDR3 for beta chain variable domain of TCR clone 211775 (TRBV19, TRBJ2-1)
CASSKAGPSSYNEQFF

SEQ ID NO: 423551 - protein, 15 aa, Homo sapiens
  CDR3 for alpha chain variable domain of TCR clone 211776 (TRAV17, TRAJ10)
CATVLLTGGGNKLTF

SEQ ID NO: 423552 - protein, 16 aa, Homo sapiens
  CDR3 for beta chain variable domain of TCR clone 211776 (TRBV7-9, TRBJ2-3)
CASGPWREVGRDTQYF

SEQ ID NO: 423553 - protein, 14 aa, Homo sapiens
  CDR3 for alpha chain variable domain of TCR clone 211777 (TRAV17, TRAJ15)
CATTTNQAGTALIF

SEQ ID NO: 423554 - protein, 14 aa, Homo sapiens
  CDR3 for beta chain variable domain of TCR clone 211777 (TRBV7-2, TRBJ2-7)
CASSPKTSFYEQYF

SEQ ID NO: 423555 - protein, 13 aa, Homo sapiens
  CDR3 for alpha chain variable domain of TCR clone 211778 (TRAV2, TRAJ40)
CAVVTSGTYKYIF

SEQ ID NO: 423556 - protein, 16 aa, Homo sapiens
  CDR3 for beta chain variable domain of TCR clone 211778 (TRBV7-9, TRBJ1-3)
CASSLGAGSSGNTMHF

SEQ ID NO: 423557 - protein, 16 aa, Homo sapiens
  CDR3 for alpha chain variable domain of TCR clone 211779 (TRAV17, TRAJ54)
CATDSDIIQGAQKLVF

SEQ ID NO: 423558 - protein, 15 aa, Homo sapiens
  CDR3 for beta chain variable domain of TCR clone 211779 (TRBV6-6, TRBJ2-5)
CASSPGGGLEETQYF

SEQ ID NO: 423559 - protein, 17 aa, Homo sapiens
  CDR3 for alpha chain variable domain of TCR clone 211780 (TRAV3, TRAJ12)
CAVRDGGSMDSSYKLIV

SEQ ID NO: 423560 - protein, 13 aa, Homo sapiens
  CDR3 for beta chain variable domain of TCR clone 211780 (TRBV15, TRBJ1-6)
CATSGGLNSPLHF

SEQ ID NO: 423561 - protein, 16 aa, Homo sapiens
  CDR3 for alpha chain variable domain of TCR clone 211781 (TRAV12-2, TRAJ52)
CRLANAGGTSYGKLTF

SEQ ID NO: 423562 - protein, 16 aa, Homo sapiens
  CDR3 for beta chain variable domain of TCR clone 211781 (TRBV19, TRBJ2-1)
CASSKAGPSSYNEQFF

SEQ ID NO: 423563 - protein, 12 aa, Homo sapiens
  CDR3 for alpha chain variable domain of TCR clone 211782 (TRAV12-2, TRAJ10)
WGVTGGGNKLTS

SEQ ID NO: 423564 - protein, 14 aa, Homo sapiens
  CDR3 for beta chain variable domain of TCR clone 211782 (TRBV12-4, TRBJ1-4)
CASSRQGANEKLFF

SEQ ID NO: 423565 - protein, 16 aa, Homo sapiens
  CDR3 for alpha chain variable domain of TCR clone 211783 (TRAV12-3, TRAJ53)
CAMSPGSGGSNYKLTF

SEQ ID NO: 423566 - protein, 11 aa, Homo sapiens
  CDR3 for beta chain variable domain of TCR clone 211783 (TRBV29-1, TRBJ2-5)
CSEGLTGTQYF

SEQ ID NO: 423567 - protein, 15 aa, Homo sapiens
  CDR3 for alpha chain variable domain of TCR clone 211784 (TRAV8-3, TRAJ45)
CASSYSGGGADGLTF

SEQ ID NO: 423568 - protein, 17 aa, Homo sapiens
  CDR3 for beta chain variable domain of TCR clone 211784 (TRBV18, TRBJ2-1)
CASSKGLSGGADNEQFF

SEQ ID NO: 423569 - protein, 14 aa, Homo sapiens
  CDR3 for alpha chain variable domain of TCR clone 211785 (TRAV2, TRAJ9)
CAVEDRRGGFKTIF

SEQ ID NO: 423570 - protein, 12 aa, Homo sapiens
  CDR3 for beta chain variable domain of TCR clone 211785 (TRBV12-5, TRBJ2-5)
CASGQGVETQYF

SEQ ID NO: 423571 - protein, 16 aa, Homo sapiens
  CDR3 for alpha chain variable domain of TCR clone 211786 (TRAV3, TRAJ37)
CGVRGKGSGNTGQLIF

SEQ ID NO: 423572 - protein, 20 aa, Homo sapiens
  CDR3 for beta chain variable domain of TCR clone 211786 (TRBV7-8, TRBJ2-2)
CASSHLFPGPTIHITGELFF

SEQ ID NO: 423573 - protein, 15 aa, Homo sapiens
  CDR3 for alpha chain variable domain of TCR clone 211787 (TRAV12-2, TRAJ43)
CAFDMRFGAGTRLTV

SEQ ID NO: 423574 - protein, 15 aa, Homo sapiens
  CDR3 for beta chain variable domain of TCR clone 211787 (TRBV7-9, TRBJ1-6)
CASSSPGRGNSPLHF

SEQ ID NO: 423575 - protein, 15 aa, Homo sapiens
  CDR3 for alpha chain variable domain of TCR clone 211788 (TRAV23/DV6, TRAJ44)
CASALNTGTASKLTF

SEQ ID NO: 423576 - protein, 12 aa, Homo sapiens
  CDR3 for beta chain variable domain of TCR clone 211788 (TRBV20-1, TRBJ1-5)
CSARAPDQPQHF

SEQ ID NO: 423577 - protein, 14 aa, Homo sapiens
  CDR3 for alpha chain variable domain of TCR clone 211789 (TRAV1-2, TRAJ16)
CAVNRFSDGQKLLF

SEQ ID NO: 423578 - protein, 10 aa, Homo sapiens
  CDR3 for beta chain variable domain of TCR clone 211789 (TRBV12-4, TRBJ1-2)
CASSFIWLHL

SEQ ID NO: 423579 - protein, 14 aa, Homo sapiens
  CDR3 for alpha chain variable domain of TCR clone 211790 (TRAV29/DV5, TRAJ36)
CAARRKTGANNLFF

SEQ ID NO: 423580 - protein, 15 aa, Homo sapiens
  CDR3 for beta chain variable domain of TCR clone 211790 (TRBV7-3, TRBJ2-2)
CASSETGQGTGELFF

SEQ ID NO: 423581 - protein, 14 aa, Homo sapiens
  CDR3 for alpha chain variable domain of TCR clone 211791 (TRAV27, TRAJ37)
CPGERSSNTGKLIF

SEQ ID NO: 423582 - protein, 15 aa, Homo sapiens
  CDR3 for beta chain variable domain of TCR clone 211791 (TRBV11-3, TRBJ1-6)
CASSLDWGTNSPLHF

SEQ ID NO: 423583 - protein, 14 aa, Homo sapiens
  CDR3 for alpha chain variable domain of TCR clone 211792 (TRAV8-1, TRAJ6)
CAVNATGGSYIPTF

SEQ ID NO: 423584 - protein, 13 aa, Homo sapiens
  CDR3 for beta chain variable domain of TCR clone 211792 (TRBV10-3, TRBJ2-7)
CASKLAVNYEQYF

SEQ ID NO: 423585 - protein, 14 aa, Homo sapiens
  CDR3 for alpha chain variable domain of TCR clone 211793 (TRAV23/DV6, TRAJ8)
CAASKNTGFQKLVF

SEQ ID NO: 423586 - protein, 13 aa, Homo sapiens
  CDR3 for beta chain variable domain of TCR clone 211793 (TRBV12-4, TRBJ1-2)
CASSLRQGKGYTF

SEQ ID NO: 423587 - protein, 17 aa, Homo sapiens
  CDR3 for alpha chain variable domain of TCR clone 211794 (TRAV8-6, TRAJ58)
CAVSSWVGETSGSRLTF

SEQ ID NO: 423588 - protein, 15 aa, Homo sapiens
  CDR3 for beta chain variable domain of TCR clone 211794 (TRBV5-1, TRBJ2-1)
CASTGSGRTYNEQFF

SEQ ID NO: 423589 - protein, 14 aa, Homo sapiens
  CDR3 for alpha chain variable domain of TCR clone 211795 (TRAV26-2, TRAJ45)
CILRTGGGADGLTF

SEQ ID NO: 423590 - protein, 16 aa, Homo sapiens
  CDR3 for beta chain variable domain of TCR clone 211795 (TRBV2, TRBJ2-1)
CASSVGGSLPYNEQFF

SEQ ID NO: 423591 - protein, 14 aa, Homo sapiens
  CDR3 for alpha chain variable domain of TCR clone 211796 (TRAV17, TRAJ16)
CATADFSDGQKLLF

SEQ ID NO: 423592 - protein, 15 aa, Homo sapiens
  CDR3 for beta chain variable domain of TCR clone 211796 (TRBV19, TRBJ2-7)
CASSIGRTFSYEQYF

SEQ ID NO: 423593 - protein, 16 aa, Homo sapiens
  CDR3 for alpha chain variable domain of TCR clone 211797 (TRAV23/DV6, )
CAEPDIQNPDPAVYQL

SEQ ID NO: 423594 - protein, 15 aa, Homo sapiens
  CDR3 for beta chain variable domain of TCR clone 211797 (TRBV12-4, TRBJ2-5)
CASTLSSGRGETQYF

SEQ ID NO: 423595 - protein, 13 aa, Homo sapiens
  CDR3 for alpha chain variable domain of TCR clone 211798 (TRAV2, TRAJ20)
CAVEDPSEYKLSF

SEQ ID NO: 423596 - protein, 17 aa, Homo sapiens
  CDR3 for beta chain variable domain of TCR clone 211798 (TRBV13, TRBJ2-3)
CASSLSRVAGGRNTQYF

SEQ ID NO: 423597 - protein, 15 aa, Homo sapiens
  CDR3 for alpha chain variable domain of TCR clone 211799 (TRAV27, TRAJ38)
CTARRNAGNNRKLIW

SEQ ID NO: 423598 - protein, 13 aa, Homo sapiens
  CDR3 for beta chain variable domain of TCR clone 211799 (TRBV12-5, TRBJ2-3)
CASGDRQSDTQYF

SEQ ID NO: 423599 - protein, 18 aa, Homo sapiens
  CDR3 for alpha chain variable domain of TCR clone 211800 (TRAV21, TRAJ52)
CAVRPSPSGGTSYGKLTF

SEQ ID NO: 423600 - protein, 13 aa, Homo sapiens
  CDR3 for beta chain variable domain of TCR clone 211800 (TRBV29-1, TRBJ2-2)
CSVYREDTGELFF

SEQ ID NO: 423601 - protein, 14 aa, Homo sapiens
  CDR3 for alpha chain variable domain of TCR clone 211801 (TRAV12-2, TRAJ6)
CASKGGGGRYIPTF

SEQ ID NO: 423602 - protein, 13 aa, Homo sapiens
  CDR3 for beta chain variable domain of TCR clone 211801 (TRBV2, TRBJ1-1)
CASSEGGNTEAFF

SEQ ID NO: 423603 - protein, 13 aa, Homo sapiens
  CDR3 for alpha chain variable domain of TCR clone 211802 (TRAV12-1, TRAJ22)
CGVYSGSARQLTF

SEQ ID NO: 423604 - protein, 17 aa, Homo sapiens
  CDR3 for beta chain variable domain of TCR clone 211802 (TRBV7-2, TRBJ2-7)
CASSLVGAGGARNEQYF

SEQ ID NO: 423605 - protein, 16 aa, Homo sapiens
  CDR3 for alpha chain variable domain of TCR clone 211803 (TRAV8-3, TRAJ44)
CAVGTLMTGTSSKLTF

SEQ ID NO: 423606 - protein, 13 aa, Homo sapiens
  CDR3 for beta chain variable domain of TCR clone 211803 (TRBV11-2, TRBJ2-1)
CASSLRLTHEQFF

SEQ ID NO: 423607 - protein, 14 aa, Homo sapiens
  CDR3 for alpha chain variable domain of TCR clone 211804 (TRAV12-3, TRAJ10)
SHLPLTGGGNKLTF

SEQ ID NO: 423608 - protein, 20 aa, Homo sapiens
  CDR3 for beta chain variable domain of TCR clone 211804 (TRBV19, TRBJ2-7)
CASTQVAPESLRAVLRAGHQ

SEQ ID NO: 423609 - protein, 12 aa, Homo sapiens
  CDR3 for alpha chain variable domain of TCR clone 211805 (TRAV9-2, TRAJ36)
CALKKGANNLFF

SEQ ID NO: 423610 - protein, 16 aa, Homo sapiens
  CDR3 for beta chain variable domain of TCR clone 211805 (TRBV19, TRBJ2-2)
CASRSPGTGATGELFF

SEQ ID NO: 423611 - protein, 13 aa, Homo sapiens
  CDR3 for alpha chain variable domain of TCR clone 211806 (TRAV21, TRAJ15)
CAVRNQAGTALIF

SEQ ID NO: 423612 - protein, 16 aa, Homo sapiens
  CDR3 for beta chain variable domain of TCR clone 211806 (TRBV20-1, TRBJ2-5)
CSPGGTSGGYIETQYF

SEQ ID NO: 423613 - protein, 14 aa, Homo sapiens
  CDR3 for alpha chain variable domain of TCR clone 211807 (TRAV2, TRAJ9)
CAVEDRSGGFKTIF

SEQ ID NO: 423614 - protein, 11 aa, Homo sapiens
  CDR3 for beta chain variable domain of TCR clone 211807 (TRBV7-9, TRBJ2-5)
CASSLSATQYF

SEQ ID NO: 423615 - protein, 15 aa, Homo sapiens
  CDR3 for alpha chain variable domain of TCR clone 211808 (TRAV17, TRAJ4)
CATGTWSGGYNKLIF

SEQ ID NO: 423616 - protein, 15 aa, Homo sapiens
  CDR3 for beta chain variable domain of TCR clone 211808 (TRBV20-1, TRBJ2-7)
CIARDRVSGMDEQYF

SEQ ID NO: 423617 - protein, 12 aa, Homo sapiens
  CDR3 for alpha chain variable domain of TCR clone 211809 (TRAV25, TRAJ16)
CAGPKDGQKLLF

SEQ ID NO: 423618 - protein, 21 aa, Homo sapiens
  CDR3 for beta chain variable domain of TCR clone 211809 (TRBV11-2, TRBJ2-7)
CASSPTTGGGILRAVLRAGHQ

SEQ ID NO: 423619 - protein, 15 aa, Homo sapiens
  CDR3 for alpha chain variable domain of TCR clone 211810 (TRAV12-1, TRAJ17)
CGEHDEKAAGNKLTF

SEQ ID NO: 423620 - protein, 17 aa, Homo sapiens
  CDR3 for beta chain variable domain of TCR clone 211810 (TRBV4-1, TRBJ1-4)
CASSQEGPRGVEEKLFF

SEQ ID NO: 423621 - protein, 15 aa, Homo sapiens
  CDR3 for alpha chain variable domain of TCR clone 211811 (TRAV13-2, TRAJ22)
CAENSRPGSARQLTF

SEQ ID NO: 423622 - protein, 11 aa, Homo sapiens
  CDR3 for beta chain variable domain of TCR clone 211811 (TRBV7-2, TRBJ2-7)
CASSSGLWQYF

SEQ ID NO: 423623 - protein, 14 aa, Homo sapiens
  CDR3 for alpha chain variable domain of TCR clone 211812 (TRAV1-2, TRAJ16)
CAVNRFSDGQKLLF

SEQ ID NO: 423624 - protein, 17 aa, Homo sapiens
  CDR3 for beta chain variable domain of TCR clone 211812 (TRBV7-3, TRBJ2-5)
CASSLGSGRNGSETQYF

SEQ ID NO: 423625 - protein, 14 aa, Homo sapiens
  CDR3 for alpha chain variable domain of TCR clone 211813 (TRAV12-2, TRAJ13)
CAVKKTGGYQKVTF

SEQ ID NO: 423626 - protein, 14 aa, Homo sapiens
  CDR3 for beta chain variable domain of TCR clone 211813 (TRBV7-6, TRBJ2-1)
CASSSRSGSNEQFF

SEQ ID NO: 423627 - protein, 15 aa, Homo sapiens
  CDR3 for alpha chain variable domain of TCR clone 211814 (TRAV21, TRAJ32)
CAVNYYGGATNKLIF

SEQ ID NO: 423628 - protein, 18 aa, Homo sapiens
  CDR3 for beta chain variable domain of TCR clone 211814 (TRBV7-9, TRBJ2-1)
CASSTGLAEGSSYNEQFF

SEQ ID NO: 423629 - protein, 18 aa, Homo sapiens
  CDR3 for alpha chain variable domain of TCR clone 211815 (TRAV26-1, TRAJ23)
CIVRVGLEVWNQGGKRIF

SEQ ID NO: 423630 - protein, 16 aa, Homo sapiens
  CDR3 for beta chain variable domain of TCR clone 211815 (TRBV12-4, TRBJ2-5)
CASSFFVRGRQKTQYF

SEQ ID NO: 423631 - protein, 10 aa, Homo sapiens
  CDR3 for alpha chain variable domain of TCR clone 211816 (TRAV29/DV5, TRAJ54)
LIQGAQKLVF

SEQ ID NO: 423632 - protein, 18 aa, Homo sapiens
  CDR3 for beta chain variable domain of TCR clone 211816 (TRBV3-1, TRBJ1-2)
SASSQDVIGWNGDYGYTF

SEQ ID NO: 423633 - protein, 16 aa, Homo sapiens
  CDR3 for alpha chain variable domain of TCR clone 211817 (TRAV3, TRAJ10)
CALRDIRAGGGNKPTF

SEQ ID NO: 423634 - protein, 17 aa, Homo sapiens
  CDR3 for beta chain variable domain of TCR clone 211817 (TRBV20-1, TRBJ2-2)
CSASGSGQGGLTGELFF

SEQ ID NO: 423635 - protein, 14 aa, Homo sapiens
  CDR3 for alpha chain variable domain of TCR clone 211818 (TRAV20, TRAJ32)
CCGRYGGATNKLIF

SEQ ID NO: 423636 - protein, 16 aa, Homo sapiens
  CDR3 for beta chain variable domain of TCR clone 211818 (TRBV19, TRBJ2-2)
CASRAPGTGATGELFF

SEQ ID NO: 423637 - protein, 13 aa, Homo sapiens
  CDR3 for alpha chain variable domain of TCR clone 211819 (TRAV13-1, TRAJ39)
CSKYSNAGNMLTF

SEQ ID NO: 423638 - protein, 13 aa, Homo sapiens
  CDR3 for beta chain variable domain of TCR clone 211819 (TRBV6-6, TRBJ2-7)
CASSPKHLAEQYF

SEQ ID NO: 423639 - protein, 13 aa, Homo sapiens
  CDR3 for alpha chain variable domain of TCR clone 211820 (TRAV3, TRAJ21)
CAVREPDFNKYYF

SEQ ID NO: 423640 - protein, 13 aa, Homo sapiens
  CDR3 for beta chain variable domain of TCR clone 211820 (TRBV9, TRBJ2-1)
CASSPSGGNEQFF

SEQ ID NO: 423641 - protein, 16 aa, Homo sapiens
  CDR3 for alpha chain variable domain of TCR clone 211821 (TRAV3, TRAJ10)
CAVRDMRAGGGNKLTF

SEQ ID NO: 423642 - protein, 12 aa, Homo sapiens
  CDR3 for beta chain variable domain of TCR clone 211821 (TRBV5-1, TRBJ2-5)
CASSLGLETQYF

SEQ ID NO: 423643 - protein, 19 aa, Homo sapiens
  CDR3 for alpha chain variable domain of TCR clone 211822 (TRAV26-1, TRAJ52)
YIVRVANNAGGTSYGKLTF

SEQ ID NO: 423644 - protein, 14 aa, Homo sapiens
  CDR3 for beta chain variable domain of TCR clone 211822 (TRBV19, TRBJ1-2)
CASSIGAGSYGYTF

SEQ ID NO: 423645 - protein, 14 aa, Homo sapiens
  CDR3 for alpha chain variable domain of TCR clone 211823 (TRAV12-2, TRAJ45)
CAVNIGGGADGLTF

SEQ ID NO: 423646 - protein, 15 aa, Homo sapiens
  CDR3 for beta chain variable domain of TCR clone 211823 (TRBV5-1, TRBJ2-7)
CASSLDLTSSYEQYF

SEQ ID NO: 423647 - protein, 12 aa, Homo sapiens
  CDR3 for alpha chain variable domain of TCR clone 211824 (TRAV2, TRAJ8)
CAVGQGFQKLVF

SEQ ID NO: 423648 - protein, 19 aa, Homo sapiens
  CDR3 for beta chain variable domain of TCR clone 211824 (TRBV19, TRBJ2-6)
CASTPTWGRAASGANVLTF

SEQ ID NO: 423649 - protein, 17 aa, Homo sapiens
  CDR3 for alpha chain variable domain of TCR clone 211825 (TRAV3, TRAJ6)
CAVRDGPRSGGSYIPTF

SEQ ID NO: 423650 - protein, 14 aa, Homo sapiens
  CDR3 for beta chain variable domain of TCR clone 211825 (TRBV7-2, TRBJ2-7)
CASSPKTSFYEQYF

SEQ ID NO: 423651 - protein, 13 aa, Homo sapiens
  CDR3 for alpha chain variable domain of TCR clone 211826 (TRAV1-1, TRAJ31)
CASYLNNNARLMF

SEQ ID NO: 423652 - protein, 13 aa, Homo sapiens
  CDR3 for beta chain variable domain of TCR clone 211826 (TRBV4-1, TRBJ2-5)
RQSRSGSGETQYF

SEQ ID NO: 423653 - protein, 16 aa, Homo sapiens
  CDR3 for alpha chain variable domain of TCR clone 211827 (TRAV12-2, TRAJ6)
CAAPLAGSGGSYIPTF

SEQ ID NO: 423654 - protein, 10 aa, Homo sapiens
  CDR3 for beta chain variable domain of TCR clone 211827 (TRBV28, TRBJ1-2)
CDSSSDRAVF

SEQ ID NO: 423655 - protein, 14 aa, Homo sapiens
  CDR3 for alpha chain variable domain of TCR clone 211828 (TRAV1-2, TRAJ8)
CAVREDTGFQQLLF

SEQ ID NO: 423656 - protein, 15 aa, Homo sapiens
  CDR3 for beta chain variable domain of TCR clone 211828 (TRBV6-3, TRBJ2-7)
CASSSPGTVFYEQYF

SEQ ID NO: 423657 - protein, 15 aa, Homo sapiens
  CDR3 for alpha chain variable domain of TCR clone 211829 (TRAV19, TRAJ57)
CARDTSRGGSEKLVF

SEQ ID NO: 423658 - protein, 10 aa, Homo sapiens
  CDR3 for beta chain variable domain of TCR clone 211829 (TRBV6-4, TRBJ2-1)
CASWMFTQFF

SEQ ID NO: 423659 - protein, 15 aa, Homo sapiens
  CDR3 for alpha chain variable domain of TCR clone 211830 (TRAV25, TRAJ10)
CAGPLLTGGGNKLTF

SEQ ID NO: 423660 - protein, 12 aa, Homo sapiens
  CDR3 for beta chain variable domain of TCR clone 211830 (TRBV10-3, TRBJ2-7)
CAHGADSGEQYF

SEQ ID NO: 423661 - protein, 23 aa, Homo sapiens
  CDR3 for alpha chain variable domain of TCR clone 211831 (TRAV8-3, TRAJ38)
CAVGASNAGNNHIQNPDPAVYQL

SEQ ID NO: 423662 - protein, 15 aa, Homo sapiens
  CDR3 for beta chain variable domain of TCR clone 211831 (TRBV11-3, TRBJ1-3)
CASSLFGPSGNAIYF

SEQ ID NO: 423663 - protein, 20 aa, Homo sapiens
  CDR3 for alpha chain variable domain of TCR clone 211832 (TRAV12-3, TRAJ41)
SLFIRDSQPSDSATPEALNF

SEQ ID NO: 423664 - protein, 15 aa, Homo sapiens
  CDR3 for beta chain variable domain of TCR clone 211832 (TRBV5-1, TRBJ2-7)
CASSLDLASSYEQYF

SEQ ID NO: 423665 - protein, 13 aa, Homo sapiens
  CDR3 for alpha chain variable domain of TCR clone 211833 (TRAV12-3, TRAJ13)
CVMGTGGYQKVTF

SEQ ID NO: 423666 - protein, 14 aa, Homo sapiens
  CDR3 for beta chain variable domain of TCR clone 211833 (TRBV7-2, TRBJ2-5)
CASSTGGELKTQYF

SEQ ID NO: 423667 - protein, 12 aa, Homo sapiens
  CDR3 for alpha chain variable domain of TCR clone 211834 (TRAV21, TRAJ31)
CAVWGNNARLMF

SEQ ID NO: 423668 - protein, 14 aa, Homo sapiens
  CDR3 for beta chain variable domain of TCR clone 211834 (TRBV4-2, TRBJ2-1)
CASGLDRAYNEQFF

SEQ ID NO: 423669 - protein, 12 aa, Homo sapiens
  CDR3 for alpha chain variable domain of TCR clone 211835 (TRAV12-2, TRAJ31)
CAVNTPDASLMF

SEQ ID NO: 423670 - protein, 12 aa, Homo sapiens
  CDR3 for beta chain variable domain of TCR clone 211835 (TRBV7-8, TRBJ2-7)
CASSLGDGEQYF

SEQ ID NO: 423671 - protein, 13 aa, Homo sapiens
  CDR3 for alpha chain variable domain of TCR clone 211836 (TRAV13-1, TRAJ21)
CAASIYNFNKFYF

SEQ ID NO: 423672 - protein, 15 aa, Homo sapiens
  CDR3 for beta chain variable domain of TCR clone 211836 (TRBV7-2, TRBJ2-7)
CASSLGIGNDYEQYF

SEQ ID NO: 423673 - protein, 14 aa, Homo sapiens
  CDR3 for alpha chain variable domain of TCR clone 211837 (TRAV20, TRAJ22)
CAVQVSGSARQLTF

SEQ ID NO: 423674 - protein, 16 aa, Homo sapiens
  CDR3 for beta chain variable domain of TCR clone 211837 (TRBV3-1, TRBJ2-5)
CASSSQRGYAPETQYF

SEQ ID NO: 423675 - protein, 15 aa, Homo sapiens
  CDR3 for alpha chain variable domain of TCR clone 211838 (TRAV26-2, TRAJ26)
CSLRDFDNYGQNFVF

SEQ ID NO: 423676 - protein, 14 aa, Homo sapiens
  CDR3 for beta chain variable domain of TCR clone 211838 (TRBV29-1, TRBJ2-5)
CSFWTPYAGETQYF

SEQ ID NO: 423677 - protein, 11 aa, Homo sapiens
  CDR3 for alpha chain variable domain of TCR clone 211839 (TRAV2, TRAJ33)
CAVESNYQLTW

SEQ ID NO: 423678 - protein, 15 aa, Homo sapiens
  CDR3 for beta chain variable domain of TCR clone 211839 (TRBV19, TRBJ1-1)
CDSTSGQIQNTEAFF

SEQ ID NO: 423679 - protein, 21 aa, Homo sapiens
  CDR3 for alpha chain variable domain of TCR clone 211840 (TRAV36/DV7, TRAJ39)
TATQTGDSAIYLPNAGNMLTF

SEQ ID NO: 423680 - protein, 15 aa, Homo sapiens
  CDR3 for beta chain variable domain of TCR clone 211840 (TRBV28, TRBJ2-1)
CASSIIAGGRSEQFF

SEQ ID NO: 423681 - protein, 12 aa, Homo sapiens
  CDR3 for alpha chain variable domain of TCR clone 211841 (TRAV2, TRAJ17)
CAVRYAGNKLTF

SEQ ID NO: 423682 - protein, 14 aa, Homo sapiens
  CDR3 for beta chain variable domain of TCR clone 211841 (TRBV5-7, TRBJ1-5)
CASSRTGGGQPQHF

SEQ ID NO: 423683 - protein, 15 aa, Homo sapiens
  CDR3 for alpha chain variable domain of TCR clone 211842 (TRAV29/DV5, TRAJ24)
CAASGATDSWGKFKF

SEQ ID NO: 423684 - protein, 14 aa, Homo sapiens
  CDR3 for beta chain variable domain of TCR clone 211842 (TRBV12-5, TRBJ2-5)
CASGSRTHQETQYF

SEQ ID NO: 423685 - protein, 13 aa, Homo sapiens
  CDR3 for alpha chain variable domain of TCR clone 211843 (TRAV12-2, TRAJ10)
CAVPTGGGNKLTF

SEQ ID NO: 423686 - protein, 15 aa, Homo sapiens
  CDR3 for beta chain variable domain of TCR clone 211843 (TRBV19, TRBJ1-1)
CASSIRRQMNTEAFF

SEQ ID NO: 423687 - protein, 13 aa, Homo sapiens
  CDR3 for alpha chain variable domain of TCR clone 211844 (TRAV16, TRAJ17)
ALSGRAAGNKLTF

SEQ ID NO: 423688 - protein, 15 aa, Homo sapiens
  CDR3 for beta chain variable domain of TCR clone 211844 (TRBV3-1, TRBJ1-2)
CASSPTRLPEGGYTF

SEQ ID NO: 423689 - protein, 14 aa, Homo sapiens
  CDR3 for alpha chain variable domain of TCR clone 211845 (TRAV38-1, TRAJ45)
CASHSGEGADGLTF

SEQ ID NO: 423690 - protein, 15 aa, Homo sapiens
  CDR3 for beta chain variable domain of TCR clone 211845 (TRBV10-2, TRBJ2-6)
CASSEQGTGANVLTF

SEQ ID NO: 423691 - protein, 12 aa, Homo sapiens
  CDR3 for alpha chain variable domain of TCR clone 211846 (TRAV12-3, TRAJ17)
CAMTLTGNKLTS

SEQ ID NO: 423692 - protein, 15 aa, Homo sapiens
  CDR3 for beta chain variable domain of TCR clone 211846 (TRBV20-1, TRBJ2-7)
RSARDRVSGMDEQYF

SEQ ID NO: 423693 - protein, 19 aa, Homo sapiens
  CDR3 for alpha chain variable domain of TCR clone 211847 (TRAV2, TRAJ20)
ILQVREADAAVYRDCKLRF

SEQ ID NO: 423694 - protein, 17 aa, Homo sapiens
  CDR3 for beta chain variable domain of TCR clone 211847 (TRBV20-1, TRBJ2-2)
CSASGSGQGGLTGELFF

SEQ ID NO: 423695 - protein, 14 aa, Homo sapiens
  CDR3 for alpha chain variable domain of TCR clone 211848 (TRAV13-1, TRAJ40)
CAASMTSGTYKYIF

SEQ ID NO: 423696 - protein, 11 aa, Homo sapiens
  CDR3 for beta chain variable domain of TCR clone 211848 (TRBV29-1, TRBJ2-5)
CSEDRTGTQYF

SEQ ID NO: 423697 - protein, 14 aa, Homo sapiens
  CDR3 for alpha chain variable domain of TCR clone 211849 (TRAV1-2, TRAJ8)
CAVREDTGFQTLVF

SEQ ID NO: 423698 - protein, 14 aa, Homo sapiens
  CDR3 for beta chain variable domain of TCR clone 211849 (TRBV7-6, TRBJ2-3)
CASSLGTVTDTQYF

SEQ ID NO: 423699 - protein, 15 aa, Homo sapiens
  CDR3 for alpha chain variable domain of TCR clone 211850 (TRAV2, TRAJ11)
CDVGGRNSGYSTLTF

SEQ ID NO: 423700 - protein, 14 aa, Homo sapiens
  CDR3 for beta chain variable domain of TCR clone 211850 (TRBV4-1, TRBJ2-2)
CASSQAVNTGELFF

SEQ ID NO: 423701 - protein, 16 aa, Homo sapiens
  CDR3 for alpha chain variable domain of TCR clone 211851 (TRAV13-1, TRAJ48)
CAASIFGNFGIEKLTF

SEQ ID NO: 423702 - protein, 16 aa, Homo sapiens
  CDR3 for beta chain variable domain of TCR clone 211851 (TRBV18, TRBJ1-5)
CASSPYRVEGNQPQHF

SEQ ID NO: 423703 - protein, 13 aa, Homo sapiens
  CDR3 for alpha chain variable domain of TCR clone 211852 (TRAV1-2, TRAJ16)
CAVNRFSDGQAAL

SEQ ID NO: 423704 - protein, 13 aa, Homo sapiens
  CDR3 for beta chain variable domain of TCR clone 211852 (TRBV20-1, TRBJ1-1)
CSARAGGNTEAFF

SEQ ID NO: 423705 - protein, 23 aa, Homo sapiens
  CDR3 for alpha chain variable domain of TCR clone 211853 (TRAV1-1, TRAJ11)
LLQELQMKDSASYFCAGYSTLTF

SEQ ID NO: 423706 - protein, 13 aa, Homo sapiens
  CDR3 for beta chain variable domain of TCR clone 211853 (TRBV10-3, TRBJ2-7)
CASKLAVNYEQYF

SEQ ID NO: 423707 - protein, 20 aa, Homo sapiens
  CDR3 for alpha chain variable domain of TCR clone 211854 (TRAV1-1, TRAJ39)
CLLLLRCESSAYNSCNMLTF

SEQ ID NO: 423708 - protein, 13 aa, Homo sapiens
  CDR3 for beta chain variable domain of TCR clone 211854 (TRBV12-4, TRBJ1-5)
CASSPDRAQPQHF

SEQ ID NO: 423709 - protein, 15 aa, Homo sapiens
  CDR3 for alpha chain variable domain of TCR clone 211855 (TRAV17, TRAJ57)
CATGTSQGGSEKLGF

SEQ ID NO: 423710 - protein, 14 aa, Homo sapiens
  CDR3 for beta chain variable domain of TCR clone 211855 (TRBV12-5, TRBJ2-5)
CASGSRTHQETQYF

SEQ ID NO: 423711 - protein, 14 aa, Homo sapiens
  CDR3 for alpha chain variable domain of TCR clone 211856 (TRAV1-2, TRAJ16)
CAVNRLSDGQKLLF

SEQ ID NO: 423712 - protein, 14 aa, Homo sapiens
  CDR3 for beta chain variable domain of TCR clone 211856 (TRBV19, TRBJ1-1)
CATTSGTRGTEAFF

SEQ ID NO: 423713 - protein, 14 aa, Homo sapiens
  CDR3 for alpha chain variable domain of TCR clone 211857 (TRAV1-2, TRAJ8)
CAVREDTGFQKLVF

SEQ ID NO: 423714 - protein, 17 aa, Homo sapiens
  CDR3 for beta chain variable domain of TCR clone 211857 (TRBV20-1, TRBJ2-7)
CSARDPEGDRREYEQYF

SEQ ID NO: 423715 - protein, 13 aa, Homo sapiens
  CDR3 for alpha chain variable domain of TCR clone 211858 (TRAV36/DV7, TRAJ49)
CAGDSNTGNQFYF

SEQ ID NO: 423716 - protein, 15 aa, Homo sapiens
  CDR3 for beta chain variable domain of TCR clone 211858 (TRBV6-3, TRBJ2-7)
CASSSPGTVFYEQYF

SEQ ID NO: 423717 - protein, 12 aa, Homo sapiens
  CDR3 for alpha chain variable domain of TCR clone 211859 (TRAV21, TRAJ31)
CAVWGNNARLMF

SEQ ID NO: 423718 - protein, 16 aa, Homo sapiens
  CDR3 for beta chain variable domain of TCR clone 211859 (TRBV2, TRBJ2-3)
CASSTSVEGVTDTQYF

SEQ ID NO: 423719 - protein, 13 aa, Homo sapiens
  CDR3 for alpha chain variable domain of TCR clone 211860 (TRAV36/DV7, TRAJ49)
CAVEANNGNQFYF

SEQ ID NO: 423720 - protein, 13 aa, Homo sapiens
  CDR3 for beta chain variable domain of TCR clone 211860 (TRBV10-3, TRBJ2-7)
CASKLAVNYEQYF

SEQ ID NO: 423721 - protein, 13 aa, Homo sapiens
  CDR3 for alpha chain variable domain of TCR clone 211861 (TRAV2, TRAJ15)
CAVASQAGTALIF

SEQ ID NO: 423722 - protein, 18 aa, Homo sapiens
  CDR3 for beta chain variable domain of TCR clone 211861 (TRBV25-1, TRBJ1-2)
CASSGLQNGQGLIFGYTF

SEQ ID NO: 423723 - protein, 12 aa, Homo sapiens
  CDR3 for alpha chain variable domain of TCR clone 211862 (TRAV24, TRAJ47)
CAFGEYGNKLVF

SEQ ID NO: 423724 - protein, 14 aa, Homo sapiens
  CDR3 for beta chain variable domain of TCR clone 211862 (TRBV6-1, TRBJ1-3)
CASVQGGGGNTIYF

SEQ ID NO: 423725 - protein, 14 aa, Homo sapiens
  CDR3 for alpha chain variable domain of TCR clone 211863 (TRAV1-2, TRAJ8)
SAVREDTGFQKLVF

SEQ ID NO: 423726 - protein, 16 aa, Homo sapiens
  CDR3 for beta chain variable domain of TCR clone 211863 (TRBV19, TRBJ2-1)
CASSKAGPSSYNEQFF

SEQ ID NO: 423727 - protein, 13 aa, Homo sapiens
  CDR3 for alpha chain variable domain of TCR clone 211864 (TRAV8-1, TRAJ30)
CAVIMNRDDKINF

SEQ ID NO: 423728 - protein, 14 aa, Homo sapiens
  CDR3 for beta chain variable domain of TCR clone 211864 (TRBV7-2, TRBJ1-6)
CASSLQGANSPLYF

SEQ ID NO: 423729 - protein, 16 aa, Homo sapiens
  CDR3 for alpha chain variable domain of TCR clone 211865 (TRAV12-3, TRAJ45)
CAMGWGSGGGADGLTF

SEQ ID NO: 423730 - protein, 19 aa, Homo sapiens
  CDR3 for beta chain variable domain of TCR clone 211865 (TRBV28, TRBJ2-1)
CASSFSIRGSGRTRYEQFF

SEQ ID NO: 423731 - protein, 13 aa, Homo sapiens
  CDR3 for alpha chain variable domain of TCR clone 211866 (TRAV27, TRAJ41)
RAGDGNSGYALNF

SEQ ID NO: 423732 - protein, 14 aa, Homo sapiens
  CDR3 for beta chain variable domain of TCR clone 211866 (TRBV7-2, TRBJ1-1)
CASSFLTGTTEAFF

SEQ ID NO: 423733 - protein, 13 aa, Homo sapiens
  CDR3 for alpha chain variable domain of TCR clone 211867 (TRAV3, TRAJ21)
CAVREQDFNKFYF

SEQ ID NO: 423734 - protein, 12 aa, Homo sapiens
  CDR3 for beta chain variable domain of TCR clone 211867 (TRBV28, TRBJ2-6)
CAIQAGANVLTF

SEQ ID NO: 423735 - protein, 14 aa, Homo sapiens
  CDR3 for alpha chain variable domain of TCR clone 211868 (TRAV12-2, TRAJ13)
CAVKKTGGYQKVTF

SEQ ID NO: 423736 - protein, 14 aa, Homo sapiens
  CDR3 for beta chain variable domain of TCR clone 211868 (TRBV5-4, TRBJ2-5)
CASSLVRGQETQYF

SEQ ID NO: 423737 - protein, 15 aa, Homo sapiens
  CDR3 for alpha chain variable domain of TCR clone 211869 (TRAV3, TRAJ5)
CAVRDRKTGRRALTF

SEQ ID NO: 423738 - protein, 15 aa, Homo sapiens
  CDR3 for beta chain variable domain of TCR clone 211869 (TRBV28, TRBJ1-2)
CASSLWQPTNYGYTF

SEQ ID NO: 423739 - protein, 12 aa, Homo sapiens
  CDR3 for alpha chain variable domain of TCR clone 211870 (TRAV12-3, TRAJ5)
CAMDTGRRALTF

SEQ ID NO: 423740 - protein, 13 aa, Homo sapiens
  CDR3 for beta chain variable domain of TCR clone 211870 (TRBV7-7, TRBJ2-2)
CASSLTSAGEVFF

SEQ ID NO: 423741 - protein, 12 aa, Homo sapiens
  CDR3 for alpha chain variable domain of TCR clone 211871 (TRAV12-3, TRAJ17)
CAMTLTGNKLTF

SEQ ID NO: 423742 - protein, 16 aa, Homo sapiens
  CDR3 for beta chain variable domain of TCR clone 211871 (TRBV11-3, TRBJ2-5)
CASSSVVAGSTETQYF

SEQ ID NO: 423743 - protein, 14 aa, Homo sapiens
  CDR3 for alpha chain variable domain of TCR clone 211872 (TRAV29/DV5, TRAJ49)
CAASLSNTGNQFYF

SEQ ID NO: 423744 - protein, 14 aa, Homo sapiens
  CDR3 for beta chain variable domain of TCR clone 211872 (TRBV19, TRBJ2-2)
CASSTLHRSGELFF

SEQ ID NO: 423745 - protein, 15 aa, Homo sapiens
  CDR3 for alpha chain variable domain of TCR clone 211873 (TRAV12-2, TRAJ9)
CVVNGGYTGGFKTIF

SEQ ID NO: 423746 - protein, 17 aa, Homo sapiens
  CDR3 for beta chain variable domain of TCR clone 211873 (TRBV4-1, TRBJ2-1)
CASSHRDSGSSYNEQFF

SEQ ID NO: 423747 - protein, 13 aa, Homo sapiens
  CDR3 for alpha chain variable domain of TCR clone 211874 (TRAV12-3, TRAJ7)
CAMTPYGNNRLAL

SEQ ID NO: 423748 - protein, 16 aa, Homo sapiens
  CDR3 for beta chain variable domain of TCR clone 211874 (TRBV20-1, TRBJ1-4)
CSARPYGGELNEKLFF

SEQ ID NO: 423749 - protein, 12 aa, Homo sapiens
  CDR3 for alpha chain variable domain of TCR clone 211875 (TRAV12-3, TRAJ17)
GAMTLTGHKLTF

SEQ ID NO: 423750 - protein, 15 aa, Homo sapiens
  CDR3 for beta chain variable domain of TCR clone 211875 (TRBV20-1, TRBJ2-7)
CSARDRVSGMDEQYF

SEQ ID NO: 423751 - protein, 13 aa, Homo sapiens
  CDR3 for alpha chain variable domain of TCR clone 211876 (TRAV27, TRAJ41)
CAGEGNSGYALNF

SEQ ID NO: 423752 - protein, 13 aa, Homo sapiens
  CDR3 for beta chain variable domain of TCR clone 211876 (TRBV28, TRBJ2-5)
CASSWGTQETQYF

SEQ ID NO: 423753 - protein, 11 aa, Homo sapiens
  CDR3 for alpha chain variable domain of TCR clone 211877 (TRAV3, TRAJ21)
CAVGNFNKFYF

SEQ ID NO: 423754 - protein, 14 aa, Homo sapiens
  CDR3 for beta chain variable domain of TCR clone 211877 (TRBV25-1, TRBJ1-1)
CASTHLGGNTEAFF

SEQ ID NO: 423755 - protein, 16 aa, Homo sapiens
  CDR3 for alpha chain variable domain of TCR clone 211878 (TRAV20, TRAJ28)
CAVRDPSGAGSYQLTF

SEQ ID NO: 423756 - protein, 16 aa, Homo sapiens
  CDR3 for beta chain variable domain of TCR clone 211878 (TRBV6-1, TRBJ2-5)
CASSLRTGGVGETQYF

SEQ ID NO: 423757 - protein, 12 aa, Homo sapiens
  CDR3 for alpha chain variable domain of TCR clone 211879 (TRAV12-2, TRAJ4)
GCPEGGYNKLIF

SEQ ID NO: 423758 - protein, 16 aa, Homo sapiens
  CDR3 for beta chain variable domain of TCR clone 211879 (TRBV6-1, TRBJ2-5)
CASSETLDRGAETQYF

SEQ ID NO: 423759 - protein, 11 aa, Homo sapiens
  CDR3 for alpha chain variable domain of TCR clone 211880 (TRAV12-3, TRAJ43)
CAMSVYNDMRF

SEQ ID NO: 423760 - protein, 13 aa, Homo sapiens
  CDR3 for beta chain variable domain of TCR clone 211880 (TRBV20-1, TRBJ1-1)
CSAPLGGGTGAFF

SEQ ID NO: 423761 - protein, 12 aa, Homo sapiens
  CDR3 for alpha chain variable domain of TCR clone 211881 (TRAV35, TRAJ49)
CAGWNTGNQFYF

SEQ ID NO: 423762 - protein, 16 aa, Homo sapiens
  CDR3 for beta chain variable domain of TCR clone 211881 (TRBV5-1, TRBJ2-2)
RASSLWDTTNTGELFF

SEQ ID NO: 423763 - protein, 16 aa, Homo sapiens
  CDR3 for alpha chain variable domain of TCR clone 211882 (TRAV3, TRAJ37)
CAVRGKGSGNTGKLIF

SEQ ID NO: 423764 - protein, 14 aa, Homo sapiens
  CDR3 for beta chain variable domain of TCR clone 211882 (TRBV5-7, TRBJ1-2)
CASSAVGVSGGYTF

SEQ ID NO: 423765 - protein, 18 aa, Homo sapiens
  CDR3 for alpha chain variable domain of TCR clone 211883 (TRAV17, TRAJ45)
CATSLDLYSGGGADGVTF

SEQ ID NO: 423766 - protein, 15 aa, Homo sapiens
  CDR3 for beta chain variable domain of TCR clone 211883 (TRBV11-2, TRBJ2-1)
CASSKNRGLIYEQFF

SEQ ID NO: 423767 - protein, 16 aa, Homo sapiens
  CDR3 for alpha chain variable domain of TCR clone 211884 (TRAV3, TRAJ37)
CAVRPHGSGNTGQLIF

SEQ ID NO: 423768 - protein, 16 aa, Homo sapiens
  CDR3 for beta chain variable domain of TCR clone 211884 (TRBV20-1, TRBJ1-4)
CSAPGQGLLTNEKLFF

SEQ ID NO: 423769 - protein, 15 aa, Homo sapiens
  CDR3 for alpha chain variable domain of TCR clone 211885 (TRAV26-1, TRAJ22)
CIVRVSFWFCKATDL

SEQ ID NO: 423770 - protein, 14 aa, Homo sapiens
  CDR3 for beta chain variable domain of TCR clone 211885 (TRBV7-6, TRBJ2-3)
CASSLGTVTDTQYF

SEQ ID NO: 423771 - protein, 13 aa, Homo sapiens
  CDR3 for alpha chain variable domain of TCR clone 211886 (TRAV12-1, TRAJ34)
CVVTGYNTDKLIF

SEQ ID NO: 423772 - protein, 12 aa, Homo sapiens
  CDR3 for beta chain variable domain of TCR clone 211886 (TRBV6-1, TRBJ2-7)
CACSDYSYEQYF

SEQ ID NO: 423773 - protein, 15 aa, Homo sapiens
  CDR3 for alpha chain variable domain of TCR clone 211887 (TRAV23/DV6, TRAJ37)
CAAGEGSSNTGKLIF

SEQ ID NO: 423774 - protein, 17 aa, Homo sapiens
  CDR3 for beta chain variable domain of TCR clone 211887 (TRBV20-1, TRBJ2-7)
CSATRAGGVAGVEEQYL

SEQ ID NO: 423775 - protein, 13 aa, Homo sapiens
  CDR3 for alpha chain variable domain of TCR clone 211888 (TRAV12-2, TRAJ54)
CAVNRRGAQRLVF

SEQ ID NO: 423776 - protein, 18 aa, Homo sapiens
  CDR3 for beta chain variable domain of TCR clone 211888 (TRBV7-3, TRBJ2-5)
CASSLGGAAQGRWETQYF

SEQ ID NO: 423777 - protein, 13 aa, Homo sapiens
  CDR3 for alpha chain variable domain of TCR clone 211889 (TRAV1-2, TRAJ9)
CAALNTGGFKTIF

SEQ ID NO: 423778 - protein, 12 aa, Homo sapiens
  CDR3 for beta chain variable domain of TCR clone 211889 (TRBV11-3, TRBJ1-1)
CASSHRQGEAVF

SEQ ID NO: 423779 - protein, 15 aa, Homo sapiens
  CDR3 for alpha chain variable domain of TCR clone 211890 (TRAV8-2, TRAJ10)
CVVSHSTGGGNKLTF

SEQ ID NO: 423780 - protein, 12 aa, Homo sapiens
  CDR3 for beta chain variable domain of TCR clone 211890 (TRBV28, TRBJ1-2)
CASSLTTGGYTF

SEQ ID NO: 423781 - protein, 17 aa, Homo sapiens
  CDR3 for alpha chain variable domain of TCR clone 211891 (TRAV3, TRAJ6)
CAVRGGPRAGGSCIPTF

SEQ ID NO: 423782 - protein, 14 aa, Homo sapiens
  CDR3 for beta chain variable domain of TCR clone 211891 (TRBV7-2, TRBJ2-7)
CASSPKTSFYEQYF

SEQ ID NO: 423783 - protein, 13 aa, Homo sapiens
  CDR3 for alpha chain variable domain of TCR clone 211892 (TRAV12-2, TRAJ18)
CAVRGSTLGRLSF

SEQ ID NO: 423784 - protein, 18 aa, Homo sapiens
  CDR3 for beta chain variable domain of TCR clone 211892 (TRBV27, TRBJ2-3)
CASSLSGTSGRGTDTQYF

SEQ ID NO: 423785 - protein, 16 aa, Homo sapiens
  CDR3 for alpha chain variable domain of TCR clone 211893 (TRAV30, TRAJ24)
CGTEIVDADSWGKYQF

SEQ ID NO: 423786 - protein, 13 aa, Homo sapiens
  CDR3 for beta chain variable domain of TCR clone 211893 (TRBV11-2, TRBJ2-5)
CASSSTGEETQYF

SEQ ID NO: 423787 - protein, 15 aa, Homo sapiens
  CDR3 for alpha chain variable domain of TCR clone 211894 (TRAV26-1, TRAJ42)
CIVRVKGGSQGNLIF

SEQ ID NO: 423788 - protein, 15 aa, Homo sapiens
  CDR3 for beta chain variable domain of TCR clone 211894 (TRBV9, TRBJ2-2)
CASSDFAGASGELFF

SEQ ID NO: 423789 - protein, 11 aa, Homo sapiens
  CDR3 for alpha chain variable domain of TCR clone 211895 (TRAV17, TRAJ20)
CATDAGYKLSF

SEQ ID NO: 423790 - protein, 15 aa, Homo sapiens
  CDR3 for beta chain variable domain of TCR clone 211895 (TRBV3-1, TRBJ2-2)
CASSQDWTRAGELFF

SEQ ID NO: 423791 - protein, 13 aa, Homo sapiens
  CDR3 for alpha chain variable domain of TCR clone 211896 (TRAV12-3, TRAJ6)
CAMIPGGSYIPTF

SEQ ID NO: 423792 - protein, 15 aa, Homo sapiens
  CDR3 for beta chain variable domain of TCR clone 211896 (TRBV4-1, TRBJ1-4)
CASSDTGGTNEKLFF

SEQ ID NO: 423793 - protein, 12 aa, Homo sapiens
  CDR3 for alpha chain variable domain of TCR clone 211897 (TRAV3, TRAJ43)
CAVRDPNNDMRF

SEQ ID NO: 423794 - protein, 17 aa, Homo sapiens
  CDR3 for beta chain variable domain of TCR clone 211897 (TRBV28, TRBJ2-5)
CASSTPEGDALQETQYF

SEQ ID NO: 423795 - protein, 13 aa, Homo sapiens
  CDR3 for alpha chain variable domain of TCR clone 211898 (TRAV2, TRAJ40)
CAVVTSGTYKYIF

SEQ ID NO: 423796 - protein, 14 aa, Homo sapiens
  CDR3 for beta chain variable domain of TCR clone 211898 (TRBV19, TRBJ2-3)
CAWSAPRGTDTQYF

SEQ ID NO: 423797 - protein, 12 aa, Homo sapiens
  CDR3 for alpha chain variable domain of TCR clone 211899 (TRAV12-1, TRAJ40)
CVFYSGTYKYIF

SEQ ID NO: 423798 - protein, 15 aa, Homo sapiens
  CDR3 for beta chain variable domain of TCR clone 211899 (TRBV11-2, TRBJ1-1)
CASSSRSSLLLSLDK

SEQ ID NO: 423799 - protein, 13 aa, Homo sapiens
  CDR3 for alpha chain variable domain of TCR clone 211900 (TRAV21, TRAJ27)
CAARPGNAGKSTF

SEQ ID NO: 423800 - protein, 13 aa, Homo sapiens
  CDR3 for beta chain variable domain of TCR clone 211900 (TRBV7-6, TRBJ1-1)
CASSLKLGTEAFF

SEQ ID NO: 423801 - protein, 14 aa, Homo sapiens
  CDR3 for alpha chain variable domain of TCR clone 211901 (TRAV23/DV6, TRAJ22)
CAASRSGSARHLTF

SEQ ID NO: 423802 - protein, 13 aa, Homo sapiens
  CDR3 for beta chain variable domain of TCR clone 211901 (TRBV15, TRBJ1-6)
CATSGGLNSPLHF

SEQ ID NO: 423803 - protein, 13 aa, Homo sapiens
  CDR3 for alpha chain variable domain of TCR clone 211902 (TRAV8-3, TRAJ28)
CAVGAVGSYQLTF

SEQ ID NO: 423804 - protein, 14 aa, Homo sapiens
  CDR3 for beta chain variable domain of TCR clone 211902 (TRBV19, TRBJ2-7)
CASSMGQGAIEQYF

SEQ ID NO: 423805 - protein, 15 aa, Homo sapiens
  CDR3 for alpha chain variable domain of TCR clone 211903 (TRAV41, TRAJ45)
CAASYSGGGADGLTF

SEQ ID NO: 423806 - protein, 14 aa, Homo sapiens
  CDR3 for beta chain variable domain of TCR clone 211903 (TRBV12-5, TRBJ2-5)
CASGSRTHQETQCF

SEQ ID NO: 423807 - protein, 18 aa, Homo sapiens
  CDR3 for alpha chain variable domain of TCR clone 211904 (TRAV17, TRAJ45)
CATSLDLYSGGGADGLTF

SEQ ID NO: 423808 - protein, 15 aa, Homo sapiens
  CDR3 for beta chain variable domain of TCR clone 211904 (TRBV11-2, TRBJ2-1)
CASSKNRGVIYEQFF

SEQ ID NO: 423809 - protein, 13 aa, Homo sapiens
  CDR3 for alpha chain variable domain of TCR clone 211905 (TRAV3, TRAJ29)
CAVGDIIDTPLVF

SEQ ID NO: 423810 - protein, 15 aa, Homo sapiens
  CDR3 for beta chain variable domain of TCR clone 211905 (TRBV7-9, TRBJ2-2)
CASGPLDTFPGELFF

SEQ ID NO: 423811 - protein, 15 aa, Homo sapiens
  CDR3 for alpha chain variable domain of TCR clone 211906 (TRAV17, TRAJ57)
CATGPSQGGSEKLFF

SEQ ID NO: 423812 - protein, 11 aa, Homo sapiens
  CDR3 for beta chain variable domain of TCR clone 211906 (TRBV11-2, TRBJ2-2)
CASSLPGELFF

SEQ ID NO: 423813 - protein, 10 aa, Homo sapiens
  CDR3 for alpha chain variable domain of TCR clone 211907 (TRAV23/DV6, TRAJ31)
CARGGARPMF

SEQ ID NO: 423814 - protein, 14 aa, Homo sapiens
  CDR3 for beta chain variable domain of TCR clone 211907 (TRBV7-8, TRBJ1-2)
CASSPDSLSYGYTF

SEQ ID NO: 423815 - protein, 12 aa, Homo sapiens
  CDR3 for alpha chain variable domain of TCR clone 211908 (TRAV12-3, TRAJ17)
CAMTLTGNKLTF

SEQ ID NO: 423816 - protein, 15 aa, Homo sapiens
  CDR3 for beta chain variable domain of TCR clone 211908 (TRBV20-1, TRBJ2-7)
CSARDPVAGMDEQYF

SEQ ID NO: 423817 - protein, 14 aa, Homo sapiens
  CDR3 for alpha chain variable domain of TCR clone 211909 (TRAV1-2, TRAJ16)
CAVNRFSAGQKLLF

SEQ ID NO: 423818 - protein, 14 aa, Homo sapiens
  CDR3 for beta chain variable domain of TCR clone 211909 (TRBV7-9, TRBJ1-4)
CAITEGEANEKLFF

SEQ ID NO: 423819 - protein, 12 aa, Homo sapiens
  CDR3 for alpha chain variable domain of TCR clone 211910 (TRAV25, TRAJ38)
CAGTGNNRNLIW

SEQ ID NO: 423820 - protein, 14 aa, Homo sapiens
  CDR3 for beta chain variable domain of TCR clone 211910 (TRBV19, TRBJ1-5)
CASSKMTGPQPHHF

SEQ ID NO: 423821 - protein, 14 aa, Homo sapiens
  CDR3 for alpha chain variable domain of TCR clone 211911 (TRAV12-3, TRAJ12)
CAMSEVDSSYKLIF

SEQ ID NO: 423822 - protein, 12 aa, Homo sapiens
  CDR3 for beta chain variable domain of TCR clone 211911 (TRBV18, TRBJ1-4)
CASSPIREKLFF

SEQ ID NO: 423823 - protein, 13 aa, Homo sapiens
  CDR3 for alpha chain variable domain of TCR clone 211912 (TRAV8-6, TRAJ40)
CAVSVTGTYKYIF

SEQ ID NO: 423824 - protein, 15 aa, Homo sapiens
  CDR3 for beta chain variable domain of TCR clone 211912 (TRBV4-1, TRBJ2-3)
CASSRGLGIPDTQYF

SEQ ID NO: 423825 - protein, 13 aa, Homo sapiens
  CDR3 for alpha chain variable domain of TCR clone 211913 (TRAV12-1, TRAJ33)
CVVNRKSNYQLIW

SEQ ID NO: 423826 - protein, 13 aa, Homo sapiens
  CDR3 for beta chain variable domain of TCR clone 211913 (TRBV5-7, TRBJ1-2)
CASSLIRAPGYTF

SEQ ID NO: 423827 - protein, 14 aa, Homo sapiens
  CDR3 for alpha chain variable domain of TCR clone 211914 (TRAV12-2, TRAJ9)
CSVRGQTGGFKAIF

SEQ ID NO: 423828 - protein, 15 aa, Homo sapiens
  CDR3 for beta chain variable domain of TCR clone 211914 (TRBV7-2, TRBJ2-7)
CASSFTGQGAQEQYF

SEQ ID NO: 423829 - protein, 14 aa, Homo sapiens
  CDR3 for alpha chain variable domain of TCR clone 211915 (TRAV23/DV6, TRAJ22)
CAASVSGSARQLTF

SEQ ID NO: 423830 - protein, 15 aa, Homo sapiens
  CDR3 for beta chain variable domain of TCR clone 211915 (TRBV27, TRBJ2-1)
CASSNGGGSSNEQFF

SEQ ID NO: 423831 - protein, 14 aa, Homo sapiens
  CDR3 for alpha chain variable domain of TCR clone 211916 (TRAV17, TRAJ6)
CSTPAMGGSYIPTF

SEQ ID NO: 423832 - protein, 12 aa, Homo sapiens
  CDR3 for beta chain variable domain of TCR clone 211916 (TRBV6-3, TRBJ2-7)
CASSLTPYEQYF

SEQ ID NO: 423833 - protein, 14 aa, Homo sapiens
  CDR3 for alpha chain variable domain of TCR clone 211917 (TRAV2, TRAJ8)
CAGRGNTGFQKLVF

SEQ ID NO: 423834 - protein, 16 aa, Homo sapiens
  CDR3 for beta chain variable domain of TCR clone 211917 (TRBV20-1, TRBJ1-5)
CSAELPGQQTNQPQHF

SEQ ID NO: 423835 - protein, 14 aa, Homo sapiens
  CDR3 for alpha chain variable domain of TCR clone 211918 (TRAV8-2, TRAJ13)
CVLSDSGGYQKVTF

SEQ ID NO: 423836 - protein, 14 aa, Homo sapiens
  CDR3 for beta chain variable domain of TCR clone 211918 (TRBV5-5, TRBJ1-4)
CASSPRGYNEKLFF

SEQ ID NO: 423837 - protein, 14 aa, Homo sapiens
  CDR3 for alpha chain variable domain of TCR clone 211919 (TRAV12-2, TRAJ13)
CAVKKTGGYQKVTV

SEQ ID NO: 423838 - protein, 15 aa, Homo sapiens
  CDR3 for beta chain variable domain of TCR clone 211919 (TRBV12-4, TRBJ2-5)
CASSPPTGLQETQYF

SEQ ID NO: 423839 - protein, 15 aa, Homo sapiens
  CDR3 for alpha chain variable domain of TCR clone 211920 (TRAV16, TRAJ17)
VALSGNKAAGNKLTF

SEQ ID NO: 423840 - protein, 16 aa, Homo sapiens
  CDR3 for beta chain variable domain of TCR clone 211920 (TRBV7-6, TRBJ1-6)
CASSSLPAGEYSPLHF

SEQ ID NO: 423841 - protein, 12 aa, Homo sapiens
  CDR3 for alpha chain variable domain of TCR clone 211921 (TRAV13-1, TRAJ49)
CAASPMGNQFYF

SEQ ID NO: 423842 - protein, 14 aa, Homo sapiens
  CDR3 for beta chain variable domain of TCR clone 211921 (TRBV20-1, TRBJ2-3)
CSARGGTSTDTQYF

SEQ ID NO: 423843 - protein, 17 aa, Homo sapiens
  CDR3 for alpha chain variable domain of TCR clone 211922 (TRAV3, TRAJ6)
CAVRDGPRAGGSYRTTF

SEQ ID NO: 423844 - protein, 14 aa, Homo sapiens
  CDR3 for beta chain variable domain of TCR clone 211922 (TRBV7-2, TRBJ2-7)
CASSPKTSFYEQYF

SEQ ID NO: 423845 - protein, 21 aa, Homo sapiens
  CDR3 for alpha chain variable domain of TCR clone 211923 (TRAV4, TRAJ42)
CCVLLPRGCPELWRSQGNLIF

SEQ ID NO: 423846 - protein, 12 aa, Homo sapiens
  CDR3 for beta chain variable domain of TCR clone 211923 (TRBV20-1, TRBJ2-1)
CSAQYTYNEQFF

SEQ ID NO: 423847 - protein, 16 aa, Homo sapiens
  CDR3 for alpha chain variable domain of TCR clone 211924 (TRAV3, TRAJ37)
CAVRPHGSCNTGKLIF

SEQ ID NO: 423848 - protein, 17 aa, Homo sapiens
  CDR3 for beta chain variable domain of TCR clone 211924 (TRBV20-1, TRBJ2-1)
CSASSSGLAGSYNEQFF

SEQ ID NO: 423849 - protein, 11 aa, Homo sapiens
  CDR3 for alpha chain variable domain of TCR clone 211925 (TRAV2, TRAJ33)
CAVDSNYQLIW

SEQ ID NO: 423850 - protein, 13 aa, Homo sapiens
  CDR3 for beta chain variable domain of TCR clone 211925 (TRBV7-3, TRBJ1-2)
CASSLKRGYGYTF

SEQ ID NO: 423851 - protein, 14 aa, Homo sapiens
  CDR3 for alpha chain variable domain of TCR clone 211926 (TRAV8-2, TRAJ4)
CVVSPSGGYNKLIF

SEQ ID NO: 423852 - protein, 15 aa, Homo sapiens
  CDR3 for beta chain variable domain of TCR clone 211926 (TRBV4-1, TRBJ1-4)
CASSDTGGTNEKLFF

SEQ ID NO: 423853 - protein, 15 aa, Homo sapiens
  CDR3 for alpha chain variable domain of TCR clone 211927 (TRAV2, TRAJ9)
CAVEDRGTGGFKTIF

SEQ ID NO: 423854 - protein, 16 aa, Homo sapiens
  CDR3 for beta chain variable domain of TCR clone 211927 (TRBV24-1, TRBJ2-3)
CATSDPGTGSTDTQYF

SEQ ID NO: 423855 - protein, 12 aa, Homo sapiens
  CDR3 for alpha chain variable domain of TCR clone 211928 (TRAV1-1, TRAJ24)
CAVRGSWGKFQF

SEQ ID NO: 423856 - protein, 14 aa, Homo sapiens
  CDR3 for beta chain variable domain of TCR clone 211928 (TRBV20-1, TRBJ2-3)
CSARGGTSTDSQYF

SEQ ID NO: 423857 - protein, 12 aa, Homo sapiens
  CDR3 for alpha chain variable domain of TCR clone 211929 (TRAV12-1, TRAJ34)
CVVAGATDKLIW

SEQ ID NO: 423858 - protein, 16 aa, Homo sapiens
  CDR3 for beta chain variable domain of TCR clone 211929 (TRBV7-2, TRBJ1-2)
CASSSNQDRRGRGYTF

SEQ ID NO: 423859 - protein, 13 aa, Homo sapiens
  CDR3 for alpha chain variable domain of TCR clone 211930 (TRAV13-2, TRAJ13)
CAERPGGYQKVTF

SEQ ID NO: 423860 - protein, 13 aa, Homo sapiens
  CDR3 for beta chain variable domain of TCR clone 211930 (TRBV12-4, TRBJ1-1)
CASSPGTGFEAFF

SEQ ID NO: 423861 - protein, 12 aa, Homo sapiens
  CDR3 for alpha chain variable domain of TCR clone 211931 (TRAV12-3, TRAJ17)
CAMTLTGNKLTF

SEQ ID NO: 423862 - protein, 18 aa, Homo sapiens
  CDR3 for beta chain variable domain of TCR clone 211931 (TRBV4-3, TRBJ1-6)
CASSQETPASSYNAPLHF

SEQ ID NO: 423863 - protein, 15 aa, Homo sapiens
  CDR3 for alpha chain variable domain of TCR clone 211932 (TRAV21, TRAJ37)
CAVRPTLSNTGKLIF

SEQ ID NO: 423864 - protein, 13 aa, Homo sapiens
  CDR3 for beta chain variable domain of TCR clone 211932 (TRBV7-7, TRBJ2-3)
CASSLSRADTQYF

SEQ ID NO: 423865 - protein, 12 aa, Homo sapiens
  CDR3 for alpha chain variable domain of TCR clone 211933 (TRAV3, TRAJ7)
CADLLWEQQTRY

SEQ ID NO: 423866 - protein, 13 aa, Homo sapiens
  CDR3 for beta chain variable domain of TCR clone 211933 (TRBV7-3, TRBJ2-5)
CASSFRGGETQYF

SEQ ID NO: 423867 - protein, 14 aa, Homo sapiens
  CDR3 for alpha chain variable domain of TCR clone 211934 (TRAV21, TRAJ37)
CAVTGSSNTGKLIF

SEQ ID NO: 423868 - protein, 14 aa, Homo sapiens
  CDR3 for beta chain variable domain of TCR clone 211934 (TRBV7-2, TRBJ2-1)
CASSRGGARNEQFF

SEQ ID NO: 423869 - protein, 15 aa, Homo sapiens
  CDR3 for alpha chain variable domain of TCR clone 211935 (TRAV3, TRAJ29)
CAVRAPLSGDTPLVF

SEQ ID NO: 423870 - protein, 15 aa, Homo sapiens
  CDR3 for beta chain variable domain of TCR clone 211935 (TRBV28, TRBJ1-1)
CASRIKGGLNTEAFF

SEQ ID NO: 423871 - protein, 18 aa, Homo sapiens
  CDR3 for alpha chain variable domain of TCR clone 211936 (TRAV12-3, TRAJ10)
SPVIQPPTSDGRRKKLTF

SEQ ID NO: 423872 - protein, 14 aa, Homo sapiens
  CDR3 for beta chain variable domain of TCR clone 211936 (TRBV6-1, TRBJ1-3)
CASVQGGGGNTIYF

SEQ ID NO: 423873 - protein, 14 aa, Homo sapiens
  CDR3 for alpha chain variable domain of TCR clone 211937 (TRAV12-2, TRAJ13)
CAVKKTGGYQKVTF

SEQ ID NO: 423874 - protein, 15 aa, Homo sapiens
  CDR3 for beta chain variable domain of TCR clone 211937 (TRBV27, TRBJ2-1)
CASSNGGGASNKQFF

SEQ ID NO: 423875 - protein, 13 aa, Homo sapiens
  CDR3 for alpha chain variable domain of TCR clone 211938 (TRAV12-1, TRAJ34)
CVVTGYNTDKLIF

SEQ ID NO: 423876 - protein, 13 aa, Homo sapiens
  CDR3 for beta chain variable domain of TCR clone 211938 (TRBV28, TRBJ2-1)
CASKAGGVYEQFF

SEQ ID NO: 423877 - protein, 12 aa, Homo sapiens
  CDR3 for alpha chain variable domain of TCR clone 211939 (TRAV25, TRAJ11)
CAGASGYSTLTF

SEQ ID NO: 423878 - protein, 17 aa, Homo sapiens
  CDR3 for beta chain variable domain of TCR clone 211939 (TRBV25-1, TRBJ2-7)
CASSDARVVFSSYEQYF

SEQ ID NO: 423879 - protein, 14 aa, Homo sapiens
  CDR3 for alpha chain variable domain of TCR clone 211940 (TRAV1-2, TRAJ16)
CAVNRFSDGQKLLF

SEQ ID NO: 423880 - protein, 14 aa, Homo sapiens
  CDR3 for beta chain variable domain of TCR clone 211940 (TRBV7-9, TRBJ2-3)
CVSSLEDGTDTQYF

SEQ ID NO: 423881 - protein, 13 aa, Homo sapiens
  CDR3 for alpha chain variable domain of TCR clone 211941 (TRAV8-3, TRAJ36)
CAVGATGANNLFF

SEQ ID NO: 423882 - protein, 13 aa, Homo sapiens
  CDR3 for beta chain variable domain of TCR clone 211941 (TRBV6-1, TRBJ1-1)
CASGRQGNTEAFF

SEQ ID NO: 423883 - protein, 14 aa, Homo sapiens
  CDR3 for alpha chain variable domain of TCR clone 211942 (TRAV12-2, TRAJ17)
CAVLFKATGNKLTF

SEQ ID NO: 423884 - protein, 14 aa, Homo sapiens
  CDR3 for beta chain variable domain of TCR clone 211942 (TRBV12-5, TRBJ2-5)
CASGSWTHQETQYF

SEQ ID NO: 423885 - protein, 13 aa, Homo sapiens
  CDR3 for alpha chain variable domain of TCR clone 211943 (TRAV13-1, TRAJ5)
CAASDTGRRALTF

SEQ ID NO: 423886 - protein, 12 aa, Homo sapiens
  CDR3 for beta chain variable domain of TCR clone 211943 (TRBV28, TRBJ2-3)
CASSLYRVTQYF

SEQ ID NO: 423887 - protein, 15 aa, Homo sapiens
  CDR3 for alpha chain variable domain of TCR clone 211944 (TRAV27, TRAJ24)
CAGGTSADSWGKLQF

SEQ ID NO: 423888 - protein, 12 aa, Homo sapiens
  CDR3 for beta chain variable domain of TCR clone 211944 (TRBV5-1, TRBJ1-1)
CASSFGNTEAFF

SEQ ID NO: 423889 - protein, 14 aa, Homo sapiens
  CDR3 for alpha chain variable domain of TCR clone 211945 (TRAV12-1, TRAJ37)
CVVGGVENTGKLIF

SEQ ID NO: 423890 - protein, 13 aa, Homo sapiens
  CDR3 for beta chain variable domain of TCR clone 211945 (TRBV7-9, TRBJ1-2)
CASSLKQNYGYTF

SEQ ID NO: 423891 - protein, 14 aa, Homo sapiens
  CDR3 for alpha chain variable domain of TCR clone 211946 (TRAV12-1, TRAJ17)
CVVNYKAAGNKLTF

SEQ ID NO: 423892 - protein, 14 aa, Homo sapiens
  CDR3 for beta chain variable domain of TCR clone 211946 (TRBV25-1, TRBJ1-1)
WASTHLGGNTEAFF

SEQ ID NO: 423893 - protein, 14 aa, Homo sapiens
  CDR3 for alpha chain variable domain of TCR clone 211947 (TRAV8-4, TRAJ16)
CAVSHVGRWPEAAL

SEQ ID NO: 423894 - protein, 15 aa, Homo sapiens
  CDR3 for beta chain variable domain of TCR clone 211947 (TRBV11-3, TRBJ2-7)
CASSPGPASSYEQYF

SEQ ID NO: 423895 - protein, 12 aa, Homo sapiens
  CDR3 for alpha chain variable domain of TCR clone 211948 (TRAV21, TRAJ37)
CAVRGNTGKLIF

SEQ ID NO: 423896 - protein, 14 aa, Homo sapiens
  CDR3 for beta chain variable domain of TCR clone 211948 (TRBV19, TRBJ2-1)
CASEVTGARNEQVF

SEQ ID NO: 423897 - protein, 11 aa, Homo sapiens
  CDR3 for alpha chain variable domain of TCR clone 211949 (TRAV27, TRAJ47)
SIVEYGNKLVF

SEQ ID NO: 423898 - protein, 20 aa, Homo sapiens
  CDR3 for beta chain variable domain of TCR clone 211949 (TRBV7-8, TRBJ2-2)
CASSHLFPGPTIHITGELFF

SEQ ID NO: 423899 - protein, 16 aa, Homo sapiens
  CDR3 for alpha chain variable domain of TCR clone 211950 (TRAV3, TRAJ10)
CAVRDMRAGGGNKLTF

SEQ ID NO: 423900 - protein, 16 aa, Homo sapiens
  CDR3 for beta chain variable domain of TCR clone 211950 (TRBV6-6, TRBJ2-3)
CASSYSHAGSTDTQYF

SEQ ID NO: 423901 - protein, 12 aa, Homo sapiens
  CDR3 for alpha chain variable domain of TCR clone 211951 (TRAV13-1, TRAJ21)
CAAKEGFNKFYF

SEQ ID NO: 423902 - protein, 14 aa, Homo sapiens
  CDR3 for beta chain variable domain of TCR clone 211951 (TRBV2, TRBJ2-5)
CASKRDGTTETQYF

SEQ ID NO: 423903 - protein, 20 aa, Homo sapiens
  CDR3 for alpha chain variable domain of TCR clone 211952 (TRAV1-1, TRAJ4)
CLLLLRCEGFLSGGYNKMIF

SEQ ID NO: 423904 - protein, 16 aa, Homo sapiens
  CDR3 for beta chain variable domain of TCR clone 211952 (TRBV28, TRBJ1-4)
CASSPPYRGRSEKLFF

SEQ ID NO: 423905 - protein, 14 aa, Homo sapiens
  CDR3 for alpha chain variable domain of TCR clone 211953 (TRAV12-3, TRAJ10)
SHLPLTGGGNKLTF

SEQ ID NO: 423906 - protein, 16 aa, Homo sapiens
  CDR3 for beta chain variable domain of TCR clone 211953 (TRBV5-1, TRBJ2-1)
CASSPCTSGEYNEQFF

SEQ ID NO: 423907 - protein, 13 aa, Homo sapiens
  CDR3 for alpha chain variable domain of TCR clone 211954 (TRAV14/DV4, TRAJ26)
CAMREAYGQNFVF

SEQ ID NO: 423908 - protein, 19 aa, Homo sapiens
  CDR3 for beta chain variable domain of TCR clone 211954 (TRBV13, TRBJ2-6)
CASSLVHRDRGAGDNVLTF

SEQ ID NO: 423909 - protein, 12 aa, Homo sapiens
  CDR3 for alpha chain variable domain of TCR clone 211955 (TRAV12-1, TRAJ40)
CVVYSGTYKYIF

SEQ ID NO: 423910 - protein, 14 aa, Homo sapiens
  CDR3 for beta chain variable domain of TCR clone 211955 (TRBV7-9, TRBJ2-5)
CASRLDTAQETQYF

SEQ ID NO: 423911 - protein, 14 aa, Homo sapiens
  CDR3 for alpha chain variable domain of TCR clone 211956 (TRAV13-1, TRAJ9)
CAASALTGGFKTIF

SEQ ID NO: 423912 - protein, 16 aa, Homo sapiens
  CDR3 for beta chain variable domain of TCR clone 211956 (TRBV12-4, TRBJ2-3)
CASSFGTGGISDTQYY

SEQ ID NO: 423913 - protein, 14 aa, Homo sapiens
  CDR3 for alpha chain variable domain of TCR clone 211957 (TRAV13-2, TRAJ17)
CAENSKAAGNKLTF

SEQ ID NO: 423914 - protein, 16 aa, Homo sapiens
  CDR3 for beta chain variable domain of TCR clone 211957 (TRBV15, TRBJ2-3)
CATSRDLGIVTDTQYF

SEQ ID NO: 423915 - protein, 14 aa, Homo sapiens
  CDR3 for alpha chain variable domain of TCR clone 211958 (TRAV12-3, TRAJ54)
CAMSALQGAQKLVF

SEQ ID NO: 423916 - protein, 15 aa, Homo sapiens
  CDR3 for beta chain variable domain of TCR clone 211958 (TRBV6-3, TRBJ2-7)
CASSSPGTVFYEQYF

SEQ ID NO: 423917 - protein, 14 aa, Homo sapiens
  CDR3 for alpha chain variable domain of TCR clone 211959 (TRAV12-3, TRAJ10)
SHLPLTGGGNKLTF

SEQ ID NO: 423918 - protein, 16 aa, Homo sapiens
  CDR3 for beta chain variable domain of TCR clone 211959 (TRBV19, TRBJ2-1)
CASSIQAGGSYNEQFF

SEQ ID NO: 423919 - protein, 13 aa, Homo sapiens
  CDR3 for alpha chain variable domain of TCR clone 211960 (TRAV29/DV5, TRAJ31)
CAASRNNNARLMF

SEQ ID NO: 423920 - protein, 15 aa, Homo sapiens
  CDR3 for beta chain variable domain of TCR clone 211960 (TRBV20-1, TRBJ2-1)
CSARGGTRYYNEQFF

SEQ ID NO: 423921 - protein, 17 aa, Homo sapiens
  CDR3 for alpha chain variable domain of TCR clone 211961 (TRAV3, TRAJ6)
CAVRDGPRAGGSYIPTF

SEQ ID NO: 423922 - protein, 15 aa, Homo sapiens
  CDR3 for beta chain variable domain of TCR clone 211961 (TRBV13, TRBJ1-3)
CASSPNRGSGNTIYF

SEQ ID NO: 423923 - protein, 14 aa, Homo sapiens
  CDR3 for alpha chain variable domain of TCR clone 211962 (TRAV35, TRAJ54)
CAGYLIQGAQKLVF

SEQ ID NO: 423924 - protein, 14 aa, Homo sapiens
  CDR3 for beta chain variable domain of TCR clone 211962 (TRBV7-2, TRBJ2-5)
CASSVGWAEEDQYF

SEQ ID NO: 423925 - protein, 14 aa, Homo sapiens
  CDR3 for alpha chain variable domain of TCR clone 211963 (TRAV1-2, TRAJ16)
CAVNRFSDGQKLVF

SEQ ID NO: 423926 - protein, 15 aa, Homo sapiens
  CDR3 for beta chain variable domain of TCR clone 211963 (TRBV7-8, TRBJ2-1)
CASSLAGGLYNEQFF

SEQ ID NO: 423927 - protein, 12 aa, Homo sapiens
  CDR3 for alpha chain variable domain of TCR clone 211964 (TRAV17, TRAJ39)
CATGAAGNMLTF

SEQ ID NO: 423928 - protein, 14 aa, Homo sapiens
  CDR3 for beta chain variable domain of TCR clone 211964 (TRBV6-1, TRBJ1-3)
CASVQGGGGNTIYF

SEQ ID NO: 423929 - protein, 15 aa, Homo sapiens
  CDR3 for alpha chain variable domain of TCR clone 211965 (TRAV2, TRAJ9)
CAVEDRGTGGFKTIF

SEQ ID NO: 423930 - protein, 15 aa, Homo sapiens
  CDR3 for beta chain variable domain of TCR clone 211965 (TRBV18, TRBJ2-3)
CASSPLAGETDTQYF

SEQ ID NO: 423931 - protein, 13 aa, Homo sapiens
  CDR3 for alpha chain variable domain of TCR clone 211966 (TRAV13-2, TRAJ48)
CAEMDFGNEKLTF

SEQ ID NO: 423932 - protein, 14 aa, Homo sapiens
  CDR3 for beta chain variable domain of TCR clone 211966 (TRBV19, TRBJ2-7)
CVSSMGQGAIEQYF

SEQ ID NO: 423933 - protein, 13 aa, Homo sapiens
  CDR3 for alpha chain variable domain of TCR clone 211967 (TRAV36/DV7, TRAJ37)
CAVFSSNTGKLIF

SEQ ID NO: 423934 - protein, 16 aa, Homo sapiens
  CDR3 for beta chain variable domain of TCR clone 211967 (TRBV3-1, TRBJ2-5)
CASSPGQWNGFGTQYF

SEQ ID NO: 423935 - protein, 17 aa, Homo sapiens
  CDR3 for alpha chain variable domain of TCR clone 211968 (TRAV12-3, TRAJ6)
CAMSARGGAGGSYIPTF

SEQ ID NO: 423936 - protein, 18 aa, Homo sapiens
  CDR3 for beta chain variable domain of TCR clone 211968 (TRBV7-9, TRBJ2-7)
CASSLTTSGSRTWYEQYF

SEQ ID NO: 423937 - protein, 13 aa, Homo sapiens
  CDR3 for alpha chain variable domain of TCR clone 211969 (TRAV29/DV5, TRAJ31)
CAVSRNNNARLMF

SEQ ID NO: 423938 - protein, 12 aa, Homo sapiens
  CDR3 for beta chain variable domain of TCR clone 211969 (TRBV14, TRBJ2-5)
CASSQLKETQYF

SEQ ID NO: 423939 - protein, 18 aa, Homo sapiens
  CDR3 for alpha chain variable domain of TCR clone 211970 (TRAV13-1, TRAJ28)
CAASPVPILWGWELPTHF

SEQ ID NO: 423940 - protein, 14 aa, Homo sapiens
  CDR3 for beta chain variable domain of TCR clone 211970 (TRBV19, TRBJ2-1)
CASPTFVLSGEQFF

SEQ ID NO: 423941 - protein, 11 aa, Homo sapiens
  CDR3 for alpha chain variable domain of TCR clone 211971 (TRAV2, TRAJ13)
CASGGYQKVTF

SEQ ID NO: 423942 - protein, 15 aa, Homo sapiens
  CDR3 for beta chain variable domain of TCR clone 211971 (TRBV20-1, TRBJ2-7)
CSARDRVSGMDEQYV

SEQ ID NO: 423943 - protein, 17 aa, Homo sapiens
  CDR3 for alpha chain variable domain of TCR clone 211972 (TRAV3, TRAJ38)
CAVRDCLNAGNNRKLIW

SEQ ID NO: 423944 - protein, 15 aa, Homo sapiens
  CDR3 for beta chain variable domain of TCR clone 211972 (TRBV7-9, TRBJ1-4)
CASSARTGGNEKLFF

SEQ ID NO: 423945 - protein, 15 aa, Homo sapiens
  CDR3 for alpha chain variable domain of TCR clone 211973 (TRAV21, TRAJ53)
CATLNSGGSNYKLTF

SEQ ID NO: 423946 - protein, 17 aa, Homo sapiens
  CDR3 for beta chain variable domain of TCR clone 211973 (TRBV7-8, TRBJ2-6)
CASSAGTGGAGANILTF

SEQ ID NO: 423947 - protein, 15 aa, Homo sapiens
  CDR3 for alpha chain variable domain of TCR clone 211974 (TRAV17, TRAJ28)
CATVYSGAGSYQLTF

SEQ ID NO: 423948 - protein, 12 aa, Homo sapiens
  CDR3 for beta chain variable domain of TCR clone 211974 (TRBV7-2, TRBJ2-5)
CASSVAKETQYF

SEQ ID NO: 423949 - protein, 18 aa, Homo sapiens
  CDR3 for alpha chain variable domain of TCR clone 211975 (TRAV12-1, TRAJ52)
CVVKLINAGGTSYGKLTF

SEQ ID NO: 423950 - protein, 17 aa, Homo sapiens
  CDR3 for beta chain variable domain of TCR clone 211975 (TRBV15, TRBJ1-5)
CATSRAPPGTRNQPQHF

SEQ ID NO: 423951 - protein, 13 aa, Homo sapiens
  CDR3 for alpha chain variable domain of TCR clone 211976 (TRAV2, TRAJ9)
CAVESTGCFKTIF

SEQ ID NO: 423952 - protein, 15 aa, Homo sapiens
  CDR3 for beta chain variable domain of TCR clone 211976 (TRBV10-3, TRBJ2-1)
CAITFGGGTDNEQFF

SEQ ID NO: 423953 - protein, 12 aa, Homo sapiens
  CDR3 for alpha chain variable domain of TCR clone 211977 (TRAV21, TRAJ23)
CAVGPQGGQLIF

SEQ ID NO: 423954 - protein, 13 aa, Homo sapiens
  CDR3 for beta chain variable domain of TCR clone 211977 (TRBV20-1, TRBJ2-7)
CSARTGAGYEQYF

SEQ ID NO: 423955 - protein, 13 aa, Homo sapiens
  CDR3 for alpha chain variable domain of TCR clone 211978 (TRAV8-6, TRAJ8)
CAVSNTGFQKLVF

SEQ ID NO: 423956 - protein, 15 aa, Homo sapiens
  CDR3 for beta chain variable domain of TCR clone 211978 (TRBV28, TRBJ2-5)
RSSSSGRTIQETQYF

SEQ ID NO: 423957 - protein, 14 aa, Homo sapiens
  CDR3 for alpha chain variable domain of TCR clone 211979 (TRAV12-3, TRAJ10)
SHLPLTGGGNKLTF

SEQ ID NO: 423958 - protein, 17 aa, Homo sapiens
  CDR3 for beta chain variable domain of TCR clone 211979 (TRBV7-3, TRBJ2-3)
CASSRGLAGEVPDTQYF

SEQ ID NO: 423959 - protein, 10 aa, Homo sapiens
  CDR3 for alpha chain variable domain of TCR clone 211980 (TRAV3, TRAJ20)
CAVRPSVTTT

SEQ ID NO: 423960 - protein, 15 aa, Homo sapiens
  CDR3 for beta chain variable domain of TCR clone 211980 (TRBV19, TRBJ2-6)
CASVRRDSGANDLTF

SEQ ID NO: 423961 - protein, 12 aa, Homo sapiens
  CDR3 for alpha chain variable domain of TCR clone 211981 (TRAV3, TRAJ39)
CAVIEWSNMLTF

SEQ ID NO: 423962 - protein, 17 aa, Homo sapiens
  CDR3 for beta chain variable domain of TCR clone 211981 (TRBV11-2, TRBJ2-1)
CASSLYPPGVEYNEQFF

SEQ ID NO: 423963 - protein, 14 aa, Homo sapiens
  CDR3 for alpha chain variable domain of TCR clone 211982 (TRAV9-2, TRAJ39)
CALYIYNASNMLTF

SEQ ID NO: 423964 - protein, 12 aa, Homo sapiens
  CDR3 for beta chain variable domain of TCR clone 211982 (TRBV24-1, TRBJ1-1)
CATLYPDTEAFF

SEQ ID NO: 423965 - protein, 12 aa, Homo sapiens
  CDR3 for alpha chain variable domain of TCR clone 211983 (TRAV23/DV6, TRAJ33)
CAAEDSNYQLIW

SEQ ID NO: 423966 - protein, 14 aa, Homo sapiens
  CDR3 for beta chain variable domain of TCR clone 211983 (TRBV7-2, TRBJ2-5)
CASSFTQGQETQYF

SEQ ID NO: 423967 - protein, 17 aa, Homo sapiens
  CDR3 for alpha chain variable domain of TCR clone 211984 (TRAV3, TRAJ42)
CAVRDRDYGGSQGNLIF

SEQ ID NO: 423968 - protein, 12 aa, Homo sapiens
  CDR3 for beta chain variable domain of TCR clone 211984 (TRBV11-2, TRBJ2-1)
CERRKGKNEKLL

SEQ ID NO: 423969 - protein, 14 aa, Homo sapiens
  CDR3 for alpha chain variable domain of TCR clone 211985 (TRAV26-1, TRAJ21)
CIVRPPYNFNKFYF

SEQ ID NO: 423970 - protein, 14 aa, Homo sapiens
  CDR3 for beta chain variable domain of TCR clone 211985 (TRBV12-5, TRBJ2-5)
CASGSRTHQETQYF

SEQ ID NO: 423971 - protein, 11 aa, Homo sapiens
  CDR3 for alpha chain variable domain of TCR clone 211986 (TRAV2, TRAJ13)
CASGGYQKVTF

SEQ ID NO: 423972 - protein, 14 aa, Homo sapiens
  CDR3 for beta chain variable domain of TCR clone 211986 (TRBV28, TRBJ2-7)
CASGGTWFTGEQYF

SEQ ID NO: 423973 - protein, 16 aa, Homo sapiens
  CDR3 for alpha chain variable domain of TCR clone 211987 (TRAV16, TRAJ4)
CALSRMFSGGYNKLIF

SEQ ID NO: 423974 - protein, 14 aa, Homo sapiens
  CDR3 for beta chain variable domain of TCR clone 211987 (TRBV27, TRBJ2-3)
CATWTSGRPWGQYF

SEQ ID NO: 423975 - protein, 13 aa, Homo sapiens
  CDR3 for alpha chain variable domain of TCR clone 211988 (TRAV36/DV7, TRAJ33)
CAVDMDSNYQLIW

SEQ ID NO: 423976 - protein, 16 aa, Homo sapiens
  CDR3 for beta chain variable domain of TCR clone 211988 (TRBV15, TRBJ2-3)
CATRLSGGRAPNTQYF

SEQ ID NO: 423977 - protein, 13 aa, Homo sapiens
  CDR3 for alpha chain variable domain of TCR clone 211989 (TRAV8-3, TRAJ20)
CAVGRPNDYTLSF

SEQ ID NO: 423978 - protein, 13 aa, Homo sapiens
  CDR3 for beta chain variable domain of TCR clone 211989 (TRBV6-5, TRBJ1-4)
CASSYLSQEKLFF

SEQ ID NO: 423979 - protein, 19 aa, Homo sapiens
  CDR3 for alpha chain variable domain of TCR clone 211990 (TRAV1-2, TRAJ26)
CLLPLCCERPDNYGQNFVF

SEQ ID NO: 423980 - protein, 14 aa, Homo sapiens
  CDR3 for beta chain variable domain of TCR clone 211990 (TRBV28, TRBJ1-2)
CASKTPGTNYGYTF

SEQ ID NO: 423981 - protein, 20 aa, Homo sapiens
  CDR3 for alpha chain variable domain of TCR clone 211991 (TRAV27, TRAJ41)
CAVRTQIPDIQNPDPAVYQL

SEQ ID NO: 423982 - protein, 16 aa, Homo sapiens
  CDR3 for beta chain variable domain of TCR clone 211991 (TRBV5-1, TRBJ2-3)
CASSLGLAVYADTQYF

SEQ ID NO: 423983 - protein, 16 aa, Homo sapiens
  CDR3 for alpha chain variable domain of TCR clone 211992 (TRAV16, TRAJ4)
CALSRMFSGGYNKLIF

SEQ ID NO: 423984 - protein, 14 aa, Homo sapiens
  CDR3 for beta chain variable domain of TCR clone 211992 (TRBV7-9, TRBJ2-1)
CASSPRDSLYEQFF

SEQ ID NO: 423985 - protein, 14 aa, Homo sapiens
  CDR3 for alpha chain variable domain of TCR clone 211993 (TRAV1-2, TRAJ8)
CAVREATGFQKLVF

SEQ ID NO: 423986 - protein, 15 aa, Homo sapiens
  CDR3 for beta chain variable domain of TCR clone 211993 (TRBV6-3, TRBJ2-7)
CASSSPGTAFYEQYF

SEQ ID NO: 423987 - protein, 14 aa, Homo sapiens
  CDR3 for alpha chain variable domain of TCR clone 211994 (TRAV16, TRAJ17)
CALSGRSAGNKLTF

SEQ ID NO: 423988 - protein, 17 aa, Homo sapiens
  CDR3 for beta chain variable domain of TCR clone 211994 (TRBV18, TRBJ2-6)
CASSPRQGAVGANVLTF

SEQ ID NO: 423989 - protein, 14 aa, Homo sapiens
  CDR3 for alpha chain variable domain of TCR clone 211995 (TRAV12-3, TRAJ43)
CAMSLGGAGTRRTV

SEQ ID NO: 423990 - protein, 13 aa, Homo sapiens
  CDR3 for beta chain variable domain of TCR clone 211995 (TRBV7-9, TRBJ1-2)
CASSLKQNYGYTF

SEQ ID NO: 423991 - protein, 14 aa, Homo sapiens
  CDR3 for alpha chain variable domain of TCR clone 211996 (TRAV13-1, TRAJ35)
SAAGKGGFGNVLHC

SEQ ID NO: 423992 - protein, 13 aa, Homo sapiens
  CDR3 for beta chain variable domain of TCR clone 211996 (TRBV7-3, TRBJ1-1)
CASSQDWGAEAFF

SEQ ID NO: 423993 - protein, 12 aa, Homo sapiens
  CDR3 for alpha chain variable domain of TCR clone 211997 (TRAV25, TRAJ35)
CAGIGFGNVLHC

SEQ ID NO: 423994 - protein, 14 aa, Homo sapiens
  CDR3 for beta chain variable domain of TCR clone 211997 (TRBV12-5, TRBJ2-5)
CASGSRTHQETQYF

SEQ ID NO: 423995 - protein, 12 aa, Homo sapiens
  CDR3 for alpha chain variable domain of TCR clone 211998 (TRAV13-2, TRAJ23)
CAERHRGGKLIF

SEQ ID NO: 423996 - protein, 12 aa, Homo sapiens
  CDR3 for beta chain variable domain of TCR clone 211998 (TRBV18, TRBJ2-5)
CASSPSKETQYF

SEQ ID NO: 423997 - protein, 14 aa, Homo sapiens
  CDR3 for alpha chain variable domain of TCR clone 211999 (TRAV17, TRAJ56)
CATVPAGANSKMTF

SEQ ID NO: 423998 - protein, 16 aa, Homo sapiens
  CDR3 for beta chain variable domain of TCR clone 211999 (TRBV12-5, TRBJ2-5)
CASGPRTSGNQETQYF

SEQ ID NO: 423999 - protein, 15 aa, Homo sapiens
  CDR3 for alpha chain variable domain of TCR clone 212000 (TRAV27, TRAJ38)
CAARRNAGNNRKLIL

SEQ ID NO: 424000 - protein, 13 aa, Homo sapiens
  CDR3 for beta chain variable domain of TCR clone 212000 (TRBV20-1, TRBJ1-1)
CSAPLGGGTEAFF

SEQ ID NO: 424001 - protein, 11 aa, Homo sapiens
  CDR3 for alpha chain variable domain of TCR clone 212001 (TRAV12-1, TRAJ43)
CVEYDNNDMRF

SEQ ID NO: 424002 - protein, 13 aa, Homo sapiens
  CDR3 for beta chain variable domain of TCR clone 212001 (TRBV20-1, TRBJ1-1)
CSSPLGGGTEAFF

SEQ ID NO: 424003 - protein, 15 aa, Homo sapiens
  CDR3 for alpha chain variable domain of TCR clone 212002 (TRAV20, TRAJ6)
CAERLQSGGSDIPTF

SEQ ID NO: 424004 - protein, 14 aa, Homo sapiens
  CDR3 for beta chain variable domain of TCR clone 212002 (TRBV12-4, TRBJ2-7)
CASSASGGWYEQYF

SEQ ID NO: 424005 - protein, 13 aa, Homo sapiens
  CDR3 for alpha chain variable domain of TCR clone 212003 (TRAV30, TRAJ49)
CGTEPNTGNQFYF

SEQ ID NO: 424006 - protein, 14 aa, Homo sapiens
  CDR3 for beta chain variable domain of TCR clone 212003 (TRBV29-1, TRBJ2-1)
CSVEFRGIPLEQFF

SEQ ID NO: 424007 - protein, 17 aa, Homo sapiens
  CDR3 for alpha chain variable domain of TCR clone 212004 (TRAV3, TRAJ6)
CAVRDGPRARGSYIPTF

SEQ ID NO: 424008 - protein, 14 aa, Homo sapiens
  CDR3 for beta chain variable domain of TCR clone 212004 (TRBV7-2, TRBJ2-7)
CASSPKTSFHEQYF

SEQ ID NO: 424009 - protein, 12 aa, Homo sapiens
  CDR3 for alpha chain variable domain of TCR clone 212005 (TRAV20, TRAJ33)
CDVRGSNYQLIW

SEQ ID NO: 424010 - protein, 13 aa, Homo sapiens
  CDR3 for beta chain variable domain of TCR clone 212005 (TRBV4-3, TRBJ1-1)
CASSPTGNTEAFF

SEQ ID NO: 424011 - protein, 11 aa, Homo sapiens
  CDR3 for alpha chain variable domain of TCR clone 212006 (TRAV35, TRAJ30)
CAGPGDDKIIF

SEQ ID NO: 424012 - protein, 18 aa, Homo sapiens
  CDR3 for beta chain variable domain of TCR clone 212006 (TRBV7-6, TRBJ2-1)
CASGPRTSGMSSYNEQFF

SEQ ID NO: 424013 - protein, 15 aa, Homo sapiens
  CDR3 for alpha chain variable domain of TCR clone 212007 (TRAV3, TRAJ3)
CAVRDRDSSASKIIF

SEQ ID NO: 424014 - protein, 13 aa, Homo sapiens
  CDR3 for beta chain variable domain of TCR clone 212007 (TRBV19, TRBJ2-1)
CASSMYRVNEQFF

SEQ ID NO: 424015 - protein, 16 aa, Homo sapiens
  CDR3 for alpha chain variable domain of TCR clone 212008 (TRAV22, TRAJ45)
CAVERGKRGGSDGLTF

SEQ ID NO: 424016 - protein, 11 aa, Homo sapiens
  CDR3 for beta chain variable domain of TCR clone 212008 (TRBV29-1, TRBJ2-5)
CSEDRTGTQYF

SEQ ID NO: 424017 - protein, 13 aa, Homo sapiens
  CDR3 for alpha chain variable domain of TCR clone 212009 (TRAV1-2, TRAJ9)
CAALNTGGFKTIF

SEQ ID NO: 424018 - protein, 13 aa, Homo sapiens
  CDR3 for beta chain variable domain of TCR clone 212009 (TRBV19, TRBJ1-2)
CASSVSGQDGYSF

SEQ ID NO: 424019 - protein, 14 aa, Homo sapiens
  CDR3 for alpha chain variable domain of TCR clone 212010 (TRAV8-2, TRAJ4)
CVGSPSGGYNKLIF

SEQ ID NO: 424020 - protein, 15 aa, Homo sapiens
  CDR3 for beta chain variable domain of TCR clone 212010 (TRBV2, TRBJ2-1)
CASSELAGSYNEQFF

SEQ ID NO: 424021 - protein, 15 aa, Homo sapiens
  CDR3 for alpha chain variable domain of TCR clone 212011 (TRAV8-3, TRAJ40)
CATPSLGSGTYKYIF

SEQ ID NO: 424022 - protein, 12 aa, Homo sapiens
  CDR3 for beta chain variable domain of TCR clone 212011 (TRBV7-8, TRBJ2-7)
CASNLGDREQYF

SEQ ID NO: 424023 - protein, 12 aa, Homo sapiens
  CDR3 for alpha chain variable domain of TCR clone 212012 (TRAV27, TRAJ42)
CAVGGSQGNLIF

SEQ ID NO: 424024 - protein, 13 aa, Homo sapiens
  CDR3 for beta chain variable domain of TCR clone 212012 (TRBV19, TRBJ2-7)
CASSIRSSYEQYF

SEQ ID NO: 424025 - protein, 10 aa, Homo sapiens
  CDR3 for alpha chain variable domain of TCR clone 212013 (TRAV1-2, TRAJ31)
CAFFDARLMF

SEQ ID NO: 424026 - protein, 14 aa, Homo sapiens
  CDR3 for beta chain variable domain of TCR clone 212013 (TRBV10-3, TRBJ2-2)
CAISEVSHSGELFF

SEQ ID NO: 424027 - protein, 17 aa, Homo sapiens
  CDR3 for alpha chain variable domain of TCR clone 212014 (TRAV3, TRAJ42)
CAVRDRDYGVSQGNLIF

SEQ ID NO: 424028 - protein, 14 aa, Homo sapiens
  CDR3 for beta chain variable domain of TCR clone 212014 (TRBV19, TRBJ2-5)
CASSMTGQQETQYF

SEQ ID NO: 424029 - protein, 19 aa, Homo sapiens
  CDR3 for alpha chain variable domain of TCR clone 212015 (TRAV2, TRAJ20)
ILQVREADAAVYRDCKLSF

SEQ ID NO: 424030 - protein, 12 aa, Homo sapiens
  CDR3 for beta chain variable domain of TCR clone 212015 (TRBV11-2, TRBJ2-5)
CASSYFGETQYF

SEQ ID NO: 424031 - protein, 13 aa, Homo sapiens
  CDR3 for alpha chain variable domain of TCR clone 212016 (TRAV1-1, TRAJ23)
CAVVADQGGKLIF

SEQ ID NO: 424032 - protein, 12 aa, Homo sapiens
  CDR3 for beta chain variable domain of TCR clone 212016 (TRBV14, TRBJ2-5)
CASSQLKETQYF

SEQ ID NO: 424033 - protein, 13 aa, Homo sapiens
  CDR3 for alpha chain variable domain of TCR clone 212017 (TRAV10, TRAJ45)
CVGSGGGADGLTF

SEQ ID NO: 424034 - protein, 15 aa, Homo sapiens
  CDR3 for beta chain variable domain of TCR clone 212017 (TRBV5-1, TRBJ2-7)
CASSLCPDGGYEQYF

SEQ ID NO: 424035 - protein, 16 aa, Homo sapiens
  CDR3 for alpha chain variable domain of TCR clone 212018 (TRAV13-1, TRAJ18)
CAASRMRGSTLGRLYF

SEQ ID NO: 424036 - protein, 17 aa, Homo sapiens
  CDR3 for beta chain variable domain of TCR clone 212018 (TRBV5-4, TRBJ2-1)
CASSSAGGRGPYNEQFF

SEQ ID NO: 424037 - protein, 13 aa, Homo sapiens
  CDR3 for alpha chain variable domain of TCR clone 212019 (TRAV21, TRAJ20)
CAVGLRVDYNLSL

SEQ ID NO: 424038 - protein, 11 aa, Homo sapiens
  CDR3 for beta chain variable domain of TCR clone 212019 (TRBV29-1, TRBJ2-5)
CSEDRTGTQYF

SEQ ID NO: 424039 - protein, 16 aa, Homo sapiens
  CDR3 for alpha chain variable domain of TCR clone 212020 (TRAV8-3, TRAJ48)
CAVGLISNFGNEKLTF

SEQ ID NO: 424040 - protein, 13 aa, Homo sapiens
  CDR3 for beta chain variable domain of TCR clone 212020 (TRBV20-1, TRBJ1-5)
CSASWGRSQPQQF

SEQ ID NO: 424041 - protein, 14 aa, Homo sapiens
  CDR3 for alpha chain variable domain of TCR clone 212021 (TRAV12-1, TRAJ12)
CVVIAMDSSYKLIF

SEQ ID NO: 424042 - protein, 15 aa, Homo sapiens
  CDR3 for beta chain variable domain of TCR clone 212021 (TRBV28, TRBJ2-1)
CASSIIAGGRSEQFF

SEQ ID NO: 424043 - protein, 15 aa, Homo sapiens
  CDR3 for alpha chain variable domain of TCR clone 212022 (TRAV26-1, TRAJ56)
CIVRVATGANSKLTF

SEQ ID NO: 424044 - protein, 15 aa, Homo sapiens
  CDR3 for beta chain variable domain of TCR clone 212022 (TRBV27, TRBJ2-7)
CASSPRRECQREQYF

SEQ ID NO: 424045 - protein, 14 aa, Homo sapiens
  CDR3 for alpha chain variable domain of TCR clone 212023 (TRAV26-1, TRAJ38)
CIADNAGNNRKQIW

SEQ ID NO: 424046 - protein, 15 aa, Homo sapiens
  CDR3 for beta chain variable domain of TCR clone 212023 (TRBV20-1, TRBJ1-1)
CSARGGGTLKLSLDK

SEQ ID NO: 424047 - protein, 14 aa, Homo sapiens
  CDR3 for alpha chain variable domain of TCR clone 212024 (TRAV12-2, TRAJ17)
YAVLFKAAGNKLTF

SEQ ID NO: 424048 - protein, 14 aa, Homo sapiens
  CDR3 for beta chain variable domain of TCR clone 212024 (TRBV12-5, TRBJ2-5)
CASGSRTHQETQYF

SEQ ID NO: 424049 - protein, 11 aa, Homo sapiens
  CDR3 for alpha chain variable domain of TCR clone 212025 (TRAV21, TRAJ34)
CAVTNTDKLIF

SEQ ID NO: 424050 - protein, 17 aa, Homo sapiens
  CDR3 for beta chain variable domain of TCR clone 212025 (TRBV20-1, TRBJ2-1)
CSARSPSGGTPTMSSSS

SEQ ID NO: 424051 - protein, 12 aa, Homo sapiens
  CDR3 for alpha chain variable domain of TCR clone 212026 (TRAV8-4, TRAJ37)
CAVRSNTGKLIF

SEQ ID NO: 424052 - protein, 16 aa, Homo sapiens
  CDR3 for beta chain variable domain of TCR clone 212026 (TRBV7-2, TRBJ2-3)
CASSSVGDASTDTQYF

SEQ ID NO: 424053 - protein, 12 aa, Homo sapiens
  CDR3 for alpha chain variable domain of TCR clone 212027 (TRAV17, TRAJ49)
CATASTGNQFYF

SEQ ID NO: 424054 - protein, 15 aa, Homo sapiens
  CDR3 for beta chain variable domain of TCR clone 212027 (TRBV15, TRBJ2-1)
CATSRDLVSYNEQFF

SEQ ID NO: 424055 - protein, 15 aa, Homo sapiens
  CDR3 for alpha chain variable domain of TCR clone 212028 (TRAV4, TRAJ10)
CLVVREGGGGNKLTF

SEQ ID NO: 424056 - protein, 14 aa, Homo sapiens
  CDR3 for beta chain variable domain of TCR clone 212028 (TRBV25-1, TRBJ1-1)
CASTHLGGNTEAFF

SEQ ID NO: 424057 - protein, 15 aa, Homo sapiens
  CDR3 for alpha chain variable domain of TCR clone 212029 (TRAV17, TRAJ6)
CATDLPSGGSYIPTF

SEQ ID NO: 424058 - protein, 16 aa, Homo sapiens
  CDR3 for beta chain variable domain of TCR clone 212029 (TRBV4-1, TRBJ2-7)
CASSQDHTGYSYEQYF

SEQ ID NO: 424059 - protein, 16 aa, Homo sapiens
  CDR3 for alpha chain variable domain of TCR clone 212030 (TRAV3, TRAJ37)
CAVRGKGSGNTGKLIF

SEQ ID NO: 424060 - protein, 15 aa, Homo sapiens
  CDR3 for beta chain variable domain of TCR clone 212030 (TRBV7-9, TRBJ1-6)
CASSSPGRGNSALHF

SEQ ID NO: 424061 - protein, 13 aa, Homo sapiens
  CDR3 for alpha chain variable domain of TCR clone 212031 (TRAV21, TRAJ13)
CPGPSGGYQKVTF

SEQ ID NO: 424062 - protein, 14 aa, Homo sapiens
  CDR3 for beta chain variable domain of TCR clone 212031 (TRBV20-1, TRBJ2-7)
CSAKDRKGAYEQYF

SEQ ID NO: 424063 - protein, 13 aa, Homo sapiens
  CDR3 for alpha chain variable domain of TCR clone 212032 (TRAV27, TRAJ29)
CAGAHSGNTPLVF

SEQ ID NO: 424064 - protein, 14 aa, Homo sapiens
  CDR3 for beta chain variable domain of TCR clone 212032 (TRBV12-5, TRBJ2-5)
CASGSRTHQETQYF

SEQ ID NO: 424065 - protein, 15 aa, Homo sapiens
  CDR3 for alpha chain variable domain of TCR clone 212033 (TRAV39, TRAJ42)
CAVVNYGGSQGSLIF

SEQ ID NO: 424066 - protein, 15 aa, Homo sapiens
  CDR3 for beta chain variable domain of TCR clone 212033 (TRBV10-3, TRBJ1-1)
CAISDLGRANTEAFF

SEQ ID NO: 424067 - protein, 13 aa, Homo sapiens
  CDR3 for alpha chain variable domain of TCR clone 212034 (TRAV17, TRAJ9)
WATDYTGGFKTIF

SEQ ID NO: 424068 - protein, 14 aa, Homo sapiens
  CDR3 for beta chain variable domain of TCR clone 212034 (TRBV19, TRBJ2-5)
CASSMTGQQETQYC

SEQ ID NO: 424069 - protein, 21 aa, Homo sapiens
  CDR3 for alpha chain variable domain of TCR clone 212035 (TRAV13-1, TRAJ6)
CAARKEEATYLHLEEEPALLF

SEQ ID NO: 424070 - protein, 15 aa, Homo sapiens
  CDR3 for beta chain variable domain of TCR clone 212035 (TRBV12-4, TRBJ1-1)
CASSGRTGMNTEAFF

SEQ ID NO: 424071 - protein, 17 aa, Homo sapiens
  CDR3 for alpha chain variable domain of TCR clone 212036 (TRAV12-2, TRAJ39)
CAVNNMLTFGGETRLMV

SEQ ID NO: 424072 - protein, 16 aa, Homo sapiens
  CDR3 for beta chain variable domain of TCR clone 212036 (TRBV5-3, TRBJ2-2)
CARSFGTGTNTGELFF

SEQ ID NO: 424073 - protein, 13 aa, Homo sapiens
  CDR3 for alpha chain variable domain of TCR clone 212037 (TRAV12-2, TRAJ10)
CAVPTGGGNKLTF

SEQ ID NO: 424074 - protein, 16 aa, Homo sapiens
  CDR3 for beta chain variable domain of TCR clone 212037 (TRBV28, TRBJ2-7)
CASSFLGRLAGNEQYF

SEQ ID NO: 424075 - protein, 12 aa, Homo sapiens
  CDR3 for alpha chain variable domain of TCR clone 212038 (TRAV1-1, TRAJ8)
CAGGTGFPKLVF

SEQ ID NO: 424076 - protein, 14 aa, Homo sapiens
  CDR3 for beta chain variable domain of TCR clone 212038 (TRBV5-4, TRBJ1-1)
CASSLDSRRDEAFF

SEQ ID NO: 424077 - protein, 13 aa, Homo sapiens
  CDR3 for alpha chain variable domain of TCR clone 212039 (TRAV8-3, TRAJ43)
CAVGQTITMTCAL

SEQ ID NO: 424078 - protein, 14 aa, Homo sapiens
  CDR3 for beta chain variable domain of TCR clone 212039 (TRBV19, TRBJ2-1)
CASPTFVLSGEQFF

SEQ ID NO: 424079 - protein, 18 aa, Homo sapiens
  CDR3 for alpha chain variable domain of TCR clone 212040 (TRAV26-1, TRAJ11)
TIASSESSWDAGYSTLTF

SEQ ID NO: 424080 - protein, 14 aa, Homo sapiens
  CDR3 for beta chain variable domain of TCR clone 212040 (TRBV25-1, TRBJ1-4)
CASSGGGQPEKLFF

SEQ ID NO: 424081 - protein, 11 aa, Homo sapiens
  CDR3 for alpha chain variable domain of TCR clone 212041 (TRAV16, TRAJ26)
CALTRWSEFCL

SEQ ID NO: 424082 - protein, 13 aa, Homo sapiens
  CDR3 for beta chain variable domain of TCR clone 212041 (TRBV4-1, TRBJ2-2)
CASSQENIGELFF

SEQ ID NO: 424083 - protein, 11 aa, Homo sapiens
  CDR3 for alpha chain variable domain of TCR clone 212042 (TRAV3, TRAJ17)
PRGAAGNKLTF

SEQ ID NO: 424084 - protein, 16 aa, Homo sapiens
  CDR3 for beta chain variable domain of TCR clone 212042 (TRBV7-6, TRBJ2-1)
CASSAPGPSSYNEQFC

SEQ ID NO: 424085 - protein, 14 aa, Homo sapiens
  CDR3 for alpha chain variable domain of TCR clone 212043 (TRAV13-1, TRAJ40)
CAASMTSGTYKYIF

SEQ ID NO: 424086 - protein, 13 aa, Homo sapiens
  CDR3 for beta chain variable domain of TCR clone 212043 (TRBV12-4, TRBJ1-1)
CASSPGTGFEAFF

SEQ ID NO: 424087 - protein, 18 aa, Homo sapiens
  CDR3 for alpha chain variable domain of TCR clone 212044 (TRAV13-1, TRAJ52)
CAAKNPNAVGTSYGKLTF

SEQ ID NO: 424088 - protein, 14 aa, Homo sapiens
  CDR3 for beta chain variable domain of TCR clone 212044 (TRBV4-1, TRBJ2-2)
CASSQALNTGELFF

SEQ ID NO: 424089 - protein, 14 aa, Homo sapiens
  CDR3 for alpha chain variable domain of TCR clone 212045 (TRAV12-2, TRAJ13)
CAVKKTGGYQKVTF

SEQ ID NO: 424090 - protein, 13 aa, Homo sapiens
  CDR3 for beta chain variable domain of TCR clone 212045 (TRBV4-1, TRBJ2-1)
CASSQAGGDERFF

SEQ ID NO: 424091 - protein, 13 aa, Homo sapiens
  CDR3 for alpha chain variable domain of TCR clone 212046 (TRAV27, TRAJ56)
CAGKPGANSKLTF

SEQ ID NO: 424092 - protein, 18 aa, Homo sapiens
  CDR3 for beta chain variable domain of TCR clone 212046 (TRBV11-2, TRBJ2-3)
CDSSLGGASRGAPNTQYF

SEQ ID NO: 424093 - protein, 17 aa, Homo sapiens
  CDR3 for alpha chain variable domain of TCR clone 212047 (TRAV3, TRAJ6)
CAVSRRTDTGGSYIPTF

SEQ ID NO: 424094 - protein, 17 aa, Homo sapiens
  CDR3 for beta chain variable domain of TCR clone 212047 (TRBV7-2, TRBJ2-3)
CASSLNEPGPESRYAVF

SEQ ID NO: 424095 - protein, 14 aa, Homo sapiens
  CDR3 for alpha chain variable domain of TCR clone 212048 (TRAV9-2, TRAJ36)
CALPCRTGANNLSF

SEQ ID NO: 424096 - protein, 14 aa, Homo sapiens
  CDR3 for beta chain variable domain of TCR clone 212048 (TRBV2, TRBJ1-2)
CASSELQVNYGYTF

SEQ ID NO: 424097 - protein, 11 aa, Homo sapiens
  CDR3 for alpha chain variable domain of TCR clone 212049 (TRAV1-1, TRAJ23)
FAVRQGGKLIL

SEQ ID NO: 424098 - protein, 20 aa, Homo sapiens
  CDR3 for beta chain variable domain of TCR clone 212049 (TRBV7-8, TRBJ2-2)
CASSHLFPGPTIHITGELFF

SEQ ID NO: 424099 - protein, 10 aa, Homo sapiens
  CDR3 for alpha chain variable domain of TCR clone 212050 (TRAV23/DV6, TRAJ57)
CAASSTLSQC

SEQ ID NO: 424100 - protein, 14 aa, Homo sapiens
  CDR3 for beta chain variable domain of TCR clone 212050 (TRBV20-1, TRBJ2-7)
CSAKRGRSSYEQYF

SEQ ID NO: 424101 - protein, 17 aa, Homo sapiens
  CDR3 for alpha chain variable domain of TCR clone 212051 (TRAV17, TRAJ52)
CASERPSGGTSYGKLTF

SEQ ID NO: 424102 - protein, 13 aa, Homo sapiens
  CDR3 for beta chain variable domain of TCR clone 212051 (TRBV6-4, TRBJ1-5)
CASSADLNQPQHF

SEQ ID NO: 424103 - protein, 12 aa, Homo sapiens
  CDR3 for alpha chain variable domain of TCR clone 212052 (TRAV12-3, TRAJ17)
CAMTLTGNKLTF

SEQ ID NO: 424104 - protein, 14 aa, Homo sapiens
  CDR3 for beta chain variable domain of TCR clone 212052 (TRBV12-4, TRBJ2-1)
CAGAVGGLGNEQFF

SEQ ID NO: 424105 - protein, 12 aa, Homo sapiens
  CDR3 for alpha chain variable domain of TCR clone 212053 (TRAV16, TRAJ13)
CITLRGYQKVTF

SEQ ID NO: 424106 - protein, 17 aa, Homo sapiens
  CDR3 for beta chain variable domain of TCR clone 212053 (TRBV28, TRBJ2-5)
CASSTQGGLAGAETQYF

SEQ ID NO: 424107 - protein, 13 aa, Homo sapiens
  CDR3 for alpha chain variable domain of TCR clone 212054 (TRAV21, TRAJ58)
CAVKESSGSRLTF

SEQ ID NO: 424108 - protein, 17 aa, Homo sapiens
  CDR3 for beta chain variable domain of TCR clone 212054 (TRBV5-1, TRBJ2-3)
CASSLGGWGSVVDTQYF

SEQ ID NO: 424109 - protein, 15 aa, Homo sapiens
  CDR3 for alpha chain variable domain of TCR clone 212055 (TRAV3, TRAJ5)
CAVRDLDTGRRALTF

SEQ ID NO: 424110 - protein, 16 aa, Homo sapiens
  CDR3 for beta chain variable domain of TCR clone 212055 (TRBV28, TRBJ2-1)
CASSSPEYPRDNEQFF

SEQ ID NO: 424111 - protein, 18 aa, Homo sapiens
  CDR3 for alpha chain variable domain of TCR clone 212056 (TRAV12-3, TRAJ52)
CAMSVGGAGGTSYGKLTF

SEQ ID NO: 424112 - protein, 15 aa, Homo sapiens
  CDR3 for beta chain variable domain of TCR clone 212056 (TRBV27, TRBJ1-6)
CASSVDRGLGSTLHF

SEQ ID NO: 424113 - protein, 14 aa, Homo sapiens
  CDR3 for alpha chain variable domain of TCR clone 212057 (TRAV1-2, TRAJ8)
CAVREDTGLQKLVF

SEQ ID NO: 424114 - protein, 15 aa, Homo sapiens
  CDR3 for beta chain variable domain of TCR clone 212057 (TRBV6-3, TRBJ2-7)
CARSSPGTVFYEQYF

SEQ ID NO: 424115 - protein, 15 aa, Homo sapiens
  CDR3 for alpha chain variable domain of TCR clone 212058 (TRAV8-1, TRAJ37)
CAVKKGSGKTGKLIF

SEQ ID NO: 424116 - protein, 17 aa, Homo sapiens
  CDR3 for beta chain variable domain of TCR clone 212058 (TRBV12-4, TRBJ1-1)
CASSLSGFRTMNTEAFF

SEQ ID NO: 424117 - protein, 14 aa, Homo sapiens
  CDR3 for alpha chain variable domain of TCR clone 212059 (TRAV8-4, TRAJ9)
CAVRRNTGGFKTIF

SEQ ID NO: 424118 - protein, 15 aa, Homo sapiens
  CDR3 for beta chain variable domain of TCR clone 212059 (TRBV10-2, TRBJ2-6)
CASSEQGTGDNVLTF

SEQ ID NO: 424119 - protein, 13 aa, Homo sapiens
  CDR3 for alpha chain variable domain of TCR clone 212060 (TRAV27, TRAJ40)
CAGPPAGTYTYIF

SEQ ID NO: 424120 - protein, 13 aa, Homo sapiens
  CDR3 for beta chain variable domain of TCR clone 212060 (TRBV28, TRBJ1-2)
CAGRDRGNYGYTF

SEQ ID NO: 424121 - protein, 15 aa, Homo sapiens
  CDR3 for alpha chain variable domain of TCR clone 212061 (TRAV3, TRAJ22)
CAVRDRGGSARQPTF

SEQ ID NO: 424122 - protein, 14 aa, Homo sapiens
  CDR3 for beta chain variable domain of TCR clone 212061 (TRBV20-1, TRBJ1-1)
CSAQTRIGGTEAFF

SEQ ID NO: 424123 - protein, 13 aa, Homo sapiens
  CDR3 for alpha chain variable domain of TCR clone 212062 (TRAV16, TRAJ48)
CSPLNFGDEKLTF

SEQ ID NO: 424124 - protein, 13 aa, Homo sapiens
  CDR3 for beta chain variable domain of TCR clone 212062 (TRBV19, TRBJ1-2)
CASSVPGQDGYTF

SEQ ID NO: 424125 - protein, 12 aa, Homo sapiens
  CDR3 for alpha chain variable domain of TCR clone 212063 (TRAV29/DV5, TRAJ49)
CAATDTGNQFYF

SEQ ID NO: 424126 - protein, 19 aa, Homo sapiens
  CDR3 for beta chain variable domain of TCR clone 212063 (TRBV25-1, TRBJ2-2)
CAILVYRVDRGRNTGALFF

SEQ ID NO: 424127 - protein, 17 aa, Homo sapiens
  CDR3 for alpha chain variable domain of TCR clone 212064 (TRAV2, TRAJ36)
CAVEDRGNWGKQPLLWD

SEQ ID NO: 424128 - protein, 14 aa, Homo sapiens
  CDR3 for beta chain variable domain of TCR clone 212064 (TRBV7-9, TRBJ2-5)
CASSLDTAKETQYF

SEQ ID NO: 424129 - protein, 14 aa, Homo sapiens
  CDR3 for alpha chain variable domain of TCR clone 212065 (TRAV30, TRAJ39)
CGTEKVNAGNMLTF

SEQ ID NO: 424130 - protein, 12 aa, Homo sapiens
  CDR3 for beta chain variable domain of TCR clone 212065 (TRBV7-8, TRBJ2-7)
CASSLGDREQYF

SEQ ID NO: 424131 - protein, 12 aa, Homo sapiens
  CDR3 for alpha chain variable domain of TCR clone 212066 (TRAV13-1, TRAJ49)
CAASPMGNQFYF

SEQ ID NO: 424132 - protein, 15 aa, Homo sapiens
  CDR3 for beta chain variable domain of TCR clone 212066 (TRBV6-1, TRBJ2-7)
CASSESMGDFYEQYF

SEQ ID NO: 424133 - protein, 13 aa, Homo sapiens
  CDR3 for alpha chain variable domain of TCR clone 212067 (TRAV30, TRAJ34)
CGTVGYNTDKLIF

SEQ ID NO: 424134 - protein, 14 aa, Homo sapiens
  CDR3 for beta chain variable domain of TCR clone 212067 (TRBV7-3, TRBJ2-2)
CASSLNSNTGELFF

SEQ ID NO: 424135 - protein, 14 aa, Homo sapiens
  CDR3 for alpha chain variable domain of TCR clone 212068 (TRAV13-1, TRAJ26)
CAASRGNYGQNFVF

SEQ ID NO: 424136 - protein, 13 aa, Homo sapiens
  CDR3 for beta chain variable domain of TCR clone 212068 (TRBV18, TRBJ2-5)
CASSLQGQETQYF

SEQ ID NO: 424137 - protein, 14 aa, Homo sapiens
  CDR3 for alpha chain variable domain of TCR clone 212069 (TRAV12-2, TRAJ15)
CAPHTGQAGTAVIF

SEQ ID NO: 424138 - protein, 14 aa, Homo sapiens
  CDR3 for beta chain variable domain of TCR clone 212069 (TRBV7-2, TRBJ2-7)
CASSPKTSFYEQYF

SEQ ID NO: 424139 - protein, 15 aa, Homo sapiens
  CDR3 for alpha chain variable domain of TCR clone 212070 (TRAV13-2, TRAJ10)
RADNRDTGGGNKLTF

SEQ ID NO: 424140 - protein, 16 aa, Homo sapiens
  CDR3 for beta chain variable domain of TCR clone 212070 (TRBV2, TRBJ1-3)
CASSRTGGSTGNTIYF

SEQ ID NO: 424141 - protein, 13 aa, Homo sapiens
  CDR3 for alpha chain variable domain of TCR clone 212071 (TRAV13-1, TRAJ27)
CAASTHQCRQINL

SEQ ID NO: 424142 - protein, 16 aa, Homo sapiens
  CDR3 for beta chain variable domain of TCR clone 212071 (TRBV27, TRBJ2-2)
CASSFQGLVRTGELFF

SEQ ID NO: 424143 - protein, 14 aa, Homo sapiens
  CDR3 for alpha chain variable domain of TCR clone 212072 (TRAV38-1, TRAJ29)
CAFITPSGNTPLVF

SEQ ID NO: 424144 - protein, 18 aa, Homo sapiens
  CDR3 for beta chain variable domain of TCR clone 212072 (TRBV11-2, TRBJ2-3)
CASSLGGASRGAPNTQYF

SEQ ID NO: 424145 - protein, 14 aa, Homo sapiens
  CDR3 for alpha chain variable domain of TCR clone 212073 (TRAV12-1, TRAJ23)
CVVMIYNQGGKLIF

SEQ ID NO: 424146 - protein, 23 aa, Homo sapiens
  CDR3 for beta chain variable domain of TCR clone 212073 (TRBV7-3, TRBJ1-6)
CASSLTSRDEASDPSSYNSPLHF

SEQ ID NO: 424147 - protein, 14 aa, Homo sapiens
  CDR3 for alpha chain variable domain of TCR clone 212074 (TRAV12-2, TRAJ13)
CAVKKTGGYQRVTF

SEQ ID NO: 424148 - protein, 12 aa, Homo sapiens
  CDR3 for beta chain variable domain of TCR clone 212074 (TRBV3-1, TRBJ2-1)
CASSQGSSGQFV

SEQ ID NO: 424149 - protein, 14 aa, Homo sapiens
  CDR3 for alpha chain variable domain of TCR clone 212075 (TRAV8-3, TRAJ10)
CAVQAPGGGNKLTF

SEQ ID NO: 424150 - protein, 16 aa, Homo sapiens
  CDR3 for beta chain variable domain of TCR clone 212075 (TRBV12-5, TRBJ2-5)
CASGPRTSGNQETQYF

SEQ ID NO: 424151 - protein, 14 aa, Homo sapiens
  CDR3 for alpha chain variable domain of TCR clone 212076 (TRAV12-1, TRAJ10)
CVVNLAGGGNKLNF

SEQ ID NO: 424152 - protein, 14 aa, Homo sapiens
  CDR3 for beta chain variable domain of TCR clone 212076 (TRBV12-4, TRBJ1-1)
CASSLGTGGTEAFF

SEQ ID NO: 424153 - protein, 15 aa, Homo sapiens
  CDR3 for alpha chain variable domain of TCR clone 212077 (TRAV13-1, TRAJ52)
SYYNAGGTSYGKLTF

SEQ ID NO: 424154 - protein, 11 aa, Homo sapiens
  CDR3 for beta chain variable domain of TCR clone 212077 (TRBV12-4, TRBJ2-2)
CATSSAGELFF

SEQ ID NO: 424155 - protein, 11 aa, Homo sapiens
  CDR3 for alpha chain variable domain of TCR clone 212078 (TRAV17, TRAJ49)
CATNTGNQFYF

SEQ ID NO: 424156 - protein, 14 aa, Homo sapiens
  CDR3 for beta chain variable domain of TCR clone 212078 (TRBV7-2, TRBJ1-1)
CASSFLTGTTGAFF

SEQ ID NO: 424157 - protein, 11 aa, Homo sapiens
  CDR3 for alpha chain variable domain of TCR clone 212079 (TRAV16, TRAJ52)
CALSGVGGTSY

SEQ ID NO: 424158 - protein, 14 aa, Homo sapiens
  CDR3 for beta chain variable domain of TCR clone 212079 (TRBV19, TRBJ1-2)
CASSLQGQAYGYTF

SEQ ID NO: 424159 - protein, 14 aa, Homo sapiens
  CDR3 for alpha chain variable domain of TCR clone 212080 (TRAV9-2, TRAJ39)
CALYIYNAGNMLTF

SEQ ID NO: 424160 - protein, 18 aa, Homo sapiens
  CDR3 for beta chain variable domain of TCR clone 212080 (TRBV6-6, TRBJ1-5)
CASNRGWDPTGSNQPQHF

SEQ ID NO: 424161 - protein, 10 aa, Homo sapiens
  CDR3 for alpha chain variable domain of TCR clone 212081 (TRAV26-2, TRAJ49)
RLNTGNQFYF

SEQ ID NO: 424162 - protein, 14 aa, Homo sapiens
  CDR3 for beta chain variable domain of TCR clone 212081 (TRBV11-2, TRBJ1-2)
CASSLGTANYGYTF

SEQ ID NO: 424163 - protein, 18 aa, Homo sapiens
  CDR3 for alpha chain variable domain of TCR clone 212082 (TRAV16, TRAJ52)
CALSGVDAGGTSYGKLRF

SEQ ID NO: 424164 - protein, 15 aa, Homo sapiens
  CDR3 for beta chain variable domain of TCR clone 212082 (TRBV6-3, TRBJ2-7)
CASSSPGTVFYEQYF

SEQ ID NO: 424165 - protein, 12 aa, Homo sapiens
  CDR3 for alpha chain variable domain of TCR clone 212083 (TRAV9-2, TRAJ9)
CALNTGGFKTIF

SEQ ID NO: 424166 - protein, 14 aa, Homo sapiens
  CDR3 for beta chain variable domain of TCR clone 212083 (TRBV7-8, TRBJ2-3)
CASSLEAGTDTQYF

SEQ ID NO: 424167 - protein, 12 aa, Homo sapiens
  CDR3 for alpha chain variable domain of TCR clone 212084 (TRAV27, TRAJ37)
CADSGNTGQLIF

SEQ ID NO: 424168 - protein, 18 aa, Homo sapiens
  CDR3 for beta chain variable domain of TCR clone 212084 (TRBV7-9, TRBJ1-1)
CASSKPWDTMGMNTEAFF

SEQ ID NO: 424169 - protein, 12 aa, Homo sapiens
  CDR3 for alpha chain variable domain of TCR clone 212085 (TRAV17, TRAJ49)
CATVTTGNQFYF

SEQ ID NO: 424170 - protein, 14 aa, Homo sapiens
  CDR3 for beta chain variable domain of TCR clone 212085 (TRBV4-1, TRBJ1-1)
CASSRSGQSFEAFF

SEQ ID NO: 424171 - protein, 13 aa, Homo sapiens
  CDR3 for alpha chain variable domain of TCR clone 212086 (TRAV1-2, TRAJ9)
CAALNTGGFKTIF

SEQ ID NO: 424172 - protein, 14 aa, Homo sapiens
  CDR3 for beta chain variable domain of TCR clone 212086 (TRBV19, TRBJ2-7)
CASSMGQGEIEQYF

SEQ ID NO: 424173 - protein, 15 aa, Homo sapiens
  CDR3 for alpha chain variable domain of TCR clone 212087 (TRAV21, TRAJ53)
CATLNRGGSNYKLTF

SEQ ID NO: 424174 - protein, 16 aa, Homo sapiens
  CDR3 for beta chain variable domain of TCR clone 212087 (TRBV9, TRBJ2-1)
CASSVGGGGNYNEQCF

SEQ ID NO: 424175 - protein, 11 aa, Homo sapiens
  CDR3 for alpha chain variable domain of TCR clone 212088 (TRAV12-1, TRAJ21)
CVVNNFNKFYF

SEQ ID NO: 424176 - protein, 14 aa, Homo sapiens
  CDR3 for beta chain variable domain of TCR clone 212088 (TRBV15, TRBJ1-5)
CATSIEQSNQPQHF

SEQ ID NO: 424177 - protein, 14 aa, Homo sapiens
  CDR3 for alpha chain variable domain of TCR clone 212089 (TRAV34, TRAJ22)
CGADTSGSARQLTF

SEQ ID NO: 424178 - protein, 14 aa, Homo sapiens
  CDR3 for beta chain variable domain of TCR clone 212089 (TRBV20-1, TRBJ2-5)
CSARYRGLQETQYF

SEQ ID NO: 424179 - protein, 14 aa, Homo sapiens
  CDR3 for alpha chain variable domain of TCR clone 212090 (TRAV1-2, TRAJ16)
CAFNRFSDGQKLLF

SEQ ID NO: 424180 - protein, 14 aa, Homo sapiens
  CDR3 for beta chain variable domain of TCR clone 212090 (TRBV19, TRBJ2-2)
CASSTLHRSGELFF

SEQ ID NO: 424181 - protein, 14 aa, Homo sapiens
  CDR3 for alpha chain variable domain of TCR clone 212091 (TRAV23/DV6, TRAJ22)
CAASVSGSARQLTF

SEQ ID NO: 424182 - protein, 15 aa, Homo sapiens
  CDR3 for beta chain variable domain of TCR clone 212091 (TRBV19, TRBJ1-1)
CASTSGQIQNTEAFF

SEQ ID NO: 424183 - protein, 12 aa, Homo sapiens
  CDR3 for alpha chain variable domain of TCR clone 212092 (TRAV8-6, TRAJ8)
CAVTPGFQKLVF

SEQ ID NO: 424184 - protein, 16 aa, Homo sapiens
  CDR3 for beta chain variable domain of TCR clone 212092 (TRBV7-3, TRBJ2-2)
CAISLKRGTLSGELFV

SEQ ID NO: 424185 - protein, 11 aa, Homo sapiens
  CDR3 for alpha chain variable domain of TCR clone 212093 (TRAV21, TRAJ33)
CAVHSNYQLIW

SEQ ID NO: 424186 - protein, 15 aa, Homo sapiens
  CDR3 for beta chain variable domain of TCR clone 212093 (TRBV11-2, TRBJ2-7)
CASSLMVGGSYEQYF

SEQ ID NO: 424187 - protein, 17 aa, Homo sapiens
  CDR3 for alpha chain variable domain of TCR clone 212094 (TRAV38-1, TRAJ45)
CAFMRSHSGGGADGLTF

SEQ ID NO: 424188 - protein, 15 aa, Homo sapiens
  CDR3 for beta chain variable domain of TCR clone 212094 (TRBV7-2, TRBJ2-3)
CASSLVVRSPDTQYF

SEQ ID NO: 424189 - protein, 17 aa, Homo sapiens
  CDR3 for alpha chain variable domain of TCR clone 212095 (TRAV8-4, TRAJ45)
CAVSEGGSGGGADGLTF

SEQ ID NO: 424190 - protein, 17 aa, Homo sapiens
  CDR3 for beta chain variable domain of TCR clone 212095 (TRBV7-9, TRBJ2-3)
CASSPTVAGDLTDTQYF

SEQ ID NO: 424191 - protein, 15 aa, Homo sapiens
  CDR3 for alpha chain variable domain of TCR clone 212096 (TRAV23/DV6, TRAJ18)
CAARCRGSTLGRLYF

SEQ ID NO: 424192 - protein, 13 aa, Homo sapiens
  CDR3 for beta chain variable domain of TCR clone 212096 (TRBV7-2, TRBJ2-7)
CASSSPSGSEQYF

SEQ ID NO: 424193 - protein, 14 aa, Homo sapiens
  CDR3 for alpha chain variable domain of TCR clone 212097 (TRAV13-1, TRAJ35)
CAASKGGFGDVLHC

SEQ ID NO: 424194 - protein, 15 aa, Homo sapiens
  CDR3 for beta chain variable domain of TCR clone 212097 (TRBV7-9, TRBJ2-7)
CASSLALAEAYEQHF

SEQ ID NO: 424195 - protein, 14 aa, Homo sapiens
  CDR3 for alpha chain variable domain of TCR clone 212098 (TRAV27, TRAJ22)
CAGLPSGSARQLTF

SEQ ID NO: 424196 - protein, 16 aa, Homo sapiens
  CDR3 for beta chain variable domain of TCR clone 212098 (TRBV5-7, TRBJ2-3)
CASSPWTSGGTDTQYF

SEQ ID NO: 424197 - protein, 14 aa, Homo sapiens
  CDR3 for alpha chain variable domain of TCR clone 212099 (TRAV3, TRAJ6)
CAVRRPQGRRKLHT

SEQ ID NO: 424198 - protein, 14 aa, Homo sapiens
  CDR3 for beta chain variable domain of TCR clone 212099 (TRBV7-2, TRBJ2-7)
CASSPKTSFYEQYF

SEQ ID NO: 424199 - protein, 13 aa, Homo sapiens
  CDR3 for alpha chain variable domain of TCR clone 212100 (TRAV13-1, TRAJ9)
CAASGTGGFKTIF

SEQ ID NO: 424200 - protein, 13 aa, Homo sapiens
  CDR3 for beta chain variable domain of TCR clone 212100 (TRBV12-4, TRBJ2-7)
CASSLETVREQYF

SEQ ID NO: 424201 - protein, 20 aa, Homo sapiens
  CDR3 for alpha chain variable domain of TCR clone 212101 (TRAV12-1, TRAJ42)
SSVIQPPTSVKGGSQGNLIF

SEQ ID NO: 424202 - protein, 18 aa, Homo sapiens
  CDR3 for beta chain variable domain of TCR clone 212101 (TRBV11-2, TRBJ2-3)
CASSLWGASRGAPNTQYF

SEQ ID NO: 424203 - protein, 13 aa, Homo sapiens
  CDR3 for alpha chain variable domain of TCR clone 212102 (TRAV8-1, TRAJ30)
CAVIMNRDDKIIF

SEQ ID NO: 424204 - protein, 17 aa, Homo sapiens
  CDR3 for beta chain variable domain of TCR clone 212102 (TRBV25-1, TRBJ2-7)
CASSDARVVFSSYEQYF

SEQ ID NO: 424205 - protein, 13 aa, Homo sapiens
  CDR3 for alpha chain variable domain of TCR clone 212103 (TRAV27, TRAJ3)
ASLRGSSASKIIF

SEQ ID NO: 424206 - protein, 13 aa, Homo sapiens
  CDR3 for beta chain variable domain of TCR clone 212103 (TRBV11-2, TRBJ1-1)
CASSLETSTEAFF

SEQ ID NO: 424207 - protein, 16 aa, Homo sapiens
  CDR3 for alpha chain variable domain of TCR clone 212104 (TRAV30, TRAJ24)
CGTEIVGADSWGKFQF

SEQ ID NO: 424208 - protein, 14 aa, Homo sapiens
  CDR3 for beta chain variable domain of TCR clone 212104 (TRBV12-5, TRBJ2-5)
CGSGSRTHQETQYF

SEQ ID NO: 424209 - protein, 16 aa, Homo sapiens
  CDR3 for alpha chain variable domain of TCR clone 212105 (TRAV35, TRAJ28)
CAGQKYSGAGSYQLTF

SEQ ID NO: 424210 - protein, 16 aa, Homo sapiens
  CDR3 for beta chain variable domain of TCR clone 212105 (TRBV11-2, TRBJ2-1)
CASSVTADFSYNEQFF

SEQ ID NO: 424211 - protein, 13 aa, Homo sapiens
  CDR3 for alpha chain variable domain of TCR clone 212106 (TRAV12-3, TRAJ56)
CALATGANSKLTF

SEQ ID NO: 424212 - protein, 14 aa, Homo sapiens
  CDR3 for beta chain variable domain of TCR clone 212106 (TRBV6-1, TRBJ2-2)
CASRGQSYTGELFF

SEQ ID NO: 424213 - protein, 14 aa, Homo sapiens
  CDR3 for alpha chain variable domain of TCR clone 212107 (TRAV12-3, TRAJ42)
CAMNYGGSQGNLIF

SEQ ID NO: 424214 - protein, 15 aa, Homo sapiens
  CDR3 for beta chain variable domain of TCR clone 212107 (TRBV5-7, TRBJ1-5)
CVSSYGKLWDQPRQF

SEQ ID NO: 424215 - protein, 15 aa, Homo sapiens
  CDR3 for alpha chain variable domain of TCR clone 212108 (TRAV12-3, TRAJ6)
CAMIATTGGSYIPTF

SEQ ID NO: 424216 - protein, 14 aa, Homo sapiens
  CDR3 for beta chain variable domain of TCR clone 212108 (TRBV7-2, TRBJ2-2)
CASRGQGAAGELFF

SEQ ID NO: 424217 - protein, 15 aa, Homo sapiens
  CDR3 for alpha chain variable domain of TCR clone 212109 (TRAV8-3, TRAJ15)
CAVGAPNQAGTALIF

SEQ ID NO: 424218 - protein, 16 aa, Homo sapiens
  CDR3 for beta chain variable domain of TCR clone 212109 (TRBV20-1, TRBJ1-2)
CSASMGQGVANYGYTF

SEQ ID NO: 424219 - protein, 14 aa, Homo sapiens
  CDR3 for alpha chain variable domain of TCR clone 212110 (TRAV12-2, TRAJ45)
CAVNKGGGADGLTF

SEQ ID NO: 424220 - protein, 14 aa, Homo sapiens
  CDR3 for beta chain variable domain of TCR clone 212110 (TRBV20-1, TRBJ1-1)
CSAMGGTVNTEAFF

SEQ ID NO: 424221 - protein, 14 aa, Homo sapiens
  CDR3 for alpha chain variable domain of TCR clone 212111 (TRAV23/DV6, TRAJ23)
CAAGPYNQGGKLIF

SEQ ID NO: 424222 - protein, 17 aa, Homo sapiens
  CDR3 for beta chain variable domain of TCR clone 212111 (TRBV4-2, TRBJ1-1)
CASSQVETGGMNTEAFF

SEQ ID NO: 424223 - protein, 12 aa, Homo sapiens
  CDR3 for alpha chain variable domain of TCR clone 212112 (TRAV9-2, TRAJ9)
SAMNTGGFKTIF

SEQ ID NO: 424224 - protein, 17 aa, Homo sapiens
  CDR3 for beta chain variable domain of TCR clone 212112 (TRBV28, TRBJ2-5)
CASSRQGGLAGAETQYF

SEQ ID NO: 424225 - protein, 13 aa, Homo sapiens
  CDR3 for alpha chain variable domain of TCR clone 212113 (TRAV3, TRAJ21)
CAVREPDFNKFYF

SEQ ID NO: 424226 - protein, 18 aa, Homo sapiens
  CDR3 for beta chain variable domain of TCR clone 212113 (TRBV11-2, TRBJ2-3)
CASSLGGASRGSPNTQYF

SEQ ID NO: 424227 - protein, 15 aa, Homo sapiens
  CDR3 for alpha chain variable domain of TCR clone 212114 (TRAV1-2, TRAJ3)
CAVRGGDSSASKIIF

SEQ ID NO: 424228 - protein, 16 aa, Homo sapiens
  CDR3 for beta chain variable domain of TCR clone 212114 (TRBV5-1, TRBJ2-5)
CASSLSLAGAQETQYF

SEQ ID NO: 424229 - protein, 17 aa, Homo sapiens
  CDR3 for alpha chain variable domain of TCR clone 212115 (TRAV3, TRAJ42)
CAVRDRDYGGSQGNLIF

SEQ ID NO: 424230 - protein, 17 aa, Homo sapiens
  CDR3 for beta chain variable domain of TCR clone 212115 (TRBV7-9, TRBJ2-3)
CASSPTLAGDLTDTQYF

SEQ ID NO: 424231 - protein, 13 aa, Homo sapiens
  CDR3 for alpha chain variable domain of TCR clone 212116 (TRAV16, TRAJ11)
CALTQSGYSTLTL

SEQ ID NO: 424232 - protein, 14 aa, Homo sapiens
  CDR3 for beta chain variable domain of TCR clone 212116 (TRBV19, TRBJ2-7)
CASSTTRSSYEQYF

SEQ ID NO: 424233 - protein, 13 aa, Homo sapiens
  CDR3 for alpha chain variable domain of TCR clone 212117 (TRAV2, TRAJ15)
CAVASQAGTALIF

SEQ ID NO: 424234 - protein, 12 aa, Homo sapiens
  CDR3 for beta chain variable domain of TCR clone 212117 (TRBV18, TRBJ2-1)
CASSSDEDEQFF

SEQ ID NO: 424235 - protein, 16 aa, Homo sapiens
  CDR3 for alpha chain variable domain of TCR clone 212118 (TRAV1-2, TRAJ18)
CAVRVERGSTLGRLYF

SEQ ID NO: 424236 - protein, 13 aa, Homo sapiens
  CDR3 for beta chain variable domain of TCR clone 212118 (TRBV7-9, TRBJ2-3)
CASSPGSTDTQYF

SEQ ID NO: 424237 - protein, 13 aa, Homo sapiens
  CDR3 for alpha chain variable domain of TCR clone 212119 (TRAV3, TRAJ21)
CAVREPDFNKFYF

SEQ ID NO: 424238 - protein, 12 aa, Homo sapiens
  CDR3 for beta chain variable domain of TCR clone 212119 (TRBV13, TRBJ2-1)
CASSLGAQEQFF

SEQ ID NO: 424239 - protein, 16 aa, Homo sapiens
  CDR3 for alpha chain variable domain of TCR clone 212120 (TRAV30, TRAJ24)
YGTEIVDADSWGKFQF

SEQ ID NO: 424240 - protein, 16 aa, Homo sapiens
  CDR3 for beta chain variable domain of TCR clone 212120 (TRBV7-3, TRBJ2-2)
CASSLKRGTLSGELFF

SEQ ID NO: 424241 - protein, 12 aa, Homo sapiens
  CDR3 for alpha chain variable domain of TCR clone 212121 (TRAV25, TRAJ11)
CAGASGYSTLTF

SEQ ID NO: 424242 - protein, 15 aa, Homo sapiens
  CDR3 for beta chain variable domain of TCR clone 212121 (TRBV11-2, TRBJ2-1)
CASSRNRGLMYEQFF

SEQ ID NO: 424243 - protein, 14 aa, Homo sapiens
  CDR3 for alpha chain variable domain of TCR clone 212122 (TRAV12-2, TRAJ44)
CAVNIAGTASKLTF

SEQ ID NO: 424244 - protein, 17 aa, Homo sapiens
  CDR3 for beta chain variable domain of TCR clone 212122 (TRBV10-3, TRBJ1-2)
CAISESTTALANYDYTF

SEQ ID NO: 424245 - protein, 15 aa, Homo sapiens
  CDR3 for alpha chain variable domain of TCR clone 212123 (TRAV12-3, TRAJ6)
CAMSATTGGSYIPTF

SEQ ID NO: 424246 - protein, 15 aa, Homo sapiens
  CDR3 for beta chain variable domain of TCR clone 212123 (TRBV7-6, TRBJ1-5)
CASSQSSRINQPQHF

SEQ ID NO: 424247 - protein, 15 aa, Homo sapiens
  CDR3 for alpha chain variable domain of TCR clone 212124 (TRAV16, TRAJ20)
CALKGGLRAVYKLSF

SEQ ID NO: 424248 - protein, 16 aa, Homo sapiens
  CDR3 for beta chain variable domain of TCR clone 212124 (TRBV11-3, TRBJ2-2)
CASSSRTSPGTGELFF

SEQ ID NO: 424249 - protein, 17 aa, Homo sapiens
  CDR3 for alpha chain variable domain of TCR clone 212125 (TRAV21, TRAJ52)
CAVGVNAGGTSYGKLTF

SEQ ID NO: 424250 - protein, 14 aa, Homo sapiens
  CDR3 for beta chain variable domain of TCR clone 212125 (TRBV12-5, TRBJ2-5)
CASGSRTHQETQYF

SEQ ID NO: 424251 - protein, 14 aa, Homo sapiens
  CDR3 for alpha chain variable domain of TCR clone 212126 (TRAV16, TRAJ15)
CALSFNQAGTALIF

SEQ ID NO: 424252 - protein, 11 aa, Homo sapiens
  CDR3 for beta chain variable domain of TCR clone 212126 (TRBV12-4, TRBJ2-3)
CASTATDTQYF

SEQ ID NO: 424253 - protein, 14 aa, Homo sapiens
  CDR3 for alpha chain variable domain of TCR clone 212127 (TRAV17, TRAJ16)
CATADFSDGQKLLF

SEQ ID NO: 424254 - protein, 16 aa, Homo sapiens
  CDR3 for beta chain variable domain of TCR clone 212127 (TRBV7-9, TRBJ2-3)
CASSPWREVGTDTQYF

SEQ ID NO: 424255 - protein, 15 aa, Homo sapiens
  CDR3 for alpha chain variable domain of TCR clone 212128 (TRAV17, TRAJ57)
CATGPSEGGSEKLVF

SEQ ID NO: 424256 - protein, 14 aa, Homo sapiens
  CDR3 for beta chain variable domain of TCR clone 212128 (TRBV12-5, TRBJ2-5)
CASGSRTHQETQYF

SEQ ID NO: 424257 - protein, 10 aa, Homo sapiens
  CDR3 for alpha chain variable domain of TCR clone 212129 (TRAV12-3, TRAJ49)
CAVHGKQFYF

SEQ ID NO: 424258 - protein, 12 aa, Homo sapiens
  CDR3 for beta chain variable domain of TCR clone 212129 (TRBV24-1, TRBJ2-7)
CATSDPGYEQYF

SEQ ID NO: 424259 - protein, 13 aa, Homo sapiens
  CDR3 for alpha chain variable domain of TCR clone 212130 (TRAV27, TRAJ28)
CAISGAGSYQLTF

SEQ ID NO: 424260 - protein, 13 aa, Homo sapiens
  CDR3 for beta chain variable domain of TCR clone 212130 (TRBV6-5, TRBJ2-5)
CASSPQGGETQYF

SEQ ID NO: 424261 - protein, 15 aa, Homo sapiens
  CDR3 for alpha chain variable domain of TCR clone 212131 (TRAV26-1, TRAJ40)
CIDRYATSGAYKYIF

SEQ ID NO: 424262 - protein, 11 aa, Homo sapiens
  CDR3 for beta chain variable domain of TCR clone 212131 (TRBV7-9, TRBJ2-1)
CASSSQNEQFF

SEQ ID NO: 424263 - protein, 14 aa, Homo sapiens
  CDR3 for alpha chain variable domain of TCR clone 212132 (TRAV13-1, TRAJ40)
CAASMTSGTYKYIF

SEQ ID NO: 424264 - protein, 15 aa, Homo sapiens
  CDR3 for beta chain variable domain of TCR clone 212132 (TRBV12-4, TRBJ2-5)
CASNPPTGLQETQYF

SEQ ID NO: 424265 - protein, 15 aa, Homo sapiens
  CDR3 for alpha chain variable domain of TCR clone 212133 (TRAV4, TRAJ39)
CLVGPNNNAGNMLTF

SEQ ID NO: 424266 - protein, 13 aa, Homo sapiens
  CDR3 for beta chain variable domain of TCR clone 212133 (TRBV19, TRBJ2-7)
CASEGTTTYEQYF

SEQ ID NO: 424267 - protein, 12 aa, Homo sapiens
  CDR3 for alpha chain variable domain of TCR clone 212134 (TRAV38-2/DV8, TRAJ49)
CAYRSATNQFYF

SEQ ID NO: 424268 - protein, 14 aa, Homo sapiens
  CDR3 for beta chain variable domain of TCR clone 212134 (TRBV7-2, TRBJ2-7)
CASSPKTSFYEQYF

SEQ ID NO: 424269 - protein, 11 aa, Homo sapiens
  CDR3 for alpha chain variable domain of TCR clone 212135 (TRAV12-3, TRAJ27)
CAMANAGKSTF

SEQ ID NO: 424270 - protein, 18 aa, Homo sapiens
  CDR3 for beta chain variable domain of TCR clone 212135 (TRBV4-2, TRBJ1-5)
CASSQGDRVEWGNQPQHF

SEQ ID NO: 424271 - protein, 14 aa, Homo sapiens
  CDR3 for alpha chain variable domain of TCR clone 212136 (TRAV9-2, TRAJ39)
CALYIYNAGNMLTF

SEQ ID NO: 424272 - protein, 19 aa, Homo sapiens
  CDR3 for beta chain variable domain of TCR clone 212136 (TRBV7-2, TRBJ2-3)
CASSFLSRNWGGGTETQYF

SEQ ID NO: 424273 - protein, 12 aa, Homo sapiens
  CDR3 for alpha chain variable domain of TCR clone 212137 (TRAV38-1, TRAJ34)
CAFMTETDKLIF

SEQ ID NO: 424274 - protein, 17 aa, Homo sapiens
  CDR3 for beta chain variable domain of TCR clone 212137 (TRBV7-8, TRBJ2-6)
CASSAGTGGAGANVLTF

SEQ ID NO: 424275 - protein, 17 aa, Homo sapiens
  CDR3 for alpha chain variable domain of TCR clone 212138 (TRAV3, TRAJ6)
CAVRDGPRAGGSYTPTL

SEQ ID NO: 424276 - protein, 12 aa, Homo sapiens
  CDR3 for beta chain variable domain of TCR clone 212138 (TRBV11-2, TRBJ2-1)
CASSPGNNEQFF

SEQ ID NO: 424277 - protein, 10 aa, Homo sapiens
  CDR3 for alpha chain variable domain of TCR clone 212139 (TRAV30, TRAJ16)
CGTGGQKLLF

SEQ ID NO: 424278 - protein, 11 aa, Homo sapiens
  CDR3 for beta chain variable domain of TCR clone 212139 (TRBV6-1, TRBJ1-2)
CASSTGWPPLA

SEQ ID NO: 424279 - protein, 13 aa, Homo sapiens
  CDR3 for alpha chain variable domain of TCR clone 212140 (TRAV8-6, TRAJ42)
CAVRGGSQGNLIF

SEQ ID NO: 424280 - protein, 12 aa, Homo sapiens
  CDR3 for beta chain variable domain of TCR clone 212140 (TRBV11-2, TRBJ2-1)
CASSPGNNEQFF

SEQ ID NO: 424281 - protein, 17 aa, Homo sapiens
  CDR3 for alpha chain variable domain of TCR clone 212141 (TRAV29/DV5, TRAJ42)
CAASAGNYGGSQGNLIF

SEQ ID NO: 424282 - protein, 17 aa, Homo sapiens
  CDR3 for beta chain variable domain of TCR clone 212141 (TRBV4-2, TRBJ1-1)
CASTQFGGGSGNTEAFF

SEQ ID NO: 424283 - protein, 14 aa, Homo sapiens
  CDR3 for alpha chain variable domain of TCR clone 212142 (TRAV29/DV5, TRAJ36)
CAARRKTGANNPFF

SEQ ID NO: 424284 - protein, 15 aa, Homo sapiens
  CDR3 for beta chain variable domain of TCR clone 212142 (TRBV27, TRBJ2-7)
CASSTAGTGSYEQYF

SEQ ID NO: 424285 - protein, 14 aa, Homo sapiens
  CDR3 for alpha chain variable domain of TCR clone 212143 (TRAV12-1, TRAJ23)
CVVIVYNQGGKLIF

SEQ ID NO: 424286 - protein, 15 aa, Homo sapiens
  CDR3 for beta chain variable domain of TCR clone 212143 (TRBV20-1, TRBJ1-5)
CSAKPPGESPQPQHF

SEQ ID NO: 424287 - protein, 13 aa, Homo sapiens
  CDR3 for alpha chain variable domain of TCR clone 212144 (TRAV8-3, TRAJ44)
CALVPGTASKLTF

SEQ ID NO: 424288 - protein, 14 aa, Homo sapiens
  CDR3 for beta chain variable domain of TCR clone 212144 (TRBV11-2, TRBJ2-3)
CASRRLARTDTQYF

SEQ ID NO: 424289 - protein, 21 aa, Homo sapiens
  CDR3 for alpha chain variable domain of TCR clone 212145 (TRAV3, TRAJ17)
CAVRARRGGRSCRQQAHFLRR

SEQ ID NO: 424290 - protein, 14 aa, Homo sapiens
  CDR3 for beta chain variable domain of TCR clone 212145 (TRBV4-1, TRBJ2-2)
CASSQAVNTGELFF

SEQ ID NO: 424291 - protein, 16 aa, Homo sapiens
  CDR3 for alpha chain variable domain of TCR clone 212146 (TRAV30, TRAJ24)
CGTEMVDADSWGKFQF

SEQ ID NO: 424292 - protein, 17 aa, Homo sapiens
  CDR3 for beta chain variable domain of TCR clone 212146 (TRBV20-1, TRBJ2-1)
CSARDRRRASSYNEQFF

SEQ ID NO: 424293 - protein, 14 aa, Homo sapiens
  CDR3 for alpha chain variable domain of TCR clone 212147 (TRAV13-2, TRAJ4)
CAEKGPKGYNKLIF

SEQ ID NO: 424294 - protein, 12 aa, Homo sapiens
  CDR3 for beta chain variable domain of TCR clone 212147 (TRBV11-2, TRBJ2-2)
CASSLGGGELFF

SEQ ID NO: 424295 - protein, 15 aa, Homo sapiens
  CDR3 for alpha chain variable domain of TCR clone 212148 (TRAV21, TRAJ53)
CATLNSGGSNYKLTF

SEQ ID NO: 424296 - protein, 14 aa, Homo sapiens
  CDR3 for beta chain variable domain of TCR clone 212148 (TRBV15, TRBJ2-5)
CATSIGGLGETQFF

SEQ ID NO: 424297 - protein, 15 aa, Homo sapiens
  CDR3 for alpha chain variable domain of TCR clone 212149 (TRAV12-3, TRAJ49)
CAIAVTPNTGNQFYF

SEQ ID NO: 424298 - protein, 15 aa, Homo sapiens
  CDR3 for beta chain variable domain of TCR clone 212149 (TRBV9, TRBJ1-6)
CASSVAGTGDSPLHF

SEQ ID NO: 424299 - protein, 11 aa, Homo sapiens
  CDR3 for alpha chain variable domain of TCR clone 212150 (TRAV23/DV6, TRAJ43)
CAASSGNDMRF

SEQ ID NO: 424300 - protein, 14 aa, Homo sapiens
  CDR3 for beta chain variable domain of TCR clone 212150 (TRBV4-1, TRBJ1-2)
CASSQDPLPCGYTF

SEQ ID NO: 424301 - protein, 14 aa, Homo sapiens
  CDR3 for alpha chain variable domain of TCR clone 212151 (TRAV3, TRAJ7)
CAVREEEREQQTRF

SEQ ID NO: 424302 - protein, 14 aa, Homo sapiens
  CDR3 for beta chain variable domain of TCR clone 212151 (TRBV7-7, TRBJ2-2)
CASSTRASGGGLFF

SEQ ID NO: 424303 - protein, 13 aa, Homo sapiens
  CDR3 for alpha chain variable domain of TCR clone 212152 (TRAV27, TRAJ29)
CAGAHSGNTPLVF

SEQ ID NO: 424304 - protein, 14 aa, Homo sapiens
  CDR3 for beta chain variable domain of TCR clone 212152 (TRBV7-9, TRBJ2-7)
CASSIGQGAGEQHF

SEQ ID NO: 424305 - protein, 13 aa, Homo sapiens
  CDR3 for alpha chain variable domain of TCR clone 212153 (TRAV1-2, TRAJ16)
CAVNRFSDGQAAL

SEQ ID NO: 424306 - protein, 13 aa, Homo sapiens
  CDR3 for beta chain variable domain of TCR clone 212153 (TRBV18, TRBJ2-5)
CASSPAGKETQYF

SEQ ID NO: 424307 - protein, 14 aa, Homo sapiens
  CDR3 for alpha chain variable domain of TCR clone 212154 (TRAV35, TRAJ13)
CAGSPSGGYQKVTF

SEQ ID NO: 424308 - protein, 17 aa, Homo sapiens
  CDR3 for beta chain variable domain of TCR clone 212154 (TRBV7-6, TRBJ2-5)
CASSPGLADTWGETQYF

SEQ ID NO: 424309 - protein, 12 aa, Homo sapiens
  CDR3 for alpha chain variable domain of TCR clone 212155 (TRAV13-1, TRAJ49)
CAASPMGNQFYF

SEQ ID NO: 424310 - protein, 13 aa, Homo sapiens
  CDR3 for beta chain variable domain of TCR clone 212155 (TRBV20-1, TRBJ2-2)
CSGSAAGTGELFF

SEQ ID NO: 424311 - protein, 15 aa, Homo sapiens
  CDR3 for alpha chain variable domain of TCR clone 212156 (TRAV8-3, TRAJ40)
CSAPSLGSGTYRYIF

SEQ ID NO: 424312 - protein, 12 aa, Homo sapiens
  CDR3 for beta chain variable domain of TCR clone 212156 (TRBV11-2, TRBJ2-2)
CASSLGGGELFF

SEQ ID NO: 424313 - protein, 16 aa, Homo sapiens
  CDR3 for alpha chain variable domain of TCR clone 212157 (TRAV3, TRAJ10)
CAVRDMRAGGGNKLTF

SEQ ID NO: 424314 - protein, 20 aa, Homo sapiens
  CDR3 for beta chain variable domain of TCR clone 212157 (TRBV28, TRBJ2-1)
CASTPIGRAPGLAGGNEQFF

SEQ ID NO: 424315 - protein, 13 aa, Homo sapiens
  CDR3 for alpha chain variable domain of TCR clone 212158 (TRAV12-3, TRAJ33)
CAMSVNSNYQLIW

SEQ ID NO: 424316 - protein, 15 aa, Homo sapiens
  CDR3 for beta chain variable domain of TCR clone 212158 (TRBV9, TRBJ2-1)
CASSLAGSSYNEQFF

SEQ ID NO: 424317 - protein, 13 aa, Homo sapiens
  CDR3 for alpha chain variable domain of TCR clone 212159 (TRAV12-3, TRAJ40)
CAMSDSGTYKYIF

SEQ ID NO: 424318 - protein, 14 aa, Homo sapiens
  CDR3 for beta chain variable domain of TCR clone 212159 (TRBV7-2, TRBJ1-5)
CASSAQGAGQPQHF

SEQ ID NO: 424319 - protein, 13 aa, Homo sapiens
  CDR3 for alpha chain variable domain of TCR clone 212160 (TRAV8-6, TRAJ16)
CAVSSPDGQKLLF

SEQ ID NO: 424320 - protein, 16 aa, Homo sapiens
  CDR3 for beta chain variable domain of TCR clone 212160 (TRBV5-7, TRBJ2-3)
CASSPLGGAITDTQYF

SEQ ID NO: 424321 - protein, 14 aa, Homo sapiens
  CDR3 for alpha chain variable domain of TCR clone 212161 (TRAV17, TRAJ34)
CATDSLEGTDKLTF

SEQ ID NO: 424322 - protein, 13 aa, Homo sapiens
  CDR3 for beta chain variable domain of TCR clone 212161 (TRBV11-2, TRBJ2-7)
CASSGTRHYEQYF

SEQ ID NO: 424323 - protein, 17 aa, Homo sapiens
  CDR3 for alpha chain variable domain of TCR clone 212162 (TRAV8-1, TRAJ43)
CAVTNDMRSGAGTRLTV

SEQ ID NO: 424324 - protein, 17 aa, Homo sapiens
  CDR3 for beta chain variable domain of TCR clone 212162 (TRBV5-4, TRBJ2-1)
CASSSAGGGGPYNEQFF

SEQ ID NO: 424325 - protein, 11 aa, Homo sapiens
  CDR3 for alpha chain variable domain of TCR clone 212163 (TRAV2, TRAJ33)
CAVESNYQLIW

SEQ ID NO: 424326 - protein, 14 aa, Homo sapiens
  CDR3 for beta chain variable domain of TCR clone 212163 (TRBV20-1, TRBJ2-7)
CSAKTGTGGYEQYF

SEQ ID NO: 424327 - protein, 13 aa, Homo sapiens
  CDR3 for alpha chain variable domain of TCR clone 212164 (TRAV29/DV5, TRAJ31)
CAASRNNNARLIF

SEQ ID NO: 424328 - protein, 13 aa, Homo sapiens
  CDR3 for beta chain variable domain of TCR clone 212164 (TRBV7-2, TRBJ2-4)
CASSREHANIQYF

SEQ ID NO: 424329 - protein, 13 aa, Homo sapiens
  CDR3 for alpha chain variable domain of TCR clone 212165 (TRAV21, TRAJ27)
CAALNTNAGKSTF

SEQ ID NO: 424330 - protein, 15 aa, Homo sapiens
  CDR3 for beta chain variable domain of TCR clone 212165 (TRBV6-3, TRBJ2-7)
CASSSPGTVFYEQYF

SEQ ID NO: 424331 - protein, 14 aa, Homo sapiens
  CDR3 for alpha chain variable domain of TCR clone 212166 (TRAV2, TRAJ9)
CAVEDRSGGVKTIF

SEQ ID NO: 424332 - protein, 14 aa, Homo sapiens
  CDR3 for beta chain variable domain of TCR clone 212166 (TRBV9, TRBJ2-1)
CASSVAGTFDEQFF

SEQ ID NO: 424333 - protein, 12 aa, Homo sapiens
  CDR3 for alpha chain variable domain of TCR clone 212167 (TRAV21, TRAJ11)
CAATSGYSTLTF

SEQ ID NO: 424334 - protein, 13 aa, Homo sapiens
  CDR3 for beta chain variable domain of TCR clone 212167 (TRBV18, TRBJ2-5)
CASSPGDQETQYF

SEQ ID NO: 424335 - protein, 13 aa, Homo sapiens
  CDR3 for alpha chain variable domain of TCR clone 212168 (TRAV21, TRAJ57)
CAVTQGGSEKLVF

SEQ ID NO: 424336 - protein, 13 aa, Homo sapiens
  CDR3 for beta chain variable domain of TCR clone 212168 (TRBV11-2, TRBJ2-5)
CASSFSSQETQYF

SEQ ID NO: 424337 - protein, 15 aa, Homo sapiens
  CDR3 for alpha chain variable domain of TCR clone 212169 (TRAV12-3, TRAJ6)
CAMSATTGGSYIPTF

SEQ ID NO: 424338 - protein, 12 aa, Homo sapiens
  CDR3 for beta chain variable domain of TCR clone 212169 (TRBV12-4, TRBJ2-3)
CASSTLPDTQYF

SEQ ID NO: 424339 - protein, 16 aa, Homo sapiens
  CDR3 for alpha chain variable domain of TCR clone 212170 (TRAV17, TRAJ22)
CATDAISSGSARQLTF

SEQ ID NO: 424340 - protein, 15 aa, Homo sapiens
  CDR3 for beta chain variable domain of TCR clone 212170 (TRBV5-1, TRBJ2-1)
CASSPPRAPYNEQFV

SEQ ID NO: 424341 - protein, 15 aa, Homo sapiens
  CDR3 for alpha chain variable domain of TCR clone 212171 (TRAV17, TRAJ35)
CATAFVIGFGNVLHC

SEQ ID NO: 424342 - protein, 17 aa, Homo sapiens
  CDR3 for beta chain variable domain of TCR clone 212171 (TRBV20-1, TRBJ2-1)
CSASSSGLAGSYNEQFF

SEQ ID NO: 424343 - protein, 12 aa, Homo sapiens
  CDR3 for alpha chain variable domain of TCR clone 212172 (TRAV10, TRAJ31)
CVVRAHRARLMF

SEQ ID NO: 424344 - protein, 15 aa, Homo sapiens
  CDR3 for beta chain variable domain of TCR clone 212172 (TRBV5-1, TRBJ1-1)
CASSPTGFDVTEAFF

SEQ ID NO: 424345 - protein, 16 aa, Homo sapiens
  CDR3 for alpha chain variable domain of TCR clone 212173 (TRAV16, TRAJ4)
CALSRMFSGGYNKMIF

SEQ ID NO: 424346 - protein, 12 aa, Homo sapiens
  CDR3 for beta chain variable domain of TCR clone 212173 (TRBV29-1, TRBJ2-3)
CSVTGGADTQYF

SEQ ID NO: 424347 - protein, 14 aa, Homo sapiens
  CDR3 for alpha chain variable domain of TCR clone 212174 (TRAV1-2, TRAJ16)
CAVNRFSDDQKLLF

SEQ ID NO: 424348 - protein, 14 aa, Homo sapiens
  CDR3 for beta chain variable domain of TCR clone 212174 (TRBV25-1, TRBJ1-1)
CASTHLGGNTEAFF

SEQ ID NO: 424349 - protein, 14 aa, Homo sapiens
  CDR3 for alpha chain variable domain of TCR clone 212175 (TRAV13-2, TRAJ17)
CAENSKAAGNKLTF

SEQ ID NO: 424350 - protein, 15 aa, Homo sapiens
  CDR3 for beta chain variable domain of TCR clone 212175 (TRBV13, TRBJ1-2)
CASSSPRGVRYGYTF

SEQ ID NO: 424351 - protein, 16 aa, Homo sapiens
  CDR3 for alpha chain variable domain of TCR clone 212176 (TRAV12-2, TRAJ4)
CAVILPFSGGYNKLIF

SEQ ID NO: 424352 - protein, 15 aa, Homo sapiens
  CDR3 for beta chain variable domain of TCR clone 212176 (TRBV27, TRBJ2-1)
CASSNGGGSSNEQFF

SEQ ID NO: 424353 - protein, 17 aa, Homo sapiens
  CDR3 for alpha chain variable domain of TCR clone 212177 (TRAV13-1, TRAJ28)
CAASPPYSGAGSYPLTF

SEQ ID NO: 424354 - protein, 13 aa, Homo sapiens
  CDR3 for beta chain variable domain of TCR clone 212177 (TRBV12-5, TRBJ2-3)
CASGDRQSDTQYF

SEQ ID NO: 424355 - protein, 14 aa, Homo sapiens
  CDR3 for alpha chain variable domain of TCR clone 212178 (TRAV13-1, TRAJ40)
CAARSTSRTYKYIF

SEQ ID NO: 424356 - protein, 15 aa, Homo sapiens
  CDR3 for beta chain variable domain of TCR clone 212178 (TRBV18, TRBJ1-5)
CASSETGGNNQPQHF

SEQ ID NO: 424357 - protein, 14 aa, Homo sapiens
  CDR3 for alpha chain variable domain of TCR clone 212179 (TRAV16, TRAJ26)
CITVLSAYGRNFVF

SEQ ID NO: 424358 - protein, 14 aa, Homo sapiens
  CDR3 for beta chain variable domain of TCR clone 212179 (TRBV7-2, TRBJ2-7)
CASRSQGAAYEQYF

SEQ ID NO: 424359 - protein, 11 aa, Homo sapiens
  CDR3 for alpha chain variable domain of TCR clone 212180 (TRAV3, TRAJ21)
FAVGNFNKFYF

SEQ ID NO: 424360 - protein, 16 aa, Homo sapiens
  CDR3 for beta chain variable domain of TCR clone 212180 (TRBV19, TRBJ2-1)
CASSRAGPSSYNEQFF

SEQ ID NO: 424361 - protein, 17 aa, Homo sapiens
  CDR3 for alpha chain variable domain of TCR clone 212181 (TRAV3, TRAJ42)
CAVRDRDYGGSQGNLIF

SEQ ID NO: 424362 - protein, 15 aa, Homo sapiens
  CDR3 for beta chain variable domain of TCR clone 212181 (TRBV6-5, TRBJ2-7)
CASSYDAGAGNEQFF

SEQ ID NO: 424363 - protein, 14 aa, Homo sapiens
  CDR3 for alpha chain variable domain of TCR clone 212182 (TRAV3, TRAJ9)
CAVRGNTGGFKNIF

SEQ ID NO: 424364 - protein, 14 aa, Homo sapiens
  CDR3 for beta chain variable domain of TCR clone 212182 (TRBV15, TRBJ2-1)
CATSGVEDYNEQFF

SEQ ID NO: 424365 - protein, 14 aa, Homo sapiens
  CDR3 for alpha chain variable domain of TCR clone 212183 (TRAV8-3, TRAJ28)
CAVVPGAGSYQLTF

SEQ ID NO: 424366 - protein, 13 aa, Homo sapiens
  CDR3 for beta chain variable domain of TCR clone 212183 (TRBV6-1, TRBJ1-1)
CASSRQGNTEAFF

SEQ ID NO: 424367 - protein, 16 aa, Homo sapiens
  CDR3 for alpha chain variable domain of TCR clone 212184 (TRAV30, TRAJ24)
CGTEIVDADSWGKFQV

SEQ ID NO: 424368 - protein, 14 aa, Homo sapiens
  CDR3 for beta chain variable domain of TCR clone 212184 (TRBV12-5, TRBJ2-5)
CASGSRTYQETQYF

SEQ ID NO: 424369 - protein, 15 aa, Homo sapiens
  CDR3 for alpha chain variable domain of TCR clone 212185 (TRAV12-2, TRAJ43)
CAFDMRFGAGTRLTV

SEQ ID NO: 424370 - protein, 18 aa, Homo sapiens
  CDR3 for beta chain variable domain of TCR clone 212185 (TRBV20-1, TRBJ2-3)
CSASGLAGGPETTETQYF

SEQ ID NO: 424371 - protein, 12 aa, Homo sapiens
  CDR3 for alpha chain variable domain of TCR clone 212186 (TRAV30, TRAJ43)
CGTEERGNDMRF

SEQ ID NO: 424372 - protein, 16 aa, Homo sapiens
  CDR3 for beta chain variable domain of TCR clone 212186 (TRBV5-1, TRBJ2-5)
CASSLRRTSGQETQYF

SEQ ID NO: 424373 - protein, 15 aa, Homo sapiens
  CDR3 for alpha chain variable domain of TCR clone 212187 (TRAV17, TRAJ56)
CATDANTGANSKLTF

SEQ ID NO: 424374 - protein, 12 aa, Homo sapiens
  CDR3 for beta chain variable domain of TCR clone 212187 (TRBV7-8, TRBJ2-7)
CASSLGDREHYF

SEQ ID NO: 424375 - protein, 16 aa, Homo sapiens
  CDR3 for alpha chain variable domain of TCR clone 212188 (TRAV12-3, TRAJ53)
CAMSPGSGGSNYKLKF

SEQ ID NO: 424376 - protein, 15 aa, Homo sapiens
  CDR3 for beta chain variable domain of TCR clone 212188 (TRBV4-1, TRBJ2-5)
CASSQWDLYQETQYF

SEQ ID NO: 424377 - protein, 16 aa, Homo sapiens
  CDR3 for alpha chain variable domain of TCR clone 212189 (TRAV8-6, TRAJ4)
CAVSERISGGDNKLIF

SEQ ID NO: 424378 - protein, 19 aa, Homo sapiens
  CDR3 for beta chain variable domain of TCR clone 212189 (TRBV19, TRBJ1-5)
CASSISPRQTGGGNQPQHF

SEQ ID NO: 424379 - protein, 15 aa, Homo sapiens
  CDR3 for alpha chain variable domain of TCR clone 212190 (TRAV8-4, TRAJ3)
CAVTGENLVQQCFQD

SEQ ID NO: 424380 - protein, 16 aa, Homo sapiens
  CDR3 for beta chain variable domain of TCR clone 212190 (TRBV4-2, TRBJ1-1)
CASIQAGFGMNTEAFF

SEQ ID NO: 424381 - protein, 14 aa, Homo sapiens
  CDR3 for alpha chain variable domain of TCR clone 212191 (TRAV1-2, TRAJ8)
CAVREDTGFQKLVF

SEQ ID NO: 424382 - protein, 14 aa, Homo sapiens
  CDR3 for beta chain variable domain of TCR clone 212191 (TRBV28, TRBJ2-1)
CASSPSTGFNEQFF

SEQ ID NO: 424383 - protein, 17 aa, Homo sapiens
  CDR3 for alpha chain variable domain of TCR clone 212192 (TRAV36/DV7, TRAJ42)
CAGGGMNYGGSQGNLIF

SEQ ID NO: 424384 - protein, 13 aa, Homo sapiens
  CDR3 for beta chain variable domain of TCR clone 212192 (TRBV25-1, TRBJ1-4)
CASSEERWEKLFF

SEQ ID NO: 424385 - protein, 13 aa, Homo sapiens
  CDR3 for alpha chain variable domain of TCR clone 212193 (TRAV12-3, TRAJ40)
CAMSDSGTYKYIF

SEQ ID NO: 424386 - protein, 15 aa, Homo sapiens
  CDR3 for beta chain variable domain of TCR clone 212193 (TRBV20-1, TRBJ2-7)
CSARDRVSGMDEQYF

SEQ ID NO: 424387 - protein, 13 aa, Homo sapiens
  CDR3 for alpha chain variable domain of TCR clone 212194 (TRAV12-1, TRAJ31)
CVVNMNNNARLMF

SEQ ID NO: 424388 - protein, 15 aa, Homo sapiens
  CDR3 for beta chain variable domain of TCR clone 212194 (TRBV4-1, TRBJ1-2)
CASSQRQGAAYGYTF

SEQ ID NO: 424389 - protein, 15 aa, Homo sapiens
  CDR3 for alpha chain variable domain of TCR clone 212195 (TRAV21, TRAJ40)
CAVRPQTSGTYKYIF

SEQ ID NO: 424390 - protein, 13 aa, Homo sapiens
  CDR3 for beta chain variable domain of TCR clone 212195 (TRBV7-2, TRBJ2-2)
CASSSVRAGEQFF

SEQ ID NO: 424391 - protein, 14 aa, Homo sapiens
  CDR3 for alpha chain variable domain of TCR clone 212196 (TRAV36/DV7, TRAJ53)
CAVVDGGSNYKLTF

SEQ ID NO: 424392 - protein, 16 aa, Homo sapiens
  CDR3 for beta chain variable domain of TCR clone 212196 (TRBV15, TRBJ2-7)
CATSARQARSSYEKYF

SEQ ID NO: 424393 - protein, 17 aa, Homo sapiens
  CDR3 for alpha chain variable domain of TCR clone 212197 (TRAV3, TRAJ6)
CAVRDGPRAGGSYIPTF

SEQ ID NO: 424394 - protein, 11 aa, Homo sapiens
  CDR3 for beta chain variable domain of TCR clone 212197 (TRBV29-1, TRBJ2-5)
CSEDRTGTQYF

SEQ ID NO: 424395 - protein, 12 aa, Homo sapiens
  CDR3 for alpha chain variable domain of TCR clone 212198 (TRAV13-1, TRAJ20)
CAASRGDYKLSF

SEQ ID NO: 424396 - protein, 12 aa, Homo sapiens
  CDR3 for beta chain variable domain of TCR clone 212198 (TRBV29-1, TRBJ2-3)
CSVTGGADTQYF

SEQ ID NO: 424397 - protein, 12 aa, Homo sapiens
  CDR3 for alpha chain variable domain of TCR clone 212199 (TRAV3, TRAJ9)
CAVNTGGFKTIF

SEQ ID NO: 424398 - protein, 14 aa, Homo sapiens
  CDR3 for beta chain variable domain of TCR clone 212199 (TRBV7-3, TRBJ2-2)
CASSSGGYTGELFF

SEQ ID NO: 424399 - protein, 14 aa, Homo sapiens
  CDR3 for alpha chain variable domain of TCR clone 212200 (TRAV26-1, TRAJ38)
CIADNAGNNHKLIW

SEQ ID NO: 424400 - protein, 13 aa, Homo sapiens
  CDR3 for beta chain variable domain of TCR clone 212200 (TRBV7-9, TRBJ1-2)
CASSLKQNYGYTF

SEQ ID NO: 424401 - protein, 14 aa, Homo sapiens
  CDR3 for alpha chain variable domain of TCR clone 212201 (TRAV26-1, TRAJ38)
CIADNAGNNRKLLW

SEQ ID NO: 424402 - protein, 15 aa, Homo sapiens
  CDR3 for beta chain variable domain of TCR clone 212201 (TRBV20-1, TRBJ2-7)
CSARDRVSGMDEQYF

SEQ ID NO: 424403 - protein, 17 aa, Homo sapiens
  CDR3 for alpha chain variable domain of TCR clone 212202 (TRAV3, TRAJ28)
CAVREAYSGAGSYQLTF

SEQ ID NO: 424404 - protein, 14 aa, Homo sapiens
  CDR3 for beta chain variable domain of TCR clone 212202 (TRBV4-2, TRBJ2-1)
CASGLDRAYNEQFF

SEQ ID NO: 424405 - protein, 13 aa, Homo sapiens
  CDR3 for alpha chain variable domain of TCR clone 212203 (TRAV27, TRAJ54)
CAGAGQEAQKLVF

SEQ ID NO: 424406 - protein, 15 aa, Homo sapiens
  CDR3 for beta chain variable domain of TCR clone 212203 (TRBV18, TRBJ2-6)
CASSPSYAGANVLTF

SEQ ID NO: 424407 - protein, 16 aa, Homo sapiens
  CDR3 for alpha chain variable domain of TCR clone 212204 (TRAV12-3, TRAJ53)
CAMSPGRGGSNYKLTF

SEQ ID NO: 424408 - protein, 14 aa, Homo sapiens
  CDR3 for beta chain variable domain of TCR clone 212204 (TRBV2, TRBJ2-7)
CASSLTSGGYEQYF

SEQ ID NO: 424409 - protein, 18 aa, Homo sapiens
  CDR3 for alpha chain variable domain of TCR clone 212205 (TRAV13-1, TRAJ52)
CAAKNPNAGGTSYGKLTF

SEQ ID NO: 424410 - protein, 18 aa, Homo sapiens
  CDR3 for beta chain variable domain of TCR clone 212205 (TRBV4-3, TRBJ2-6)
CASSQDIQGGPGANVLTF

SEQ ID NO: 424411 - protein, 15 aa, Homo sapiens
  CDR3 for alpha chain variable domain of TCR clone 212206 (TRAV12-2, TRAJ53)
CAVNGGGGSNYKLTF

SEQ ID NO: 424412 - protein, 13 aa, Homo sapiens
  CDR3 for beta chain variable domain of TCR clone 212206 (TRBV3-1, TRBJ1-1)
CATSPGVITEAFF

SEQ ID NO: 424413 - protein, 17 aa, Homo sapiens
  CDR3 for alpha chain variable domain of TCR clone 212207 (TRAV3, TRAJ28)
CAVREAYSGAGSYQLTF

SEQ ID NO: 424414 - protein, 11 aa, Homo sapiens
  CDR3 for beta chain variable domain of TCR clone 212207 (TRBV19, TRBJ2-2)
CASRYSGELYF

SEQ ID NO: 424415 - protein, 14 aa, Homo sapiens
  CDR3 for alpha chain variable domain of TCR clone 212208 (TRAV26-1, TRAJ38)
CIADNAGNNRKLIW

SEQ ID NO: 424416 - protein, 16 aa, Homo sapiens
  CDR3 for beta chain variable domain of TCR clone 212208 (TRBV3-1, TRBJ2-5)
CASSPGQFNGFGTQYF

SEQ ID NO: 424417 - protein, 14 aa, Homo sapiens
  CDR3 for alpha chain variable domain of TCR clone 212209 (TRAV8-3, TRAJ15)
CAVGRHQAGTALIF

SEQ ID NO: 424418 - protein, 13 aa, Homo sapiens
  CDR3 for beta chain variable domain of TCR clone 212209 (TRBV9, TRBJ2-7)
CASSVAEYYEQYF

SEQ ID NO: 424419 - protein, 11 aa, Homo sapiens
  CDR3 for alpha chain variable domain of TCR clone 212210 (TRAV3, TRAJ21)
CAVGNSNKFYF

SEQ ID NO: 424420 - protein, 16 aa, Homo sapiens
  CDR3 for beta chain variable domain of TCR clone 212210 (TRBV19, TRBJ2-1)
CASSKAGPSSYNEQFF

SEQ ID NO: 424421 - protein, 14 aa, Homo sapiens
  CDR3 for alpha chain variable domain of TCR clone 212211 (TRAV27, TRAJ58)
CAGDGETSGSRLTF

SEQ ID NO: 424422 - protein, 17 aa, Homo sapiens
  CDR3 for beta chain variable domain of TCR clone 212211 (TRBV20-1, TRBJ2-2)
CSASGSGQGGLTGELFF

SEQ ID NO: 424423 - protein, 14 aa, Homo sapiens
  CDR3 for alpha chain variable domain of TCR clone 212212 (TRAV12-2, TRAJ13)
CAVKKTGGYQKVTF

SEQ ID NO: 424424 - protein, 16 aa, Homo sapiens
  CDR3 for beta chain variable domain of TCR clone 212212 (TRBV20-1, TRBJ2-3)
CSGEAGLAGGQDTQYF

SEQ ID NO: 424425 - protein, 15 aa, Homo sapiens
  CDR3 for alpha chain variable domain of TCR clone 212213 (TRAV3, TRAJ13)
CAVRDIAGGYQKVTF

SEQ ID NO: 424426 - protein, 16 aa, Homo sapiens
  CDR3 for beta chain variable domain of TCR clone 212213 (TRBV19, TRBJ2-1)
CASSKAGPSSYNEQFF

SEQ ID NO: 424427 - protein, 14 aa, Homo sapiens
  CDR3 for alpha chain variable domain of TCR clone 212214 (TRAV38-1, TRAJ29)
CAFITPSGNTPLVF

SEQ ID NO: 424428 - protein, 15 aa, Homo sapiens
  CDR3 for beta chain variable domain of TCR clone 212214 (TRBV5-1, TRBJ2-3)
CASSYTSGSTDTQYF

SEQ ID NO: 424429 - protein, 15 aa, Homo sapiens
  CDR3 for alpha chain variable domain of TCR clone 212215 (TRAV26-1, TRAJ17)
YIVRVVKAAGNKLTF

SEQ ID NO: 424430 - protein, 16 aa, Homo sapiens
  CDR3 for beta chain variable domain of TCR clone 212215 (TRBV7-9, TRBJ2-1)
CASSLVSGPSYNEQFF

SEQ ID NO: 424431 - protein, 15 aa, Homo sapiens
  CDR3 for alpha chain variable domain of TCR clone 212216 (TRAV26-1, TRAJ29)
CIVRVEGSGNTPLVF

SEQ ID NO: 424432 - protein, 14 aa, Homo sapiens
  CDR3 for beta chain variable domain of TCR clone 212216 (TRBV9, TRBJ2-1)
CASSVALAVNEQFF

SEQ ID NO: 424433 - protein, 12 aa, Homo sapiens
  CDR3 for alpha chain variable domain of TCR clone 212217 (TRAV12-3, TRAJ3)
CAIDSSASKIIF

SEQ ID NO: 424434 - protein, 14 aa, Homo sapiens
  CDR3 for beta chain variable domain of TCR clone 212217 (TRBV4-1, TRBJ2-7)
CASSPVAGGDEQYF

SEQ ID NO: 424435 - protein, 11 aa, Homo sapiens
  CDR3 for alpha chain variable domain of TCR clone 212218 (TRAV13-1, TRAJ39)
CASHAGNMLTF

SEQ ID NO: 424436 - protein, 14 aa, Homo sapiens
  CDR3 for beta chain variable domain of TCR clone 212218 (TRBV11-2, TRBJ1-5)
CASSLARGRQPQHF

SEQ ID NO: 424437 - protein, 15 aa, Homo sapiens
  CDR3 for alpha chain variable domain of TCR clone 212219 (TRAV2, TRAJ11)
CAVGGRNSGYSTLTF

SEQ ID NO: 424438 - protein, 11 aa, Homo sapiens
  CDR3 for beta chain variable domain of TCR clone 212219 (TRBV28, TRBJ2-3)
CASSSDPPQYF

SEQ ID NO: 424439 - protein, 12 aa, Homo sapiens
  CDR3 for alpha chain variable domain of TCR clone 212220 (TRAV2, TRAJ31)
CAVEDNNARLMF

SEQ ID NO: 424440 - protein, 15 aa, Homo sapiens
  CDR3 for beta chain variable domain of TCR clone 212220 (TRBV7-2, TRBJ1-3)
CASSPQGGSGNTIYF

SEQ ID NO: 424441 - protein, 12 aa, Homo sapiens
  CDR3 for alpha chain variable domain of TCR clone 212221 (TRAV17, TRAJ57)
CATDGGSEKLVF

SEQ ID NO: 424442 - protein, 14 aa, Homo sapiens
  CDR3 for beta chain variable domain of TCR clone 212221 (TRBV20-1, TRBJ1-1)
CSARDRRTNTEAFF

SEQ ID NO: 424443 - protein, 19 aa, Homo sapiens
  CDR3 for alpha chain variable domain of TCR clone 212222 (TRAV26-1, TRAJ52)
CIVRAHRNAGRTSYGKLTF

SEQ ID NO: 424444 - protein, 15 aa, Homo sapiens
  CDR3 for beta chain variable domain of TCR clone 212222 (TRBV29-1, TRBJ2-1)
CSGRDRKSSYNEQFF

SEQ ID NO: 424445 - protein, 13 aa, Homo sapiens
  CDR3 for alpha chain variable domain of TCR clone 212223 (TRAV20, TRAJ20)
CAVQAGSGYKLSF

SEQ ID NO: 424446 - protein, 18 aa, Homo sapiens
  CDR3 for beta chain variable domain of TCR clone 212223 (TRBV4-1, TRBJ1-5)
CASSQDPRGQGLNQPQHF

SEQ ID NO: 424447 - protein, 16 aa, Homo sapiens
  CDR3 for alpha chain variable domain of TCR clone 212224 (TRAV3, TRAJ21)
CAVRDIDRGNFNKFYF

SEQ ID NO: 424448 - protein, 13 aa, Homo sapiens
  CDR3 for beta chain variable domain of TCR clone 212224 (TRBV27, TRBJ2-7)
CASSVTTGYEQYF

SEQ ID NO: 424449 - protein, 17 aa, Homo sapiens
  CDR3 for alpha chain variable domain of TCR clone 212225 (TRAV3, TRAJ6)
CAVRDGPRSGGSYVPTF

SEQ ID NO: 424450 - protein, 14 aa, Homo sapiens
  CDR3 for beta chain variable domain of TCR clone 212225 (TRBV7-2, TRBJ2-7)
CASSPKTSFYEQYF

SEQ ID NO: 424451 - protein, 14 aa, Homo sapiens
  CDR3 for alpha chain variable domain of TCR clone 212226 (TRAV1-2, TRAJ8)
CAVREDTGFQKLVF

SEQ ID NO: 424452 - protein, 14 aa, Homo sapiens
  CDR3 for beta chain variable domain of TCR clone 212226 (TRBV28, TRBJ2-3)
CASSPPRGVHTQYF

SEQ ID NO: 424453 - protein, 15 aa, Homo sapiens
  CDR3 for alpha chain variable domain of TCR clone 212227 (TRAV3, TRAJ5)
CAVRDLDTGRRALTF

SEQ ID NO: 424454 - protein, 13 aa, Homo sapiens
  CDR3 for beta chain variable domain of TCR clone 212227 (TRBV7-3, TRBJ2-1)
CASSPVAYNEQFF

SEQ ID NO: 424455 - protein, 12 aa, Homo sapiens
  CDR3 for alpha chain variable domain of TCR clone 212228 (TRAV16, TRAJ10)
CYRTGGGNKLTF

SEQ ID NO: 424456 - protein, 14 aa, Homo sapiens
  CDR3 for beta chain variable domain of TCR clone 212228 (TRBV4-2, TRBJ2-5)
CASSQDRGRETQYF

SEQ ID NO: 424457 - protein, 14 aa, Homo sapiens
  CDR3 for alpha chain variable domain of TCR clone 212229 (TRAV20, TRAJ10)
CAVRVEGGGNKLTF

SEQ ID NO: 424458 - protein, 18 aa, Homo sapiens
  CDR3 for beta chain variable domain of TCR clone 212229 (TRBV24-1, TRBJ2-1)
CATSDLMILGRGVHEQFF

SEQ ID NO: 424459 - protein, 14 aa, Homo sapiens
  CDR3 for alpha chain variable domain of TCR clone 212230 (TRAV38-1, TRAJ40)
CALRPTSGTYKYIF

SEQ ID NO: 424460 - protein, 14 aa, Homo sapiens
  CDR3 for beta chain variable domain of TCR clone 212230 (TRBV25-1, TRBJ1-1)
WASTHLGGNTEAFF

SEQ ID NO: 424461 - protein, 14 aa, Homo sapiens
  CDR3 for alpha chain variable domain of TCR clone 212231 (TRAV16, TRAJ17)
CALSGRAAGNKLTF

SEQ ID NO: 424462 - protein, 14 aa, Homo sapiens
  CDR3 for beta chain variable domain of TCR clone 212231 (TRBV7-6, TRBJ2-3)
CASSLGTVTDTQYF

SEQ ID NO: 424463 - protein, 15 aa, Homo sapiens
  CDR3 for alpha chain variable domain of TCR clone 212232 (TRAV21, TRAJ22)
VLSGFSSGSARQLTF

SEQ ID NO: 424464 - protein, 14 aa, Homo sapiens
  CDR3 for beta chain variable domain of TCR clone 212232 (TRBV19, TRBJ1-5)
CASRAPDSFLSQHF

SEQ ID NO: 424465 - protein, 15 aa, Homo sapiens
  CDR3 for alpha chain variable domain of TCR clone 212233 (TRAV2, TRAJ22)
CAVPSRGGSARRLTF

SEQ ID NO: 424466 - protein, 14 aa, Homo sapiens
  CDR3 for beta chain variable domain of TCR clone 212233 (TRBV7-6, TRBJ2-3)
CASSLGTVTDTQYF

SEQ ID NO: 424467 - protein, 15 aa, Homo sapiens
  CDR3 for alpha chain variable domain of TCR clone 212234 (TRAV8-3, TRAJ27)
CAVGPSKPNAGKSTF

SEQ ID NO: 424468 - protein, 13 aa, Homo sapiens
  CDR3 for beta chain variable domain of TCR clone 212234 (TRBV20-1, TRBJ1-1)
CSAPLGGGTEAFF

SEQ ID NO: 424469 - protein, 18 aa, Homo sapiens
  CDR3 for alpha chain variable domain of TCR clone 212235 (TRAV17, TRAJ57)
CFLLLCYGPQGGAEKLVF

SEQ ID NO: 424470 - protein, 14 aa, Homo sapiens
  CDR3 for beta chain variable domain of TCR clone 212235 (TRBV27, TRBJ2-5)
CASSSLKGWETQYF

SEQ ID NO: 424471 - protein, 12 aa, Homo sapiens
  CDR3 for alpha chain variable domain of TCR clone 212236 (TRAV25, TRAJ35)
CAGIGFGNVLHC

SEQ ID NO: 424472 - protein, 12 aa, Homo sapiens
  CDR3 for beta chain variable domain of TCR clone 212236 (TRBV19, TRBJ2-1)
CASSRQGAEQFF

SEQ ID NO: 424473 - protein, 17 aa, Homo sapiens
  CDR3 for alpha chain variable domain of TCR clone 212237 (TRAV8-1, TRAJ43)
CAVTNDMRFGAVTRLTV

SEQ ID NO: 424474 - protein, 17 aa, Homo sapiens
  CDR3 for beta chain variable domain of TCR clone 212237 (TRBV5-4, TRBJ2-1)
CASSSAGGRGPYNEHFF

SEQ ID NO: 424475 - protein, 11 aa, Homo sapiens
  CDR3 for alpha chain variable domain of TCR clone 212238 (TRAV2, TRAJ20)
CAVADDYKLSF

SEQ ID NO: 424476 - protein, 15 aa, Homo sapiens
  CDR3 for beta chain variable domain of TCR clone 212238 (TRBV5-1, TRBJ2-2)
CASSSQGGNTGELFF

SEQ ID NO: 424477 - protein, 12 aa, Homo sapiens
  CDR3 for alpha chain variable domain of TCR clone 212239 (TRAV2, TRAJ24)
CAATDSWGKFQF

SEQ ID NO: 424478 - protein, 16 aa, Homo sapiens
  CDR3 for beta chain variable domain of TCR clone 212239 (TRBV2, TRBJ2-3)
CASSTSVEGVTDTQYF

SEQ ID NO: 424479 - protein, 14 aa, Homo sapiens
  CDR3 for alpha chain variable domain of TCR clone 212240 (TRAV2, TRAJ9)
CAVEDRSGGFKTIF

SEQ ID NO: 424480 - protein, 16 aa, Homo sapiens
  CDR3 for beta chain variable domain of TCR clone 212240 (TRBV7-3, TRBJ2-2)
CASSLKRGTLSGELYF

SEQ ID NO: 424481 - protein, 16 aa, Homo sapiens
  CDR3 for alpha chain variable domain of TCR clone 212241 (TRAV16, TRAJ52)
CALSAAGGTSYGKLTF

SEQ ID NO: 424482 - protein, 15 aa, Homo sapiens
  CDR3 for beta chain variable domain of TCR clone 212241 (TRBV11-3, TRBJ2-3)
CASLKDGREGDTQYF

SEQ ID NO: 424483 - protein, 17 aa, Homo sapiens
  CDR3 for alpha chain variable domain of TCR clone 212242 (TRAV3, TRAJ42)
CAVRDRDYGGSQGNLIF

SEQ ID NO: 424484 - protein, 15 aa, Homo sapiens
  CDR3 for beta chain variable domain of TCR clone 212242 (TRBV7-3, TRBJ2-3)
CASSLTSGVGDTQYF

SEQ ID NO: 424485 - protein, 13 aa, Homo sapiens
  CDR3 for alpha chain variable domain of TCR clone 212243 (TRAV12-3, TRAJ7)
CAMSASGNNRLAF

SEQ ID NO: 424486 - protein, 18 aa, Homo sapiens
  CDR3 for beta chain variable domain of TCR clone 212243 (TRBV2, TRBJ2-3)
CASSEAGGQALGADTQYF

SEQ ID NO: 424487 - protein, 14 aa, Homo sapiens
  CDR3 for alpha chain variable domain of TCR clone 212244 (TRAV27, TRAJ23)
CAGLSYNQGGKLIF

SEQ ID NO: 424488 - protein, 14 aa, Homo sapiens
  CDR3 for beta chain variable domain of TCR clone 212244 (TRBV7-9, TRBJ1-1)
CASSLAGMMTEAFF

SEQ ID NO: 424489 - protein, 16 aa, Homo sapiens
  CDR3 for alpha chain variable domain of TCR clone 212245 (TRAV30, TRAJ24)
CGTEIVVADSWGKFQV

SEQ ID NO: 424490 - protein, 16 aa, Homo sapiens
  CDR3 for beta chain variable domain of TCR clone 212245 (TRBV6-3, TRBJ1-1)
CASTDLGTVPNTEAFF

SEQ ID NO: 424491 - protein, 14 aa, Homo sapiens
  CDR3 for alpha chain variable domain of TCR clone 212246 (TRAV20, TRAJ29)
CAVQAWVGNTPLVF

SEQ ID NO: 424492 - protein, 15 aa, Homo sapiens
  CDR3 for beta chain variable domain of TCR clone 212246 (TRBV29-1, TRBJ2-7)
CGVEFFDRGSYEQDF

SEQ ID NO: 424493 - protein, 14 aa, Homo sapiens
  CDR3 for alpha chain variable domain of TCR clone 212247 (TRAV12-2, TRAJ17)
CAVLFKAAGNKLTF

SEQ ID NO: 424494 - protein, 14 aa, Homo sapiens
  CDR3 for beta chain variable domain of TCR clone 212247 (TRBV7-3, TRBJ1-1)
CASSLKGGDTEAFF

SEQ ID NO: 424495 - protein, 13 aa, Homo sapiens
  CDR3 for alpha chain variable domain of TCR clone 212248 (TRAV8-6, TRAJ9)
RAVWDTGGFKTIF

SEQ ID NO: 424496 - protein, 14 aa, Homo sapiens
  CDR3 for beta chain variable domain of TCR clone 212248 (TRBV2, TRBJ2-1)
CASSEALIYNEQFF

SEQ ID NO: 424497 - protein, 11 aa, Homo sapiens
  CDR3 for alpha chain variable domain of TCR clone 212249 (TRAV3, TRAJ21)
FAVGNFNKFYF

SEQ ID NO: 424498 - protein, 16 aa, Homo sapiens
  CDR3 for beta chain variable domain of TCR clone 212249 (TRBV20-1, TRBJ1-2)
CSASMGQGVANYGYTF

SEQ ID NO: 424499 - protein, 14 aa, Homo sapiens
  CDR3 for alpha chain variable domain of TCR clone 212250 (TRAV12-2, TRAJ13)
CAVKKTGGYQKVTF

SEQ ID NO: 424500 - protein, 17 aa, Homo sapiens
  CDR3 for beta chain variable domain of TCR clone 212250 (TRBV13, TRBJ2-3)
CARSLSRVAGGRNTQYF

SEQ ID NO: 424501 - protein, 14 aa, Homo sapiens
  CDR3 for alpha chain variable domain of TCR clone 212251 (TRAV12-2, TRAJ17)
CAALFKAAGNKLTF

SEQ ID NO: 424502 - protein, 13 aa, Homo sapiens
  CDR3 for beta chain variable domain of TCR clone 212251 (TRBV7-3, TRBJ2-1)
CASSLDSYNEQFF

SEQ ID NO: 424503 - protein, 15 aa, Homo sapiens
  CDR3 for alpha chain variable domain of TCR clone 212252 (TRAV8-2, TRAJ16)
CVVSDGFSDGQKLLF

SEQ ID NO: 424504 - protein, 13 aa, Homo sapiens
  CDR3 for beta chain variable domain of TCR clone 212252 (TRBV20-1, TRBJ1-1)
CSAPPGGQTEAFF

SEQ ID NO: 424505 - protein, 11 aa, Homo sapiens
  CDR3 for alpha chain variable domain of TCR clone 212253 (TRAV1-2, TRAJ31)
CAVNNNARLMF

SEQ ID NO: 424506 - protein, 14 aa, Homo sapiens
  CDR3 for beta chain variable domain of TCR clone 212253 (TRBV7-3, TRBJ2-1)
CASSLSGSYNEQFF

SEQ ID NO: 424507 - protein, 16 aa, Homo sapiens
  CDR3 for alpha chain variable domain of TCR clone 212254 (TRAV12-3, TRAJ53)
CAMSPGSGGSNYKLTF

SEQ ID NO: 424508 - protein, 14 aa, Homo sapiens
  CDR3 for beta chain variable domain of TCR clone 212254 (TRBV7-2, TRBJ1-1)
CASSFLTGTTEAFV

SEQ ID NO: 424509 - protein, 17 aa, Homo sapiens
  CDR3 for alpha chain variable domain of TCR clone 212255 (TRAV3, TRAJ6)
CAVRDGPRAGGSYIPTF

SEQ ID NO: 424510 - protein, 13 aa, Homo sapiens
  CDR3 for beta chain variable domain of TCR clone 212255 (TRBV2, TRBJ2-5)
CASSALRGETQYF

SEQ ID NO: 424511 - protein, 11 aa, Homo sapiens
  CDR3 for alpha chain variable domain of TCR clone 212256 (TRAV16, TRAJ49)
CALRSGNQVYF

SEQ ID NO: 424512 - protein, 18 aa, Homo sapiens
  CDR3 for beta chain variable domain of TCR clone 212256 (TRBV28, TRBJ2-7)
CASSSGLAGVGTSSTSGR

SEQ ID NO: 424513 - protein, 14 aa, Homo sapiens
  CDR3 for alpha chain variable domain of TCR clone 212257 (TRAV2, TRAJ37)
CAVDFTSNTGKLIF

SEQ ID NO: 424514 - protein, 12 aa, Homo sapiens
  CDR3 for beta chain variable domain of TCR clone 212257 (TRBV11-2, TRBJ2-2)
CASSLGGGELFL

SEQ ID NO: 424515 - protein, 11 aa, Homo sapiens
  CDR3 for alpha chain variable domain of TCR clone 212258 (TRAV16, TRAJ33)
CALHSNYQLIW

SEQ ID NO: 424516 - protein, 14 aa, Homo sapiens
  CDR3 for beta chain variable domain of TCR clone 212258 (TRBV7-2, TRBJ1-2)
CASSQTGSTYGYTF

SEQ ID NO: 424517 - protein, 16 aa, Homo sapiens
  CDR3 for alpha chain variable domain of TCR clone 212259 (TRAV30, TRAJ24)
CGTEIVDADSWGKFQF

SEQ ID NO: 424518 - protein, 11 aa, Homo sapiens
  CDR3 for beta chain variable domain of TCR clone 212259 (TRBV19, TRBJ1-1)
CGSSIGSEAFF

SEQ ID NO: 424519 - protein, 14 aa, Homo sapiens
  CDR3 for alpha chain variable domain of TCR clone 212260 (TRAV1-2, TRAJ29)
CAVRELTSATPLVF

SEQ ID NO: 424520 - protein, 15 aa, Homo sapiens
  CDR3 for beta chain variable domain of TCR clone 212260 (TRBV10-2, TRBJ2-6)
CASSEQGTGANVLTF

SEQ ID NO: 424521 - protein, 19 aa, Homo sapiens
  CDR3 for alpha chain variable domain of TCR clone 212261 (TRAV2, TRAJ20)
ILQVREADAAVYRDCKLSF

SEQ ID NO: 424522 - protein, 10 aa, Homo sapiens
  CDR3 for beta chain variable domain of TCR clone 212261 (TRBV20-1, TRBJ2-5)
CSARFETQYF

SEQ ID NO: 424523 - protein, 13 aa, Homo sapiens
  CDR3 for alpha chain variable domain of TCR clone 212262 (TRAV17, TRAJ26)
CASVDNYGQNFVF

SEQ ID NO: 424524 - protein, 16 aa, Homo sapiens
  CDR3 for beta chain variable domain of TCR clone 212262 (TRBV2, TRBJ2-1)
CASSVGGSLSYNEQFF

SEQ ID NO: 424525 - protein, 12 aa, Homo sapiens
  CDR3 for alpha chain variable domain of TCR clone 212263 (TRAV25, TRAJ11)
CAGYSGYSTLTF

SEQ ID NO: 424526 - protein, 18 aa, Homo sapiens
  CDR3 for beta chain variable domain of TCR clone 212263 (TRBV5-4, TRBJ2-3)
CASSPTAGFRPSTDTQYF

SEQ ID NO: 424527 - protein, 15 aa, Homo sapiens
  CDR3 for alpha chain variable domain of TCR clone 212264 (TRAV26-1, TRAJ29)
CIVRVEGAGNTPLVF

SEQ ID NO: 424528 - protein, 13 aa, Homo sapiens
  CDR3 for beta chain variable domain of TCR clone 212264 (TRBV7-2, TRBJ2-2)
CASSSVRAGELFF

SEQ ID NO: 424529 - protein, 13 aa, Homo sapiens
  CDR3 for alpha chain variable domain of TCR clone 212265 (TRAV8-6, TRAJ49)
CAVITNTGNQFYF

SEQ ID NO: 424530 - protein, 15 aa, Homo sapiens
  CDR3 for beta chain variable domain of TCR clone 212265 (TRBV7-6, TRBJ2-1)
CASSSLAGEGNEQFF

SEQ ID NO: 424531 - protein, 10 aa, Homo sapiens
  CDR3 for alpha chain variable domain of TCR clone 212266 (TRAV12-3, TRAJ49)
CAKNDDQFYF

SEQ ID NO: 424532 - protein, 15 aa, Homo sapiens
  CDR3 for beta chain variable domain of TCR clone 212266 (TRBV20-1, TRBJ2-7)
CSARDRVSGMDEQYF

SEQ ID NO: 424533 - protein, 13 aa, Homo sapiens
  CDR3 for alpha chain variable domain of TCR clone 212267 (TRAV26-2, TRAJ43)
CTLRAVNNNDMRF

SEQ ID NO: 424534 - protein, 14 aa, Homo sapiens
  CDR3 for beta chain variable domain of TCR clone 212267 (TRBV20-1, TRBJ1-1)
CSAPTRIGGTEAFF

SEQ ID NO: 424535 - protein, 13 aa, Homo sapiens
  CDR3 for alpha chain variable domain of TCR clone 212268 (TRAV20, TRAJ37)
CAGCSSNTGKLIF

SEQ ID NO: 424536 - protein, 12 aa, Homo sapiens
  CDR3 for beta chain variable domain of TCR clone 212268 (TRBV28, TRBJ2-3)
CASSLYRDTQYF

SEQ ID NO: 424537 - protein, 13 aa, Homo sapiens
  CDR3 for alpha chain variable domain of TCR clone 212269 (TRAV29/DV5, TRAJ31)
CAASRNNNARRMF

SEQ ID NO: 424538 - protein, 14 aa, Homo sapiens
  CDR3 for beta chain variable domain of TCR clone 212269 (TRBV4-1, TRBJ2-2)
CASSQAVNTGELFF

SEQ ID NO: 424539 - protein, 15 aa, Homo sapiens
  CDR3 for alpha chain variable domain of TCR clone 212270 (TRAV8-1, TRAJ23)
CAVSSHYNQGGKLIF

SEQ ID NO: 424540 - protein, 15 aa, Homo sapiens
  CDR3 for beta chain variable domain of TCR clone 212270 (TRBV11-2, TRBJ1-6)
CASTLRGTGNSPLHF

SEQ ID NO: 424541 - protein, 15 aa, Homo sapiens
  CDR3 for alpha chain variable domain of TCR clone 212271 (TRAV3, TRAJ4)
CAVRDRTGGYNKLIF

SEQ ID NO: 424542 - protein, 16 aa, Homo sapiens
  CDR3 for beta chain variable domain of TCR clone 212271 (TRBV27, TRBJ2-2)
CASSSSGVSNTGELFF

SEQ ID NO: 424543 - protein, 14 aa, Homo sapiens
  CDR3 for alpha chain variable domain of TCR clone 212272 (TRAV13-1, TRAJ10)
CAAKEPGGGNKLTF

SEQ ID NO: 424544 - protein, 15 aa, Homo sapiens
  CDR3 for beta chain variable domain of TCR clone 212272 (TRBV7-9, TRBJ2-5)
CASSFKAGREETQYF

SEQ ID NO: 424545 - protein, 14 aa, Homo sapiens
  CDR3 for alpha chain variable domain of TCR clone 212273 (TRAV8-4, TRAJ9)
CAARINTGGFKTIF

SEQ ID NO: 424546 - protein, 13 aa, Homo sapiens
  CDR3 for beta chain variable domain of TCR clone 212273 (TRBV19, TRBJ1-2)
CASSVPGQDGYAF

SEQ ID NO: 424547 - protein, 14 aa, Homo sapiens
  CDR3 for alpha chain variable domain of TCR clone 212274 (TRAV8-6, TRAJ4)
CAVTVSGGYSKLIF

SEQ ID NO: 424548 - protein, 11 aa, Homo sapiens
  CDR3 for beta chain variable domain of TCR clone 212274 (TRBV7-9, TRBJ2-3)
CASSGPDTQYF

SEQ ID NO: 424549 - protein, 15 aa, Homo sapiens
  CDR3 for alpha chain variable domain of TCR clone 212275 (TRAV12-2, TRAJ52)
CAVTSSGTSYGKLTF

SEQ ID NO: 424550 - protein, 15 aa, Homo sapiens
  CDR3 for beta chain variable domain of TCR clone 212275 (TRBV7-2, TRBJ2-1)
CASSPGFISGNEQFF

SEQ ID NO: 424551 - protein, 14 aa, Homo sapiens
  CDR3 for alpha chain variable domain of TCR clone 212276 (TRAV1-2, TRAJ8)
CAVREDTGFQKLVF

SEQ ID NO: 424552 - protein, 13 aa, Homo sapiens
  CDR3 for beta chain variable domain of TCR clone 212276 (TRBV4-2, TRBJ2-2)
CASEDRVTGELFF

SEQ ID NO: 424553 - protein, 12 aa, Homo sapiens
  CDR3 for alpha chain variable domain of TCR clone 212277 (TRAV12-3, TRAJ17)
CAMTLTGNKLTF

SEQ ID NO: 424554 - protein, 15 aa, Homo sapiens
  CDR3 for beta chain variable domain of TCR clone 212277 (TRBV5-1, TRBJ2-3)
CASSYTSGSTDTQYF

SEQ ID NO: 424555 - protein, 14 aa, Homo sapiens
  CDR3 for alpha chain variable domain of TCR clone 212278 (TRAV9-2, TRAJ39)
CALYIYNAGNMPTF

SEQ ID NO: 424556 - protein, 14 aa, Homo sapiens
  CDR3 for beta chain variable domain of TCR clone 212278 (TRBV25-1, TRBJ1-1)
CASTHLGGNTEAFF

SEQ ID NO: 424557 - protein, 14 aa, Homo sapiens
  CDR3 for alpha chain variable domain of TCR clone 212279 (TRAV1-2, TRAJ6)
CAVRSSGGSYIPTF

SEQ ID NO: 424558 - protein, 15 aa, Homo sapiens
  CDR3 for beta chain variable domain of TCR clone 212279 (TRBV7-9, TRBJ1-6)
CASGSPGRGNSPLHF

SEQ ID NO: 424559 - protein, 17 aa, Homo sapiens
  CDR3 for alpha chain variable domain of TCR clone 212280 (TRAV26-2, TRAJ37)
CILRELVGSSNTGKLIF

SEQ ID NO: 424560 - protein, 16 aa, Homo sapiens
  CDR3 for beta chain variable domain of TCR clone 212280 (TRBV6-1, TRBJ2-3)
CASSGNRGRGTDTHYF

SEQ ID NO: 424561 - protein, 15 aa, Homo sapiens
  CDR3 for alpha chain variable domain of TCR clone 212281 (TRAV29/DV5, TRAJ42)
CAAKTDGGSKGNLIS

SEQ ID NO: 424562 - protein, 15 aa, Homo sapiens
  CDR3 for beta chain variable domain of TCR clone 212281 (TRBV5-1, TRBJ2-2)
CASSSQGGNTGELFF

SEQ ID NO: 424563 - protein, 17 aa, Homo sapiens
  CDR3 for alpha chain variable domain of TCR clone 212282 (TRAV26-1, TRAJ11)
CIVRVGQSNSGYSTLTF

SEQ ID NO: 424564 - protein, 15 aa, Homo sapiens
  CDR3 for beta chain variable domain of TCR clone 212282 (TRBV27, TRBJ2-5)
CASSLIPPGGETQYF

SEQ ID NO: 424565 - protein, 13 aa, Homo sapiens
  CDR3 for alpha chain variable domain of TCR clone 212283 (TRAV20, TRAJ3)
CARRYCSASKIIF

SEQ ID NO: 424566 - protein, 12 aa, Homo sapiens
  CDR3 for beta chain variable domain of TCR clone 212283 (TRBV28, TRBJ2-1)
CASSFRGNEQFF

SEQ ID NO: 424567 - protein, 12 aa, Homo sapiens
  CDR3 for alpha chain variable domain of TCR clone 212284 (TRAV12-3, TRAJ17)
CAMTLTGNKLTF

SEQ ID NO: 424568 - protein, 15 aa, Homo sapiens
  CDR3 for beta chain variable domain of TCR clone 212284 (TRBV7-9, TRBJ1-6)
CASSSPGRGNSTLHF

SEQ ID NO: 424569 - protein, 14 aa, Homo sapiens
  CDR3 for alpha chain variable domain of TCR clone 212285 (TRAV1-2, TRAJ8)
CAVREDTGFQKLAF

SEQ ID NO: 424570 - protein, 15 aa, Homo sapiens
  CDR3 for beta chain variable domain of TCR clone 212285 (TRBV6-3, TRBJ2-7)
CASSSHGTVFYEQYF

SEQ ID NO: 424571 - protein, 15 aa, Homo sapiens
  CDR3 for alpha chain variable domain of TCR clone 212286 (TRAV13-1, TRAJ52)
CAATSPRTSNGKLTF

SEQ ID NO: 424572 - protein, 16 aa, Homo sapiens
  CDR3 for beta chain variable domain of TCR clone 212286 (TRBV7-3, TRBJ2-2)
CASSLKRGTLSGELFF

SEQ ID NO: 424573 - protein, 14 aa, Homo sapiens
  CDR3 for alpha chain variable domain of TCR clone 212287 (TRAV12-2, TRAJ36)
CAVNPPTGATNLFF

SEQ ID NO: 424574 - protein, 13 aa, Homo sapiens
  CDR3 for beta chain variable domain of TCR clone 212287 (TRBV20-1, TRBJ1-6)
CSAPTGLGSPLHF

SEQ ID NO: 424575 - protein, 15 aa, Homo sapiens
  CDR3 for alpha chain variable domain of TCR clone 212288 (TRAV1-2, TRAJ28)
CAVQYSGAGSYQLTF

SEQ ID NO: 424576 - protein, 13 aa, Homo sapiens
  CDR3 for beta chain variable domain of TCR clone 212288 (TRBV20-1, TRBJ2-7)
CSATHASGYEQYF

SEQ ID NO: 424577 - protein, 16 aa, Homo sapiens
  CDR3 for alpha chain variable domain of TCR clone 212289 (TRAV30, TRAJ24)
CGTEIVAADSWGKFQF

SEQ ID NO: 424578 - protein, 15 aa, Homo sapiens
  CDR3 for beta chain variable domain of TCR clone 212289 (TRBV11-3, TRBJ2-3)
CASLKDGREGDTQYF

SEQ ID NO: 424579 - protein, 14 aa, Homo sapiens
  CDR3 for alpha chain variable domain of TCR clone 212290 (TRAV12-2, TRAJ13)
CAVKKTGGYQKGTF

SEQ ID NO: 424580 - protein, 15 aa, Homo sapiens
  CDR3 for beta chain variable domain of TCR clone 212290 (TRBV20-1, TRBJ2-1)
CSARGIGGTYNEQFF

SEQ ID NO: 424581 - protein, 15 aa, Homo sapiens
  CDR3 for alpha chain variable domain of TCR clone 212291 (TRAV3, TRAJ5)
CAVRDLDTGRIALTF

SEQ ID NO: 424582 - protein, 13 aa, Homo sapiens
  CDR3 for beta chain variable domain of TCR clone 212291 (TRBV12-4, TRBJ2-7)
CARSPTETYEQYF

SEQ ID NO: 424583 - protein, 15 aa, Homo sapiens
  CDR3 for alpha chain variable domain of TCR clone 212292 (TRAV8-3, TRAJ44)
CAVGAGAGTAGKLTF

SEQ ID NO: 424584 - protein, 12 aa, Homo sapiens
  CDR3 for beta chain variable domain of TCR clone 212292 (TRBV7-8, TRBJ2-4)
CASSLGGNIQYF

SEQ ID NO: 424585 - protein, 17 aa, Homo sapiens
  CDR3 for alpha chain variable domain of TCR clone 212293 (TRAV23/DV6, TRAJ57)
CAASSTLSQGGAEKMVF

SEQ ID NO: 424586 - protein, 14 aa, Homo sapiens
  CDR3 for beta chain variable domain of TCR clone 212293 (TRBV25-1, TRBJ1-1)
CASTHLGGNTEAFF

SEQ ID NO: 424587 - protein, 16 aa, Homo sapiens
  CDR3 for alpha chain variable domain of TCR clone 212294 (TRAV30, TRAJ24)
CGTEIVDADSWGKFQF

SEQ ID NO: 424588 - protein, 15 aa, Homo sapiens
  CDR3 for beta chain variable domain of TCR clone 212294 (TRBV6-3, TRBJ2-7)
CASSSPGTVFYEQYV

SEQ ID NO: 424589 - protein, 14 aa, Homo sapiens
  CDR3 for alpha chain variable domain of TCR clone 212295 (TRAV27, TRAJ15)
CAGFDNQAGTALIF

SEQ ID NO: 424590 - protein, 15 aa, Homo sapiens
  CDR3 for beta chain variable domain of TCR clone 212295 (TRBV6-1, TRBJ2-3)
CASSERGGITDTQYF

SEQ ID NO: 424591 - protein, 20 aa, Homo sapiens
  CDR3 for alpha chain variable domain of TCR clone 212296 (TRAV1-2, TRAJ10)
CFLPLCCEGVLTGGGNKLTF

SEQ ID NO: 424592 - protein, 12 aa, Homo sapiens
  CDR3 for beta chain variable domain of TCR clone 212296 (TRBV7-8, TRBJ2-7)
CASSLGDREQYF

SEQ ID NO: 424593 - protein, 13 aa, Homo sapiens
  CDR3 for alpha chain variable domain of TCR clone 212297 (TRAV26-2, TRAJ43)
CILRAVNNNDMRF

SEQ ID NO: 424594 - protein, 15 aa, Homo sapiens
  CDR3 for beta chain variable domain of TCR clone 212297 (TRBV7-2, TRBJ2-1)
CASTHGTGIYNEHFF

SEQ ID NO: 424595 - protein, 15 aa, Homo sapiens
  CDR3 for alpha chain variable domain of TCR clone 212298 (TRAV27, TRAJ38)
CAARRNAGNNRKMIW

SEQ ID NO: 424596 - protein, 13 aa, Homo sapiens
  CDR3 for beta chain variable domain of TCR clone 212298 (TRBV12-5, TRBJ2-3)
CASGDGQSDTQYF

SEQ ID NO: 424597 - protein, 14 aa, Homo sapiens
  CDR3 for alpha chain variable domain of TCR clone 212299 (TRAV8-2, TRAJ45)
CVVSAGGGADRLTF

SEQ ID NO: 424598 - protein, 12 aa, Homo sapiens
  CDR3 for beta chain variable domain of TCR clone 212299 (TRBV12-4, TRBJ2-1)
CASSLVRVEQFF

SEQ ID NO: 424599 - protein, 12 aa, Homo sapiens
  CDR3 for alpha chain variable domain of TCR clone 212300 (TRAV26-2, TRAJ47)
CILVAYGNKLVF

SEQ ID NO: 424600 - protein, 16 aa, Homo sapiens
  CDR3 for beta chain variable domain of TCR clone 212300 (TRBV18, TRBJ1-4)
CASSPLVGDRAEKLFF

SEQ ID NO: 424601 - protein, 14 aa, Homo sapiens
  CDR3 for alpha chain variable domain of TCR clone 212301 (TRAV2, TRAJ3)
CAVDRYSSASKIIF

SEQ ID NO: 424602 - protein, 16 aa, Homo sapiens
  CDR3 for beta chain variable domain of TCR clone 212301 (TRBV20-1, TRBJ1-5)
CSAELPGQQTNQPQHF

SEQ ID NO: 424603 - protein, 14 aa, Homo sapiens
  CDR3 for alpha chain variable domain of TCR clone 212302 (TRAV35, TRAJ33)
CAGSYQDSNYQLIW

SEQ ID NO: 424604 - protein, 15 aa, Homo sapiens
  CDR3 for beta chain variable domain of TCR clone 212302 (TRBV5-1, TRBJ1-4)
FAPAAWKDGNEKLFF

SEQ ID NO: 424605 - protein, 16 aa, Homo sapiens
  CDR3 for alpha chain variable domain of TCR clone 212303 (TRAV30, TRAJ24)
CGTEIVDAHSWGKFQF

SEQ ID NO: 424606 - protein, 15 aa, Homo sapiens
  CDR3 for beta chain variable domain of TCR clone 212303 (TRBV20-1, TRBJ2-7)
CSARGPLAGGREQYF

SEQ ID NO: 424607 - protein, 14 aa, Homo sapiens
  CDR3 for alpha chain variable domain of TCR clone 212304 (TRAV17, TRAJ39)
CATDPNNAGNMLTF

SEQ ID NO: 424608 - protein, 14 aa, Homo sapiens
  CDR3 for beta chain variable domain of TCR clone 212304 (TRBV25-1, TRBJ1-1)
CASTHLGGNTEAFF

SEQ ID NO: 424609 - protein, 16 aa, Homo sapiens
  CDR3 for alpha chain variable domain of TCR clone 212305 (TRAV16, TRAJ42)
CARKMNYGGSQGNIIF

SEQ ID NO: 424610 - protein, 15 aa, Homo sapiens
  CDR3 for beta chain variable domain of TCR clone 212305 (TRBV20-1, TRBJ2-7)
CSAREGRDSLYEQYF

SEQ ID NO: 424611 - protein, 13 aa, Homo sapiens
  CDR3 for alpha chain variable domain of TCR clone 212306 (TRAV2, TRAJ15)
CAVEAQAGTALIF

SEQ ID NO: 424612 - protein, 14 aa, Homo sapiens
  CDR3 for beta chain variable domain of TCR clone 212306 (TRBV6-5, TRBJ2-7)
CASVASGGANEQYF

SEQ ID NO: 424613 - protein, 14 aa, Homo sapiens
  CDR3 for alpha chain variable domain of TCR clone 212307 (TRAV23/DV6, TRAJ39)
CAATREEAGNMLTF

SEQ ID NO: 424614 - protein, 13 aa, Homo sapiens
  CDR3 for beta chain variable domain of TCR clone 212307 (TRBV12-4, TRBJ2-1)
CASSLVPGNEQFF

SEQ ID NO: 424615 - protein, 15 aa, Homo sapiens
  CDR3 for alpha chain variable domain of TCR clone 212308 (TRAV12-3, TRAJ42)
CAMSGHGGSQGNLIF

SEQ ID NO: 424616 - protein, 15 aa, Homo sapiens
  CDR3 for beta chain variable domain of TCR clone 212308 (TRBV5-5, TRBJ1-5)
CASSSTPGSNQPQHF

SEQ ID NO: 424617 - protein, 12 aa, Homo sapiens
  CDR3 for alpha chain variable domain of TCR clone 212309 (TRAV38-1, TRAJ32)
CAPLGATNKLIF

SEQ ID NO: 424618 - protein, 14 aa, Homo sapiens
  CDR3 for beta chain variable domain of TCR clone 212309 (TRBV29-1, TRBJ2-5)
CSVETRGSGETQYF

SEQ ID NO: 424619 - protein, 16 aa, Homo sapiens
  CDR3 for alpha chain variable domain of TCR clone 212310 (TRAV13-1, TRAJ48)
CAASISGNFGNEKLTF

SEQ ID NO: 424620 - protein, 16 aa, Homo sapiens
  CDR3 for beta chain variable domain of TCR clone 212310 (TRBV7-2, TRBJ2-6)
CASSERRASGANVPTF

SEQ ID NO: 424621 - protein, 13 aa, Homo sapiens
  CDR3 for alpha chain variable domain of TCR clone 212311 (TRAV2, TRAJ21)
CAVEDRNFNKFYF

SEQ ID NO: 424622 - protein, 14 aa, Homo sapiens
  CDR3 for beta chain variable domain of TCR clone 212311 (TRBV18, TRBJ1-2)
CASSPDRVVYGYTF

SEQ ID NO: 424623 - protein, 16 aa, Homo sapiens
  CDR3 for alpha chain variable domain of TCR clone 212312 (TRAV12-3, TRAJ53)
CAMSVGSGGSNYKLTF

SEQ ID NO: 424624 - protein, 12 aa, Homo sapiens
  CDR3 for beta chain variable domain of TCR clone 212312 (TRBV12-4, TRBJ2-1)
CASSPGRNEQFV

SEQ ID NO: 424625 - protein, 18 aa, Homo sapiens
  CDR3 for alpha chain variable domain of TCR clone 212313 (TRAV29/DV5, TRAJ52)
CGAGFRGAGGTSYGKLTF

SEQ ID NO: 424626 - protein, 16 aa, Homo sapiens
  CDR3 for beta chain variable domain of TCR clone 212313 (TRBV7-3, TRBJ2-2)
CASSLKRGTLSGELFF

SEQ ID NO: 424627 - protein, 13 aa, Homo sapiens
  CDR3 for alpha chain variable domain of TCR clone 212314 (TRAV8-4, TRAJ49)
CAVSDSTGNQFYF

SEQ ID NO: 424628 - protein, 13 aa, Homo sapiens
  CDR3 for beta chain variable domain of TCR clone 212314 (TRBV7-9, TRBJ2-3)
CASSPGSTDTQYF

SEQ ID NO: 424629 - protein, 14 aa, Homo sapiens
  CDR3 for alpha chain variable domain of TCR clone 212315 (TRAV12-3, TRAJ9)
CAMSPNTGGFKTIF

SEQ ID NO: 424630 - protein, 16 aa, Homo sapiens
  CDR3 for beta chain variable domain of TCR clone 212315 (TRBV5-5, TRBJ1-2)
CASSPTWGRGLYGYTF

SEQ ID NO: 424631 - protein, 18 aa, Homo sapiens
  CDR3 for alpha chain variable domain of TCR clone 212316 (TRAV21, TRAJ52)
CSVRPSPAGGTSYGKLTF

SEQ ID NO: 424632 - protein, 17 aa, Homo sapiens
  CDR3 for beta chain variable domain of TCR clone 212316 (TRBV13, TRBJ2-3)
CASSLSRVVGGRNTQYF

SEQ ID NO: 424633 - protein, 14 aa, Homo sapiens
  CDR3 for alpha chain variable domain of TCR clone 212317 (TRAV12-2, TRAJ52)
CRCAGGTSHGKLTF

SEQ ID NO: 424634 - protein, 13 aa, Homo sapiens
  CDR3 for beta chain variable domain of TCR clone 212317 (TRBV7-3, TRBJ1-1)
CASSQDWGAEAFF

SEQ ID NO: 424635 - protein, 15 aa, Homo sapiens
  CDR3 for alpha chain variable domain of TCR clone 212318 (TRAV26-1, TRAJ17)
CIVRVVKDAGNKLTF

SEQ ID NO: 424636 - protein, 16 aa, Homo sapiens
  CDR3 for beta chain variable domain of TCR clone 212318 (TRBV7-9, TRBJ2-1)
CASSLVSGPSYNEQFF

SEQ ID NO: 424637 - protein, 15 aa, Homo sapiens
  CDR3 for alpha chain variable domain of TCR clone 212319 (TRAV17, TRAJ56)
CATDANTGANSKQTF

SEQ ID NO: 424638 - protein, 14 aa, Homo sapiens
  CDR3 for beta chain variable domain of TCR clone 212319 (TRBV19, TRBJ1-5)
CASSLGTGGQPQHF

SEQ ID NO: 424639 - protein, 12 aa, Homo sapiens
  CDR3 for alpha chain variable domain of TCR clone 212320 (TRAV21, TRAJ13)
PGPSGGYQKVTF

SEQ ID NO: 424640 - protein, 16 aa, Homo sapiens
  CDR3 for beta chain variable domain of TCR clone 212320 (TRBV4-1, TRBJ2-7)
CASSQNDRDNSYEQYF

SEQ ID NO: 424641 - protein, 14 aa, Homo sapiens
  CDR3 for alpha chain variable domain of TCR clone 212321 (TRAV12-2, TRAJ53)
CAVKGGGSNYKLTF

SEQ ID NO: 424642 - protein, 17 aa, Homo sapiens
  CDR3 for beta chain variable domain of TCR clone 212321 (TRBV7-2, TRBJ1-4)
CASSCKAGPTTNEKLFF

SEQ ID NO: 424643 - protein, 16 aa, Homo sapiens
  CDR3 for alpha chain variable domain of TCR clone 212322 (TRAV12-3, TRAJ53)
CAMSVGSGGSNYKLTF

SEQ ID NO: 424644 - protein, 13 aa, Homo sapiens
  CDR3 for beta chain variable domain of TCR clone 212322 (TRBV7-6, TRBJ1-2)
CASSLVADYGYTC

SEQ ID NO: 424645 - protein, 14 aa, Homo sapiens
  CDR3 for alpha chain variable domain of TCR clone 212323 (TRAV1-2, TRAJ16)
CAVNRFSDVQKLLF

SEQ ID NO: 424646 - protein, 14 aa, Homo sapiens
  CDR3 for beta chain variable domain of TCR clone 212323 (TRBV2, TRBJ2-1)
CASSDRAYYNEQFF

SEQ ID NO: 424647 - protein, 15 aa, Homo sapiens
  CDR3 for alpha chain variable domain of TCR clone 212324 (TRAV8-3, TRAJ27)
CAVGPSKTNAGKSTF

SEQ ID NO: 424648 - protein, 14 aa, Homo sapiens
  CDR3 for beta chain variable domain of TCR clone 212324 (TRBV19, TRBJ2-7)
CASTVQGRPYEQYF

SEQ ID NO: 424649 - protein, 15 aa, Homo sapiens
  CDR3 for alpha chain variable domain of TCR clone 212325 (TRAV8-3, TRAJ40)
CAAPSLGSGTYKSIF

SEQ ID NO: 424650 - protein, 12 aa, Homo sapiens
  CDR3 for beta chain variable domain of TCR clone 212325 (TRBV11-2, TRBJ2-2)
CASSLGGGELFF

SEQ ID NO: 424651 - protein, 14 aa, Homo sapiens
  CDR3 for alpha chain variable domain of TCR clone 212326 (TRAV1-2, TRAJ16)
CAVNRLSDGQKLLF

SEQ ID NO: 424652 - protein, 13 aa, Homo sapiens
  CDR3 for beta chain variable domain of TCR clone 212326 (TRBV20-1, TRBJ1-1)
CSARGGGNTEAFF

SEQ ID NO: 424653 - protein, 12 aa, Homo sapiens
  CDR3 for alpha chain variable domain of TCR clone 212327 (TRAV2, TRAJ26)
CAGSPGRLWSEF

SEQ ID NO: 424654 - protein, 16 aa, Homo sapiens
  CDR3 for beta chain variable domain of TCR clone 212327 (TRBV13, TRBJ2-2)
CASSPWTGEHTGELFF

SEQ ID NO: 424655 - protein, 12 aa, Homo sapiens
  CDR3 for alpha chain variable domain of TCR clone 212328 (TRAV12-1, TRAJ40)
CVVYSGTYKYIF

SEQ ID NO: 424656 - protein, 12 aa, Homo sapiens
  CDR3 for beta chain variable domain of TCR clone 212328 (TRBV11-2, TRBJ2-3)
GASRGAPNKQYF

SEQ ID NO: 424657 - protein, 16 aa, Homo sapiens
  CDR3 for alpha chain variable domain of TCR clone 212329 (TRAV36/DV7, TRAJ33)
WRPGNKVQDSNYQLIW

SEQ ID NO: 424658 - protein, 13 aa, Homo sapiens
  CDR3 for beta chain variable domain of TCR clone 212329 (TRBV9, TRBJ2-1)
CASSPSGGNEQFF

SEQ ID NO: 424659 - protein, 14 aa, Homo sapiens
  CDR3 for alpha chain variable domain of TCR clone 212330 (TRAV8-3, TRAJ35)
CAVGARGFGNVRHC

SEQ ID NO: 424660 - protein, 13 aa, Homo sapiens
  CDR3 for beta chain variable domain of TCR clone 212330 (TRBV4-2, TRBJ1-1)
CASSQAGNTEAFF

SEQ ID NO: 424661 - protein, 16 aa, Homo sapiens
  CDR3 for alpha chain variable domain of TCR clone 212331 (TRAV30, TRAJ57)
CGTGWAPQGGSEKMVF

SEQ ID NO: 424662 - protein, 14 aa, Homo sapiens
  CDR3 for beta chain variable domain of TCR clone 212331 (TRBV18, TRBJ1-1)
CASSPGFQGVEAFF

SEQ ID NO: 424663 - protein, 12 aa, Homo sapiens
  CDR3 for alpha chain variable domain of TCR clone 212332 (TRAV13-1, TRAJ16)
CAAVSDGQKLLF

SEQ ID NO: 424664 - protein, 15 aa, Homo sapiens
  CDR3 for beta chain variable domain of TCR clone 212332 (TRBV7-8, TRBJ2-3)
CASSLSADSGGAQYF

SEQ ID NO: 424665 - protein, 15 aa, Homo sapiens
  CDR3 for alpha chain variable domain of TCR clone 212333 (TRAV25, TRAJ52)
CAGRPGGTSYGKLTF

SEQ ID NO: 424666 - protein, 17 aa, Homo sapiens
  CDR3 for beta chain variable domain of TCR clone 212333 (TRBV7-8, TRBJ2-6)
CASSAGIGGAGANDLTF

SEQ ID NO: 424667 - protein, 13 aa, Homo sapiens
  CDR3 for alpha chain variable domain of TCR clone 212334 (TRAV27, TRAJ18)
CAGRGSTLGRLYF

SEQ ID NO: 424668 - protein, 13 aa, Homo sapiens
  CDR3 for beta chain variable domain of TCR clone 212334 (TRBV4-1, TRBJ2-7)
CASSQGQAYEQYF

SEQ ID NO: 424669 - protein, 10 aa, Homo sapiens
  CDR3 for alpha chain variable domain of TCR clone 212335 (TRAV5, TRAJ34)
CAEDTDKLIF

SEQ ID NO: 424670 - protein, 12 aa, Homo sapiens
  CDR3 for beta chain variable domain of TCR clone 212335 (TRBV11-2, TRBJ2-2)
CASSLGGGELFV

SEQ ID NO: 424671 - protein, 14 aa, Homo sapiens
  CDR3 for alpha chain variable domain of TCR clone 212336 (TRAV4, TRAJ39)
CLVGVGNAGNMLTF

SEQ ID NO: 424672 - protein, 15 aa, Homo sapiens
  CDR3 for beta chain variable domain of TCR clone 212336 (TRBV20-1, TRBJ2-7)
CSARDRVSGMDEQYF

SEQ ID NO: 424673 - protein, 11 aa, Homo sapiens
  CDR3 for alpha chain variable domain of TCR clone 212337 (TRAV1-1, TRAJ23)
CAVRQGGKLIF

SEQ ID NO: 424674 - protein, 12 aa, Homo sapiens
  CDR3 for beta chain variable domain of TCR clone 212337 (TRBV27, TRBJ2-7)
CASSGGFYEQYF

SEQ ID NO: 424675 - protein, 15 aa, Homo sapiens
  CDR3 for alpha chain variable domain of TCR clone 212338 (TRAV23/DV6, TRAJ44)
CAARTLTGTASKLTF

SEQ ID NO: 424676 - protein, 15 aa, Homo sapiens
  CDR3 for beta chain variable domain of TCR clone 212338 (TRBV18, TRBJ2-7)
CASSPLQGRTYEQYF

SEQ ID NO: 424677 - protein, 11 aa, Homo sapiens
  CDR3 for alpha chain variable domain of TCR clone 212339 (TRAV12-1, TRAJ30)
CVVNGQDKIIF

SEQ ID NO: 424678 - protein, 12 aa, Homo sapiens
  CDR3 for beta chain variable domain of TCR clone 212339 (TRBV27, TRBJ2-2)
CANKLFTGELFF

SEQ ID NO: 424679 - protein, 12 aa, Homo sapiens
  CDR3 for alpha chain variable domain of TCR clone 212340 (TRAV30, TRAJ43)
CGTEERGNDMRF

SEQ ID NO: 424680 - protein, 13 aa, Homo sapiens
  CDR3 for beta chain variable domain of TCR clone 212340 (TRBV7-2, TRBJ2-7)
CASSFSQGYEQYF

SEQ ID NO: 424681 - protein, 15 aa, Homo sapiens
  CDR3 for alpha chain variable domain of TCR clone 212341 (TRAV8-3, TRAJ27)
CAVGPSKTNAGKSTF

SEQ ID NO: 424682 - protein, 15 aa, Homo sapiens
  CDR3 for beta chain variable domain of TCR clone 212341 (TRBV4-1, TRBJ2-3)
CASRSTRAGTDTQYF

SEQ ID NO: 424683 - protein, 14 aa, Homo sapiens
  CDR3 for alpha chain variable domain of TCR clone 212342 (TRAV12-2, TRAJ17)
CAALFKAAGNKLTF

SEQ ID NO: 424684 - protein, 14 aa, Homo sapiens
  CDR3 for beta chain variable domain of TCR clone 212342 (TRBV7-6, TRBJ2-3)
CASSLGTVTDTQYF

SEQ ID NO: 424685 - protein, 16 aa, Homo sapiens
  CDR3 for alpha chain variable domain of TCR clone 212343 (TRAV8-3, TRAJ10)
CAVGPGVTGGGNKLTF

SEQ ID NO: 424686 - protein, 13 aa, Homo sapiens
  CDR3 for beta chain variable domain of TCR clone 212343 (TRBV18, TRBJ1-1)
CPSSPGPSGEAFF

SEQ ID NO: 424687 - protein, 16 aa, Homo sapiens
  CDR3 for alpha chain variable domain of TCR clone 212344 (TRAV38-1, TRAJ37)
CAFKGDGSLNTGKLIF

SEQ ID NO: 424688 - protein, 13 aa, Homo sapiens
  CDR3 for beta chain variable domain of TCR clone 212344 (TRBV12-4, TRBJ2-5)
CASSLFRRETQYF

SEQ ID NO: 424689 - protein, 11 aa, Homo sapiens
  CDR3 for alpha chain variable domain of TCR clone 212345 (TRAV6, TRAJ41)
CALNSGYALNF

SEQ ID NO: 424690 - protein, 15 aa, Homo sapiens
  CDR3 for beta chain variable domain of TCR clone 212345 (TRBV20-1, TRBJ1-5)
CSASKNGQRNQPQHF

SEQ ID NO: 424691 - protein, 14 aa, Homo sapiens
  CDR3 for alpha chain variable domain of TCR clone 212346 (TRAV1-2, TRAJ16)
GAVNRFSDGQKLLF

SEQ ID NO: 424692 - protein, 15 aa, Homo sapiens
  CDR3 for beta chain variable domain of TCR clone 212346 (TRBV9, TRBJ1-6)
CASSVAGTGDSTLHF

SEQ ID NO: 424693 - protein, 11 aa, Homo sapiens
  CDR3 for alpha chain variable domain of TCR clone 212347 (TRAV12-1, TRAJ30)
CVVNGQDKIIF

SEQ ID NO: 424694 - protein, 20 aa, Homo sapiens
  CDR3 for beta chain variable domain of TCR clone 212347 (TRBV7-8, TRBJ2-2)
CASSHLFPGPTIHITGELFF

SEQ ID NO: 424695 - protein, 14 aa, Homo sapiens
  CDR3 for alpha chain variable domain of TCR clone 212348 (TRAV1-2, TRAJ8)
CAVREDTGFQKLVF

SEQ ID NO: 424696 - protein, 13 aa, Homo sapiens
  CDR3 for beta chain variable domain of TCR clone 212348 (TRBV27, TRBJ2-7)
CASSVTTGYEQYF

SEQ ID NO: 424697 - protein, 14 aa, Homo sapiens
  CDR3 for alpha chain variable domain of TCR clone 212349 (TRAV35, TRAJ40)
CAGSTTSGTYKYIF

SEQ ID NO: 424698 - protein, 12 aa, Homo sapiens
  CDR3 for beta chain variable domain of TCR clone 212349 (TRBV11-2, TRBJ2-2)
CASSLGGGELFF

SEQ ID NO: 424699 - protein, 14 aa, Homo sapiens
  CDR3 for alpha chain variable domain of TCR clone 212350 (TRAV12-2, TRAJ5)
CAVNRSTGRRALTF

SEQ ID NO: 424700 - protein, 12 aa, Homo sapiens
  CDR3 for beta chain variable domain of TCR clone 212350 (TRBV19, TRBJ1-5)
CASSIAQQPQNF

SEQ ID NO: 424701 - protein, 14 aa, Homo sapiens
  CDR3 for alpha chain variable domain of TCR clone 212351 (TRAV8-3, TRAJ4)
CAVGASGCYNKLIF

SEQ ID NO: 424702 - protein, 16 aa, Homo sapiens
  CDR3 for beta chain variable domain of TCR clone 212351 (TRBV19, TRBJ2-2)
CASSPSGGLNTGELFF

SEQ ID NO: 424703 - protein, 14 aa, Homo sapiens
  CDR3 for alpha chain variable domain of TCR clone 212352 (TRAV1-2, TRAJ8)
CAVREDTGFQKLVC

SEQ ID NO: 424704 - protein, 14 aa, Homo sapiens
  CDR3 for beta chain variable domain of TCR clone 212352 (TRBV18, TRBJ2-7)
CASSPRGGAYEQYF

SEQ ID NO: 424705 - protein, 13 aa, Homo sapiens
  CDR3 for alpha chain variable domain of TCR clone 212353 (TRAV12-3, TRAJ9)
CAMRNTGGFKTIF

SEQ ID NO: 424706 - protein, 14 aa, Homo sapiens
  CDR3 for beta chain variable domain of TCR clone 212353 (TRBV19, TRBJ1-2)
CASSRQGSSIGYTF

SEQ ID NO: 424707 - protein, 14 aa, Homo sapiens
  CDR3 for alpha chain variable domain of TCR clone 212354 (TRAV23/DV6, TRAJ23)
CAAGPYHQGGKLIF

SEQ ID NO: 424708 - protein, 17 aa, Homo sapiens
  CDR3 for beta chain variable domain of TCR clone 212354 (TRBV4-2, TRBJ1-1)
CASSQVATGGMNTEAFF

SEQ ID NO: 424709 - protein, 12 aa, Homo sapiens
  CDR3 for alpha chain variable domain of TCR clone 212355 (TRAV9-2, TRAJ5)
CSLSPGRRALTF

SEQ ID NO: 424710 - protein, 12 aa, Homo sapiens
  CDR3 for beta chain variable domain of TCR clone 212355 (TRBV29-1, TRBJ2-3)
CSVTGGADTQYF

SEQ ID NO: 424711 - protein, 17 aa, Homo sapiens
  CDR3 for alpha chain variable domain of TCR clone 212356 (TRAV3, TRAJ6)
CAVRDGPKAGGSYIPTF

SEQ ID NO: 424712 - protein, 15 aa, Homo sapiens
  CDR3 for beta chain variable domain of TCR clone 212356 (TRBV11-3, TRBJ2-7)
CASSPGPASSYEQYF

SEQ ID NO: 424713 - protein, 18 aa, Homo sapiens
  CDR3 for alpha chain variable domain of TCR clone 212357 (TRAV4, TRAJ12)
CCVLLPRGRLYSSYKLIF

SEQ ID NO: 424714 - protein, 10 aa, Homo sapiens
  CDR3 for beta chain variable domain of TCR clone 212357 (TRBV12-4, TRBJ2-2)
CASSLGVRHT

SEQ ID NO: 424715 - protein, 19 aa, Homo sapiens
  CDR3 for alpha chain variable domain of TCR clone 212358 (TRAV27, TRAJ49)
TAAQPGDIGLYPTSNQFYF

SEQ ID NO: 424716 - protein, 14 aa, Homo sapiens
  CDR3 for beta chain variable domain of TCR clone 212358 (TRBV9, TRBJ2-3)
CASSNDWGRDTQYF

SEQ ID NO: 424717 - protein, 15 aa, Homo sapiens
  CDR3 for alpha chain variable domain of TCR clone 212359 (TRAV9-2, TRAJ57)
CALRPNQVGSEKLVF

SEQ ID NO: 424718 - protein, 17 aa, Homo sapiens
  CDR3 for beta chain variable domain of TCR clone 212359 (TRBV20-1, TRBJ2-1)
CSAPPRLAGTRYNEQFF

SEQ ID NO: 424719 - protein, 14 aa, Homo sapiens
  CDR3 for alpha chain variable domain of TCR clone 212360 (TRAV14/DV4, TRAJ54)
CAMREAPGAQKLVF

SEQ ID NO: 424720 - protein, 18 aa, Homo sapiens
  CDR3 for beta chain variable domain of TCR clone 212360 (TRBV18, TRBJ2-3)
CASSYTSGAAGGTDTQYF

SEQ ID NO: 424721 - protein, 14 aa, Homo sapiens
  CDR3 for alpha chain variable domain of TCR clone 212361 (TRAV14/DV4, TRAJ15)
CAMSRDQAGTALIF

SEQ ID NO: 424722 - protein, 11 aa, Homo sapiens
  CDR3 for beta chain variable domain of TCR clone 212361 (TRBV7-2, TRBJ2-7)
CASSSGLWQYF

SEQ ID NO: 424723 - protein, 15 aa, Homo sapiens
  CDR3 for alpha chain variable domain of TCR clone 212362 (TRAV2, TRAJ15)
CAAGGPNQAGTALIF

SEQ ID NO: 424724 - protein, 13 aa, Homo sapiens
  CDR3 for beta chain variable domain of TCR clone 212362 (TRBV2, TRBJ1-5)
CATAGPGKQPQHF

SEQ ID NO: 424725 - protein, 13 aa, Homo sapiens
  CDR3 for alpha chain variable domain of TCR clone 212363 (TRAV3, TRAJ8)
CAVRFTGFQKLVF

SEQ ID NO: 424726 - protein, 16 aa, Homo sapiens
  CDR3 for beta chain variable domain of TCR clone 212363 (TRBV9, TRBJ2-3)
CASSGTSGKDTDTQYF

SEQ ID NO: 424727 - protein, 16 aa, Homo sapiens
  CDR3 for alpha chain variable domain of TCR clone 212364 (TRAV3, TRAJ4)
CAVRPSPSGGYKKLIF

SEQ ID NO: 424728 - protein, 12 aa, Homo sapiens
  CDR3 for beta chain variable domain of TCR clone 212364 (TRBV7-9, TRBJ1-5)
CASSPQGQPQHF

SEQ ID NO: 424729 - protein, 15 aa, Homo sapiens
  CDR3 for alpha chain variable domain of TCR clone 212365 (TRAV1-1, TRAJ23)
CAVRVCYNQGGKLIF

SEQ ID NO: 424730 - protein, 13 aa, Homo sapiens
  CDR3 for beta chain variable domain of TCR clone 212365 (TRBV7-2, TRBJ1-1)
CARSLTENTEAFF

SEQ ID NO: 424731 - protein, 17 aa, Homo sapiens
  CDR3 for alpha chain variable domain of TCR clone 212366 (TRAV13-1, TRAJ52)
CAASSGAGGTSYGKLTF

SEQ ID NO: 424732 - protein, 14 aa, Homo sapiens
  CDR3 for beta chain variable domain of TCR clone 212366 (TRBV12-4, TRBJ2-3)
CASTIAGWGDMQYF

SEQ ID NO: 424733 - protein, 17 aa, Homo sapiens
  CDR3 for alpha chain variable domain of TCR clone 212367 (TRAV3, TRAJ6)
CAVRHGPRAGGSDIPTF

SEQ ID NO: 424734 - protein, 14 aa, Homo sapiens
  CDR3 for beta chain variable domain of TCR clone 212367 (TRBV7-2, TRBJ2-7)
CASSPKTSFYEQYF

SEQ ID NO: 424735 - protein, 14 aa, Homo sapiens
  CDR3 for alpha chain variable domain of TCR clone 212368 (TRAV12-2, TRAJ13)
CAVKKTGGYPKVTF

SEQ ID NO: 424736 - protein, 15 aa, Homo sapiens
  CDR3 for beta chain variable domain of TCR clone 212368 (TRBV27, TRBJ2-1)
CASSNGGGSSMSSSS

SEQ ID NO: 424737 - protein, 13 aa, Homo sapiens
  CDR3 for alpha chain variable domain of TCR clone 212369 (TRAV12-2, TRAJ13)
CREEDWGYQKVTF

SEQ ID NO: 424738 - protein, 12 aa, Homo sapiens
  CDR3 for beta chain variable domain of TCR clone 212369 (TRBV24-1, TRBJ1-1)
CATSDSDRGAFF

SEQ ID NO: 424739 - protein, 14 aa, Homo sapiens
  CDR3 for alpha chain variable domain of TCR clone 212370 (TRAV1-2, TRAJ16)
CAVNRFSDGQKLLF

SEQ ID NO: 424740 - protein, 16 aa, Homo sapiens
  CDR3 for beta chain variable domain of TCR clone 212370 (TRBV28, TRBJ2-1)
CASSSRVRDSYNEQFF

SEQ ID NO: 424741 - protein, 15 aa, Homo sapiens
  CDR3 for alpha chain variable domain of TCR clone 212371 (TRAV2, TRAJ9)
CAVEDRGTGGLKTIF

SEQ ID NO: 424742 - protein, 14 aa, Homo sapiens
  CDR3 for beta chain variable domain of TCR clone 212371 (TRBV5-1, TRBJ2-7)
CASSRGESLYEQYF

SEQ ID NO: 424743 - protein, 15 aa, Homo sapiens
  CDR3 for alpha chain variable domain of TCR clone 212372 (TRAV40, TRAJ53)
CLLASSGGSNYKLTF

SEQ ID NO: 424744 - protein, 15 aa, Homo sapiens
  CDR3 for beta chain variable domain of TCR clone 212372 (TRBV7-6, TRBJ2-2)
CASRRTSGNTGELFF

SEQ ID NO: 424745 - protein, 13 aa, Homo sapiens
  CDR3 for alpha chain variable domain of TCR clone 212373 (TRAV8-6, TRAJ49)
CAVITNTGNQFYF

SEQ ID NO: 424746 - protein, 14 aa, Homo sapiens
  CDR3 for beta chain variable domain of TCR clone 212373 (TRBV20-1, TRBJ2-7)
CSAWTALSSYEQYF

SEQ ID NO: 424747 - protein, 14 aa, Homo sapiens
  CDR3 for alpha chain variable domain of TCR clone 212374 (TRAV12-2, TRAJ5)
CAANRSPGRRALTF

SEQ ID NO: 424748 - protein, 12 aa, Homo sapiens
  CDR3 for beta chain variable domain of TCR clone 212374 (TRBV19, TRBJ1-5)
CASSIAQQPQHF

SEQ ID NO: 424749 - protein, 15 aa, Homo sapiens
  CDR3 for alpha chain variable domain of TCR clone 212375 (TRAV3, TRAJ4)
CAVRDGTGGYNKLIF

SEQ ID NO: 424750 - protein, 12 aa, Homo sapiens
  CDR3 for beta chain variable domain of TCR clone 212375 (TRBV7-9, TRBJ2-7)
CASSLEGYEQYS

SEQ ID NO: 424751 - protein, 15 aa, Homo sapiens
  CDR3 for alpha chain variable domain of TCR clone 212376 (TRAV35, TRAJ23)
RAGQRGYNQGGKPIF

SEQ ID NO: 424752 - protein, 16 aa, Homo sapiens
  CDR3 for beta chain variable domain of TCR clone 212376 (TRBV27, TRBJ2-1)
CASSSRLAGNYNEQFF

SEQ ID NO: 424753 - protein, 14 aa, Homo sapiens
  CDR3 for alpha chain variable domain of TCR clone 212377 (TRAV12-1, TRAJ31)
CVVNNRDNNARLMF

SEQ ID NO: 424754 - protein, 15 aa, Homo sapiens
  CDR3 for beta chain variable domain of TCR clone 212377 (TRBV3-1, TRBJ2-3)
CQQSSGSGGRDTQYF

SEQ ID NO: 424755 - protein, 15 aa, Homo sapiens
  CDR3 for alpha chain variable domain of TCR clone 212378 (TRAV13-1, TRAJ52)
SYYNAGGTSYGKMTF

SEQ ID NO: 424756 - protein, 11 aa, Homo sapiens
  CDR3 for beta chain variable domain of TCR clone 212378 (TRBV12-4, TRBJ2-2)
CASSSAGELFF

SEQ ID NO: 424757 - protein, 16 aa, Homo sapiens
  CDR3 for alpha chain variable domain of TCR clone 212379 (TRAV8-3, TRAJ44)
CAVGASNTGTASKLTF

SEQ ID NO: 424758 - protein, 15 aa, Homo sapiens
  CDR3 for beta chain variable domain of TCR clone 212379 (TRBV10-2, TRBJ2-6)
CASSEQGTGANVLTF

SEQ ID NO: 424759 - protein, 15 aa, Homo sapiens
  CDR3 for alpha chain variable domain of TCR clone 212380 (TRAV21, TRAJ53)
CATLNSGGSNYKLTF

SEQ ID NO: 424760 - protein, 17 aa, Homo sapiens
  CDR3 for beta chain variable domain of TCR clone 212380 (TRBV20-1, TRBJ2-1)
CSASSSGLAGSYNEQFF

SEQ ID NO: 424761 - protein, 15 aa, Homo sapiens
  CDR3 for alpha chain variable domain of TCR clone 212381 (TRAV1-2, TRAJ30)
CAVRPHGNRDDTLIF

SEQ ID NO: 424762 - protein, 13 aa, Homo sapiens
  CDR3 for beta chain variable domain of TCR clone 212381 (TRBV4-1, TRBJ2-7)
CASSQGQAYEQYF

SEQ ID NO: 424763 - protein, 15 aa, Homo sapiens
  CDR3 for alpha chain variable domain of TCR clone 212382 (TRAV26-1, TRAJ42)
CILRVKGGSQGNLIF

SEQ ID NO: 424764 - protein, 14 aa, Homo sapiens
  CDR3 for beta chain variable domain of TCR clone 212382 (TRBV19, TRBJ2-2)
CATTGHANTGELFF

SEQ ID NO: 424765 - protein, 15 aa, Homo sapiens
  CDR3 for alpha chain variable domain of TCR clone 212383 (TRAV2, TRAJ22)
CAVPSRGGSARQLTF

SEQ ID NO: 424766 - protein, 14 aa, Homo sapiens
  CDR3 for beta chain variable domain of TCR clone 212383 (TRBV4-2, TRBJ2-1)
CASGLDRAYNEQFF

SEQ ID NO: 424767 - protein, 16 aa, Homo sapiens
  CDR3 for alpha chain variable domain of TCR clone 212384 (TRAV3, TRAJ37)
CAVRGKGSGNTGKLIF

SEQ ID NO: 424768 - protein, 13 aa, Homo sapiens
  CDR3 for beta chain variable domain of TCR clone 212384 (TRBV7-3, TRBJ1-1)
CASSQDWGAEDFF

SEQ ID NO: 424769 - protein, 16 aa, Homo sapiens
  CDR3 for alpha chain variable domain of TCR clone 212385 (TRAV3, TRAJ18)
CAMRDGRGSTLGRLYF

SEQ ID NO: 424770 - protein, 15 aa, Homo sapiens
  CDR3 for beta chain variable domain of TCR clone 212385 (TRBV7-9, TRBJ1-6)
CASSSPGRGTSPLHF

SEQ ID NO: 424771 - protein, 18 aa, Homo sapiens
  CDR3 for alpha chain variable domain of TCR clone 212386 (TRAV13-1, TRAJ52)
CAAKNPNAGGTSYGNLTF

SEQ ID NO: 424772 - protein, 11 aa, Homo sapiens
  CDR3 for beta chain variable domain of TCR clone 212386 (TRBV11-2, TRBJ2-2)
CASSLPGELFF

SEQ ID NO: 424773 - protein, 16 aa, Homo sapiens
  CDR3 for alpha chain variable domain of TCR clone 212387 (TRAV14/DV4, TRAJ53)
CAMREGGGGSNYKLTF

SEQ ID NO: 424774 - protein, 13 aa, Homo sapiens
  CDR3 for beta chain variable domain of TCR clone 212387 (TRBV4-1, TRBJ2-1)
CASSQEVQYEQFF

SEQ ID NO: 424775 - protein, 14 aa, Homo sapiens
  CDR3 for alpha chain variable domain of TCR clone 212388 (TRAV27, TRAJ22)
CAGLPSGSARQLTF

SEQ ID NO: 424776 - protein, 19 aa, Homo sapiens
  CDR3 for beta chain variable domain of TCR clone 212388 (TRBV7-3, TRBJ2-2)
CASSLRAGGSGPNTGELFF

SEQ ID NO: 424777 - protein, 13 aa, Homo sapiens
  CDR3 for alpha chain variable domain of TCR clone 212389 (TRAV16, TRAJ31)
CALSAHNNARPIF

SEQ ID NO: 424778 - protein, 17 aa, Homo sapiens
  CDR3 for beta chain variable domain of TCR clone 212389 (TRBV12-4, TRBJ2-1)
CASSPGLAGGRINEQFF

SEQ ID NO: 424779 - protein, 15 aa, Homo sapiens
  CDR3 for alpha chain variable domain of TCR clone 212390 (TRAV25, TRAJ52)
CAGRPGGTSYGNLTF

SEQ ID NO: 424780 - protein, 14 aa, Homo sapiens
  CDR3 for beta chain variable domain of TCR clone 212390 (TRBV7-9, TRBJ2-1)
CASSLGVADNEQFF

SEQ ID NO: 424781 - protein, 13 aa, Homo sapiens
  CDR3 for alpha chain variable domain of TCR clone 212391 (TRAV19, TRAJ3)
CALRYSSASKIIF

SEQ ID NO: 424782 - protein, 13 aa, Homo sapiens
  CDR3 for beta chain variable domain of TCR clone 212391 (TRBV27, TRBJ1-4)
CASSLMGDEKLFF

SEQ ID NO: 424783 - protein, 12 aa, Homo sapiens
  CDR3 for alpha chain variable domain of TCR clone 212392 (TRAV12-2, TRAJ10)
WGVTGGGNKLTF

SEQ ID NO: 424784 - protein, 12 aa, Homo sapiens
  CDR3 for beta chain variable domain of TCR clone 212392 (TRBV5-1, TRBJ2-7)
CASSLDSYEQYF

SEQ ID NO: 424785 - protein, 12 aa, Homo sapiens
  CDR3 for alpha chain variable domain of TCR clone 212393 (TRAV13-1, TRAJ11)
CAGPSGYSTLIF

SEQ ID NO: 424786 - protein, 13 aa, Homo sapiens
  CDR3 for beta chain variable domain of TCR clone 212393 (TRBV12-4, TRBJ1-5)
CASSPDRAQPQHF

SEQ ID NO: 424787 - protein, 14 aa, Homo sapiens
  CDR3 for alpha chain variable domain of TCR clone 212394 (TRAV12-3, TRAJ12)
CAMSALDSSYKLIF

SEQ ID NO: 424788 - protein, 15 aa, Homo sapiens
  CDR3 for beta chain variable domain of TCR clone 212394 (TRBV20-1, TRBJ2-7)
CSARDRVSGMDEQYF

SEQ ID NO: 424789 - protein, 14 aa, Homo sapiens
  CDR3 for alpha chain variable domain of TCR clone 212395 (TRAV12-2, TRAJ13)
CAVKKTGGYQKVTF

SEQ ID NO: 424790 - protein, 15 aa, Homo sapiens
  CDR3 for beta chain variable domain of TCR clone 212395 (TRBV20-1, TRBJ2-5)
CSARDRTGYGETQYF

SEQ ID NO: 424791 - protein, 13 aa, Homo sapiens
  CDR3 for alpha chain variable domain of TCR clone 212396 (TRAV27, TRAJ56)
ASTSVQESSKLTF

SEQ ID NO: 424792 - protein, 16 aa, Homo sapiens
  CDR3 for beta chain variable domain of TCR clone 212396 (TRBV29-1, TRBJ2-7)
CSVEVVGTSGSYEQYF

SEQ ID NO: 424793 - protein, 13 aa, Homo sapiens
  CDR3 for alpha chain variable domain of TCR clone 212397 (TRAV22, TRAJ12)
CAGRMDSSYKLIF

SEQ ID NO: 424794 - protein, 16 aa, Homo sapiens
  CDR3 for beta chain variable domain of TCR clone 212397 (TRBV7-3, TRBJ2-2)
CASSLKRGTLSGELFF

SEQ ID NO: 424795 - protein, 14 aa, Homo sapiens
  CDR3 for alpha chain variable domain of TCR clone 212398 (TRAV17, TRAJ15)
CATDRGQAGTALIF

SEQ ID NO: 424796 - protein, 12 aa, Homo sapiens
  CDR3 for beta chain variable domain of TCR clone 212398 (TRBV5-7, TRBJ1-2)
CASSDRIHGYTF

SEQ ID NO: 424797 - protein, 13 aa, Homo sapiens
  CDR3 for alpha chain variable domain of TCR clone 212399 (TRAV3, TRAJ21)
CAVATSTNFTLDL

SEQ ID NO: 424798 - protein, 15 aa, Homo sapiens
  CDR3 for beta chain variable domain of TCR clone 212399 (TRBV7-2, TRBJ2-3)
CASSLVVRGPDTQYF

SEQ ID NO: 424799 - protein, 13 aa, Homo sapiens
  CDR3 for alpha chain variable domain of TCR clone 212400 (TRAV8-3, TRAJ48)
RAVVPFGNEKLTF

SEQ ID NO: 424800 - protein, 19 aa, Homo sapiens
  CDR3 for beta chain variable domain of TCR clone 212400 (TRBV25-1, TRBJ2-2)
CAILVYRVDRGRKTGELFF

SEQ ID NO: 424801 - protein, 12 aa, Homo sapiens
  CDR3 for alpha chain variable domain of TCR clone 212401 (TRAV13-2, TRAJ58)
CAERRLDSMLTF

SEQ ID NO: 424802 - protein, 15 aa, Homo sapiens
  CDR3 for beta chain variable domain of TCR clone 212401 (TRBV5-1, TRBJ2-5)
CASSSGQERVETQYF

SEQ ID NO: 424803 - protein, 14 aa, Homo sapiens
  CDR3 for alpha chain variable domain of TCR clone 212402 (TRAV12-1, TRAJ12)
CVVTRMDSSNKLIF

SEQ ID NO: 424804 - protein, 13 aa, Homo sapiens
  CDR3 for beta chain variable domain of TCR clone 212402 (TRBV20-1, TRBJ1-1)
CSARGGGNTETFF

SEQ ID NO: 424805 - protein, 14 aa, Homo sapiens
  CDR3 for alpha chain variable domain of TCR clone 212403 (TRAV1-2, TRAJ16)
CAVNRFSDGQKLLF

SEQ ID NO: 424806 - protein, 14 aa, Homo sapiens
  CDR3 for beta chain variable domain of TCR clone 212403 (TRBV7-9, TRBJ2-3)
CSSSLEDGTDTQYF

SEQ ID NO: 424807 - protein, 12 aa, Homo sapiens
  CDR3 for alpha chain variable domain of TCR clone 212404 (TRAV13-2, TRAJ23)
CAERHRGGKLIF

SEQ ID NO: 424808 - protein, 16 aa, Homo sapiens
  CDR3 for beta chain variable domain of TCR clone 212404 (TRBV27, TRBJ2-2)
CASSLSGCWVTGELFF

SEQ ID NO: 424809 - protein, 14 aa, Homo sapiens
  CDR3 for alpha chain variable domain of TCR clone 212405 (TRAV1-2, TRAJ16)
CAVNRFSDGQKLLF

SEQ ID NO: 424810 - protein, 14 aa, Homo sapiens
  CDR3 for beta chain variable domain of TCR clone 212405 (TRBV20-1, TRBJ2-1)
CSAQIGGSANEQFV

SEQ ID NO: 424811 - protein, 13 aa, Homo sapiens
  CDR3 for alpha chain variable domain of TCR clone 212406 (TRAV2, TRAJ40)
CAVVTSGTYTYIF

SEQ ID NO: 424812 - protein, 15 aa, Homo sapiens
  CDR3 for beta chain variable domain of TCR clone 212406 (TRBV6-3, TRBJ2-7)
CASSSPGTVFYEQYF

SEQ ID NO: 424813 - protein, 14 aa, Homo sapiens
  CDR3 for alpha chain variable domain of TCR clone 212407 (TRAV12-1, TRAJ17)
CVVNYKAAGNKLTF

SEQ ID NO: 424814 - protein, 17 aa, Homo sapiens
  CDR3 for beta chain variable domain of TCR clone 212407 (TRBV20-1, TRBJ2-1)
CSASSSGLAGSYHEQFF

SEQ ID NO: 424815 - protein, 17 aa, Homo sapiens
  CDR3 for alpha chain variable domain of TCR clone 212408 (TRAV8-2, TRAJ17)
CVVSDRRFKAAGNKLTF

SEQ ID NO: 424816 - protein, 13 aa, Homo sapiens
  CDR3 for beta chain variable domain of TCR clone 212408 (TRBV7-9, TRBJ2-3)
CASSPGSTDTQYF

SEQ ID NO: 424817 - protein, 15 aa, Homo sapiens
  CDR3 for alpha chain variable domain of TCR clone 212409 (TRAV2, TRAJ15)
CAVEDRGQAGTALIF

SEQ ID NO: 424818 - protein, 13 aa, Homo sapiens
  CDR3 for beta chain variable domain of TCR clone 212409 (TRBV10-2, TRBJ2-7)
CASGASGGYEQYF

SEQ ID NO: 424819 - protein, 14 aa, Homo sapiens
  CDR3 for alpha chain variable domain of TCR clone 212410 (TRAV13-1, TRAJ44)
CAAKATGTASKLPF

SEQ ID NO: 424820 - protein, 13 aa, Homo sapiens
  CDR3 for beta chain variable domain of TCR clone 212410 (TRBV5-5, TRBJ1-2)
CASSFWRGEDYSF

SEQ ID NO: 424821 - protein, 11 aa, Homo sapiens
  CDR3 for alpha chain variable domain of TCR clone 212411 (TRAV1-2, TRAJ31)
CAVNNNARLMF

SEQ ID NO: 424822 - protein, 15 aa, Homo sapiens
  CDR3 for beta chain variable domain of TCR clone 212411 (TRBV11-2, TRBJ1-2)
CASSLEGVQRNGYTF

SEQ ID NO: 424823 - protein, 15 aa, Homo sapiens
  CDR3 for alpha chain variable domain of TCR clone 212412 (TRAV21, TRAJ53)
CATLNSGGSNYKLTF

SEQ ID NO: 424824 - protein, 14 aa, Homo sapiens
  CDR3 for beta chain variable domain of TCR clone 212412 (TRBV7-2, TRBJ2-7)
CASSRKTSFYEQYF

SEQ ID NO: 424825 - protein, 14 aa, Homo sapiens
  CDR3 for alpha chain variable domain of TCR clone 212413 (TRAV12-1, TRAJ17)
CVVNYKAAGNKLTL

SEQ ID NO: 424826 - protein, 15 aa, Homo sapiens
  CDR3 for beta chain variable domain of TCR clone 212413 (TRBV10-2, TRBJ2-6)
CASSEQGTGANVLTF

SEQ ID NO: 424827 - protein, 15 aa, Homo sapiens
  CDR3 for alpha chain variable domain of TCR clone 212414 (TRAV26-1, TRAJ40)
CIDRYATSGTYEYIF

SEQ ID NO: 424828 - protein, 11 aa, Homo sapiens
  CDR3 for beta chain variable domain of TCR clone 212414 (TRBV7-9, TRBJ2-1)
CASSSQNEQFF

SEQ ID NO: 424829 - protein, 12 aa, Homo sapiens
  CDR3 for alpha chain variable domain of TCR clone 212415 (TRAV12-2, TRAJ10)
WGVTGGGNKLTF

SEQ ID NO: 424830 - protein, 11 aa, Homo sapiens
  CDR3 for beta chain variable domain of TCR clone 212415 (TRBV7-9, TRBJ2-3)
CASSPTDTQYF

SEQ ID NO: 424831 - protein, 13 aa, Homo sapiens
  CDR3 for alpha chain variable domain of TCR clone 212416 (TRAV21, TRAJ56)
CAVRLGANSKLTL

SEQ ID NO: 424832 - protein, 12 aa, Homo sapiens
  CDR3 for beta chain variable domain of TCR clone 212416 (TRBV12-4, TRBJ2-3)
CASSSTTDTQYF

SEQ ID NO: 424833 - protein, 12 aa, Homo sapiens
  CDR3 for alpha chain variable domain of TCR clone 212417 (TRAV38-1, TRAJ43)
CAFMTRLADMRC

SEQ ID NO: 424834 - protein, 14 aa, Homo sapiens
  CDR3 for beta chain variable domain of TCR clone 212417 (TRBV27, TRBJ2-2)
CASSLSVVDGRMFF

SEQ ID NO: 424835 - protein, 15 aa, Homo sapiens
  CDR3 for alpha chain variable domain of TCR clone 212418 (TRAV12-2, TRAJ8)
CAVREENTGFQKLVF

SEQ ID NO: 424836 - protein, 23 aa, Homo sapiens
  CDR3 for beta chain variable domain of TCR clone 212418 (TRBV4-2, TRBJ2-3)
CASSQDPPRASSISGGRGDTQYF

SEQ ID NO: 424837 - protein, 16 aa, Homo sapiens
  CDR3 for alpha chain variable domain of TCR clone 212419 (TRAV3, TRAJ4)
CAVRPSPSGGYNKLIF

SEQ ID NO: 424838 - protein, 15 aa, Homo sapiens
  CDR3 for beta chain variable domain of TCR clone 212419 (TRBV2, TRBJ2-7)
CASSEGLARSYEQYF

SEQ ID NO: 424839 - protein, 18 aa, Homo sapiens
  CDR3 for alpha chain variable domain of TCR clone 212420 (TRAV13-1, TRAJ52)
CAAKNPNAGCTSYGKLTF

SEQ ID NO: 424840 - protein, 14 aa, Homo sapiens
  CDR3 for beta chain variable domain of TCR clone 212420 (TRBV7-3, TRBJ2-1)
CASSLAGGTNGQFF

SEQ ID NO: 424841 - protein, 11 aa, Homo sapiens
  CDR3 for alpha chain variable domain of TCR clone 212421 (TRAV2, TRAJ20)
CAVLNDYKLSF

SEQ ID NO: 424842 - protein, 12 aa, Homo sapiens
  CDR3 for beta chain variable domain of TCR clone 212421 (TRBV3-1, TRBJ2-1)
CASGGLGNEQFF

SEQ ID NO: 424843 - protein, 13 aa, Homo sapiens
  CDR3 for alpha chain variable domain of TCR clone 212422 (TRAV8-3, TRAJ30)
CAVGGWRDDKIIF

SEQ ID NO: 424844 - protein, 12 aa, Homo sapiens
  CDR3 for beta chain variable domain of TCR clone 212422 (TRBV7-8, TRBJ2-7)
CASSLGDREQYF

SEQ ID NO: 424845 - protein, 10 aa, Homo sapiens
  CDR3 for alpha chain variable domain of TCR clone 212423 (TRAV1-2, TRAJ31)
CVSEDTRLMF

SEQ ID NO: 424846 - protein, 14 aa, Homo sapiens
  CDR3 for beta chain variable domain of TCR clone 212423 (TRBV19, TRBJ2-1)
CASPTFVLSGEQFF

SEQ ID NO: 424847 - protein, 12 aa, Homo sapiens
  CDR3 for alpha chain variable domain of TCR clone 212424 (TRAV20, TRAJ30)
CAVQARDDKIIF

SEQ ID NO: 424848 - protein, 14 aa, Homo sapiens
  CDR3 for beta chain variable domain of TCR clone 212424 (TRBV27, TRBJ1-4)
CASSPLDPNEKLFF

SEQ ID NO: 424849 - protein, 14 aa, Homo sapiens
  CDR3 for alpha chain variable domain of TCR clone 212425 (TRAV38-1, TRAJ40)
CALRPTSGTYKYIF

SEQ ID NO: 424850 - protein, 12 aa, Homo sapiens
  CDR3 for beta chain variable domain of TCR clone 212425 (TRBV14, TRBJ1-1)
CASSQLKGLAFF

SEQ ID NO: 424851 - protein, 18 aa, Homo sapiens
  CDR3 for alpha chain variable domain of TCR clone 212426 (TRAV29/DV5, TRAJ52)
CAAGFRGAGGTSYGKLTF

SEQ ID NO: 424852 - protein, 13 aa, Homo sapiens
  CDR3 for beta chain variable domain of TCR clone 212426 (TRBV19, TRBJ1-3)
CASRLSLGNTIYF

SEQ ID NO: 424853 - protein, 11 aa, Homo sapiens
  CDR3 for alpha chain variable domain of TCR clone 212427 (TRAV29/DV5, TRAJ31)
CAAMNNARLMF

SEQ ID NO: 424854 - protein, 14 aa, Homo sapiens
  CDR3 for beta chain variable domain of TCR clone 212427 (TRBV15, TRBJ2-5)
CATSIGGLGETQYF

SEQ ID NO: 424855 - protein, 16 aa, Homo sapiens
  CDR3 for alpha chain variable domain of TCR clone 212428 (TRAV38-1, TRAJ32)
CAFMPFLGGATNKLIF

SEQ ID NO: 424856 - protein, 14 aa, Homo sapiens
  CDR3 for beta chain variable domain of TCR clone 212428 (TRBV4-1, TRBJ2-7)
CASSQDREHVEQYF

SEQ ID NO: 424857 - protein, 14 aa, Homo sapiens
  CDR3 for alpha chain variable domain of TCR clone 212429 (TRAV1-2, TRAJ16)
CAVNRFSDGQKLRF

SEQ ID NO: 424858 - protein, 14 aa, Homo sapiens
  CDR3 for beta chain variable domain of TCR clone 212429 (TRBV2, TRBJ2-7)
CASSLTSGGYEQYF

SEQ ID NO: 424859 - protein, 14 aa, Homo sapiens
  CDR3 for alpha chain variable domain of TCR clone 212430 (TRAV17, TRAJ34)
CATDSLEGTDKRIL

SEQ ID NO: 424860 - protein, 13 aa, Homo sapiens
  CDR3 for beta chain variable domain of TCR clone 212430 (TRBV11-2, TRBJ2-7)
CASSGTRPYEQYF

SEQ ID NO: 424861 - protein, 13 aa, Homo sapiens
  CDR3 for alpha chain variable domain of TCR clone 212431 (TRAV21, TRAJ27)
CAARPGNARKSTL

SEQ ID NO: 424862 - protein, 14 aa, Homo sapiens
  CDR3 for beta chain variable domain of TCR clone 212431 (TRBV7-6, TRBJ2-3)
CASSLGTVTDTQYF

SEQ ID NO: 424863 - protein, 14 aa, Homo sapiens
  CDR3 for alpha chain variable domain of TCR clone 212432 (TRAV26-1, TRAJ47)
CIASPWEYGNKLVF

SEQ ID NO: 424864 - protein, 14 aa, Homo sapiens
  CDR3 for beta chain variable domain of TCR clone 212432 (TRBV12-4, TRBJ1-2)
CASTAQALRYGYTF

SEQ ID NO: 424865 - protein, 13 aa, Homo sapiens
  CDR3 for alpha chain variable domain of TCR clone 212433 (TRAV20, TRAJ54)
CAVQAGGAPKLGF

SEQ ID NO: 424866 - protein, 14 aa, Homo sapiens
  CDR3 for beta chain variable domain of TCR clone 212433 (TRBV20-1, TRBJ2-7)
CSAKTGTGGYEQYF

SEQ ID NO: 424867 - protein, 13 aa, Homo sapiens
  CDR3 for alpha chain variable domain of TCR clone 212434 (TRAV2, TRAJ40)
CAVVPSGTHKYIF

SEQ ID NO: 424868 - protein, 14 aa, Homo sapiens
  CDR3 for beta chain variable domain of TCR clone 212434 (TRBV19, TRBJ2-1)
CASPTFVLSGEQFF

SEQ ID NO: 424869 - protein, 12 aa, Homo sapiens
  CDR3 for alpha chain variable domain of TCR clone 212435 (TRAV16, TRAJ26)
FASKDGGQNFVF

SEQ ID NO: 424870 - protein, 13 aa, Homo sapiens
  CDR3 for beta chain variable domain of TCR clone 212435 (TRBV25-1, TRBJ1-1)
CASSDRGRAEAFF

SEQ ID NO: 424871 - protein, 14 aa, Homo sapiens
  CDR3 for alpha chain variable domain of TCR clone 212436 (TRAV13-1, TRAJ39)
CAAPPNNAANMLTF

SEQ ID NO: 424872 - protein, 14 aa, Homo sapiens
  CDR3 for beta chain variable domain of TCR clone 212436 (TRBV12-4, TRBJ1-1)
CASNSGDLNTEAFF

SEQ ID NO: 424873 - protein, 12 aa, Homo sapiens
  CDR3 for alpha chain variable domain of TCR clone 212437 (TRAV16, TRAJ56)
CAPTGANSKLTF

SEQ ID NO: 424874 - protein, 17 aa, Homo sapiens
  CDR3 for beta chain variable domain of TCR clone 212437 (TRBV27, TRBJ2-6)
CASSLTGFASGANVLPV

SEQ ID NO: 424875 - protein, 13 aa, Homo sapiens
  CDR3 for alpha chain variable domain of TCR clone 212438 (TRAV36/DV7, TRAJ7)
CAGTRYGNNRLAF

SEQ ID NO: 424876 - protein, 15 aa, Homo sapiens
  CDR3 for beta chain variable domain of TCR clone 212438 (TRBV11-3, TRBJ2-3)
CASLKDGREGDAQYF

SEQ ID NO: 424877 - protein, 16 aa, Homo sapiens
  CDR3 for alpha chain variable domain of TCR clone 212439 (TRAV4, TRAJ9)
CLVGDPNRPGGFKTIF

SEQ ID NO: 424878 - protein, 16 aa, Homo sapiens
  CDR3 for beta chain variable domain of TCR clone 212439 (TRBV4-1, TRBJ2-5)
CASSQTSGGPLETQYF

SEQ ID NO: 424879 - protein, 14 aa, Homo sapiens
  CDR3 for alpha chain variable domain of TCR clone 212440 (TRAV16, TRAJ16)
CALSVLSDGQKLLF

SEQ ID NO: 424880 - protein, 12 aa, Homo sapiens
  CDR3 for beta chain variable domain of TCR clone 212440 (TRBV20-1, TRBJ2-1)
CSARLGTDEQFF

SEQ ID NO: 424881 - protein, 12 aa, Homo sapiens
  CDR3 for alpha chain variable domain of TCR clone 212441 (TRAV1-2, TRAJ29)
CAVPSGNTHLVF

SEQ ID NO: 424882 - protein, 13 aa, Homo sapiens
  CDR3 for beta chain variable domain of TCR clone 212441 (TRBV18, TRBJ2-5)
CASSPGVSETQYF

SEQ ID NO: 424883 - protein, 13 aa, Homo sapiens
  CDR3 for alpha chain variable domain of TCR clone 212442 (TRAV21, TRAJ45)
CAVMGGGADGLAF

SEQ ID NO: 424884 - protein, 16 aa, Homo sapiens
  CDR3 for beta chain variable domain of TCR clone 212442 (TRBV20-1, TRBJ2-1)
CSARDHLAGGRGEQFF

SEQ ID NO: 424885 - protein, 11 aa, Homo sapiens
  CDR3 for alpha chain variable domain of TCR clone 212443 (TRAV12-2, TRAJ43)
CASPIGNDMRF

SEQ ID NO: 424886 - protein, 16 aa, Homo sapiens
  CDR3 for beta chain variable domain of TCR clone 212443 (TRBV19, TRBJ2-1)
CASSKAGPSSYNEQFF

SEQ ID NO: 424887 - protein, 14 aa, Homo sapiens
  CDR3 for alpha chain variable domain of TCR clone 212444 (TRAV22, TRAJ6)
CAVVGPGGSYIPTF

SEQ ID NO: 424888 - protein, 14 aa, Homo sapiens
  CDR3 for beta chain variable domain of TCR clone 212444 (TRBV9, TRBJ2-7)
CASSVGVGSYEQYF

SEQ ID NO: 424889 - protein, 14 aa, Homo sapiens
  CDR3 for alpha chain variable domain of TCR clone 212445 (TRAV13-1, TRAJ9)
CAASTLTGGFKTIF

SEQ ID NO: 424890 - protein, 13 aa, Homo sapiens
  CDR3 for beta chain variable domain of TCR clone 212445 (TRBV20-1, TRBJ1-1)
CSAGTVGNTEAFF

SEQ ID NO: 424891 - protein, 12 aa, Homo sapiens
  CDR3 for alpha chain variable domain of TCR clone 212446 (TRAV17, TRAJ39)
CATGAAGNMLTF

SEQ ID NO: 424892 - protein, 14 aa, Homo sapiens
  CDR3 for beta chain variable domain of TCR clone 212446 (TRBV7-9, TRBJ1-2)
CASSRPGANYGDTF

SEQ ID NO: 424893 - protein, 13 aa, Homo sapiens
  CDR3 for alpha chain variable domain of TCR clone 212447 (TRAV12-3, TRAJ47)
CAMKKEYGNKLVF

SEQ ID NO: 424894 - protein, 16 aa, Homo sapiens
  CDR3 for beta chain variable domain of TCR clone 212447 (TRBV3-1, TRBJ2-6)
CASSLTWVSGANDLTC

SEQ ID NO: 424895 - protein, 13 aa, Homo sapiens
  CDR3 for alpha chain variable domain of TCR clone 212448 (TRAV1-2, TRAJ9)
CAALNTGGFKAIF

SEQ ID NO: 424896 - protein, 14 aa, Homo sapiens
  CDR3 for beta chain variable domain of TCR clone 212448 (TRBV18, TRBJ2-5)
CASSPLRVQETQYF

SEQ ID NO: 424897 - protein, 17 aa, Homo sapiens
  CDR3 for alpha chain variable domain of TCR clone 212449 (TRAV3, TRAJ6)
CAVSRRTDTGGSYIPTF

SEQ ID NO: 424898 - protein, 13 aa, Homo sapiens
  CDR3 for beta chain variable domain of TCR clone 212449 (TRBV9, TRBJ2-1)
CASSPSGRNEQFF

SEQ ID NO: 424899 - protein, 13 aa, Homo sapiens
  CDR3 for alpha chain variable domain of TCR clone 212450 (TRAV20, TRAJ37)
CAGCSSNTGKLIF

SEQ ID NO: 424900 - protein, 14 aa, Homo sapiens
  CDR3 for beta chain variable domain of TCR clone 212450 (TRBV12-4, TRBJ1-1)
CASTWTGHDTEAFF

SEQ ID NO: 424901 - protein, 17 aa, Homo sapiens
  CDR3 for alpha chain variable domain of TCR clone 212451 (TRAV13-2, TRAJ20)
QLLNLRLSCLLVHKLSF

SEQ ID NO: 424902 - protein, 14 aa, Homo sapiens
  CDR3 for beta chain variable domain of TCR clone 212451 (TRBV18, TRBJ2-7)
CASSPRGGAYEQYF

SEQ ID NO: 424903 - protein, 12 aa, Homo sapiens
  CDR3 for alpha chain variable domain of TCR clone 212452 (TRAV21, TRAJ13)
PGPSWGYQKVTF

SEQ ID NO: 424904 - protein, 14 aa, Homo sapiens
  CDR3 for beta chain variable domain of TCR clone 212452 (TRBV20-1, TRBJ2-7)
CSAKDRKGAYEQYF

SEQ ID NO: 424905 - protein, 12 aa, Homo sapiens
  CDR3 for alpha chain variable domain of TCR clone 212453 (TRAV38-2/DV8, TRAJ49)
CAYRSSGNQFYF

SEQ ID NO: 424906 - protein, 17 aa, Homo sapiens
  CDR3 for beta chain variable domain of TCR clone 212453 (TRBV4-1, TRBJ1-4)
CASSQEGPRGVEEKLFF

SEQ ID NO: 424907 - protein, 15 aa, Homo sapiens
  CDR3 for alpha chain variable domain of TCR clone 212454 (TRAV1-1, TRAJ4)
RAVRAFSGGYNKLIF

SEQ ID NO: 424908 - protein, 16 aa, Homo sapiens
  CDR3 for beta chain variable domain of TCR clone 212454 (TRBV7-2, TRBJ2-6)
CAILSGVSSGANVLTF

SEQ ID NO: 424909 - protein, 13 aa, Homo sapiens
  CDR3 for alpha chain variable domain of TCR clone 212455 (TRAV8-1, TRAJ47)
CAVGMEYGNKLVL

SEQ ID NO: 424910 - protein, 13 aa, Homo sapiens
  CDR3 for beta chain variable domain of TCR clone 212455 (TRBV20-1, TRBJ2-2)
CSARVANTGELFF

SEQ ID NO: 424911 - protein, 15 aa, Homo sapiens
  CDR3 for alpha chain variable domain of TCR clone 212456 (TRAV3, TRAJ4)
CAVRDGTGGYNKLLF

SEQ ID NO: 424912 - protein, 13 aa, Homo sapiens
  CDR3 for beta chain variable domain of TCR clone 212456 (TRBV12-5, TRBJ1-2)
CASGVRTGNGYTF

SEQ ID NO: 424913 - protein, 14 aa, Homo sapiens
  CDR3 for alpha chain variable domain of TCR clone 212457 (TRAV8-3, TRAJ4)
FAVGASGGYNKLIF

SEQ ID NO: 424914 - protein, 17 aa, Homo sapiens
  CDR3 for beta chain variable domain of TCR clone 212457 (TRBV11-2, TRBJ2-1)
CASSLYPPGVEYNEQFF

SEQ ID NO: 424915 - protein, 14 aa, Homo sapiens
  CDR3 for alpha chain variable domain of TCR clone 212458 (TRAV17, TRAJ35)
CATDRPGFGNVLHC

SEQ ID NO: 424916 - protein, 19 aa, Homo sapiens
  CDR3 for beta chain variable domain of TCR clone 212458 (TRBV28, TRBJ2-5)
CASSSGRVIKRPSTSGQAR

SEQ ID NO: 424917 - protein, 11 aa, Homo sapiens
  CDR3 for alpha chain variable domain of TCR clone 212459 (TRAV13-1, TRAJ43)
CAAHNNNDMRF

SEQ ID NO: 424918 - protein, 15 aa, Homo sapiens
  CDR3 for beta chain variable domain of TCR clone 212459 (TRBV6-1, TRBJ2-2)
CASSRLRGDTGELFL

SEQ ID NO: 424919 - protein, 12 aa, Homo sapiens
  CDR3 for alpha chain variable domain of TCR clone 212460 (TRAV27, TRAJ41)
CAGRNSGYALNF

SEQ ID NO: 424920 - protein, 12 aa, Homo sapiens
  CDR3 for beta chain variable domain of TCR clone 212460 (TRBV14, TRBJ2-7)
CASSRLKGGQYF

SEQ ID NO: 424921 - protein, 17 aa, Homo sapiens
  CDR3 for alpha chain variable domain of TCR clone 212461 (TRAV12-2, TRAJ4)
CAVNVSPVSGGYNKLIF

SEQ ID NO: 424922 - protein, 17 aa, Homo sapiens
  CDR3 for beta chain variable domain of TCR clone 212461 (TRBV6-3, TRBJ2-1)
CASSYSSGTRGLDEQFF

SEQ ID NO: 424923 - protein, 17 aa, Homo sapiens
  CDR3 for alpha chain variable domain of TCR clone 212462 (TRAV23/DV6, TRAJ57)
RAASSTLSQGGSEKLVF

SEQ ID NO: 424924 - protein, 14 aa, Homo sapiens
  CDR3 for beta chain variable domain of TCR clone 212462 (TRBV25-1, TRBJ1-1)
CASNHLGGNTEAFF

SEQ ID NO: 424925 - protein, 18 aa, Homo sapiens
  CDR3 for alpha chain variable domain of TCR clone 212463 (TRAV21, TRAJ52)
CAVRPSPAGGTSYGKLTF

SEQ ID NO: 424926 - protein, 17 aa, Homo sapiens
  CDR3 for beta chain variable domain of TCR clone 212463 (TRBV14, TRBJ2-5)
CASSQASGRPSTSGQAR

SEQ ID NO: 424927 - protein, 14 aa, Homo sapiens
  CDR3 for alpha chain variable domain of TCR clone 212464 (TRAV12-2, TRAJ17)
CAVLFKAAGNKLTF

SEQ ID NO: 424928 - protein, 16 aa, Homo sapiens
  CDR3 for beta chain variable domain of TCR clone 212464 (TRBV12-5, TRBJ2-5)
CATGPRTSGNQETQYF

SEQ ID NO: 424929 - protein, 15 aa, Homo sapiens
  CDR3 for alpha chain variable domain of TCR clone 212465 (TRAV17, TRAJ57)
CATGPSQGGSEQLVF

SEQ ID NO: 424930 - protein, 14 aa, Homo sapiens
  CDR3 for beta chain variable domain of TCR clone 212465 (TRBV6-1, TRBJ1-3)
CASVQGGGGNTIYF

SEQ ID NO: 424931 - protein, 16 aa, Homo sapiens
  CDR3 for alpha chain variable domain of TCR clone 212466 (TRAV3, TRAJ6)
CAVRDGMGRRKLHTYI

SEQ ID NO: 424932 - protein, 15 aa, Homo sapiens
  CDR3 for beta chain variable domain of TCR clone 212466 (TRBV5-1, TRBJ2-7)
CASSLGDCTTYEQYF

SEQ ID NO: 424933 - protein, 15 aa, Homo sapiens
  CDR3 for alpha chain variable domain of TCR clone 212467 (TRAV3, TRAJ5)
CAVRDRKTGRRALTF

SEQ ID NO: 424934 - protein, 14 aa, Homo sapiens
  CDR3 for beta chain variable domain of TCR clone 212467 (TRBV3-1, TRBJ2-5)
CASSQGPDQETQYF

SEQ ID NO: 424935 - protein, 13 aa, Homo sapiens
  CDR3 for alpha chain variable domain of TCR clone 212468 (TRAV2, TRAJ40)
CAVVTSGTYKYIF

SEQ ID NO: 424936 - protein, 12 aa, Homo sapiens
  CDR3 for beta chain variable domain of TCR clone 212468 (TRBV19, TRBJ2-3)
CATTSSTDTQYF

SEQ ID NO: 424937 - protein, 12 aa, Homo sapiens
  CDR3 for alpha chain variable domain of TCR clone 212469 (TRAV12-1, TRAJ40)
CVFYSGTYKYIF

SEQ ID NO: 424938 - protein, 12 aa, Homo sapiens
  CDR3 for beta chain variable domain of TCR clone 212469 (TRBV7-8, TRBJ2-7)
CASSLGDREQYF

SEQ ID NO: 424939 - protein, 12 aa, Homo sapiens
  CDR3 for alpha chain variable domain of TCR clone 212470 (TRAV1-2, TRAJ33)
CAALDSNYQLIW

SEQ ID NO: 424940 - protein, 16 aa, Homo sapiens
  CDR3 for beta chain variable domain of TCR clone 212470 (TRBV6-4, TRBJ1-2)
CASSEDVGDPNYGYTF

SEQ ID NO: 424941 - protein, 14 aa, Homo sapiens
  CDR3 for alpha chain variable domain of TCR clone 212471 (TRAV8-6, TRAJ12)
CAVKAADSSYKLIF

SEQ ID NO: 424942 - protein, 13 aa, Homo sapiens
  CDR3 for beta chain variable domain of TCR clone 212471 (TRBV12-4, TRBJ1-2)
CASSSGLTVISTF

SEQ ID NO: 424943 - protein, 14 aa, Homo sapiens
  CDR3 for alpha chain variable domain of TCR clone 212472 (TRAV1-2, TRAJ29)
CAVRELTSATPLVF

SEQ ID NO: 424944 - protein, 12 aa, Homo sapiens
  CDR3 for beta chain variable domain of TCR clone 212472 (TRBV7-9, TRBJ1-6)
CASSLMTSPLHF

SEQ ID NO: 424945 - protein, 16 aa, Homo sapiens
  CDR3 for alpha chain variable domain of TCR clone 212473 (TRAV1-2, TRAJ10)
CAVRGVLTGGGNKLTF

SEQ ID NO: 424946 - protein, 17 aa, Homo sapiens
  CDR3 for beta chain variable domain of TCR clone 212473 (TRBV15, TRBJ1-5)
CATSWAPPGTRNQPQHF

SEQ ID NO: 424947 - protein, 11 aa, Homo sapiens
  CDR3 for alpha chain variable domain of TCR clone 212474 (TRAV3, TRAJ21)
CAVGNFNKFYF

SEQ ID NO: 424948 - protein, 16 aa, Homo sapiens
  CDR3 for beta chain variable domain of TCR clone 212474 (TRBV19, TRBJ2-7)
CASSKAGPSSYNEQYF

SEQ ID NO: 424949 - protein, 15 aa, Homo sapiens
  CDR3 for alpha chain variable domain of TCR clone 212475 (TRAV20, TRAJ37)
CCAGGGSSNTGKLIF

SEQ ID NO: 424950 - protein, 12 aa, Homo sapiens
  CDR3 for beta chain variable domain of TCR clone 212475 (TRBV11-2, TRBJ2-1)
CASSPGNNEQFF

SEQ ID NO: 424951 - protein, 11 aa, Homo sapiens
  CDR3 for alpha chain variable domain of TCR clone 212476 (TRAV3, TRAJ21)
CAVGNFNKFYF

SEQ ID NO: 424952 - protein, 16 aa, Homo sapiens
  CDR3 for beta chain variable domain of TCR clone 212476 (TRBV19, TRBJ2-5)
CASSKAGPSSYNEQYF

SEQ ID NO: 424953 - protein, 15 aa, Homo sapiens
  CDR3 for alpha chain variable domain of TCR clone 212477 (TRAV3, TRAJ3)
CAVGDRDSSASKIIF

SEQ ID NO: 424954 - protein, 12 aa, Homo sapiens
  CDR3 for beta chain variable domain of TCR clone 212477 (TRBV29-1, TRBJ2-3)
CSVTGGADTQYF

SEQ ID NO: 424955 - protein, 16 aa, Homo sapiens
  CDR3 for alpha chain variable domain of TCR clone 212478 (TRAV30, TRAJ24)
CGTEIVDADTWGKFQF

SEQ ID NO: 424956 - protein, 15 aa, Homo sapiens
  CDR3 for beta chain variable domain of TCR clone 212478 (TRBV7-9, TRBJ1-4)
CASSARTGGNEKLFF

SEQ ID NO: 424957 - protein, 18 aa, Homo sapiens
  CDR3 for alpha chain variable domain of TCR clone 212479 (TRAV13-1, TRAJ52)
CAASKRSAGGTSYGKLTF

SEQ ID NO: 424958 - protein, 13 aa, Homo sapiens
  CDR3 for beta chain variable domain of TCR clone 212479 (TRBV7-3, TRBJ2-1)
CASSLDSYNEQFV

SEQ ID NO: 424959 - protein, 17 aa, Homo sapiens
  CDR3 for alpha chain variable domain of TCR clone 212480 (TRAV23/DV6, TRAJ58)
CAARLLRGETSGSRLTF

SEQ ID NO: 424960 - protein, 13 aa, Homo sapiens
  CDR3 for beta chain variable domain of TCR clone 212480 (TRBV28, TRBJ2-5)
CASSFAGGETQYF

SEQ ID NO: 424961 - protein, 13 aa, Homo sapiens
  CDR3 for alpha chain variable domain of TCR clone 212481 (TRAV12-3, TRAJ53)
CAMRGGSNYKLTF

SEQ ID NO: 424962 - protein, 13 aa, Homo sapiens
  CDR3 for beta chain variable domain of TCR clone 212481 (TRBV12-4, TRBJ2-7)
CASSPTETYEQYF

SEQ ID NO: 424963 - protein, 12 aa, Homo sapiens
  CDR3 for alpha chain variable domain of TCR clone 212482 (TRAV12-3, TRAJ42)
CAPGGSQGNLIF

SEQ ID NO: 424964 - protein, 13 aa, Homo sapiens
  CDR3 for beta chain variable domain of TCR clone 212482 (TRBV5-7, TRBJ2-6)
CASSSSGANVLTF

SEQ ID NO: 424965 - protein, 16 aa, Homo sapiens
  CDR3 for alpha chain variable domain of TCR clone 212483 (TRAV1-2, TRAJ27)
CSVREPQTPMQANQPL

SEQ ID NO: 424966 - protein, 13 aa, Homo sapiens
  CDR3 for beta chain variable domain of TCR clone 212483 (TRBV6-1, TRBJ1-2)
CASSAREGYGYTF

SEQ ID NO: 424967 - protein, 13 aa, Homo sapiens
  CDR3 for alpha chain variable domain of TCR clone 212484 (TRAV8-4, TRAJ36)
RAVSEGGANNLFF

SEQ ID NO: 424968 - protein, 12 aa, Homo sapiens
  CDR3 for beta chain variable domain of TCR clone 212484 (TRBV28, TRBJ2-7)
CASTGNHYEQYF

SEQ ID NO: 424969 - protein, 12 aa, Homo sapiens
  CDR3 for alpha chain variable domain of TCR clone 212485 (TRAV12-2, TRAJ10)
WGVTGGGNKLTF

SEQ ID NO: 424970 - protein, 16 aa, Homo sapiens
  CDR3 for beta chain variable domain of TCR clone 212485 (TRBV9, TRBJ2-1)
CASSVGGGGNYNEQFF

SEQ ID NO: 424971 - protein, 11 aa, Homo sapiens
  CDR3 for alpha chain variable domain of TCR clone 212486 (TRAV2, TRAJ13)
CASGGYQKVTF

SEQ ID NO: 424972 - protein, 15 aa, Homo sapiens
  CDR3 for beta chain variable domain of TCR clone 212486 (TRBV7-2, TRBJ2-3)
CARSSTGLETDTQYF

SEQ ID NO: 424973 - protein, 12 aa, Homo sapiens
  CDR3 for alpha chain variable domain of TCR clone 212487 (TRAV13-1, TRAJ53)
AASGGSNYKLTF

SEQ ID NO: 424974 - protein, 17 aa, Homo sapiens
  CDR3 for beta chain variable domain of TCR clone 212487 (TRBV20-1, TRBJ2-1)
CSAPPRLAGTRYNEQFF

SEQ ID NO: 424975 - protein, 17 aa, Homo sapiens
  CDR3 for alpha chain variable domain of TCR clone 212488 (TRAV23/DV6, TRAJ57)
CAASSTLSQGGSEKLVF

SEQ ID NO: 424976 - protein, 13 aa, Homo sapiens
  CDR3 for beta chain variable domain of TCR clone 212488 (TRBV25-1, TRBJ1-1)
CQNHLGGNTEAFF

SEQ ID NO: 424977 - protein, 16 aa, Homo sapiens
  CDR3 for alpha chain variable domain of TCR clone 212489 (TRAV30, TRAJ24)
CGTEIVDADSWGKFQF

SEQ ID NO: 424978 - protein, 15 aa, Homo sapiens
  CDR3 for beta chain variable domain of TCR clone 212489 (TRBV9, TRBJ1-6)
CASSVAGTGDSPLDF

SEQ ID NO: 424979 - protein, 13 aa, Homo sapiens
  CDR3 for alpha chain variable domain of TCR clone 212490 (TRAV26-2, TRAJ43)
CILRAVNNNDMRV

SEQ ID NO: 424980 - protein, 11 aa, Homo sapiens
  CDR3 for beta chain variable domain of TCR clone 212490 (TRBV29-1, TRBJ2-5)
CSEDRTGTQYF

SEQ ID NO: 424981 - protein, 15 aa, Homo sapiens
  CDR3 for alpha chain variable domain of TCR clone 212491 (TRAV26-1, TRAJ40)
CIDRYATSGTYKYVF

SEQ ID NO: 424982 - protein, 11 aa, Homo sapiens
  CDR3 for beta chain variable domain of TCR clone 212491 (TRBV7-9, TRBJ2-1)
CASSSQNEQFF

SEQ ID NO: 424983 - protein, 11 aa, Homo sapiens
  CDR3 for alpha chain variable domain of TCR clone 212492 (TRAV2, TRAJ13)
CASGGYQKVTF

SEQ ID NO: 424984 - protein, 15 aa, Homo sapiens
  CDR3 for beta chain variable domain of TCR clone 212492 (TRBV12-4, TRBJ2-1)
CASSLSGGASNEQFF

SEQ ID NO: 424985 - protein, 13 aa, Homo sapiens
  CDR3 for alpha chain variable domain of TCR clone 212493 (TRAV21, TRAJ27)
CAARPGNAGKSTF

SEQ ID NO: 424986 - protein, 22 aa, Homo sapiens
  CDR3 for beta chain variable domain of TCR clone 212493 (TRBV7-6, TRBJ2-1)
AAGLGHGSLCQQLGGGADEQFF

SEQ ID NO: 424987 - protein, 16 aa, Homo sapiens
  CDR3 for alpha chain variable domain of TCR clone 212494 (TRAV3, TRAJ37)
CAVRPHGSGNTGKLIF

SEQ ID NO: 424988 - protein, 16 aa, Homo sapiens
  CDR3 for beta chain variable domain of TCR clone 212494 (TRBV9, TRBJ1-2)
CASSVEEKGSPYGYTF

SEQ ID NO: 424989 - protein, 15 aa, Homo sapiens
  CDR3 for alpha chain variable domain of TCR clone 212495 (TRAV17, TRAJ52)
CATEAGVTSYGKLTF

SEQ ID NO: 424990 - protein, 16 aa, Homo sapiens
  CDR3 for beta chain variable domain of TCR clone 212495 (TRBV20-1, TRBJ2-1)
CSAGRPAGGPYNEQFF

SEQ ID NO: 424991 - protein, 14 aa, Homo sapiens
  CDR3 for alpha chain variable domain of TCR clone 212496 (TRAV12-1, TRAJ12)
CVVNPMDSSYNLIF

SEQ ID NO: 424992 - protein, 16 aa, Homo sapiens
  CDR3 for beta chain variable domain of TCR clone 212496 (TRBV28, TRBJ2-2)
CTSVPAFGRAPGSCFF

SEQ ID NO: 424993 - protein, 13 aa, Homo sapiens
  CDR3 for alpha chain variable domain of TCR clone 212497 (TRAV20, TRAJ31)
CAVQAWNNARLMF

SEQ ID NO: 424994 - protein, 19 aa, Homo sapiens
  CDR3 for beta chain variable domain of TCR clone 212497 (TRBV25-1, TRBJ2-2)
CAILVYRVDRGRKTGELFF

SEQ ID NO: 424995 - protein, 15 aa, Homo sapiens
  CDR3 for alpha chain variable domain of TCR clone 212498 (TRAV17, TRAJ57)
CATGPSQGGSEKLVF

SEQ ID NO: 424996 - protein, 15 aa, Homo sapiens
  CDR3 for beta chain variable domain of TCR clone 212498 (TRBV18, TRBJ1-1)
CASSPRQGENTEAFF

SEQ ID NO: 424997 - protein, 14 aa, Homo sapiens
  CDR3 for alpha chain variable domain of TCR clone 212499 (TRAV38-1, TRAJ45)
CASHSGGGADGLTF

SEQ ID NO: 424998 - protein, 17 aa, Homo sapiens
  CDR3 for beta chain variable domain of TCR clone 212499 (TRBV25-1, TRBJ2-7)
CASSDARVVFSSYEQYV

SEQ ID NO: 424999 - protein, 14 aa, Homo sapiens
  CDR3 for alpha chain variable domain of TCR clone 212500 (TRAV20, TRAJ29)
CAVQAWVGNTPLVF

SEQ ID NO: 425000 - protein, 17 aa, Homo sapiens
  CDR3 for beta chain variable domain of TCR clone 212500 (TRBV11-2, TRBJ2-1)
CASSLYPPGVEYNEQFF

SEQ ID NO: 425001 - protein, 15 aa, Homo sapiens
  CDR3 for alpha chain variable domain of TCR clone 212501 (TRAV26-2, TRAJ13)
CILRDVSGGYQKVTF

SEQ ID NO: 425002 - protein, 15 aa, Homo sapiens
  CDR3 for beta chain variable domain of TCR clone 212501 (TRBV28, TRBJ2-5)
CASSPPWSYQETQCF

SEQ ID NO: 425003 - protein, 14 aa, Homo sapiens
  CDR3 for alpha chain variable domain of TCR clone 212502 (TRAV17, TRAJ34)
CATDSLEGTDKLIF

SEQ ID NO: 425004 - protein, 13 aa, Homo sapiens
  CDR3 for beta chain variable domain of TCR clone 212502 (TRBV11-2, TRBJ2-7)
CASSRTRPYEQYF

SEQ ID NO: 425005 - protein, 14 aa, Homo sapiens
  CDR3 for alpha chain variable domain of TCR clone 212503 (TRAV21, TRAJ23)
CAIMIYNQGGKLIF

SEQ ID NO: 425006 - protein, 15 aa, Homo sapiens
  CDR3 for beta chain variable domain of TCR clone 212503 (TRBV6-3, TRBJ2-7)
CASSSPGTVFYEQYF

SEQ ID NO: 425007 - protein, 16 aa, Homo sapiens
  CDR3 for alpha chain variable domain of TCR clone 212504 (TRAV3, TRAJ10)
CAVREMRAGGGNKLTL

SEQ ID NO: 425008 - protein, 14 aa, Homo sapiens
  CDR3 for beta chain variable domain of TCR clone 212504 (TRBV7-2, TRBJ1-1)
CASSFLTGTTEAFF

SEQ ID NO: 425009 - protein, 11 aa, Homo sapiens
  CDR3 for alpha chain variable domain of TCR clone 212505 (TRAV2, TRAJ13)
CASGGYQRVTF

SEQ ID NO: 425010 - protein, 12 aa, Homo sapiens
  CDR3 for beta chain variable domain of TCR clone 212505 (TRBV11-2, TRBJ2-2)
CASSLGGGELFF

SEQ ID NO: 425011 - protein, 13 aa, Homo sapiens
  CDR3 for alpha chain variable domain of TCR clone 212506 (TRAV21, TRAJ57)
CAVTQGGSEKLVF

SEQ ID NO: 425012 - protein, 16 aa, Homo sapiens
  CDR3 for beta chain variable domain of TCR clone 212506 (TRBV7-3, TRBJ2-2)
CASSLKRGTLSGELFL

SEQ ID NO: 425013 - protein, 11 aa, Homo sapiens
  CDR3 for alpha chain variable domain of TCR clone 212507 (TRAV2, TRAJ13)
CASGGYQKVTF

SEQ ID NO: 425014 - protein, 19 aa, Homo sapiens
  CDR3 for beta chain variable domain of TCR clone 212507 (TRBV23-1, TRBJ2-7)
CASGDRGLAGALTSSTSGR

SEQ ID NO: 425015 - protein, 14 aa, Homo sapiens
  CDR3 for alpha chain variable domain of TCR clone 212508 (TRAV26-1, TRAJ16)
CIVRVPSDGQKLLF

SEQ ID NO: 425016 - protein, 17 aa, Homo sapiens
  CDR3 for beta chain variable domain of TCR clone 212508 (TRBV20-1, TRBJ2-1)
FSASSSGLAGSYNEQFF

SEQ ID NO: 425017 - protein, 13 aa, Homo sapiens
  CDR3 for alpha chain variable domain of TCR clone 212509 (TRAV13-1, TRAJ39)
CAASKWAGNMLTF

SEQ ID NO: 425018 - protein, 15 aa, Homo sapiens
  CDR3 for beta chain variable domain of TCR clone 212509 (TRBV7-9, TRBJ1-1)
CASSLLEQGGTEAFF

SEQ ID NO: 425019 - protein, 14 aa, Homo sapiens
  CDR3 for alpha chain variable domain of TCR clone 212510 (TRAV1-2, TRAJ16)
CAVNRFSYGQKLLF

SEQ ID NO: 425020 - protein, 16 aa, Homo sapiens
  CDR3 for beta chain variable domain of TCR clone 212510 (TRBV12-5, TRBJ2-5)
CASGQRTSGNQETQYF

SEQ ID NO: 425021 - protein, 19 aa, Homo sapiens
  CDR3 for alpha chain variable domain of TCR clone 212511 (TRAV38-1, TRAJ53)
CAFMKHGLERGGSNDTLTF

SEQ ID NO: 425022 - protein, 13 aa, Homo sapiens
  CDR3 for beta chain variable domain of TCR clone 212511 (TRBV19, TRBJ2-7)
CASSPRQSYEQYF

SEQ ID NO: 425023 - protein, 16 aa, Homo sapiens
  CDR3 for alpha chain variable domain of TCR clone 212512 (TRAV17, TRAJ35)
CATAEGGIGFGNVLHC

SEQ ID NO: 425024 - protein, 15 aa, Homo sapiens
  CDR3 for beta chain variable domain of TCR clone 212512 (TRBV6-6, TRBJ2-7)
CASSYSYGGSYEQYF

SEQ ID NO: 425025 - protein, 16 aa, Homo sapiens
  CDR3 for alpha chain variable domain of TCR clone 212513 (TRAV12-3, TRAJ58)
CAMTDTEETSGSRLTF

SEQ ID NO: 425026 - protein, 14 aa, Homo sapiens
  CDR3 for beta chain variable domain of TCR clone 212513 (TRBV7-2, TRBJ2-7)
CASSPKTSFYEQYF

SEQ ID NO: 425027 - protein, 14 aa, Homo sapiens
  CDR3 for alpha chain variable domain of TCR clone 212514 (TRAV1-2, TRAJ16)
CAVNRFSDGQKLLF

SEQ ID NO: 425028 - protein, 13 aa, Homo sapiens
  CDR3 for beta chain variable domain of TCR clone 212514 (TRBV6-3, TRBJ2-5)
CASLLAGTETQYF

SEQ ID NO: 425029 - protein, 10 aa, Homo sapiens
  CDR3 for alpha chain variable domain of TCR clone 212515 (TRAV12-1, TRAJ37)
ARGNTGKLIF

SEQ ID NO: 425030 - protein, 15 aa, Homo sapiens
  CDR3 for beta chain variable domain of TCR clone 212515 (TRBV7-2)
CVWCLVVGGCGVLFF

SEQ ID NO: 425031 - protein, 16 aa, Homo sapiens
  CDR3 for alpha chain variable domain of TCR clone 212516 (TRAV3, TRAJ34)
CAVRARGTPTSSSLGL

SEQ ID NO: 425032 - protein, 15 aa, Homo sapiens
  CDR3 for beta chain variable domain of TCR clone 212516 (TRBV6-3, TRBJ2-7)
CASSSPGTVFYEQYF

SEQ ID NO: 425033 - protein, 11 aa, Homo sapiens
  CDR3 for alpha chain variable domain of TCR clone 212517 (TRAV3, TRAJ21)
WAVGNFNKFYF

SEQ ID NO: 425034 - protein, 14 aa, Homo sapiens
  CDR3 for beta chain variable domain of TCR clone 212517 (TRBV6-3, TRBJ1-1)
CASSYHSKNTEAFF

SEQ ID NO: 425035 - protein, 12 aa, Homo sapiens
  CDR3 for alpha chain variable domain of TCR clone 212518 (TRAV17, TRAJ20)
CATDANDYKLSF

SEQ ID NO: 425036 - protein, 15 aa, Homo sapiens
  CDR3 for beta chain variable domain of TCR clone 212518 (TRBV2, TRBJ2-1)
CASSELAGSYNEQFF

SEQ ID NO: 425037 - protein, 14 aa, Homo sapiens
  CDR3 for alpha chain variable domain of TCR clone 212519 (TRAV9-2, TRAJ48)
CALSSNFRNEKLPF

SEQ ID NO: 425038 - protein, 15 aa, Homo sapiens
  CDR3 for beta chain variable domain of TCR clone 212519 (TRBV11-2, TRBJ2-2)
CASSSDRVNAGELFF

SEQ ID NO: 425039 - protein, 13 aa, Homo sapiens
  CDR3 for alpha chain variable domain of TCR clone 212520 (TRAV4, TRAJ22)
CLGGSGSARQLTF

SEQ ID NO: 425040 - protein, 16 aa, Homo sapiens
  CDR3 for beta chain variable domain of TCR clone 212520 (TRBV7-2, TRBJ1-5)
CASSPWGPEGNQPQHF

SEQ ID NO: 425041 - protein, 16 aa, Homo sapiens
  CDR3 for alpha chain variable domain of TCR clone 212521 (TRAV30, TRAJ24)
CGTEIVDADSWGKFQF

SEQ ID NO: 425042 - protein, 17 aa, Homo sapiens
  CDR3 for beta chain variable domain of TCR clone 212521 (TRBV15, TRBJ1-5)
CDTSRAPPGTRNQPQHF

SEQ ID NO: 425043 - protein, 17 aa, Homo sapiens
  CDR3 for alpha chain variable domain of TCR clone 212522 (TRAV3, TRAJ6)
CAVRDGPRAGGRYIPTI

SEQ ID NO: 425044 - protein, 13 aa, Homo sapiens
  CDR3 for beta chain variable domain of TCR clone 212522 (TRBV27, TRBJ1-1)
CASSLSIGAEAFF

SEQ ID NO: 425045 - protein, 14 aa, Homo sapiens
  CDR3 for alpha chain variable domain of TCR clone 212523 (TRAV12-2, TRAJ17)
CAVNIKAAGNKLTF

SEQ ID NO: 425046 - protein, 13 aa, Homo sapiens
  CDR3 for beta chain variable domain of TCR clone 212523 (TRBV9, TRBJ2-1)
CASSPSGGNEQFF

SEQ ID NO: 425047 - protein, 12 aa, Homo sapiens
  CDR3 for alpha chain variable domain of TCR clone 212524 (TRAV21, TRAJ49)
CAVSWTGNPFYF

SEQ ID NO: 425048 - protein, 18 aa, Homo sapiens
  CDR3 for beta chain variable domain of TCR clone 212524 (TRBV7-8, TRBJ2-1)
CASSPAEGLAGGLNEQFF

SEQ ID NO: 425049 - protein, 13 aa, Homo sapiens
  CDR3 for alpha chain variable domain of TCR clone 212525 (TRAV16, TRAJ31)
RALSAHNNARLMF

SEQ ID NO: 425050 - protein, 17 aa, Homo sapiens
  CDR3 for beta chain variable domain of TCR clone 212525 (TRBV12-4, TRBJ2-1)
CASSPGLAGGRINEQFF

SEQ ID NO: 425051 - protein, 16 aa, Homo sapiens
  CDR3 for alpha chain variable domain of TCR clone 212526 (TRAV8-3, TRAJ42)
CAVACDYGGSQGHLIF

SEQ ID NO: 425052 - protein, 16 aa, Homo sapiens
  CDR3 for beta chain variable domain of TCR clone 212526 (TRBV7-8, TRBJ2-1)
CASSLVGGGPYNEQFF

SEQ ID NO: 425053 - protein, 14 aa, Homo sapiens
  CDR3 for alpha chain variable domain of TCR clone 212527 (TRAV1-2, TRAJ16)
CAVNRVSDGQKLLF

SEQ ID NO: 425054 - protein, 15 aa, Homo sapiens
  CDR3 for beta chain variable domain of TCR clone 212527 (TRBV10-2, TRBJ2-6)
CASSEQGTGANVLTF

SEQ ID NO: 425055 - protein, 17 aa, Homo sapiens
  CDR3 for alpha chain variable domain of TCR clone 212528 (TRAV3, TRAJ6)
CAVRDGPRAGGSYIPTF

SEQ ID NO: 425056 - protein, 20 aa, Homo sapiens
  CDR3 for beta chain variable domain of TCR clone 212528 (TRBV28, TRBJ2-1)
CASTPIGRSPGLAGGIEQFF

SEQ ID NO: 425057 - protein, 13 aa, Homo sapiens
  CDR3 for alpha chain variable domain of TCR clone 212529 (TRAV26-2, TRAJ43)
CILRAVNNNDMRF

SEQ ID NO: 425058 - protein, 15 aa, Homo sapiens
  CDR3 for beta chain variable domain of TCR clone 212529 (TRBV12-4, TRBJ2-5)
CARSPPTGLQETQYF

SEQ ID NO: 425059 - protein, 14 aa, Homo sapiens
  CDR3 for alpha chain variable domain of TCR clone 212530 (TRAV26-1, TRAJ8)
CIVRVDTGFQRLVF

SEQ ID NO: 425060 - protein, 15 aa, Homo sapiens
  CDR3 for beta chain variable domain of TCR clone 212530 (TRBV10-2, TRBJ2-7)
CASWNGGQATYERYF

SEQ ID NO: 425061 - protein, 13 aa, Homo sapiens
  CDR3 for alpha chain variable domain of TCR clone 212531 (TRAV35, TRAJ43)
CAGYPYNNNDMRF

SEQ ID NO: 425062 - protein, 15 aa, Homo sapiens
  CDR3 for beta chain variable domain of TCR clone 212531 (TRBV25-1, TRBJ1-4)
CASSKRIATNEKRFF

SEQ ID NO: 425063 - protein, 13 aa, Homo sapiens
  CDR3 for alpha chain variable domain of TCR clone 212532 (TRAV3, TRAJ15)
CGVRDQAGTALIF

SEQ ID NO: 425064 - protein, 15 aa, Homo sapiens
  CDR3 for beta chain variable domain of TCR clone 212532 (TRBV11-1, TRBJ2-7)
CASSLNYGASYEQYF

SEQ ID NO: 425065 - protein, 15 aa, Homo sapiens
  CDR3 for alpha chain variable domain of TCR clone 212533 (TRAV20, TRAJ43)
CAVQAGKSSNNDMRL

SEQ ID NO: 425066 - protein, 13 aa, Homo sapiens
  CDR3 for beta chain variable domain of TCR clone 212533 (TRBV27, TRBJ1-1)
CASSLSMGAEAFF

SEQ ID NO: 425067 - protein, 15 aa, Homo sapiens
  CDR3 for alpha chain variable domain of TCR clone 212534 (TRAV3, TRAJ13)
CAVRVYSGGYQKVTF

SEQ ID NO: 425068 - protein, 12 aa, Homo sapiens
  CDR3 for beta chain variable domain of TCR clone 212534 (TRBV5-7, TRBJ1-2)
CASSLGWRLTMA

SEQ ID NO: 425069 - protein, 14 aa, Homo sapiens
  CDR3 for alpha chain variable domain of TCR clone 212535 (TRAV2, TRAJ9)
CAVEDRSGGLKTIF

SEQ ID NO: 425070 - protein, 18 aa, Homo sapiens
  CDR3 for beta chain variable domain of TCR clone 212535 (TRBV11-2, TRBJ2-3)
CASSFGGASRGAPNTQYF

SEQ ID NO: 425071 - protein, 13 aa, Homo sapiens
  CDR3 for alpha chain variable domain of TCR clone 212536 (TRAV1-2, TRAJ35)
CAASRGFGNVLHC

SEQ ID NO: 425072 - protein, 14 aa, Homo sapiens
  CDR3 for beta chain variable domain of TCR clone 212536 (TRBV4-1, TRBJ2-2)
CASSQAVNTGELFF

SEQ ID NO: 425073 - protein, 11 aa, Homo sapiens
  CDR3 for alpha chain variable domain of TCR clone 212537 (TRAV25, TRAJ41)
CARNSGYALNF

SEQ ID NO: 425074 - protein, 12 aa, Homo sapiens
  CDR3 for beta chain variable domain of TCR clone 212537 (TRBV11-2, TRBJ2-2)
CASSLGGGELFF

SEQ ID NO: 425075 - protein, 15 aa, Homo sapiens
  CDR3 for alpha chain variable domain of TCR clone 212538 (TRAV8-3, TRAJ27)
CAVGPSKTNAGKSTF

SEQ ID NO: 425076 - protein, 14 aa, Homo sapiens
  CDR3 for beta chain variable domain of TCR clone 212538 (TRBV6-1, TRBJ1-3)
CASVQGGGGNTIYF

SEQ ID NO: 425077 - protein, 16 aa, Homo sapiens
  CDR3 for alpha chain variable domain of TCR clone 212539 (TRAV16, TRAJ4)
CALSRMFSGGYNKLIF

SEQ ID NO: 425078 - protein, 14 aa, Homo sapiens
  CDR3 for beta chain variable domain of TCR clone 212539 (TRBV7-2, TRBJ2-1)
CASSLRGEYNEQFF

SEQ ID NO: 425079 - protein, 13 aa, Homo sapiens
  CDR3 for alpha chain variable domain of TCR clone 212540 (TRAV8-3, TRAJ36)
CAVGATGANNLFF

SEQ ID NO: 425080 - protein, 14 aa, Homo sapiens
  CDR3 for beta chain variable domain of TCR clone 212540 (TRBV7-3, TRBJ2-1)
CASSLAGGTNEQFF

SEQ ID NO: 425081 - protein, 13 aa, Homo sapiens
  CDR3 for alpha chain variable domain of TCR clone 212541 (TRAV21, TRAJ20)
CAMGLRVDYKLSF

SEQ ID NO: 425082 - protein, 18 aa, Homo sapiens
  CDR3 for beta chain variable domain of TCR clone 212541 (TRBV7-6, TRBJ2-1)
CASSPRTSGMSSYNEQFF

SEQ ID NO: 425083 - protein, 14 aa, Homo sapiens
  CDR3 for alpha chain variable domain of TCR clone 212542 (TRAV23/DV6, TRAJ4)
CAAPSSGGYNKLIF

SEQ ID NO: 425084 - protein, 15 aa, Homo sapiens
  CDR3 for beta chain variable domain of TCR clone 212542 (TRBV6-1, TRBJ2-3)
CASSERGGITDTQYF

SEQ ID NO: 425085 - protein, 16 aa, Homo sapiens
  CDR3 for alpha chain variable domain of TCR clone 212543 (TRAV30, TRAJ49)
SAAQRVGLNTGNQFYF

SEQ ID NO: 425086 - protein, 15 aa, Homo sapiens
  CDR3 for beta chain variable domain of TCR clone 212543 (TRBV2, TRBJ2-1)
CASSELAGSYNEQFF

SEQ ID NO: 425087 - protein, 18 aa, Homo sapiens
  CDR3 for alpha chain variable domain of TCR clone 212544 (TRAV29/DV5, TRAJ52)
CAAGFRGAGGTSYGRLTF

SEQ ID NO: 425088 - protein, 13 aa, Homo sapiens
  CDR3 for beta chain variable domain of TCR clone 212544 (TRBV19, TRBJ1-2)
CASSQGQVYGYTF

SEQ ID NO: 425089 - protein, 15 aa, Homo sapiens
  CDR3 for alpha chain variable domain of TCR clone 212545 (TRAV21, TRAJ13)
CAVRPTSGGYQKVTF

SEQ ID NO: 425090 - protein, 13 aa, Homo sapiens
  CDR3 for beta chain variable domain of TCR clone 212545 (TRBV12-4, TRBJ2-7)
CASSPTETYEQYF

SEQ ID NO: 425091 - protein, 13 aa, Homo sapiens
  CDR3 for alpha chain variable domain of TCR clone 212546 (TRAV12-2, TRAJ6)
CAVNVSRKLHTYI

SEQ ID NO: 425092 - protein, 12 aa, Homo sapiens
  CDR3 for beta chain variable domain of TCR clone 212546 (TRBV29-1, TRBJ2-3)
CSVTGGADSQYF

SEQ ID NO: 425093 - protein, 14 aa, Homo sapiens
  CDR3 for alpha chain variable domain of TCR clone 212547 (TRAV26-1, TRAJ38)
CIADNAGTNRKLIW

SEQ ID NO: 425094 - protein, 17 aa, Homo sapiens
  CDR3 for beta chain variable domain of TCR clone 212547 (TRBV15, TRBJ1-1)
CATSRVGGADGDTEAFF

SEQ ID NO: 425095 - protein, 14 aa, Homo sapiens
  CDR3 for alpha chain variable domain of TCR clone 212548 (TRAV17, TRAJ31)
CATVLRNNNARLMF

SEQ ID NO: 425096 - protein, 12 aa, Homo sapiens
  CDR3 for beta chain variable domain of TCR clone 212548 (TRBV29-1, TRBJ2-3)
CSVTGGADTQYF

SEQ ID NO: 425097 - protein, 14 aa, Homo sapiens
  CDR3 for alpha chain variable domain of TCR clone 212549 (TRAV1-2, TRAJ16)
CAVNRVSDGQKLLF

SEQ ID NO: 425098 - protein, 13 aa, Homo sapiens
  CDR3 for beta chain variable domain of TCR clone 212549 (TRBV27, TRBJ1-1)
CASGLSIGAEAFF

SEQ ID NO: 425099 - protein, 14 aa, Homo sapiens
  CDR3 for alpha chain variable domain of TCR clone 212550 (TRAV38-1, TRAJ40)
CAFRPTSGTYKYIF

SEQ ID NO: 425100 - protein, 14 aa, Homo sapiens
  CDR3 for beta chain variable domain of TCR clone 212550 (TRBV25-1, TRBJ1-1)
CASTHLGGNTEALF

SEQ ID NO: 425101 - protein, 16 aa, Homo sapiens
  CDR3 for alpha chain variable domain of TCR clone 212551 (TRAV26-2, TRAJ57)
CILRDVGSGGSEKLVF

SEQ ID NO: 425102 - protein, 13 aa, Homo sapiens
  CDR3 for beta chain variable domain of TCR clone 212551 (TRBV18, TRBJ2-3)
CASSPRVTDTQYF

SEQ ID NO: 425103 - protein, 18 aa, Homo sapiens
  CDR3 for alpha chain variable domain of TCR clone 212552 (TRAV13-1, TRAJ52)
CTASKRSAGGTSYGKLTF

SEQ ID NO: 425104 - protein, 14 aa, Homo sapiens
  CDR3 for beta chain variable domain of TCR clone 212552 (TRBV19, TRBJ2-1)
CASPTFVLSGEQFF

SEQ ID NO: 425105 - protein, 14 aa, Homo sapiens
  CDR3 for alpha chain variable domain of TCR clone 212553 (TRAV13-2, TRAJ10)
CAERGTGGGNKLTF

SEQ ID NO: 425106 - protein, 15 aa, Homo sapiens
  CDR3 for beta chain variable domain of TCR clone 212553 (TRBV5-1, TRBJ1-1)
CASSLGMGTSTEDFF

SEQ ID NO: 425107 - protein, 16 aa, Homo sapiens
  CDR3 for alpha chain variable domain of TCR clone 212554 (TRAV14/DV4, TRAJ53)
CAMREGGGGSNYKLTF

SEQ ID NO: 425108 - protein, 14 aa, Homo sapiens
  CDR3 for beta chain variable domain of TCR clone 212554 (TRBV20-1, TRBJ2-5)
CSAHRQGLWETQYF

SEQ ID NO: 425109 - protein, 14 aa, Homo sapiens
  CDR3 for alpha chain variable domain of TCR clone 212555 (TRAV13-1, TRAJ29)
CAASSNSGNTPLVF

SEQ ID NO: 425110 - protein, 15 aa, Homo sapiens
  CDR3 for beta chain variable domain of TCR clone 212555 (TRBV10-2, TRBJ1-1)
CASNDQMNTEAFLDK

SEQ ID NO: 425111 - protein, 17 aa, Homo sapiens
  CDR3 for alpha chain variable domain of TCR clone 212556 (TRAV26-1, TRAJ53)
CIVRVDDSGVSNYKLTF

SEQ ID NO: 425112 - protein, 15 aa, Homo sapiens
  CDR3 for beta chain variable domain of TCR clone 212556 (TRBV11-3, TRBJ2-3)
CASLKDGREGDTQYF

SEQ ID NO: 425113 - protein, 14 aa, Homo sapiens
  CDR3 for alpha chain variable domain of TCR clone 212557 (TRAV1-2, TRAJ8)
CAVREDTGFQKLVF

SEQ ID NO: 425114 - protein, 16 aa, Homo sapiens
  CDR3 for beta chain variable domain of TCR clone 212557 (TRBV12-4, TRBJ1-5)
CASSRPVGGSNKPQHF

SEQ ID NO: 425115 - protein, 13 aa, Homo sapiens
  CDR3 for alpha chain variable domain of TCR clone 212558 (TRAV2, TRAJ40)
RAVVTSGIYKYIF

SEQ ID NO: 425116 - protein, 12 aa, Homo sapiens
  CDR3 for beta chain variable domain of TCR clone 212558 (TRBV3-1, TRBJ2-3)
CASSQDRDTQYF

SEQ ID NO: 425117 - protein, 12 aa, Homo sapiens
  CDR3 for alpha chain variable domain of TCR clone 212559 (TRAV1-2, TRAJ17)
CAVRAAGNKLTF

SEQ ID NO: 425118 - protein, 16 aa, Homo sapiens
  CDR3 for beta chain variable domain of TCR clone 212559 (TRBV20-1, TRBJ2-1)
CSARGLAGSYSDEQFF

SEQ ID NO: 425119 - protein, 11 aa, Homo sapiens
  CDR3 for alpha chain variable domain of TCR clone 212560 (TRAV12-1, TRAJ44)
SLRGTASKLTF

SEQ ID NO: 425120 - protein, 13 aa, Homo sapiens
  CDR3 for beta chain variable domain of TCR clone 212560 (TRBV2, TRBJ1-5)
CATAGPGNQPQHF

SEQ ID NO: 425121 - protein, 13 aa, Homo sapiens
  CDR3 for alpha chain variable domain of TCR clone 212561 (TRAV2, TRAJ29)
CAAQNSGNTPLVF

SEQ ID NO: 425122 - protein, 13 aa, Homo sapiens
  CDR3 for beta chain variable domain of TCR clone 212561 (TRBV7-2, TRBJ2-7)
CASSSPSGSEQYF

SEQ ID NO: 425123 - protein, 12 aa, Homo sapiens
  CDR3 for alpha chain variable domain of TCR clone 212562 (TRAV20, TRAJ13)
CCVKRGYQKVTF

SEQ ID NO: 425124 - protein, 13 aa, Homo sapiens
  CDR3 for beta chain variable domain of TCR clone 212562 (TRBV12-5, TRBJ2-1)
CASCLGRGNEQFF

SEQ ID NO: 425125 - protein, 15 aa, Homo sapiens
  CDR3 for alpha chain variable domain of TCR clone 212563 (TRAV1-1, TRAJ20)
CAVRDNVANDYKLSF

SEQ ID NO: 425126 - protein, 13 aa, Homo sapiens
  CDR3 for beta chain variable domain of TCR clone 212563 (TRBV4-1, TRBJ2-2)
CATSQENTGELFF

SEQ ID NO: 425127 - protein, 14 aa, Homo sapiens
  CDR3 for alpha chain variable domain of TCR clone 212564 (TRAV20, TRAJ47)
CAVTFGEYGNKLVF

SEQ ID NO: 425128 - protein, 17 aa, Homo sapiens
  CDR3 for beta chain variable domain of TCR clone 212564 (TRBV7-8, TRBJ1-2)
CASSLRPLQGHLYGYTF

SEQ ID NO: 425129 - protein, 15 aa, Homo sapiens
  CDR3 for alpha chain variable domain of TCR clone 212565 (TRAV8-4, TRAJ37)
CAVTYGASNTGKLSF

SEQ ID NO: 425130 - protein, 13 aa, Homo sapiens
  CDR3 for beta chain variable domain of TCR clone 212565 (TRBV12-4, TRBJ2-5)
CASSLGGSRTQYF

SEQ ID NO: 425131 - protein, 16 aa, Homo sapiens
  CDR3 for alpha chain variable domain of TCR clone 212566 (TRAV3, TRAJ37)
CAVRGKGSGNTGKRTF

SEQ ID NO: 425132 - protein, 12 aa, Homo sapiens
  CDR3 for beta chain variable domain of TCR clone 212566 (TRBV12-4, TRBJ2-3)
CASSTLPDTQYF

SEQ ID NO: 425133 - protein, 13 aa, Homo sapiens
  CDR3 for alpha chain variable domain of TCR clone 212567 (TRAV12-3, TRAJ33)
CAMSVNSNYQLIC

SEQ ID NO: 425134 - protein, 15 aa, Homo sapiens
  CDR3 for beta chain variable domain of TCR clone 212567 (TRBV20-1, TRBJ2-7)
CSARDRVSGMDEQYF

SEQ ID NO: 425135 - protein, 14 aa, Homo sapiens
  CDR3 for alpha chain variable domain of TCR clone 212568 (TRAV26-1, TRAJ21)
CIVRPPYNFNKFYF

SEQ ID NO: 425136 - protein, 14 aa, Homo sapiens
  CDR3 for beta chain variable domain of TCR clone 212568 (TRBV11-3, TRBJ2-1)
CASIATTSGSIQFF

SEQ ID NO: 425137 - protein, 13 aa, Homo sapiens
  CDR3 for alpha chain variable domain of TCR clone 212569 (TRAV12-1, TRAJ53)
CVVNAESNHKLTF

SEQ ID NO: 425138 - protein, 16 aa, Homo sapiens
  CDR3 for beta chain variable domain of TCR clone 212569 (TRBV19, TRBJ1-1)
CASRPRSEALNTEAFF

SEQ ID NO: 425139 - protein, 12 aa, Homo sapiens
  CDR3 for alpha chain variable domain of TCR clone 212570 (TRAV9-2, TRAJ26)
CALRCYGQNFVF

SEQ ID NO: 425140 - protein, 12 aa, Homo sapiens
  CDR3 for beta chain variable domain of TCR clone 212570 (TRBV29-1, TRBJ2-3)
CSVTGGADTQYF

SEQ ID NO: 425141 - protein, 16 aa, Homo sapiens
  CDR3 for alpha chain variable domain of TCR clone 212571 (TRAV12-1, TRAJ42)
CVVTPYYVGSQGNLIF

SEQ ID NO: 425142 - protein, 15 aa, Homo sapiens
  CDR3 for beta chain variable domain of TCR clone 212571 (TRBV4-3, TRBJ2-7)
CASSQGGRGIYEQYF

SEQ ID NO: 425143 - protein, 14 aa, Homo sapiens
  CDR3 for alpha chain variable domain of TCR clone 212572 (TRAV1-2, TRAJ6)
CAVRLPGGSYIPTF

SEQ ID NO: 425144 - protein, 15 aa, Homo sapiens
  CDR3 for beta chain variable domain of TCR clone 212572 (TRBV28, TRBJ2-7)
CASSPGGRGFYEQYF

SEQ ID NO: 425145 - protein, 13 aa, Homo sapiens
  CDR3 for alpha chain variable domain of TCR clone 212573 (TRAV2, TRAJ20)
CAVEGPSEYKLSF

SEQ ID NO: 425146 - protein, 16 aa, Homo sapiens
  CDR3 for beta chain variable domain of TCR clone 212573 (TRBV25-1, TRBJ2-7)
CASSELTGGEIYEQYF

SEQ ID NO: 425147 - protein, 13 aa, Homo sapiens
  CDR3 for alpha chain variable domain of TCR clone 212574 (TRAV13-1, TRAJ40)
CAAISPGTYKYIF

SEQ ID NO: 425148 - protein, 13 aa, Homo sapiens
  CDR3 for beta chain variable domain of TCR clone 212574 (TRBV10-3, TRBJ2-7)
CAFRAGGPHEQYF

SEQ ID NO: 425149 - protein, 11 aa, Homo sapiens
  CDR3 for alpha chain variable domain of TCR clone 212575 (TRAV1-2, TRAJ20)
CALANDYKFSF

SEQ ID NO: 425150 - protein, 14 aa, Homo sapiens
  CDR3 for beta chain variable domain of TCR clone 212575 (TRBV6-1, TRBJ1-3)
CASVQGGGGNTIYF

SEQ ID NO: 425151 - protein, 15 aa, Homo sapiens
  CDR3 for alpha chain variable domain of TCR clone 212576 (TRAV1-1, TRAJ4)
CAVRAFSCGYNKLIF

SEQ ID NO: 425152 - protein, 16 aa, Homo sapiens
  CDR3 for beta chain variable domain of TCR clone 212576 (TRBV7-2, TRBJ2-6)
CAILRGVSSGANVLTF

SEQ ID NO: 425153 - protein, 11 aa, Homo sapiens
  CDR3 for alpha chain variable domain of TCR clone 212577 (TRAV12-3, TRAJ49)
CAANTGNKFYF

SEQ ID NO: 425154 - protein, 15 aa, Homo sapiens
  CDR3 for beta chain variable domain of TCR clone 212577 (TRBV11-2, TRBJ2-1)
CASSLGTSGLNEQFF

SEQ ID NO: 425155 - protein, 15 aa, Homo sapiens
  CDR3 for alpha chain variable domain of TCR clone 212578 (TRAV2, TRAJ15)
CAVEDRGHAGTALVF

SEQ ID NO: 425156 - protein, 15 aa, Homo sapiens
  CDR3 for beta chain variable domain of TCR clone 212578 (TRBV7-2, TRBJ2-3)
CASSLVVRGPDTQYF

SEQ ID NO: 425157 - protein, 14 aa, Homo sapiens
  CDR3 for alpha chain variable domain of TCR clone 212579 (TRAV13-2, TRAJ32)
CAENYGGATNKLIF

SEQ ID NO: 425158 - protein, 17 aa, Homo sapiens
  CDR3 for beta chain variable domain of TCR clone 212579 (TRBV7-8, TRBJ2-6)
CASSAGTGGAGANDLSF

SEQ ID NO: 425159 - protein, 12 aa, Homo sapiens
  CDR3 for alpha chain variable domain of TCR clone 212580 (TRAV12-2, TRAJ10)
WGVTGGGNKLTF

SEQ ID NO: 425160 - protein, 13 aa, Homo sapiens
  CDR3 for beta chain variable domain of TCR clone 212580 (TRBV6-1, TRBJ1-1)
CASSEVFGTEAFF

SEQ ID NO: 425161 - protein, 15 aa, Homo sapiens
  CDR3 for alpha chain variable domain of TCR clone 212581 (TRAV3, TRAJ32)
CAVSSYGGASNKLIF

SEQ ID NO: 425162 - protein, 13 aa, Homo sapiens
  CDR3 for beta chain variable domain of TCR clone 212581 (TRBV20-1, TRBJ2-7)
CSARPSTNYEQYF

SEQ ID NO: 425163 - protein, 15 aa, Homo sapiens
  CDR3 for alpha chain variable domain of TCR clone 212582 (TRAV3, TRAJ20)
CAVRDIKLSDYKLSF

SEQ ID NO: 425164 - protein, 14 aa, Homo sapiens
  CDR3 for beta chain variable domain of TCR clone 212582 (TRBV13, TRBJ2-5)
CASSLERVGETQYF

SEQ ID NO: 425165 - protein, 14 aa, Homo sapiens
  CDR3 for alpha chain variable domain of TCR clone 212583 (TRAV1-2, TRAJ16)
CSVNRFSDGQKLLF

SEQ ID NO: 425166 - protein, 15 aa, Homo sapiens
  CDR3 for beta chain variable domain of TCR clone 212583 (TRBV9, TRBJ1-6)
CASSVAGTGDSTLHF

SEQ ID NO: 425167 - protein, 15 aa, Homo sapiens
  CDR3 for alpha chain variable domain of TCR clone 212584 (TRAV21, TRAJ53)
FATLNSGGSNYKLTF

SEQ ID NO: 425168 - protein, 17 aa, Homo sapiens
  CDR3 for beta chain variable domain of TCR clone 212584 (TRBV20-1, TRBJ2-2)
CSASGSGQGGLTGELFF

SEQ ID NO: 425169 - protein, 15 aa, Homo sapiens
  CDR3 for alpha chain variable domain of TCR clone 212585 (TRAV12-3, TRAJ10)
CASYILTGGGNKLTF

SEQ ID NO: 425170 - protein, 15 aa, Homo sapiens
  CDR3 for beta chain variable domain of TCR clone 212585 (TRBV7-2, TRBJ1-6)
CASSLGPDRGMALHF

SEQ ID NO: 425171 - protein, 14 aa, Homo sapiens
  CDR3 for alpha chain variable domain of TCR clone 212586 (TRAV17, TRAJ24)
CATLTTDSWGKFQF

SEQ ID NO: 425172 - protein, 16 aa, Homo sapiens
  CDR3 for beta chain variable domain of TCR clone 212586 (TRBV4-2, TRBJ2-7)
CASSQDGGSLRREQYF

SEQ ID NO: 425173 - protein, 14 aa, Homo sapiens
  CDR3 for alpha chain variable domain of TCR clone 212587 (TRAV3, TRAJ13)
CALSYSGGYQKVTF

SEQ ID NO: 425174 - protein, 15 aa, Homo sapiens
  CDR3 for beta chain variable domain of TCR clone 212587 (TRBV7-2, TRBJ1-3)
CASSLQAGGENTIYF

SEQ ID NO: 425175 - protein, 13 aa, Homo sapiens
  CDR3 for alpha chain variable domain of TCR clone 212588 (TRAV8-3, TRAJ28)
CAGGAVGRYQLTF

SEQ ID NO: 425176 - protein, 14 aa, Homo sapiens
  CDR3 for beta chain variable domain of TCR clone 212588 (TRBV7-2, TRBJ2-7)
CASRSQGAAYEQYF

SEQ ID NO: 425177 - protein, 12 aa, Homo sapiens
  CDR3 for alpha chain variable domain of TCR clone 212589 (TRAV1-2, TRAJ26)
CAVSPYGKNFVF

SEQ ID NO: 425178 - protein, 14 aa, Homo sapiens
  CDR3 for beta chain variable domain of TCR clone 212589 (TRBV5-1, TRBJ2-7)
CASSFASGVNEQYF

SEQ ID NO: 425179 - protein, 15 aa, Homo sapiens
  CDR3 for alpha chain variable domain of TCR clone 212590 (TRAV4, TRAJ10)
CLVGDDEGGGNKLTF

SEQ ID NO: 425180 - protein, 17 aa, Homo sapiens
  CDR3 for beta chain variable domain of TCR clone 212590 (TRBV19, TRBJ2-6)
CASSTGQEFSGANVLTF

SEQ ID NO: 425181 - protein, 13 aa, Homo sapiens
  CDR3 for alpha chain variable domain of TCR clone 212591 (TRAV24, TRAJ30)
CAFLRVRDDKIIF

SEQ ID NO: 425182 - protein, 13 aa, Homo sapiens
  CDR3 for beta chain variable domain of TCR clone 212591 (TRBV11-2, TRBJ2-5)
CASSSTGEETQYF

SEQ ID NO: 425183 - protein, 20 aa, Homo sapiens
  CDR3 for alpha chain variable domain of TCR clone 212592 (TRAV8-3, TRAJ45)
LSTSVLWGSYSGGGADGLAF

SEQ ID NO: 425184 - protein, 11 aa, Homo sapiens
  CDR3 for beta chain variable domain of TCR clone 212592 (TRBV20-1, TRBJ2-5)
CSADRAETQYF

SEQ ID NO: 425185 - protein, 12 aa, Homo sapiens
  CDR3 for alpha chain variable domain of TCR clone 212593 (TRAV29/DV5, TRAJ49)
CAATDTGNQFYF

SEQ ID NO: 425186 - protein, 16 aa, Homo sapiens
  CDR3 for beta chain variable domain of TCR clone 212593 (TRBV12-4, TRBJ1-5)
CASSRPVGGSNQPQHF

SEQ ID NO: 425187 - protein, 15 aa, Homo sapiens
  CDR3 for alpha chain variable domain of TCR clone 212594 (TRAV38-2/DV8, TRAJ57)
CAYGRVFGKGTKLTV

SEQ ID NO: 425188 - protein, 18 aa, Homo sapiens
  CDR3 for beta chain variable domain of TCR clone 212594 (TRBV18, TRBJ1-1)
CASSLPGAPQGAGTEDFF

SEQ ID NO: 425189 - protein, 14 aa, Homo sapiens
  CDR3 for alpha chain variable domain of TCR clone 212595 (TRAV8-1, TRAJ49)
CASSIANTGNQFYF

SEQ ID NO: 425190 - protein, 13 aa, Homo sapiens
  CDR3 for beta chain variable domain of TCR clone 212595 (TRBV11-2, TRBJ2-5)
CASSFSSQEAQYF

SEQ ID NO: 425191 - protein, 18 aa, Homo sapiens
  CDR3 for alpha chain variable domain of TCR clone 212596 (TRAV13-1, TRAJ52)
CAAKNPNAGGTSYGKLTF

SEQ ID NO: 425192 - protein, 13 aa, Homo sapiens
  CDR3 for beta chain variable domain of TCR clone 212596 (TRBV18, TRBJ2-1)
CASGLASNNEQFF

SEQ ID NO: 425193 - protein, 19 aa, Homo sapiens
  CDR3 for alpha chain variable domain of TCR clone 212597 (TRAV13-1, TRAJ52)
CAASPYQNAGGTSYGKLTF

SEQ ID NO: 425194 - protein, 13 aa, Homo sapiens
  CDR3 for beta chain variable domain of TCR clone 212597 (TRBV19, TRBJ1-2)
CASSVPVQDGYTF

SEQ ID NO: 425195 - protein, 14 aa, Homo sapiens
  CDR3 for alpha chain variable domain of TCR clone 212598 (TRAV1-2, TRAJ8)
CAVREDTGLQKLVF

SEQ ID NO: 425196 - protein, 15 aa, Homo sapiens
  CDR3 for beta chain variable domain of TCR clone 212598 (TRBV7-9, TRBJ2-1)
CASSLGWGRANEQFF

SEQ ID NO: 425197 - protein, 13 aa, Homo sapiens
  CDR3 for alpha chain variable domain of TCR clone 212599 (TRAV20, TRAJ31)
CAVQAIGGARRMF

SEQ ID NO: 425198 - protein, 14 aa, Homo sapiens
  CDR3 for beta chain variable domain of TCR clone 212599 (TRBV2, TRBJ1-5)
CASSGTVSNQPQHF

SEQ ID NO: 425199 - protein, 15 aa, Homo sapiens
  CDR3 for alpha chain variable domain of TCR clone 212600 (TRAV25, TRAJ52)
CAGRPGGTSYGKLTF

SEQ ID NO: 425200 - protein, 15 aa, Homo sapiens
  CDR3 for beta chain variable domain of TCR clone 212600 (TRBV7-8, TRBJ2-1)
CASSSRTSREDEQFF

SEQ ID NO: 425201 - protein, 14 aa, Homo sapiens
  CDR3 for alpha chain variable domain of TCR clone 212601 (TRAV12-3, TRAJ57)
CAMSAWGGSEKLVL

SEQ ID NO: 425202 - protein, 16 aa, Homo sapiens
  CDR3 for beta chain variable domain of TCR clone 212601 (TRBV7-3, TRBJ2-2)
CASSLKRGTLSGELFF

SEQ ID NO: 425203 - protein, 14 aa, Homo sapiens
  CDR3 for alpha chain variable domain of TCR clone 212602 (TRAV12-3, TRAJ10)
SHLPLPGGGNKLTF

SEQ ID NO: 425204 - protein, 14 aa, Homo sapiens
  CDR3 for beta chain variable domain of TCR clone 212602 (TRBV4-2, TRBJ2-1)
CASGLDRAYNEQFF

SEQ ID NO: 425205 - protein, 13 aa, Homo sapiens
  CDR3 for alpha chain variable domain of TCR clone 212603 (TRAV21, TRAJ20)
CAVGLRVDYKLSF

SEQ ID NO: 425206 - protein, 14 aa, Homo sapiens
  CDR3 for beta chain variable domain of TCR clone 212603 (TRBV19, TRBJ1-5)
CASRAPDSFLSQHF

SEQ ID NO: 425207 - protein, 14 aa, Homo sapiens
  CDR3 for alpha chain variable domain of TCR clone 212604 (TRAV12-3, TRAJ10)
SHLPLTGGGNKLTF

SEQ ID NO: 425208 - protein, 17 aa, Homo sapiens
  CDR3 for beta chain variable domain of TCR clone 212604 (TRBV24-1, TRBJ2-4)
CATSDAEARGVRNIQYF

SEQ ID NO: 425209 - protein, 13 aa, Homo sapiens
  CDR3 for alpha chain variable domain of TCR clone 212605 (TRAV36/DV7, TRAJ54)
CAVDIQGAQKLVF

SEQ ID NO: 425210 - protein, 13 aa, Homo sapiens
  CDR3 for beta chain variable domain of TCR clone 212605 (TRBV7-9, TRBJ1-2)
CASSLKQNYGYTF

SEQ ID NO: 425211 - protein, 15 aa, Homo sapiens
  CDR3 for alpha chain variable domain of TCR clone 212606 (TRAV8-3, TRAJ45)
CASSYSGGGADGLTF

SEQ ID NO: 425212 - protein, 12 aa, Homo sapiens
  CDR3 for beta chain variable domain of TCR clone 212606 (TRBV4-1, TRBJ2-3)
CASSQGTDTQYF

SEQ ID NO: 425213 - protein, 15 aa, Homo sapiens
  CDR3 for alpha chain variable domain of TCR clone 212607 (TRAV26-1, TRAJ56)
CIVRVDNGADSKLTF

SEQ ID NO: 425214 - protein, 14 aa, Homo sapiens
  CDR3 for beta chain variable domain of TCR clone 212607 (TRBV5-1, TRBJ2-7)
CASSRGESLYEQYF

SEQ ID NO: 425215 - protein, 14 aa, Homo sapiens
  CDR3 for alpha chain variable domain of TCR clone 212608 (TRAV21, TRAJ58)
CALRRGRSGSRLTV

SEQ ID NO: 425216 - protein, 13 aa, Homo sapiens
  CDR3 for beta chain variable domain of TCR clone 212608 (TRBV7-2, TRBJ1-6)
CASSLKFDSPLHF

SEQ ID NO: 425217 - protein, 16 aa, Homo sapiens
  CDR3 for alpha chain variable domain of TCR clone 212609 (TRAV8-3, TRAJ44)
CAVGASNTGTASRLTF

SEQ ID NO: 425218 - protein, 15 aa, Homo sapiens
  CDR3 for beta chain variable domain of TCR clone 212609 (TRBV27, TRBJ1-5)
CASTFSRGSNQPQHF

SEQ ID NO: 425219 - protein, 12 aa, Homo sapiens
  CDR3 for alpha chain variable domain of TCR clone 212610 (TRAV20, TRAJ20)
CAVQVNDYKLSF

SEQ ID NO: 425220 - protein, 15 aa, Homo sapiens
  CDR3 for beta chain variable domain of TCR clone 212610 (TRBV10-2, TRBJ2-6)
CASSEQGTGANVLTF

SEQ ID NO: 425221 - protein, 14 aa, Homo sapiens
  CDR3 for alpha chain variable domain of TCR clone 212611 (TRAV8-3, TRAJ4)
CAVGAAGGSNKLIF

SEQ ID NO: 425222 - protein, 15 aa, Homo sapiens
  CDR3 for beta chain variable domain of TCR clone 212611 (TRBV9, TRBJ1-6)
CASSVAGTGDSPLHF

SEQ ID NO: 425223 - protein, 11 aa, Homo sapiens
  CDR3 for alpha chain variable domain of TCR clone 212612 (TRAV2, TRAJ13)
CASVGYQKVTF

SEQ ID NO: 425224 - protein, 14 aa, Homo sapiens
  CDR3 for beta chain variable domain of TCR clone 212612 (TRBV7-2, TRBJ2-7)
CASSPKTSFYEQYF

SEQ ID NO: 425225 - protein, 13 aa, Homo sapiens
  CDR3 for alpha chain variable domain of TCR clone 212613 (TRAV13-2, TRAJ48)
CAEMDFGNEKLTF

SEQ ID NO: 425226 - protein, 15 aa, Homo sapiens
  CDR3 for beta chain variable domain of TCR clone 212613 (TRBV7-3, TRBJ2-1)
CASSQREGALIEQFF

SEQ ID NO: 425227 - protein, 13 aa, Homo sapiens
  CDR3 for alpha chain variable domain of TCR clone 212614 (TRAV26-1, TRAJ40)
CIVATSGTYEYIF

SEQ ID NO: 425228 - protein, 16 aa, Homo sapiens
  CDR3 for beta chain variable domain of TCR clone 212614 (TRBV7-2, TRBJ2-2)
CASSLYRGPNTGELFF

SEQ ID NO: 425229 - protein, 15 aa, Homo sapiens
  CDR3 for alpha chain variable domain of TCR clone 212615 (TRAV17, TRAJ57)
CATGPSQGGSEKLVF

SEQ ID NO: 425230 - protein, 17 aa, Homo sapiens
  CDR3 for beta chain variable domain of TCR clone 212615 (TRBV13, TRBJ2-3)
CASSLSRVAGGRITQYF

SEQ ID NO: 425231 - protein, 14 aa, Homo sapiens
  CDR3 for alpha chain variable domain of TCR clone 212616 (TRAV25, TRAJ6)
CAGRESGGSYIPTF

SEQ ID NO: 425232 - protein, 13 aa, Homo sapiens
  CDR3 for beta chain variable domain of TCR clone 212616 (TRBV4-1, TRBJ2-2)
CASSQENTGELFF

SEQ ID NO: 425233 - protein, 16 aa, Homo sapiens
  CDR3 for alpha chain variable domain of TCR clone 212617 (TRAV3, TRAJ21)
CAVRDIERGKFNKFYF

SEQ ID NO: 425234 - protein, 11 aa, Homo sapiens
  CDR3 for beta chain variable domain of TCR clone 212617 (TRBV4-1, TRBJ2-2)
CASSQASPPGL

SEQ ID NO: 425235 - protein, 11 aa, Homo sapiens
  CDR3 for alpha chain variable domain of TCR clone 212618 (TRAV1-2, TRAJ20)
CAVSNDFKLSF

SEQ ID NO: 425236 - protein, 16 aa, Homo sapiens
  CDR3 for beta chain variable domain of TCR clone 212618 (TRBV29-1, TRBJ2-6)
CSVDDITYSGANDLTF

SEQ ID NO: 425237 - protein, 15 aa, Homo sapiens
  CDR3 for alpha chain variable domain of TCR clone 212619 (TRAV26-1, TRAJ29)
CIVRVEGSGNKPLVF

SEQ ID NO: 425238 - protein, 14 aa, Homo sapiens
  CDR3 for beta chain variable domain of TCR clone 212619 (TRBV18, TRBJ2-5)
CASSPGVSQETQYL

SEQ ID NO: 425239 - protein, 18 aa, Homo sapiens
  CDR3 for alpha chain variable domain of TCR clone 212620 (TRAV21, TRAJ52)
CAVRPSPAGGTSYGKRTF

SEQ ID NO: 425240 - protein, 13 aa, Homo sapiens
  CDR3 for beta chain variable domain of TCR clone 212620 (TRBV20-1, TRBJ1-1)
CSARVGGNTEAFF

SEQ ID NO: 425241 - protein, 11 aa, Homo sapiens
  CDR3 for alpha chain variable domain of TCR clone 212621 (TRAV21, TRAJ34)
CAVTNTGKLIF

SEQ ID NO: 425242 - protein, 12 aa, Homo sapiens
  CDR3 for beta chain variable domain of TCR clone 212621 (TRBV7-9, TRBJ1-1)
CASNLVRGEAFF

SEQ ID NO: 425243 - protein, 14 aa, Homo sapiens
  CDR3 for alpha chain variable domain of TCR clone 212622 (TRAV3, TRAJ28)
CVVRRGAGSYQLTF

SEQ ID NO: 425244 - protein, 16 aa, Homo sapiens
  CDR3 for beta chain variable domain of TCR clone 212622 (TRBV4-1, TRBJ2-7)
CASSQEWTSGPLEQYF

SEQ ID NO: 425245 - protein, 14 aa, Homo sapiens
  CDR3 for alpha chain variable domain of TCR clone 212623 (TRAV8-2, TRAJ4)
CVVSPSGGYNELIF

SEQ ID NO: 425246 - protein, 15 aa, Homo sapiens
  CDR3 for beta chain variable domain of TCR clone 212623 (TRBV4-1, TRBJ1-4)
CASSDEGGTNEKLFF

SEQ ID NO: 425247 - protein, 14 aa, Homo sapiens
  CDR3 for alpha chain variable domain of TCR clone 212624 (TRAV13-1, TRAJ40)
CAASMTSGTYKYIF

SEQ ID NO: 425248 - protein, 17 aa, Homo sapiens
  CDR3 for beta chain variable domain of TCR clone 212624 (TRBV20-1, TRBJ2-3)
CSASLLGRGGSADTQYF

SEQ ID NO: 425249 - protein, 14 aa, Homo sapiens
  CDR3 for alpha chain variable domain of TCR clone 212625 (TRAV12-3, TRAJ28)
CATNSGAGSYQLTF

SEQ ID NO: 425250 - protein, 11 aa, Homo sapiens
  CDR3 for beta chain variable domain of TCR clone 212625 (TRBV4-1, TRBJ2-2)
CASEHTGELFF

SEQ ID NO: 425251 - protein, 14 aa, Homo sapiens
  CDR3 for alpha chain variable domain of TCR clone 212626 (TRAV23/DV6, TRAJ13)
CAASETGGYQKVTF

SEQ ID NO: 425252 - protein, 14 aa, Homo sapiens
  CDR3 for beta chain variable domain of TCR clone 212626 (TRBV7-6, TRBJ2-3)
CASSLGTVTDTQYF

SEQ ID NO: 425253 - protein, 14 aa, Homo sapiens
  CDR3 for alpha chain variable domain of TCR clone 212627 (TRAV26-1, TRAJ34)
CIVRVAYNTDKHIF

SEQ ID NO: 425254 - protein, 14 aa, Homo sapiens
  CDR3 for beta chain variable domain of TCR clone 212627 (TRBV12-5, TRBJ2-5)
CASGSRTHQETQYF

SEQ ID NO: 425255 - protein, 13 aa, Homo sapiens
  CDR3 for alpha chain variable domain of TCR clone 212628 (TRAV12-2, TRAJ34)
CAVRGYNTDKLIF

SEQ ID NO: 425256 - protein, 18 aa, Homo sapiens
  CDR3 for beta chain variable domain of TCR clone 212628 (TRBV11-2, TRBJ2-3)
CASSLGGASRGAPNTQHF

SEQ ID NO: 425257 - protein, 14 aa, Homo sapiens
  CDR3 for alpha chain variable domain of TCR clone 212629 (TRAV8-6, TRAJ12)
CAVSRGDSSYKLIF

SEQ ID NO: 425258 - protein, 13 aa, Homo sapiens
  CDR3 for beta chain variable domain of TCR clone 212629 (TRBV12-4, TRBJ1-1)
CASSFSEDTEAFF

SEQ ID NO: 425259 - protein, 14 aa, Homo sapiens
  CDR3 for alpha chain variable domain of TCR clone 212630 (TRAV12-3, TRAJ6)
CAMSATGGSYIPTF

SEQ ID NO: 425260 - protein, 16 aa, Homo sapiens
  CDR3 for beta chain variable domain of TCR clone 212630 (TRBV4-2, TRBJ2-1)
CASSPRAEQGANEQFF

SEQ ID NO: 425261 - protein, 14 aa, Homo sapiens
  CDR3 for alpha chain variable domain of TCR clone 212631 (TRAV12-3, TRAJ20)
CAMSARRGDYKLSF

SEQ ID NO: 425262 - protein, 14 aa, Homo sapiens
  CDR3 for beta chain variable domain of TCR clone 212631 (TRBV7-3, TRBJ2-3)
CAGSPSARTDTQYF

SEQ ID NO: 425263 - protein, 17 aa, Homo sapiens
  CDR3 for alpha chain variable domain of TCR clone 212632 (TRAV1-1, TRAJ32)
CAVRVDDLWWCYKQAHL

SEQ ID NO: 425264 - protein, 16 aa, Homo sapiens
  CDR3 for beta chain variable domain of TCR clone 212632 (TRBV5-4, TRBJ2-3)
CASQQPGAGGADTQYF

SEQ ID NO: 425265 - protein, 16 aa, Homo sapiens
  CDR3 for alpha chain variable domain of TCR clone 212633 (TRAV30, TRAJ24)
RGTEIVDADSWGKFQF

SEQ ID NO: 425266 - protein, 13 aa, Homo sapiens
  CDR3 for beta chain variable domain of TCR clone 212633 (TRBV11-2, TRBJ2-5)
CAISSTGEETQYF

SEQ ID NO: 425267 - protein, 14 aa, Homo sapiens
  CDR3 for alpha chain variable domain of TCR clone 212634 (TRAV13-1, TRAJ44)
CAAKATGTASKLTF

SEQ ID NO: 425268 - protein, 16 aa, Homo sapiens
  CDR3 for beta chain variable domain of TCR clone 212634 (TRBV7-9, TRBJ2-6)
CASSLKGPLKANVLTF

SEQ ID NO: 425269 - protein, 13 aa, Homo sapiens
  CDR3 for alpha chain variable domain of TCR clone 212635 (TRAV13-1, TRAJ6)
CAARRGGSYIPTF

SEQ ID NO: 425270 - protein, 14 aa, Homo sapiens
  CDR3 for beta chain variable domain of TCR clone 212635 (TRBV11-2, TRBJ2-7)
CASSLGAGAYEQYF

SEQ ID NO: 425271 - protein, 14 aa, Homo sapiens
  CDR3 for alpha chain variable domain of TCR clone 212636 (TRAV3, TRAJ9)
CAVRLNTGGFKTIF

SEQ ID NO: 425272 - protein, 14 aa, Homo sapiens
  CDR3 for beta chain variable domain of TCR clone 212636 (TRBV28, TRBJ2-1)
CASSLNGRDNEQFF

SEQ ID NO: 425273 - protein, 12 aa, Homo sapiens
  CDR3 for alpha chain variable domain of TCR clone 212637 (TRAV13-2, TRAJ23)
CPERHRGGKLIF

SEQ ID NO: 425274 - protein, 16 aa, Homo sapiens
  CDR3 for beta chain variable domain of TCR clone 212637 (TRBV20-1, TRBJ1-4)
CSAPGQGLLTNEKLFF

SEQ ID NO: 425275 - protein, 15 aa, Homo sapiens
  CDR3 for alpha chain variable domain of TCR clone 212638 (TRAV12-3, TRAJ6)
CAMSATSGGSYIPTF

SEQ ID NO: 425276 - protein, 14 aa, Homo sapiens
  CDR3 for beta chain variable domain of TCR clone 212638 (TRBV20-1, TRBJ2-1)
CSAQIGGSANEQFF

SEQ ID NO: 425277 - protein, 15 aa, Homo sapiens
  CDR3 for alpha chain variable domain of TCR clone 212639 (TRAV21, TRAJ53)
CATLNSGGSNSKLTF

SEQ ID NO: 425278 - protein, 14 aa, Homo sapiens
  CDR3 for beta chain variable domain of TCR clone 212639 (TRBV19, TRBJ2-1)
CASPTFVLSGEQFF

SEQ ID NO: 425279 - protein, 22 aa, Homo sapiens
  CDR3 for alpha chain variable domain of TCR clone 212640 (TRAV24, TRAJ42)
CAFNGAKEITSLEKALNSLLNQ

SEQ ID NO: 425280 - protein, 15 aa, Homo sapiens
  CDR3 for beta chain variable domain of TCR clone 212640 (TRBV5-5, TRBJ1-5)
CASSSTPGSNQPQHF

SEQ ID NO: 425281 - protein, 13 aa, Homo sapiens
  CDR3 for alpha chain variable domain of TCR clone 212641 (TRAV8-3, TRAJ6)
CAVEKGGSYIPTF

SEQ ID NO: 425282 - protein, 15 aa, Homo sapiens
  CDR3 for beta chain variable domain of TCR clone 212641 (TRBV28, TRBJ2-5)
CASSAGRGRGETQYF

SEQ ID NO: 425283 - protein, 12 aa, Homo sapiens
  CDR3 for alpha chain variable domain of TCR clone 212642 (TRAV13-2, TRAJ8)
CAPWLGFQKLVF

SEQ ID NO: 425284 - protein, 16 aa, Homo sapiens
  CDR3 for beta chain variable domain of TCR clone 212642 (TRBV6-1, TRBJ2-5)
CASSETLDRGAETQYF

SEQ ID NO: 425285 - protein, 18 aa, Homo sapiens
  CDR3 for alpha chain variable domain of TCR clone 212643 (TRAV12-2, )
CAVEDIQNPDPAVYQLRD

SEQ ID NO: 425286 - protein, 15 aa, Homo sapiens
  CDR3 for beta chain variable domain of TCR clone 212643 (TRBV6-1, TRBJ2-3)
CASSERGGITDTQYF

SEQ ID NO: 425287 - protein, 11 aa, Homo sapiens
  CDR3 for alpha chain variable domain of TCR clone 212644 (TRAV17, TRAJ36)
CARTGANNLFF

SEQ ID NO: 425288 - protein, 13 aa, Homo sapiens
  CDR3 for beta chain variable domain of TCR clone 212644 (TRBV20-1, TRBJ1-1)
CSAPPGGHTEAFF

SEQ ID NO: 425289 - protein, 13 aa, Homo sapiens
  CDR3 for alpha chain variable domain of TCR clone 212645 (TRAV30, TRAJ24)
CGTEGNGWGKFQV

SEQ ID NO: 425290 - protein, 11 aa, Homo sapiens
  CDR3 for beta chain variable domain of TCR clone 212645 (TRBV29-1, TRBJ2-5)
CSEDRTGTQYF

SEQ ID NO: 425291 - protein, 14 aa, Homo sapiens
  CDR3 for alpha chain variable domain of TCR clone 212646 (TRAV1-2, TRAJ8)
CAVSEDTGFQKLVF

SEQ ID NO: 425292 - protein, 16 aa, Homo sapiens
  CDR3 for beta chain variable domain of TCR clone 212646 (TRBV6-1, TRBJ2-5)
CASSETLDRGAETQYF

SEQ ID NO: 425293 - protein, 11 aa, Homo sapiens
  CDR3 for alpha chain variable domain of TCR clone 212647 (TRAV1-1, TRAJ23)
FAVRQGGKLIF

SEQ ID NO: 425294 - protein, 14 aa, Homo sapiens
  CDR3 for beta chain variable domain of TCR clone 212647 (TRBV19, TRBJ2-1)
CASPTFVLSVEQFF

SEQ ID NO: 425295 - protein, 15 aa, Homo sapiens
  CDR3 for alpha chain variable domain of TCR clone 212648 (TRAV27, TRAJ45)
CAPVDSGGGADGLTF

SEQ ID NO: 425296 - protein, 23 aa, Homo sapiens
  CDR3 for beta chain variable domain of TCR clone 212648 (TRBV23-1, TRBJ1-5)
TVSLRQQSIEGTGLGGLYQHQYF

SEQ ID NO: 425297 - protein, 17 aa, Homo sapiens
  CDR3 for alpha chain variable domain of TCR clone 212649 (TRAV3, TRAJ6)
CAVRYGPRAGGSYIHTF

SEQ ID NO: 425298 - protein, 20 aa, Homo sapiens
  CDR3 for beta chain variable domain of TCR clone 212649 (TRBV28, TRBJ2-1)
CASTPIGRSPGLAGGNEQFF

SEQ ID NO: 425299 - protein, 16 aa, Homo sapiens
  CDR3 for alpha chain variable domain of TCR clone 212650 (TRAV3, TRAJ10)
CAVRDMRAGGGNKLTF

SEQ ID NO: 425300 - protein, 19 aa, Homo sapiens
  CDR3 for beta chain variable domain of TCR clone 212650 (TRBV6-3, TRBJ1-2)
CASSYSKGRTGPPNSGYTF

SEQ ID NO: 425301 - protein, 16 aa, Homo sapiens
  CDR3 for alpha chain variable domain of TCR clone 212651 (TRAV30, TRAJ24)
CGTEIVDADSWGKFQF

SEQ ID NO: 425302 - protein, 13 aa, Homo sapiens
  CDR3 for beta chain variable domain of TCR clone 212651 (TRBV20-1, TRBJ1-1)
GSARGGGNTEAFF

SEQ ID NO: 425303 - protein, 16 aa, Homo sapiens
  CDR3 for alpha chain variable domain of TCR clone 212652 (TRAV16, TRAJ4)
CALSRMFSGGYNKLIF

SEQ ID NO: 425304 - protein, 16 aa, Homo sapiens
  CDR3 for beta chain variable domain of TCR clone 212652 (TRBV18, TRBJ1-5)
CASSPYRVEGNQPQHF

SEQ ID NO: 425305 - protein, 12 aa, Homo sapiens
  CDR3 for alpha chain variable domain of TCR clone 212653 (TRAV12-2, TRAJ9)
CAVTTGGFKTIF

SEQ ID NO: 425306 - protein, 13 aa, Homo sapiens
  CDR3 for beta chain variable domain of TCR clone 212653 (TRBV4-1, TRBJ2-1)
CASSQEVQYEQFF

SEQ ID NO: 425307 - protein, 11 aa, Homo sapiens
  CDR3 for alpha chain variable domain of TCR clone 212654 (TRAV21, TRAJ34)
CAVTNTDKLIF

SEQ ID NO: 425308 - protein, 13 aa, Homo sapiens
  CDR3 for beta chain variable domain of TCR clone 212654 (TRBV7-7, TRBJ2-2)
CASSLTSAGELFF

SEQ ID NO: 425309 - protein, 10 aa, Homo sapiens
  CDR3 for alpha chain variable domain of TCR clone 212655 (TRAV36/DV7, TRAJ43)
VRPPGADMRF

SEQ ID NO: 425310 - protein, 13 aa, Homo sapiens
  CDR3 for beta chain variable domain of TCR clone 212655 (TRBV7-3, TRBJ1-1)
CASSQDWGAEAFF

SEQ ID NO: 425311 - protein, 14 aa, Homo sapiens
  CDR3 for alpha chain variable domain of TCR clone 212656 (TRAV13-1, TRAJ12)
CAASYMDSSYKLIF

SEQ ID NO: 425312 - protein, 13 aa, Homo sapiens
  CDR3 for beta chain variable domain of TCR clone 212656 (TRBV2, TRBJ2-5)
CASLDGIQETQYF

SEQ ID NO: 425313 - protein, 11 aa, Homo sapiens
  CDR3 for alpha chain variable domain of TCR clone 212657 (TRAV1-2, TRAJ40)
CAVPGTYKYIF

SEQ ID NO: 425314 - protein, 16 aa, Homo sapiens
  CDR3 for beta chain variable domain of TCR clone 212657 (TRBV7-3, TRBJ2-2)
CASSLKRGSLSGELFF

SEQ ID NO: 425315 - protein, 12 aa, Homo sapiens
  CDR3 for alpha chain variable domain of TCR clone 212658 (TRAV21, TRAJ37)
CAVRGNTGKLIF

SEQ ID NO: 425316 - protein, 17 aa, Homo sapiens
  CDR3 for beta chain variable domain of TCR clone 212658 (TRBV28, TRBJ2-1)
CASSSARQALTYNEQFF

SEQ ID NO: 425317 - protein, 11 aa, Homo sapiens
  CDR3 for alpha chain variable domain of TCR clone 212659 (TRAV21, TRAJ34)
CAVTNTDKLIF

SEQ ID NO: 425318 - protein, 13 aa, Homo sapiens
  CDR3 for beta chain variable domain of TCR clone 212659 (TRBV12-4, TRBJ2-1)
CQQFRTGASEQFF

SEQ ID NO: 425319 - protein, 14 aa, Homo sapiens
  CDR3 for alpha chain variable domain of TCR clone 212660 (TRAV3, TRAJ33)
CAVRDMGSNYQLIW

SEQ ID NO: 425320 - protein, 17 aa, Homo sapiens
  CDR3 for beta chain variable domain of TCR clone 212660 (TRBV19, TRBJ2-1)
CASSIWSAQPTHNEQFC

SEQ ID NO: 425321 - protein, 13 aa, Homo sapiens
  CDR3 for alpha chain variable domain of TCR clone 212661 (TRAV12-2, TRAJ49)
CAVKPNTGDQFYF

SEQ ID NO: 425322 - protein, 13 aa, Homo sapiens
  CDR3 for beta chain variable domain of TCR clone 212661 (TRBV4-2, TRBJ1-1)
CASSQAGNTEAFF

SEQ ID NO: 425323 - protein, 13 aa, Homo sapiens
  CDR3 for alpha chain variable domain of TCR clone 212662 (TRAV1-2, TRAJ11)
CAVRREGYSTLTF

SEQ ID NO: 425324 - protein, 14 aa, Homo sapiens
  CDR3 for beta chain variable domain of TCR clone 212662 (TRBV6-1, TRBJ1-3)
CASVQGGGGNTIYF

SEQ ID NO: 425325 - protein, 10 aa, Homo sapiens
  CDR3 for alpha chain variable domain of TCR clone 212663 (TRAV12-3, TRAJ50)
CAMSAMGNLL

SEQ ID NO: 425326 - protein, 14 aa, Homo sapiens
  CDR3 for beta chain variable domain of TCR clone 212663 (TRBV7-8, TRBJ2-3)
CASSLEAGTDTQYF

SEQ ID NO: 425327 - protein, 14 aa, Homo sapiens
  CDR3 for alpha chain variable domain of TCR clone 212664 (TRAV12-2, TRAJ5)
CAVNRSTGRRALTF

SEQ ID NO: 425328 - protein, 15 aa, Homo sapiens
  CDR3 for beta chain variable domain of TCR clone 212664 (TRBV7-8, TRBJ1-2)
CASSLVRDGGLGYTF

SEQ ID NO: 425329 - protein, 11 aa, Homo sapiens
  CDR3 for alpha chain variable domain of TCR clone 212665 (TRAV12-3, TRAJ49)
CAANTGNQFYF

SEQ ID NO: 425330 - protein, 17 aa, Homo sapiens
  CDR3 for beta chain variable domain of TCR clone 212665 (TRBV11-2, TRBJ2-1)
CASSLYPPGVEYNEQFL

SEQ ID NO: 425331 - protein, 16 aa, Homo sapiens
  CDR3 for alpha chain variable domain of TCR clone 212666 (TRAV12-2, TRAJ52)
CRLANAGCTSYGKLTF

SEQ ID NO: 425332 - protein, 13 aa, Homo sapiens
  CDR3 for beta chain variable domain of TCR clone 212666 (TRBV10-3, TRBJ2-7)
CASKLAVNYEQYF

SEQ ID NO: 425333 - protein, 14 aa, Homo sapiens
  CDR3 for alpha chain variable domain of TCR clone 212667 (TRAV8-4, TRAJ8)
CAVSEDTGFQKLVF

SEQ ID NO: 425334 - protein, 14 aa, Homo sapiens
  CDR3 for beta chain variable domain of TCR clone 212667 (TRBV25-1, TRBJ1-1)
CASTHLGGNTEAFF

SEQ ID NO: 425335 - protein, 13 aa, Homo sapiens
  CDR3 for alpha chain variable domain of TCR clone 212668 (TRAV3, TRAJ43)
CAVKARNNNDMRF

SEQ ID NO: 425336 - protein, 15 aa, Homo sapiens
  CDR3 for beta chain variable domain of TCR clone 212668 (TRBV7-9, TRBJ2-3)
CQQLFGSGGTDTQYF

SEQ ID NO: 425337 - protein, 16 aa, Homo sapiens
  CDR3 for alpha chain variable domain of TCR clone 212669 (TRAV3, TRAJ37)
CAVRGKVFGNTGKLIF

SEQ ID NO: 425338 - protein, 13 aa, Homo sapiens
  CDR3 for beta chain variable domain of TCR clone 212669 (TRBV7-3, TRBJ1-1)
CASSQDWGAEAFF

SEQ ID NO: 425339 - protein, 17 aa, Homo sapiens
  CDR3 for alpha chain variable domain of TCR clone 212670 (TRAV3, TRAJ6)
CAVRDGPRAGGGNIPTF

SEQ ID NO: 425340 - protein, 14 aa, Homo sapiens
  CDR3 for beta chain variable domain of TCR clone 212670 (TRBV7-2, TRBJ2-7)
CASSPKTSFYEQYF

SEQ ID NO: 425341 - protein, 15 aa, Homo sapiens
  CDR3 for alpha chain variable domain of TCR clone 212671 (TRAV13-1, TRAJ44)
CAASRWGGTASKLTF

SEQ ID NO: 425342 - protein, 12 aa, Homo sapiens
  CDR3 for beta chain variable domain of TCR clone 212671 (TRBV11-2, TRBJ2-2)
CASSLGGGELFF

SEQ ID NO: 425343 - protein, 14 aa, Homo sapiens
  CDR3 for alpha chain variable domain of TCR clone 212672 (TRAV12-1, TRAJ17)
CVVNYKAAGNKLAF

SEQ ID NO: 425344 - protein, 16 aa, Homo sapiens
  CDR3 for beta chain variable domain of TCR clone 212672 (TRBV12-5, TRBJ2-5)
CASGPRTSGNQETQYF

SEQ ID NO: 425345 - protein, 20 aa, Homo sapiens
  CDR3 for alpha chain variable domain of TCR clone 212673 (TRAV27, TRAJ36)
TGPSLVIQASTSAGANNLFF

SEQ ID NO: 425346 - protein, 13 aa, Homo sapiens
  CDR3 for beta chain variable domain of TCR clone 212673 (TRBV7-9, TRBJ2-3)
CASSPGSTDTQYF

SEQ ID NO: 425347 - protein, 14 aa, Homo sapiens
  CDR3 for alpha chain variable domain of TCR clone 212674 (TRAV12-2, TRAJ17)
CAVLFKAAGNKLTF

SEQ ID NO: 425348 - protein, 17 aa, Homo sapiens
  CDR3 for beta chain variable domain of TCR clone 212674 (TRBV28, TRBJ2-2)
CASSLATGMGDAGELFF

SEQ ID NO: 425349 - protein, 16 aa, Homo sapiens
  CDR3 for alpha chain variable domain of TCR clone 212675 (TRAV12-3, TRAJ53)
CAMSPGSGGSNYKLTF

SEQ ID NO: 425350 - protein, 15 aa, Homo sapiens
  CDR3 for beta chain variable domain of TCR clone 212675 (TRBV29-1, TRBJ2-5)
CSEDRTGTQYFARHA

SEQ ID NO: 425351 - protein, 14 aa, Homo sapiens
  CDR3 for alpha chain variable domain of TCR clone 212676 (TRAV4, TRAJ13)
CLVGYSGGYQKVTF

SEQ ID NO: 425352 - protein, 13 aa, Homo sapiens
  CDR3 for beta chain variable domain of TCR clone 212676 (TRBV18, TRBJ1-1)
CAGSGGRNTEAFC

SEQ ID NO: 425353 - protein, 15 aa, Homo sapiens
  CDR3 for alpha chain variable domain of TCR clone 212677 (TRAV8-3, TRAJ15)
SAVGAPNQAGTALIF

SEQ ID NO: 425354 - protein, 14 aa, Homo sapiens
  CDR3 for beta chain variable domain of TCR clone 212677 (TRBV20-1, TRBJ2-1)
CSPNDEASYNEQFF

SEQ ID NO: 425355 - protein, 12 aa, Homo sapiens
  CDR3 for alpha chain variable domain of TCR clone 212678 (TRAV13-2, TRAJ23)
CAERHRGGKLIF

SEQ ID NO: 425356 - protein, 12 aa, Homo sapiens
  CDR3 for beta chain variable domain of TCR clone 212678 (TRBV7-9, TRBJ1-5)
CASSPQGQPQHF

SEQ ID NO: 425357 - protein, 14 aa, Homo sapiens
  CDR3 for alpha chain variable domain of TCR clone 212679 (TRAV2, TRAJ22)
CAVGRGGSARKLTF

SEQ ID NO: 425358 - protein, 12 aa, Homo sapiens
  CDR3 for beta chain variable domain of TCR clone 212679 (TRBV19, TRBJ2-1)
CASRMQDTEQFF

SEQ ID NO: 425359 - protein, 13 aa, Homo sapiens
  CDR3 for alpha chain variable domain of TCR clone 212680 (TRAV12-3, TRAJ57)
CAMVGAGSEKLVF

SEQ ID NO: 425360 - protein, 15 aa, Homo sapiens
  CDR3 for beta chain variable domain of TCR clone 212680 (TRBV7-2, TRBJ1-3)
CASSWRGITGNTIYF

SEQ ID NO: 425361 - protein, 13 aa, Homo sapiens
  CDR3 for alpha chain variable domain of TCR clone 212681 (TRAV21, TRAJ20)
CAVGLRVDYKLGF

SEQ ID NO: 425362 - protein, 13 aa, Homo sapiens
  CDR3 for beta chain variable domain of TCR clone 212681 (TRBV6-1, TRBJ1-1)
CASSRQGNTGAFF

SEQ ID NO: 425363 - protein, 14 aa, Homo sapiens
  CDR3 for alpha chain variable domain of TCR clone 212682 (TRAV13-2, TRAJ32)
CAESLGGATNKLIF

SEQ ID NO: 425364 - protein, 14 aa, Homo sapiens
  CDR3 for beta chain variable domain of TCR clone 212682 (TRBV7-9, TRBJ2-7)
CASSLGTDPNEQYF

SEQ ID NO: 425365 - protein, 15 aa, Homo sapiens
  CDR3 for alpha chain variable domain of TCR clone 212683 (TRAV26-1, TRAJ29)
CIVRVEGSGNTPRVF

SEQ ID NO: 425366 - protein, 16 aa, Homo sapiens
  CDR3 for beta chain variable domain of TCR clone 212683 (TRBV5-7, TRBJ2-3)
CASSPWTSGGTDTQYF

SEQ ID NO: 425367 - protein, 13 aa, Homo sapiens
  CDR3 for alpha chain variable domain of TCR clone 212684 (TRAV8-1, TRAJ28)
CAVSGAGSYQLTF

SEQ ID NO: 425368 - protein, 14 aa, Homo sapiens
  CDR3 for beta chain variable domain of TCR clone 212684 (TRBV7-2, TRBJ2-2)
CARRGQGAAGELFF

SEQ ID NO: 425369 - protein, 16 aa, Homo sapiens
  CDR3 for alpha chain variable domain of TCR clone 212685 (TRAV30, TRAJ24)
CGTEIVDADSWGKFQV

SEQ ID NO: 425370 - protein, 18 aa, Homo sapiens
  CDR3 for beta chain variable domain of TCR clone 212685 (TRBV20-1, TRBJ2-6)
CSAETTPTHGSGANVLTF

SEQ ID NO: 425371 - protein, 12 aa, Homo sapiens
  CDR3 for alpha chain variable domain of TCR clone 212686 (TRAV12-2, TRAJ42)
CAVGGSQGNLIF

SEQ ID NO: 425372 - protein, 16 aa, Homo sapiens
  CDR3 for beta chain variable domain of TCR clone 212686 (TRBV7-3, TRBJ2-2)
CASSLTRGTLSGELFF

SEQ ID NO: 425373 - protein, 12 aa, Homo sapiens
  CDR3 for alpha chain variable domain of TCR clone 212687 (TRAV2, TRAJ10)
CASTGGGNKLTF

SEQ ID NO: 425374 - protein, 12 aa, Homo sapiens
  CDR3 for beta chain variable domain of TCR clone 212687 (TRBV11-2, TRBJ2-7)
CASSPPADEQYF

SEQ ID NO: 425375 - protein, 13 aa, Homo sapiens
  CDR3 for alpha chain variable domain of TCR clone 212688 (TRAV20, TRAJ29)
CAVQAVGNTPLVF

SEQ ID NO: 425376 - protein, 12 aa, Homo sapiens
  CDR3 for beta chain variable domain of TCR clone 212688 (TRBV11-3, TRBJ1-1)
CASSHRQGKAFF

SEQ ID NO: 425377 - protein, 12 aa, Homo sapiens
  CDR3 for alpha chain variable domain of TCR clone 212689 (TRAV12-2, TRAJ9)
CAVYNGGFKTIF

SEQ ID NO: 425378 - protein, 16 aa, Homo sapiens
  CDR3 for beta chain variable domain of TCR clone 212689 (TRBV19, TRBJ2-3)
CASGIGPNDGTDTQYF

SEQ ID NO: 425379 - protein, 10 aa, Homo sapiens
  CDR3 for alpha chain variable domain of TCR clone 212690 (TRAV12-3, TRAJ49)
CAMNDDQLYF

SEQ ID NO: 425380 - protein, 13 aa, Homo sapiens
  CDR3 for beta chain variable domain of TCR clone 212690 (TRBV12-4, TRBJ1-1)
CASSPGAGFEAFF

SEQ ID NO: 425381 - protein, 13 aa, Homo sapiens
  CDR3 for alpha chain variable domain of TCR clone 212691 (TRAV8-3, TRAJ34)
CAVGPYNTDKLIF

SEQ ID NO: 425382 - protein, 14 aa, Homo sapiens
  CDR3 for beta chain variable domain of TCR clone 212691 (TRBV7-9, TRBJ2-1)
CASSPRDSLYEQFF

SEQ ID NO: 425383 - protein, 15 aa, Homo sapiens
  CDR3 for alpha chain variable domain of TCR clone 212692 (TRAV13-1, TRAJ44)
CAASRGGGTASKLTF

SEQ ID NO: 425384 - protein, 20 aa, Homo sapiens
  CDR3 for beta chain variable domain of TCR clone 212692 (TRBV7-8, TRBJ2-2)
CASSHLFPGPTIHITGELFF

SEQ ID NO: 425385 - protein, 15 aa, Homo sapiens
  CDR3 for alpha chain variable domain of TCR clone 212693 (TRAV12-3, TRAJ6)
CAMSATTGGSYIPTF

SEQ ID NO: 425386 - protein, 16 aa, Homo sapiens
  CDR3 for beta chain variable domain of TCR clone 212693 (TRBV20-1, TRBJ1-2)
CSASIGQGVANYGDTF

SEQ ID NO: 425387 - protein, 14 aa, Homo sapiens
  CDR3 for alpha chain variable domain of TCR clone 212694 (TRAV12-3, TRAJ57)
CAMSAWGGSEKLVF

SEQ ID NO: 425388 - protein, 16 aa, Homo sapiens
  CDR3 for beta chain variable domain of TCR clone 212694 (TRBV12-4, TRBJ2-7)
CASSLIGGTGTYEQYF

SEQ ID NO: 425389 - protein, 17 aa, Homo sapiens
  CDR3 for alpha chain variable domain of TCR clone 212695 (TRAV3, TRAJ6)
CAVRDGPRAGGSYIPTF

SEQ ID NO: 425390 - protein, 15 aa, Homo sapiens
  CDR3 for beta chain variable domain of TCR clone 212695 (TRBV3-1, TRBJ2-7)
CASSQAPSGSYEQYF

SEQ ID NO: 425391 - protein, 15 aa, Homo sapiens
  CDR3 for alpha chain variable domain of TCR clone 212696 (TRAV13-1, TRAJ57)
CAASNTQGGSEKLVF

SEQ ID NO: 425392 - protein, 13 aa, Homo sapiens
  CDR3 for beta chain variable domain of TCR clone 212696 (TRBV12-4, TRBJ1-2)
CASSSGLTVISTF

SEQ ID NO: 425393 - protein, 13 aa, Homo sapiens
  CDR3 for alpha chain variable domain of TCR clone 212697 (TRAV20, TRAJ48)
CAVQGVGNEKLTF

SEQ ID NO: 425394 - protein, 14 aa, Homo sapiens
  CDR3 for beta chain variable domain of TCR clone 212697 (TRBV27, TRBJ2-7)
CASSVRDGPYEQYF

SEQ ID NO: 425395 - protein, 13 aa, Homo sapiens
  CDR3 for alpha chain variable domain of TCR clone 212698 (TRAV13-2, TRAJ8)
CAFMNTGFQKLVF

SEQ ID NO: 425396 - protein, 17 aa, Homo sapiens
  CDR3 for beta chain variable domain of TCR clone 212698 (TRBV28, TRBJ2-1)
CASSSARQALTFNEQFF

SEQ ID NO: 425397 - protein, 16 aa, Homo sapiens
  CDR3 for alpha chain variable domain of TCR clone 212699 (TRAV8-3, TRAJ8)
CAVPRAGNTGFQKLVF

SEQ ID NO: 425398 - protein, 15 aa, Homo sapiens
  CDR3 for beta chain variable domain of TCR clone 212699 (TRBV6-1, TRBJ2-6)
CASSSRPSGANVLTF

SEQ ID NO: 425399 - protein, 11 aa, Homo sapiens
  CDR3 for alpha chain variable domain of TCR clone 212700 (TRAV12-1, TRAJ8)
CVVKGFQKLVF

SEQ ID NO: 425400 - protein, 14 aa, Homo sapiens
  CDR3 for beta chain variable domain of TCR clone 212700 (TRBV19, TRBJ2-1)
CASGKSTQYNEQFF

SEQ ID NO: 425401 - protein, 12 aa, Homo sapiens
  CDR3 for alpha chain variable domain of TCR clone 212701 (TRAV12-3, TRAJ3)
CAIDSSASKIIF

SEQ ID NO: 425402 - protein, 17 aa, Homo sapiens
  CDR3 for beta chain variable domain of TCR clone 212701 (TRBV7-9, TRBJ2-3)
CASSLEEAGAYSDTQYF

SEQ ID NO: 425403 - protein, 14 aa, Homo sapiens
  CDR3 for alpha chain variable domain of TCR clone 212702 (TRAV17, TRAJ6)
CATNPAGGSFIPTF

SEQ ID NO: 425404 - protein, 15 aa, Homo sapiens
  CDR3 for beta chain variable domain of TCR clone 212702 (TRBV2, TRBJ2-5)
CASSGTVAAGETQYF

SEQ ID NO: 425405 - protein, 13 aa, Homo sapiens
  CDR3 for alpha chain variable domain of TCR clone 212703 (TRAV3, TRAJ27)
CAVRPLGAGKSTF

SEQ ID NO: 425406 - protein, 14 aa, Homo sapiens
  CDR3 for beta chain variable domain of TCR clone 212703 (TRBV11-2, TRBJ2-5)
CASSRTGGIETQYF

SEQ ID NO: 425407 - protein, 17 aa, Homo sapiens
  CDR3 for alpha chain variable domain of TCR clone 212704 (TRAV3, TRAJ38)
CAVRDCLNAGNNRKLIW

SEQ ID NO: 425408 - protein, 14 aa, Homo sapiens
  CDR3 for beta chain variable domain of TCR clone 212704 (TRBV7-3, TRBJ2-2)
CASSSGGYTGELFF

SEQ ID NO: 425409 - protein, 12 aa, Homo sapiens
  CDR3 for alpha chain variable domain of TCR clone 212705 (TRAV17, TRAJ21)
CALRYNFNKFYF

SEQ ID NO: 425410 - protein, 18 aa, Homo sapiens
  CDR3 for beta chain variable domain of TCR clone 212705 (TRBV10-3, TRBJ2-3)
CAISESRVGPMRGDTQYF

SEQ ID NO: 425411 - protein, 12 aa, Homo sapiens
  CDR3 for alpha chain variable domain of TCR clone 212706 (TRAV17, TRAJ39)
CATEGAGNMLTF

SEQ ID NO: 425412 - protein, 15 aa, Homo sapiens
  CDR3 for beta chain variable domain of TCR clone 212706 (TRBV12-4, TRBJ2-1)
CDSSPLATGNNEQFF

SEQ ID NO: 425413 - protein, 14 aa, Homo sapiens
  CDR3 for alpha chain variable domain of TCR clone 212707 (TRAV2, TRAJ37)
CAIDFTSNTGKLIF

SEQ ID NO: 425414 - protein, 13 aa, Homo sapiens
  CDR3 for beta chain variable domain of TCR clone 212707 (TRBV20-1, TRBJ1-1)
CSAPLGGGTEAFF

SEQ ID NO: 425415 - protein, 13 aa, Homo sapiens
  CDR3 for alpha chain variable domain of TCR clone 212708 (TRAV12-2, TRAJ10)
CAVPTGGGNKLTF

SEQ ID NO: 425416 - protein, 13 aa, Homo sapiens
  CDR3 for beta chain variable domain of TCR clone 212708 (TRBV18, TRBJ2-2)
CASSPTRGGELFF

SEQ ID NO: 425417 - protein, 15 aa, Homo sapiens
  CDR3 for alpha chain variable domain of TCR clone 212709 (TRAV3, TRAJ22)
CAVRDRGGSSRQLTF

SEQ ID NO: 425418 - protein, 13 aa, Homo sapiens
  CDR3 for beta chain variable domain of TCR clone 212709 (TRBV12-4, TRBJ1-2)
CASSLRQGKGYTF

SEQ ID NO: 425419 - protein, 15 aa, Homo sapiens
  CDR3 for alpha chain variable domain of TCR clone 212710 (TRAV12-2, TRAJ52)
CAVTYGGTSYGKLTF

SEQ ID NO: 425420 - protein, 15 aa, Homo sapiens
  CDR3 for beta chain variable domain of TCR clone 212710 (TRBV7-2, TRBJ2-1)
CASSPGFISGNEQFF

SEQ ID NO: 425421 - protein, 16 aa, Homo sapiens
  CDR3 for alpha chain variable domain of TCR clone 212711 (TRAV1-2, TRAJ10)
CAVRGVLTGGGDKLTF

SEQ ID NO: 425422 - protein, 16 aa, Homo sapiens
  CDR3 for beta chain variable domain of TCR clone 212711 (TRBV4-2, TRBJ2-5)
CASSQELVGSQETQYF

SEQ ID NO: 425423 - protein, 12 aa, Homo sapiens
  CDR3 for alpha chain variable domain of TCR clone 212712 (TRAV21, TRAJ33)
CAKMDSNYQLIW

SEQ ID NO: 425424 - protein, 14 aa, Homo sapiens
  CDR3 for beta chain variable domain of TCR clone 212712 (TRBV5-1, TRBJ1-1)
CASSLVSINTEAFF

SEQ ID NO: 425425 - protein, 13 aa, Homo sapiens
  CDR3 for alpha chain variable domain of TCR clone 212713 (TRAV13-1, TRAJ17)
CAADGAAGNKLTF

SEQ ID NO: 425426 - protein, 15 aa, Homo sapiens
  CDR3 for beta chain variable domain of TCR clone 212713 (TRBV15, TRBJ2-7)
CATSSRQESSYEQYF

SEQ ID NO: 425427 - protein, 16 aa, Homo sapiens
  CDR3 for alpha chain variable domain of TCR clone 212714 (TRAV30, TRAJ24)
CGTEIVDADSWGKFQF

SEQ ID NO: 425428 - protein, 12 aa, Homo sapiens
  CDR3 for beta chain variable domain of TCR clone 212714 (TRBV19, TRBJ2-7)
CASTSVGSEQYF

SEQ ID NO: 425429 - protein, 13 aa, Homo sapiens
  CDR3 for alpha chain variable domain of TCR clone 212715 (TRAV22, TRAJ29)
CAVGGSGNTPLVF

SEQ ID NO: 425430 - protein, 13 aa, Homo sapiens
  CDR3 for beta chain variable domain of TCR clone 212715 (TRBV4-2, TRBJ1-1)
CDSSQAGNTEAFF

SEQ ID NO: 425431 - protein, 14 aa, Homo sapiens
  CDR3 for alpha chain variable domain of TCR clone 212716 (TRAV8-4, TRAJ9)
CAVTFNTGGFKIIF

SEQ ID NO: 425432 - protein, 15 aa, Homo sapiens
  CDR3 for beta chain variable domain of TCR clone 212716 (TRBV7-9, TRBJ2-2)
CASSPETGAGGELFF

SEQ ID NO: 425433 - protein, 14 aa, Homo sapiens
  CDR3 for alpha chain variable domain of TCR clone 212717 (TRAV8-3, TRAJ23)
CAVIIYNQGGKLIF

SEQ ID NO: 425434 - protein, 15 aa, Homo sapiens
  CDR3 for beta chain variable domain of TCR clone 212717 (TRBV18, TRBJ2-1)
CASSPPSAAYNEQFF

SEQ ID NO: 425435 - protein, 14 aa, Homo sapiens
  CDR3 for alpha chain variable domain of TCR clone 212718 (TRAV1-2, TRAJ16)
CAVNRFSDGQKMLF

SEQ ID NO: 425436 - protein, 16 aa, Homo sapiens
  CDR3 for beta chain variable domain of TCR clone 212718 (TRBV9, TRBJ2-1)
CASSVGGGGNYNEQFF

SEQ ID NO: 425437 - protein, 14 aa, Homo sapiens
  CDR3 for alpha chain variable domain of TCR clone 212719 (TRAV12-2, TRAJ13)
CAVKKTWGYQKVTF

SEQ ID NO: 425438 - protein, 14 aa, Homo sapiens
  CDR3 for beta chain variable domain of TCR clone 212719 (TRBV5-5, TRBJ2-7)
CASSLGQGTYEQYF

SEQ ID NO: 425439 - protein, 15 aa, Homo sapiens
  CDR3 for alpha chain variable domain of TCR clone 212720 (TRAV26-1, TRAJ21)
CIVRVPNYNFSKFYF

SEQ ID NO: 425440 - protein, 16 aa, Homo sapiens
  CDR3 for beta chain variable domain of TCR clone 212720 (TRBV7-9, TRBJ2-3)
CASSLQGNPGTDTQYF

SEQ ID NO: 425441 - protein, 14 aa, Homo sapiens
  CDR3 for alpha chain variable domain of TCR clone 212721 (TRAV8-3, TRAJ9)
CAVVYNTGGFKTIF

SEQ ID NO: 425442 - protein, 14 aa, Homo sapiens
  CDR3 for beta chain variable domain of TCR clone 212721 (TRBV7-3, TRBJ2-2)
CASSAGGDTGELFF

SEQ ID NO: 425443 - protein, 13 aa, Homo sapiens
  CDR3 for alpha chain variable domain of TCR clone 212722 (TRAV30, TRAJ24)
CGTVTDSWGKLQF

SEQ ID NO: 425444 - protein, 14 aa, Homo sapiens
  CDR3 for beta chain variable domain of TCR clone 212722 (TRBV6-3, TRBJ2-2)
CASTYTPDTGELCF

SEQ ID NO: 425445 - protein, 14 aa, Homo sapiens
  CDR3 for alpha chain variable domain of TCR clone 212723 (TRAV12-3, TRAJ21)
CAATYLYNFNKFYF

SEQ ID NO: 425446 - protein, 13 aa, Homo sapiens
  CDR3 for beta chain variable domain of TCR clone 212723 (TRBV19, TRBJ2-2)
CASSSKNTGELFF

SEQ ID NO: 425447 - protein, 11 aa, Homo sapiens
  CDR3 for alpha chain variable domain of TCR clone 212724 (TRAV21, TRAJ34)
CAHYNTDKLIF

SEQ ID NO: 425448 - protein, 13 aa, Homo sapiens
  CDR3 for beta chain variable domain of TCR clone 212724 (TRBV12-5, TRBJ2-3)
CASGDRQSDTQYF

SEQ ID NO: 425449 - protein, 12 aa, Homo sapiens
  CDR3 for alpha chain variable domain of TCR clone 212725 (TRAV26-2, TRAJ21)
GILKGNFNKFYF

SEQ ID NO: 425450 - protein, 14 aa, Homo sapiens
  CDR3 for beta chain variable domain of TCR clone 212725 (TRBV7-9, TRBJ1-1)
CASTPLQSYTEAFF

SEQ ID NO: 425451 - protein, 12 aa, Homo sapiens
  CDR3 for alpha chain variable domain of TCR clone 212726 (TRAV12-3, TRAJ17)
CSMTLTGNKLTF

SEQ ID NO: 425452 - protein, 15 aa, Homo sapiens
  CDR3 for beta chain variable domain of TCR clone 212726 (TRBV12-4, TRBJ2-5)
CASSPPTGLQETQYF

SEQ ID NO: 425453 - protein, 14 aa, Homo sapiens
  CDR3 for alpha chain variable domain of TCR clone 212727 (TRAV26-1, TRAJ38)
CIADNAGNNRKLIW

SEQ ID NO: 425454 - protein, 20 aa, Homo sapiens
  CDR3 for beta chain variable domain of TCR clone 212727 (TRBV5-5, TRBJ2-1)
PAAQPNRGTDSLSSYNEQFF

SEQ ID NO: 425455 - protein, 14 aa, Homo sapiens
  CDR3 for alpha chain variable domain of TCR clone 212728 (TRAV23/DV6, TRAJ17)
FAASIGAAGNKLTF

SEQ ID NO: 425456 - protein, 12 aa, Homo sapiens
  CDR3 for beta chain variable domain of TCR clone 212728 (TRBV20-1, TRBJ2-5)
CSAGGAGETQYF

SEQ ID NO: 425457 - protein, 19 aa, Homo sapiens
  CDR3 for alpha chain variable domain of TCR clone 212729 (TRAV30, TRAJ52)
CGTEANTNAGGTSYGKLTF

SEQ ID NO: 425458 - protein, 19 aa, Homo sapiens
  CDR3 for beta chain variable domain of TCR clone 212729 (TRBV28, TRBJ2-7)
CASSPLVGAGGRAGSTSGR

SEQ ID NO: 425459 - protein, 17 aa, Homo sapiens
  CDR3 for alpha chain variable domain of TCR clone 212730 (TRAV3, TRAJ12)
CAVRDGGRMDSSYKLIF

SEQ ID NO: 425460 - protein, 14 aa, Homo sapiens
  CDR3 for beta chain variable domain of TCR clone 212730 (TRBV12-4, TRBJ1-3)
CASTLTGAGNTMYF

SEQ ID NO: 425461 - protein, 17 aa, Homo sapiens
  CDR3 for alpha chain variable domain of TCR clone 212731 (TRAV3, TRAJ6)
CAVRDGPRAGGRYIPTF

SEQ ID NO: 425462 - protein, 14 aa, Homo sapiens
  CDR3 for beta chain variable domain of TCR clone 212731 (TRBV11-1, TRBJ2-7)
CASSFRQGSYEQYF

SEQ ID NO: 425463 - protein, 14 aa, Homo sapiens
  CDR3 for alpha chain variable domain of TCR clone 212732 (TRAV1-2, TRAJ16)
CAVNRFSDGQKRLF

SEQ ID NO: 425464 - protein, 14 aa, Homo sapiens
  CDR3 for beta chain variable domain of TCR clone 212732 (TRBV7-9, TRBJ2-3)
CASNSEDGTDTQYF

SEQ ID NO: 425465 - protein, 16 aa, Homo sapiens
  CDR3 for alpha chain variable domain of TCR clone 212733 (TRAV38-2/DV8, TRAJ45)
CAYRGNSGGGADGLTF

SEQ ID NO: 425466 - protein, 15 aa, Homo sapiens
  CDR3 for beta chain variable domain of TCR clone 212733 (TRBV20-1, TRBJ2-7)
CSARDRVSGMDEQYF

SEQ ID NO: 425467 - protein, 18 aa, Homo sapiens
  CDR3 for alpha chain variable domain of TCR clone 212734 (TRAV26-1, TRAJ52)
CTGRVEGAGGTSYGKLTF

SEQ ID NO: 425468 - protein, 13 aa, Homo sapiens
  CDR3 for beta chain variable domain of TCR clone 212734 (TRBV7-3, TRBJ1-2)
CASSLKRGYGYTF

SEQ ID NO: 425469 - protein, 13 aa, Homo sapiens
  CDR3 for alpha chain variable domain of TCR clone 212735 (TRAV24, TRAJ15)
CAFKDQAGTALIF

SEQ ID NO: 425470 - protein, 14 aa, Homo sapiens
  CDR3 for beta chain variable domain of TCR clone 212735 (TRBV2, TRBJ2-1)
CASSLSGSQGEQYF

SEQ ID NO: 425471 - protein, 11 aa, Homo sapiens
  CDR3 for alpha chain variable domain of TCR clone 212736 (TRAV17, TRAJ9)
CATTGGFKTIF

SEQ ID NO: 425472 - protein, 14 aa, Homo sapiens
  CDR3 for beta chain variable domain of TCR clone 212736 (TRBV7-9, TRBJ2-2)
SASSGLADTRELFF

SEQ ID NO: 425473 - protein, 19 aa, Homo sapiens
  CDR3 for alpha chain variable domain of TCR clone 212737 (TRAV17, TRAJ17)
CATDGRPGVIKAAGNKLTF

SEQ ID NO: 425474 - protein, 12 aa, Homo sapiens
  CDR3 for beta chain variable domain of TCR clone 212737 (TRBV28, TRBJ2-3)
CASSLYRDTQYF

SEQ ID NO: 425475 - protein, 14 aa, Homo sapiens
  CDR3 for alpha chain variable domain of TCR clone 212738 (TRAV1-2, TRAJ8)
FAVREDTGFQKLVF

SEQ ID NO: 425476 - protein, 16 aa, Homo sapiens
  CDR3 for beta chain variable domain of TCR clone 212738 (TRBV27, TRBJ2-2)
CASSFRGLVRTGELFF

SEQ ID NO: 425477 - protein, 14 aa, Homo sapiens
  CDR3 for alpha chain variable domain of TCR clone 212739 (TRAV13-2, TRAJ6)
CAERGSGGSYIPTF

SEQ ID NO: 425478 - protein, 17 aa, Homo sapiens
  CDR3 for beta chain variable domain of TCR clone 212739 (TRBV12-4, TRBJ2-2)
CASSLGVGRGGTGELFF

SEQ ID NO: 425479 - protein, 16 aa, Homo sapiens
  CDR3 for alpha chain variable domain of TCR clone 212740 (TRAV3, TRAJ28)
CAVLPRSGAGSYQLTF

SEQ ID NO: 425480 - protein, 13 aa, Homo sapiens
  CDR3 for beta chain variable domain of TCR clone 212740 (TRBV12-4, TRBJ2-5)
CVSRLAVQETQYF

SEQ ID NO: 425481 - protein, 14 aa, Homo sapiens
  CDR3 for alpha chain variable domain of TCR clone 212741 (TRAV20, TRAJ40)
CAVSLTSGTSKYIF

SEQ ID NO: 425482 - protein, 21 aa, Homo sapiens
  CDR3 for beta chain variable domain of TCR clone 212741 (TRBV27, TRBJ1-1)
CASSFLETARREFSLKLSLDK

SEQ ID NO: 425483 - protein, 16 aa, Homo sapiens
  CDR3 for alpha chain variable domain of TCR clone 212742 (TRAV27, TRAJ52)
CAGPSAGGTSYGKLTF

SEQ ID NO: 425484 - protein, 15 aa, Homo sapiens
  CDR3 for beta chain variable domain of TCR clone 212742 (TRBV7-9, TRBJ2-1)
CQQLGGAVGDNEQFF

SEQ ID NO: 425485 - protein, 14 aa, Homo sapiens
  CDR3 for alpha chain variable domain of TCR clone 212743 (TRAV3, TRAJ40)
CAVRDRRGTYKYIF

SEQ ID NO: 425486 - protein, 15 aa, Homo sapiens
  CDR3 for beta chain variable domain of TCR clone 212743 (TRBV28, TRBJ2-1)
CASSRIAGGRSEQFF

SEQ ID NO: 425487 - protein, 11 aa, Homo sapiens
  CDR3 for alpha chain variable domain of TCR clone 212744 (TRAV12-3, TRAJ49)
CAANTGNQFYF

SEQ ID NO: 425488 - protein, 16 aa, Homo sapiens
  CDR3 for beta chain variable domain of TCR clone 212744 (TRBV2, TRBJ2-1)
CASRSPAGGKYNEQFF

SEQ ID NO: 425489 - protein, 12 aa, Homo sapiens
  CDR3 for alpha chain variable domain of TCR clone 212745 (TRAV1-1, TRAJ23)
CAVTNQGGKLIF

SEQ ID NO: 425490 - protein, 16 aa, Homo sapiens
  CDR3 for beta chain variable domain of TCR clone 212745 (TRBV19, TRBJ2-1)
CANSKAGPSSYNEQFF

SEQ ID NO: 425491 - protein, 11 aa, Homo sapiens
  CDR3 for alpha chain variable domain of TCR clone 212746 (TRAV13-1, TRAJ43)
CAASMRNDLRF

SEQ ID NO: 425492 - protein, 12 aa, Homo sapiens
  CDR3 for beta chain variable domain of TCR clone 212746 (TRBV29-1, TRBJ2-3)
CSVTGGADTQYF

SEQ ID NO: 425493 - protein, 14 aa, Homo sapiens
  CDR3 for alpha chain variable domain of TCR clone 212747 (TRAV26-1, TRAJ44)
CIVSNIGTASKLTF

SEQ ID NO: 425494 - protein, 11 aa, Homo sapiens
  CDR3 for beta chain variable domain of TCR clone 212747 (TRBV19, TRBJ2-7)
CASSILGEQYF

SEQ ID NO: 425495 - protein, 18 aa, Homo sapiens
  CDR3 for alpha chain variable domain of TCR clone 212748 (TRAV3, TRAJ32)
CAVRDISGYGGATNKLIL

SEQ ID NO: 425496 - protein, 15 aa, Homo sapiens
  CDR3 for beta chain variable domain of TCR clone 212748 (TRBV12-4, TRBJ2-2)
CASSLGVRHTGELFF

SEQ ID NO: 425497 - protein, 15 aa, Homo sapiens
  CDR3 for alpha chain variable domain of TCR clone 212749 (TRAV35, TRAJ42)
CAGPLSRGSQGNLIF

SEQ ID NO: 425498 - protein, 14 aa, Homo sapiens
  CDR3 for beta chain variable domain of TCR clone 212749 (TRBV6-5, TRBJ1-1)
CASSFGQGLTEAFF

SEQ ID NO: 425499 - protein, 15 aa, Homo sapiens
  CDR3 for alpha chain variable domain of TCR clone 212750 (TRAV26-2, TRAJ57)
CILRAIRGGSEKLVF

SEQ ID NO: 425500 - protein, 15 aa, Homo sapiens
  CDR3 for beta chain variable domain of TCR clone 212750 (TRBV2, TRBJ2-1)
CASDIGLAGEGEQFF

SEQ ID NO: 425501 - protein, 15 aa, Homo sapiens
  CDR3 for alpha chain variable domain of TCR clone 212751 (TRAV2, TRAJ22)
CAVPSRGGSARQLTS

SEQ ID NO: 425502 - protein, 14 aa, Homo sapiens
  CDR3 for beta chain variable domain of TCR clone 212751 (TRBV4-2, TRBJ2-1)
CASGLDRAYNEQFF

SEQ ID NO: 425503 - protein, 17 aa, Homo sapiens
  CDR3 for alpha chain variable domain of TCR clone 212752 (TRAV12-1, TRAJ42)
CVVNMQRKGGSQGNLIF

SEQ ID NO: 425504 - protein, 15 aa, Homo sapiens
  CDR3 for beta chain variable domain of TCR clone 212752 (TRBV3-1, TRBJ1-2)
CASSHPGTPGYGYTF

SEQ ID NO: 425505 - protein, 13 aa, Homo sapiens
  CDR3 for alpha chain variable domain of TCR clone 212753 (TRAV8-3, TRAJ28)
CAVCAVVSYQLTF

SEQ ID NO: 425506 - protein, 14 aa, Homo sapiens
  CDR3 for beta chain variable domain of TCR clone 212753 (TRBV7-2, TRBJ2-7)
CASRSQGAAYEQYF

SEQ ID NO: 425507 - protein, 12 aa, Homo sapiens
  CDR3 for alpha chain variable domain of TCR clone 212754 (TRAV12-3, TRAJ40)
CAMSSGTYKYIF

SEQ ID NO: 425508 - protein, 20 aa, Homo sapiens
  CDR3 for beta chain variable domain of TCR clone 212754 (TRBV7-8, TRBJ2-2)
CASSHLFPGTTIHITGELFF

SEQ ID NO: 425509 - protein, 13 aa, Homo sapiens
  CDR3 for alpha chain variable domain of TCR clone 212755 (TRAV8-6, TRAJ49)
CAVITNTGNQFYF

SEQ ID NO: 425510 - protein, 15 aa, Homo sapiens
  CDR3 for beta chain variable domain of TCR clone 212755 (TRBV6-3, TRBJ2-7)
CASSSPGTVFYEQYL

SEQ ID NO: 425511 - protein, 17 aa, Homo sapiens
  CDR3 for alpha chain variable domain of TCR clone 212756 (TRAV3, TRAJ42)
CAVRDRDYGGSQGNLIF

SEQ ID NO: 425512 - protein, 13 aa, Homo sapiens
  CDR3 for beta chain variable domain of TCR clone 212756 (TRBV7-6, TRBJ1-2)
CASSLVADYGYTF

SEQ ID NO: 425513 - protein, 14 aa, Homo sapiens
  CDR3 for alpha chain variable domain of TCR clone 212757 (TRAV21, TRAJ35)
CAVMPIGFGNVLHC

SEQ ID NO: 425514 - protein, 16 aa, Homo sapiens
  CDR3 for beta chain variable domain of TCR clone 212757 (TRBV9, TRBJ2-1)
CASSVGGGGNYNEQFF

SEQ ID NO: 425515 - protein, 14 aa, Homo sapiens
  CDR3 for alpha chain variable domain of TCR clone 212758 (TRAV12-3, TRAJ47)
CGMSVREYGNKLVF

SEQ ID NO: 425516 - protein, 15 aa, Homo sapiens
  CDR3 for beta chain variable domain of TCR clone 212758 (TRBV20-1, TRBJ2-2)
CSARDTRLNTGELFF

SEQ ID NO: 425517 - protein, 13 aa, Homo sapiens
  CDR3 for alpha chain variable domain of TCR clone 212759 (TRAV12-3, TRAJ40)
CAMSDSGTYQYIF

SEQ ID NO: 425518 - protein, 14 aa, Homo sapiens
  CDR3 for beta chain variable domain of TCR clone 212759 (TRBV7-2, TRBJ1-5)
CASSTQGAGQPQHF

SEQ ID NO: 425519 - protein, 15 aa, Homo sapiens
  CDR3 for alpha chain variable domain of TCR clone 212760 (TRAV21, TRAJ53)
CATLNSGGSNYKLTF

SEQ ID NO: 425520 - protein, 17 aa, Homo sapiens
  CDR3 for beta chain variable domain of TCR clone 212760 (TRBV20-1, TRBJ2-7)
CSARDRSLGWTSSTSGR

SEQ ID NO: 425521 - protein, 14 aa, Homo sapiens
  CDR3 for alpha chain variable domain of TCR clone 212761 (TRAV1-2, TRAJ8)
CAVREDTGFQKLVF

SEQ ID NO: 425522 - protein, 16 aa, Homo sapiens
  CDR3 for beta chain variable domain of TCR clone 212761 (TRBV24-1, TRBJ2-3)
CATSGYRDRDTDTQYS

SEQ ID NO: 425523 - protein, 12 aa, Homo sapiens
  CDR3 for alpha chain variable domain of TCR clone 212762 (TRAV8-3, TRAJ41)
CAVGALGYALNF

SEQ ID NO: 425524 - protein, 16 aa, Homo sapiens
  CDR3 for beta chain variable domain of TCR clone 212762 (TRBV7-6, TRBJ2-3)
CDSSDSRGEGTDTQYF

SEQ ID NO: 425525 - protein, 13 aa, Homo sapiens
  CDR3 for alpha chain variable domain of TCR clone 212763 (TRAV21, TRAJ27)
CAARPGNAGKSAF

SEQ ID NO: 425526 - protein, 13 aa, Homo sapiens
  CDR3 for beta chain variable domain of TCR clone 212763 (TRBV7-3, TRBJ2-7)
CASSQAGGYEQYF

SEQ ID NO: 425527 - protein, 15 aa, Homo sapiens
  CDR3 for alpha chain variable domain of TCR clone 212764 (TRAV12-1, TRAJ44)
CVVFVNTGTASKLTF

SEQ ID NO: 425528 - protein, 14 aa, Homo sapiens
  CDR3 for beta chain variable domain of TCR clone 212764 (TRBV7-8, TRBJ2-3)
CASSLEAGTDTQYF

SEQ ID NO: 425529 - protein, 13 aa, Homo sapiens
  CDR3 for alpha chain variable domain of TCR clone 212765 (TRAV12-1, TRAJ30)
CVVNTYRDDKIIF

SEQ ID NO: 425530 - protein, 12 aa, Homo sapiens
  CDR3 for beta chain variable domain of TCR clone 212765 (TRBV12-4, TRBJ2-1)
CASSLQGSEQFF

SEQ ID NO: 425531 - protein, 16 aa, Homo sapiens
  CDR3 for alpha chain variable domain of TCR clone 212766 (TRAV16, TRAJ4)
CALSRMFSGGYNKLIF

SEQ ID NO: 425532 - protein, 16 aa, Homo sapiens
  CDR3 for beta chain variable domain of TCR clone 212766 (TRBV11-2, TRBJ2-7)
CASSLAPTGVNYEQYF

SEQ ID NO: 425533 - protein, 14 aa, Homo sapiens
  CDR3 for alpha chain variable domain of TCR clone 212767 (TRAV8-4, TRAJ8)
CAVSVNTGFQKLVF

SEQ ID NO: 425534 - protein, 15 aa, Homo sapiens
  CDR3 for beta chain variable domain of TCR clone 212767 (TRBV20-1, TRBJ2-7)
CSARDRVSGMDEQYF

SEQ ID NO: 425535 - protein, 16 aa, Homo sapiens
  CDR3 for alpha chain variable domain of TCR clone 212768 (TRAV30, TRAJ24)
CGTEIVDADSWGKFQF

SEQ ID NO: 425536 - protein, 17 aa, Homo sapiens
  CDR3 for beta chain variable domain of TCR clone 212768 (TRBV11-2, TRBJ2-1)
CASSLYPPRVEYNEQFF

SEQ ID NO: 425537 - protein, 19 aa, Homo sapiens
  CDR3 for alpha chain variable domain of TCR clone 212769 (TRAV2, TRAJ20)
ILQVREADAAVYRDCKLRF

SEQ ID NO: 425538 - protein, 13 aa, Homo sapiens
  CDR3 for beta chain variable domain of TCR clone 212769 (TRBV15, TRBJ1-6)
CAAPGGLNSPLHF

SEQ ID NO: 425539 - protein, 14 aa, Homo sapiens
  CDR3 for alpha chain variable domain of TCR clone 212770 (TRAV27, TRAJ49)
CAGRPEGTGNQFYF

SEQ ID NO: 425540 - protein, 15 aa, Homo sapiens
  CDR3 for beta chain variable domain of TCR clone 212770 (TRBV11-1, TRBJ2-7)
CASSLNYGASYEQYF

SEQ ID NO: 425541 - protein, 14 aa, Homo sapiens
  CDR3 for alpha chain variable domain of TCR clone 212771 (TRAV23/DV6, TRAJ58)
CASMRETSGSRLTF

SEQ ID NO: 425542 - protein, 13 aa, Homo sapiens
  CDR3 for beta chain variable domain of TCR clone 212771 (TRBV28, TRBJ2-7)
CASRSSGVYEQYF

SEQ ID NO: 425543 - protein, 15 aa, Homo sapiens
  CDR3 for alpha chain variable domain of TCR clone 212772 (TRAV12-1, TRAJ44)
CVVFVNTGTASKLTF

SEQ ID NO: 425544 - protein, 12 aa, Homo sapiens
  CDR3 for beta chain variable domain of TCR clone 212772 (TRBV29-1, TRBJ2-3)
CSVTGGADTQYF

SEQ ID NO: 425545 - protein, 14 aa, Homo sapiens
  CDR3 for alpha chain variable domain of TCR clone 212773 (TRAV12-2, TRAJ53)
CAVKGGGSNYKLTF

SEQ ID NO: 425546 - protein, 13 aa, Homo sapiens
  CDR3 for beta chain variable domain of TCR clone 212773 (TRBV19, TRBJ1-3)
CASRLALGNTIYF

SEQ ID NO: 425547 - protein, 15 aa, Homo sapiens
  CDR3 for alpha chain variable domain of TCR clone 212774 (TRAV20, TRAJ58)
CAVQDLETSGSRLTF

SEQ ID NO: 425548 - protein, 16 aa, Homo sapiens
  CDR3 for beta chain variable domain of TCR clone 212774 (TRBV4-1, TRBJ2-7)
CASSQNDRDNSYEQYF

SEQ ID NO: 425549 - protein, 14 aa, Homo sapiens
  CDR3 for alpha chain variable domain of TCR clone 212775 (TRAV16, TRAJ3)
CALSQYSSSSKIIF

SEQ ID NO: 425550 - protein, 14 aa, Homo sapiens
  CDR3 for beta chain variable domain of TCR clone 212775 (TRBV6-3, TRBJ2-1)
CASLHSAYYNEQFF

SEQ ID NO: 425551 - protein, 16 aa, Homo sapiens
  CDR3 for alpha chain variable domain of TCR clone 212776 (TRAV16, TRAJ57)
CAPYLITQGGSEKLVF

SEQ ID NO: 425552 - protein, 17 aa, Homo sapiens
  CDR3 for beta chain variable domain of TCR clone 212776 (TRBV24-1, TRBJ2-4)
CATSDAEARGVRIIQYF

SEQ ID NO: 425553 - protein, 13 aa, Homo sapiens
  CDR3 for alpha chain variable domain of TCR clone 212777 (TRAV39, TRAJ57)
CAVDRGGSEKLVF

SEQ ID NO: 425554 - protein, 11 aa, Homo sapiens
  CDR3 for beta chain variable domain of TCR clone 212777 (TRBV4-1, TRBJ2-2)
CASEHTGELFF

SEQ ID NO: 425555 - protein, 12 aa, Homo sapiens
  CDR3 for alpha chain variable domain of TCR clone 212778 (TRAV20, TRAJ4)
CSASGGYNKLIF

SEQ ID NO: 425556 - protein, 13 aa, Homo sapiens
  CDR3 for beta chain variable domain of TCR clone 212778 (TRBV9, TRBJ2-1)
CASGPSGGNEQFF

SEQ ID NO: 425557 - protein, 19 aa, Homo sapiens
  CDR3 for alpha chain variable domain of TCR clone 212779 (TRAV1-2, TRAJ26)
CLLPLFCERPDNYGQNFVF

SEQ ID NO: 425558 - protein, 17 aa, Homo sapiens
  CDR3 for beta chain variable domain of TCR clone 212779 (TRBV28, TRBJ2-5)
CASSRQGGLAGAETQYF

SEQ ID NO: 425559 - protein, 17 aa, Homo sapiens
  CDR3 for alpha chain variable domain of TCR clone 212780 (TRAV3, TRAJ6)
CAVRDGPRAGGSYIPTF

SEQ ID NO: 425560 - protein, 15 aa, Homo sapiens
  CDR3 for beta chain variable domain of TCR clone 212780 (TRBV11-3, TRBJ2-7)
CASSPGPASSYEQYY

SEQ ID NO: 425561 - protein, 13 aa, Homo sapiens
  CDR3 for alpha chain variable domain of TCR clone 212781 (TRAV12-2, TRAJ10)
CAVPTGGGNKLTF

SEQ ID NO: 425562 - protein, 15 aa, Homo sapiens
  CDR3 for beta chain variable domain of TCR clone 212781 (TRBV4-3, TRBJ2-3)
CASSPSLLSTDTQYF

SEQ ID NO: 425563 - protein, 14 aa, Homo sapiens
  CDR3 for alpha chain variable domain of TCR clone 212782 (TRAV12-2, TRAJ17)
CAVNIKAAGNKLTF

SEQ ID NO: 425564 - protein, 16 aa, Homo sapiens
  CDR3 for beta chain variable domain of TCR clone 212782 (TRBV28, TRBJ2-6)
CASSNRRGSGANVLTF

SEQ ID NO: 425565 - protein, 14 aa, Homo sapiens
  CDR3 for alpha chain variable domain of TCR clone 212783 (TRAV1-1, TRAJ27)
CAVIYNTNAGKSTF

SEQ ID NO: 425566 - protein, 16 aa, Homo sapiens
  CDR3 for beta chain variable domain of TCR clone 212783 (TRBV4-1, TRBJ2-3)
CASSQSTSGAEDTQYF

SEQ ID NO: 425567 - protein, 16 aa, Homo sapiens
  CDR3 for alpha chain variable domain of TCR clone 212784 (TRAV3, TRAJ37)
CAVRPHGSGKPGKLIF

SEQ ID NO: 425568 - protein, 16 aa, Homo sapiens
  CDR3 for beta chain variable domain of TCR clone 212784 (TRBV9, TRBJ1-2)
CASSVEEKVSPYGYTF

SEQ ID NO: 425569 - protein, 15 aa, Homo sapiens
  CDR3 for alpha chain variable domain of TCR clone 212785 (TRAV8-3, TRAJ45)
CAVEGSGGGADGRTF

SEQ ID NO: 425570 - protein, 16 aa, Homo sapiens
  CDR3 for beta chain variable domain of TCR clone 212785 (TRBV6-5, TRBJ2-6)
CASSYPLSSGANVLTF

SEQ ID NO: 425571 - protein, 15 aa, Homo sapiens
  CDR3 for alpha chain variable domain of TCR clone 212786 (TRAV17, TRAJ56)
CATEPFAGANSKLTF

SEQ ID NO: 425572 - protein, 14 aa, Homo sapiens
  CDR3 for beta chain variable domain of TCR clone 212786 (TRBV19, TRBJ2-1)
CASPTSVLSGEQFF

SEQ ID NO: 425573 - protein, 13 aa, Homo sapiens
  CDR3 for alpha chain variable domain of TCR clone 212787 (TRAV29/DV5, TRAJ44)
CAASTGTASKLTF

SEQ ID NO: 425574 - protein, 15 aa, Homo sapiens
  CDR3 for beta chain variable domain of TCR clone 212787 (TRBV7-2, TRBJ2-7)
CASSSPRTARDEQYF

SEQ ID NO: 425575 - protein, 15 aa, Homo sapiens
  CDR3 for alpha chain variable domain of TCR clone 212788 (TRAV29/DV5, TRAJ24)
CAASGATDSWGKFQF

SEQ ID NO: 425576 - protein, 20 aa, Homo sapiens
  CDR3 for beta chain variable domain of TCR clone 212788 (TRBV11-2, TRBJ2-2)
LRTRACISVPAASLPGSCFF

SEQ ID NO: 425577 - protein, 14 aa, Homo sapiens
  CDR3 for alpha chain variable domain of TCR clone 212789 (TRAV12-2, TRAJ13)
CAVEKTGGYQKVTF

SEQ ID NO: 425578 - protein, 13 aa, Homo sapiens
  CDR3 for beta chain variable domain of TCR clone 212789 (TRBV20-1, TRBJ1-1)
CSARGGGNTEAFF

SEQ ID NO: 425579 - protein, 15 aa, Homo sapiens
  CDR3 for alpha chain variable domain of TCR clone 212790 (TRAV26-1, TRAJ39)
CIVRVASNAGNMLTF

SEQ ID NO: 425580 - protein, 15 aa, Homo sapiens
  CDR3 for beta chain variable domain of TCR clone 212790 (TRBV7-3, TRBJ2-1)
CASSPTGGGEVEQFF

SEQ ID NO: 425581 - protein, 14 aa, Homo sapiens
  CDR3 for alpha chain variable domain of TCR clone 212791 (TRAV1-1, TRAJ27)
CAVIYNTNAGKSTF

SEQ ID NO: 425582 - protein, 13 aa, Homo sapiens
  CDR3 for beta chain variable domain of TCR clone 212791 (TRBV12-5, TRBJ1-2)
CASGVRAGNGYSF

SEQ ID NO: 425583 - protein, 18 aa, Homo sapiens
  CDR3 for alpha chain variable domain of TCR clone 212792 (TRAV26-2, TRAJ54)
CILRDVEVGIQGAQKVVV

SEQ ID NO: 425584 - protein, 16 aa, Homo sapiens
  CDR3 for beta chain variable domain of TCR clone 212792 (TRBV6-1, TRBJ2-5)
CASSETLDRGAETQYF

SEQ ID NO: 425585 - protein, 12 aa, Homo sapiens
  CDR3 for alpha chain variable domain of TCR clone 212793 (TRAV13-2, TRAJ23)
CSERHRGGKLIF

SEQ ID NO: 425586 - protein, 15 aa, Homo sapiens
  CDR3 for beta chain variable domain of TCR clone 212793 (TRBV9, TRBJ1-6)
CASSVAGTGDSPLHF

SEQ ID NO: 425587 - protein, 13 aa, Homo sapiens
  CDR3 for alpha chain variable domain of TCR clone 212794 (TRAV12-2, TRAJ6)
CAVNVSRKLHTYI

SEQ ID NO: 425588 - protein, 15 aa, Homo sapiens
  CDR3 for beta chain variable domain of TCR clone 212794 (TRBV27, TRBJ2-1)
CASSNGGGSSNEQFF

SEQ ID NO: 425589 - protein, 14 aa, Homo sapiens
  CDR3 for alpha chain variable domain of TCR clone 212795 (TRAV12-2, TRAJ11)
CAVEGGSGYSTLTF

SEQ ID NO: 425590 - protein, 16 aa, Homo sapiens
  CDR3 for beta chain variable domain of TCR clone 212795 (TRBV12-4, TRBJ1-5)
CASSRPVGGSNQPQHF

SEQ ID NO: 425591 - protein, 16 aa, Homo sapiens
  CDR3 for alpha chain variable domain of TCR clone 212796 (TRAV8-3, TRAJ8)
CAVPRDGNTGFPKLVF

SEQ ID NO: 425592 - protein, 15 aa, Homo sapiens
  CDR3 for beta chain variable domain of TCR clone 212796 (TRBV6-1, TRBJ2-6)
CASSSRPSGANVLTF

SEQ ID NO: 425593 - protein, 14 aa, Homo sapiens
  CDR3 for alpha chain variable domain of TCR clone 212797 (TRAV23/DV6, TRAJ6)
CAASRSGGSYILTF

SEQ ID NO: 425594 - protein, 17 aa, Homo sapiens
  CDR3 for beta chain variable domain of TCR clone 212797 (TRBV20-1, TRBJ2-1)
CSASASGLAGSYNEQFF

SEQ ID NO: 425595 - protein, 14 aa, Homo sapiens
  CDR3 for alpha chain variable domain of TCR clone 212798 (TRAV30, TRAJ26)
CGTEIVSYSQNFVF

SEQ ID NO: 425596 - protein, 13 aa, Homo sapiens
  CDR3 for beta chain variable domain of TCR clone 212798 (TRBV24-1, TRBJ2-2)
CATSDWSTGELFF

SEQ ID NO: 425597 - protein, 17 aa, Homo sapiens
  CDR3 for alpha chain variable domain of TCR clone 212799 (TRAV24, TRAJ28)
CAALLAYSGAGSYQLTF

SEQ ID NO: 425598 - protein, 15 aa, Homo sapiens
  CDR3 for beta chain variable domain of TCR clone 212799 (TRBV7-2, TRBJ2-1)
CASSLVAGRYNEQFF

SEQ ID NO: 425599 - protein, 14 aa, Homo sapiens
  CDR3 for alpha chain variable domain of TCR clone 212800 (TRAV4, TRAJ12)
CLVGYMDSSYKSIF

SEQ ID NO: 425600 - protein, 14 aa, Homo sapiens
  CDR3 for beta chain variable domain of TCR clone 212800 (TRBV27, TRBJ1-1)
CASSPGGGATEAFF

SEQ ID NO: 425601 - protein, 14 aa, Homo sapiens
  CDR3 for alpha chain variable domain of TCR clone 212801 (TRAV8-4, TRAJ5)
CAVSTDTGRRALTF

SEQ ID NO: 425602 - protein, 15 aa, Homo sapiens
  CDR3 for beta chain variable domain of TCR clone 212801 (TRBV11-2, TRBJ2-1)
CASSLGTSGLNEQFF

SEQ ID NO: 425603 - protein, 14 aa, Homo sapiens
  CDR3 for alpha chain variable domain of TCR clone 212802 (TRAV8-4, TRAJ54)
CAVSEVLGAQKLVL

SEQ ID NO: 425604 - protein, 13 aa, Homo sapiens
  CDR3 for beta chain variable domain of TCR clone 212802 (TRBV27, TRBJ2-7)
CASSFVSSYEQYF

SEQ ID NO: 425605 - protein, 14 aa, Homo sapiens
  CDR3 for alpha chain variable domain of TCR clone 212803 (TRAV4, TRAJ23)
CLVGAGNQGGKLIF

SEQ ID NO: 425606 - protein, 16 aa, Homo sapiens
  CDR3 for beta chain variable domain of TCR clone 212803 (TRBV6-1, TRBJ2-5)
CASSETLDRGAETQYF

SEQ ID NO: 425607 - protein, 12 aa, Homo sapiens
  CDR3 for alpha chain variable domain of TCR clone 212804 (TRAV12-1, TRAJ40)
CVVPSGTYKYIF

SEQ ID NO: 425608 - protein, 15 aa, Homo sapiens
  CDR3 for beta chain variable domain of TCR clone 212804 (TRBV12-4, TRBJ2-1)
CASSPLSGRNNEQFV

SEQ ID NO: 425609 - protein, 21 aa, Homo sapiens
  CDR3 for alpha chain variable domain of TCR clone 212805 (TRAV26-1, TRAJ56)
CCVLLHRQSRAYTGANSKLTF

SEQ ID NO: 425610 - protein, 12 aa, Homo sapiens
  CDR3 for beta chain variable domain of TCR clone 212805 (TRBV7-8, TRBJ2-7)
CASSLGDREQYF

SEQ ID NO: 425611 - protein, 15 aa, Homo sapiens
  CDR3 for alpha chain variable domain of TCR clone 212806 (TRAV17, TRAJ6)
CATDLPSGGSYIPTF

SEQ ID NO: 425612 - protein, 16 aa, Homo sapiens
  CDR3 for beta chain variable domain of TCR clone 212806 (TRBV4-1, TRBJ2-7)
CASSQDPTGYSYEQYV

SEQ ID NO: 425613 - protein, 13 aa, Homo sapiens
  CDR3 for alpha chain variable domain of TCR clone 212807 (TRAV12-1, TRAJ26)
CVVRRNYGQNFVF

SEQ ID NO: 425614 - protein, 12 aa, Homo sapiens
  CDR3 for beta chain variable domain of TCR clone 212807 (TRBV12-5, TRBJ2-5)
CASGQGVETQYF

SEQ ID NO: 425615 - protein, 16 aa, Homo sapiens
  CDR3 for alpha chain variable domain of TCR clone 212808 (TRAV20, TRAJ26)
CAVQHRRDNYGQNFVF

SEQ ID NO: 425616 - protein, 15 aa, Homo sapiens
  CDR3 for beta chain variable domain of TCR clone 212808 (TRBV7-2, TRBJ2-7)
CASCWGQGAIYEQYS

SEQ ID NO: 425617 - protein, 12 aa, Homo sapiens
  CDR3 for alpha chain variable domain of TCR clone 212809 (TRAV16, TRAJ56)
CAPTGANSKLTF

SEQ ID NO: 425618 - protein, 17 aa, Homo sapiens
  CDR3 for beta chain variable domain of TCR clone 212809 (TRBV27, TRBJ2-6)
CASSLTWFASGANVLTF

SEQ ID NO: 425619 - protein, 18 aa, Homo sapiens
  CDR3 for alpha chain variable domain of TCR clone 212810 (TRAV13-1, TRAJ52)
CAAKNPNAGGTSYGKLTF

SEQ ID NO: 425620 - protein, 15 aa, Homo sapiens
  CDR3 for beta chain variable domain of TCR clone 212810 (TRBV2, TRBJ2-4)
CASSGTNLAKNIQYF

SEQ ID NO: 425621 - protein, 13 aa, Homo sapiens
  CDR3 for alpha chain variable domain of TCR clone 212811 (TRAV12-1, TRAJ40)
CVVPTSGTYKYIF

SEQ ID NO: 425622 - protein, 15 aa, Homo sapiens
  CDR3 for beta chain variable domain of TCR clone 212811 (TRBV28, TRBJ2-1)
CASRVGLDEYNEQFF

SEQ ID NO: 425623 - protein, 18 aa, Homo sapiens
  CDR3 for alpha chain variable domain of TCR clone 212812 (TRAV13-1, TRAJ52)
CSASKRSAGGTSYGKLTF

SEQ ID NO: 425624 - protein, 14 aa, Homo sapiens
  CDR3 for beta chain variable domain of TCR clone 212812 (TRBV7-9, TRBJ2-1)
RASSPRNSLYEQFF

SEQ ID NO: 425625 - protein, 13 aa, Homo sapiens
  CDR3 for alpha chain variable domain of TCR clone 212813 (TRAV29/DV5, TRAJ31)
CAASRNNNARLMF

SEQ ID NO: 425626 - protein, 16 aa, Homo sapiens
  CDR3 for beta chain variable domain of TCR clone 212813 (TRBV11-2, TRBJ2-1)
CQQLIPPGVEYNEQFF

SEQ ID NO: 425627 - protein, 12 aa, Homo sapiens
  CDR3 for alpha chain variable domain of TCR clone 212814 (TRAV17, TRAJ30)
CVPERRDDKIIF

SEQ ID NO: 425628 - protein, 14 aa, Homo sapiens
  CDR3 for beta chain variable domain of TCR clone 212814 (TRBV7-7, TRBJ2-2)
CASSRDRSTGELFV

SEQ ID NO: 425629 - protein, 14 aa, Homo sapiens
  CDR3 for alpha chain variable domain of TCR clone 212815 (TRAV23/DV6, TRAJ27)
CAASRDTNAGKSTF

SEQ ID NO: 425630 - protein, 13 aa, Homo sapiens
  CDR3 for beta chain variable domain of TCR clone 212815 (TRBV11-2, TRBJ1-5)
CASSSGGNQPQHF

SEQ ID NO: 425631 - protein, 15 aa, Homo sapiens
  CDR3 for alpha chain variable domain of TCR clone 212816 (TRAV12-2, TRAJ53)
CAVNGGGGSNYKLTF

SEQ ID NO: 425632 - protein, 14 aa, Homo sapiens
  CDR3 for beta chain variable domain of TCR clone 212816 (TRBV11-2, TRBJ2-7)
CASSSTGEGYEQYF

SEQ ID NO: 425633 - protein, 15 aa, Homo sapiens
  CDR3 for alpha chain variable domain of TCR clone 212817 (TRAV12-3, TRAJ27)
CAMRAYNTNAGKSTF

SEQ ID NO: 425634 - protein, 13 aa, Homo sapiens
  CDR3 for beta chain variable domain of TCR clone 212817 (TRBV11-2, TRBJ2-5)
CANSRGPSETQYF

SEQ ID NO: 425635 - protein, 15 aa, Homo sapiens
  CDR3 for alpha chain variable domain of TCR clone 212818 (TRAV4, TRAJ39)
CLVGPDNNAGNMLTF

SEQ ID NO: 425636 - protein, 14 aa, Homo sapiens
  CDR3 for beta chain variable domain of TCR clone 212818 (TRBV19, TRBJ2-7)
CASNFRDTFTGMYF

SEQ ID NO: 425637 - protein, 11 aa, Homo sapiens
  CDR3 for alpha chain variable domain of TCR clone 212819 (TRAV16, TRAJ31)
CALFNNARLMF

SEQ ID NO: 425638 - protein, 14 aa, Homo sapiens
  CDR3 for beta chain variable domain of TCR clone 212819 (TRBV7-2, TRBJ2-7)
CASRSQGAAYEQYF

SEQ ID NO: 425639 - protein, 12 aa, Homo sapiens
  CDR3 for alpha chain variable domain of TCR clone 212820 (TRAV3, TRAJ20)
CAVRDHDYKLSF

SEQ ID NO: 425640 - protein, 13 aa, Homo sapiens
  CDR3 for beta chain variable domain of TCR clone 212820 (TRBV9, TRBJ2-7)
CASSVGQGGEQYL

SEQ ID NO: 425641 - protein, 14 aa, Homo sapiens
  CDR3 for alpha chain variable domain of TCR clone 212821 (TRAV8-1, TRAJ5)
CAVRTDTGRRALTF

SEQ ID NO: 425642 - protein, 14 aa, Homo sapiens
  CDR3 for beta chain variable domain of TCR clone 212821 (TRBV19, TRBJ2-1)
CASPTVVLSGEQFF

SEQ ID NO: 425643 - protein, 14 aa, Homo sapiens
  CDR3 for alpha chain variable domain of TCR clone 212822 (TRAV16, TRAJ33)
FALSAMDSNYQLIW

SEQ ID NO: 425644 - protein, 15 aa, Homo sapiens
  CDR3 for beta chain variable domain of TCR clone 212822 (TRBV2, TRBJ2-1)
CASSEEREGDNEQFF

SEQ ID NO: 425645 - protein, 17 aa, Homo sapiens
  CDR3 for alpha chain variable domain of TCR clone 212823 (TRAV4, TRAJ18)
CLVGERSVGSTLGRLYF

SEQ ID NO: 425646 - protein, 16 aa, Homo sapiens
  CDR3 for beta chain variable domain of TCR clone 212823 (TRBV10-3, TRBJ2-1)
CAISGVGDGGGGEQFF

SEQ ID NO: 425647 - protein, 13 aa, Homo sapiens
  CDR3 for alpha chain variable domain of TCR clone 212824 (TRAV21, TRAJ57)
CAVIEGGSEKLVF

SEQ ID NO: 425648 - protein, 15 aa, Homo sapiens
  CDR3 for beta chain variable domain of TCR clone 212824 (TRBV10-3, TRBJ2-5)
CAVSEFGRGQETQYF

SEQ ID NO: 425649 - protein, 14 aa, Homo sapiens
  CDR3 for alpha chain variable domain of TCR clone 212825 (TRAV13-1, TRAJ48)
CAASRSFGNENLTF

SEQ ID NO: 425650 - protein, 12 aa, Homo sapiens
  CDR3 for beta chain variable domain of TCR clone 212825 (TRBV6-6, TRBJ2-5)
CASNRQSGTQYF

SEQ ID NO: 425651 - protein, 13 aa, Homo sapiens
  CDR3 for alpha chain variable domain of TCR clone 212826 (TRAV3, TRAJ5)
CAVRDTGRRALTF

SEQ ID NO: 425652 - protein, 15 aa, Homo sapiens
  CDR3 for beta chain variable domain of TCR clone 212826 (TRBV20-1, TRBJ2-3)
CSARRGEAITDTQYF

SEQ ID NO: 425653 - protein, 16 aa, Homo sapiens
  CDR3 for alpha chain variable domain of TCR clone 212827 (TRAV23/DV6, TRAJ4)
CAANLSGGYNKMILEQ

SEQ ID NO: 425654 - protein, 17 aa, Homo sapiens
  CDR3 for beta chain variable domain of TCR clone 212827 (TRBV4-1, TRBJ1-3)
CASSPQRGIRFGNTIYF

SEQ ID NO: 425655 - protein, 13 aa, Homo sapiens
  CDR3 for alpha chain variable domain of TCR clone 212828 (TRAV8-3, TRAJ20)
CAVGAQDDYKLSF

SEQ ID NO: 425656 - protein, 14 aa, Homo sapiens
  CDR3 for beta chain variable domain of TCR clone 212828 (TRBV7-8, TRBJ1-2)
CASSPDSLSYGYTF

SEQ ID NO: 425657 - protein, 21 aa, Homo sapiens
  CDR3 for alpha chain variable domain of TCR clone 212829 (TRAV1-1, TRAJ6)
CLLLLRCERLERTGESYIPTF

SEQ ID NO: 425658 - protein, 13 aa, Homo sapiens
  CDR3 for beta chain variable domain of TCR clone 212829 (TRBV10-2, TRBJ2-7)
FASGASGGYEQYF

SEQ ID NO: 425659 - protein, 12 aa, Homo sapiens
  CDR3 for alpha chain variable domain of TCR clone 212830 (TRAV12-3, TRAJ17)
CAMTLTGNKLTF

SEQ ID NO: 425660 - protein, 12 aa, Homo sapiens
  CDR3 for beta chain variable domain of TCR clone 212830 (TRBV20-1, TRBJ2-5)
QSRGDYQETQYF

SEQ ID NO: 425661 - protein, 13 aa, Homo sapiens
  CDR3 for alpha chain variable domain of TCR clone 212831 (TRAV2, TRAJ40)
CAVVTSGTYKYIF

SEQ ID NO: 425662 - protein, 13 aa, Homo sapiens
  CDR3 for beta chain variable domain of TCR clone 212831 (TRBV10-2, TRBJ2-7)
CAGGASGGYEQYF

SEQ ID NO: 425663 - protein, 14 aa, Homo sapiens
  CDR3 for alpha chain variable domain of TCR clone 212832 (TRAV1-2, TRAJ16)
CAVNRFSYGQKLLF

SEQ ID NO: 425664 - protein, 13 aa, Homo sapiens
  CDR3 for beta chain variable domain of TCR clone 212832 (TRBV4-2, TRBJ1-1)
CASSQAGNTEAFF

SEQ ID NO: 425665 - protein, 18 aa, Homo sapiens
  CDR3 for alpha chain variable domain of TCR clone 212833 (TRAV8-4, TRAJ52)
CAVTRANAGGSSYGKLTF

SEQ ID NO: 425666 - protein, 20 aa, Homo sapiens
  CDR3 for beta chain variable domain of TCR clone 212833 (TRBV19, TRBJ2-1)
CASSISRTVTSTRLNNEQFF

SEQ ID NO: 425667 - protein, 14 aa, Homo sapiens
  CDR3 for alpha chain variable domain of TCR clone 212834 (TRAV3, TRAJ34)
CAVRAPGNTDKPIF

SEQ ID NO: 425668 - protein, 14 aa, Homo sapiens
  CDR3 for beta chain variable domain of TCR clone 212834 (TRBV7-8, TRBJ1-3)
CASSSDRVRNTIYF

SEQ ID NO: 425669 - protein, 13 aa, Homo sapiens
  CDR3 for alpha chain variable domain of TCR clone 212835 (TRAV27, TRAJ49)
CAPRPYTGNQFYF

SEQ ID NO: 425670 - protein, 10 aa, Homo sapiens
  CDR3 for beta chain variable domain of TCR clone 212835 (TRBV4-1, TRBJ1-2)
CASSQDADRF

SEQ ID NO: 425671 - protein, 13 aa, Homo sapiens
  CDR3 for alpha chain variable domain of TCR clone 212836 (TRAV13-1, TRAJ6)
CAASSGGSYIPKF

SEQ ID NO: 425672 - protein, 15 aa, Homo sapiens
  CDR3 for beta chain variable domain of TCR clone 212836 (TRBV12-4, TRBJ2-5)
CASSPPTGLQETQYF

SEQ ID NO: 425673 - protein, 23 aa, Homo sapiens
  CDR3 for alpha chain variable domain of TCR clone 212837 (TRAV26-1, TRAJ38)
CIADNAGNNHIQNPDPAVYQLRN

SEQ ID NO: 425674 - protein, 14 aa, Homo sapiens
  CDR3 for beta chain variable domain of TCR clone 212837 (TRBV7-3, TRBJ1-1)
CASSLKGGNTEAFS

SEQ ID NO: 425675 - protein, 16 aa, Homo sapiens
  CDR3 for alpha chain variable domain of TCR clone 212838 (TRAV30, TRAJ24)
CGPEILDADSWGKFQF

SEQ ID NO: 425676 - protein, 14 aa, Homo sapiens
  CDR3 for beta chain variable domain of TCR clone 212838 (TRBV12-5, TRBJ2-5)
CASGSRTHQETQYF

SEQ ID NO: 425677 - protein, 12 aa, Homo sapiens
  CDR3 for alpha chain variable domain of TCR clone 212839 (TRAV36/DV7, TRAJ54)
CAVVRGAQKLVF

SEQ ID NO: 425678 - protein, 14 aa, Homo sapiens
  CDR3 for beta chain variable domain of TCR clone 212839 (TRBV7-2, TRBJ2-7)
CASRSQGAAYEQYF

SEQ ID NO: 425679 - protein, 14 aa, Homo sapiens
  CDR3 for alpha chain variable domain of TCR clone 212840 (TRAV12-2, TRAJ13)
RSVKKTGGYQKVTF

SEQ ID NO: 425680 - protein, 16 aa, Homo sapiens
  CDR3 for beta chain variable domain of TCR clone 212840 (TRBV20-1, TRBJ1-2)
CSASMGQGVANYGYTF

SEQ ID NO: 425681 - protein, 13 aa, Homo sapiens
  CDR3 for alpha chain variable domain of TCR clone 212841 (TRAV13-1, TRAJ5)
CASSDTGRRALTF

SEQ ID NO: 425682 - protein, 11 aa, Homo sapiens
  CDR3 for beta chain variable domain of TCR clone 212841 (TRBV28, TRBJ2-3)
SSSLYRDTQYF

SEQ ID NO: 425683 - protein, 12 aa, Homo sapiens
  CDR3 for alpha chain variable domain of TCR clone 212842 (TRAV3, TRAJ43)
CAVRGPNNDMRF

SEQ ID NO: 425684 - protein, 15 aa, Homo sapiens
  CDR3 for beta chain variable domain of TCR clone 212842 (TRBV27, TRBJ1-5)
CASSLGTGFDQHQHF

SEQ ID NO: 425685 - protein, 14 aa, Homo sapiens
  CDR3 for alpha chain variable domain of TCR clone 212843 (TRAV12-2, TRAJ13)
CAVKKTGGYQKVTF

SEQ ID NO: 425686 - protein, 15 aa, Homo sapiens
  CDR3 for beta chain variable domain of TCR clone 212843 (TRBV2, TRBJ1-2)
CASSESRTVNYGYTF

SEQ ID NO: 425687 - protein, 15 aa, Homo sapiens
  CDR3 for alpha chain variable domain of TCR clone 212844 (TRAV12-1, TRAJ6)
CVVNCPLRRKLHTYI

SEQ ID NO: 425688 - protein, 14 aa, Homo sapiens
  CDR3 for beta chain variable domain of TCR clone 212844 (TRBV19, TRBJ2-1)
CASPTFVLSGEQFF

SEQ ID NO: 425689 - protein, 15 aa, Homo sapiens
  CDR3 for alpha chain variable domain of TCR clone 212845 (TRAV35, TRAJ28)
CWQRYSGAGSYQLTF

SEQ ID NO: 425690 - protein, 14 aa, Homo sapiens
  CDR3 for beta chain variable domain of TCR clone 212845 (TRBV18, TRBJ2-7)
CASSPRGGAYEQYF

SEQ ID NO: 425691 - protein, 13 aa, Homo sapiens
  CDR3 for alpha chain variable domain of TCR clone 212846 (TRAV24, TRAJ37)
CAFSPGNTGKLIF

SEQ ID NO: 425692 - protein, 20 aa, Homo sapiens
  CDR3 for beta chain variable domain of TCR clone 212846 (TRBV4-1, TRBJ2-2)
CASSQASPPGLASNTGELFF

SEQ ID NO: 425693 - protein, 11 aa, Homo sapiens
  CDR3 for alpha chain variable domain of TCR clone 212847 (TRAV36/DV7, TRAJ45)
PGGGGADGLTF

SEQ ID NO: 425694 - protein, 13 aa, Homo sapiens
  CDR3 for beta chain variable domain of TCR clone 212847 (TRBV28, TRBJ2-7)
CASSPSGTYEQYF

SEQ ID NO: 425695 - protein, 14 aa, Homo sapiens
  CDR3 for alpha chain variable domain of TCR clone 212848 (TRAV13-1, TRAJ44)
CAAKATGTASKLTF

SEQ ID NO: 425696 - protein, 17 aa, Homo sapiens
  CDR3 for beta chain variable domain of TCR clone 212848 (TRBV7-3, TRBJ2-3)
RASSIMKRMRGADTQYF

SEQ ID NO: 425697 - protein, 14 aa, Homo sapiens
  CDR3 for alpha chain variable domain of TCR clone 212849 (TRAV26-1, TRAJ49)
CIVRLTNTGNQFYF

SEQ ID NO: 425698 - protein, 14 aa, Homo sapiens
  CDR3 for beta chain variable domain of TCR clone 212849 (TRBV19, TRBJ2-1)
CASPTFVLSGEQFF

SEQ ID NO: 425699 - protein, 11 aa, Homo sapiens
  CDR3 for alpha chain variable domain of TCR clone 212850 (TRAV13-2, TRAJ23)
CAESPRGKLIF

SEQ ID NO: 425700 - protein, 18 aa, Homo sapiens
  CDR3 for beta chain variable domain of TCR clone 212850 (TRBV6-5, TRBJ1-1)
CASSYSAPGGTGGSEAFF

SEQ ID NO: 425701 - protein, 16 aa, Homo sapiens
  CDR3 for alpha chain variable domain of TCR clone 212851 (TRAV3, TRAJ10)
CAVRDMRAGGGNKPTF

SEQ ID NO: 425702 - protein, 17 aa, Homo sapiens
  CDR3 for beta chain variable domain of TCR clone 212851 (TRBV6-5, TRBJ2-4)
CASRPTPGQGSKNIQYF

SEQ ID NO: 425703 - protein, 13 aa, Homo sapiens
  CDR3 for alpha chain variable domain of TCR clone 212852 (TRAV12-2, TRAJ37)
CAGGSGNTGKLIF

SEQ ID NO: 425704 - protein, 12 aa, Homo sapiens
  CDR3 for beta chain variable domain of TCR clone 212852 (TRBV11-2, TRBJ2-2)
CASSLGGGELFF

SEQ ID NO: 425705 - protein, 12 aa, Homo sapiens
  CDR3 for alpha chain variable domain of TCR clone 212853 (TRAV8-3, TRAJ26)
CAGDNYGQNFVF

SEQ ID NO: 425706 - protein, 18 aa, Homo sapiens
  CDR3 for beta chain variable domain of TCR clone 212853 (TRBV12-4, TRBJ2-2)
CASSLVAGTRGWTGELFF

SEQ ID NO: 425707 - protein, 14 aa, Homo sapiens
  CDR3 for alpha chain variable domain of TCR clone 212854 (TRAV17, TRAJ49)
CATEARDTGNQIYF

SEQ ID NO: 425708 - protein, 14 aa, Homo sapiens
  CDR3 for beta chain variable domain of TCR clone 212854 (TRBV5-5, TRBJ1-2)
CASSFGQINYGYTF

SEQ ID NO: 425709 - protein, 14 aa, Homo sapiens
  CDR3 for alpha chain variable domain of TCR clone 212855 (TRAV38-2/DV8, TRAJ30)
CAYMDGLGGEKIIF

SEQ ID NO: 425710 - protein, 15 aa, Homo sapiens
  CDR3 for beta chain variable domain of TCR clone 212855 (TRBV7-9, TRBJ2-2)
CASRPADRDTGELFF

SEQ ID NO: 425711 - protein, 15 aa, Homo sapiens
  CDR3 for alpha chain variable domain of TCR clone 212856 (TRAV3, TRAJ5)
CAVRDLDTGRRAFTF

SEQ ID NO: 425712 - protein, 14 aa, Homo sapiens
  CDR3 for beta chain variable domain of TCR clone 212856 (TRBV25-1, TRBJ1-4)
CASSGGGQPEKLFF

SEQ ID NO: 425713 - protein, 15 aa, Homo sapiens
  CDR3 for alpha chain variable domain of TCR clone 212857 (TRAV3, TRAJ3)
CAVRDMRSSASKIIF

SEQ ID NO: 425714 - protein, 14 aa, Homo sapiens
  CDR3 for beta chain variable domain of TCR clone 212857 (TRBV6-6, TRBJ2-7)
CASSIAGGVDEQYF

SEQ ID NO: 425715 - protein, 11 aa, Homo sapiens
  CDR3 for alpha chain variable domain of TCR clone 212858 (TRAV17, TRAJ31)
CATSNNARLML

SEQ ID NO: 425716 - protein, 16 aa, Homo sapiens
  CDR3 for beta chain variable domain of TCR clone 212858 (TRBV7-8, TRBJ2-4)
CASSAERTLAKNIQCF

SEQ ID NO: 425717 - protein, 12 aa, Homo sapiens
  CDR3 for alpha chain variable domain of TCR clone 212859 (TRAV21, TRAJ39)
CAADDAGNMLTF

SEQ ID NO: 425718 - protein, 12 aa, Homo sapiens
  CDR3 for beta chain variable domain of TCR clone 212859 (TRBV5-4, TRBJ2-7)
CASSWAGQGENF

SEQ ID NO: 425719 - protein, 13 aa, Homo sapiens
  CDR3 for alpha chain variable domain of TCR clone 212860 (TRAV36/DV7, TRAJ17)
CARASAAGNKLNF

SEQ ID NO: 425720 - protein, 14 aa, Homo sapiens
  CDR3 for beta chain variable domain of TCR clone 212860 (TRBV12-5, TRBJ2-5)
CASGSRTHQETQYF

SEQ ID NO: 425721 - protein, 13 aa, Homo sapiens
  CDR3 for alpha chain variable domain of TCR clone 212861 (TRAV3, TRAJ29)
CAVRDIIDKPLVF

SEQ ID NO: 425722 - protein, 14 aa, Homo sapiens
  CDR3 for beta chain variable domain of TCR clone 212861 (TRBV27, TRBJ2-1)
CASSATGGYSEQFF

SEQ ID NO: 425723 - protein, 15 aa, Homo sapiens
  CDR3 for alpha chain variable domain of TCR clone 212862 (TRAV26-1, TRAJ29)
CIVRVEGSGNTPLVF

SEQ ID NO: 425724 - protein, 15 aa, Homo sapiens
  CDR3 for beta chain variable domain of TCR clone 212862 (TRBV28, TRBJ2-5)
CAGSPGQGSIETQYF

SEQ ID NO: 425725 - protein, 14 aa, Homo sapiens
  CDR3 for alpha chain variable domain of TCR clone 212863 (TRAV1-2, TRAJ16)
CAVNRFSDGQKLLF

SEQ ID NO: 425726 - protein, 12 aa, Homo sapiens
  CDR3 for beta chain variable domain of TCR clone 212863 (TRBV4-1, TRBJ2-1)
RQQPSRGDEQFF

SEQ ID NO: 425727 - protein, 13 aa, Homo sapiens
  CDR3 for alpha chain variable domain of TCR clone 212864 (TRAV26-1, TRAJ48)
CIVRVVGDEKVTF

SEQ ID NO: 425728 - protein, 19 aa, Homo sapiens
  CDR3 for beta chain variable domain of TCR clone 212864 (TRBV11-3, TRBJ2-2)
CASSTRPGAKTTNTGELFF

SEQ ID NO: 425729 - protein, 15 aa, Homo sapiens
  CDR3 for alpha chain variable domain of TCR clone 212865 (TRAV13-1, TRAJ44)
CAASRGGGTASKLTF

SEQ ID NO: 425730 - protein, 17 aa, Homo sapiens
  CDR3 for beta chain variable domain of TCR clone 212865 (TRBV4-1, TRBJ2-7)
CASSRDPLGVRGGEQYF

SEQ ID NO: 425731 - protein, 10 aa, Homo sapiens
  CDR3 for alpha chain variable domain of TCR clone 212866 (TRAV25, TRAJ17)
CQAAGNKLTF

SEQ ID NO: 425732 - protein, 13 aa, Homo sapiens
  CDR3 for beta chain variable domain of TCR clone 212866 (TRBV12-4, TRBJ2-7)
CASSPTETYEQYF

SEQ ID NO: 425733 - protein, 14 aa, Homo sapiens
  CDR3 for alpha chain variable domain of TCR clone 212867 (TRAV12-2, TRAJ44)
CAVNPAGTASKLTF

SEQ ID NO: 425734 - protein, 16 aa, Homo sapiens
  CDR3 for beta chain variable domain of TCR clone 212867 (TRBV7-9, TRBJ1-2)
CASSLGFSSGEDGYTF

SEQ ID NO: 425735 - protein, 13 aa, Homo sapiens
  CDR3 for alpha chain variable domain of TCR clone 212868 (TRAV21, TRAJ27)
CAALNTNAGKSTY

SEQ ID NO: 425736 - protein, 14 aa, Homo sapiens
  CDR3 for beta chain variable domain of TCR clone 212868 (TRBV27, TRBJ1-1)
CASSLLSGLSEAFF

SEQ ID NO: 425737 - protein, 15 aa, Homo sapiens
  CDR3 for alpha chain variable domain of TCR clone 212869 (TRAV3, TRAJ32)
CAVSSYGGSPNKLIF

SEQ ID NO: 425738 - protein, 13 aa, Homo sapiens
  CDR3 for beta chain variable domain of TCR clone 212869 (TRBV20-1, TRBJ2-7)
CSARPSTNYEQYF

SEQ ID NO: 425739 - protein, 15 aa, Homo sapiens
  CDR3 for alpha chain variable domain of TCR clone 212870 (TRAV8-3, TRAJ45)
CSSSYSGGGADGLTF

SEQ ID NO: 425740 - protein, 18 aa, Homo sapiens
  CDR3 for beta chain variable domain of TCR clone 212870 (TRBV18, TRBJ1-3)
CASSPRGGAGPSGNTIYF

SEQ ID NO: 425741 - protein, 19 aa, Homo sapiens
  CDR3 for alpha chain variable domain of TCR clone 212871 (TRAV2, TRAJ20)
ILQVREADAAIYRDCKLSF

SEQ ID NO: 425742 - protein, 15 aa, Homo sapiens
  CDR3 for beta chain variable domain of TCR clone 212871 (TRBV4-1, TRBJ1-4)
CASSDTGGTNEKLFF

SEQ ID NO: 425743 - protein, 17 aa, Homo sapiens
  CDR3 for alpha chain variable domain of TCR clone 212872 (TRAV12-2, TRAJ6)
CAPQGPPRAGGSYIPTF

SEQ ID NO: 425744 - protein, 15 aa, Homo sapiens
  CDR3 for beta chain variable domain of TCR clone 212872 (TRBV2, TRBJ2-7)
CASSEGLARSYEQYF

SEQ ID NO: 425745 - protein, 15 aa, Homo sapiens
  CDR3 for alpha chain variable domain of TCR clone 212873 (TRAV26-1, TRAJ42)
FIVRVKGGSQGNLIF

SEQ ID NO: 425746 - protein, 13 aa, Homo sapiens
  CDR3 for beta chain variable domain of TCR clone 212873 (TRBV4-1, TRBJ2-1)
CASSQEVQYEQFF

SEQ ID NO: 425747 - protein, 12 aa, Homo sapiens
  CDR3 for alpha chain variable domain of TCR clone 212874 (TRAV13-1, TRAJ15)
CAASQAGTALIF

SEQ ID NO: 425748 - protein, 14 aa, Homo sapiens
  CDR3 for beta chain variable domain of TCR clone 212874 (TRBV19, TRBJ2-1)
CAGPTFVLSGEQFF

SEQ ID NO: 425749 - protein, 19 aa, Homo sapiens
  CDR3 for alpha chain variable domain of TCR clone 212875 (TRAV27, TRAJ53)
ASTSVQSRNSGGSNYKLTF

SEQ ID NO: 425750 - protein, 14 aa, Homo sapiens
  CDR3 for beta chain variable domain of TCR clone 212875 (TRBV7-3, TRBJ2-3)
CASSATGVADTQYF

SEQ ID NO: 425751 - protein, 12 aa, Homo sapiens
  CDR3 for alpha chain variable domain of TCR clone 212876 (TRAV12-1, TRAJ40)
CVVYSGTYKYIF

SEQ ID NO: 425752 - protein, 12 aa, Homo sapiens
  CDR3 for beta chain variable domain of TCR clone 212876 (TRBV29-1, TRBJ2-3)
CSVTGGADTQYF

SEQ ID NO: 425753 - protein, 11 aa, Homo sapiens
  CDR3 for alpha chain variable domain of TCR clone 212877 (TRAV26-1, TRAJ27)
CIDPNAGKSTF

SEQ ID NO: 425754 - protein, 18 aa, Homo sapiens
  CDR3 for beta chain variable domain of TCR clone 212877 (TRBV7-9, TRBJ2-6)
CASSFPGAWMSGANVLTF

SEQ ID NO: 425755 - protein, 20 aa, Homo sapiens
  CDR3 for alpha chain variable domain of TCR clone 212878 (TRAV26-1, TRAJ42)
CCVLLHRQTYYGGSQGNLIF

SEQ ID NO: 425756 - protein, 15 aa, Homo sapiens
  CDR3 for beta chain variable domain of TCR clone 212878 (TRBV7-3, TRBJ2-2)
CSSLKRGTLSGELFF

SEQ ID NO: 425757 - protein, 12 aa, Homo sapiens
  CDR3 for alpha chain variable domain of TCR clone 212879 (TRAV3, TRAJ31)
CAVRPRGPRLMF

SEQ ID NO: 425758 - protein, 12 aa, Homo sapiens
  CDR3 for beta chain variable domain of TCR clone 212879 (TRBV7-9, TRBJ2-7)
CASSIKREEQYF

SEQ ID NO: 425759 - protein, 14 aa, Homo sapiens
  CDR3 for alpha chain variable domain of TCR clone 212880 (TRAV2, TRAJ37)
CAVAFTSNIGKLIF

SEQ ID NO: 425760 - protein, 15 aa, Homo sapiens
  CDR3 for beta chain variable domain of TCR clone 212880 (TRBV20-1, TRBJ1-1)
CSASRGVTGNTEAFF

SEQ ID NO: 425761 - protein, 12 aa, Homo sapiens
  CDR3 for alpha chain variable domain of TCR clone 212881 (TRAV36/DV7, TRAJ40)
CAVGTGTYKYIF

SEQ ID NO: 425762 - protein, 14 aa, Homo sapiens
  CDR3 for beta chain variable domain of TCR clone 212881 (TRBV5-5, TRBJ2-7)
CASSLGQGTYEQYF

SEQ ID NO: 425763 - protein, 12 aa, Homo sapiens
  CDR3 for alpha chain variable domain of TCR clone 212882 (TRAV3, TRAJ31)
CAVRDGNARLMF

SEQ ID NO: 425764 - protein, 15 aa, Homo sapiens
  CDR3 for beta chain variable domain of TCR clone 212882 (TRBV12-4, TRBJ2-5)
CASSPPTGLQETQYF

SEQ ID NO: 425765 - protein, 14 aa, Homo sapiens
  CDR3 for alpha chain variable domain of TCR clone 212883 (TRAV3, TRAJ22)
CCERPGGSARQLTF

SEQ ID NO: 425766 - protein, 13 aa, Homo sapiens
  CDR3 for beta chain variable domain of TCR clone 212883 (TRBV7-3, TRBJ2-1)
CASSSVAYNEQFF

SEQ ID NO: 425767 - protein, 13 aa, Homo sapiens
  CDR3 for alpha chain variable domain of TCR clone 212884 (TRAV35, TRAJ22)
CAGLSGSARQLTF

SEQ ID NO: 425768 - protein, 16 aa, Homo sapiens
  CDR3 for beta chain variable domain of TCR clone 212884 (TRBV7-9, TRBJ2-1)
CASSLGLTGQGNEQFF

SEQ ID NO: 425769 - protein, 14 aa, Homo sapiens
  CDR3 for alpha chain variable domain of TCR clone 212885 (TRAV2, TRAJ9)
CAVDPNIGGFKTIF

SEQ ID NO: 425770 - protein, 14 aa, Homo sapiens
  CDR3 for beta chain variable domain of TCR clone 212885 (TRBV7-2, TRBJ2-7)
CASSPKTSFYEQYF

SEQ ID NO: 425771 - protein, 12 aa, Homo sapiens
  CDR3 for alpha chain variable domain of TCR clone 212886 (TRAV12-3, TRAJ17)
CAMTPTGNKLTF

SEQ ID NO: 425772 - protein, 15 aa, Homo sapiens
  CDR3 for beta chain variable domain of TCR clone 212886 (TRBV20-1, TRBJ2-7)
CSASDRVSGMDEQYF

SEQ ID NO: 425773 - protein, 13 aa, Homo sapiens
  CDR3 for alpha chain variable domain of TCR clone 212887 (TRAV8-3, TRAJ44)
CAVVPGTASKLTF

SEQ ID NO: 425774 - protein, 12 aa, Homo sapiens
  CDR3 for beta chain variable domain of TCR clone 212887 (TRBV5-5, TRBJ2-5)
CASSYFGETQYF

SEQ ID NO: 425775 - protein, 17 aa, Homo sapiens
  CDR3 for alpha chain variable domain of TCR clone 212888 (TRAV3, TRAJ6)
CAVRDGPRAGGSYIPTF

SEQ ID NO: 425776 - protein, 13 aa, Homo sapiens
  CDR3 for beta chain variable domain of TCR clone 212888 (TRBV20-1, TRBJ1-6)
CSAPLGVGSPLLF

SEQ ID NO: 425777 - protein, 13 aa, Homo sapiens
  CDR3 for alpha chain variable domain of TCR clone 212889 (TRAV2, TRAJ15)
CAVASQAGTALIF

SEQ ID NO: 425778 - protein, 16 aa, Homo sapiens
  CDR3 for beta chain variable domain of TCR clone 212889 (TRBV18, TRBJ1-5)
CASSTYRVEGNQPQHF

SEQ ID NO: 425779 - protein, 13 aa, Homo sapiens
  CDR3 for alpha chain variable domain of TCR clone 212890 (TRAV21, TRAJ57)
CAVIEGGSEKLVF

SEQ ID NO: 425780 - protein, 14 aa, Homo sapiens
  CDR3 for beta chain variable domain of TCR clone 212890 (TRBV6-3, TRBJ1-1)
CASSNLLPGAEAFF

SEQ ID NO: 425781 - protein, 10 aa, Homo sapiens
  CDR3 for alpha chain variable domain of TCR clone 212891 (TRAV26-1, TRAJ40)
CIAGTYKYIF

SEQ ID NO: 425782 - protein, 14 aa, Homo sapiens
  CDR3 for beta chain variable domain of TCR clone 212891 (TRBV11-2, TRBJ2-1)
QLIPPRGRVHEQFF

SEQ ID NO: 425783 - protein, 15 aa, Homo sapiens
  CDR3 for alpha chain variable domain of TCR clone 212892 (TRAV8-6, TRAJ45)
CAVREQGGGADGLTF

SEQ ID NO: 425784 - protein, 14 aa, Homo sapiens
  CDR3 for beta chain variable domain of TCR clone 212892 (TRBV28, TRBJ2-5)
CASRGSSFWETQYF

SEQ ID NO: 425785 - protein, 14 aa, Homo sapiens
  CDR3 for alpha chain variable domain of TCR clone 212893 (TRAV12-3, TRAJ13)
CAVKKTGGYQKVTF

SEQ ID NO: 425786 - protein, 15 aa, Homo sapiens
  CDR3 for beta chain variable domain of TCR clone 212893 (TRBV19, TRBJ1-6)
CASSTQGAVGSPLHF

SEQ ID NO: 425787 - protein, 13 aa, Homo sapiens
  CDR3 for alpha chain variable domain of TCR clone 212894 (TRAV29/DV5, TRAJ31)
CAASRNNNARLMF

SEQ ID NO: 425788 - protein, 17 aa, Homo sapiens
  CDR3 for beta chain variable domain of TCR clone 212894 (TRBV4-1, TRBJ2-5)
CASSQDLTGGPIETQYF

SEQ ID NO: 425789 - protein, 14 aa, Homo sapiens
  CDR3 for alpha chain variable domain of TCR clone 212895 (TRAV12-2, TRAJ13)
CAVKKTGGYQKVTF

SEQ ID NO: 425790 - protein, 13 aa, Homo sapiens
  CDR3 for beta chain variable domain of TCR clone 212895 (TRBV7-6, TRBJ2-1)
CQQLGGGADEQFF

SEQ ID NO: 425791 - protein, 12 aa, Homo sapiens
  CDR3 for alpha chain variable domain of TCR clone 212896 (TRAV8-4, TRAJ43)
CAVSVNNNDMRF

SEQ ID NO: 425792 - protein, 15 aa, Homo sapiens
  CDR3 for beta chain variable domain of TCR clone 212896 (TRBV20-1, TRBJ2-7)
CSARDPVKGEGEQFF

SEQ ID NO: 425793 - protein, 13 aa, Homo sapiens
  CDR3 for alpha chain variable domain of TCR clone 212897 (TRAV20, TRAJ37)
CAGCSSNTGKLIF

SEQ ID NO: 425794 - protein, 21 aa, Homo sapiens
  CDR3 for beta chain variable domain of TCR clone 212897 (TRBV4-2, TRBJ2-3)
PCSQKTRPCISVPAGPDTQYF

SEQ ID NO: 425795 - protein, 15 aa, Homo sapiens
  CDR3 for alpha chain variable domain of TCR clone 212898 (TRAV12-3, TRAJ6)
CAMSATTGGSYIPTF

SEQ ID NO: 425796 - protein, 16 aa, Homo sapiens
  CDR3 for beta chain variable domain of TCR clone 212898 (TRBV7-9, TRBJ2-7)
CASSYPDREGGYEQYF

SEQ ID NO: 425797 - protein, 12 aa, Homo sapiens
  CDR3 for alpha chain variable domain of TCR clone 212899 (TRAV12-1, TRAJ40)
CVVYSGTYKYIF

SEQ ID NO: 425798 - protein, 18 aa, Homo sapiens
  CDR3 for beta chain variable domain of TCR clone 212899 (TRBV11-2, TRBJ2-3)
CACSFGGASRGAPNTQYF

SEQ ID NO: 425799 - protein, 13 aa, Homo sapiens
  CDR3 for alpha chain variable domain of TCR clone 212900 (TRAV29/DV5, TRAJ31)
CAASRNNNARLMF

SEQ ID NO: 425800 - protein, 19 aa, Homo sapiens
  CDR3 for beta chain variable domain of TCR clone 212900 (TRBV7-2, TRBJ2-3)
CASSFLSRNWGGGTDTQYF

SEQ ID NO: 425801 - protein, 16 aa, Homo sapiens
  CDR3 for alpha chain variable domain of TCR clone 212901 (TRAV3, TRAJ37)
CAVRGKGSGNTGKLIF

SEQ ID NO: 425802 - protein, 12 aa, Homo sapiens
  CDR3 for beta chain variable domain of TCR clone 212901 (TRBV7-9, TRBJ1-4)
CASSTDREKLFF

SEQ ID NO: 425803 - protein, 14 aa, Homo sapiens
  CDR3 for alpha chain variable domain of TCR clone 212902 (TRAV20, TRAJ10)
CAVRVEGGGHKLTF

SEQ ID NO: 425804 - protein, 18 aa, Homo sapiens
  CDR3 for beta chain variable domain of TCR clone 212902 (TRBV24-1, TRBJ2-1)
CATSDLMFLGRVVHEQFF

SEQ ID NO: 425805 - protein, 15 aa, Homo sapiens
  CDR3 for alpha chain variable domain of TCR clone 212903 (TRAV2, TRAJ9)
CAVEDRGTGGFKTIF

SEQ ID NO: 425806 - protein, 14 aa, Homo sapiens
  CDR3 for beta chain variable domain of TCR clone 212903 (TRBV19, TRBJ1-1)
CASSITGWETEAFF

SEQ ID NO: 425807 - protein, 14 aa, Homo sapiens
  CDR3 for alpha chain variable domain of TCR clone 212904 (TRAV16, TRAJ33)
CALSAMDSNYQLIW

SEQ ID NO: 425808 - protein, 15 aa, Homo sapiens
  CDR3 for beta chain variable domain of TCR clone 212904 (TRBV12-4, TRBJ2-7)
CASSQVISTGVEQYF

SEQ ID NO: 425809 - protein, 13 aa, Homo sapiens
  CDR3 for alpha chain variable domain of TCR clone 212905 (TRAV1-1, TRAJ13)
CAVNSGGYQKVTF

SEQ ID NO: 425810 - protein, 12 aa, Homo sapiens
  CDR3 for beta chain variable domain of TCR clone 212905 (TRBV28, TRBJ2-1)
CASSVQIKEQFF

SEQ ID NO: 425811 - protein, 15 aa, Homo sapiens
  CDR3 for alpha chain variable domain of TCR clone 212906 (TRAV3, TRAJ32)
CAVRDPGGATNKLIF

SEQ ID NO: 425812 - protein, 14 aa, Homo sapiens
  CDR3 for beta chain variable domain of TCR clone 212906 (TRBV9, TRBJ1-2)
CASSVKGDNYGYAF

SEQ ID NO: 425813 - protein, 14 aa, Homo sapiens
  CDR3 for alpha chain variable domain of TCR clone 212907 (TRAV8-4, TRAJ13)
CAVTLSGGYQKVSF

SEQ ID NO: 425814 - protein, 14 aa, Homo sapiens
  CDR3 for beta chain variable domain of TCR clone 212907 (TRBV7-2, TRBJ1-2)
CASSQTGSTYGYTF

SEQ ID NO: 425815 - protein, 16 aa, Homo sapiens
  CDR3 for alpha chain variable domain of TCR clone 212908 (TRAV16, TRAJ42)
CARKMNYGGSQGNLIF

SEQ ID NO: 425816 - protein, 15 aa, Homo sapiens
  CDR3 for beta chain variable domain of TCR clone 212908 (TRBV20-1, TRBJ2-7)
CSAREWRDSLYEQYF

SEQ ID NO: 425817 - protein, 14 aa, Homo sapiens
  CDR3 for alpha chain variable domain of TCR clone 212909 (TRAV12-2, TRAJ13)
CAVKKTGGYQKVPF

SEQ ID NO: 425818 - protein, 17 aa, Homo sapiens
  CDR3 for beta chain variable domain of TCR clone 212909 (TRBV13, TRBJ2-3)
CASSLSRVAGGRNTQYF

SEQ ID NO: 425819 - protein, 17 aa, Homo sapiens
  CDR3 for alpha chain variable domain of TCR clone 212910 (TRAV4, TRAJ42)
CLVGVLNYGGSQGNLIF

SEQ ID NO: 425820 - protein, 15 aa, Homo sapiens
  CDR3 for beta chain variable domain of TCR clone 212910 (TRBV28, TRBJ2-5)
CASSPPWSYQETQYF

SEQ ID NO: 425821 - protein, 14 aa, Homo sapiens
  CDR3 for alpha chain variable domain of TCR clone 212911 (TRAV12-3, TRAJ10)
SHLPLTGGGNKLTF

SEQ ID NO: 425822 - protein, 17 aa, Homo sapiens
  CDR3 for beta chain variable domain of TCR clone 212911 (TRBV28, TRBJ2-7)
CASSPRHRASEVYEQYF

SEQ ID NO: 425823 - protein, 13 aa, Homo sapiens
  CDR3 for alpha chain variable domain of TCR clone 212912 (TRAV13-1, TRAJ39)
CSTSIVMQATFSP

SEQ ID NO: 425824 - protein, 16 aa, Homo sapiens
  CDR3 for beta chain variable domain of TCR clone 212912 (TRBV20-1, TRBJ1-4)
CSAPGQGLLTNEKLFF

SEQ ID NO: 425825 - protein, 14 aa, Homo sapiens
  CDR3 for alpha chain variable domain of TCR clone 212913 (TRAV12-2, TRAJ40)
CAVKIPSGTYKYIF

SEQ ID NO: 425826 - protein, 12 aa, Homo sapiens
  CDR3 for beta chain variable domain of TCR clone 212913 (TRBV19, TRBJ2-1)
CASSMQDTEQFF

SEQ ID NO: 425827 - protein, 12 aa, Homo sapiens
  CDR3 for alpha chain variable domain of TCR clone 212914 (TRAV29/DV5, TRAJ31)
CAASSHNARLLF

SEQ ID NO: 425828 - protein, 17 aa, Homo sapiens
  CDR3 for beta chain variable domain of TCR clone 212914 (TRBV18, TRBJ2-6)
CASSPRQGAVGANVLTF

SEQ ID NO: 425829 - protein, 13 aa, Homo sapiens
  CDR3 for alpha chain variable domain of TCR clone 212915 (TRAV9-2, TRAJ49)
CALSEGTGNQFYF

SEQ ID NO: 425830 - protein, 15 aa, Homo sapiens
  CDR3 for beta chain variable domain of TCR clone 212915 (TRBV5-1, TRBJ2-1)
CASSPPRAPYNEQFF

SEQ ID NO: 425831 - protein, 15 aa, Homo sapiens
  CDR3 for alpha chain variable domain of TCR clone 212916 (TRAV13-1, TRAJ10)
CAAEVVTGGGNKLTF

SEQ ID NO: 425832 - protein, 13 aa, Homo sapiens
  CDR3 for beta chain variable domain of TCR clone 212916 (TRBV28, TRBJ2-5)
CAGVSQGEETQYF

SEQ ID NO: 425833 - protein, 12 aa, Homo sapiens
  CDR3 for alpha chain variable domain of TCR clone 212917 (TRAV12-3, TRAJ5)
CAMDTGRRALTF

SEQ ID NO: 425834 - protein, 15 aa, Homo sapiens
  CDR3 for beta chain variable domain of TCR clone 212917 (TRBV6-3, TRBJ2-7)
CASSSPGTVFYEQYF

SEQ ID NO: 425835 - protein, 13 aa, Homo sapiens
  CDR3 for alpha chain variable domain of TCR clone 212918 (TRAV17, TRAJ9)
CATDYTGGFKTIF

SEQ ID NO: 425836 - protein, 15 aa, Homo sapiens
  CDR3 for beta chain variable domain of TCR clone 212918 (TRBV3-1, TRBJ2-7)
CASSQAPSGSCEQYF

SEQ ID NO: 425837 - protein, 17 aa, Homo sapiens
  CDR3 for alpha chain variable domain of TCR clone 212919 (TRAV4, TRAJ18)
CLVGERSVGSTLGRVYF

SEQ ID NO: 425838 - protein, 15 aa, Homo sapiens
  CDR3 for beta chain variable domain of TCR clone 212919 (TRBV6-3, TRBJ2-7)
CASSSPGTVFYEQYF

SEQ ID NO: 425839 - protein, 13 aa, Homo sapiens
  CDR3 for alpha chain variable domain of TCR clone 212920 (TRAV21, TRAJ57)
CAVTQGGSEKLLF

SEQ ID NO: 425840 - protein, 16 aa, Homo sapiens
  CDR3 for beta chain variable domain of TCR clone 212920 (TRBV29-1, TRBJ2-7)
CSVEDAEDGTAYEQYF

SEQ ID NO: 425841 - protein, 16 aa, Homo sapiens
  CDR3 for alpha chain variable domain of TCR clone 212921 (TRAV12-1, TRAJ45)
CVVIRYSGGGADGLTF

SEQ ID NO: 425842 - protein, 14 aa, Homo sapiens
  CDR3 for beta chain variable domain of TCR clone 212921 (TRBV7-2, TRBJ2-7)
CASRSQGAAYEQYF

SEQ ID NO: 425843 - protein, 12 aa, Homo sapiens
  CDR3 for alpha chain variable domain of TCR clone 212922 (TRAV17, TRAJ39)
CATVAAGNMLTF

SEQ ID NO: 425844 - protein, 14 aa, Homo sapiens
  CDR3 for beta chain variable domain of TCR clone 212922 (TRBV12-4, TRBJ1-1)
CASSLGTGGTEAFF

SEQ ID NO: 425845 - protein, 13 aa, Homo sapiens
  CDR3 for alpha chain variable domain of TCR clone 212923 (TRAV17, TRAJ9)
CATDERGGFKTIV

SEQ ID NO: 425846 - protein, 15 aa, Homo sapiens
  CDR3 for beta chain variable domain of TCR clone 212923 (TRBV27, TRBJ2-1)
CASSNGGGSSNEQFF

SEQ ID NO: 425847 - protein, 13 aa, Homo sapiens
  CDR3 for alpha chain variable domain of TCR clone 212924 (TRAV27, TRAJ3)
ASLRGSSASKIIF

SEQ ID NO: 425848 - protein, 16 aa, Homo sapiens
  CDR3 for beta chain variable domain of TCR clone 212924 (TRBV18, TRBJ2-7)
CASSPLQSGTHYEQYF

SEQ ID NO: 425849 - protein, 16 aa, Homo sapiens
  CDR3 for alpha chain variable domain of TCR clone 212925 (TRAV14/DV4, TRAJ53)
CAMREGGGGSNYKLTF

SEQ ID NO: 425850 - protein, 15 aa, Homo sapiens
  CDR3 for beta chain variable domain of TCR clone 212925 (TRBV2, TRBJ2-1)
CASRESGGAYNEQFF

SEQ ID NO: 425851 - protein, 14 aa, Homo sapiens
  CDR3 for alpha chain variable domain of TCR clone 212926 (TRAV21, TRAJ35)
CAVMPIGCGNVLHC

SEQ ID NO: 425852 - protein, 12 aa, Homo sapiens
  CDR3 for beta chain variable domain of TCR clone 212926 (TRBV7-9, TRBJ2-7)
YASSIKREEQYF

SEQ ID NO: 425853 - protein, 14 aa, Homo sapiens
  CDR3 for alpha chain variable domain of TCR clone 212927 (TRAV29/DV5, TRAJ36)
CAARRKTGANNLFF

SEQ ID NO: 425854 - protein, 14 aa, Homo sapiens
  CDR3 for beta chain variable domain of TCR clone 212927 (TRBV12-5, TRBJ2-5)
CASGSRTDQETQYF

SEQ ID NO: 425855 - protein, 11 aa, Homo sapiens
  CDR3 for alpha chain variable domain of TCR clone 212928 (TRAV12-2, TRAJ29)
CAVTLRSPLVF

SEQ ID NO: 425856 - protein, 12 aa, Homo sapiens
  CDR3 for beta chain variable domain of TCR clone 212928 (TRBV16, TRBJ2-2)
CASSQSVGELFF

SEQ ID NO: 425857 - protein, 14 aa, Homo sapiens
  CDR3 for alpha chain variable domain of TCR clone 212929 (TRAV12-2, TRAJ13)
CAAKKTGGYQKVTF

SEQ ID NO: 425858 - protein, 15 aa, Homo sapiens
  CDR3 for beta chain variable domain of TCR clone 212929 (TRBV27, TRBJ2-1)
CASSNGGGSTNEQFF

SEQ ID NO: 425859 - protein, 16 aa, Homo sapiens
  CDR3 for alpha chain variable domain of TCR clone 212930 (TRAV4, TRAJ9)
WLVGDPNRPGGFKTIF

SEQ ID NO: 425860 - protein, 14 aa, Homo sapiens
  CDR3 for beta chain variable domain of TCR clone 212930 (TRBV20-1, TRBJ1-1)
CSAQTRIGGTEAFF

SEQ ID NO: 425861 - protein, 15 aa, Homo sapiens
  CDR3 for alpha chain variable domain of TCR clone 212931 (TRAV26-1, TRAJ29)
CIVRVEGSGNTPLVF

SEQ ID NO: 425862 - protein, 15 aa, Homo sapiens
  CDR3 for beta chain variable domain of TCR clone 212931 (TRBV7-9, TRBJ1-5)
CGSSQGRQPNQPQHF

SEQ ID NO: 425863 - protein, 13 aa, Homo sapiens
  CDR3 for alpha chain variable domain of TCR clone 212932 (TRAV12-1, TRAJ34)
CVVTGYNTDKLIF

SEQ ID NO: 425864 - protein, 12 aa, Homo sapiens
  CDR3 for beta chain variable domain of TCR clone 212932 (TRBV7-8, TRBJ2-4)
CASSLGGNIQYF

SEQ ID NO: 425865 - protein, 15 aa, Homo sapiens
  CDR3 for alpha chain variable domain of TCR clone 212933 (TRAV34, TRAJ38)
CGADFTPGNNRKLIW

SEQ ID NO: 425866 - protein, 15 aa, Homo sapiens
  CDR3 for beta chain variable domain of TCR clone 212933 (TRBV28, TRBJ2-5)
CASSSGRTIQETQYF

SEQ ID NO: 425867 - protein, 17 aa, Homo sapiens
  CDR3 for alpha chain variable domain of TCR clone 212934 (TRAV3, TRAJ6)
CAVRDGPRAGGSYIPTF

SEQ ID NO: 425868 - protein, 13 aa, Homo sapiens
  CDR3 for beta chain variable domain of TCR clone 212934 (TRBV9, TRBJ2-1)
CASSPSGGSEQFF

SEQ ID NO: 425869 - protein, 16 aa, Homo sapiens
  CDR3 for alpha chain variable domain of TCR clone 212935 (TRAV8-3, TRAJ10)
CAVGPILTGGGNKITF

SEQ ID NO: 425870 - protein, 12 aa, Homo sapiens
  CDR3 for beta chain variable domain of TCR clone 212935 (TRBV11-2, TRBJ2-2)
CASSLPTGELFF

SEQ ID NO: 425871 - protein, 12 aa, Homo sapiens
  CDR3 for alpha chain variable domain of TCR clone 212936 (TRAV12-3, TRAJ17)
CAMTLRGNKLTF

SEQ ID NO: 425872 - protein, 13 aa, Homo sapiens
  CDR3 for beta chain variable domain of TCR clone 212936 (TRBV7-9, TRBJ1-2)
CASSLKQNYGYTF

SEQ ID NO: 425873 - protein, 12 aa, Homo sapiens
  CDR3 for alpha chain variable domain of TCR clone 212937 (TRAV12-1, TRAJ34)
CVVAGATDKLIF

SEQ ID NO: 425874 - protein, 13 aa, Homo sapiens
  CDR3 for beta chain variable domain of TCR clone 212937 (TRBV11-2, TRBJ2-5)
CASSSTGEETQYF

SEQ ID NO: 425875 - protein, 16 aa, Homo sapiens
  CDR3 for alpha chain variable domain of TCR clone 212938 (TRAV13-2, TRAJ32)
CAENMNYGGATNKLIL

SEQ ID NO: 425876 - protein, 14 aa, Homo sapiens
  CDR3 for beta chain variable domain of TCR clone 212938 (TRBV4-3, TRBJ2-7)
CASSQDVAGGEQYF

SEQ ID NO: 425877 - protein, 17 aa, Homo sapiens
  CDR3 for alpha chain variable domain of TCR clone 212939 (TRAV4, TRAJ31)
CPVARMPDSCLEMELSW

SEQ ID NO: 425878 - protein, 15 aa, Homo sapiens
  CDR3 for beta chain variable domain of TCR clone 212939 (TRBV7-8, TRBJ1-2)
CASSLVRDGGLGYTF

SEQ ID NO: 425879 - protein, 11 aa, Homo sapiens
  CDR3 for alpha chain variable domain of TCR clone 212940 (TRAV3, TRAJ21)
CAVGNFNKFYF

SEQ ID NO: 425880 - protein, 16 aa, Homo sapiens
  CDR3 for beta chain variable domain of TCR clone 212940 (TRBV7-7, TRBJ2-1)
CASSAPGPSSYNEQFF

SEQ ID NO: 425881 - protein, 14 aa, Homo sapiens
  CDR3 for alpha chain variable domain of TCR clone 212941 (TRAV1-2, TRAJ16)
CAVNRFSDVQKLLF

SEQ ID NO: 425882 - protein, 13 aa, Homo sapiens
  CDR3 for beta chain variable domain of TCR clone 212941 (TRBV20-1, TRBJ2-1)
CSAHGSSYNEQFF

SEQ ID NO: 425883 - protein, 13 aa, Homo sapiens
  CDR3 for alpha chain variable domain of TCR clone 212942 (TRAV12-3, TRAJ21)
CAPGPHNFNKFYF

SEQ ID NO: 425884 - protein, 16 aa, Homo sapiens
  CDR3 for beta chain variable domain of TCR clone 212942 (TRBV29-1, TRBJ2-7)
CSVEVVGTSGSYEQYF

SEQ ID NO: 425885 - protein, 12 aa, Homo sapiens
  CDR3 for alpha chain variable domain of TCR clone 212943 (TRAV22, TRAJ36)
FAVGTGANNLFF

SEQ ID NO: 425886 - protein, 17 aa, Homo sapiens
  CDR3 for beta chain variable domain of TCR clone 212943 (TRBV15, TRBJ1-4)
CATSRYGTGDPNEKLFF

SEQ ID NO: 425887 - protein, 13 aa, Homo sapiens
  CDR3 for alpha chain variable domain of TCR clone 212944 (TRAV8-4, TRAJ4)
CAVSDIGYNKLIF

SEQ ID NO: 425888 - protein, 12 aa, Homo sapiens
  CDR3 for beta chain variable domain of TCR clone 212944 (TRBV11-2, TRBJ2-1)
CASSPGNNEQFF

SEQ ID NO: 425889 - protein, 15 aa, Homo sapiens
  CDR3 for alpha chain variable domain of TCR clone 212945 (TRAV26-1, TRAJ56)
CIVRVDNGANSKLTF

SEQ ID NO: 425890 - protein, 15 aa, Homo sapiens
  CDR3 for beta chain variable domain of TCR clone 212945 (TRBV20-1, TRBJ2-7)
CSARDPTEVGHDQYF

SEQ ID NO: 425891 - protein, 18 aa, Homo sapiens
  CDR3 for alpha chain variable domain of TCR clone 212946 (TRAV29/DV5, TRAJ52)
CTAGFRGAGGTSYGKLTF

SEQ ID NO: 425892 - protein, 16 aa, Homo sapiens
  CDR3 for beta chain variable domain of TCR clone 212946 (TRBV7-3, TRBJ2-2)
YASSLKRGTLSGELFF

SEQ ID NO: 425893 - protein, 21 aa, Homo sapiens
  CDR3 for alpha chain variable domain of TCR clone 212947 (TRAV8-3, TRAJ6)
CAARRGEAKYLHLEEEPTLLF

SEQ ID NO: 425894 - protein, 15 aa, Homo sapiens
  CDR3 for beta chain variable domain of TCR clone 212947 (TRBV4-1, TRBJ2-3)
CASSNLAGGRDTQYF

SEQ ID NO: 425895 - protein, 13 aa, Homo sapiens
  CDR3 for alpha chain variable domain of TCR clone 212948 (TRAV30, TRAJ34)
CGTVGYNTDKLIF

SEQ ID NO: 425896 - protein, 15 aa, Homo sapiens
  CDR3 for beta chain variable domain of TCR clone 212948 (TRBV2, TRBJ2-1)
CASSELAGSYNEQFF

SEQ ID NO: 425897 - protein, 14 aa, Homo sapiens
  CDR3 for alpha chain variable domain of TCR clone 212949 (TRAV12-2, TRAJ9)
CAVNALEGGFKTIF

SEQ ID NO: 425898 - protein, 16 aa, Homo sapiens
  CDR3 for beta chain variable domain of TCR clone 212949 (TRBV19, TRBJ1-6)
CASSVAPVAGNSPIHF

SEQ ID NO: 425899 - protein, 13 aa, Homo sapiens
  CDR3 for alpha chain variable domain of TCR clone 212950 (TRAV8-3, TRAJ48)
CAVVPFGNEKLPF

SEQ ID NO: 425900 - protein, 12 aa, Homo sapiens
  CDR3 for beta chain variable domain of TCR clone 212950 (TRBV11-2, TRBJ2-2)
CASSLGGGELFF

SEQ ID NO: 425901 - protein, 14 aa, Homo sapiens
  CDR3 for alpha chain variable domain of TCR clone 212951 (TRAV1-2, TRAJ16)
CAVNRFSDGQKLLF

SEQ ID NO: 425902 - protein, 16 aa, Homo sapiens
  CDR3 for beta chain variable domain of TCR clone 212951 (TRBV7-3, TRBJ2-2)
CASSLKRGTWSGELFF

SEQ ID NO: 425903 - protein, 21 aa, Homo sapiens
  CDR3 for alpha chain variable domain of TCR clone 212952 (TRAV4, TRAJ39)
CCVLLPRGGAAGGNAGNMLTF

SEQ ID NO: 425904 - protein, 16 aa, Homo sapiens
  CDR3 for beta chain variable domain of TCR clone 212952 (TRBV7-6, TRBJ2-7)
CASSGGTGDLSYEQYF

SEQ ID NO: 425905 - protein, 13 aa, Homo sapiens
  CDR3 for alpha chain variable domain of TCR clone 212953 (TRAV8-3, TRAJ36)
CAVGATGANNLFF

SEQ ID NO: 425906 - protein, 20 aa, Homo sapiens
  CDR3 for beta chain variable domain of TCR clone 212953 (TRBV7-9, TRBJ2-1)
CASSSPRASRTRSSYNEQFF

SEQ ID NO: 425907 - protein, 15 aa, Homo sapiens
  CDR3 for alpha chain variable domain of TCR clone 212954 (TRAV13-1, TRAJ52)
CAASSPSTSYGKLKF

SEQ ID NO: 425908 - protein, 13 aa, Homo sapiens
  CDR3 for beta chain variable domain of TCR clone 212954 (TRBV27, TRBJ2-5)
CASSLSSLETQYF

SEQ ID NO: 425909 - protein, 16 aa, Homo sapiens
  CDR3 for alpha chain variable domain of TCR clone 212955 (TRAV30, TRAJ24)
CGTEIVDANSWGKFQF

SEQ ID NO: 425910 - protein, 14 aa, Homo sapiens
  CDR3 for beta chain variable domain of TCR clone 212955 (TRBV12-5, TRBJ2-5)
CASGSRTHQETQYL

SEQ ID NO: 425911 - protein, 14 aa, Homo sapiens
  CDR3 for alpha chain variable domain of TCR clone 212956 (TRAV16, TRAJ17)
CALSEGAAGNKLTF

SEQ ID NO: 425912 - protein, 17 aa, Homo sapiens
  CDR3 for beta chain variable domain of TCR clone 212956 (TRBV20-1, TRBJ2-2)
CSASGSGQGGLTGELFF

SEQ ID NO: 425913 - protein, 13 aa, Homo sapiens
  CDR3 for alpha chain variable domain of TCR clone 212957 (TRAV21, TRAJ27)
CAARPGKAGKSTF

SEQ ID NO: 425914 - protein, 14 aa, Homo sapiens
  CDR3 for beta chain variable domain of TCR clone 212957 (TRBV7-6, TRBJ2-3)
RASSLGTVTDTQYF

SEQ ID NO: 425915 - protein, 14 aa, Homo sapiens
  CDR3 for alpha chain variable domain of TCR clone 212958 (TRAV23/DV6, TRAJ47)
CAARRREYGNKLVF

SEQ ID NO: 425916 - protein, 15 aa, Homo sapiens
  CDR3 for beta chain variable domain of TCR clone 212958 (TRBV7-8, TRBJ1-2)
CASSLVRDGGLGYTF

SEQ ID NO: 425917 - protein, 12 aa, Homo sapiens
  CDR3 for alpha chain variable domain of TCR clone 212959 (TRAV13-2, TRAJ23)
CAERHRGGKLIF

SEQ ID NO: 425918 - protein, 12 aa, Homo sapiens
  CDR3 for beta chain variable domain of TCR clone 212959 (TRBV3-1, TRBJ2-5)
CASSQRGETQYF

SEQ ID NO: 425919 - protein, 16 aa, Homo sapiens
  CDR3 for alpha chain variable domain of TCR clone 212960 (TRAV4, TRAJ37)
CLVCWFGSSNTGKLIF

SEQ ID NO: 425920 - protein, 15 aa, Homo sapiens
  CDR3 for beta chain variable domain of TCR clone 212960 (TRBV12-4, TRBJ2-3)
CASSLAERPTDTQYF

SEQ ID NO: 425921 - protein, 13 aa, Homo sapiens
  CDR3 for alpha chain variable domain of TCR clone 212961 (TRAV39, TRAJ58)
CAGEETSGSRLTF

SEQ ID NO: 425922 - protein, 19 aa, Homo sapiens
  CDR3 for beta chain variable domain of TCR clone 212961 (TRBV25-1, TRBJ2-2)
CAILVYRVDRGRKTGELFF

SEQ ID NO: 425923 - protein, 17 aa, Homo sapiens
  CDR3 for alpha chain variable domain of TCR clone 212962 (TRAV1-1, TRAJ28)
CAVDPAYSGAGSYQLTF

SEQ ID NO: 425924 - protein, 14 aa, Homo sapiens
  CDR3 for beta chain variable domain of TCR clone 212962 (TRBV19, TRBJ2-1)
CARPTFVLSGEQFF

SEQ ID NO: 425925 - protein, 13 aa, Homo sapiens
  CDR3 for alpha chain variable domain of TCR clone 212963 (TRAV2, TRAJ15)
CAVASQAGTALIF

SEQ ID NO: 425926 - protein, 13 aa, Homo sapiens
  CDR3 for beta chain variable domain of TCR clone 212963 (TRBV18, TRBJ1-2)
CASSASATEGYTF

SEQ ID NO: 425927 - protein, 14 aa, Homo sapiens
  CDR3 for alpha chain variable domain of TCR clone 212964 (TRAV26-1, TRAJ40)
CIVRLLSGTYKYIF

SEQ ID NO: 425928 - protein, 15 aa, Homo sapiens
  CDR3 for beta chain variable domain of TCR clone 212964 (TRBV29-1, TRBJ2-5)
CSVAGASGTQETQYF

SEQ ID NO: 425929 - protein, 11 aa, Homo sapiens
  CDR3 for alpha chain variable domain of TCR clone 212965 (TRAV2, TRAJ13)
CASGGYQKVTF

SEQ ID NO: 425930 - protein, 15 aa, Homo sapiens
  CDR3 for beta chain variable domain of TCR clone 212965 (TRBV6-1, TRBJ2-2)
CASSRLRRDTGELFF

SEQ ID NO: 425931 - protein, 16 aa, Homo sapiens
  CDR3 for alpha chain variable domain of TCR clone 212966 (TRAV26-1, TRAJ58)
IASSESGETSGSRLTF

SEQ ID NO: 425932 - protein, 13 aa, Homo sapiens
  CDR3 for beta chain variable domain of TCR clone 212966 (TRBV19, TRBJ1-2)
CASSVPGQDGYTF

SEQ ID NO: 425933 - protein, 14 aa, Homo sapiens
  CDR3 for alpha chain variable domain of TCR clone 212967 (TRAV12-2, TRAJ13)
CAVKKTGGNQKVTF

SEQ ID NO: 425934 - protein, 19 aa, Homo sapiens
  CDR3 for beta chain variable domain of TCR clone 212967 (TRBV25-1, TRBJ2-2)
CAILVYRVDRGRKTGELFF

SEQ ID NO: 425935 - protein, 13 aa, Homo sapiens
  CDR3 for alpha chain variable domain of TCR clone 212968 (TRAV12-3, TRAJ33)
CAMSVNSNYQLIW

SEQ ID NO: 425936 - protein, 13 aa, Homo sapiens
  CDR3 for beta chain variable domain of TCR clone 212968 (TRBV7-2, TRBJ2-2)
CASSLAVTGELFV

SEQ ID NO: 425937 - protein, 16 aa, Homo sapiens
  CDR3 for alpha chain variable domain of TCR clone 212969 (TRAV30, TRAJ24)
CGTEIVDADSWGKFQF

SEQ ID NO: 425938 - protein, 15 aa, Homo sapiens
  CDR3 for beta chain variable domain of TCR clone 212969 (TRBV20-1, TRBJ2-4)
CSARDLTGGPNIQYV

SEQ ID NO: 425939 - protein, 12 aa, Homo sapiens
  CDR3 for alpha chain variable domain of TCR clone 212970 (TRAV12-3, TRAJ17)
CAMTLTGNKLTF

SEQ ID NO: 425940 - protein, 19 aa, Homo sapiens
  CDR3 for beta chain variable domain of TCR clone 212970 (TRBV25-1, TRBJ2-2)
CAFLVYRVDRGRKTGELFF

SEQ ID NO: 425941 - protein, 12 aa, Homo sapiens
  CDR3 for alpha chain variable domain of TCR clone 212971 (TRAV12-3, TRAJ29)
CAVTSGNTPLVF

SEQ ID NO: 425942 - protein, 13 aa, Homo sapiens
  CDR3 for beta chain variable domain of TCR clone 212971 (TRBV7-7, TRBJ2-2)
CASSLAGAGELFF

SEQ ID NO: 425943 - protein, 14 aa, Homo sapiens
  CDR3 for alpha chain variable domain of TCR clone 212972 (TRAV8-3, TRAJ13)
CAGGAQEGYQKVTF

SEQ ID NO: 425944 - protein, 13 aa, Homo sapiens
  CDR3 for beta chain variable domain of TCR clone 212972 (TRBV11-2, TRBJ2-5)
CASSSTGEETQYF

SEQ ID NO: 425945 - protein, 17 aa, Homo sapiens
  CDR3 for alpha chain variable domain of TCR clone 212973 (TRAV1-2, TRAJ8)
CAVRDPDENTGFQKLVF

SEQ ID NO: 425946 - protein, 16 aa, Homo sapiens
  CDR3 for beta chain variable domain of TCR clone 212973 (TRBV7-9, TRBJ2-2)
CASIGFGGANTGELFF

SEQ ID NO: 425947 - protein, 15 aa, Homo sapiens
  CDR3 for alpha chain variable domain of TCR clone 212974 (TRAV3, TRAJ22)
CAVRDRGGSARHLTF

SEQ ID NO: 425948 - protein, 15 aa, Homo sapiens
  CDR3 for beta chain variable domain of TCR clone 212974 (TRBV7-3, TRBJ2-2)
CASSETGQGTGELFF

SEQ ID NO: 425949 - protein, 10 aa, Homo sapiens
  CDR3 for alpha chain variable domain of TCR clone 212975 (TRAV26-1, TRAJ40)
CIAGTYKYIF

SEQ ID NO: 425950 - protein, 12 aa, Homo sapiens
  CDR3 for beta chain variable domain of TCR clone 212975 (TRBV19, TRBJ1-4)
CASKDWPGGLFF

SEQ ID NO: 425951 - protein, 16 aa, Homo sapiens
  CDR3 for alpha chain variable domain of TCR clone 212976 (TRAV16, TRAJ4)
CALSRMFSGCYNKLIF

SEQ ID NO: 425952 - protein, 13 aa, Homo sapiens
  CDR3 for beta chain variable domain of TCR clone 212976 (TRBV7-2, TRBJ2-2)
CASSLAVTGELFF

SEQ ID NO: 425953 - protein, 15 aa, Homo sapiens
  CDR3 for alpha chain variable domain of TCR clone 212977 (TRAV2, TRAJ9)
CAVKDRGTGGFKTIF

SEQ ID NO: 425954 - protein, 16 aa, Homo sapiens
  CDR3 for beta chain variable domain of TCR clone 212977 (TRBV24-1, TRBJ2-3)
CATSDPGTGATDTQYF

SEQ ID NO: 425955 - protein, 16 aa, Homo sapiens
  CDR3 for alpha chain variable domain of TCR clone 212978 (TRAV8-3, TRAJ44)
CAVGTLMTGTASKLTF

SEQ ID NO: 425956 - protein, 17 aa, Homo sapiens
  CDR3 for beta chain variable domain of TCR clone 212978 (TRBV15, TRBJ1-5)
CATSRAPPGTRNQPQHF

SEQ ID NO: 425957 - protein, 13 aa, Homo sapiens
  CDR3 for alpha chain variable domain of TCR clone 212979 (TRAV17, TRAJ22)
CAGRRGSARQLTF

SEQ ID NO: 425958 - protein, 14 aa, Homo sapiens
  CDR3 for beta chain variable domain of TCR clone 212979 (TRBV19, TRBJ1-1)
CASSITGWDTEAFF

SEQ ID NO: 425959 - protein, 17 aa, Homo sapiens
  CDR3 for alpha chain variable domain of TCR clone 212980 (TRAV3, TRAJ6)
CAVRDGPRAGGSYIPTF

SEQ ID NO: 425960 - protein, 18 aa, Homo sapiens
  CDR3 for beta chain variable domain of TCR clone 212980 (TRBV12-4, TRBJ2-2)
CASSRSGGAIPNTGELFF

SEQ ID NO: 425961 - protein, 16 aa, Homo sapiens
  CDR3 for alpha chain variable domain of TCR clone 212981 (TRAV20, TRAJ52)
CVVLPDGGTSYGKLTF

SEQ ID NO: 425962 - protein, 12 aa, Homo sapiens
  CDR3 for beta chain variable domain of TCR clone 212981 (TRBV19, TRBJ2-1)
CASSQISNEQFF

SEQ ID NO: 425963 - protein, 14 aa, Homo sapiens
  CDR3 for alpha chain variable domain of TCR clone 212982 (TRAV8-3, TRAJ39)
CAVGAWGAGHMLTF

SEQ ID NO: 425964 - protein, 16 aa, Homo sapiens
  CDR3 for beta chain variable domain of TCR clone 212982 (TRBV7-2, TRBJ1-3)
CASSSGRVLSGNTIYF

SEQ ID NO: 425965 - protein, 14 aa, Homo sapiens
  CDR3 for alpha chain variable domain of TCR clone 212983 (TRAV1-1, TRAJ27)
CAVIYNTNAGKSTF

SEQ ID NO: 425966 - protein, 11 aa, Homo sapiens
  CDR3 for beta chain variable domain of TCR clone 212983 (TRBV12-4, TRBJ2-3)
CASTATDTQYF

SEQ ID NO: 425967 - protein, 14 aa, Homo sapiens
  CDR3 for alpha chain variable domain of TCR clone 212984 (TRAV1-2, TRAJ8)
CAVREDTGFQKLVF

SEQ ID NO: 425968 - protein, 13 aa, Homo sapiens
  CDR3 for beta chain variable domain of TCR clone 212984 (TRBV13, TRBJ2-5)
CASSLGGEETQYF

SEQ ID NO: 425969 - protein, 23 aa, Homo sapiens
  CDR3 for alpha chain variable domain of TCR clone 212985 (TRAV13-1, TRAJ32)
CSASNGWWCYKQAHLWNWHSASF

SEQ ID NO: 425970 - protein, 15 aa, Homo sapiens
  CDR3 for beta chain variable domain of TCR clone 212985 (TRBV20-1, TRBJ1-2)
CSAIRTGAFNYGYTF

SEQ ID NO: 425971 - protein, 15 aa, Homo sapiens
  CDR3 for alpha chain variable domain of TCR clone 212986 (TRAV13-1, TRAJ17)
CAASIERAAGNKLTF

SEQ ID NO: 425972 - protein, 15 aa, Homo sapiens
  CDR3 for beta chain variable domain of TCR clone 212986 (TRBV6-1, TRBJ2-3)
FASSERGGITYTQYF

SEQ ID NO: 425973 - protein, 13 aa, Homo sapiens
  CDR3 for alpha chain variable domain of TCR clone 212987 (TRAV8-4, TRAJ29)
CAVSATGNTPLVF

SEQ ID NO: 425974 - protein, 15 aa, Homo sapiens
  CDR3 for beta chain variable domain of TCR clone 212987 (TRBV27, TRBJ2-1)
CASSNGGGSSNEQFF

SEQ ID NO: 425975 - protein, 14 aa, Homo sapiens
  CDR3 for alpha chain variable domain of TCR clone 212988 (TRAV26-1, TRAJ44)
CIARTTGTASKLTF

SEQ ID NO: 425976 - protein, 14 aa, Homo sapiens
  CDR3 for beta chain variable domain of TCR clone 212988 (TRBV19, TRBJ2-3)
CASSAPRGTDTQYF

SEQ ID NO: 425977 - protein, 14 aa, Homo sapiens
  CDR3 for alpha chain variable domain of TCR clone 212989 (TRAV8-3, TRAJ44)
CAVGLTGTASKLTF

SEQ ID NO: 425978 - protein, 12 aa, Homo sapiens
  CDR3 for beta chain variable domain of TCR clone 212989 (TRBV7-3, TRBJ2-1)
CASSLGLNEQFF

SEQ ID NO: 425979 - protein, 14 aa, Homo sapiens
  CDR3 for alpha chain variable domain of TCR clone 212990 (TRAV25, TRAJ22)
CAVRSSGSARQLTF

SEQ ID NO: 425980 - protein, 16 aa, Homo sapiens
  CDR3 for beta chain variable domain of TCR clone 212990 (TRBV7-9, TRBJ2-1)
CASSLVSGPSYNEQFF

SEQ ID NO: 425981 - protein, 15 aa, Homo sapiens
  CDR3 for alpha chain variable domain of TCR clone 212991 (TRAV2, TRAJ9)
CAVEDRGTGGFKTIF

SEQ ID NO: 425982 - protein, 14 aa, Homo sapiens
  CDR3 for beta chain variable domain of TCR clone 212991 (TRBV4-1, TRBJ2-2)
CASSQAVNTGELFF

SEQ ID NO: 425983 - protein, 14 aa, Homo sapiens
  CDR3 for alpha chain variable domain of TCR clone 212992 (TRAV1-2, TRAJ8)
CAVREDTGFQKLVF

SEQ ID NO: 425984 - protein, 15 aa, Homo sapiens
  CDR3 for beta chain variable domain of TCR clone 212992 (TRBV7-3, TRBJ2-2)
CASRETGQGTGKLFF

SEQ ID NO: 425985 - protein, 14 aa, Homo sapiens
  CDR3 for alpha chain variable domain of TCR clone 212993 (TRAV9-2, TRAJ39)
CALYIYNAGNTLTF

SEQ ID NO: 425986 - protein, 14 aa, Homo sapiens
  CDR3 for beta chain variable domain of TCR clone 212993 (TRBV6-1, TRBJ1-3)
CASVQGGGGNTMYF

SEQ ID NO: 425987 - protein, 12 aa, Homo sapiens
  CDR3 for alpha chain variable domain of TCR clone 212994 (TRAV38-1, TRAJ34)
CAFMKETDKLIF

SEQ ID NO: 425988 - protein, 17 aa, Homo sapiens
  CDR3 for beta chain variable domain of TCR clone 212994 (TRBV7-8, TRBJ2-6)
CASSAGTGGAGDNVLTF

SEQ ID NO: 425989 - protein, 14 aa, Homo sapiens
  CDR3 for alpha chain variable domain of TCR clone 212995 (TRAV35, TRAJ10)
CAGILTGGGNKLTF

SEQ ID NO: 425990 - protein, 15 aa, Homo sapiens
  CDR3 for beta chain variable domain of TCR clone 212995 (TRBV5-1, TRBJ2-2)
CASSWTSPNTGELFF

SEQ ID NO: 425991 - protein, 11 aa, Homo sapiens
  CDR3 for alpha chain variable domain of TCR clone 212996 (TRAV3, TRAJ21)
CAVGNFNKFYF

SEQ ID NO: 425992 - protein, 14 aa, Homo sapiens
  CDR3 for beta chain variable domain of TCR clone 212996 (TRBV12-5, TRBJ2-5)
CASGSPTHQETQYF

SEQ ID NO: 425993 - protein, 14 aa, Homo sapiens
  CDR3 for alpha chain variable domain of TCR clone 212997 (TRAV1-2, TRAJ16)
CAVNRFSDGQKLLF

SEQ ID NO: 425994 - protein, 11 aa, Homo sapiens
  CDR3 for beta chain variable domain of TCR clone 212997 (TRBV28, TRBJ2-1)
CASRRVNEQFF

SEQ ID NO: 425995 - protein, 14 aa, Homo sapiens
  CDR3 for alpha chain variable domain of TCR clone 212998 (TRAV2, TRAJ37)
CAVDFTSNTGKLIF

SEQ ID NO: 425996 - protein, 18 aa, Homo sapiens
  CDR3 for beta chain variable domain of TCR clone 212998 (TRBV18, TRBJ2-3)
CASSYTSGAAGGTDTQYF

SEQ ID NO: 425997 - protein, 13 aa, Homo sapiens
  CDR3 for alpha chain variable domain of TCR clone 212999 (TRAV1-1, TRAJ9)
CAAKNTGCFKTIF

SEQ ID NO: 425998 - protein, 14 aa, Homo sapiens
  CDR3 for beta chain variable domain of TCR clone 212999 (TRBV20-1, TRBJ2-1)
CSAHIGGSANEQFF

SEQ ID NO: 425999 - protein, 12 aa, Homo sapiens
  CDR3 for alpha chain variable domain of TCR clone 213000 (TRAV1-2, TRAJ26)
CAVRYYGQNFVF

SEQ ID NO: 426000 - protein, 14 aa, Homo sapiens
  CDR3 for beta chain variable domain of TCR clone 213000 (TRBV11-1, TRBJ2-7)
CASSFRQGSYEQNF

SEQ ID NO: 426001 - protein, 14 aa, Homo sapiens
  CDR3 for alpha chain variable domain of TCR clone 213001 (TRAV1-2, TRAJ16)
CAVNRFSDGQKLLF

SEQ ID NO: 426002 - protein, 16 aa, Homo sapiens
  CDR3 for beta chain variable domain of TCR clone 213001 (TRBV12-4, TRBJ1-2)
CASSLGQYRPNYGYTF

SEQ ID NO: 426003 - protein, 15 aa, Homo sapiens
  CDR3 for alpha chain variable domain of TCR clone 213002 (TRAV35, TRAJ40)
CAGQLGTSATYKYIF

SEQ ID NO: 426004 - protein, 14 aa, Homo sapiens
  CDR3 for beta chain variable domain of TCR clone 213002 (TRBV7-3, TRBJ2-1)
CASSLAGGTNEQFF

SEQ ID NO: 426005 - protein, 14 aa, Homo sapiens
  CDR3 for alpha chain variable domain of TCR clone 213003 (TRAV30, TRAJ33)
CGTERRFSNYQLIW

SEQ ID NO: 426006 - protein, 16 aa, Homo sapiens
  CDR3 for beta chain variable domain of TCR clone 213003 (TRBV7-3, TRBJ2-2)
FASSLKRGTLSGELFF

SEQ ID NO: 426007 - protein, 11 aa, Homo sapiens
  CDR3 for alpha chain variable domain of TCR clone 213004 (TRAV12-2, TRAJ31)
CAVTRWARLMF

SEQ ID NO: 426008 - protein, 13 aa, Homo sapiens
  CDR3 for beta chain variable domain of TCR clone 213004 (TRBV7-2, TRBJ2-7)
CASSSPSGSEQYF

SEQ ID NO: 426009 - protein, 15 aa, Homo sapiens
  CDR3 for alpha chain variable domain of TCR clone 213005 (TRAV12-2, TRAJ9)
CAVNNERTGGFKTIF

SEQ ID NO: 426010 - protein, 16 aa, Homo sapiens
  CDR3 for beta chain variable domain of TCR clone 213005 (TRBV4-1, TRBJ1-4)
CISAPSAERKNEKLFF

SEQ ID NO: 426011 - protein, 18 aa, Homo sapiens
  CDR3 for alpha chain variable domain of TCR clone 213006 (TRAV3, TRAJ17)
CAVRARRGGRSCRQQANF

SEQ ID NO: 426012 - protein, 16 aa, Homo sapiens
  CDR3 for beta chain variable domain of TCR clone 213006 (TRBV4-1, TRBJ2-5)
CASSHADRAGGETQYF

SEQ ID NO: 426013 - protein, 16 aa, Homo sapiens
  CDR3 for alpha chain variable domain of TCR clone 213007 (TRAV8-4, TRAJ5)
CAVSPLTDTCRRALTF

SEQ ID NO: 426014 - protein, 14 aa, Homo sapiens
  CDR3 for beta chain variable domain of TCR clone 213007 (TRBV19, TRBJ1-6)
CASSTDGWNSPLHF

SEQ ID NO: 426015 - protein, 11 aa, Homo sapiens
  CDR3 for alpha chain variable domain of TCR clone 213008 (TRAV1-2, TRAJ20)
CSVANDYKLSF

SEQ ID NO: 426016 - protein, 18 aa, Homo sapiens
  CDR3 for beta chain variable domain of TCR clone 213008 (TRBV20-1, TRBJ2-6)
CSSETTPTHGSGANVLTF

SEQ ID NO: 426017 - protein, 10 aa, Homo sapiens
  CDR3 for alpha chain variable domain of TCR clone 213009 (TRAV23/DV6, TRAJ57)
CAASSTLSQG

SEQ ID NO: 426018 - protein, 14 aa, Homo sapiens
  CDR3 for beta chain variable domain of TCR clone 213009 (TRBV25-1, TRBJ1-1)
CASTHLGGNSEAFF

SEQ ID NO: 426019 - protein, 13 aa, Homo sapiens
  CDR3 for alpha chain variable domain of TCR clone 213010 (TRAV16, TRAJ22)
SAMLAGCARQLTF

SEQ ID NO: 426020 - protein, 18 aa, Homo sapiens
  CDR3 for beta chain variable domain of TCR clone 213010 (TRBV7-2, TRBJ2-3)
CASSLETSRGRKADTQYF

SEQ ID NO: 426021 - protein, 15 aa, Homo sapiens
  CDR3 for alpha chain variable domain of TCR clone 213011 (TRAV1-2, TRAJ35)
CAVRDREGFGNVLHC

SEQ ID NO: 426022 - protein, 15 aa, Homo sapiens
  CDR3 for beta chain variable domain of TCR clone 213011 (TRBV6-1, TRBJ2-3)
CASSEIAHSTDTQYF

SEQ ID NO: 426023 - protein, 13 aa, Homo sapiens
  CDR3 for alpha chain variable domain of TCR clone 213012 (TRAV8-3, TRAJ20)
CAVGAQDDYKLSF

SEQ ID NO: 426024 - protein, 15 aa, Homo sapiens
  CDR3 for beta chain variable domain of TCR clone 213012 (TRBV27, TRBJ2-1)
CASSNGGGSSNEQFF

SEQ ID NO: 426025 - protein, 14 aa, Homo sapiens
  CDR3 for alpha chain variable domain of TCR clone 213013 (TRAV12-3, TRAJ9)
CAMSPNTGGFKTIF

SEQ ID NO: 426026 - protein, 18 aa, Homo sapiens
  CDR3 for beta chain variable domain of TCR clone 213013 (TRBV28, TRBJ2-1)
CASSSTSGRANSYNEQFF

SEQ ID NO: 426027 - protein, 14 aa, Homo sapiens
  CDR3 for alpha chain variable domain of TCR clone 213014 (TRAV2, TRAJ9)
FAVEDRSGGFKTIF

SEQ ID NO: 426028 - protein, 12 aa, Homo sapiens
  CDR3 for beta chain variable domain of TCR clone 213014 (TRBV11-2, TRBJ2-2)
CASSLGGGELFF

SEQ ID NO: 426029 - protein, 16 aa, Homo sapiens
  CDR3 for alpha chain variable domain of TCR clone 213015 (TRAV12-2, TRAJ43)
CAGDDMRFGAGTRLTV

SEQ ID NO: 426030 - protein, 13 aa, Homo sapiens
  CDR3 for beta chain variable domain of TCR clone 213015 (TRBV20-1, TRBJ2-7)
CSATHTSGYEQYF

SEQ ID NO: 426031 - protein, 15 aa, Homo sapiens
  CDR3 for alpha chain variable domain of TCR clone 213016 (TRAV26-1, TRAJ17)
CIVRVVKAAGNKLTF

SEQ ID NO: 426032 - protein, 17 aa, Homo sapiens
  CDR3 for beta chain variable domain of TCR clone 213016 (TRBV13, TRBJ2-3)
CASSLSRVAGGRNTQYF

SEQ ID NO: 426033 - protein, 12 aa, Homo sapiens
  CDR3 for alpha chain variable domain of TCR clone 213017 (TRAV12-3, TRAJ17)
CAMTLTGNKLTF

SEQ ID NO: 426034 - protein, 13 aa, Homo sapiens
  CDR3 for beta chain variable domain of TCR clone 213017 (TRBV5-5, TRBJ1-1)
CASSQAGNTEAFF

SEQ ID NO: 426035 - protein, 11 aa, Homo sapiens
  CDR3 for alpha chain variable domain of TCR clone 213018 (TRAV12-2, TRAJ29)
CAVTLRSPLVF

SEQ ID NO: 426036 - protein, 16 aa, Homo sapiens
  CDR3 for beta chain variable domain of TCR clone 213018 (TRBV29-1, TRBJ2-2)
CSVETRASGNTGGLVF

SEQ ID NO: 426037 - protein, 13 aa, Homo sapiens
  CDR3 for alpha chain variable domain of TCR clone 213019 (TRAV8-3, TRAJ28)
CAVGAVGSYQLTF

SEQ ID NO: 426038 - protein, 11 aa, Homo sapiens
  CDR3 for beta chain variable domain of TCR clone 213019 (TRBV7-9, TRBJ2-3)
CASSPTDTQYF

SEQ ID NO: 426039 - protein, 14 aa, Homo sapiens
  CDR3 for alpha chain variable domain of TCR clone 213020 (TRAV12-2, TRAJ15)
RAPHTGQAGTALIF

SEQ ID NO: 426040 - protein, 17 aa, Homo sapiens
  CDR3 for beta chain variable domain of TCR clone 213020 (TRBV7-8, TRBJ2-6)
CASSAGTGGAGANVLTF

SEQ ID NO: 426041 - protein, 15 aa, Homo sapiens
  CDR3 for alpha chain variable domain of TCR clone 213021 (TRAV26-2, TRAJ13)
CILRDLSGGFQKVTF

SEQ ID NO: 426042 - protein, 11 aa, Homo sapiens
  CDR3 for beta chain variable domain of TCR clone 213021 (TRBV7-9, TRBJ2-5)
CASSLSATQYF

SEQ ID NO: 426043 - protein, 13 aa, Homo sapiens
  CDR3 for alpha chain variable domain of TCR clone 213022 (TRAV12-3, TRAJ56)
CALATGAISKLTF

SEQ ID NO: 426044 - protein, 12 aa, Homo sapiens
  CDR3 for beta chain variable domain of TCR clone 213022 (TRBV10-2, TRBJ2-3)
CASSPESDTQYF

SEQ ID NO: 426045 - protein, 16 aa, Homo sapiens
  CDR3 for alpha chain variable domain of TCR clone 213023 (TRAV22, TRAJ45)
CAVERGRRGGADGLTF

SEQ ID NO: 426046 - protein, 11 aa, Homo sapiens
  CDR3 for beta chain variable domain of TCR clone 213023 (TRBV29-1, TRBJ2-5)
CSEDRPGTQYF

SEQ ID NO: 426047 - protein, 13 aa, Homo sapiens
  CDR3 for alpha chain variable domain of TCR clone 213024 (TRAV2, TRAJ40)
CAVVTSGTYKYIF

SEQ ID NO: 426048 - protein, 12 aa, Homo sapiens
  CDR3 for beta chain variable domain of TCR clone 213024 (TRBV6-3, TRBJ2-7)
CASSRTPYEQYF

SEQ ID NO: 426049 - protein, 16 aa, Homo sapiens
  CDR3 for alpha chain variable domain of TCR clone 213025 (TRAV3, TRAJ37)
CAVSPHGSGNTGKLIF

SEQ ID NO: 426050 - protein, 11 aa, Homo sapiens
  CDR3 for beta chain variable domain of TCR clone 213025 (TRBV10-3, TRBJ2-7)
CAISEGLEQYF

SEQ ID NO: 426051 - protein, 13 aa, Homo sapiens
  CDR3 for alpha chain variable domain of TCR clone 213026 (TRAV20, TRAJ37)
CAGCSSNTGKLIF

SEQ ID NO: 426052 - protein, 15 aa, Homo sapiens
  CDR3 for beta chain variable domain of TCR clone 213026 (TRBV4-2, TRBJ1-1)
CASSQQGAGDTEAFF

SEQ ID NO: 426053 - protein, 11 aa, Homo sapiens
  CDR3 for alpha chain variable domain of TCR clone 213027 (TRAV13-1, TRAJ6)
CATLGSYIPSF

SEQ ID NO: 426054 - protein, 12 aa, Homo sapiens
  CDR3 for beta chain variable domain of TCR clone 213027 (TRBV11-2, TRBJ2-1)
CASSPGNNEQFF

SEQ ID NO: 426055 - protein, 12 aa, Homo sapiens
  CDR3 for alpha chain variable domain of TCR clone 213028 (TRAV25, TRAJ48)
CAGDFGNEKLTF

SEQ ID NO: 426056 - protein, 12 aa, Homo sapiens
  CDR3 for beta chain variable domain of TCR clone 213028 (TRBV2, TRBJ2-5)
CASKEYGETQYL

SEQ ID NO: 426057 - protein, 17 aa, Homo sapiens
  CDR3 for alpha chain variable domain of TCR clone 213029 (TRAV26-2, TRAJ42)
CILRDVGYGGSQGNLIF

SEQ ID NO: 426058 - protein, 12 aa, Homo sapiens
  CDR3 for beta chain variable domain of TCR clone 213029 (TRBV6-1, TRBJ1-6)
CASGVGNSPLHF

SEQ ID NO: 426059 - protein, 23 aa, Homo sapiens
  CDR3 for alpha chain variable domain of TCR clone 213030 (TRAV26-1, )
CIADSAGNNHIQTPDPAVNQLRD

SEQ ID NO: 426060 - protein, 13 aa, Homo sapiens
  CDR3 for beta chain variable domain of TCR clone 213030 (TRBV20-1, TRBJ2-1)
CSARSSPRDEQFF

SEQ ID NO: 426061 - protein, 17 aa, Homo sapiens
  CDR3 for alpha chain variable domain of TCR clone 213031 (TRAV3, TRAJ42)
CAVRDRDYGGSQGNLIL

SEQ ID NO: 426062 - protein, 11 aa, Homo sapiens
  CDR3 for beta chain variable domain of TCR clone 213031 (TRBV4-1, TRBJ2-2)
CASEHTGELFF

SEQ ID NO: 426063 - protein, 16 aa, Homo sapiens
  CDR3 for alpha chain variable domain of TCR clone 213032 (TRAV30, TRAJ24)
CGTEIVDADSWGKFQF

SEQ ID NO: 426064 - protein, 13 aa, Homo sapiens
  CDR3 for beta chain variable domain of TCR clone 213032 (TRBV20-1, TRBJ2-7)
CSAPGLADYEQYF

SEQ ID NO: 426065 - protein, 12 aa, Homo sapiens
  CDR3 for alpha chain variable domain of TCR clone 213033 (TRAV16, TRAJ13)
CITLRVYQKVTF

SEQ ID NO: 426066 - protein, 17 aa, Homo sapiens
  CDR3 for beta chain variable domain of TCR clone 213033 (TRBV28, TRBJ2-5)
CASSRQGGLAGAETQYF

SEQ ID NO: 426067 - protein, 11 aa, Homo sapiens
  CDR3 for alpha chain variable domain of TCR clone 213034 (TRAV1-2, TRAJ31)
CAVNNNARLMF

SEQ ID NO: 426068 - protein, 15 aa, Homo sapiens
  CDR3 for beta chain variable domain of TCR clone 213034 (TRBV28, TRBJ2-1)
CASGIIAGGRGEQFF

SEQ ID NO: 426069 - protein, 14 aa, Homo sapiens
  CDR3 for alpha chain variable domain of TCR clone 213035 (TRAV12-2, TRAJ13)
CAVQKTGGYQTVTF

SEQ ID NO: 426070 - protein, 15 aa, Homo sapiens
  CDR3 for beta chain variable domain of TCR clone 213035 (TRBV27, TRBJ2-1)
CASSNGGGSSNEQFF

SEQ ID NO: 426071 - protein, 13 aa, Homo sapiens
  CDR3 for alpha chain variable domain of TCR clone 213036 (TRAV12-3, TRAJ31)
CAMSANNNARLMF

SEQ ID NO: 426072 - protein, 12 aa, Homo sapiens
  CDR3 for beta chain variable domain of TCR clone 213036 (TRBV7-9, TRBJ1-5)
CASSPQGQPQHF

SEQ ID NO: 426073 - protein, 17 aa, Homo sapiens
  CDR3 for alpha chain variable domain of TCR clone 213037 (TRAV26-1, TRAJ53)
CIVRVDDSGGSNYKLTF

SEQ ID NO: 426074 - protein, 15 aa, Homo sapiens
  CDR3 for beta chain variable domain of TCR clone 213037 (TRBV20-1, TRBJ2-7)
YSARVPAAYFYEQYF

SEQ ID NO: 426075 - protein, 15 aa, Homo sapiens
  CDR3 for alpha chain variable domain of TCR clone 213038 (TRAV8-3, TRAJ40)
CAAPSLGLGTYKYIF

SEQ ID NO: 426076 - protein, 16 aa, Homo sapiens
  CDR3 for beta chain variable domain of TCR clone 213038 (TRBV7-3, TRBJ2-3)
CASSLSGYRPEDTQYF

SEQ ID NO: 426077 - protein, 17 aa, Homo sapiens
  CDR3 for alpha chain variable domain of TCR clone 213039 (TRAV3, TRAJ38)
CAVRDCLNAGNNHIQNP

SEQ ID NO: 426078 - protein, 13 aa, Homo sapiens
  CDR3 for beta chain variable domain of TCR clone 213039 (TRBV23-1, TRBJ1-4)
CASRGKFNEKLFF

SEQ ID NO: 426079 - protein, 12 aa, Homo sapiens
  CDR3 for alpha chain variable domain of TCR clone 213040 (TRAV13-1, TRAJ27)
CAAHTDAGKSTF

SEQ ID NO: 426080 - protein, 14 aa, Homo sapiens
  CDR3 for beta chain variable domain of TCR clone 213040 (TRBV19, TRBJ2-2)
CASSGQGIAGELFF

SEQ ID NO: 426081 - protein, 14 aa, Homo sapiens
  CDR3 for alpha chain variable domain of TCR clone 213041 (TRAV12-2, TRAJ13)
CAVKKTGGYQKVTF

SEQ ID NO: 426082 - protein, 15 aa, Homo sapiens
  CDR3 for beta chain variable domain of TCR clone 213041 (TRBV27, TRBJ2-1)
CTSSNGGASSNEQFF

SEQ ID NO: 426083 - protein, 12 aa, Homo sapiens
  CDR3 for alpha chain variable domain of TCR clone 213042 (TRAV8-3, TRAJ26)
CAGDNYGQNFVF

SEQ ID NO: 426084 - protein, 14 aa, Homo sapiens
  CDR3 for beta chain variable domain of TCR clone 213042 (TRBV7-2, TRBJ1-1)
CASSFLTGTTEAVF

SEQ ID NO: 426085 - protein, 12 aa, Homo sapiens
  CDR3 for alpha chain variable domain of TCR clone 213043 (TRAV8-3, TRAJ20)
CAVDFNDYKLSF

SEQ ID NO: 426086 - protein, 14 aa, Homo sapiens
  CDR3 for beta chain variable domain of TCR clone 213043 (TRBV11-2, TRBJ2-3)
CASSRLARTDTQYF

SEQ ID NO: 426087 - protein, 11 aa, Homo sapiens
  CDR3 for alpha chain variable domain of TCR clone 213044 (TRAV21, TRAJ11)
CAVNGYSTLTF

SEQ ID NO: 426088 - protein, 15 aa, Homo sapiens
  CDR3 for beta chain variable domain of TCR clone 213044 (TRBV6-6, TRBJ2-7)
CASSYSYGGSYEQYF

SEQ ID NO: 426089 - protein, 13 aa, Homo sapiens
  CDR3 for alpha chain variable domain of TCR clone 213045 (TRAV13-2, TRAJ22)
CLGWFSSARQLTF

SEQ ID NO: 426090 - protein, 15 aa, Homo sapiens
  CDR3 for beta chain variable domain of TCR clone 213045 (TRBV7-2, TRBJ2-3)
CASSSTGLETDTQYF

SEQ ID NO: 426091 - protein, 15 aa, Homo sapiens
  CDR3 for alpha chain variable domain of TCR clone 213046 (TRAV3, TRAJ17)
CAVRDTGAAGNKLTF

SEQ ID NO: 426092 - protein, 17 aa, Homo sapiens
  CDR3 for beta chain variable domain of TCR clone 213046 (TRBV7-9, TRBJ2-3)
CASSPTVAGDLTDTQYF

SEQ ID NO: 426093 - protein, 14 aa, Homo sapiens
  CDR3 for alpha chain variable domain of TCR clone 213047 (TRAV38-1, TRAJ40)
CALRPTSGTYKYIF

SEQ ID NO: 426094 - protein, 15 aa, Homo sapiens
  CDR3 for beta chain variable domain of TCR clone 213047 (TRBV20-1, TRBJ2-7)
CSAESGTSGAYEQYF

SEQ ID NO: 426095 - protein, 12 aa, Homo sapiens
  CDR3 for alpha chain variable domain of TCR clone 213048 (TRAV12-3, TRAJ54)
CGADRGAQKMVF

SEQ ID NO: 426096 - protein, 15 aa, Homo sapiens
  CDR3 for beta chain variable domain of TCR clone 213048 (TRBV27, TRBJ2-1)
CASSLAGGPFNEQFF

SEQ ID NO: 426097 - protein, 14 aa, Homo sapiens
  CDR3 for alpha chain variable domain of TCR clone 213049 (TRAV9-2, TRAJ20)
CALRDPLNDYKLSF

SEQ ID NO: 426098 - protein, 13 aa, Homo sapiens
  CDR3 for beta chain variable domain of TCR clone 213049 (TRBV7-9, TRBJ1-2)
CASSLKQNYGYTF

SEQ ID NO: 426099 - protein, 18 aa, Homo sapiens
  CDR3 for alpha chain variable domain of TCR clone 213050 (TRAV3, TRAJ17)
CAVRARRGWRSCRQQANF

SEQ ID NO: 426100 - protein, 13 aa, Homo sapiens
  CDR3 for beta chain variable domain of TCR clone 213050 (TRBV4-1, TRBJ2-2)
RQQPSGEHRELFF

SEQ ID NO: 426101 - protein, 15 aa, Homo sapiens
  CDR3 for alpha chain variable domain of TCR clone 213051 (TRAV27, TRAJ38)
CAARRNAGNNRKLSW

SEQ ID NO: 426102 - protein, 17 aa, Homo sapiens
  CDR3 for beta chain variable domain of TCR clone 213051 (TRBV7-3, TRBJ2-3)
CASSLMKRMRGADTQYF

SEQ ID NO: 426103 - protein, 11 aa, Homo sapiens
  CDR3 for alpha chain variable domain of TCR clone 213052 (TRAV13-2, TRAJ23)
CAESPRGKLIF

SEQ ID NO: 426104 - protein, 15 aa, Homo sapiens
  CDR3 for beta chain variable domain of TCR clone 213052 (TRBV28, TRBJ2-5)
CASSGLAEVDNEQFF

SEQ ID NO: 426105 - protein, 15 aa, Homo sapiens
  CDR3 for alpha chain variable domain of TCR clone 213053 (TRAV8-2, TRAJ40)
CVVLGTTSGTHKYIF

SEQ ID NO: 426106 - protein, 16 aa, Homo sapiens
  CDR3 for beta chain variable domain of TCR clone 213053 (TRBV7-3, TRBJ2-1)
CASSLEGDRSYNEQFF

SEQ ID NO: 426107 - protein, 14 aa, Homo sapiens
  CDR3 for alpha chain variable domain of TCR clone 213054 (TRAV35, TRAJ33)
CAGSSQDSNYQLIW

SEQ ID NO: 426108 - protein, 15 aa, Homo sapiens
  CDR3 for beta chain variable domain of TCR clone 213054 (TRBV20-1, TRBJ2-7)
CSARGPLAGGREQYF

SEQ ID NO: 426109 - protein, 11 aa, Homo sapiens
  CDR3 for alpha chain variable domain of TCR clone 213055 (TRAV27, TRAJ39)
VQENAGNMLTF

SEQ ID NO: 426110 - protein, 13 aa, Homo sapiens
  CDR3 for beta chain variable domain of TCR clone 213055 (TRBV20-1, TRBJ1-1)
CSAPLGGGTEAFF

SEQ ID NO: 426111 - protein, 14 aa, Homo sapiens
  CDR3 for alpha chain variable domain of TCR clone 213056 (TRAV17, TRAJ31)
CATVLRNNNARLMF

SEQ ID NO: 426112 - protein, 16 aa, Homo sapiens
  CDR3 for beta chain variable domain of TCR clone 213056 (TRBV13, TRBJ2-2)
CASSPRTGEHTGELFF

SEQ ID NO: 426113 - protein, 14 aa, Homo sapiens
  CDR3 for alpha chain variable domain of TCR clone 213057 (TRAV1-2, TRAJ8)
CAVREDTGFQKLVF

SEQ ID NO: 426114 - protein, 17 aa, Homo sapiens
  CDR3 for beta chain variable domain of TCR clone 213057 (TRBV6-5, TRBJ2-7)
CASGPSVGEVQHYEQYF

SEQ ID NO: 426115 - protein, 13 aa, Homo sapiens
  CDR3 for alpha chain variable domain of TCR clone 213058 (TRAV17, TRAJ5)
CATMDTGRRALTF

SEQ ID NO: 426116 - protein, 13 aa, Homo sapiens
  CDR3 for beta chain variable domain of TCR clone 213058 (TRBV7-9, TRBJ1-2)
CASSLKQNYGYTF

SEQ ID NO: 426117 - protein, 12 aa, Homo sapiens
  CDR3 for alpha chain variable domain of TCR clone 213059 (TRAV29/DV5, TRAJ41)
CAAISSGYAFNF

SEQ ID NO: 426118 - protein, 17 aa, Homo sapiens
  CDR3 for beta chain variable domain of TCR clone 213059 (TRBV18, TRBJ2-1)
CASSKGLSGGADNEQFF

SEQ ID NO: 426119 - protein, 13 aa, Homo sapiens
  CDR3 for alpha chain variable domain of TCR clone 213060 (TRAV12-3, TRAJ33)
CAMSVNSNYQLIW

SEQ ID NO: 426120 - protein, 15 aa, Homo sapiens
  CDR3 for beta chain variable domain of TCR clone 213060 (TRBV20-1, TRBJ2-7)
SAVLDRVSGMDEQYF

SEQ ID NO: 426121 - protein, 15 aa, Homo sapiens
  CDR3 for alpha chain variable domain of TCR clone 213061 (TRAV3, TRAJ22)
CAVRDRGGSARQLTF

SEQ ID NO: 426122 - protein, 13 aa, Homo sapiens
  CDR3 for beta chain variable domain of TCR clone 213061 (TRBV20-1, TRBJ1-1)
CSARVGGNTEALF

SEQ ID NO: 426123 - protein, 12 aa, Homo sapiens
  CDR3 for alpha chain variable domain of TCR clone 213062 (TRAV12-3, TRAJ17)
CAMTLTGNKLTF

SEQ ID NO: 426124 - protein, 15 aa, Homo sapiens
  CDR3 for beta chain variable domain of TCR clone 213062 (TRBV20-1, TRBJ2-7)
RSARDRVPGMDEQYF

SEQ ID NO: 426125 - protein, 13 aa, Homo sapiens
  CDR3 for alpha chain variable domain of TCR clone 213063 (TRAV26-2, TRAJ43)
CILRAVNNNDIRF

SEQ ID NO: 426126 - protein, 16 aa, Homo sapiens
  CDR3 for beta chain variable domain of TCR clone 213063 (TRBV7-6, TRBJ1-6)
CASSLSSRIGDSPLHF

SEQ ID NO: 426127 - protein, 14 aa, Homo sapiens
  CDR3 for alpha chain variable domain of TCR clone 213064 (TRAV1-2, TRAJ16)
CAVNRFSDGQKLLF

SEQ ID NO: 426128 - protein, 15 aa, Homo sapiens
  CDR3 for beta chain variable domain of TCR clone 213064 (TRBV6-3, TRBJ2-2)
CASSCLATLTGELFF

SEQ ID NO: 426129 - protein, 11 aa, Homo sapiens
  CDR3 for alpha chain variable domain of TCR clone 213065 (TRAV21, TRAJ41)
CAVRSGYALNF

SEQ ID NO: 426130 - protein, 13 aa, Homo sapiens
  CDR3 for beta chain variable domain of TCR clone 213065 (TRBV7-9, TRBJ1-2)
CASSLKQIYGYTF

SEQ ID NO: 426131 - protein, 16 aa, Homo sapiens
  CDR3 for alpha chain variable domain of TCR clone 213066 (TRAV12-2, TRAJ45)
CAVNRGSGGGADGLPF

SEQ ID NO: 426132 - protein, 14 aa, Homo sapiens
  CDR3 for beta chain variable domain of TCR clone 213066 (TRBV23-1, TRBJ2-2)
EDRGVEKDTGELFF

SEQ ID NO: 426133 - protein, 11 aa, Homo sapiens
  CDR3 for alpha chain variable domain of TCR clone 213067 (TRAV35, TRAJ30)
CAPGGDDKIIF

SEQ ID NO: 426134 - protein, 15 aa, Homo sapiens
  CDR3 for beta chain variable domain of TCR clone 213067 (TRBV18, TRBJ1-1)
CASSPRQGENTEAFF

SEQ ID NO: 426135 - protein, 17 aa, Homo sapiens
  CDR3 for alpha chain variable domain of TCR clone 213068 (TRAV13-1, TRAJ52)
CAAGRNAGVTSDGKLTF

SEQ ID NO: 426136 - protein, 13 aa, Homo sapiens
  CDR3 for beta chain variable domain of TCR clone 213068 (TRBV7-2, TRBJ1-1)
CASNLKGAKVAFF

SEQ ID NO: 426137 - protein, 14 aa, Homo sapiens
  CDR3 for alpha chain variable domain of TCR clone 213069 (TRAV12-3, TRAJ47)
CAMSVREYGNKLVF

SEQ ID NO: 426138 - protein, 18 aa, Homo sapiens
  CDR3 for beta chain variable domain of TCR clone 213069 (TRBV6-1, TRBJ2-3)
CASSAGTGGRWDTDTQYF

SEQ ID NO: 426139 - protein, 15 aa, Homo sapiens
  CDR3 for alpha chain variable domain of TCR clone 213070 (TRAV12-3, TRAJ6)
CAMSATTGGSYIPTF

SEQ ID NO: 426140 - protein, 16 aa, Homo sapiens
  CDR3 for beta chain variable domain of TCR clone 213070 (TRBV20-1, TRBJ1-2)
CSASMGQGVANYGYAV

SEQ ID NO: 426141 - protein, 15 aa, Homo sapiens
  CDR3 for alpha chain variable domain of TCR clone 213071 (TRAV8-4, TRAJ47)
CAVSDLLGNGNKLVF

SEQ ID NO: 426142 - protein, 16 aa, Homo sapiens
  CDR3 for beta chain variable domain of TCR clone 213071 (TRBV19, TRBJ2-2)
CASSPSGGLNTGELFF

SEQ ID NO: 426143 - protein, 14 aa, Homo sapiens
  CDR3 for alpha chain variable domain of TCR clone 213072 (TRAV29/DV5, TRAJ36)
CAARRKTGANNLFF

SEQ ID NO: 426144 - protein, 12 aa, Homo sapiens
  CDR3 for beta chain variable domain of TCR clone 213072 (TRBV7-2, TRBJ2-5)
CASSLGPETQYF

SEQ ID NO: 426145 - protein, 16 aa, Homo sapiens
  CDR3 for alpha chain variable domain of TCR clone 213073 (TRAV26-1, TRAJ57)
CIVRAPTRGGSEKLVF

SEQ ID NO: 426146 - protein, 15 aa, Homo sapiens
  CDR3 for beta chain variable domain of TCR clone 213073 (TRBV19, TRBJ1-1)
CASSRGGALNTEAFF

SEQ ID NO: 426147 - protein, 17 aa, Homo sapiens
  CDR3 for alpha chain variable domain of TCR clone 213074 (TRAV3, TRAJ22)
CAVRPFISSGSARQLTF

SEQ ID NO: 426148 - protein, 14 aa, Homo sapiens
  CDR3 for beta chain variable domain of TCR clone 213074 (TRBV12-4, TRBJ2-7)
CASSLTGRAYEQYF

SEQ ID NO: 426149 - protein, 15 aa, Homo sapiens
  CDR3 for alpha chain variable domain of TCR clone 213075 (TRAV1-2, TRAJ35)
CAVRDREGFGNVLHC

SEQ ID NO: 426150 - protein, 14 aa, Homo sapiens
  CDR3 for beta chain variable domain of TCR clone 213075 (TRBV28, TRBJ1-4)
CASSRTVGNENLFF

SEQ ID NO: 426151 - protein, 15 aa, Homo sapiens
  CDR3 for alpha chain variable domain of TCR clone 213076 (TRAV25, TRAJ10)
CAGLGLTGGGNKLTF

SEQ ID NO: 426152 - protein, 14 aa, Homo sapiens
  CDR3 for beta chain variable domain of TCR clone 213076 (TRBV7-2, TRBJ2-1)
FASSLEGGYNEQFF

SEQ ID NO: 426153 - protein, 13 aa, Homo sapiens
  CDR3 for alpha chain variable domain of TCR clone 213077 (TRAV12-2, TRAJ10)
CAVPTGGGNKLTF

SEQ ID NO: 426154 - protein, 11 aa, Homo sapiens
  CDR3 for beta chain variable domain of TCR clone 213077 (TRBV25-1, TRBJ1-2)
CASSGLVGYTF

SEQ ID NO: 426155 - protein, 16 aa, Homo sapiens
  CDR3 for alpha chain variable domain of TCR clone 213078 (TRAV8-3, TRAJ44)
CAVGTLMTGTASQLTF

SEQ ID NO: 426156 - protein, 13 aa, Homo sapiens
  CDR3 for beta chain variable domain of TCR clone 213078 (TRBV11-2, TRBJ2-1)
CASSLRLTHEQFF

SEQ ID NO: 426157 - protein, 13 aa, Homo sapiens
  CDR3 for alpha chain variable domain of TCR clone 213079 (TRAV26-1, TRAJ35)
CIVSRRMGEMLHC

SEQ ID NO: 426158 - protein, 17 aa, Homo sapiens
  CDR3 for beta chain variable domain of TCR clone 213079 (TRBV7-9, TRBJ2-7)
CASSFDGSRGGAYEQYF

SEQ ID NO: 426159 - protein, 15 aa, Homo sapiens
  CDR3 for alpha chain variable domain of TCR clone 213080 (TRAV27, TRAJ38)
CAGRFNAGNNRKLIW

SEQ ID NO: 426160 - protein, 13 aa, Homo sapiens
  CDR3 for beta chain variable domain of TCR clone 213080 (TRBV9, TRBJ2-1)
CASSPSGGSEQFF

SEQ ID NO: 426161 - protein, 15 aa, Homo sapiens
  CDR3 for alpha chain variable domain of TCR clone 213081 (TRAV17, TRAJ57)
CATGPSQGGSEKLGF

SEQ ID NO: 426162 - protein, 16 aa, Homo sapiens
  CDR3 for beta chain variable domain of TCR clone 213081 (TRBV12-4, TRBJ1-5)
CASSRPVGGSNQHQHF

SEQ ID NO: 426163 - protein, 14 aa, Homo sapiens
  CDR3 for alpha chain variable domain of TCR clone 213082 (TRAV12-2, TRAJ40)
CAVNIRSGTYNYIF

SEQ ID NO: 426164 - protein, 17 aa, Homo sapiens
  CDR3 for beta chain variable domain of TCR clone 213082 (TRBV11-2, TRBJ2-1)
CASSLYPPGVEYNEQFF

SEQ ID NO: 426165 - protein, 11 aa, Homo sapiens
  CDR3 for alpha chain variable domain of TCR clone 213083 (TRAV12-2, TRAJ29)
CAVTLRSPLFF

SEQ ID NO: 426166 - protein, 16 aa, Homo sapiens
  CDR3 for beta chain variable domain of TCR clone 213083 (TRBV19, TRBJ1-5)
CASSIDRGGPRQPQHL

SEQ ID NO: 426167 - protein, 13 aa, Homo sapiens
  CDR3 for alpha chain variable domain of TCR clone 213084 (TRAV12-3, TRAJ7)
CAMTPYGNNRPAF

SEQ ID NO: 426168 - protein, 16 aa, Homo sapiens
  CDR3 for beta chain variable domain of TCR clone 213084 (TRBV20-1, TRBJ1-4)
CSARPDGGELNEELFF

SEQ ID NO: 426169 - protein, 16 aa, Homo sapiens
  CDR3 for alpha chain variable domain of TCR clone 213085 (TRAV38-1, TRAJ56)
CAFMKRQTGANSKLTF

SEQ ID NO: 426170 - protein, 15 aa, Homo sapiens
  CDR3 for beta chain variable domain of TCR clone 213085 (TRBV7-3, TRBJ2-1)
CASSQRGGALIEQFF

SEQ ID NO: 426171 - protein, 14 aa, Homo sapiens
  CDR3 for alpha chain variable domain of TCR clone 213086 (TRAV13-1, TRAJ40)
CAASMTLGTYKYIF

SEQ ID NO: 426172 - protein, 13 aa, Homo sapiens
  CDR3 for beta chain variable domain of TCR clone 213086 (TRBV4-1, TRBJ2-5)
CASSQEVQETQYF

SEQ ID NO: 426173 - protein, 14 aa, Homo sapiens
  CDR3 for alpha chain variable domain of TCR clone 213087 (TRAV29/DV5, TRAJ44)
CAAFLVGTARKLTF

SEQ ID NO: 426174 - protein, 16 aa, Homo sapiens
  CDR3 for beta chain variable domain of TCR clone 213087 (TRBV19, TRBJ1-5)
CASSIQGGYSNQPQHF

SEQ ID NO: 426175 - protein, 15 aa, Homo sapiens
  CDR3 for alpha chain variable domain of TCR clone 213088 (TRAV35, TRAJ40)
CAGQLGTSGTYKYIF

SEQ ID NO: 426176 - protein, 14 aa, Homo sapiens
  CDR3 for beta chain variable domain of TCR clone 213088 (TRBV5-1, TRBJ2-7)
CASSRGESLYEQYY

SEQ ID NO: 426177 - protein, 16 aa, Homo sapiens
  CDR3 for alpha chain variable domain of TCR clone 213089 (TRAV26-1, TRAJ11)
CLVRVVLGFRIQHPHL

SEQ ID NO: 426178 - protein, 14 aa, Homo sapiens
  CDR3 for beta chain variable domain of TCR clone 213089 (TRBV25-1, TRBJ1-4)
CASSGGGQPEKLFF

SEQ ID NO: 426179 - protein, 16 aa, Homo sapiens
  CDR3 for alpha chain variable domain of TCR clone 213090 (TRAV4, TRAJ9)
CLVGDPNRPGGFKTIF

SEQ ID NO: 426180 - protein, 16 aa, Homo sapiens
  CDR3 for beta chain variable domain of TCR clone 213090 (TRBV28, TRBJ1-4)
CASSPPYRGRSETLFV

SEQ ID NO: 426181 - protein, 12 aa, Homo sapiens
  CDR3 for alpha chain variable domain of TCR clone 213091 (TRAV13-1, TRAJ21)
CAAKEGFNKFYF

SEQ ID NO: 426182 - protein, 14 aa, Homo sapiens
  CDR3 for beta chain variable domain of TCR clone 213091 (TRBV7-2, TRBJ2-5)
CARSLSGGGETQYF

SEQ ID NO: 426183 - protein, 16 aa, Homo sapiens
  CDR3 for alpha chain variable domain of TCR clone 213092 (TRAV20, TRAJ38)
CAVQASNAGNNRKPIW

SEQ ID NO: 426184 - protein, 16 aa, Homo sapiens
  CDR3 for beta chain variable domain of TCR clone 213092 (TRBV7-8, TRBJ2-6)
CASRVGDSYGANVLTF

SEQ ID NO: 426185 - protein, 10 aa, Homo sapiens
  CDR3 for alpha chain variable domain of TCR clone 213093 (TRAV36/DV7, TRAJ49)
CALTGNQFYF

SEQ ID NO: 426186 - protein, 14 aa, Homo sapiens
  CDR3 for beta chain variable domain of TCR clone 213093 (TRBV4-2, TRBJ2-7)
CASSLERTAYEQYF

SEQ ID NO: 426187 - protein, 10 aa, Homo sapiens
  CDR3 for alpha chain variable domain of TCR clone 213094 (TRAV13-2, TRAJ49)
CEGTGNQFYF

SEQ ID NO: 426188 - protein, 13 aa, Homo sapiens
  CDR3 for beta chain variable domain of TCR clone 213094 (TRBV9, TRBJ2-7)
CASRVLQAGEQYF

SEQ ID NO: 426189 - protein, 12 aa, Homo sapiens
  CDR3 for alpha chain variable domain of TCR clone 213095 (TRAV1-1, TRAJ43)
CAPRVSSNDMRF

SEQ ID NO: 426190 - protein, 16 aa, Homo sapiens
  CDR3 for beta chain variable domain of TCR clone 213095 (TRBV19, TRBJ2-1)
CASSKAGPSSYNEQFF

SEQ ID NO: 426191 - protein, 16 aa, Homo sapiens
  CDR3 for alpha chain variable domain of TCR clone 213096 (TRAV30, TRAJ24)
CGTEIVDADSWRKFQF

SEQ ID NO: 426192 - protein, 14 aa, Homo sapiens
  CDR3 for beta chain variable domain of TCR clone 213096 (TRBV12-5, TRBJ2-5)
CASGSRTHQETQYS

SEQ ID NO: 426193 - protein, 15 aa, Homo sapiens
  CDR3 for alpha chain variable domain of TCR clone 213097 (TRAV26-1, TRAJ23)
CIVRVAINQGGKLIF

SEQ ID NO: 426194 - protein, 15 aa, Homo sapiens
  CDR3 for beta chain variable domain of TCR clone 213097 (TRBV27, TRBJ2-1)
CASSNGGGSSNEQFF

SEQ ID NO: 426195 - protein, 16 aa, Homo sapiens
  CDR3 for alpha chain variable domain of TCR clone 213098 (TRAV3, TRAJ37)
CAVRGKGSGKTGKLIF

SEQ ID NO: 426196 - protein, 15 aa, Homo sapiens
  CDR3 for beta chain variable domain of TCR clone 213098 (TRBV7-2, TRBJ2-5)
CASSGILAGAETQYF

SEQ ID NO: 426197 - protein, 12 aa, Homo sapiens
  CDR3 for alpha chain variable domain of TCR clone 213099 (TRAV35, TRAJ39)
LAPNNAGNMLTF

SEQ ID NO: 426198 - protein, 16 aa, Homo sapiens
  CDR3 for beta chain variable domain of TCR clone 213099 (TRBV2, TRBJ2-3)
CAGSTSVEGVTDTQYF

SEQ ID NO: 426199 - protein, 12 aa, Homo sapiens
  CDR3 for alpha chain variable domain of TCR clone 213100 (TRAV21, TRAJ33)
CAKMDSNYQLIW

SEQ ID NO: 426200 - protein, 14 aa, Homo sapiens
  CDR3 for beta chain variable domain of TCR clone 213100 (TRBV15, TRBJ2-5)
CATSIGGLGETQYF

SEQ ID NO: 426201 - protein, 12 aa, Homo sapiens
  CDR3 for alpha chain variable domain of TCR clone 213101 (TRAV36/DV7, TRAJ54)
CAVVRGAQELVF

SEQ ID NO: 426202 - protein, 14 aa, Homo sapiens
  CDR3 for beta chain variable domain of TCR clone 213101 (TRBV7-3, TRBJ1-1)
CARSLKGGNTEAFF

SEQ ID NO: 426203 - protein, 15 aa, Homo sapiens
  CDR3 for alpha chain variable domain of TCR clone 213102 (TRAV1-1, TRAJ37)
CAVRDKALANRQTNL

SEQ ID NO: 426204 - protein, 13 aa, Homo sapiens
  CDR3 for beta chain variable domain of TCR clone 213102 (TRBV7-3, TRBJ1-1)
CASSQDWGAEAFF

SEQ ID NO: 426205 - protein, 13 aa, Homo sapiens
  CDR3 for alpha chain variable domain of TCR clone 213103 (TRAV21, TRAJ27)
CAARPGNAGKSTF

SEQ ID NO: 426206 - protein, 14 aa, Homo sapiens
  CDR3 for beta chain variable domain of TCR clone 213103 (TRBV7-2, TRBJ2-7)
CASSPKTSFYEQYL

SEQ ID NO: 426207 - protein, 12 aa, Homo sapiens
  CDR3 for alpha chain variable domain of TCR clone 213104 (TRAV13-1, TRAJ49)
CAASIRSNQFYL

SEQ ID NO: 426208 - protein, 14 aa, Homo sapiens
  CDR3 for beta chain variable domain of TCR clone 213104 (TRBV7-2, TRBJ2-1)
CASSPGLAGNEQFF

SEQ ID NO: 426209 - protein, 12 aa, Homo sapiens
  CDR3 for alpha chain variable domain of TCR clone 213105 (TRAV13-2, TRAJ23)
CAERHRGGKLIF

SEQ ID NO: 426210 - protein, 16 aa, Homo sapiens
  CDR3 for beta chain variable domain of TCR clone 213105 (TRBV2, TRBJ2-3)
CASSTSAEGVTDTQYF

SEQ ID NO: 426211 - protein, 12 aa, Homo sapiens
  CDR3 for alpha chain variable domain of TCR clone 213106 (TRAV2, TRAJ31)
CAVDEGNARLMF

SEQ ID NO: 426212 - protein, 18 aa, Homo sapiens
  CDR3 for beta chain variable domain of TCR clone 213106 (TRBV7-9, TRBJ2-3)
CASSLDLAGLATPDTQYF

SEQ ID NO: 426213 - protein, 16 aa, Homo sapiens
  CDR3 for alpha chain variable domain of TCR clone 213107 (TRAV23/DV6, TRAJ9)
CAARIGGNTGGFKTIL

SEQ ID NO: 426214 - protein, 15 aa, Homo sapiens
  CDR3 for beta chain variable domain of TCR clone 213107 (TRBV28, TRBJ2-1)
CASSIIAGGRSEQFF

SEQ ID NO: 426215 - protein, 14 aa, Homo sapiens
  CDR3 for alpha chain variable domain of TCR clone 213108 (TRAV4, TRAJ17)
CLVGDMAAGNKLTF

SEQ ID NO: 426216 - protein, 14 aa, Homo sapiens
  CDR3 for beta chain variable domain of TCR clone 213108 (TRBV7-3, TRBJ2-1)
CASSLAGGTNEQFF

SEQ ID NO: 426217 - protein, 14 aa, Homo sapiens
  CDR3 for alpha chain variable domain of TCR clone 213109 (TRAV1-2, TRAJ16)
CAVHRFSDGQKLLF

SEQ ID NO: 426218 - protein, 14 aa, Homo sapiens
  CDR3 for beta chain variable domain of TCR clone 213109 (TRBV7-6, TRBJ2-3)
CASSLGTVTDTQYF

SEQ ID NO: 426219 - protein, 16 aa, Homo sapiens
  CDR3 for alpha chain variable domain of TCR clone 213110 (TRAV30, TRAJ24)
CGTEIVDADSWGKFRF

SEQ ID NO: 426220 - protein, 15 aa, Homo sapiens
  CDR3 for beta chain variable domain of TCR clone 213110 (TRBV20-1, TRBJ2-6)
CSARDRGPGANVLTF

SEQ ID NO: 426221 - protein, 17 aa, Homo sapiens
  CDR3 for alpha chain variable domain of TCR clone 213111 (TRAV3, TRAJ6)
CAVRDGTRAGGSYIPTF

SEQ ID NO: 426222 - protein, 15 aa, Homo sapiens
  CDR3 for beta chain variable domain of TCR clone 213111 (TRBV7-6, TRBJ2-3)
CASSPIIYSTDTQYF

SEQ ID NO: 426223 - protein, 12 aa, Homo sapiens
  CDR3 for alpha chain variable domain of TCR clone 213112 (TRAV21, TRAJ11)
CAATSGYSTLTF

SEQ ID NO: 426224 - protein, 15 aa, Homo sapiens
  CDR3 for beta chain variable domain of TCR clone 213112 (TRBV2, TRBJ2-7)
CASSEGLARSYEQYF

SEQ ID NO: 426225 - protein, 14 aa, Homo sapiens
  CDR3 for alpha chain variable domain of TCR clone 213113 (TRAV30, TRAJ33)
CGTVAPHSNYQLIW

SEQ ID NO: 426226 - protein, 16 aa, Homo sapiens
  CDR3 for beta chain variable domain of TCR clone 213113 (TRBV3-1, TRBJ2-5)
CASSPGQFNGFGTQYF

SEQ ID NO: 426227 - protein, 15 aa, Homo sapiens
  CDR3 for alpha chain variable domain of TCR clone 213114 (TRAV26-1, TRAJ44)
CIVRDNTGTASKLTF

SEQ ID NO: 426228 - protein, 16 aa, Homo sapiens
  CDR3 for beta chain variable domain of TCR clone 213114 (TRBV7-7, TRBJ2-1)
CASSLASGTSYNEQFF

SEQ ID NO: 426229 - protein, 12 aa, Homo sapiens
  CDR3 for alpha chain variable domain of TCR clone 213115 (TRAV12-3, TRAJ17)
CAMTLTGNKLTF

SEQ ID NO: 426230 - protein, 15 aa, Homo sapiens
  CDR3 for beta chain variable domain of TCR clone 213115 (TRBV20-1, TRBJ2-7)
CSARDRVSGMDKRYF

SEQ ID NO: 426231 - protein, 15 aa, Homo sapiens
  CDR3 for alpha chain variable domain of TCR clone 213116 (TRAV27, TRAJ38)
CAARRNAGNNRKLIW

SEQ ID NO: 426232 - protein, 13 aa, Homo sapiens
  CDR3 for beta chain variable domain of TCR clone 213116 (TRBV12-4, TRBJ1-2)
CASSLDSNYGYTF

SEQ ID NO: 426233 - protein, 14 aa, Homo sapiens
  CDR3 for alpha chain variable domain of TCR clone 213117 (TRAV26-1, TRAJ38)
CIADNAGNNRKLIW

SEQ ID NO: 426234 - protein, 14 aa, Homo sapiens
  CDR3 for beta chain variable domain of TCR clone 213117 (TRBV19, TRBJ2-7)
CASTVQGRPYEQYF

SEQ ID NO: 426235 - protein, 16 aa, Homo sapiens
  CDR3 for alpha chain variable domain of TCR clone 213118 (TRAV30, TRAJ24)
CGTEIVDADIWGTFQF

SEQ ID NO: 426236 - protein, 14 aa, Homo sapiens
  CDR3 for beta chain variable domain of TCR clone 213118 (TRBV12-5, TRBJ2-5)
CASGSRTHQETQYF

SEQ ID NO: 426237 - protein, 14 aa, Homo sapiens
  CDR3 for alpha chain variable domain of TCR clone 213119 (TRAV17, TRAJ6)
CATNPAGGSYIPTF

SEQ ID NO: 426238 - protein, 14 aa, Homo sapiens
  CDR3 for beta chain variable domain of TCR clone 213119 (TRBV6-3, TRBJ2-5)
CASSYSGRLSGQYF

SEQ ID NO: 426239 - protein, 14 aa, Homo sapiens
  CDR3 for alpha chain variable domain of TCR clone 213120 (TRAV25, TRAJ35)
CARRMEGFANVLHC

SEQ ID NO: 426240 - protein, 13 aa, Homo sapiens
  CDR3 for beta chain variable domain of TCR clone 213120 (TRBV7-2, TRBJ1-4)
CASSLAGLEKLFF

SEQ ID NO: 426241 - protein, 12 aa, Homo sapiens
  CDR3 for alpha chain variable domain of TCR clone 213121 (TRAV29/DV5, TRAJ49)
CAATDTGNQFYF

SEQ ID NO: 426242 - protein, 14 aa, Homo sapiens
  CDR3 for beta chain variable domain of TCR clone 213121 (TRBV7-6, TRBJ2-3)
CASSLGTVTDTQYF

SEQ ID NO: 426243 - protein, 13 aa, Homo sapiens
  CDR3 for alpha chain variable domain of TCR clone 213122 (TRAV23/DV6, TRAJ29)
CAARNSGNTPLFF

SEQ ID NO: 426244 - protein, 15 aa, Homo sapiens
  CDR3 for beta chain variable domain of TCR clone 213122 (TRBV5-1, TRBJ1-1)
CASSSRTGRNTEAFF

SEQ ID NO: 426245 - protein, 12 aa, Homo sapiens
  CDR3 for alpha chain variable domain of TCR clone 213123 (TRAV13-2, TRAJ23)
CAERHRGGKLNF

SEQ ID NO: 426246 - protein, 15 aa, Homo sapiens
  CDR3 for beta chain variable domain of TCR clone 213123 (TRBV7-9, TRBJ1-6)
CASSSPGRGNSPLHF

SEQ ID NO: 426247 - protein, 18 aa, Homo sapiens
  CDR3 for alpha chain variable domain of TCR clone 213124 (TRAV21, TRAJ52)
CAVRPSPAGGTSYGKLTF

SEQ ID NO: 426248 - protein, 12 aa, Homo sapiens
  CDR3 for beta chain variable domain of TCR clone 213124 (TRBV12-4, TRBJ2-1)
CASSPGRNEQFF

SEQ ID NO: 426249 - protein, 14 aa, Homo sapiens
  CDR3 for alpha chain variable domain of TCR clone 213125 (TRAV12-1, TRAJ26)
CVVKGSNYGQNFVF

SEQ ID NO: 426250 - protein, 17 aa, Homo sapiens
  CDR3 for beta chain variable domain of TCR clone 213125 (TRBV11-2, TRBJ2-6)
CASSQRDIFSWANVLTF

SEQ ID NO: 426251 - protein, 15 aa, Homo sapiens
  CDR3 for alpha chain variable domain of TCR clone 213126 (TRAV4, TRAJ39)
CLVGPNTNAGNMLTF

SEQ ID NO: 426252 - protein, 16 aa, Homo sapiens
  CDR3 for beta chain variable domain of TCR clone 213126 (TRBV13, TRBJ2-2)
CASSPRTGEHTGELFF

SEQ ID NO: 426253 - protein, 12 aa, Homo sapiens
  CDR3 for alpha chain variable domain of TCR clone 213127 (TRAV3, TRAJ43)
CAVRDPNNDMRF

SEQ ID NO: 426254 - protein, 15 aa, Homo sapiens
  CDR3 for beta chain variable domain of TCR clone 213127 (TRBV27, TRBJ1-5)
CASSPWTGFDQPQHF

SEQ ID NO: 426255 - protein, 11 aa, Homo sapiens
  CDR3 for alpha chain variable domain of TCR clone 213128 (TRAV26-1, TRAJ40)
CIVSGTYKYIF

SEQ ID NO: 426256 - protein, 14 aa, Homo sapiens
  CDR3 for beta chain variable domain of TCR clone 213128 (TRBV7-8, TRBJ2-3)
CASSLEAGTDTQYF

SEQ ID NO: 426257 - protein, 14 aa, Homo sapiens
  CDR3 for alpha chain variable domain of TCR clone 213129 (TRAV8-4, TRAJ9)
CAVRRNTGGFKTIL

SEQ ID NO: 426258 - protein, 15 aa, Homo sapiens
  CDR3 for beta chain variable domain of TCR clone 213129 (TRBV20-1, TRBJ2-7)
CSARDRVSGMDEQYF

SEQ ID NO: 426259 - protein, 12 aa, Homo sapiens
  CDR3 for alpha chain variable domain of TCR clone 213130 (TRAV13-2, TRAJ23)
CAERHRGGKLIF

SEQ ID NO: 426260 - protein, 12 aa, Homo sapiens
  CDR3 for beta chain variable domain of TCR clone 213130 (TRBV5-1, TRBJ2-3)
CASSLRGATKYF

SEQ ID NO: 426261 - protein, 12 aa, Homo sapiens
  CDR3 for alpha chain variable domain of TCR clone 213131 (TRAV20, TRAJ37)
CALPSNKGKLIF

SEQ ID NO: 426262 - protein, 14 aa, Homo sapiens
  CDR3 for beta chain variable domain of TCR clone 213131 (TRBV19, TRBJ2-1)
CASPTFVLSGEQFF

SEQ ID NO: 426263 - protein, 11 aa, Homo sapiens
  CDR3 for alpha chain variable domain of TCR clone 213132 (TRAV3, TRAJ21)
CAVGNFNKFYF

SEQ ID NO: 426264 - protein, 16 aa, Homo sapiens
  CDR3 for beta chain variable domain of TCR clone 213132 (TRBV19, TRBJ2-1)
CASSKAGPSPYNEKFF

SEQ ID NO: 426265 - protein, 12 aa, Homo sapiens
  CDR3 for alpha chain variable domain of TCR clone 213133 (TRAV27, TRAJ21)
CAGVRQHQQILL

SEQ ID NO: 426266 - protein, 14 aa, Homo sapiens
  CDR3 for beta chain variable domain of TCR clone 213133 (TRBV7-9, TRBJ1-4)
CASSLEGQSEKLFF

SEQ ID NO: 426267 - protein, 14 aa, Homo sapiens
  CDR3 for alpha chain variable domain of TCR clone 213134 (TRAV8-4, TRAJ15)
CAVTIREAGTALIF

SEQ ID NO: 426268 - protein, 14 aa, Homo sapiens
  CDR3 for beta chain variable domain of TCR clone 213134 (TRBV7-2, TRBJ1-1)
CASSFLTGTTEAFF

SEQ ID NO: 426269 - protein, 12 aa, Homo sapiens
  CDR3 for alpha chain variable domain of TCR clone 213135 (TRAV12-3, TRAJ4)
CAMTGAGTRLAV

SEQ ID NO: 426270 - protein, 16 aa, Homo sapiens
  CDR3 for beta chain variable domain of TCR clone 213135 (TRBV20-1, TRBJ2-2)
CSASASGIPGAGELFF

SEQ ID NO: 426271 - protein, 12 aa, Homo sapiens
  CDR3 for alpha chain variable domain of TCR clone 213136 (TRAV2, TRAJ31)
CAVEEGNARVMF

SEQ ID NO: 426272 - protein, 18 aa, Homo sapiens
  CDR3 for beta chain variable domain of TCR clone 213136 (TRBV7-9, TRBJ2-3)
CASSLDLAGLATPDTQYF

SEQ ID NO: 426273 - protein, 16 aa, Homo sapiens
  CDR3 for alpha chain variable domain of TCR clone 213137 (TRAV1-2, TRAJ10)
FSVRGVLTGGGNKLTF

SEQ ID NO: 426274 - protein, 12 aa, Homo sapiens
  CDR3 for beta chain variable domain of TCR clone 213137 (TRBV7-8, TRBJ2-7)
CASSLGDREQYF

SEQ ID NO: 426275 - protein, 16 aa, Homo sapiens
  CDR3 for alpha chain variable domain of TCR clone 213138 (TRAV12-3, TRAJ53)
CAMSPGSGGSNYKLTF

SEQ ID NO: 426276 - protein, 12 aa, Homo sapiens
  CDR3 for beta chain variable domain of TCR clone 213138 (TRBV5-1, TRBJ2-7)
CASSFRGYEQYF

SEQ ID NO: 426277 - protein, 13 aa, Homo sapiens
  CDR3 for alpha chain variable domain of TCR clone 213139 (TRAV30, TRAJ49)
CGTEPNTGNPFYF

SEQ ID NO: 426278 - protein, 14 aa, Homo sapiens
  CDR3 for beta chain variable domain of TCR clone 213139 (TRBV29-1, TRBJ2-1)
CSVEFRVIPFEQFF

SEQ ID NO: 426279 - protein, 15 aa, Homo sapiens
  CDR3 for alpha chain variable domain of TCR clone 213140 (TRAV8-4, TRAJ3)
CAVNGENLVQQCFQD

SEQ ID NO: 426280 - protein, 16 aa, Homo sapiens
  CDR3 for beta chain variable domain of TCR clone 213140 (TRBV4-2, TRBJ1-1)
CASSQAGFGMNTEAFF

SEQ ID NO: 426281 - protein, 14 aa, Homo sapiens
  CDR3 for alpha chain variable domain of TCR clone 213141 (TRAV13-1, TRAJ35)
CAASKGGFGNVLHF

SEQ ID NO: 426282 - protein, 13 aa, Homo sapiens
  CDR3 for beta chain variable domain of TCR clone 213141 (TRBV7-3, TRBJ1-1)
CASSQDWGAKAFF

SEQ ID NO: 426283 - protein, 14 aa, Homo sapiens
  CDR3 for alpha chain variable domain of TCR clone 213142 (TRAV29/DV5, TRAJ32)
CAAAYGGATNKLIS

SEQ ID NO: 426284 - protein, 11 aa, Homo sapiens
  CDR3 for beta chain variable domain of TCR clone 213142 (TRBV11-2, TRBJ2-2)
CASSLPGELFF

SEQ ID NO: 426285 - protein, 16 aa, Homo sapiens
  CDR3 for alpha chain variable domain of TCR clone 213143 (TRAV16, TRAJ42)
CALSGLLGGSQGNLIF

SEQ ID NO: 426286 - protein, 15 aa, Homo sapiens
  CDR3 for beta chain variable domain of TCR clone 213143 (TRBV5-1, TRBJ2-1)
RASSPGGLAGNEQFF

SEQ ID NO: 426287 - protein, 17 aa, Homo sapiens
  CDR3 for alpha chain variable domain of TCR clone 213144 (TRAV12-3, TRAJ52)
CAMSARAGGTSYGKLTF

SEQ ID NO: 426288 - protein, 13 aa, Homo sapiens
  CDR3 for beta chain variable domain of TCR clone 213144 (TRBV11-2, TRBJ2-5)
CASSRGPSETQYF

SEQ ID NO: 426289 - protein, 14 aa, Homo sapiens
  CDR3 for alpha chain variable domain of TCR clone 213145 (TRAV1-2, TRAJ8)
CAVREDTGFQKLVF

SEQ ID NO: 426290 - protein, 14 aa, Homo sapiens
  CDR3 for beta chain variable domain of TCR clone 213145 (TRBV11-3, TRBJ2-3)
CASSLVGNTDTQYF

SEQ ID NO: 426291 - protein, 15 aa, Homo sapiens
  CDR3 for alpha chain variable domain of TCR clone 213146 (TRAV14/DV4, TRAJ10)
CAMRELTGGGNKLTF

SEQ ID NO: 426292 - protein, 15 aa, Homo sapiens
  CDR3 for beta chain variable domain of TCR clone 213146 (TRBV7-2, TRBJ2-1)
CASSSRTSREDEQFF

SEQ ID NO: 426293 - protein, 14 aa, Homo sapiens
  CDR3 for alpha chain variable domain of TCR clone 213147 (TRAV27, TRAJ22)
CAGVVPGSARQLTF

SEQ ID NO: 426294 - protein, 15 aa, Homo sapiens
  CDR3 for beta chain variable domain of TCR clone 213147 (TRBV6-3, TRBJ2-7)
CASSSPGTVFYEQYF

SEQ ID NO: 426295 - protein, 18 aa, Homo sapiens
  CDR3 for alpha chain variable domain of TCR clone 213148 (TRAV3, TRAJ17)
CAVRARRGGRSCRQQANF

SEQ ID NO: 426296 - protein, 14 aa, Homo sapiens
  CDR3 for beta chain variable domain of TCR clone 213148 (TRBV4-1, TRBJ2-2)
CASNQAGNTGKLFF

SEQ ID NO: 426297 - protein, 16 aa, Homo sapiens
  CDR3 for alpha chain variable domain of TCR clone 213149 (TRAV1-2, TRAJ10)
CAVRGVLTGGGNKLTF

SEQ ID NO: 426298 - protein, 15 aa, Homo sapiens
  CDR3 for beta chain variable domain of TCR clone 213149 (TRBV7-8, TRBJ2-7)
CASSLERAGSYEQYF

SEQ ID NO: 426299 - protein, 17 aa, Homo sapiens
  CDR3 for alpha chain variable domain of TCR clone 213150 (TRAV13-1, TRAJ28)
CAASPPYSGAGSYQLTF

SEQ ID NO: 426300 - protein, 13 aa, Homo sapiens
  CDR3 for beta chain variable domain of TCR clone 213150 (TRBV27, TRBJ1-1)
CASSLSIGAEAFF

SEQ ID NO: 426301 - protein, 13 aa, Homo sapiens
  CDR3 for alpha chain variable domain of TCR clone 213151 (TRAV23/DV6, TRAJ27)
CAASKPVQANQPL

SEQ ID NO: 426302 - protein, 16 aa, Homo sapiens
  CDR3 for beta chain variable domain of TCR clone 213151 (TRBV2, TRBJ2-7)
CASSEPWTGPSYEQYF

SEQ ID NO: 426303 - protein, 12 aa, Homo sapiens
  CDR3 for alpha chain variable domain of TCR clone 213152 (TRAV3, TRAJ43)
CALRDPNNDMRF

SEQ ID NO: 426304 - protein, 14 aa, Homo sapiens
  CDR3 for beta chain variable domain of TCR clone 213152 (TRBV5-1, TRBJ2-3)
CASSLFGPTDTQYF

SEQ ID NO: 426305 - protein, 14 aa, Homo sapiens
  CDR3 for alpha chain variable domain of TCR clone 213153 (TRAV12-2, TRAJ9)
CAVNMEGGGFKTIF

SEQ ID NO: 426306 - protein, 14 aa, Homo sapiens
  CDR3 for beta chain variable domain of TCR clone 213153 (TRBV27, TRBJ2-5)
CASSSLKGWETRYF

SEQ ID NO: 426307 - protein, 17 aa, Homo sapiens
  CDR3 for alpha chain variable domain of TCR clone 213154 (TRAV3, TRAJ6)
CAVRDGPRAGGSYIPTF

SEQ ID NO: 426308 - protein, 16 aa, Homo sapiens
  CDR3 for beta chain variable domain of TCR clone 213154 (TRBV2, TRBJ2-6)
CASSETGGSGANVLTF

SEQ ID NO: 426309 - protein, 13 aa, Homo sapiens
  CDR3 for alpha chain variable domain of TCR clone 213155 (TRAV12-1, TRAJ21)
CVVIGDNYNKFYF

SEQ ID NO: 426310 - protein, 14 aa, Homo sapiens
  CDR3 for beta chain variable domain of TCR clone 213155 (TRBV7-3, TRBJ2-2)
CASSLYPLTGELFF

SEQ ID NO: 426311 - protein, 13 aa, Homo sapiens
  CDR3 for alpha chain variable domain of TCR clone 213156 (TRAV6, TRAJ11)
CALGLPGYSTLTF

SEQ ID NO: 426312 - protein, 14 aa, Homo sapiens
  CDR3 for beta chain variable domain of TCR clone 213156 (TRBV19, TRBJ2-1)
CASPTFVLSGEQFF

SEQ ID NO: 426313 - protein, 15 aa, Homo sapiens
  CDR3 for alpha chain variable domain of TCR clone 213157 (TRAV3, TRAJ20)
CAVRDSRSNDYKPSF

SEQ ID NO: 426314 - protein, 14 aa, Homo sapiens
  CDR3 for beta chain variable domain of TCR clone 213157 (TRBV20-1, TRBJ2-7)
CSARRGNEIYEQYF

SEQ ID NO: 426315 - protein, 14 aa, Homo sapiens
  CDR3 for alpha chain variable domain of TCR clone 213158 (TRAV26-1, TRAJ38)
CIADNAGNNRKLSW

SEQ ID NO: 426316 - protein, 15 aa, Homo sapiens
  CDR3 for beta chain variable domain of TCR clone 213158 (TRBV9, TRBJ1-6)
CASSVAGTGDSPLHF

SEQ ID NO: 426317 - protein, 13 aa, Homo sapiens
  CDR3 for alpha chain variable domain of TCR clone 213159 (TRAV23/DV6, TRAJ15)
CAALPAGSNCPDL

SEQ ID NO: 426318 - protein, 14 aa, Homo sapiens
  CDR3 for beta chain variable domain of TCR clone 213159 (TRBV7-9, TRBJ1-2)
CASSRQGANYGYTF

SEQ ID NO: 426319 - protein, 14 aa, Homo sapiens
  CDR3 for alpha chain variable domain of TCR clone 213160 (TRAV1-2, TRAJ6)
CAVSLSGGSYIPTF

SEQ ID NO: 426320 - protein, 13 aa, Homo sapiens
  CDR3 for beta chain variable domain of TCR clone 213160 (TRBV10-2, TRBJ2-7)
CASGASGGYEQYF

SEQ ID NO: 426321 - protein, 14 aa, Homo sapiens
  CDR3 for alpha chain variable domain of TCR clone 213161 (TRAV14/DV4, TRAJ27)
CAMRGNTNAGKSTF

SEQ ID NO: 426322 - protein, 13 aa, Homo sapiens
  CDR3 for beta chain variable domain of TCR clone 213161 (TRBV14, TRBJ1-1)
CASSQEAGTEAFF

SEQ ID NO: 426323 - protein, 14 aa, Homo sapiens
  CDR3 for alpha chain variable domain of TCR clone 213162 (TRAV12-3, TRAJ42)
CAMNYGGSQGNLIF

SEQ ID NO: 426324 - protein, 13 aa, Homo sapiens
  CDR3 for beta chain variable domain of TCR clone 213162 (TRBV11-3, TRBJ2-3)
CASSHDTKDMQYF

SEQ ID NO: 426325 - protein, 11 aa, Homo sapiens
  CDR3 for alpha chain variable domain of TCR clone 213163 (TRAV13-1, TRAJ40)
CAVSGTYNYIF

SEQ ID NO: 426326 - protein, 16 aa, Homo sapiens
  CDR3 for beta chain variable domain of TCR clone 213163 (TRBV10-3, TRBJ2-3)
CAISVSRLALTDTKYF

SEQ ID NO: 426327 - protein, 16 aa, Homo sapiens
  CDR3 for alpha chain variable domain of TCR clone 213164 (TRAV13-1, TRAJ45)
CAARGSREGGADGLTF

SEQ ID NO: 426328 - protein, 13 aa, Homo sapiens
  CDR3 for beta chain variable domain of TCR clone 213164 (TRBV12-4, TRBJ2-5)
CASRKRGKETQYF

SEQ ID NO: 426329 - protein, 17 aa, Homo sapiens
  CDR3 for alpha chain variable domain of TCR clone 213165 (TRAV14/DV4, TRAJ56)
CAMREGSSFGANSKLTL

SEQ ID NO: 426330 - protein, 14 aa, Homo sapiens
  CDR3 for beta chain variable domain of TCR clone 213165 (TRBV7-9, TRBJ2-3)
CASSLEQGTNTQYF

SEQ ID NO: 426331 - protein, 14 aa, Homo sapiens
  CDR3 for alpha chain variable domain of TCR clone 213166 (TRAV13-2, TRAJ22)
CADGTLGSTRQLTF

SEQ ID NO: 426332 - protein, 16 aa, Homo sapiens
  CDR3 for beta chain variable domain of TCR clone 213166 (TRBV19, TRBJ2-1)
CASSSKGTRSYNEQFF

SEQ ID NO: 426333 - protein, 16 aa, Homo sapiens
  CDR3 for alpha chain variable domain of TCR clone 213167 (TRAV12-3, TRAJ53)
CAMSPGSGGSTYKLTF

SEQ ID NO: 426334 - protein, 16 aa, Homo sapiens
  CDR3 for beta chain variable domain of TCR clone 213167 (TRBV19, TRBJ2-1)
CASSKAGPSSYNEQFF

SEQ ID NO: 426335 - protein, 13 aa, Homo sapiens
  CDR3 for alpha chain variable domain of TCR clone 213168 (TRAV20, TRAJ34)
CAVRSYNTDKLIF

SEQ ID NO: 426336 - protein, 22 aa, Homo sapiens
  CDR3 for beta chain variable domain of TCR clone 213168 (TRBV11-2, TRBJ1-4)
CASSLDITRRGIPRKDNEKLFF

SEQ ID NO: 426337 - protein, 13 aa, Homo sapiens
  CDR3 for alpha chain variable domain of TCR clone 213169 (TRAV8-2, TRAJ22)
CVVSEGSARQLTF

SEQ ID NO: 426338 - protein, 14 aa, Homo sapiens
  CDR3 for beta chain variable domain of TCR clone 213169 (TRBV20-1, TRBJ1-1)
CSAQTRIGGTEAFF

SEQ ID NO: 426339 - protein, 12 aa, Homo sapiens
  CDR3 for alpha chain variable domain of TCR clone 213170 (TRAV13-1, TRAJ21)
CAAKEGFNKFYF

SEQ ID NO: 426340 - protein, 13 aa, Homo sapiens
  CDR3 for beta chain variable domain of TCR clone 213170 (TRBV7-9, TRBJ2-1)
CASSLGTVNEQVC

SEQ ID NO: 426341 - protein, 14 aa, Homo sapiens
  CDR3 for alpha chain variable domain of TCR clone 213171 (TRAV1-2, TRAJ8)
CAVREDTGFQELVF

SEQ ID NO: 426342 - protein, 15 aa, Homo sapiens
  CDR3 for beta chain variable domain of TCR clone 213171 (TRBV6-3, TRBJ2-7)
CASSSPVTVFYEQYF

SEQ ID NO: 426343 - protein, 15 aa, Homo sapiens
  CDR3 for alpha chain variable domain of TCR clone 213172 (TRAV27, TRAJ38)
CAARRNAGNNRKLIW

SEQ ID NO: 426344 - protein, 15 aa, Homo sapiens
  CDR3 for beta chain variable domain of TCR clone 213172 (TRBV3-1, TRBJ2-2)
CASSQDWTCAGELFF

SEQ ID NO: 426345 - protein, 13 aa, Homo sapiens
  CDR3 for alpha chain variable domain of TCR clone 213173 (TRAV38-1, TRAJ42)
CARWGGSQGNLIF

SEQ ID NO: 426346 - protein, 17 aa, Homo sapiens
  CDR3 for beta chain variable domain of TCR clone 213173 (TRBV20-1, TRBJ2-1)
CSARDPLAGVWDNERFF

SEQ ID NO: 426347 - protein, 12 aa, Homo sapiens
  CDR3 for alpha chain variable domain of TCR clone 213174 (TRAV36/DV7, TRAJ40)
CAVGTGTYKYIF

SEQ ID NO: 426348 - protein, 13 aa, Homo sapiens
  CDR3 for beta chain variable domain of TCR clone 213174 (TRBV4-1, TRBJ2-3)
CASSLDFTDTQYF

SEQ ID NO: 426349 - protein, 14 aa, Homo sapiens
  CDR3 for alpha chain variable domain of TCR clone 213175 (TRAV12-2, TRAJ17)
CAVLFKAAGHKLTF

SEQ ID NO: 426350 - protein, 14 aa, Homo sapiens
  CDR3 for beta chain variable domain of TCR clone 213175 (TRBV7-2, TRBJ2-3)
CASSQTGSSYTQYF

SEQ ID NO: 426351 - protein, 14 aa, Homo sapiens
  CDR3 for alpha chain variable domain of TCR clone 213176 (TRAV13-2, TRAJ17)
CAENSKAAGNKLTF

SEQ ID NO: 426352 - protein, 11 aa, Homo sapiens
  CDR3 for beta chain variable domain of TCR clone 213176 (TRBV6-3, TRBJ2-3)
CASTATDTQYF

SEQ ID NO: 426353 - protein, 10 aa, Homo sapiens
  CDR3 for alpha chain variable domain of TCR clone 213177 (TRAV12-1, TRAJ21)
CVVNPIKFYF

SEQ ID NO: 426354 - protein, 16 aa, Homo sapiens
  CDR3 for beta chain variable domain of TCR clone 213177 (TRBV20-1, TRBJ2-1)
CSARGRAESSYNEQFF

SEQ ID NO: 426355 - protein, 10 aa, Homo sapiens
  CDR3 for alpha chain variable domain of TCR clone 213178 (TRAV1-2, TRAJ20)
CALNDYKLSF

SEQ ID NO: 426356 - protein, 16 aa, Homo sapiens
  CDR3 for beta chain variable domain of TCR clone 213178 (TRBV12-5, TRBJ2-5)
CASGPRTSGNQETQYF

SEQ ID NO: 426357 - protein, 17 aa, Homo sapiens
  CDR3 for alpha chain variable domain of TCR clone 213179 (TRAV8-3, TRAJ50)
CAVGAVDTETSYDKLIF

SEQ ID NO: 426358 - protein, 13 aa, Homo sapiens
  CDR3 for beta chain variable domain of TCR clone 213179 (TRBV7-9, TRBJ2-2)
CASSSAGTGELFF

SEQ ID NO: 426359 - protein, 14 aa, Homo sapiens
  CDR3 for alpha chain variable domain of TCR clone 213180 (TRAV12-2, TRAJ13)
CAVRKTGGYQKVTF

SEQ ID NO: 426360 - protein, 14 aa, Homo sapiens
  CDR3 for beta chain variable domain of TCR clone 213180 (TRBV19, TRBJ2-1)
CASPTFVLSGEQFF

SEQ ID NO: 426361 - protein, 16 aa, Homo sapiens
  CDR3 for alpha chain variable domain of TCR clone 213181 (TRAV3, TRAJ37)
CAVRPHGSANTGKLIF

SEQ ID NO: 426362 - protein, 17 aa, Homo sapiens
  CDR3 for beta chain variable domain of TCR clone 213181 (TRBV20-1, TRBJ2-1)
CSASSSGLAGSYNEQFF

SEQ ID NO: 426363 - protein, 14 aa, Homo sapiens
  CDR3 for alpha chain variable domain of TCR clone 213182 (TRAV21, TRAJ37)
CAVKGSSNTGKLIF

SEQ ID NO: 426364 - protein, 14 aa, Homo sapiens
  CDR3 for beta chain variable domain of TCR clone 213182 (TRBV11-2, TRBJ2-1)
CASSLAGPYNEQFF

SEQ ID NO: 426365 - protein, 18 aa, Homo sapiens
  CDR3 for alpha chain variable domain of TCR clone 213183 (TRAV8-4, TRAJ52)
CAVTRANAGGTSYGKLSF

SEQ ID NO: 426366 - protein, 20 aa, Homo sapiens
  CDR3 for beta chain variable domain of TCR clone 213183 (TRBV19, TRBJ2-1)
CASGISRTVTSTRLNNEQIF

SEQ ID NO: 426367 - protein, 11 aa, Homo sapiens
  CDR3 for alpha chain variable domain of TCR clone 213184 (TRAV1-2, TRAJ11)
CAVRGYSTLTF

SEQ ID NO: 426368 - protein, 14 aa, Homo sapiens
  CDR3 for beta chain variable domain of TCR clone 213184 (TRBV19, TRBJ1-5)
CASRAPDSLRAQHF

SEQ ID NO: 426369 - protein, 13 aa, Homo sapiens
  CDR3 for alpha chain variable domain of TCR clone 213185 (TRAV36/DV7, TRAJ34)
CAVGEVNTDKLIF

SEQ ID NO: 426370 - protein, 13 aa, Homo sapiens
  CDR3 for beta chain variable domain of TCR clone 213185 (TRBV7-9, TRBJ1-2)
CASSLKQNYGYSF

SEQ ID NO: 426371 - protein, 12 aa, Homo sapiens
  CDR3 for alpha chain variable domain of TCR clone 213186 (TRAV8-4, TRAJ43)
CAVSVNNNDMRF

SEQ ID NO: 426372 - protein, 15 aa, Homo sapiens
  CDR3 for beta chain variable domain of TCR clone 213186 (TRBV11-2, TRBJ2-2)
CASSLETGVTGELFF

SEQ ID NO: 426373 - protein, 12 aa, Homo sapiens
  CDR3 for alpha chain variable domain of TCR clone 213187 (TRAV17, TRAJ20)
CATYSNDYKLSF

SEQ ID NO: 426374 - protein, 11 aa, Homo sapiens
  CDR3 for beta chain variable domain of TCR clone 213187 (TRBV4-1, TRBJ2-2)
CASEHAGELFF

SEQ ID NO: 426375 - protein, 13 aa, Homo sapiens
  CDR3 for alpha chain variable domain of TCR clone 213188 (TRAV38-2/DV8, TRAJ34)
CAYRTWNTDKLIF

SEQ ID NO: 426376 - protein, 13 aa, Homo sapiens
  CDR3 for beta chain variable domain of TCR clone 213188 (TRBV10-2, TRBJ2-3)
CASSESGDHTQYF

SEQ ID NO: 426377 - protein, 16 aa, Homo sapiens
  CDR3 for alpha chain variable domain of TCR clone 213189 (TRAV26-2, TRAJ45)
CTTASPIRGGADGLTF

SEQ ID NO: 426378 - protein, 20 aa, Homo sapiens
  CDR3 for beta chain variable domain of TCR clone 213189 (TRBV28, TRBJ2-1)
CASTPIGRSPGLAGGNEQFF

SEQ ID NO: 426379 - protein, 15 aa, Homo sapiens
  CDR3 for alpha chain variable domain of TCR clone 213190 (TRAV12-2, TRAJ53)
CAVNGGGGSNYKLKF

SEQ ID NO: 426380 - protein, 15 aa, Homo sapiens
  CDR3 for beta chain variable domain of TCR clone 213190 (TRBV7-2, TRBJ2-1)
CASSFDPGRRNEQFF

SEQ ID NO: 426381 - protein, 15 aa, Homo sapiens
  CDR3 for alpha chain variable domain of TCR clone 213191 (TRAV21, TRAJ32)
CALNSYGGATNKPTF

SEQ ID NO: 426382 - protein, 18 aa, Homo sapiens
  CDR3 for beta chain variable domain of TCR clone 213191 (TRBV7-9, TRBJ2-1)
CASSTGLAEGSSYNEQFF

SEQ ID NO: 426383 - protein, 16 aa, Homo sapiens
  CDR3 for alpha chain variable domain of TCR clone 213192 (TRAV21, TRAJ37)
CAVRTAGSGNTGKLIF

SEQ ID NO: 426384 - protein, 13 aa, Homo sapiens
  CDR3 for beta chain variable domain of TCR clone 213192 (TRBV7-9, TRBJ2-5)
CASLPSGRDTQYF

SEQ ID NO: 426385 - protein, 15 aa, Homo sapiens
  CDR3 for alpha chain variable domain of TCR clone 213193 (TRAV25, TRAJ52)
CAGRPGGISYGKLTF

SEQ ID NO: 426386 - protein, 17 aa, Homo sapiens
  CDR3 for beta chain variable domain of TCR clone 213193 (TRBV7-8, TRBJ2-6)
CASSAGTGGAGANVLTF

SEQ ID NO: 426387 - protein, 15 aa, Homo sapiens
  CDR3 for alpha chain variable domain of TCR clone 213194 (TRAV2, TRAJ9)
CAVEDRGTGGFKTIF

SEQ ID NO: 426388 - protein, 13 aa, Homo sapiens
  CDR3 for beta chain variable domain of TCR clone 213194 (TRBV10-3, TRBJ2-5)
CAMTSGAGETQYF

SEQ ID NO: 426389 - protein, 14 aa, Homo sapiens
  CDR3 for alpha chain variable domain of TCR clone 213195 (TRAV1-2, TRAJ16)
CAVNRCSDGQKLLF

SEQ ID NO: 426390 - protein, 13 aa, Homo sapiens
  CDR3 for beta chain variable domain of TCR clone 213195 (TRBV10-3, TRBJ2-7)
CASKLAVNYEQYF

SEQ ID NO: 426391 - protein, 13 aa, Homo sapiens
  CDR3 for alpha chain variable domain of TCR clone 213196 (TRAV4, TRAJ40)
CLVEGSGTYKYIF

SEQ ID NO: 426392 - protein, 16 aa, Homo sapiens
  CDR3 for beta chain variable domain of TCR clone 213196 (TRBV20-1, TRBJ2-1)
CSASQHLAWDNNEQFF

SEQ ID NO: 426393 - protein, 18 aa, Homo sapiens
  CDR3 for alpha chain variable domain of TCR clone 213197 (TRAV13-1, TRAJ52)
CAASKRSAGGTSYGKLTF

SEQ ID NO: 426394 - protein, 19 aa, Homo sapiens
  CDR3 for beta chain variable domain of TCR clone 213197 (TRBV25-1, TRBJ2-2)
CAILVYRVDRGRKTGELFF

SEQ ID NO: 426395 - protein, 12 aa, Homo sapiens
  CDR3 for alpha chain variable domain of TCR clone 213198 (TRAV21, TRAJ33)
CAKMDSNYQLIW

SEQ ID NO: 426396 - protein, 13 aa, Homo sapiens
  CDR3 for beta chain variable domain of TCR clone 213198 (TRBV2, TRBJ2-7)
CQQPNLGGYEQYF

SEQ ID NO: 426397 - protein, 11 aa, Homo sapiens
  CDR3 for alpha chain variable domain of TCR clone 213199 (TRAV26-1, TRAJ37)
CIVRVGRKLIF

SEQ ID NO: 426398 - protein, 11 aa, Homo sapiens
  CDR3 for beta chain variable domain of TCR clone 213199 (TRBV12-4, TRBJ2-2)
CASSSAGELFF

SEQ ID NO: 426399 - protein, 14 aa, Homo sapiens
  CDR3 for alpha chain variable domain of TCR clone 213200 (TRAV8-4, TRAJ16)
CAVSPVGRLPEAAL

SEQ ID NO: 426400 - protein, 15 aa, Homo sapiens
  CDR3 for beta chain variable domain of TCR clone 213200 (TRBV7-3, TRBJ1-6)
CASSLGRGAGSPLHF

SEQ ID NO: 426401 - protein, 14 aa, Homo sapiens
  CDR3 for alpha chain variable domain of TCR clone 213201 (TRAV3, TRAJ9)
CAVRLNTGGFKTIF

SEQ ID NO: 426402 - protein, 11 aa, Homo sapiens
  CDR3 for beta chain variable domain of TCR clone 213201 (TRBV11-2, TRBJ2-2)
CASSLPGELFF

SEQ ID NO: 426403 - protein, 13 aa, Homo sapiens
  CDR3 for alpha chain variable domain of TCR clone 213202 (TRAV30, TRAJ8)
CGTPNTGFQKLVF

SEQ ID NO: 426404 - protein, 15 aa, Homo sapiens
  CDR3 for beta chain variable domain of TCR clone 213202 (TRBV18, TRBJ2-2)
CASSKTPYGAGELFF

SEQ ID NO: 426405 - protein, 13 aa, Homo sapiens
  CDR3 for alpha chain variable domain of TCR clone 213203 (TRAV1-1, TRAJ13)
CAVNSGCYQKVTF

SEQ ID NO: 426406 - protein, 12 aa, Homo sapiens
  CDR3 for beta chain variable domain of TCR clone 213203 (TRBV28, TRBJ2-1)
CASSGQINEQFF

SEQ ID NO: 426407 - protein, 20 aa, Homo sapiens
  CDR3 for alpha chain variable domain of TCR clone 213204 (TRAV12-3, TRAJ41)
SLFIRDSQPSDSATPEALNF

SEQ ID NO: 426408 - protein, 15 aa, Homo sapiens
  CDR3 for beta chain variable domain of TCR clone 213204 (TRBV11-2, TRBJ2-2)
CASRGLAANTGELFF

SEQ ID NO: 426409 - protein, 21 aa, Homo sapiens
  CDR3 for alpha chain variable domain of TCR clone 213205 (TRAV1-1, TRAJ6)
CLLLLRWERLERTGGSYIPTF

SEQ ID NO: 426410 - protein, 13 aa, Homo sapiens
  CDR3 for beta chain variable domain of TCR clone 213205 (TRBV10-2, TRBJ2-7)
CASGASGGYEQYF

SEQ ID NO: 426411 - protein, 11 aa, Homo sapiens
  CDR3 for alpha chain variable domain of TCR clone 213206 (TRAV25, TRAJ5)
CRGGVRRALTF

SEQ ID NO: 426412 - protein, 15 aa, Homo sapiens
  CDR3 for beta chain variable domain of TCR clone 213206 (TRBV19, TRBJ2-4)
CASRGPRRGENIQYF

SEQ ID NO: 426413 - protein, 15 aa, Homo sapiens
  CDR3 for alpha chain variable domain of TCR clone 213207 (TRAV8-2, TRAJ24)
CVVSDRTDSWGKLQF

SEQ ID NO: 426414 - protein, 13 aa, Homo sapiens
  CDR3 for beta chain variable domain of TCR clone 213207 (TRBV19, TRBJ1-2)
CASSVPGQDGYTF

SEQ ID NO: 426415 - protein, 16 aa, Homo sapiens
  CDR3 for alpha chain variable domain of TCR clone 213208 (TRAV3, TRAJ37)
CAVRGKGSGNTGKLIF

SEQ ID NO: 426416 - protein, 13 aa, Homo sapiens
  CDR3 for beta chain variable domain of TCR clone 213208 (TRBV7-2, TRBJ2-7)
CASSSPSGSEQYF

SEQ ID NO: 426417 - protein, 12 aa, Homo sapiens
  CDR3 for alpha chain variable domain of TCR clone 213209 (TRAV26-1, TRAJ31)
CIVRNNNARLMF

SEQ ID NO: 426418 - protein, 15 aa, Homo sapiens
  CDR3 for beta chain variable domain of TCR clone 213209 (TRBV20-1, TRBJ2-4)
CSARDLTGGQNIQYF

SEQ ID NO: 426419 - protein, 13 aa, Homo sapiens
  CDR3 for alpha chain variable domain of TCR clone 213210 (TRAV12-3, TRAJ33)
CAMSVNSNYQLIW

SEQ ID NO: 426420 - protein, 12 aa, Homo sapiens
  CDR3 for beta chain variable domain of TCR clone 213210 (TRBV29-1, TRBJ2-3)
CSVVLGADTQYF

SEQ ID NO: 426421 - protein, 14 aa, Homo sapiens
  CDR3 for alpha chain variable domain of TCR clone 213211 (TRAV22, TRAJ6)
CAGVGPGGSYIPPF

SEQ ID NO: 426422 - protein, 14 aa, Homo sapiens
  CDR3 for beta chain variable domain of TCR clone 213211 (TRBV9, TRBJ2-7)
CASSVGVGSYEQYF

SEQ ID NO: 426423 - protein, 16 aa, Homo sapiens
  CDR3 for alpha chain variable domain of TCR clone 213212 (TRAV26-1, TRAJ23)
CIVRPAIYNQGGKLIF

SEQ ID NO: 426424 - protein, 15 aa, Homo sapiens
  CDR3 for beta chain variable domain of TCR clone 213212 (TRBV11-2, TRBJ1-6)
CASSLDPWAVSPLHF

SEQ ID NO: 426425 - protein, 14 aa, Homo sapiens
  CDR3 for alpha chain variable domain of TCR clone 213213 (TRAV3, TRAJ27)
CAVRDDTNAGKSTF

SEQ ID NO: 426426 - protein, 15 aa, Homo sapiens
  CDR3 for beta chain variable domain of TCR clone 213213 (TRBV7-7, TRBJ2-2)
CANSKLAKNTGELFF

SEQ ID NO: 426427 - protein, 11 aa, Homo sapiens
  CDR3 for alpha chain variable domain of TCR clone 213214 (TRAV12-3, TRAJ27)
CAMANAGKSTL

SEQ ID NO: 426428 - protein, 15 aa, Homo sapiens
  CDR3 for beta chain variable domain of TCR clone 213214 (TRBV27, TRBJ2-5)
CASSLYPRGGETQYF

SEQ ID NO: 426429 - protein, 12 aa, Homo sapiens
  CDR3 for alpha chain variable domain of TCR clone 213215 (TRAV13-2, TRAJ23)
GAERHRGGKRIF

SEQ ID NO: 426430 - protein, 15 aa, Homo sapiens
  CDR3 for beta chain variable domain of TCR clone 213215 (TRBV15, TRBJ2-1)
CATSRPGQGLHEQFF

SEQ ID NO: 426431 - protein, 11 aa, Homo sapiens
  CDR3 for alpha chain variable domain of TCR clone 213216 (TRAV21, TRAJ11)
CAVNGYSTLTF

SEQ ID NO: 426432 - protein, 16 aa, Homo sapiens
  CDR3 for beta chain variable domain of TCR clone 213216 (TRBV5-1, TRBJ1-1)
CASSSGGNALNTEAFF

SEQ ID NO: 426433 - protein, 13 aa, Homo sapiens
  CDR3 for alpha chain variable domain of TCR clone 213217 (TRAV12-2, TRAJ18)
CAVRGSTLGRLYF

SEQ ID NO: 426434 - protein, 16 aa, Homo sapiens
  CDR3 for beta chain variable domain of TCR clone 213217 (TRBV7-8, TRBJ2-4)
CASSAERTLAKNIQYF

SEQ ID NO: 426435 - protein, 12 aa, Homo sapiens
  CDR3 for alpha chain variable domain of TCR clone 213218 (TRAV1-2, TRAJ33)
CAALDSNYQLIW

SEQ ID NO: 426436 - protein, 14 aa, Homo sapiens
  CDR3 for beta chain variable domain of TCR clone 213218 (TRBV7-3, TRBJ1-1)
CASSAQGGNTEAFF

SEQ ID NO: 426437 - protein, 12 aa, Homo sapiens
  CDR3 for alpha chain variable domain of TCR clone 213219 (TRAV16, TRAJ10)
CSRTGGGNKLTF

SEQ ID NO: 426438 - protein, 14 aa, Homo sapiens
  CDR3 for beta chain variable domain of TCR clone 213219 (TRBV19, TRBJ1-2)
CAISLQGQAYGYTF

SEQ ID NO: 426439 - protein, 12 aa, Homo sapiens
  CDR3 for alpha chain variable domain of TCR clone 213220 (TRAV3, TRAJ31)
CAVRDGNARLMF

SEQ ID NO: 426440 - protein, 18 aa, Homo sapiens
  CDR3 for beta chain variable domain of TCR clone 213220 (TRBV7-2, TRBJ2-3)
CASSFKSEGSGITDTQYF

SEQ ID NO: 426441 - protein, 12 aa, Homo sapiens
  CDR3 for alpha chain variable domain of TCR clone 213221 (TRAV17, TRAJ57)
CATDGGSEKLVF

SEQ ID NO: 426442 - protein, 14 aa, Homo sapiens
  CDR3 for beta chain variable domain of TCR clone 213221 (TRBV28, TRBJ2-7)
CASTVYGRAHEQYF

SEQ ID NO: 426443 - protein, 14 aa, Homo sapiens
  CDR3 for alpha chain variable domain of TCR clone 213222 (TRAV38-1, TRAJ45)
CASHSGGGADGLTF

SEQ ID NO: 426444 - protein, 13 aa, Homo sapiens
  CDR3 for beta chain variable domain of TCR clone 213222 (TRBV10-3, TRBJ1-2)
CAISERDSYGYAL

SEQ ID NO: 426445 - protein, 13 aa, Homo sapiens
  CDR3 for alpha chain variable domain of TCR clone 213223 (TRAV13-1, TRAJ12)
CAASPDSSYKLIF

SEQ ID NO: 426446 - protein, 16 aa, Homo sapiens
  CDR3 for beta chain variable domain of TCR clone 213223 (TRBV15, TRBJ2-1)
CATSRGRLAGAYEQFF

SEQ ID NO: 426447 - protein, 13 aa, Homo sapiens
  CDR3 for alpha chain variable domain of TCR clone 213224 (TRAV35, TRAJ42)
CAGFPGSQGNLIF

SEQ ID NO: 426448 - protein, 14 aa, Homo sapiens
  CDR3 for beta chain variable domain of TCR clone 213224 (TRBV4-1, TRBJ2-2)
CASSQAVNTGEPFF

SEQ ID NO: 426449 - protein, 13 aa, Homo sapiens
  CDR3 for alpha chain variable domain of TCR clone 213225 (TRAV8-6, TRAJ9)
CAVWDTGGFKIIF

SEQ ID NO: 426450 - protein, 14 aa, Homo sapiens
  CDR3 for beta chain variable domain of TCR clone 213225 (TRBV2, TRBJ2-1)
CASSEALIYNEQFF

SEQ ID NO: 426451 - protein, 14 aa, Homo sapiens
  CDR3 for alpha chain variable domain of TCR clone 213226 (TRAV8-3, TRAJ6)
CAVGASGGSYIPTF

SEQ ID NO: 426452 - protein, 17 aa, Homo sapiens
  CDR3 for beta chain variable domain of TCR clone 213226 (TRBV18, TRBJ2-2)
CDSSPSDPWQNTGELFF

SEQ ID NO: 426453 - protein, 16 aa, Homo sapiens
  CDR3 for alpha chain variable domain of TCR clone 213227 (TRAV30, TRAJ24)
RGTEIVDADSWGKFQF

SEQ ID NO: 426454 - protein, 14 aa, Homo sapiens
  CDR3 for beta chain variable domain of TCR clone 213227 (TRBV12-5, TRBJ2-1)
CASGSRTHQETQYF

SEQ ID NO: 426455 - protein, 12 aa, Homo sapiens
  CDR3 for alpha chain variable domain of TCR clone 213228 (TRAV8-1, TRAJ26)
CAVNNYGQNFVF

SEQ ID NO: 426456 - protein, 15 aa, Homo sapiens
  CDR3 for beta chain variable domain of TCR clone 213228 (TRBV20-1, TRBJ1-1)
CSASWDRFLYTEAFF

SEQ ID NO: 426457 - protein, 13 aa, Homo sapiens
  CDR3 for alpha chain variable domain of TCR clone 213229 (TRAV1-2, TRAJ9)
CAALNTGGFKTIF

SEQ ID NO: 426458 - protein, 20 aa, Homo sapiens
  CDR3 for beta chain variable domain of TCR clone 213229 (TRBV28, TRBJ2-1)
CASTPIGRSPRLAGGNEQFF

SEQ ID NO: 426459 - protein, 15 aa, Homo sapiens
  CDR3 for alpha chain variable domain of TCR clone 213230 (TRAV13-1, TRAJ28)
CAAKDSGAGRYQLTF

SEQ ID NO: 426460 - protein, 14 aa, Homo sapiens
  CDR3 for beta chain variable domain of TCR clone 213230 (TRBV6-1, TRBJ2-2)
CASSGQGRAGELLF

SEQ ID NO: 426461 - protein, 14 aa, Homo sapiens
  CDR3 for alpha chain variable domain of TCR clone 213231 (TRAV3, TRAJ21)
CALGRGSTNFTLDL

SEQ ID NO: 426462 - protein, 14 aa, Homo sapiens
  CDR3 for beta chain variable domain of TCR clone 213231 (TRBV7-9, TRBJ2-4)
CACSLAMGGNIQYF

SEQ ID NO: 426463 - protein, 13 aa, Homo sapiens
  CDR3 for alpha chain variable domain of TCR clone 213232 (TRAV6, TRAJ20)
CALAVSNDYKLSF

SEQ ID NO: 426464 - protein, 13 aa, Homo sapiens
  CDR3 for beta chain variable domain of TCR clone 213232 (TRBV7-9, TRBJ1-2)
CASSLKQNYGYTF

SEQ ID NO: 426465 - protein, 14 aa, Homo sapiens
  CDR3 for alpha chain variable domain of TCR clone 213233 (TRAV20, TRAJ56)
CAWQFGGANSKLTF

SEQ ID NO: 426466 - protein, 14 aa, Homo sapiens
  CDR3 for beta chain variable domain of TCR clone 213233 (TRBV20-1, TRBJ2-7)
CSAKRGRSSYEQYF

SEQ ID NO: 426467 - protein, 10 aa, Homo sapiens
  CDR3 for alpha chain variable domain of TCR clone 213234 (TRAV30, TRAJ49)
CGITGNQFYF

SEQ ID NO: 426468 - protein, 14 aa, Homo sapiens
  CDR3 for beta chain variable domain of TCR clone 213234 (TRBV19, TRBJ2-1)
CASGKSTQYNEQFF

SEQ ID NO: 426469 - protein, 13 aa, Homo sapiens
  CDR3 for alpha chain variable domain of TCR clone 213235 (TRAV12-1, TRAJ40)
CVVPTSGTYKYIF

SEQ ID NO: 426470 - protein, 18 aa, Homo sapiens
  CDR3 for beta chain variable domain of TCR clone 213235 (TRBV7-6, TRBJ2-1)
CAISPRTSGMSSYNEQFF

SEQ ID NO: 426471 - protein, 15 aa, Homo sapiens
  CDR3 for alpha chain variable domain of TCR clone 213236 (TRAV17, TRAJ23)
CATDAEDNQGGKLIF

SEQ ID NO: 426472 - protein, 14 aa, Homo sapiens
  CDR3 for beta chain variable domain of TCR clone 213236 (TRBV7-9, TRBJ1-1)
CASTPLQSYTEAFF

SEQ ID NO: 426473 - protein, 12 aa, Homo sapiens
  CDR3 for alpha chain variable domain of TCR clone 213237 (TRAV21, TRAJ13)
PGPSGGYQKVTF

SEQ ID NO: 426474 - protein, 15 aa, Homo sapiens
  CDR3 for beta chain variable domain of TCR clone 213237 (TRBV27, TRBJ2-5)
CASSLYPRGGETRYF

SEQ ID NO: 426475 - protein, 17 aa, Homo sapiens
  CDR3 for alpha chain variable domain of TCR clone 213238 (TRAV13-1, )
CAANIQNPDPAVYQLRD

SEQ ID NO: 426476 - protein, 13 aa, Homo sapiens
  CDR3 for beta chain variable domain of TCR clone 213238 (TRBV20-1, TRBJ1-1)
CSAGTVGNTEAFF

SEQ ID NO: 426477 - protein, 14 aa, Homo sapiens
  CDR3 for alpha chain variable domain of TCR clone 213239 (TRAV23/DV6, TRAJ40)
CAASKNSGTYKYIF

SEQ ID NO: 426478 - protein, 14 aa, Homo sapiens
  CDR3 for beta chain variable domain of TCR clone 213239 (TRBV10-3, TRBJ2-5)
CAISERDYQETQYF

SEQ ID NO: 426479 - protein, 14 aa, Homo sapiens
  CDR3 for alpha chain variable domain of TCR clone 213240 (TRAV8-3, TRAJ39)
CAVGANNAGNMLTF

SEQ ID NO: 426480 - protein, 12 aa, Homo sapiens
  CDR3 for beta chain variable domain of TCR clone 213240 (TRBV14, TRBJ1-1)
CASSQLKGLTFF

SEQ ID NO: 426481 - protein, 15 aa, Homo sapiens
  CDR3 for alpha chain variable domain of TCR clone 213241 (TRAV8-4, TRAJ3)
CAVTGENLVQQCFQD

SEQ ID NO: 426482 - protein, 12 aa, Homo sapiens
  CDR3 for beta chain variable domain of TCR clone 213241 (TRBV7-9, TRBJ2-7)
CATRTDAYEQYF

SEQ ID NO: 426483 - protein, 16 aa, Homo sapiens
  CDR3 for alpha chain variable domain of TCR clone 213242 (TRAV30, TRAJ24)
CGTEIVDADSWGKFQF

SEQ ID NO: 426484 - protein, 12 aa, Homo sapiens
  CDR3 for beta chain variable domain of TCR clone 213242 (TRBV28, TRBJ1-3)
CASVSSGNTIYF

SEQ ID NO: 426485 - protein, 17 aa, Homo sapiens
  CDR3 for alpha chain variable domain of TCR clone 213243 (TRAV3, TRAJ40)
CAVRAPQTTSGTYKYIF

SEQ ID NO: 426486 - protein, 15 aa, Homo sapiens
  CDR3 for beta chain variable domain of TCR clone 213243 (TRBV27, TRBJ2-1)
CASSNGGGSSNEQFF

SEQ ID NO: 426487 - protein, 11 aa, Homo sapiens
  CDR3 for alpha chain variable domain of TCR clone 213244 (TRAV2, TRAJ13)
CASGGYQKVTL

SEQ ID NO: 426488 - protein, 13 aa, Homo sapiens
  CDR3 for beta chain variable domain of TCR clone 213244 (TRBV12-4, TRBJ1-2)
CASSLRQGKGDTF

SEQ ID NO: 426489 - protein, 15 aa, Homo sapiens
  CDR3 for alpha chain variable domain of TCR clone 213245 (TRAV8-3, TRAJ40)
CAVGPFTSGTYKYIF

SEQ ID NO: 426490 - protein, 16 aa, Homo sapiens
  CDR3 for beta chain variable domain of TCR clone 213245 (TRBV7-2, TRBJ2-7)
CASSLDPGGGSGGQYF

SEQ ID NO: 426491 - protein, 12 aa, Homo sapiens
  CDR3 for alpha chain variable domain of TCR clone 213246 (TRAV13-1, TRAJ49)
CAASPMGNQFYF

SEQ ID NO: 426492 - protein, 14 aa, Homo sapiens
  CDR3 for beta chain variable domain of TCR clone 213246 (TRBV15, TRBJ2-7)
CVTTAETGGYEQYF

SEQ ID NO: 426493 - protein, 16 aa, Homo sapiens
  CDR3 for alpha chain variable domain of TCR clone 213247 (TRAV30, TRAJ24)
CGTEIVDADRWGKFQF

SEQ ID NO: 426494 - protein, 14 aa, Homo sapiens
  CDR3 for beta chain variable domain of TCR clone 213247 (TRBV12-5, TRBJ2-5)
CASGSRTHQETQYL

SEQ ID NO: 426495 - protein, 14 aa, Homo sapiens
  CDR3 for alpha chain variable domain of TCR clone 213248 (TRAV12-3, TRAJ53)
CGATSGGSNYKLTF

SEQ ID NO: 426496 - protein, 13 aa, Homo sapiens
  CDR3 for beta chain variable domain of TCR clone 213248 (TRBV19, TRBJ1-5)
CAISTQDGQPQHF

SEQ ID NO: 426497 - protein, 15 aa, Homo sapiens
  CDR3 for alpha chain variable domain of TCR clone 213249 (TRAV4, TRAJ36)
CLVGDRQTGANSLFF

SEQ ID NO: 426498 - protein, 15 aa, Homo sapiens
  CDR3 for beta chain variable domain of TCR clone 213249 (TRBV7-6, TRBJ2-1)
CASSSLAGEGNEQFF

SEQ ID NO: 426499 - protein, 12 aa, Homo sapiens
  CDR3 for alpha chain variable domain of TCR clone 213250 (TRAV17, TRAJ45)
CAAVGGADGLTF

SEQ ID NO: 426500 - protein, 15 aa, Homo sapiens
  CDR3 for beta chain variable domain of TCR clone 213250 (TRBV20-1, TRBJ2-7)
CSARDRVSGMDEQYF

SEQ ID NO: 426501 - protein, 16 aa, Homo sapiens
  CDR3 for alpha chain variable domain of TCR clone 213251 (TRAV26-2, TRAJ57)
CILRDVGQGGSEKLVF

SEQ ID NO: 426502 - protein, 12 aa, Homo sapiens
  CDR3 for beta chain variable domain of TCR clone 213251 (TRBV5-4, TRBJ2-5)
CASSSTRETQYF

SEQ ID NO: 426503 - protein, 14 aa, Homo sapiens
  CDR3 for alpha chain variable domain of TCR clone 213252 (TRAV12-2, TRAJ17)
CAVLFKAAGNKQTF

SEQ ID NO: 426504 - protein, 13 aa, Homo sapiens
  CDR3 for beta chain variable domain of TCR clone 213252 (TRBV7-3, TRBJ1-1)
CASSQDWGAEAFF

SEQ ID NO: 426505 - protein, 14 aa, Homo sapiens
  CDR3 for alpha chain variable domain of TCR clone 213253 (TRAV17, TRAJ11)
CATDTSRGNSTLTF

SEQ ID NO: 426506 - protein, 13 aa, Homo sapiens
  CDR3 for beta chain variable domain of TCR clone 213253 (TRBV19, TRBJ2-5)
CASRDSRRETQYF

SEQ ID NO: 426507 - protein, 16 aa, Homo sapiens
  CDR3 for alpha chain variable domain of TCR clone 213254 (TRAV30, TRAJ24)
CGTEIVDADSWGKFQF

SEQ ID NO: 426508 - protein, 15 aa, Homo sapiens
  CDR3 for beta chain variable domain of TCR clone 213254 (TRBV28, TRBJ2-1)
CASSIRAVGRSEQFF

SEQ ID NO: 426509 - protein, 12 aa, Homo sapiens
  CDR3 for alpha chain variable domain of TCR clone 213255 (TRAV21, TRAJ49)
CAVNDGGNQFYF

SEQ ID NO: 426510 - protein, 14 aa, Homo sapiens
  CDR3 for beta chain variable domain of TCR clone 213255 (TRBV18, TRBJ2-7)
CGSSPRGGSYEQYF

SEQ ID NO: 426511 - protein, 12 aa, Homo sapiens
  CDR3 for alpha chain variable domain of TCR clone 213256 (TRAV35, TRAJ49)
CAGWNTGNQFYF

SEQ ID NO: 426512 - protein, 16 aa, Homo sapiens
  CDR3 for beta chain variable domain of TCR clone 213256 (TRBV5-1, TRBJ2-2)
CASSLWETTNTGELFF

SEQ ID NO: 426513 - protein, 15 aa, Homo sapiens
  CDR3 for alpha chain variable domain of TCR clone 213257 (TRAV8-6, TRAJ10)
CAVSDQAGGGNELTF

SEQ ID NO: 426514 - protein, 19 aa, Homo sapiens
  CDR3 for beta chain variable domain of TCR clone 213257 (TRBV7-2, TRBJ2-3)
CASSFLSRNWGGGTDTQYF

SEQ ID NO: 426515 - protein, 15 aa, Homo sapiens
  CDR3 for alpha chain variable domain of TCR clone 213258 (TRAV23/DV6, TRAJ18)
CAARYRGSTLERLYF

SEQ ID NO: 426516 - protein, 13 aa, Homo sapiens
  CDR3 for beta chain variable domain of TCR clone 213258 (TRBV7-2, TRBJ2-7)
CASSSPGGSEQYF

SEQ ID NO: 426517 - protein, 14 aa, Homo sapiens
  CDR3 for alpha chain variable domain of TCR clone 213259 (TRAV12-2, TRAJ13)
CAVKKTGGYPKVTF

SEQ ID NO: 426518 - protein, 15 aa, Homo sapiens
  CDR3 for beta chain variable domain of TCR clone 213259 (TRBV5-1, TRBJ2-5)
CASSLGLAEQETQYF

SEQ ID NO: 426519 - protein, 14 aa, Homo sapiens
  CDR3 for alpha chain variable domain of TCR clone 213260 (TRAV2, TRAJ37)
CAVDFTSNTGKLIF

SEQ ID NO: 426520 - protein, 14 aa, Homo sapiens
  CDR3 for beta chain variable domain of TCR clone 213260 (TRBV7-2, TRBJ2-5)
CASSLSGGGETQYF

SEQ ID NO: 426521 - protein, 14 aa, Homo sapiens
  CDR3 for alpha chain variable domain of TCR clone 213261 (TRAV12-1, TRAJ17)
CVVNPKAAGNKLTF

SEQ ID NO: 426522 - protein, 15 aa, Homo sapiens
  CDR3 for beta chain variable domain of TCR clone 213261 (TRBV20-1, TRBJ2-3)
CSATGTSGFTDTQYF

SEQ ID NO: 426523 - protein, 11 aa, Homo sapiens
  CDR3 for alpha chain variable domain of TCR clone 213262 (TRAV12-3, TRAJ49)
CAANTGNQIYF

SEQ ID NO: 426524 - protein, 15 aa, Homo sapiens
  CDR3 for beta chain variable domain of TCR clone 213262 (TRBV11-2, TRBJ2-1)
CASSLGTSGLNEQFF

SEQ ID NO: 426525 - protein, 16 aa, Homo sapiens
  CDR3 for alpha chain variable domain of TCR clone 213263 (TRAV3, TRAJ32)
CAVRDVEGGATNKLIF

SEQ ID NO: 426526 - protein, 14 aa, Homo sapiens
  CDR3 for beta chain variable domain of TCR clone 213263 (TRBV27, TRBJ2-2)
CASRPGVNTGELFF

SEQ ID NO: 426527 - protein, 13 aa, Homo sapiens
  CDR3 for alpha chain variable domain of TCR clone 213264 (TRAV1-1, TRAJ9)
CAAKNTGGFKTIF

SEQ ID NO: 426528 - protein, 13 aa, Homo sapiens
  CDR3 for beta chain variable domain of TCR clone 213264 (TRBV2, TRBJ2-7)
CASSGGIAYEQYF

SEQ ID NO: 426529 - protein, 14 aa, Homo sapiens
  CDR3 for alpha chain variable domain of TCR clone 213265 (TRAV8-3, TRAJ4)
CAVGAAGGYNKLIF

SEQ ID NO: 426530 - protein, 17 aa, Homo sapiens
  CDR3 for beta chain variable domain of TCR clone 213265 (TRBV13, TRBJ2-3)
CASIPSRVAGGRNTQYF

SEQ ID NO: 426531 - protein, 15 aa, Homo sapiens
  CDR3 for alpha chain variable domain of TCR clone 213266 (TRAV26-1, TRAJ44)
CIVRANTGTASKLTF

SEQ ID NO: 426532 - protein, 17 aa, Homo sapiens
  CDR3 for beta chain variable domain of TCR clone 213266 (TRBV4-1, TRBJ1-4)
CASSQEGPRGVEEKLFF

SEQ ID NO: 426533 - protein, 14 aa, Homo sapiens
  CDR3 for alpha chain variable domain of TCR clone 213267 (TRAV27, TRAJ22)
WAGVSVLGKRKLTF

SEQ ID NO: 426534 - protein, 17 aa, Homo sapiens
  CDR3 for beta chain variable domain of TCR clone 213267 (TRBV14, TRBJ2-1)
CASSQDRRVTSYNEQFF

SEQ ID NO: 426535 - protein, 15 aa, Homo sapiens
  CDR3 for alpha chain variable domain of TCR clone 213268 (TRAV27, TRAJ33)
CAGADIMDSNYQLIW

SEQ ID NO: 426536 - protein, 13 aa, Homo sapiens
  CDR3 for beta chain variable domain of TCR clone 213268 (TRBV28, TRBJ1-2)
CASSLQGRGGYTC

SEQ ID NO: 426537 - protein, 15 aa, Homo sapiens
  CDR3 for alpha chain variable domain of TCR clone 213269 (TRAV17, TRAJ16)
CATALRFSDGQKLLF

SEQ ID NO: 426538 - protein, 14 aa, Homo sapiens
  CDR3 for beta chain variable domain of TCR clone 213269 (TRBV18, TRBJ2-7)
CASSPRGGAYEQYF

SEQ ID NO: 426539 - protein, 12 aa, Homo sapiens
  CDR3 for alpha chain variable domain of TCR clone 213270 (TRAV26-2, TRAJ48)
CILRKGNEKLTF

SEQ ID NO: 426540 - protein, 15 aa, Homo sapiens
  CDR3 for beta chain variable domain of TCR clone 213270 (TRBV20-1, TRBJ2-7)
CSARDRVSGMDEQYF

SEQ ID NO: 426541 - protein, 14 aa, Homo sapiens
  CDR3 for alpha chain variable domain of TCR clone 213271 (TRAV16, TRAJ15)
CALSFNQAGTALIF

SEQ ID NO: 426542 - protein, 16 aa, Homo sapiens
  CDR3 for beta chain variable domain of TCR clone 213271 (TRBV9, TRBJ2-7)
CAGSAGPDRSPYEQYF

SEQ ID NO: 426543 - protein, 18 aa, Homo sapiens
  CDR3 for alpha chain variable domain of TCR clone 213272 (TRAV12-3, TRAJ52)
CAMSVGGAGGTSYGKLTF

SEQ ID NO: 426544 - protein, 15 aa, Homo sapiens
  CDR3 for beta chain variable domain of TCR clone 213272 (TRBV11-2, TRBJ1-3)
CASSAHSSSGNTIYF

SEQ ID NO: 426545 - protein, 14 aa, Homo sapiens
  CDR3 for alpha chain variable domain of TCR clone 213273 (TRAV16, TRAJ39)
CALSKNNAGNMLTF

SEQ ID NO: 426546 - protein, 13 aa, Homo sapiens
  CDR3 for beta chain variable domain of TCR clone 213273 (TRBV24-1, TRBJ2-2)
CATSDWSTGELFF

SEQ ID NO: 426547 - protein, 15 aa, Homo sapiens
  CDR3 for alpha chain variable domain of TCR clone 213274 (TRAV26-1, TRAJ29)
CIVRVEGSGNTPLVF

SEQ ID NO: 426548 - protein, 19 aa, Homo sapiens
  CDR3 for beta chain variable domain of TCR clone 213274 (TRBV18, TRBJ2-5)
CASSPGVSQETPVLRARHA

SEQ ID NO: 426549 - protein, 15 aa, Homo sapiens
  CDR3 for alpha chain variable domain of TCR clone 213275 (TRAV2, TRAJ32)
CAVANYVGATNKLIF

SEQ ID NO: 426550 - protein, 15 aa, Homo sapiens
  CDR3 for beta chain variable domain of TCR clone 213275 (TRBV7-7, TRBJ2-5)
CASSQLERAEETQYF

SEQ ID NO: 426551 - protein, 13 aa, Homo sapiens
  CDR3 for alpha chain variable domain of TCR clone 213276 (TRAV1-1, TRAJ12)
CAVSMDSSYHLIF

SEQ ID NO: 426552 - protein, 14 aa, Homo sapiens
  CDR3 for beta chain variable domain of TCR clone 213276 (TRBV19, TRBJ2-1)
CASSSGRDYNEQFF

SEQ ID NO: 426553 - protein, 14 aa, Homo sapiens
  CDR3 for alpha chain variable domain of TCR clone 213277 (TRAV27, TRAJ50)
CAGGRRTSYDKVIF

SEQ ID NO: 426554 - protein, 11 aa, Homo sapiens
  CDR3 for beta chain variable domain of TCR clone 213277 (TRBV12-4, TRBJ2-3)
CASSSVRGRYF

SEQ ID NO: 426555 - protein, 13 aa, Homo sapiens
  CDR3 for alpha chain variable domain of TCR clone 213278 (TRAV21, TRAJ57)
CAVTQGGSEKLVF

SEQ ID NO: 426556 - protein, 16 aa, Homo sapiens
  CDR3 for beta chain variable domain of TCR clone 213278 (TRBV29-1, TRBJ2-6)
CSVEDITYSGANVLTF

SEQ ID NO: 426557 - protein, 13 aa, Homo sapiens
  CDR3 for alpha chain variable domain of TCR clone 213279 (TRAV2, TRAJ15)
CAVASQAGTALIF

SEQ ID NO: 426558 - protein, 16 aa, Homo sapiens
  CDR3 for beta chain variable domain of TCR clone 213279 (TRBV18, TRBJ1-5)
CASSHYRVEGNQPQHF

SEQ ID NO: 426559 - protein, 16 aa, Homo sapiens
  CDR3 for alpha chain variable domain of TCR clone 213280 (TRAV26-1, TRAJ37)
CIYARHGSSNTGKLIF

SEQ ID NO: 426560 - protein, 17 aa, Homo sapiens
  CDR3 for beta chain variable domain of TCR clone 213280 (TRBV11-2, TRBJ2-1)
CASSLYPPGVEYNEQFF

SEQ ID NO: 426561 - protein, 15 aa, Homo sapiens
  CDR3 for alpha chain variable domain of TCR clone 213281 (TRAV23/DV6, TRAJ12)
CAAIDLGAMDGSYKL

SEQ ID NO: 426562 - protein, 15 aa, Homo sapiens
  CDR3 for beta chain variable domain of TCR clone 213281 (TRBV12-4, TRBJ2-5)
CASTLNSGRGETQYF

SEQ ID NO: 426563 - protein, 14 aa, Homo sapiens
  CDR3 for alpha chain variable domain of TCR clone 213282 (TRAV8-3, TRAJ4)
CAVGASGGDNKLIF

SEQ ID NO: 426564 - protein, 17 aa, Homo sapiens
  CDR3 for beta chain variable domain of TCR clone 213282 (TRBV5-1, TRBJ2-1)
CASSMGLAGEGYNEQFF

SEQ ID NO: 426565 - protein, 13 aa, Homo sapiens
  CDR3 for alpha chain variable domain of TCR clone 213283 (TRAV1-1, TRAJ9)
CAAKNTGVFKTIF

SEQ ID NO: 426566 - protein, 13 aa, Homo sapiens
  CDR3 for beta chain variable domain of TCR clone 213283 (TRBV7-9, TRBJ1-2)
CASSLKQNYGYTF

SEQ ID NO: 426567 - protein, 15 aa, Homo sapiens
  CDR3 for alpha chain variable domain of TCR clone 213284 (TRAV4, TRAJ32)
CLVGEDGGATNKLIF

SEQ ID NO: 426568 - protein, 14 aa, Homo sapiens
  CDR3 for beta chain variable domain of TCR clone 213284 (TRBV7-2, TRBJ1-5)
CASSTQGAGQPQHF

SEQ ID NO: 426569 - protein, 16 aa, Homo sapiens
  CDR3 for alpha chain variable domain of TCR clone 213285 (TRAV30, TRAJ24)
CGTEIVDADSWGKFQF

SEQ ID NO: 426570 - protein, 16 aa, Homo sapiens
  CDR3 for beta chain variable domain of TCR clone 213285 (TRBV5-1, TRBJ2-3)
CASSLQGRVGADTQYF

SEQ ID NO: 426571 - protein, 14 aa, Homo sapiens
  CDR3 for alpha chain variable domain of TCR clone 213286 (TRAV4, TRAJ43)
CLAGPMYNNNDMRF

SEQ ID NO: 426572 - protein, 21 aa, Homo sapiens
  CDR3 for beta chain variable domain of TCR clone 213286 (TRBV11-1, TRBJ2-1)
CASSARERLRPEGPSYNEQFF

SEQ ID NO: 426573 - protein, 16 aa, Homo sapiens
  CDR3 for alpha chain variable domain of TCR clone 213287 (TRAV17, TRAJ53)
CATDALSGGCNYKLTF

SEQ ID NO: 426574 - protein, 15 aa, Homo sapiens
  CDR3 for beta chain variable domain of TCR clone 213287 (TRBV20-1, TRBJ2-7)
CSARDRVSGMDEQYF

SEQ ID NO: 426575 - protein, 16 aa, Homo sapiens
  CDR3 for alpha chain variable domain of TCR clone 213288 (TRAV12-2, TRAJ28)
CDVITDSGAGSYQLTF

SEQ ID NO: 426576 - protein, 15 aa, Homo sapiens
  CDR3 for beta chain variable domain of TCR clone 213288 (TRBV6-3, TRBJ2-7)
CASSSPGTVFYEQYF

SEQ ID NO: 426577 - protein, 11 aa, Homo sapiens
  CDR3 for alpha chain variable domain of TCR clone 213289 (TRAV2, TRAJ23)
CAVDTRGKLIF

SEQ ID NO: 426578 - protein, 14 aa, Homo sapiens
  CDR3 for beta chain variable domain of TCR clone 213289 (TRBV2, TRBJ2-3)
CASSEGQNTDMQYF

SEQ ID NO: 426579 - protein, 14 aa, Homo sapiens
  CDR3 for alpha chain variable domain of TCR clone 213290 (TRAV13-1, TRAJ8)
CAASTYTGFQKLVF

SEQ ID NO: 426580 - protein, 13 aa, Homo sapiens
  CDR3 for beta chain variable domain of TCR clone 213290 (TRBV7-9, TRBJ1-2)
CASSLKQNYGYTF

SEQ ID NO: 426581 - protein, 14 aa, Homo sapiens
  CDR3 for alpha chain variable domain of TCR clone 213291 (TRAV2, TRAJ8)
CAGPGNTGFQKLVF

SEQ ID NO: 426582 - protein, 13 aa, Homo sapiens
  CDR3 for beta chain variable domain of TCR clone 213291 (TRBV6-5, TRBJ2-7)
CASRTSGIHEQYF

SEQ ID NO: 426583 - protein, 14 aa, Homo sapiens
  CDR3 for alpha chain variable domain of TCR clone 213292 (TRAV12-2, TRAJ13)
CAVKKTGGYQKVTF

SEQ ID NO: 426584 - protein, 15 aa, Homo sapiens
  CDR3 for beta chain variable domain of TCR clone 213292 (TRBV13, TRBJ1-2)
CASSLGRQPGYGYTF

SEQ ID NO: 426585 - protein, 15 aa, Homo sapiens
  CDR3 for alpha chain variable domain of TCR clone 213293 (TRAV34, TRAJ38)
CGADFTPGNNRKLIW

SEQ ID NO: 426586 - protein, 16 aa, Homo sapiens
  CDR3 for beta chain variable domain of TCR clone 213293 (TRBV12-5, TRBJ2-5)
CASGPGTSGNQETQYF

SEQ ID NO: 426587 - protein, 15 aa, Homo sapiens
  CDR3 for alpha chain variable domain of TCR clone 213294 (TRAV12-1, TRAJ44)
CVVDEYTGTASKLTF

SEQ ID NO: 426588 - protein, 15 aa, Homo sapiens
  CDR3 for beta chain variable domain of TCR clone 213294 (TRBV19, TRBJ2-3)
CAAGDTNAPNDTQYF

SEQ ID NO: 426589 - protein, 12 aa, Homo sapiens
  CDR3 for alpha chain variable domain of TCR clone 213295 (TRAV21, TRAJ57)
CCTQGGSEKLVF

SEQ ID NO: 426590 - protein, 16 aa, Homo sapiens
  CDR3 for beta chain variable domain of TCR clone 213295 (TRBV29-1, TRBJ2-7)
CSVEDAEDGTAYEQYF

SEQ ID NO: 426591 - protein, 15 aa, Homo sapiens
  CDR3 for alpha chain variable domain of TCR clone 213296 (TRAV12-2, TRAJ9)
CAVNNERTGGFKTIF

SEQ ID NO: 426592 - protein, 14 aa, Homo sapiens
  CDR3 for beta chain variable domain of TCR clone 213296 (TRBV4-1, TRBJ1-4)
CASSQERKNEELFF

SEQ ID NO: 426593 - protein, 13 aa, Homo sapiens
  CDR3 for alpha chain variable domain of TCR clone 213297 (TRAV1-1, TRAJ9)
CAAKNTGGFKTIS

SEQ ID NO: 426594 - protein, 16 aa, Homo sapiens
  CDR3 for beta chain variable domain of TCR clone 213297 (TRBV5-1, TRBJ1-1)
CASSSGGNSLNTEAFF

SEQ ID NO: 426595 - protein, 18 aa, Homo sapiens
  CDR3 for alpha chain variable domain of TCR clone 213298 (TRAV21, TRAJ52)
CAVRPSPAGGTSYGKLTF

SEQ ID NO: 426596 - protein, 17 aa, Homo sapiens
  CDR3 for beta chain variable domain of TCR clone 213298 (TRBV7-9, TRBJ1-1)
CASSSPPGQGQNTEAFF

SEQ ID NO: 426597 - protein, 14 aa, Homo sapiens
  CDR3 for alpha chain variable domain of TCR clone 213299 (TRAV2, TRAJ39)
CAVEVNNAGNMLTF

SEQ ID NO: 426598 - protein, 16 aa, Homo sapiens
  CDR3 for beta chain variable domain of TCR clone 213299 (TRBV7-9, TRBJ2-3)
CASSPWREVGTDTQYF

SEQ ID NO: 426599 - protein, 14 aa, Homo sapiens
  CDR3 for alpha chain variable domain of TCR clone 213300 (TRAV16, TRAJ33)
FALSAVDSNYQLIW

SEQ ID NO: 426600 - protein, 15 aa, Homo sapiens
  CDR3 for beta chain variable domain of TCR clone 213300 (TRBV28, TRBJ2-7)
CASSLEAYPIYEQYF

SEQ ID NO: 426601 - protein, 13 aa, Homo sapiens
  CDR3 for alpha chain variable domain of TCR clone 213301 (TRAV12-2, TRAJ24)
CAVSTDSCGKLQF

SEQ ID NO: 426602 - protein, 15 aa, Homo sapiens
  CDR3 for beta chain variable domain of TCR clone 213301 (TRBV7-2, TRBJ2-2)
CASSPTGANTGELFF

SEQ ID NO: 426603 - protein, 14 aa, Homo sapiens
  CDR3 for alpha chain variable domain of TCR clone 213302 (TRAV26-1, TRAJ21)
CIVRVVYNFTKFYF

SEQ ID NO: 426604 - protein, 15 aa, Homo sapiens
  CDR3 for beta chain variable domain of TCR clone 213302 (TRBV7-3, TRBJ2-2)
CASSETGQGTGELFF

SEQ ID NO: 426605 - protein, 15 aa, Homo sapiens
  CDR3 for alpha chain variable domain of TCR clone 213303 (TRAV8-3, TRAJ40)
CAAPSLGSGTYKYIF

SEQ ID NO: 426606 - protein, 16 aa, Homo sapiens
  CDR3 for beta chain variable domain of TCR clone 213303 (TRBV7-3, TRBJ2-3)
CACSLSGYRPEDTQYF

SEQ ID NO: 426607 - protein, 16 aa, Homo sapiens
  CDR3 for alpha chain variable domain of TCR clone 213304 (TRAV3, TRAJ37)
CAVRGKGSGNTGKLIY

SEQ ID NO: 426608 - protein, 13 aa, Homo sapiens
  CDR3 for beta chain variable domain of TCR clone 213304 (TRBV14, TRBJ2-7)
CASSQDRRYEQYF

SEQ ID NO: 426609 - protein, 14 aa, Homo sapiens
  CDR3 for alpha chain variable domain of TCR clone 213305 (TRAV12-2, TRAJ17)
CALNIKAAGNKLTF

SEQ ID NO: 426610 - protein, 16 aa, Homo sapiens
  CDR3 for beta chain variable domain of TCR clone 213305 (TRBV20-1, TRBJ2-6)
CSASSQGYDGANVLTF

SEQ ID NO: 426611 - protein, 18 aa, Homo sapiens
  CDR3 for alpha chain variable domain of TCR clone 213306 (TRAV13-1, TRAJ52)
CAASKRSAGGTSYGKLTF

SEQ ID NO: 426612 - protein, 14 aa, Homo sapiens
  CDR3 for beta chain variable domain of TCR clone 213306 (TRBV28, TRBJ1-2)
CASSQAEGPFGYTF

SEQ ID NO: 426613 - protein, 14 aa, Homo sapiens
  CDR3 for alpha chain variable domain of TCR clone 213307 (TRAV27, TRAJ12)
CAGARMDSSYKLSF

SEQ ID NO: 426614 - protein, 18 aa, Homo sapiens
  CDR3 for beta chain variable domain of TCR clone 213307 (TRBV10-3, TRBJ2-7)
CAISESGRPSGGRVEQYF

SEQ ID NO: 426615 - protein, 13 aa, Homo sapiens
  CDR3 for alpha chain variable domain of TCR clone 213308 (TRAV8-3, TRAJ28)
CAVGSVGSYQLTF

SEQ ID NO: 426616 - protein, 14 aa, Homo sapiens
  CDR3 for beta chain variable domain of TCR clone 213308 (TRBV7-2, TRBJ2-7)
CASRSQGAAYEQYS

SEQ ID NO: 426617 - protein, 12 aa, Homo sapiens
  CDR3 for alpha chain variable domain of TCR clone 213309 (TRAV12-1, TRAJ40)
CAVYSGTYKYIF

SEQ ID NO: 426618 - protein, 17 aa, Homo sapiens
  CDR3 for beta chain variable domain of TCR clone 213309 (TRBV11-3, TRBJ1-5)
CASSPLTGLRGNQPQHF

SEQ ID NO: 426619 - protein, 15 aa, Homo sapiens
  CDR3 for alpha chain variable domain of TCR clone 213310 (TRAV23/DV6, TRAJ57)
CAASSTLSQGGSEKL

SEQ ID NO: 426620 - protein, 15 aa, Homo sapiens
  CDR3 for beta chain variable domain of TCR clone 213310 (TRBV10-3, TRBJ2-3)
CAISLTSGGTDTQYF

SEQ ID NO: 426621 - protein, 14 aa, Homo sapiens
  CDR3 for alpha chain variable domain of TCR clone 213311 (TRAV3, TRAJ21)
CAVESQANFNKFYF

SEQ ID NO: 426622 - protein, 14 aa, Homo sapiens
  CDR3 for beta chain variable domain of TCR clone 213311 (TRBV20-1, TRBJ1-5)
CSARDDRGNQPQHF

SEQ ID NO: 426623 - protein, 15 aa, Homo sapiens
  CDR3 for alpha chain variable domain of TCR clone 213312 (TRAV3, TRAJ29)
CAVRDSPLGNTPLVF

SEQ ID NO: 426624 - protein, 13 aa, Homo sapiens
  CDR3 for beta chain variable domain of TCR clone 213312 (TRBV7-9, TRBJ2-7)
CASSFAGAYEQYF

SEQ ID NO: 426625 - protein, 18 aa, Homo sapiens
  CDR3 for alpha chain variable domain of TCR clone 213313 (TRAV12-2, )
CAVEDIQNPAPAVYQLRD

SEQ ID NO: 426626 - protein, 13 aa, Homo sapiens
  CDR3 for beta chain variable domain of TCR clone 213313 (TRBV20-1, TRBJ1-1)
CSARGGGNTEAFF

SEQ ID NO: 426627 - protein, 14 aa, Homo sapiens
  CDR3 for alpha chain variable domain of TCR clone 213314 (TRAV12-3, TRAJ10)
GHLPLTGGGNKLTF

SEQ ID NO: 426628 - protein, 19 aa, Homo sapiens
  CDR3 for beta chain variable domain of TCR clone 213314 (TRBV19, TRBJ2-5)
CASSIGQVTDFFLGETQYF

SEQ ID NO: 426629 - protein, 16 aa, Homo sapiens
  CDR3 for alpha chain variable domain of TCR clone 213315 (TRAV30, TRAJ24)
CGTEIVDADSWGKFQF

SEQ ID NO: 426630 - protein, 14 aa, Homo sapiens
  CDR3 for beta chain variable domain of TCR clone 213315 (TRBV7-2, TRBJ2-7)
CASSPKTSVYEQYF

SEQ ID NO: 426631 - protein, 12 aa, Homo sapiens
  CDR3 for alpha chain variable domain of TCR clone 213316 (TRAV2, TRAJ9)
CAVAAGGFKTIF

SEQ ID NO: 426632 - protein, 13 aa, Homo sapiens
  CDR3 for beta chain variable domain of TCR clone 213316 (TRBV4-1, TRBJ2-7)
CASSHGQAYEQYF

SEQ ID NO: 426633 - protein, 17 aa, Homo sapiens
  CDR3 for alpha chain variable domain of TCR clone 213317 (TRAV8-6, TRAJ8)
CAVKEGIENTGFQKLLF

SEQ ID NO: 426634 - protein, 15 aa, Homo sapiens
  CDR3 for beta chain variable domain of TCR clone 213317 (TRBV7-2, TRBJ2-1)
CASSSGLAGGNEQFF

SEQ ID NO: 426635 - protein, 14 aa, Homo sapiens
  CDR3 for alpha chain variable domain of TCR clone 213318 (TRAV12-2, TRAJ40)
CAVKIPSGTYKYIF

SEQ ID NO: 426636 - protein, 12 aa, Homo sapiens
  CDR3 for beta chain variable domain of TCR clone 213318 (TRBV11-2, TRBJ2-2)
CTSSLGGGELFF

SEQ ID NO: 426637 - protein, 16 aa, Homo sapiens
  CDR3 for alpha chain variable domain of TCR clone 213319 (TRAV26-1, )
CIDIQNPDPAVYQLRD

SEQ ID NO: 426638 - protein, 19 aa, Homo sapiens
  CDR3 for beta chain variable domain of TCR clone 213319 (TRBV19, TRBJ2-5)
CASSIGQVTDFFLGETQCF

SEQ ID NO: 426639 - protein, 11 aa, Homo sapiens
  CDR3 for alpha chain variable domain of TCR clone 213320 (TRAV35, TRAJ30)
CAGLRDDKIIF

SEQ ID NO: 426640 - protein, 13 aa, Homo sapiens
  CDR3 for beta chain variable domain of TCR clone 213320 (TRBV7-2, TRBJ1-5)
CASSLAEGGANEF

SEQ ID NO: 426641 - protein, 14 aa, Homo sapiens
  CDR3 for alpha chain variable domain of TCR clone 213321 (TRAV24, TRAJ42)
CAQNYGGSQGNLIF

SEQ ID NO: 426642 - protein, 17 aa, Homo sapiens
  CDR3 for beta chain variable domain of TCR clone 213321 (TRBV19, TRBJ1-5)
CASSIPGGGDSPSILVM

SEQ ID NO: 426643 - protein, 12 aa, Homo sapiens
  CDR3 for alpha chain variable domain of TCR clone 213322 (TRAV8-3, TRAJ26)
CAGDNYGQNFDF

SEQ ID NO: 426644 - protein, 11 aa, Homo sapiens
  CDR3 for beta chain variable domain of TCR clone 213322 (TRBV29-1, TRBJ2-5)
CSEDRTGTQYF

SEQ ID NO: 426645 - protein, 13 aa, Homo sapiens
  CDR3 for alpha chain variable domain of TCR clone 213323 (TRAV8-6, TRAJ54)
CAVSEEGAQKLVF

SEQ ID NO: 426646 - protein, 14 aa, Homo sapiens
  CDR3 for beta chain variable domain of TCR clone 213323 (TRBV7-9, TRBJ2-1)
CASSSMVGFGEQVF

SEQ ID NO: 426647 - protein, 15 aa, Homo sapiens
  CDR3 for alpha chain variable domain of TCR clone 213324 (TRAV12-2, TRAJ53)
CAVNGGGGSNYKLTF

SEQ ID NO: 426648 - protein, 12 aa, Homo sapiens
  CDR3 for beta chain variable domain of TCR clone 213324 (TRBV5-7, TRBJ1-1)
CASSLGRGKAFF

SEQ ID NO: 426649 - protein, 15 aa, Homo sapiens
  CDR3 for alpha chain variable domain of TCR clone 213325 (TRAV3, TRAJ22)
CAVRDRGGSARQLTF

SEQ ID NO: 426650 - protein, 12 aa, Homo sapiens
  CDR3 for beta chain variable domain of TCR clone 213325 (TRBV27, TRBJ2-2)
CASSFLPGELFF

SEQ ID NO: 426651 - protein, 14 aa, Homo sapiens
  CDR3 for alpha chain variable domain of TCR clone 213326 (TRAV12-1, TRAJ12)
CVLTRMDSSYKLIF

SEQ ID NO: 426652 - protein, 14 aa, Homo sapiens
  CDR3 for beta chain variable domain of TCR clone 213326 (TRBV4-1, TRBJ2-7)
CASSPVAGGDEQYF

SEQ ID NO: 426653 - protein, 17 aa, Homo sapiens
  CDR3 for alpha chain variable domain of TCR clone 213327 (TRAV26-1, TRAJ46)
VASSESEKKSSGDKLTF

SEQ ID NO: 426654 - protein, 16 aa, Homo sapiens
  CDR3 for beta chain variable domain of TCR clone 213327 (TRBV27, TRBJ2-2)
CASSFRGLVRTGELFF

SEQ ID NO: 426655 - protein, 14 aa, Homo sapiens
  CDR3 for alpha chain variable domain of TCR clone 213328 (TRAV8-1, TRAJ5)
CAVSMDTGRRALTF

SEQ ID NO: 426656 - protein, 15 aa, Homo sapiens
  CDR3 for beta chain variable domain of TCR clone 213328 (TRBV19, TRBJ2-4)
CASRGPRRGENIQYL

SEQ ID NO: 426657 - protein, 14 aa, Homo sapiens
  CDR3 for alpha chain variable domain of TCR clone 213329 (TRAV8-4, TRAJ34)
CAVSDPGDPDKLTF

SEQ ID NO: 426658 - protein, 13 aa, Homo sapiens
  CDR3 for beta chain variable domain of TCR clone 213329 (TRBV7-9, TRBJ2-5)
CASLSPGQETQCF

SEQ ID NO: 426659 - protein, 13 aa, Homo sapiens
  CDR3 for alpha chain variable domain of TCR clone 213330 (TRAV13-1, TRAJ5)
CAASDTGRRALTL

SEQ ID NO: 426660 - protein, 12 aa, Homo sapiens
  CDR3 for beta chain variable domain of TCR clone 213330 (TRBV28, TRBJ2-3)
CASSLHRDTQYF

SEQ ID NO: 426661 - protein, 15 aa, Homo sapiens
  CDR3 for alpha chain variable domain of TCR clone 213331 (TRAV12-1, TRAJ44)
CVVFVNTGTASKLTF

SEQ ID NO: 426662 - protein, 17 aa, Homo sapiens
  CDR3 for beta chain variable domain of TCR clone 213331 (TRBV4-2, TRBJ1-1)
CASTQFGGGSGNTEAVF

SEQ ID NO: 426663 - protein, 13 aa, Homo sapiens
  CDR3 for alpha chain variable domain of TCR clone 213332 (TRAV8-3, TRAJ43)
CAVGPDNNNDMRF

SEQ ID NO: 426664 - protein, 13 aa, Homo sapiens
  CDR3 for beta chain variable domain of TCR clone 213332 (TRBV7-9, TRBJ2-3)
CASSPGSTDTQYF

SEQ ID NO: 426665 - protein, 14 aa, Homo sapiens
  CDR3 for alpha chain variable domain of TCR clone 213333 (TRAV1-2, TRAJ8)
CAEREDTGFQKIVF

SEQ ID NO: 426666 - protein, 15 aa, Homo sapiens
  CDR3 for beta chain variable domain of TCR clone 213333 (TRBV6-3, TRBJ2-7)
CASSSPGTVFYEQYF

SEQ ID NO: 426667 - protein, 13 aa, Homo sapiens
  CDR3 for alpha chain variable domain of TCR clone 213334 (TRAV2, TRAJ15)
CAVASQAGTALIF

SEQ ID NO: 426668 - protein, 12 aa, Homo sapiens
  CDR3 for beta chain variable domain of TCR clone 213334 (TRBV12-4, TRBJ1-2)
CASIFIWLHLRF

SEQ ID NO: 426669 - protein, 13 aa, Homo sapiens
  CDR3 for alpha chain variable domain of TCR clone 213335 (TRAV21, TRAJ27)
CAARPGNAGKSTF

SEQ ID NO: 426670 - protein, 15 aa, Homo sapiens
  CDR3 for beta chain variable domain of TCR clone 213335 (TRBV2, TRBJ2-3)
CASSDAGGQPDTQYF

SEQ ID NO: 426671 - protein, 14 aa, Homo sapiens
  CDR3 for alpha chain variable domain of TCR clone 213336 (TRAV1-2, TRAJ16)
CAVNRFSDGQKLLF

SEQ ID NO: 426672 - protein, 16 aa, Homo sapiens
  CDR3 for beta chain variable domain of TCR clone 213336 (TRBV13, TRBJ2-2)
CASSTRTGEHTGELFF

SEQ ID NO: 426673 - protein, 16 aa, Homo sapiens
  CDR3 for alpha chain variable domain of TCR clone 213337 (TRAV3, TRAJ37)
CAVIPHGSGSTGKLIF

SEQ ID NO: 426674 - protein, 16 aa, Homo sapiens
  CDR3 for beta chain variable domain of TCR clone 213337 (TRBV20-1, TRBJ1-4)
CSAPGQGLLTNEKLFF

SEQ ID NO: 426675 - protein, 14 aa, Homo sapiens
  CDR3 for alpha chain variable domain of TCR clone 213338 (TRAV17, TRAJ12)
CATDEKDSSYKLIF

SEQ ID NO: 426676 - protein, 15 aa, Homo sapiens
  CDR3 for beta chain variable domain of TCR clone 213338 (TRBV28, TRBJ2-5)
CASSPPWSYQETQYF

SEQ ID NO: 426677 - protein, 15 aa, Homo sapiens
  CDR3 for alpha chain variable domain of TCR clone 213339 (TRAV2, TRAJ24)
CAVEVLTDSWGKFQF

SEQ ID NO: 426678 - protein, 13 aa, Homo sapiens
  CDR3 for beta chain variable domain of TCR clone 213339 (TRBV10-3, TRBJ2-7)
CASKLAVNYEQYF

SEQ ID NO: 426679 - protein, 16 aa, Homo sapiens
  CDR3 for alpha chain variable domain of TCR clone 213340 (TRAV26-2, TRAJ45)
CTTASPIGGGADGLTF

SEQ ID NO: 426680 - protein, 15 aa, Homo sapiens
  CDR3 for beta chain variable domain of TCR clone 213340 (TRBV5-8, TRBJ2-2)
CASSLDRGATGELFF

SEQ ID NO: 426681 - protein, 13 aa, Homo sapiens
  CDR3 for alpha chain variable domain of TCR clone 213341 (TRAV36/DV7, TRAJ54)
CAVDIQGAQKLVF

SEQ ID NO: 426682 - protein, 14 aa, Homo sapiens
  CDR3 for beta chain variable domain of TCR clone 213341 (TRBV19, TRBJ2-7)
CSSNFRYTFTGMYF

SEQ ID NO: 426683 - protein, 15 aa, Homo sapiens
  CDR3 for alpha chain variable domain of TCR clone 213342 (TRAV8-3, TRAJ41)
CAVGSNPNAGYALNF

SEQ ID NO: 426684 - protein, 17 aa, Homo sapiens
  CDR3 for beta chain variable domain of TCR clone 213342 (TRBV25-1, TRBJ2-1)
CASSAYGQGRGVYEQFF

SEQ ID NO: 426685 - protein, 13 aa, Homo sapiens
  CDR3 for alpha chain variable domain of TCR clone 213343 (TRAV36/DV7, TRAJ21)
CAVEAYNFNRFYF

SEQ ID NO: 426686 - protein, 14 aa, Homo sapiens
  CDR3 for beta chain variable domain of TCR clone 213343 (TRBV6-1, TRBJ1-1)
CASSGTGLNTEAFF

SEQ ID NO: 426687 - protein, 12 aa, Homo sapiens
  CDR3 for alpha chain variable domain of TCR clone 213344 (TRAV13-1, TRAJ43)
CAASIGDNNMRF

SEQ ID NO: 426688 - protein, 17 aa, Homo sapiens
  CDR3 for beta chain variable domain of TCR clone 213344 (TRBV11-3, TRBJ2-3)
CASSPGSSGGRTDTQYF

SEQ ID NO: 426689 - protein, 10 aa, Homo sapiens
  CDR3 for alpha chain variable domain of TCR clone 213345 (TRAV4, TRAJ15)
CLPFWTALIF

SEQ ID NO: 426690 - protein, 15 aa, Homo sapiens
  CDR3 for beta chain variable domain of TCR clone 213345 (TRBV5-1, TRBJ2-1)
CASSFSGTGYNEQFF

SEQ ID NO: 426691 - protein, 15 aa, Homo sapiens
  CDR3 for alpha chain variable domain of TCR clone 213346 (TRAV12-1, TRAJ44)
CVADLPTGTVSKLTF

SEQ ID NO: 426692 - protein, 13 aa, Homo sapiens
  CDR3 for beta chain variable domain of TCR clone 213346 (TRBV6-5, TRBJ2-5)
CASSPQGGETQYF

SEQ ID NO: 426693 - protein, 14 aa, Homo sapiens
  CDR3 for alpha chain variable domain of TCR clone 213347 (TRAV1-2, TRAJ16)
CAVNRFSDGQKLLL

SEQ ID NO: 426694 - protein, 18 aa, Homo sapiens
  CDR3 for beta chain variable domain of TCR clone 213347 (TRBV20-1, TRBJ2-6)
CSAETTPTHGSGANVLTF

SEQ ID NO: 426695 - protein, 12 aa, Homo sapiens
  CDR3 for alpha chain variable domain of TCR clone 213348 (TRAV8-3, TRAJ26)
CAGDNYGQNFVF

SEQ ID NO: 426696 - protein, 15 aa, Homo sapiens
  CDR3 for beta chain variable domain of TCR clone 213348 (TRBV2, TRBJ2-2)
CASSRETVGTGELFF

SEQ ID NO: 426697 - protein, 11 aa, Homo sapiens
  CDR3 for alpha chain variable domain of TCR clone 213349 (TRAV12-3, TRAJ27)
CAMTNAGKSTF

SEQ ID NO: 426698 - protein, 13 aa, Homo sapiens
  CDR3 for beta chain variable domain of TCR clone 213349 (TRBV20-1, TRBJ1-1)
CSARVGGNTEAFF

SEQ ID NO: 426699 - protein, 14 aa, Homo sapiens
  CDR3 for alpha chain variable domain of TCR clone 213350 (TRAV16, TRAJ17)
CAPRIKAAGDKLTF

SEQ ID NO: 426700 - protein, 17 aa, Homo sapiens
  CDR3 for beta chain variable domain of TCR clone 213350 (TRBV7-2, TRBJ2-3)
CASSSYSGTRRADTQYF

SEQ ID NO: 426701 - protein, 15 aa, Homo sapiens
  CDR3 for alpha chain variable domain of TCR clone 213351 (TRAV23/DV6, TRAJ18)
CAARYRGSTLGRLYF

SEQ ID NO: 426702 - protein, 16 aa, Homo sapiens
  CDR3 for beta chain variable domain of TCR clone 213351 (TRBV11-2, TRBJ2-3)
CASSSRTSGGAGTQYF

SEQ ID NO: 426703 - protein, 13 aa, Homo sapiens
  CDR3 for alpha chain variable domain of TCR clone 213352 (TRAV36/DV7, TRAJ49)
CAGASNTGNQFYF

SEQ ID NO: 426704 - protein, 12 aa, Homo sapiens
  CDR3 for beta chain variable domain of TCR clone 213352 (TRBV11-2, TRBJ2-2)
CASSLGGGELFF

SEQ ID NO: 426705 - protein, 13 aa, Homo sapiens
  CDR3 for alpha chain variable domain of TCR clone 213353 (TRAV1-1, TRAJ15)
CAVVDQAGTALTF

SEQ ID NO: 426706 - protein, 15 aa, Homo sapiens
  CDR3 for beta chain variable domain of TCR clone 213353 (TRBV11-3, TRBJ2-7)
CASSPGPASSYEQYF

SEQ ID NO: 426707 - protein, 18 aa, Homo sapiens
  CDR3 for alpha chain variable domain of TCR clone 213354 (TRAV8-3, TRAJ4)
WVRDPTSNDPGGYNKLIF

SEQ ID NO: 426708 - protein, 14 aa, Homo sapiens
  CDR3 for beta chain variable domain of TCR clone 213354 (TRBV7-8, TRBJ1-5)
CASSLGAFNQPQHF

SEQ ID NO: 426709 - protein, 15 aa, Homo sapiens
  CDR3 for alpha chain variable domain of TCR clone 213355 (TRAV26-1, TRAJ29)
CIVRVEGSGNTPLVF

SEQ ID NO: 426710 - protein, 14 aa, Homo sapiens
  CDR3 for beta chain variable domain of TCR clone 213355 (TRBV18, TRBJ2-5)
CASTPGASQETQYF

SEQ ID NO: 426711 - protein, 15 aa, Homo sapiens
  CDR3 for alpha chain variable domain of TCR clone 213356 (TRAV1-2, TRAJ35)
CAVRDREGFGYVLHC

SEQ ID NO: 426712 - protein, 14 aa, Homo sapiens
  CDR3 for beta chain variable domain of TCR clone 213356 (TRBV28, TRBJ1-4)
CASSRTVGNEKLFF

SEQ ID NO: 426713 - protein, 15 aa, Homo sapiens
  CDR3 for alpha chain variable domain of TCR clone 213357 (TRAV26-2, TRAJ36)
CILRSFRTGANNLFF

SEQ ID NO: 426714 - protein, 14 aa, Homo sapiens
  CDR3 for beta chain variable domain of TCR clone 213357 (TRBV19, TRBJ2-1)
CASPTFVLSGEQFF

SEQ ID NO: 426715 - protein, 14 aa, Homo sapiens
  CDR3 for alpha chain variable domain of TCR clone 213358 (TRAV29/DV5, TRAJ36)
CAARRKTGADNLFF

SEQ ID NO: 426716 - protein, 14 aa, Homo sapiens
  CDR3 for beta chain variable domain of TCR clone 213358 (TRBV12-5, TRBJ2-5)
CASGSRTNQETQYF

SEQ ID NO: 426717 - protein, 12 aa, Homo sapiens
  CDR3 for alpha chain variable domain of TCR clone 213359 (TRAV8-3, TRAJ26)
CAGDNYGQNFVF

SEQ ID NO: 426718 - protein, 15 aa, Homo sapiens
  CDR3 for beta chain variable domain of TCR clone 213359 (TRBV9, TRBJ2-1)
CASSLAGSSYNEEFF

SEQ ID NO: 426719 - protein, 16 aa, Homo sapiens
  CDR3 for alpha chain variable domain of TCR clone 213360 (TRAV26-1, )
CIDIQNPDPTVYQLRD

SEQ ID NO: 426720 - protein, 19 aa, Homo sapiens
  CDR3 for beta chain variable domain of TCR clone 213360 (TRBV19, TRBJ2-5)
CASSIGQVTDFFLGETQYF

SEQ ID NO: 426721 - protein, 13 aa, Homo sapiens
  CDR3 for alpha chain variable domain of TCR clone 213361 (TRAV13-2, TRAJ13)
CAERPGGYQKGTF

SEQ ID NO: 426722 - protein, 19 aa, Homo sapiens
  CDR3 for beta chain variable domain of TCR clone 213361 (TRBV4-1, TRBJ2-1)
CASSQGPLPGLGSRNEQFF

SEQ ID NO: 426723 - protein, 10 aa, Homo sapiens
  CDR3 for alpha chain variable domain of TCR clone 213362 (TRAV8-4, TRAJ11)
CAVSLHTLTF

SEQ ID NO: 426724 - protein, 15 aa, Homo sapiens
  CDR3 for beta chain variable domain of TCR clone 213362 (TRBV9, TRBJ2-1)
CASSLAGSSYNEQFF

SEQ ID NO: 426725 - protein, 16 aa, Homo sapiens
  CDR3 for alpha chain variable domain of TCR clone 213363 (TRAV25, TRAJ53)
CAGPKGSGGSNYKLTF

SEQ ID NO: 426726 - protein, 18 aa, Homo sapiens
  CDR3 for beta chain variable domain of TCR clone 213363 (TRBV12-4, TRBJ2-2)
CASSLVAGTRGRTGELFF

SEQ ID NO: 426727 - protein, 11 aa, Homo sapiens
  CDR3 for alpha chain variable domain of TCR clone 213364 (TRAV2, TRAJ13)
CASGGYQKVTF

SEQ ID NO: 426728 - protein, 14 aa, Homo sapiens
  CDR3 for beta chain variable domain of TCR clone 213364 (TRBV11-3, TRBJ2-7)
CASSPDRNTYEQYF

SEQ ID NO: 426729 - protein, 15 aa, Homo sapiens
  CDR3 for alpha chain variable domain of TCR clone 213365 (TRAV21, TRAJ53)
CAVRHSGGSNYKLTF

SEQ ID NO: 426730 - protein, 13 aa, Homo sapiens
  CDR3 for beta chain variable domain of TCR clone 213365 (TRBV7-9, TRBJ1-2)
CASSLKQNYGYTF

SEQ ID NO: 426731 - protein, 16 aa, Homo sapiens
  CDR3 for alpha chain variable domain of TCR clone 213366 (TRAV30, TRAJ24)
CGTEIVDADGWGKFQF

SEQ ID NO: 426732 - protein, 14 aa, Homo sapiens
  CDR3 for beta chain variable domain of TCR clone 213366 (TRBV19, TRBJ2-1)
CASPTFVLSGEQFF

SEQ ID NO: 426733 - protein, 15 aa, Homo sapiens
  CDR3 for alpha chain variable domain of TCR clone 213367 (TRAV8-2, TRAJ15)
CVVTMGNQAGTALLF

SEQ ID NO: 426734 - protein, 12 aa, Homo sapiens
  CDR3 for beta chain variable domain of TCR clone 213367 (TRBV6-1, TRBJ2-7)
CASSDYSYEQYF

SEQ ID NO: 426735 - protein, 14 aa, Homo sapiens
  CDR3 for alpha chain variable domain of TCR clone 213368 (TRAV13-2, TRAJ10)
CAETFTGGGNTLTF

SEQ ID NO: 426736 - protein, 16 aa, Homo sapiens
  CDR3 for beta chain variable domain of TCR clone 213368 (TRBV18, TRBJ2-7)
CASSPRSQGISYEQYF

SEQ ID NO: 426737 - protein, 15 aa, Homo sapiens
  CDR3 for alpha chain variable domain of TCR clone 213369 (TRAV8-3, TRAJ11)
CAVGLLNSGYSTLTF

SEQ ID NO: 426738 - protein, 16 aa, Homo sapiens
  CDR3 for beta chain variable domain of TCR clone 213369 (TRBV7-9, TRBJ1-2)
CASSLGFYSGEDGETF

SEQ ID NO: 426739 - protein, 13 aa, Homo sapiens
  CDR3 for alpha chain variable domain of TCR clone 213370 (TRAV1-2, TRAJ9)
WAALNTGGFKTIF

SEQ ID NO: 426740 - protein, 20 aa, Homo sapiens
  CDR3 for beta chain variable domain of TCR clone 213370 (TRBV28, TRBJ2-1)
CASTPIGRSPGLAGGNEQFF

SEQ ID NO: 426741 - protein, 15 aa, Homo sapiens
  CDR3 for alpha chain variable domain of TCR clone 213371 (TRAV2, TRAJ15)
RAVEDRGQAGTALIF

SEQ ID NO: 426742 - protein, 15 aa, Homo sapiens
  CDR3 for beta chain variable domain of TCR clone 213371 (TRBV20-1, TRBJ1-5)
CSATSDRGLGQPQHF

SEQ ID NO: 426743 - protein, 18 aa, Homo sapiens
  CDR3 for alpha chain variable domain of TCR clone 213372 (TRAV13-1, TRAJ52)
CAASKRSAGGTSYGKLTF

SEQ ID NO: 426744 - protein, 14 aa, Homo sapiens
  CDR3 for beta chain variable domain of TCR clone 213372 (TRBV7-2, TRBJ2-5)
CASSTGGELKTQYV

SEQ ID NO: 426745 - protein, 18 aa, Homo sapiens
  CDR3 for alpha chain variable domain of TCR clone 213373 (TRAV26-1, TRAJ52)
CIVRVEGAGGTSYGKLTF

SEQ ID NO: 426746 - protein, 13 aa, Homo sapiens
  CDR3 for beta chain variable domain of TCR clone 213373 (TRBV7-3, TRBJ1-2)
CASSLKRGYRYTF

SEQ ID NO: 426747 - protein, 17 aa, Homo sapiens
  CDR3 for alpha chain variable domain of TCR clone 213374 (TRAV21, TRAJ3)
SHLPLRCFYSSASKIIF

SEQ ID NO: 426748 - protein, 16 aa, Homo sapiens
  CDR3 for beta chain variable domain of TCR clone 213374 (TRBV19, TRBJ2-1)
CASSKAGPSSYNEQFF

SEQ ID NO: 426749 - protein, 13 aa, Homo sapiens
  CDR3 for alpha chain variable domain of TCR clone 213375 (TRAV17, TRAJ9)
CATDYTGGFKTIF

SEQ ID NO: 426750 - protein, 18 aa, Homo sapiens
  CDR3 for beta chain variable domain of TCR clone 213375 (TRBV4-3, TRBJ2-3)
CASSQSPPAGSSTDTQYF

SEQ ID NO: 426751 - protein, 12 aa, Homo sapiens
  CDR3 for alpha chain variable domain of TCR clone 213376 (TRAV12-3, TRAJ20)
CAMVRGDYKLSF

SEQ ID NO: 426752 - protein, 14 aa, Homo sapiens
  CDR3 for beta chain variable domain of TCR clone 213376 (TRBV2, TRBJ1-5)
CASSGTVSNQPQHF

SEQ ID NO: 426753 - protein, 12 aa, Homo sapiens
  CDR3 for alpha chain variable domain of TCR clone 213377 (TRAV21, TRAJ33)
CAKMDSDYQLIC

SEQ ID NO: 426754 - protein, 14 aa, Homo sapiens
  CDR3 for beta chain variable domain of TCR clone 213377 (TRBV2, TRBJ2-7)
CASSLASGGYEQYF

SEQ ID NO: 426755 - protein, 20 aa, Homo sapiens
  CDR3 for alpha chain variable domain of TCR clone 213378 (TRAV27, TRAJ5)
TAAQPGDTGLYETGRRALTF

SEQ ID NO: 426756 - protein, 11 aa, Homo sapiens
  CDR3 for beta chain variable domain of TCR clone 213378 (TRBV19, TRBJ1-1)
CASSIGSEAFF

SEQ ID NO: 426757 - protein, 12 aa, Homo sapiens
  CDR3 for alpha chain variable domain of TCR clone 213379 (TRAV23/DV6, TRAJ42)
CAPGGSQGNLIF

SEQ ID NO: 426758 - protein, 15 aa, Homo sapiens
  CDR3 for beta chain variable domain of TCR clone 213379 (TRBV6-3, TRBJ2-7)
CASSSPGTVFYEQYF

SEQ ID NO: 426759 - protein, 15 aa, Homo sapiens
  CDR3 for alpha chain variable domain of TCR clone 213380 (TRAV13-1, TRAJ49)
CAASTEGNTGNKFYF

SEQ ID NO: 426760 - protein, 12 aa, Homo sapiens
  CDR3 for beta chain variable domain of TCR clone 213380 (TRBV11-2, TRBJ2-2)
CASSLGGGELFF

SEQ ID NO: 426761 - protein, 21 aa, Homo sapiens
  CDR3 for alpha chain variable domain of TCR clone 213381 (TRAV3, TRAJ6)
CAVRDRNPADQEEATYLHLEE

SEQ ID NO: 426762 - protein, 15 aa, Homo sapiens
  CDR3 for beta chain variable domain of TCR clone 213381 (TRBV18, TRBJ2-7)
CASSPTFMDSYEQYF

SEQ ID NO: 426763 - protein, 14 aa, Homo sapiens
  CDR3 for alpha chain variable domain of TCR clone 213382 (TRAV12-3, TRAJ42)
CAMNYGGSQGNLNF

SEQ ID NO: 426764 - protein, 15 aa, Homo sapiens
  CDR3 for beta chain variable domain of TCR clone 213382 (TRBV5-7, TRBJ1-5)
CASSYGKLWDQPQHF

SEQ ID NO: 426765 - protein, 16 aa, Homo sapiens
  CDR3 for alpha chain variable domain of TCR clone 213383 (TRAV3, TRAJ10)
CAVRDMRGGGGNKLTF

SEQ ID NO: 426766 - protein, 15 aa, Homo sapiens
  CDR3 for beta chain variable domain of TCR clone 213383 (TRBV2, TRBJ2-1)
CASSELAGSYNEQFF

SEQ ID NO: 426767 - protein, 11 aa, Homo sapiens
  CDR3 for alpha chain variable domain of TCR clone 213384 (TRAV1-1, TRAJ23)
RAVRQGGKLIC

SEQ ID NO: 426768 - protein, 20 aa, Homo sapiens
  CDR3 for beta chain variable domain of TCR clone 213384 (TRBV7-8, TRBJ2-2)
CASSHLFPGPTIHITGELFF

SEQ ID NO: 426769 - protein, 15 aa, Homo sapiens
  CDR3 for alpha chain variable domain of TCR clone 213385 (TRAV3, TRAJ12)
CAVRDIRDSSYKLIF

SEQ ID NO: 426770 - protein, 15 aa, Homo sapiens
  CDR3 for beta chain variable domain of TCR clone 213385 (TRBV27, TRBJ2-7)
CASSLRNEQVYEQYF

SEQ ID NO: 426771 - protein, 14 aa, Homo sapiens
  CDR3 for alpha chain variable domain of TCR clone 213386 (TRAV8-3, TRAJ39)
CAVGANNAGNILTF

SEQ ID NO: 426772 - protein, 12 aa, Homo sapiens
  CDR3 for beta chain variable domain of TCR clone 213386 (TRBV28, TRBJ1-3)
CASVSSGNTIYF

SEQ ID NO: 426773 - protein, 14 aa, Homo sapiens
  CDR3 for alpha chain variable domain of TCR clone 213387 (TRAV8-3, TRAJ15)
CAVGRHQAGTALIF

SEQ ID NO: 426774 - protein, 13 aa, Homo sapiens
  CDR3 for beta chain variable domain of TCR clone 213387 (TRBV28, TRBJ2-5)
CASSFAGGETQYF

SEQ ID NO: 426775 - protein, 14 aa, Homo sapiens
  CDR3 for alpha chain variable domain of TCR clone 213388 (TRAV27, TRAJ45)
CAGAQEEVLTDSPL

SEQ ID NO: 426776 - protein, 15 aa, Homo sapiens
  CDR3 for beta chain variable domain of TCR clone 213388 (TRBV20-1, TRBJ2-7)
CSARDRVSGMDEQYF

SEQ ID NO: 426777 - protein, 11 aa, Homo sapiens
  CDR3 for alpha chain variable domain of TCR clone 213389 (TRAV3, TRAJ21)
CTVGNFNKFYF

SEQ ID NO: 426778 - protein, 17 aa, Homo sapiens
  CDR3 for beta chain variable domain of TCR clone 213389 (TRBV5-1, TRBJ2-5)
CASAVTRQFGNKETQYF

SEQ ID NO: 426779 - protein, 14 aa, Homo sapiens
  CDR3 for alpha chain variable domain of TCR clone 213390 (TRAV12-2, TRAJ13)
WSVKKTGGSQKVTF

SEQ ID NO: 426780 - protein, 15 aa, Homo sapiens
  CDR3 for beta chain variable domain of TCR clone 213390 (TRBV27, TRBJ2-1)
CASSNGGGSSNEQFF

SEQ ID NO: 426781 - protein, 20 aa, Homo sapiens
  CDR3 for alpha chain variable domain of TCR clone 213391 (TRAV26-1, TRAJ38)
CIADNAGNNHIQNPDPAVYQ

SEQ ID NO: 426782 - protein, 17 aa, Homo sapiens
  CDR3 for beta chain variable domain of TCR clone 213391 (TRBV11-2, TRBJ2-6)
CASSQRDIFSGANVLTF

SEQ ID NO: 426783 - protein, 14 aa, Homo sapiens
  CDR3 for alpha chain variable domain of TCR clone 213392 (TRAV1-2, TRAJ16)
CAVNRFSDGQKLLF

SEQ ID NO: 426784 - protein, 17 aa, Homo sapiens
  CDR3 for beta chain variable domain of TCR clone 213392 (TRBV28, TRBJ2-5)
RASSTPEGDARQETQYF

SEQ ID NO: 426785 - protein, 12 aa, Homo sapiens
  CDR3 for alpha chain variable domain of TCR clone 213393 (TRAV8-3, TRAJ26)
CAVGAGGQNFVF

SEQ ID NO: 426786 - protein, 13 aa, Homo sapiens
  CDR3 for beta chain variable domain of TCR clone 213393 (TRBV12-4, TRBJ1-2)
CASSLRQGKGYTF

SEQ ID NO: 426787 - protein, 14 aa, Homo sapiens
  CDR3 for alpha chain variable domain of TCR clone 213394 (TRAV1-1, TRAJ33)
CAVRPEDSNYQLIW

SEQ ID NO: 426788 - protein, 15 aa, Homo sapiens
  CDR3 for beta chain variable domain of TCR clone 213394 (TRBV20-1, TRBJ2-1)
CSARSPGGPGDEQFF

SEQ ID NO: 426789 - protein, 11 aa, Homo sapiens
  CDR3 for alpha chain variable domain of TCR clone 213395 (TRAV1-2, TRAJ20)
CAVANDYKLSF

SEQ ID NO: 426790 - protein, 17 aa, Homo sapiens
  CDR3 for beta chain variable domain of TCR clone 213395 (TRBV4-1, TRBJ2-3)
CASSQGYVSGGTDTQYF

SEQ ID NO: 426791 - protein, 14 aa, Homo sapiens
  CDR3 for alpha chain variable domain of TCR clone 213396 (TRAV17, TRAJ16)
CATADFSHGQKLLF

SEQ ID NO: 426792 - protein, 15 aa, Homo sapiens
  CDR3 for beta chain variable domain of TCR clone 213396 (TRBV18, TRBJ2-1)
CASSPPSASYNEQFF

SEQ ID NO: 426793 - protein, 14 aa, Homo sapiens
  CDR3 for alpha chain variable domain of TCR clone 213397 (TRAV12-2, TRAJ40)
CAVKIPSGTYKYIF

SEQ ID NO: 426794 - protein, 16 aa, Homo sapiens
  CDR3 for beta chain variable domain of TCR clone 213397 (TRBV2, TRBJ2-3)
CASSTSVEGGNRYAVF

SEQ ID NO: 426795 - protein, 13 aa, Homo sapiens
  CDR3 for alpha chain variable domain of TCR clone 213398 (TRAV12-2, TRAJ50)
FAVIVTSYDKVIF

SEQ ID NO: 426796 - protein, 14 aa, Homo sapiens
  CDR3 for beta chain variable domain of TCR clone 213398 (TRBV9, TRBJ2-1)
CASSVDPRGKEQFF

SEQ ID NO: 426797 - protein, 14 aa, Homo sapiens
  CDR3 for alpha chain variable domain of TCR clone 213399 (TRAV13-1, TRAJ44)
CAAKATGTASKLTF

SEQ ID NO: 426798 - protein, 17 aa, Homo sapiens
  CDR3 for beta chain variable domain of TCR clone 213399 (TRBV7-3, TRBJ2-3)
CANSLMKRMRGADTQYF

SEQ ID NO: 426799 - protein, 13 aa, Homo sapiens
  CDR3 for alpha chain variable domain of TCR clone 213400 (TRAV17, TRAJ15)
CSTDARAGTALIF

SEQ ID NO: 426800 - protein, 15 aa, Homo sapiens
  CDR3 for beta chain variable domain of TCR clone 213400 (TRBV20-1, TRBJ2-7)
CSARDRASGMDEQYF

SEQ ID NO: 426801 - protein, 16 aa, Homo sapiens
  CDR3 for alpha chain variable domain of TCR clone 213401 (TRAV24, TRAJ53)
CAFNMGGGGSNYKLTF

SEQ ID NO: 426802 - protein, 14 aa, Homo sapiens
  CDR3 for beta chain variable domain of TCR clone 213401 (TRBV4-2, TRBJ2-1)
CARGLDRAYNEQFF

SEQ ID NO: 426803 - protein, 14 aa, Homo sapiens
  CDR3 for alpha chain variable domain of TCR clone 213402 (TRAV8-3, TRAJ4)
CAVGASGGYNKLIF

SEQ ID NO: 426804 - protein, 13 aa, Homo sapiens
  CDR3 for beta chain variable domain of TCR clone 213402 (TRBV14, TRBJ2-7)
CASSQDRRGEQYF

SEQ ID NO: 426805 - protein, 13 aa, Homo sapiens
  CDR3 for alpha chain variable domain of TCR clone 213403 (TRAV8-3, TRAJ48)
CCGCNFGNEKLTF

SEQ ID NO: 426806 - protein, 12 aa, Homo sapiens
  CDR3 for beta chain variable domain of TCR clone 213403 (TRBV7-2, TRBJ2-5)
CASSQYQEPQYF

SEQ ID NO: 426807 - protein, 14 aa, Homo sapiens
  CDR3 for alpha chain variable domain of TCR clone 213404 (TRAV9-2, TRAJ39)
CALYIYNAGNMFTF

SEQ ID NO: 426808 - protein, 15 aa, Homo sapiens
  CDR3 for beta chain variable domain of TCR clone 213404 (TRBV2, TRBJ2-7)
CASSEGLARSYEQYF

SEQ ID NO: 426809 - protein, 13 aa, Homo sapiens
  CDR3 for alpha chain variable domain of TCR clone 213405 (TRAV21, TRAJ27)
CAARPGHAGKSTF

SEQ ID NO: 426810 - protein, 12 aa, Homo sapiens
  CDR3 for beta chain variable domain of TCR clone 213405 (TRBV7-8, TRBJ2-7)
CASSLGDREQYF

SEQ ID NO: 426811 - protein, 13 aa, Homo sapiens
  CDR3 for alpha chain variable domain of TCR clone 213406 (TRAV12-1, TRAJ49)
CVVNTNTGNQFYF

SEQ ID NO: 426812 - protein, 14 aa, Homo sapiens
  CDR3 for beta chain variable domain of TCR clone 213406 (TRBV25-1, TRBJ1-1)
CASTHLGGNTEAFF

SEQ ID NO: 426813 - protein, 13 aa, Homo sapiens
  CDR3 for alpha chain variable domain of TCR clone 213407 (TRAV13-2, TRAJ13)
CAERPGGYQKVTF

SEQ ID NO: 426814 - protein, 16 aa, Homo sapiens
  CDR3 for beta chain variable domain of TCR clone 213407 (TRBV12-4, TRBJ1-5)
CASSRPVGGSNQPQHF

SEQ ID NO: 426815 - protein, 14 aa, Homo sapiens
  CDR3 for alpha chain variable domain of TCR clone 213408 (TRAV26-1, TRAJ45)
CIEVTGGGADGLTF

SEQ ID NO: 426816 - protein, 13 aa, Homo sapiens
  CDR3 for beta chain variable domain of TCR clone 213408 (TRBV7-6, TRBJ1-2)
CASSLVADYGETF

SEQ ID NO: 426817 - protein, 14 aa, Homo sapiens
  CDR3 for alpha chain variable domain of TCR clone 213409 (TRAV23/DV6, TRAJ10)
CAASIGTHGRRKQN

SEQ ID NO: 426818 - protein, 15 aa, Homo sapiens
  CDR3 for beta chain variable domain of TCR clone 213409 (TRBV20-1, TRBJ2-7)
CSARVPAAYSYEQYF

SEQ ID NO: 426819 - protein, 13 aa, Homo sapiens
  CDR3 for alpha chain variable domain of TCR clone 213410 (TRAV1-1, TRAJ23)
CAVVANQGGKLIF

SEQ ID NO: 426820 - protein, 16 aa, Homo sapiens
  CDR3 for beta chain variable domain of TCR clone 213410 (TRBV5-5, TRBJ1-2)
CSSSPTWGRGLYGYTF

SEQ ID NO: 426821 - protein, 10 aa, Homo sapiens
  CDR3 for alpha chain variable domain of TCR clone 213411 (TRAV13-1, TRAJ8)
CAAPFQKLVF

SEQ ID NO: 426822 - protein, 20 aa, Homo sapiens
  CDR3 for beta chain variable domain of TCR clone 213411 (TRBV7-8, TRBJ2-2)
CASSHLFPGPTIHITGELFF

SEQ ID NO: 426823 - protein, 15 aa, Homo sapiens
  CDR3 for alpha chain variable domain of TCR clone 213412 (TRAV3, TRAJ20)
CAVRDIRLSDYKLRF

SEQ ID NO: 426824 - protein, 15 aa, Homo sapiens
  CDR3 for beta chain variable domain of TCR clone 213412 (TRBV7-9, TRBJ1-6)
CASSSPGRGNSPLHF

SEQ ID NO: 426825 - protein, 17 aa, Homo sapiens
  CDR3 for alpha chain variable domain of TCR clone 213413 (TRAV26-1, TRAJ11)
CIVRVGQSNSGYITLTF

SEQ ID NO: 426826 - protein, 11 aa, Homo sapiens
  CDR3 for beta chain variable domain of TCR clone 213413 (TRBV12-4, TRBJ2-3)
CASTATDTQYF

SEQ ID NO: 426827 - protein, 13 aa, Homo sapiens
  CDR3 for alpha chain variable domain of TCR clone 213414 (TRAV29/DV5, TRAJ47)
CAASAEYGNKLFF

SEQ ID NO: 426828 - protein, 15 aa, Homo sapiens
  CDR3 for beta chain variable domain of TCR clone 213414 (TRBV7-9, TRBJ1-4)
CASTARTGGNEKLFF

SEQ ID NO: 426829 - protein, 14 aa, Homo sapiens
  CDR3 for alpha chain variable domain of TCR clone 213415 (TRAV1-2, TRAJ16)
CAVNRFSDGQKLLF

SEQ ID NO: 426830 - protein, 12 aa, Homo sapiens
  CDR3 for beta chain variable domain of TCR clone 213415 (TRBV10-2, TRBJ2-5)
CASSGGGKTQYF

SEQ ID NO: 426831 - protein, 16 aa, Homo sapiens
  CDR3 for alpha chain variable domain of TCR clone 213416 (TRAV3, TRAJ10)
CAVRDMRAGGGNKLTF

SEQ ID NO: 426832 - protein, 15 aa, Homo sapiens
  CDR3 for beta chain variable domain of TCR clone 213416 (TRBV20-1, TRBJ2-1)
CSAISAGSSYNEQFF

SEQ ID NO: 426833 - protein, 12 aa, Homo sapiens
  CDR3 for alpha chain variable domain of TCR clone 213417 (TRAV30, TRAJ43)
CGTEERGNDMRF

SEQ ID NO: 426834 - protein, 15 aa, Homo sapiens
  CDR3 for beta chain variable domain of TCR clone 213417 (TRBV10-2, TRBJ2-6)
CASSEQGTGANDLTF

SEQ ID NO: 426835 - protein, 16 aa, Homo sapiens
  CDR3 for alpha chain variable domain of TCR clone 213418 (TRAV35, TRAJ28)
CAGQRYSGAGSYQLTF

SEQ ID NO: 426836 - protein, 15 aa, Homo sapiens
  CDR3 for beta chain variable domain of TCR clone 213418 (TRBV7-9, TRBJ1-1)
CASSLLEQGGTEAFF

SEQ ID NO: 426837 - protein, 12 aa, Homo sapiens
  CDR3 for alpha chain variable domain of TCR clone 213419 (TRAV4, TRAJ26)
CLVGDYGQNVVF

SEQ ID NO: 426838 - protein, 16 aa, Homo sapiens
  CDR3 for beta chain variable domain of TCR clone 213419 (TRBV7-2, TRBJ1-2)
CASSSNQDRRGHGYTV

SEQ ID NO: 426839 - protein, 14 aa, Homo sapiens
  CDR3 for alpha chain variable domain of TCR clone 213420 (TRAV26-1, TRAJ34)
RIVRESYNTDKLIF

SEQ ID NO: 426840 - protein, 12 aa, Homo sapiens
  CDR3 for beta chain variable domain of TCR clone 213420 (TRBV19, TRBJ2-1)
CHLQGVYNEQFF

SEQ ID NO: 426841 - protein, 13 aa, Homo sapiens
  CDR3 for alpha chain variable domain of TCR clone 213421 (TRAV12-2, TRAJ54)
CAVNRRGAQKLVF

SEQ ID NO: 426842 - protein, 15 aa, Homo sapiens
  CDR3 for beta chain variable domain of TCR clone 213421 (TRBV29-1, TRBJ2-5)
CSVEGLAVNQETQYF

SEQ ID NO: 426843 - protein, 10 aa, Homo sapiens
  CDR3 for alpha chain variable domain of TCR clone 213422 (TRAV12-2, TRAJ43)
CAVKVLSIRF

SEQ ID NO: 426844 - protein, 14 aa, Homo sapiens
  CDR3 for beta chain variable domain of TCR clone 213422 (TRBV11-2, TRBJ2-7)
CASSLGNSLYEQYF

SEQ ID NO: 426845 - protein, 13 aa, Homo sapiens
  CDR3 for alpha chain variable domain of TCR clone 213423 (TRAV14/DV4, TRAJ42)
CAMRELWRKPRKY

SEQ ID NO: 426846 - protein, 15 aa, Homo sapiens
  CDR3 for beta chain variable domain of TCR clone 213423 (TRBV2, TRBJ2-7)
CASSEGLARSYEQYF

SEQ ID NO: 426847 - protein, 14 aa, Homo sapiens
  CDR3 for alpha chain variable domain of TCR clone 213424 (TRAV35, TRAJ22)
CAGLRPGSARQLTF

SEQ ID NO: 426848 - protein, 15 aa, Homo sapiens
  CDR3 for beta chain variable domain of TCR clone 213424 (TRBV12-3, TRBJ2-5)
CAISPPTGLQETQYF

SEQ ID NO: 426849 - protein, 14 aa, Homo sapiens
  CDR3 for alpha chain variable domain of TCR clone 213425 (TRAV12-2, TRAJ13)
CAVKKTGGYQKVTF

SEQ ID NO: 426850 - protein, 16 aa, Homo sapiens
  CDR3 for beta chain variable domain of TCR clone 213425 (TRBV12-5, TRBJ2-7)
CASGSQGALTSSTSGR

SEQ ID NO: 426851 - protein, 12 aa, Homo sapiens
  CDR3 for alpha chain variable domain of TCR clone 213426 (TRAV16, TRAJ10)
CSRTGGGNKLTF

SEQ ID NO: 426852 - protein, 15 aa, Homo sapiens
  CDR3 for beta chain variable domain of TCR clone 213426 (TRBV6-3, TRBJ2-7)
GASSSPRTVFYEQYF

SEQ ID NO: 426853 - protein, 13 aa, Homo sapiens
  CDR3 for alpha chain variable domain of TCR clone 213427 (TRAV12-1, TRAJ42)
CGGVGGSQGNLIF

SEQ ID NO: 426854 - protein, 13 aa, Homo sapiens
  CDR3 for beta chain variable domain of TCR clone 213427 (TRBV20-1, TRBJ1-1)
CSARGGGNTEAFF

SEQ ID NO: 426855 - protein, 14 aa, Homo sapiens
  CDR3 for alpha chain variable domain of TCR clone 213428 (TRAV13-1, TRAJ40)
CAASMTSGTYKYIF

SEQ ID NO: 426856 - protein, 15 aa, Homo sapiens
  CDR3 for beta chain variable domain of TCR clone 213428 (TRBV7-3, TRBJ2-1)
CANSPTGGGEVEQFL

SEQ ID NO: 426857 - protein, 14 aa, Homo sapiens
  CDR3 for alpha chain variable domain of TCR clone 213429 (TRAV21, TRAJ15)
CAASLNQAGTALIF

SEQ ID NO: 426858 - protein, 14 aa, Homo sapiens
  CDR3 for beta chain variable domain of TCR clone 213429 (TRBV4-2, TRBJ2-2)
CASSQVVGTGELFF

SEQ ID NO: 426859 - protein, 11 aa, Homo sapiens
  CDR3 for alpha chain variable domain of TCR clone 213430 (TRAV13-2, TRAJ39)
CAENAGNMLTF

SEQ ID NO: 426860 - protein, 15 aa, Homo sapiens
  CDR3 for beta chain variable domain of TCR clone 213430 (TRBV25-1, TRBJ1-4)
CASSKRIATNEKLFF

SEQ ID NO: 426861 - protein, 13 aa, Homo sapiens
  CDR3 for alpha chain variable domain of TCR clone 213431 (TRAV8-4, TRAJ48)
CAVSLFGNEKLTF

SEQ ID NO: 426862 - protein, 13 aa, Homo sapiens
  CDR3 for beta chain variable domain of TCR clone 213431 (TRBV7-3, TRBJ1-1)
CASSQDWGAEAFF

SEQ ID NO: 426863 - protein, 16 aa, Homo sapiens
  CDR3 for alpha chain variable domain of TCR clone 213432 (TRAV3, TRAJ37)
CAVRPHGSSNTGKLIF

SEQ ID NO: 426864 - protein, 12 aa, Homo sapiens
  CDR3 for beta chain variable domain of TCR clone 213432 (TRBV11-2, TRBJ2-1)
CASSPGNNEQFF

SEQ ID NO: 426865 - protein, 17 aa, Homo sapiens
  CDR3 for alpha chain variable domain of TCR clone 213433 (TRAV12-1, TRAJ32)
CVVNMQGYGGATNKLIF

SEQ ID NO: 426866 - protein, 13 aa, Homo sapiens
  CDR3 for beta chain variable domain of TCR clone 213433 (TRBV19, TRBJ2-7)
CASSPRQSYEQYF

SEQ ID NO: 426867 - protein, 14 aa, Homo sapiens
  CDR3 for alpha chain variable domain of TCR clone 213434 (TRAV35, TRAJ42)
CAGRHGGSQGNLIF

SEQ ID NO: 426868 - protein, 15 aa, Homo sapiens
  CDR3 for beta chain variable domain of TCR clone 213434 (TRBV7-9, TRBJ2-7)
CASSLGWGRANEQYF

SEQ ID NO: 426869 - protein, 14 aa, Homo sapiens
  CDR3 for alpha chain variable domain of TCR clone 213435 (TRAV12-3, TRAJ58)
CAMSTETSGTRLTC

SEQ ID NO: 426870 - protein, 15 aa, Homo sapiens
  CDR3 for beta chain variable domain of TCR clone 213435 (TRBV11-3, TRBJ1-1)
CASSLGGPGDTEAFF

SEQ ID NO: 426871 - protein, 14 aa, Homo sapiens
  CDR3 for alpha chain variable domain of TCR clone 213436 (TRAV29/DV5, TRAJ34)
CAASASGNTDKLIF

SEQ ID NO: 426872 - protein, 16 aa, Homo sapiens
  CDR3 for beta chain variable domain of TCR clone 213436 (TRBV12-4, TRBJ2-5)
CASSFFVRGRQETQYF

SEQ ID NO: 426873 - protein, 14 aa, Homo sapiens
  CDR3 for alpha chain variable domain of TCR clone 213437 (TRAV12-3, TRAJ10)
SHLPLTGGGNKLTF

SEQ ID NO: 426874 - protein, 13 aa, Homo sapiens
  CDR3 for beta chain variable domain of TCR clone 213437 (TRBV10-3, TRBJ2-7)
CAIRAGGPHEQYF

SEQ ID NO: 426875 - protein, 12 aa, Homo sapiens
  CDR3 for alpha chain variable domain of TCR clone 213438 (TRAV36/DV7, TRAJ39)
CWTNNAGNMITF

SEQ ID NO: 426876 - protein, 14 aa, Homo sapiens
  CDR3 for beta chain variable domain of TCR clone 213438 (TRBV7-2, TRBJ2-2)
CASSSDGHTGELFF

SEQ ID NO: 426877 - protein, 16 aa, Homo sapiens
  CDR3 for alpha chain variable domain of TCR clone 213439 (TRAV13-1, TRAJ13)
CTAFFLGVTRKLPLEL

SEQ ID NO: 426878 - protein, 15 aa, Homo sapiens
  CDR3 for beta chain variable domain of TCR clone 213439 (TRBV7-8, TRBJ2-1)
CASSLADSIYNEQFF

SEQ ID NO: 426879 - protein, 15 aa, Homo sapiens
  CDR3 for alpha chain variable domain of TCR clone 213440 (TRAV17, TRAJ56)
CATEPFTGANSKLTF

SEQ ID NO: 426880 - protein, 15 aa, Homo sapiens
  CDR3 for beta chain variable domain of TCR clone 213440 (TRBV28, TRBJ1-5)
CASSRTGGYVQPQHV

SEQ ID NO: 426881 - protein, 13 aa, Homo sapiens
  CDR3 for alpha chain variable domain of TCR clone 213441 (TRAV1-2, TRAJ9)
CAALNTGGFKTIF

SEQ ID NO: 426882 - protein, 15 aa, Homo sapiens
  CDR3 for beta chain variable domain of TCR clone 213441 (TRBV28, TRBJ2-4)
CAAGSGTLLMGIQYF

SEQ ID NO: 426883 - protein, 16 aa, Homo sapiens
  CDR3 for alpha chain variable domain of TCR clone 213442 (TRAV23/DV6, TRAJ58)
CSKITKGETSGSRLTF

SEQ ID NO: 426884 - protein, 12 aa, Homo sapiens
  CDR3 for beta chain variable domain of TCR clone 213442 (TRBV24-1, TRBJ1-1)
CATSDSDRGAFF

SEQ ID NO: 426885 - protein, 13 aa, Homo sapiens
  CDR3 for alpha chain variable domain of TCR clone 213443 (TRAV12-3, TRAJ9)
CAMRNTGGFKTIF

SEQ ID NO: 426886 - protein, 14 aa, Homo sapiens
  CDR3 for beta chain variable domain of TCR clone 213443 (TRBV12-5, TRBJ2-5)
CASGSRTHQETQYF

SEQ ID NO: 426887 - protein, 16 aa, Homo sapiens
  CDR3 for alpha chain variable domain of TCR clone 213444 (TRAV3, TRAJ10)
CAVRDMRAGGGNKLTF

SEQ ID NO: 426888 - protein, 19 aa, Homo sapiens
  CDR3 for beta chain variable domain of TCR clone 213444 (TRBV6-3, TRBJ1-2)
CASRYSKGRTGPPNYGYTF

SEQ ID NO: 426889 - protein, 16 aa, Homo sapiens
  CDR3 for alpha chain variable domain of TCR clone 213445 (TRAV30, TRAJ24)
CGTEIVDADSWGKFQF

SEQ ID NO: 426890 - protein, 13 aa, Homo sapiens
  CDR3 for beta chain variable domain of TCR clone 213445 (TRBV18, TRBJ1-1)
CASSPGRNTEDFF

SEQ ID NO: 426891 - protein, 11 aa, Homo sapiens
  CDR3 for alpha chain variable domain of TCR clone 213446 (TRAV2, TRAJ23)
CAVETRGKLIF

SEQ ID NO: 426892 - protein, 14 aa, Homo sapiens
  CDR3 for beta chain variable domain of TCR clone 213446 (TRBV11-1, TRBJ2-7)
CASSFRQGSYEQYF

SEQ ID NO: 426893 - protein, 13 aa, Homo sapiens
  CDR3 for alpha chain variable domain of TCR clone 213447 (TRAV3, TRAJ29)
CAVRDWGNTPLVF

SEQ ID NO: 426894 - protein, 15 aa, Homo sapiens
  CDR3 for beta chain variable domain of TCR clone 213447 (TRBV4-1, TRBJ2-5)
CASSQWDLYQETQYF

SEQ ID NO: 426895 - protein, 11 aa, Homo sapiens
  CDR3 for alpha chain variable domain of TCR clone 213448 (TRAV13-1, TRAJ39)
CASHAGNMLTF

SEQ ID NO: 426896 - protein, 13 aa, Homo sapiens
  CDR3 for beta chain variable domain of TCR clone 213448 (TRBV12-5, TRBJ2-3)
CASGDRQSDTQYL

SEQ ID NO: 426897 - protein, 13 aa, Homo sapiens
  CDR3 for alpha chain variable domain of TCR clone 213449 (TRAV17, TRAJ5)
CSPMDTGRRALPF

SEQ ID NO: 426898 - protein, 14 aa, Homo sapiens
  CDR3 for beta chain variable domain of TCR clone 213449 (TRBV29-1, TRBJ2-7)
CSVDQRQASYEQYF

SEQ ID NO: 426899 - protein, 14 aa, Homo sapiens
  CDR3 for alpha chain variable domain of TCR clone 213450 (TRAV8-3, TRAJ6)
CAVGSSGGSYIPTF

SEQ ID NO: 426900 - protein, 16 aa, Homo sapiens
  CDR3 for beta chain variable domain of TCR clone 213450 (TRBV12-4, TRBJ2-5)
CASSFFVRGRQETQYF

SEQ ID NO: 426901 - protein, 14 aa, Homo sapiens
  CDR3 for alpha chain variable domain of TCR clone 213451 (TRAV17, TRAJ6)
CATDERRGRYIPTF

SEQ ID NO: 426902 - protein, 13 aa, Homo sapiens
  CDR3 for beta chain variable domain of TCR clone 213451 (TRBV27, TRBJ2-1)
CASSLGRIWGQFF

SEQ ID NO: 426903 - protein, 14 aa, Homo sapiens
  CDR3 for alpha chain variable domain of TCR clone 213452 (TRAV12-3, TRAJ10)
SHLPLTGGGNKLTF

SEQ ID NO: 426904 - protein, 15 aa, Homo sapiens
  CDR3 for beta chain variable domain of TCR clone 213452 (TRBV7-3, TRBJ2-2)
CASSEPGQGTGELFF

SEQ ID NO: 426905 - protein, 12 aa, Homo sapiens
  CDR3 for alpha chain variable domain of TCR clone 213453 (TRAV12-1, TRAJ40)
CVVYSGTYKYIF

SEQ ID NO: 426906 - protein, 13 aa, Homo sapiens
  CDR3 for beta chain variable domain of TCR clone 213453 (TRBV5-7, TRBJ1-1)
CASSLFQNTEAFF

SEQ ID NO: 426907 - protein, 14 aa, Homo sapiens
  CDR3 for alpha chain variable domain of TCR clone 213454 (TRAV8-1, TRAJ10)
CAVIFTGGGNKLTF

SEQ ID NO: 426908 - protein, 14 aa, Homo sapiens
  CDR3 for beta chain variable domain of TCR clone 213454 (TRBV7-2, TRBJ2-7)
CASSPKTSFYEQYF

SEQ ID NO: 426909 - protein, 16 aa, Homo sapiens
  CDR3 for alpha chain variable domain of TCR clone 213455 (TRAV1-2, TRAJ10)
CAVRGVLTGGGNKLTF

SEQ ID NO: 426910 - protein, 12 aa, Homo sapiens
  CDR3 for beta chain variable domain of TCR clone 213455 (TRBV7-8, TRBJ2-7)
WASSLGDREQYF

SEQ ID NO: 426911 - protein, 14 aa, Homo sapiens
  CDR3 for alpha chain variable domain of TCR clone 213456 (TRAV26-1, TRAJ45)
CIEVTGGCADGLTF

SEQ ID NO: 426912 - protein, 15 aa, Homo sapiens
  CDR3 for beta chain variable domain of TCR clone 213456 (TRBV6-5, TRBJ2-1)
CASSYDAGAGNEQFF

SEQ ID NO: 426913 - protein, 23 aa, Homo sapiens
  CDR3 for alpha chain variable domain of TCR clone 213457 (TRAV4, TRAJ26)
IPADRKSSTLSLPRVYYGQNFVF

SEQ ID NO: 426914 - protein, 16 aa, Homo sapiens
  CDR3 for beta chain variable domain of TCR clone 213457 (TRBV7-2, TRBJ1-2)
CASSSNQDRRGRGYTF

SEQ ID NO: 426915 - protein, 16 aa, Homo sapiens
  CDR3 for alpha chain variable domain of TCR clone 213458 (TRAV26-1, TRAJ41)
CIVRVAVANSGYALNF

SEQ ID NO: 426916 - protein, 12 aa, Homo sapiens
  CDR3 for beta chain variable domain of TCR clone 213458 (TRBV6-3, TRBJ2-7)
CASSLTPYEQYF

SEQ ID NO: 426917 - protein, 16 aa, Homo sapiens
  CDR3 for alpha chain variable domain of TCR clone 213459 (TRAV3, TRAJ37)
CAVRPHGSGNTGKLIF

SEQ ID NO: 426918 - protein, 15 aa, Homo sapiens
  CDR3 for beta chain variable domain of TCR clone 213459 (TRBV28, TRBJ1-3)
CASSMGWASGNTIYF

SEQ ID NO: 426919 - protein, 12 aa, Homo sapiens
  CDR3 for alpha chain variable domain of TCR clone 213460 (TRAV2, TRAJ33)
CAFMDSNYQLFW

SEQ ID NO: 426920 - protein, 16 aa, Homo sapiens
  CDR3 for beta chain variable domain of TCR clone 213460 (TRBV2, TRBJ2-7)
CASSEPWTGPSYEQYF

SEQ ID NO: 426921 - protein, 15 aa, Homo sapiens
  CDR3 for alpha chain variable domain of TCR clone 213461 (TRAV21, TRAJ52)
CAVRGGGASYGKLTF

SEQ ID NO: 426922 - protein, 15 aa, Homo sapiens
  CDR3 for beta chain variable domain of TCR clone 213461 (TRBV18, TRBJ1-5)
CASSPSDRSNQPQHF

SEQ ID NO: 426923 - protein, 14 aa, Homo sapiens
  CDR3 for alpha chain variable domain of TCR clone 213462 (TRAV1-2, TRAJ16)
CAVNRFSDGPKLLF

SEQ ID NO: 426924 - protein, 13 aa, Homo sapiens
  CDR3 for beta chain variable domain of TCR clone 213462 (TRBV18, TRBJ2-5)
CASSPAGKETQYF

SEQ ID NO: 426925 - protein, 11 aa, Homo sapiens
  CDR3 for alpha chain variable domain of TCR clone 213463 (TRAV12-2, TRAJ29)
CAVTLRSPLVF

SEQ ID NO: 426926 - protein, 16 aa, Homo sapiens
  CDR3 for beta chain variable domain of TCR clone 213463 (TRBV19, TRBJ1-5)
CASSIVRGGPRQPQHF

SEQ ID NO: 426927 - protein, 18 aa, Homo sapiens
  CDR3 for alpha chain variable domain of TCR clone 213464 (TRAV38-2/DV8, TRAJ42)
CAYRSADLTVGSQGNLIF

SEQ ID NO: 426928 - protein, 12 aa, Homo sapiens
  CDR3 for beta chain variable domain of TCR clone 213464 (TRBV11-2, TRBJ2-2)
CASSLGGGELFF

SEQ ID NO: 426929 - protein, 16 aa, Homo sapiens
  CDR3 for alpha chain variable domain of TCR clone 213465 (TRAV20, TRAJ53)
CAVQAESGGSNYKLTF

SEQ ID NO: 426930 - protein, 16 aa, Homo sapiens
  CDR3 for beta chain variable domain of TCR clone 213465 (TRBV7-3, TRBJ2-2)
CASSLKRGTSSGELFF

SEQ ID NO: 426931 - protein, 14 aa, Homo sapiens
  CDR3 for alpha chain variable domain of TCR clone 213466 (TRAV12-3, TRAJ10)
SHLPLTGGGNKLTF

SEQ ID NO: 426932 - protein, 17 aa, Homo sapiens
  CDR3 for beta chain variable domain of TCR clone 213466 (TRBV6-1, TRBJ1-3)
CASVPACKGGGGNTIYF

SEQ ID NO: 426933 - protein, 11 aa, Homo sapiens
  CDR3 for alpha chain variable domain of TCR clone 213467 (TRAV3, TRAJ21)
CAVGNFNKFYF

SEQ ID NO: 426934 - protein, 14 aa, Homo sapiens
  CDR3 for beta chain variable domain of TCR clone 213467 (TRBV7-2, TRBJ2-2)
CASSSDGHTGELFF

SEQ ID NO: 426935 - protein, 13 aa, Homo sapiens
  CDR3 for alpha chain variable domain of TCR clone 213468 (TRAV13-2, TRAJ48)
CAEMDFGNEKLTF

SEQ ID NO: 426936 - protein, 15 aa, Homo sapiens
  CDR3 for beta chain variable domain of TCR clone 213468 (TRBV18, TRBJ1-5)
CASSPSDRSNQPQHF

SEQ ID NO: 426937 - protein, 13 aa, Homo sapiens
  CDR3 for alpha chain variable domain of TCR clone 213469 (TRAV8-2, TRAJ47)
CVVSEREGNKLVV

SEQ ID NO: 426938 - protein, 15 aa, Homo sapiens
  CDR3 for beta chain variable domain of TCR clone 213469 (TRBV6-3, TRBJ2-7)
CASSSPGTVFYEQYF

SEQ ID NO: 426939 - protein, 16 aa, Homo sapiens
  CDR3 for alpha chain variable domain of TCR clone 213470 (TRAV3, TRAJ5)
CAERNLMDTGRRALTF

SEQ ID NO: 426940 - protein, 16 aa, Homo sapiens
  CDR3 for beta chain variable domain of TCR clone 213470 (TRBV4-2, TRBJ2-7)
CASSQEGLANSYEQYF

SEQ ID NO: 426941 - protein, 14 aa, Homo sapiens
  CDR3 for alpha chain variable domain of TCR clone 213471 (TRAV1-2, TRAJ16)
CAVNRFSDGQKLLF

SEQ ID NO: 426942 - protein, 14 aa, Homo sapiens
  CDR3 for beta chain variable domain of TCR clone 213471 (TRBV7-9, TRBJ2-3)
CASSLEDGTDMQYF

SEQ ID NO: 426943 - protein, 13 aa, Homo sapiens
  CDR3 for alpha chain variable domain of TCR clone 213472 (TRAV8-3, TRAJ43)
CAVGPYNNNDMRF

SEQ ID NO: 426944 - protein, 16 aa, Homo sapiens
  CDR3 for beta chain variable domain of TCR clone 213472 (TRBV7-2, TRBJ2-5)
CASSPFPTGGEETQYF

SEQ ID NO: 426945 - protein, 17 aa, Homo sapiens
  CDR3 for alpha chain variable domain of TCR clone 213473 (TRAV26-1, TRAJ37)
CIVRVITVSSNTGKLIF

SEQ ID NO: 426946 - protein, 15 aa, Homo sapiens
  CDR3 for beta chain variable domain of TCR clone 213473 (TRBV11-3, TRBJ2-3)
CASSFRAAFPDTQYF

SEQ ID NO: 426947 - protein, 11 aa, Homo sapiens
  CDR3 for alpha chain variable domain of TCR clone 213474 (TRAV21, TRAJ34)
CAVTNTDKLIF

SEQ ID NO: 426948 - protein, 12 aa, Homo sapiens
  CDR3 for beta chain variable domain of TCR clone 213474 (TRBV24-1, TRBJ2-7)
CATGTGTYEQYF

SEQ ID NO: 426949 - protein, 16 aa, Homo sapiens
  CDR3 for alpha chain variable domain of TCR clone 213475 (TRAV16, TRAJ4)
CALSRMFSGGYNKLIF

SEQ ID NO: 426950 - protein, 19 aa, Homo sapiens
  CDR3 for beta chain variable domain of TCR clone 213475 (TRBV25-1, TRBJ2-2)
CAILVYRVDRGRKTGELFF

SEQ ID NO: 426951 - protein, 15 aa, Homo sapiens
  CDR3 for alpha chain variable domain of TCR clone 213476 (TRAV3, TRAJ5)
CAVRPLGHGQESAYF

SEQ ID NO: 426952 - protein, 16 aa, Homo sapiens
  CDR3 for beta chain variable domain of TCR clone 213476 (TRBV3-1, TRBJ2-7)
CASSQGVGKGSSEQYF

SEQ ID NO: 426953 - protein, 11 aa, Homo sapiens
  CDR3 for alpha chain variable domain of TCR clone 213477 (TRAV21, TRAJ39)
LLMNAGNMLTF

SEQ ID NO: 426954 - protein, 16 aa, Homo sapiens
  CDR3 for beta chain variable domain of TCR clone 213477 (TRBV9, TRBJ2-7)
CASSVGLGGGTYEQYF

SEQ ID NO: 426955 - protein, 15 aa, Homo sapiens
  CDR3 for alpha chain variable domain of TCR clone 213478 (TRAV12-1, TRAJ44)
CMVFVNTGTASKLTF

SEQ ID NO: 426956 - protein, 17 aa, Homo sapiens
  CDR3 for beta chain variable domain of TCR clone 213478 (TRBV7-8, TRBJ2-6)
CASSAGTGGAGANVLTF

SEQ ID NO: 426957 - protein, 12 aa, Homo sapiens
  CDR3 for alpha chain variable domain of TCR clone 213479 (TRAV8-6, TRAJ43)
CAVSHNNNDMRF

SEQ ID NO: 426958 - protein, 12 aa, Homo sapiens
  CDR3 for beta chain variable domain of TCR clone 213479 (TRBV11-2, TRBJ2-2)
CASSLGGGELFF

SEQ ID NO: 426959 - protein, 15 aa, Homo sapiens
  CDR3 for alpha chain variable domain of TCR clone 213480 (TRAV2, TRAJ24)
CALEVLTDSWGKFQF

SEQ ID NO: 426960 - protein, 14 aa, Homo sapiens
  CDR3 for beta chain variable domain of TCR clone 213480 (TRBV19, TRBJ2-1)
CASSMGSGRRSSSS

SEQ ID NO: 426961 - protein, 15 aa, Homo sapiens
  CDR3 for alpha chain variable domain of TCR clone 213481 (TRAV8-6, TRAJ23)
CAVRLINNQGGKLIF

SEQ ID NO: 426962 - protein, 13 aa, Homo sapiens
  CDR3 for beta chain variable domain of TCR clone 213481 (TRBV11-2, TRBJ2-2)
CASSLQNTGELFF

SEQ ID NO: 426963 - protein, 15 aa, Homo sapiens
  CDR3 for alpha chain variable domain of TCR clone 213482 (TRAV12-2, TRAJ53)
CAVNGGGGSNYKLKF

SEQ ID NO: 426964 - protein, 17 aa, Homo sapiens
  CDR3 for beta chain variable domain of TCR clone 213482 (TRBV11-2, TRBJ2-1)
CASSLYPPGVEYNEQFF

SEQ ID NO: 426965 - protein, 14 aa, Homo sapiens
  CDR3 for alpha chain variable domain of TCR clone 213483 (TRAV35, TRAJ22)
CAGLRPGFTRQLTF

SEQ ID NO: 426966 - protein, 15 aa, Homo sapiens
  CDR3 for beta chain variable domain of TCR clone 213483 (TRBV12-4, TRBJ2-5)
CASSPPTGLQETQYF

SEQ ID NO: 426967 - protein, 15 aa, Homo sapiens
  CDR3 for alpha chain variable domain of TCR clone 213484 (TRAV4, TRAJ26)
CLVGGLDNYGQNFGF

SEQ ID NO: 426968 - protein, 13 aa, Homo sapiens
  CDR3 for beta chain variable domain of TCR clone 213484 (TRBV20-1, TRBJ2-5)
CSASLTGRETQYF

SEQ ID NO: 426969 - protein, 17 aa, Homo sapiens
  CDR3 for alpha chain variable domain of TCR clone 213485 (TRAV26-1, TRAJ53)
CIVRVDDRGGSNYKLTF

SEQ ID NO: 426970 - protein, 15 aa, Homo sapiens
  CDR3 for beta chain variable domain of TCR clone 213485 (TRBV7-9, TRBJ1-4)
CAGSRTGGFDEKLFF

SEQ ID NO: 426971 - protein, 15 aa, Homo sapiens
  CDR3 for alpha chain variable domain of TCR clone 213486 (TRAV27, TRAJ38)
CAARRNAGNNRSLIW

SEQ ID NO: 426972 - protein, 13 aa, Homo sapiens
  CDR3 for beta chain variable domain of TCR clone 213486 (TRBV12-5, TRBJ2-3)
CASGDRQSDTQYF

SEQ ID NO: 426973 - protein, 15 aa, Homo sapiens
  CDR3 for alpha chain variable domain of TCR clone 213487 (TRAV3, TRAJ22)
CAVRDRGGSARTLTF

SEQ ID NO: 426974 - protein, 15 aa, Homo sapiens
  CDR3 for beta chain variable domain of TCR clone 213487 (TRBV7-9, TRBJ1-1)
CASSLLEQGGTEAFF

SEQ ID NO: 426975 - protein, 16 aa, Homo sapiens
  CDR3 for alpha chain variable domain of TCR clone 213488 (TRAV3, TRAJ37)
CAVRGKGSGNTGKLIF

SEQ ID NO: 426976 - protein, 13 aa, Homo sapiens
  CDR3 for beta chain variable domain of TCR clone 213488 (TRBV14, TRBJ2-7)
SASSQDRRYEQYF

SEQ ID NO: 426977 - protein, 11 aa, Homo sapiens
  CDR3 for alpha chain variable domain of TCR clone 213489 (TRAV17, TRAJ36)
CAPTGANNLFF

SEQ ID NO: 426978 - protein, 15 aa, Homo sapiens
  CDR3 for beta chain variable domain of TCR clone 213489 (TRBV19, TRBJ1-2)
CASSVGQVLNYGYTF

SEQ ID NO: 426979 - protein, 10 aa, Homo sapiens
  CDR3 for alpha chain variable domain of TCR clone 213490 (TRAV1-2, TRAJ18)
CDVRGEAQPW

SEQ ID NO: 426980 - protein, 15 aa, Homo sapiens
  CDR3 for beta chain variable domain of TCR clone 213490 (TRBV20-1, TRBJ2-1)
CSAEGGLLAGDEQFF

SEQ ID NO: 426981 - protein, 15 aa, Homo sapiens
  CDR3 for alpha chain variable domain of TCR clone 213491 (TRAV26-1, TRAJ12)
IASSELMDSSYKLIF

SEQ ID NO: 426982 - protein, 11 aa, Homo sapiens
  CDR3 for beta chain variable domain of TCR clone 213491 (TRBV7-9, TRBJ2-3)
CASSPPDTQYV

SEQ ID NO: 426983 - protein, 13 aa, Homo sapiens
  CDR3 for alpha chain variable domain of TCR clone 213492 (TRAV12-1, TRAJ16)
CVVNTRNGQKLLF

SEQ ID NO: 426984 - protein, 15 aa, Homo sapiens
  CDR3 for beta chain variable domain of TCR clone 213492 (TRBV2, TRBJ2-2)
CASSRETVGTGELFF

SEQ ID NO: 426985 - protein, 14 aa, Homo sapiens
  CDR3 for alpha chain variable domain of TCR clone 213493 (TRAV12-1, TRAJ17)
CVVNYKAAGNKLTF

SEQ ID NO: 426986 - protein, 14 aa, Homo sapiens
  CDR3 for beta chain variable domain of TCR clone 213493 (TRBV20-1, TRBJ1-1)
CSAQTRIGGTEAFC

SEQ ID NO: 426987 - protein, 14 aa, Homo sapiens
  CDR3 for alpha chain variable domain of TCR clone 213494 (TRAV12-2, TRAJ45)
CAVYSGGGADGLTF

SEQ ID NO: 426988 - protein, 12 aa, Homo sapiens
  CDR3 for beta chain variable domain of TCR clone 213494 (TRBV16, TRBJ2-2)
CASSQSVGELFF

SEQ ID NO: 426989 - protein, 13 aa, Homo sapiens
  CDR3 for alpha chain variable domain of TCR clone 213495 (TRAV22, TRAJ29)
CAVGGSGNTPLVF

SEQ ID NO: 426990 - protein, 17 aa, Homo sapiens
  CDR3 for beta chain variable domain of TCR clone 213495 (TRBV7-8, TRBJ2-6)
CASSAGTGGAGANVLTF

SEQ ID NO: 426991 - protein, 13 aa, Homo sapiens
  CDR3 for alpha chain variable domain of TCR clone 213496 (TRAV13-2, TRAJ48)
CAEMDFGNEKLTF

SEQ ID NO: 426992 - protein, 13 aa, Homo sapiens
  CDR3 for beta chain variable domain of TCR clone 213496 (TRBV7-9, TRBJ1-2)
CPSSLKQNYGYTF

SEQ ID NO: 426993 - protein, 15 aa, Homo sapiens
  CDR3 for alpha chain variable domain of TCR clone 213497 (TRAV23/DV6, TRAJ12)
CAAIDLGAMDSSYKL

SEQ ID NO: 426994 - protein, 14 aa, Homo sapiens
  CDR3 for beta chain variable domain of TCR clone 213497 (TRBV20-1, TRBJ1-1)
CSAQTRIGGTEAFF

SEQ ID NO: 426995 - protein, 11 aa, Homo sapiens
  CDR3 for alpha chain variable domain of TCR clone 213498 (TRAV2, TRAJ33)
CAVDSNYQLIW

SEQ ID NO: 426996 - protein, 16 aa, Homo sapiens
  CDR3 for beta chain variable domain of TCR clone 213498 (TRBV29-1, TRBJ2-7)
CSVEDAEDGTAYEQYF

SEQ ID NO: 426997 - protein, 14 aa, Homo sapiens
  CDR3 for alpha chain variable domain of TCR clone 213499 (TRAV12-3, TRAJ57)
CAMSAWGGSEKLVF

SEQ ID NO: 426998 - protein, 18 aa, Homo sapiens
  CDR3 for beta chain variable domain of TCR clone 213499 (TRBV4-1, TRBJ1-5)
CASSQDPRGQGLNQPQHF

SEQ ID NO: 426999 - protein, 15 aa, Homo sapiens
  CDR3 for alpha chain variable domain of TCR clone 213500 (TRAV12-2, TRAJ53)
CAVNGGGGSNYKLTF

SEQ ID NO: 427000 - protein, 13 aa, Homo sapiens
  CDR3 for beta chain variable domain of TCR clone 213500 (TRBV29-1, TRBJ2-1)
CSVGGGRVNEQFF

SEQ ID NO: 427001 - protein, 12 aa, Homo sapiens
  CDR3 for alpha chain variable domain of TCR clone 213501 (TRAV12-2, TRAJ52)
IGGGTSYGKLTF

SEQ ID NO: 427002 - protein, 13 aa, Homo sapiens
  CDR3 for beta chain variable domain of TCR clone 213501 (TRBV15, TRBJ2-7)
CATSTTGHYEQYL

SEQ ID NO: 427003 - protein, 11 aa, Homo sapiens
  CDR3 for alpha chain variable domain of TCR clone 213502 (TRAV1-2, TRAJ31)
CAVNNNARLMF

SEQ ID NO: 427004 - protein, 15 aa, Homo sapiens
  CDR3 for beta chain variable domain of TCR clone 213502 (TRBV28, TRBJ2-7)
CASSPGGRGFYEQYF

SEQ ID NO: 427005 - protein, 13 aa, Homo sapiens
  CDR3 for alpha chain variable domain of TCR clone 213503 (TRAV27, TRAJ41)
CAGEGNSGYALNF

SEQ ID NO: 427006 - protein, 13 aa, Homo sapiens
  CDR3 for beta chain variable domain of TCR clone 213503 (TRBV19, TRBJ1-2)
CASSVPGKDGYTF

SEQ ID NO: 427007 - protein, 15 aa, Homo sapiens
  CDR3 for alpha chain variable domain of TCR clone 213504 (TRAV3, TRAJ20)
CAVRDIKLSEYKLSF

SEQ ID NO: 427008 - protein, 15 aa, Homo sapiens
  CDR3 for beta chain variable domain of TCR clone 213504 (TRBV7-9, TRBJ1-6)
CAGSSPGRGNSPLHF

SEQ ID NO: 427009 - protein, 16 aa, Homo sapiens
  CDR3 for alpha chain variable domain of TCR clone 213505 (TRAV30, TRAJ24)
CGTEIADADSWGKFQF

SEQ ID NO: 427010 - protein, 13 aa, Homo sapiens
  CDR3 for beta chain variable domain of TCR clone 213505 (TRBV7-7, TRBJ2-3)
CASSLSRADTQYF

SEQ ID NO: 427011 - protein, 14 aa, Homo sapiens
  CDR3 for alpha chain variable domain of TCR clone 213506 (TRAV8-6, TRAJ54)
CAVSDFQGAQKLVF

SEQ ID NO: 427012 - protein, 15 aa, Homo sapiens
  CDR3 for beta chain variable domain of TCR clone 213506 (TRBV4-1, TRBJ2-5)
CASSQWDLYQETQYF

SEQ ID NO: 427013 - protein, 15 aa, Homo sapiens
  CDR3 for alpha chain variable domain of TCR clone 213507 (TRAV17, TRAJ56)
CATDANTGANSKLTF

SEQ ID NO: 427014 - protein, 16 aa, Homo sapiens
  CDR3 for beta chain variable domain of TCR clone 213507 (TRBV7-3, TRBJ2-2)
CASSLRRGTLSGELFF

SEQ ID NO: 427015 - protein, 12 aa, Homo sapiens
  CDR3 for alpha chain variable domain of TCR clone 213508 (TRAV35, TRAJ40)
CAGRAGTYKYIF

SEQ ID NO: 427016 - protein, 14 aa, Homo sapiens
  CDR3 for beta chain variable domain of TCR clone 213508 (TRBV7-2, TRBJ1-3)
CASSRGGTGNTIYI

SEQ ID NO: 427017 - protein, 13 aa, Homo sapiens
  CDR3 for alpha chain variable domain of TCR clone 213509 (TRAV13-1, TRAJ33)
FAASRSGNYQLIW

SEQ ID NO: 427018 - protein, 15 aa, Homo sapiens
  CDR3 for beta chain variable domain of TCR clone 213509 (TRBV2, TRBJ2-7)
EDSAMYFCASSEQYF

SEQ ID NO: 427019 - protein, 17 aa, Homo sapiens
  CDR3 for alpha chain variable domain of TCR clone 213510 (TRAV3, TRAJ38)
CAVRDCLNACNNRKLIW

SEQ ID NO: 427020 - protein, 16 aa, Homo sapiens
  CDR3 for beta chain variable domain of TCR clone 213510 (TRBV12-4, TRBJ1-5)
CASSRPVGGSNQPQHF

SEQ ID NO: 427021 - protein, 14 aa, Homo sapiens
  CDR3 for alpha chain variable domain of TCR clone 213511 (TRAV21, TRAJ45)
CAVSSGGGADGLTF

SEQ ID NO: 427022 - protein, 13 aa, Homo sapiens
  CDR3 for beta chain variable domain of TCR clone 213511 (TRBV7-2, TRBJ2-2)
CASSLAVTGELFF

SEQ ID NO: 427023 - protein, 13 aa, Homo sapiens
  CDR3 for alpha chain variable domain of TCR clone 213512 (TRAV20, TRAJ21)
CAVEGYNFNKFYF

SEQ ID NO: 427024 - protein, 16 aa, Homo sapiens
  CDR3 for beta chain variable domain of TCR clone 213512 (TRBV15, TRBJ1-2)
CATSRGPRTGGGGYTF

SEQ ID NO: 427025 - protein, 12 aa, Homo sapiens
  CDR3 for alpha chain variable domain of TCR clone 213513 (TRAV25, TRAJ35)
CAGIGFGNVLHC

SEQ ID NO: 427026 - protein, 15 aa, Homo sapiens
  CDR3 for beta chain variable domain of TCR clone 213513 (TRBV7-2, TRBJ2-7)
CASSLSSGRTYEQYF

SEQ ID NO: 427027 - protein, 10 aa, Homo sapiens
  CDR3 for alpha chain variable domain of TCR clone 213514 (TRAV23/DV6, TRAJ9)
CAASIGGNTG

SEQ ID NO: 427028 - protein, 14 aa, Homo sapiens
  CDR3 for beta chain variable domain of TCR clone 213514 (TRBV9, TRBJ2-7)
CASSVGVVSYEQYF

SEQ ID NO: 427029 - protein, 13 aa, Homo sapiens
  CDR3 for alpha chain variable domain of TCR clone 213515 (TRAV14/DV4, TRAJ22)
CAMRDLSARQLTF

SEQ ID NO: 427030 - protein, 18 aa, Homo sapiens
  CDR3 for beta chain variable domain of TCR clone 213515 (TRBV19, TRBJ1-5)
CAGSKGQVSIHSNQPQHF

SEQ ID NO: 427031 - protein, 13 aa, Homo sapiens
  CDR3 for alpha chain variable domain of TCR clone 213516 (TRAV3, TRAJ4)
CALRDGGYNKLIF

SEQ ID NO: 427032 - protein, 15 aa, Homo sapiens
  CDR3 for beta chain variable domain of TCR clone 213516 (TRBV5-1, TRBJ2-1)
CASSPPRAPYNEQFF

SEQ ID NO: 427033 - protein, 14 aa, Homo sapiens
  CDR3 for alpha chain variable domain of TCR clone 213517 (TRAV13-1, TRAJ35)
CAASKGGFGNVLHF

SEQ ID NO: 427034 - protein, 13 aa, Homo sapiens
  CDR3 for beta chain variable domain of TCR clone 213517 (TRBV7-3, TRBJ1-1)
CASSQDGGAEAVF

SEQ ID NO: 427035 - protein, 14 aa, Homo sapiens
  CDR3 for alpha chain variable domain of TCR clone 213518 (TRAV1-2, TRAJ8)
CAVREDTGFQKRVF

SEQ ID NO: 427036 - protein, 16 aa, Homo sapiens
  CDR3 for beta chain variable domain of TCR clone 213518 (TRBV20-1, TRBJ2-4)
CSASAILAGQGDIQYF

SEQ ID NO: 427037 - protein, 13 aa, Homo sapiens
  CDR3 for alpha chain variable domain of TCR clone 213519 (TRAV12-1, TRAJ26)
CVLRRNYGQNFVF

SEQ ID NO: 427038 - protein, 14 aa, Homo sapiens
  CDR3 for beta chain variable domain of TCR clone 213519 (TRBV7-2, TRBJ2-7)
CASRSQGAAYEQYF

SEQ ID NO: 427039 - protein, 14 aa, Homo sapiens
  CDR3 for alpha chain variable domain of TCR clone 213520 (TRAV16, TRAJ4)
CALHFSGGYNKLIF

SEQ ID NO: 427040 - protein, 15 aa, Homo sapiens
  CDR3 for beta chain variable domain of TCR clone 213520 (TRBV7-2, TRBJ2-7)
CARSTRLAGVDEQYF

SEQ ID NO: 427041 - protein, 14 aa, Homo sapiens
  CDR3 for alpha chain variable domain of TCR clone 213521 (TRAV1-2, TRAJ8)
CAVREDTGFQKLVF

SEQ ID NO: 427042 - protein, 18 aa, Homo sapiens
  CDR3 for beta chain variable domain of TCR clone 213521 (TRBV4-1, IGLJ4)
CASSQDLRRGGEKLFLAG

SEQ ID NO: 427043 - protein, 12 aa, Homo sapiens
  CDR3 for alpha chain variable domain of TCR clone 213522 (TRAV8-3, TRAJ41)
CAVALSGYALNF

SEQ ID NO: 427044 - protein, 16 aa, Homo sapiens
  CDR3 for beta chain variable domain of TCR clone 213522 (TRBV12-4, TRBJ2-5)
CASSFFVRGRQETQYF

SEQ ID NO: 427045 - protein, 17 aa, Homo sapiens
  CDR3 for alpha chain variable domain of TCR clone 213523 (TRAV4, TRAJ18)
CLVGERSVGSTLGRLYF

SEQ ID NO: 427046 - protein, 14 aa, Homo sapiens
  CDR3 for beta chain variable domain of TCR clone 213523 (TRBV6-5, TRBJ1-2)
CTSSYDGTGGGYTF

SEQ ID NO: 427047 - protein, 16 aa, Homo sapiens
  CDR3 for alpha chain variable domain of TCR clone 213524 (TRAV30, TRAJ24)
CGTEMVDADSWGKFQF

SEQ ID NO: 427048 - protein, 19 aa, Homo sapiens
  CDR3 for beta chain variable domain of TCR clone 213524 (TRBV25-1, TRBJ2-2)
CAILVYRVDRGRKTGELFF

SEQ ID NO: 427049 - protein, 17 aa, Homo sapiens
  CDR3 for alpha chain variable domain of TCR clone 213525 (TRAV13-1, TRAJ52)
FAASSGAGCTSYGKLTF

SEQ ID NO: 427050 - protein, 15 aa, Homo sapiens
  CDR3 for beta chain variable domain of TCR clone 213525 (TRBV2, TRBJ2-1)
CASSELAGSYNEQFF

SEQ ID NO: 427051 - protein, 14 aa, Homo sapiens
  CDR3 for alpha chain variable domain of TCR clone 213526 (TRAV21, TRAJ45)
CAVSSGGGADGITF

SEQ ID NO: 427052 - protein, 15 aa, Homo sapiens
  CDR3 for beta chain variable domain of TCR clone 213526 (TRBV10-2, TRBJ2-6)
CASSEQGTGANVLTF

SEQ ID NO: 427053 - protein, 11 aa, Homo sapiens
  CDR3 for alpha chain variable domain of TCR clone 213527 (TRAV12-3, TRAJ11)
CAMKGYSTLTF

SEQ ID NO: 427054 - protein, 12 aa, Homo sapiens
  CDR3 for beta chain variable domain of TCR clone 213527 (TRBV11-2, TRBJ2-2)
CASSLGGGELFF

SEQ ID NO: 427055 - protein, 13 aa, Homo sapiens
  CDR3 for alpha chain variable domain of TCR clone 213528 (TRAV21, TRAJ27)
CAARPGNAGKSTF

SEQ ID NO: 427056 - protein, 18 aa, Homo sapiens
  CDR3 for beta chain variable domain of TCR clone 213528 (TRBV7-9, TRBJ2-1)
CASSPPRGERGPYNEQFF

SEQ ID NO: 427057 - protein, 12 aa, Homo sapiens
  CDR3 for alpha chain variable domain of TCR clone 213529 (TRAV21, TRAJ12)
CAVMDSSYKLIF

SEQ ID NO: 427058 - protein, 16 aa, Homo sapiens
  CDR3 for beta chain variable domain of TCR clone 213529 (TRBV7-9, TRBJ2-5)
CASRLEMGTRKETQYF

SEQ ID NO: 427059 - protein, 11 aa, Homo sapiens
  CDR3 for alpha chain variable domain of TCR clone 213530 (TRAV21, TRAJ34)
CAHYNTDKLIF

SEQ ID NO: 427060 - protein, 13 aa, Homo sapiens
  CDR3 for beta chain variable domain of TCR clone 213530 (TRBV10-3, TRBJ2-7)
CAISEKGGYEQYF

SEQ ID NO: 427061 - protein, 11 aa, Homo sapiens
  CDR3 for alpha chain variable domain of TCR clone 213531 (TRAV12-2, TRAJ49)
CAVTGGTQFYF

SEQ ID NO: 427062 - protein, 16 aa, Homo sapiens
  CDR3 for beta chain variable domain of TCR clone 213531 (TRBV19, TRBJ1-2)
CASSIGSNRDGYGYTF

SEQ ID NO: 427063 - protein, 13 aa, Homo sapiens
  CDR3 for alpha chain variable domain of TCR clone 213532 (TRAV30, TRAJ6)
CGFIEGGSYIPTF

SEQ ID NO: 427064 - protein, 13 aa, Homo sapiens
  CDR3 for beta chain variable domain of TCR clone 213532 (TRBV5-4, TRBJ2-5)
CASRPVSQETQYF

SEQ ID NO: 427065 - protein, 13 aa, Homo sapiens
  CDR3 for alpha chain variable domain of TCR clone 213533 (TRAV13-2, TRAJ16)
CADARTDGQKLPF

SEQ ID NO: 427066 - protein, 15 aa, Homo sapiens
  CDR3 for beta chain variable domain of TCR clone 213533 (TRBV29-1, TRBJ2-1)
CSVEAPRGSPNEQFF

SEQ ID NO: 427067 - protein, 16 aa, Homo sapiens
  CDR3 for alpha chain variable domain of TCR clone 213534 (TRAV26-1, TRAJ33)
CIVPFWWEDSNYQLIW

SEQ ID NO: 427068 - protein, 14 aa, Homo sapiens
  CDR3 for beta chain variable domain of TCR clone 213534 (TRBV6-3, TRBJ1-1)
CASSYHSKNTEAFF

SEQ ID NO: 427069 - protein, 14 aa, Homo sapiens
  CDR3 for alpha chain variable domain of TCR clone 213535 (TRAV26-1, TRAJ45)
CIVRVVGGADGVTF

SEQ ID NO: 427070 - protein, 16 aa, Homo sapiens
  CDR3 for beta chain variable domain of TCR clone 213535 (TRBV7-9, TRBJ1-1)
CASSLTQVRSNTEAFF

SEQ ID NO: 427071 - protein, 14 aa, Homo sapiens
  CDR3 for alpha chain variable domain of TCR clone 213536 (TRAV9-2, TRAJ39)
CALYIYNAGSMLTF

SEQ ID NO: 427072 - protein, 13 aa, Homo sapiens
  CDR3 for beta chain variable domain of TCR clone 213536 (TRBV12-5, TRBJ2-3)
CASGDRQSDTQYF

SEQ ID NO: 427073 - protein, 12 aa, Homo sapiens
  CDR3 for alpha chain variable domain of TCR clone 213537 (TRAV12-3, TRAJ17)
CAMPLTGNKLTF

SEQ ID NO: 427074 - protein, 15 aa, Homo sapiens
  CDR3 for beta chain variable domain of TCR clone 213537 (TRBV27, TRBJ2-1)
CASSNGGGSSNEQFF

SEQ ID NO: 427075 - protein, 14 aa, Homo sapiens
  CDR3 for alpha chain variable domain of TCR clone 213538 (TRAV26-1, TRAJ38)
CIADNAGNNRKLFW

SEQ ID NO: 427076 - protein, 13 aa, Homo sapiens
  CDR3 for beta chain variable domain of TCR clone 213538 (TRBV20-1, TRBJ1-1)
CSARGGGNTEAFF

SEQ ID NO: 427077 - protein, 12 aa, Homo sapiens
  CDR3 for alpha chain variable domain of TCR clone 213539 (TRAV12-2, TRAJ31)
CAVNTPDARLIF

SEQ ID NO: 427078 - protein, 12 aa, Homo sapiens
  CDR3 for beta chain variable domain of TCR clone 213539 (TRBV12-4, TRBJ2-7)
CASSLGGYEQYF

SEQ ID NO: 427079 - protein, 14 aa, Homo sapiens
  CDR3 for alpha chain variable domain of TCR clone 213540 (TRAV23/DV6, TRAJ40)
CAASLTSGTYKYFF

SEQ ID NO: 427080 - protein, 14 aa, Homo sapiens
  CDR3 for beta chain variable domain of TCR clone 213540 (TRBV5-1, TRBJ2-3)
CASSRGQGGGTQYF

SEQ ID NO: 427081 - protein, 12 aa, Homo sapiens
  CDR3 for alpha chain variable domain of TCR clone 213541 (TRAV16, TRAJ9)
CALSSGGFKTIF

SEQ ID NO: 427082 - protein, 14 aa, Homo sapiens
  CDR3 for beta chain variable domain of TCR clone 213541 (TRBV7-3, TRBJ2-3)
CASSFGASTDTQYF

SEQ ID NO: 427083 - protein, 15 aa, Homo sapiens
  CDR3 for alpha chain variable domain of TCR clone 213542 (TRAV3, TRAJ17)
CAVSPKEAAGNKLTC

SEQ ID NO: 427084 - protein, 12 aa, Homo sapiens
  CDR3 for beta chain variable domain of TCR clone 213542 (TRBV7-9, TRBJ1-6)
CASSLMTSPLHF

SEQ ID NO: 427085 - protein, 13 aa, Homo sapiens
  CDR3 for alpha chain variable domain of TCR clone 213543 (TRAV12-3, TRAJ41)
CAIAPNAGYALNF

SEQ ID NO: 427086 - protein, 14 aa, Homo sapiens
  CDR3 for beta chain variable domain of TCR clone 213543 (TRBV7-2, TRBJ1-3)
CASSLGTAGNTIYF

SEQ ID NO: 427087 - protein, 15 aa, Homo sapiens
  CDR3 for alpha chain variable domain of TCR clone 213544 (TRAV3, TRAJ17)
CAVRDTGAAGNKLTF

SEQ ID NO: 427088 - protein, 13 aa, Homo sapiens
  CDR3 for beta chain variable domain of TCR clone 213544 (TRBV7-2, TRBJ2-7)
CASSSPSGSEQYF

SEQ ID NO: 427089 - protein, 14 aa, Homo sapiens
  CDR3 for alpha chain variable domain of TCR clone 213545 (TRAV1-2, TRAJ16)
CAVNRFSEGQKLLF

SEQ ID NO: 427090 - protein, 18 aa, Homo sapiens
  CDR3 for beta chain variable domain of TCR clone 213545 (TRBV7-9, TRBJ2-7)
CASSLTTSGSRTWYEQYF

SEQ ID NO: 427091 - protein, 14 aa, Homo sapiens
  CDR3 for alpha chain variable domain of TCR clone 213546 (TRAV13-1, TRAJ41)
CAARSGDSGYALNF

SEQ ID NO: 427092 - protein, 15 aa, Homo sapiens
  CDR3 for beta chain variable domain of TCR clone 213546 (TRBV11-2, TRBJ2-2)
CASSSDRVNAGELFF

SEQ ID NO: 427093 - protein, 15 aa, Homo sapiens
  CDR3 for alpha chain variable domain of TCR clone 213547 (TRAV12-2, TRAJ32)
CAVNHYGGATNKLIF

SEQ ID NO: 427094 - protein, 13 aa, Homo sapiens
  CDR3 for beta chain variable domain of TCR clone 213547 (TRBV7-9, TRBJ1-2)
CASSLKQNYGDTF

SEQ ID NO: 427095 - protein, 17 aa, Homo sapiens
  CDR3 for alpha chain variable domain of TCR clone 213548 (TRAV17, TRAJ52)
CATDRNAGGTSYGKLTF

SEQ ID NO: 427096 - protein, 17 aa, Homo sapiens
  CDR3 for beta chain variable domain of TCR clone 213548 (TRBV5-1, TRBJ2-2)
CASSPRTGGMNTGELFF

SEQ ID NO: 427097 - protein, 16 aa, Homo sapiens
  CDR3 for alpha chain variable domain of TCR clone 213549 (TRAV12-1, TRAJ43)
CVVNPHRFGAWTRLTV

SEQ ID NO: 427098 - protein, 13 aa, Homo sapiens
  CDR3 for beta chain variable domain of TCR clone 213549 (TRBV12-4, TRBJ1-2)
CASSSGPNYGYTF

SEQ ID NO: 427099 - protein, 14 aa, Homo sapiens
  CDR3 for alpha chain variable domain of TCR clone 213550 (TRAV3, TRAJ6)
CSVRDSRRKLHTYI

SEQ ID NO: 427100 - protein, 15 aa, Homo sapiens
  CDR3 for beta chain variable domain of TCR clone 213550 (TRBV18, TRBJ2-7)
CASSPLQGRTYEQYF

SEQ ID NO: 427101 - protein, 10 aa, Homo sapiens
  CDR3 for alpha chain variable domain of TCR clone 213551 (TRAV8-4, TRAJ39)
CAVAGNMLTF

SEQ ID NO: 427102 - protein, 13 aa, Homo sapiens
  CDR3 for beta chain variable domain of TCR clone 213551 (TRBV7-3, TRBJ2-1)
CQQLSGGTNEQFF

SEQ ID NO: 427103 - protein, 17 aa, Homo sapiens
  CDR3 for alpha chain variable domain of TCR clone 213552 (TRAV3, TRAJ6)
CAVRDGPRAGGSYIPTF

SEQ ID NO: 427104 - protein, 12 aa, Homo sapiens
  CDR3 for beta chain variable domain of TCR clone 213552 (TRBV7-8, TRBJ2-7)
CASRLGDREQYF

SEQ ID NO: 427105 - protein, 13 aa, Homo sapiens
  CDR3 for alpha chain variable domain of TCR clone 213553 (TRAV25, TRAJ35)
CAGGGAWGMCCIA

SEQ ID NO: 427106 - protein, 14 aa, Homo sapiens
  CDR3 for beta chain variable domain of TCR clone 213553 (TRBV6-1, TRBJ2-1)
CASAGGAIKNEQFF

SEQ ID NO: 427107 - protein, 13 aa, Homo sapiens
  CDR3 for alpha chain variable domain of TCR clone 213554 (TRAV23/DV6, TRAJ34)
CAAIENNTGKLIF

SEQ ID NO: 427108 - protein, 18 aa, Homo sapiens
  CDR3 for beta chain variable domain of TCR clone 213554 (TRBV20-1, TRBJ2-6)
CSAETTPTHGSGANVLTF

SEQ ID NO: 427109 - protein, 14 aa, Homo sapiens
  CDR3 for alpha chain variable domain of TCR clone 213555 (TRAV12-1, TRAJ15)
CLPPANQAGTALIF

SEQ ID NO: 427110 - protein, 13 aa, Homo sapiens
  CDR3 for beta chain variable domain of TCR clone 213555 (TRBV2, TRBJ2-7)
CASSGAAAYEQYF

SEQ ID NO: 427111 - protein, 17 aa, Homo sapiens
  CDR3 for alpha chain variable domain of TCR clone 213556 (TRAV36/DV7, TRAJ52)
CAVAQRAGGTSYGKLTF

SEQ ID NO: 427112 - protein, 16 aa, Homo sapiens
  CDR3 for beta chain variable domain of TCR clone 213556 (TRBV19, TRBJ2-1)
CASSKAGPSSYNEQFF

SEQ ID NO: 427113 - protein, 13 aa, Homo sapiens
  CDR3 for alpha chain variable domain of TCR clone 213557 (TRAV2, TRAJ40)
CAVVTSGTYKYIF

SEQ ID NO: 427114 - protein, 13 aa, Homo sapiens
  CDR3 for beta chain variable domain of TCR clone 213557 (TRBV7-9, TRBJ2-5)
CASLPSGRETQFF

SEQ ID NO: 427115 - protein, 15 aa, Homo sapiens
  CDR3 for alpha chain variable domain of TCR clone 213558 (TRAV34, TRAJ38)
CAADFTPGNNRKLIW

SEQ ID NO: 427116 - protein, 12 aa, Homo sapiens
  CDR3 for beta chain variable domain of TCR clone 213558 (TRBV7-9, TRBJ2-7)
CATRTDAYEQYF

SEQ ID NO: 427117 - protein, 14 aa, Homo sapiens
  CDR3 for alpha chain variable domain of TCR clone 213559 (TRAV12-1, TRAJ17)
CVVNYKAAGNKLTF

SEQ ID NO: 427118 - protein, 17 aa, Homo sapiens
  CDR3 for beta chain variable domain of TCR clone 213559 (TRBV20-1, TRBJ2-1)
CSASSSGLAGSYYEQFF

SEQ ID NO: 427119 - protein, 13 aa, Homo sapiens
  CDR3 for alpha chain variable domain of TCR clone 213560 (TRAV8-3, TRAJ48)
CAVVPFGNEKLTF

SEQ ID NO: 427120 - protein, 14 aa, Homo sapiens
  CDR3 for beta chain variable domain of TCR clone 213560 (TRBV18, TRBJ2-7)
CASSPRGWAYEQYF

SEQ ID NO: 427121 - protein, 14 aa, Homo sapiens
  CDR3 for alpha chain variable domain of TCR clone 213561 (TRAV13-1, TRAJ35)
CAASKGGFGNVLHC

SEQ ID NO: 427122 - protein, 17 aa, Homo sapiens
  CDR3 for beta chain variable domain of TCR clone 213561 (TRBV24-1, TRBJ2-4)
CATSDAEARGVRNIQYF

SEQ ID NO: 427123 - protein, 14 aa, Homo sapiens
  CDR3 for alpha chain variable domain of TCR clone 213562 (TRAV12-1, TRAJ6)
CVVARIRRKLHTYI

SEQ ID NO: 427124 - protein, 15 aa, Homo sapiens
  CDR3 for beta chain variable domain of TCR clone 213562 (TRBV28, TRBJ1-3)
CASSMGWASGNTIYF

SEQ ID NO: 427125 - protein, 15 aa, Homo sapiens
  CDR3 for alpha chain variable domain of TCR clone 213563 (TRAV25, TRAJ52)
CAGRPGGTSYGQLTF

SEQ ID NO: 427126 - protein, 16 aa, Homo sapiens
  CDR3 for beta chain variable domain of TCR clone 213563 (TRBV12-4, TRBJ1-5)
CASSSGPRGSNQPQHF

SEQ ID NO: 427127 - protein, 13 aa, Homo sapiens
  CDR3 for alpha chain variable domain of TCR clone 213564 (TRAV8-3, TRAJ44)
FAVVPVTASKLTF

SEQ ID NO: 427128 - protein, 14 aa, Homo sapiens
  CDR3 for beta chain variable domain of TCR clone 213564 (TRBV11-2, TRBJ2-3)
CASSRLARTDTQYF

SEQ ID NO: 427129 - protein, 12 aa, Homo sapiens
  CDR3 for alpha chain variable domain of TCR clone 213565 (TRAV1-1, TRAJ29)
CAVISVNTPLVF

SEQ ID NO: 427130 - protein, 17 aa, Homo sapiens
  CDR3 for beta chain variable domain of TCR clone 213565 (TRBV20-1, TRBJ2-2)
CSASGSGQGGLTGELFF

SEQ ID NO: 427131 - protein, 15 aa, Homo sapiens
  CDR3 for alpha chain variable domain of TCR clone 213566 (TRAV8-3, TRAJ15)
CAVGEPNQAGTALIF

SEQ ID NO: 427132 - protein, 14 aa, Homo sapiens
  CDR3 for beta chain variable domain of TCR clone 213566 (TRBV20-1, TRBJ2-1)
CSPSDEASYNEQFF

SEQ ID NO: 427133 - protein, 13 aa, Homo sapiens
  CDR3 for alpha chain variable domain of TCR clone 213567 (TRAV3, TRAJ27)
CAVRPLGAGQSTL

SEQ ID NO: 427134 - protein, 13 aa, Homo sapiens
  CDR3 for beta chain variable domain of TCR clone 213567 (TRBV7-9, TRBJ2-3)
CASSPGSTDTQYF

SEQ ID NO: 427135 - protein, 16 aa, Homo sapiens
  CDR3 for alpha chain variable domain of TCR clone 213568 (TRAV16, TRAJ42)
CALSGLLGGSQGNLIF

SEQ ID NO: 427136 - protein, 15 aa, Homo sapiens
  CDR3 for beta chain variable domain of TCR clone 213568 (TRBV5-1, TRBJ2-1)
CASSPGGLGGTSSSS

SEQ ID NO: 427137 - protein, 14 aa, Homo sapiens
  CDR3 for alpha chain variable domain of TCR clone 213569 (TRAV2, TRAJ20)
CAVEDGTNDHKLSF

SEQ ID NO: 427138 - protein, 13 aa, Homo sapiens
  CDR3 for beta chain variable domain of TCR clone 213569 (TRBV7-2, TRBJ1-1)
CASSRNTNTEAFF

SEQ ID NO: 427139 - protein, 15 aa, Homo sapiens
  CDR3 for alpha chain variable domain of TCR clone 213570 (TRAV29/DV5, TRAJ42)
CAAPRNPSLHSNYGG

SEQ ID NO: 427140 - protein, 11 aa, Homo sapiens
  CDR3 for beta chain variable domain of TCR clone 213570 (TRBV29-1, TRBJ2-5)
CSEDRTGTQYF

SEQ ID NO: 427141 - protein, 13 aa, Homo sapiens
  CDR3 for alpha chain variable domain of TCR clone 213571 (TRAV12-2, TRAJ42)
CAVKRGSQGNLIF

SEQ ID NO: 427142 - protein, 13 aa, Homo sapiens
  CDR3 for beta chain variable domain of TCR clone 213571 (TRBV28, TRBJ2-7)
CASSLPSRYEQYF

SEQ ID NO: 427143 - protein, 12 aa, Homo sapiens
  CDR3 for alpha chain variable domain of TCR clone 213572 (TRAV2, TRAJ31)
CAVEDNNARLMF

SEQ ID NO: 427144 - protein, 13 aa, Homo sapiens
  CDR3 for beta chain variable domain of TCR clone 213572 (TRBV20-1, TRBJ1-6)
CSAPLGVGSPLHF

SEQ ID NO: 427145 - protein, 14 aa, Homo sapiens
  CDR3 for alpha chain variable domain of TCR clone 213573 (TRAV8-1, TRAJ34)
CAGITTYNTDKLIF

SEQ ID NO: 427146 - protein, 14 aa, Homo sapiens
  CDR3 for beta chain variable domain of TCR clone 213573 (TRBV11-3, TRBJ1-3)
CASSHNGQGNTIYF

SEQ ID NO: 427147 - protein, 11 aa, Homo sapiens
  CDR3 for alpha chain variable domain of TCR clone 213574 (TRAV21, TRAJ11)
CSVNGYSTLTF

SEQ ID NO: 427148 - protein, 11 aa, Homo sapiens
  CDR3 for beta chain variable domain of TCR clone 213574 (TRBV19, TRBJ1-1)
CASSIGSEAFF

SEQ ID NO: 427149 - protein, 21 aa, Homo sapiens
  CDR3 for alpha chain variable domain of TCR clone 213575 (TRAV25, TRAJ47)
TATQTTDVGTYFWEYGNKLVF

SEQ ID NO: 427150 - protein, 16 aa, Homo sapiens
  CDR3 for beta chain variable domain of TCR clone 213575 (TRBV11-1, TRBJ2-2)
CASSAEGLKNTGELFF

SEQ ID NO: 427151 - protein, 12 aa, Homo sapiens
  CDR3 for alpha chain variable domain of TCR clone 213576 (TRAV8-3, TRAJ20)
CAVGANHYKLSF

SEQ ID NO: 427152 - protein, 16 aa, Homo sapiens
  CDR3 for beta chain variable domain of TCR clone 213576 (TRBV19, TRBJ2-2)
GASRSPGTGATGELFF

SEQ ID NO: 427153 - protein, 14 aa, Homo sapiens
  CDR3 for alpha chain variable domain of TCR clone 213577 (TRAV1-2, TRAJ8)
CAVRADTGFQKLVF

SEQ ID NO: 427154 - protein, 16 aa, Homo sapiens
  CDR3 for beta chain variable domain of TCR clone 213577 (TRBV6-1, TRBJ2-5)
CASSETLDRGAETQYF

SEQ ID NO: 427155 - protein, 14 aa, Homo sapiens
  CDR3 for alpha chain variable domain of TCR clone 213578 (TRAV12-3, TRAJ10)
SHLPLTGGGNKLTF

SEQ ID NO: 427156 - protein, 13 aa, Homo sapiens
  CDR3 for beta chain variable domain of TCR clone 213578 (TRBV7-9, TRBJ2-3)
CASSPGSTDTPYF

SEQ ID NO: 427157 - protein, 14 aa, Homo sapiens
  CDR3 for alpha chain variable domain of TCR clone 213579 (TRAV8-6, TRAJ12)
CAVKAAYSSYKLIF

SEQ ID NO: 427158 - protein, 15 aa, Homo sapiens
  CDR3 for beta chain variable domain of TCR clone 213579 (TRBV5-1, TRBJ2-5)
CASSLGLAERETQYF

SEQ ID NO: 427159 - protein, 17 aa, Homo sapiens
  CDR3 for alpha chain variable domain of TCR clone 213580 (TRAV3, TRAJ38)
CAVRDGLNAGNNRKLIW

SEQ ID NO: 427160 - protein, 15 aa, Homo sapiens
  CDR3 for beta chain variable domain of TCR clone 213580 (TRBV27, TRBJ2-1)
CASSNGGGSSNEQFF

SEQ ID NO: 427161 - protein, 12 aa, Homo sapiens
  CDR3 for alpha chain variable domain of TCR clone 213581 (TRAV12-3, TRAJ17)
CAMTLTGNKLTF

SEQ ID NO: 427162 - protein, 17 aa, Homo sapiens
  CDR3 for beta chain variable domain of TCR clone 213581 (TRBV6-3, TRBJ2-2)
CASSYAGQGINTGELFF

SEQ ID NO: 427163 - protein, 11 aa, Homo sapiens
  CDR3 for alpha chain variable domain of TCR clone 213582 (TRAV1-2, TRAJ40)
CAVPGTYKYIF

SEQ ID NO: 427164 - protein, 15 aa, Homo sapiens
  CDR3 for beta chain variable domain of TCR clone 213582 (TRBV27, TRBJ2-1)
CASSNGGGPPMSSSS

SEQ ID NO: 427165 - protein, 15 aa, Homo sapiens
  CDR3 for alpha chain variable domain of TCR clone 213583 (TRAV3, TRAJ20)
CAVRYIKLSDDKLSF

SEQ ID NO: 427166 - protein, 15 aa, Homo sapiens
  CDR3 for beta chain variable domain of TCR clone 213583 (TRBV7-9, TRBJ1-6)
CASSSPGRGNSPLHF

SEQ ID NO: 427167 - protein, 18 aa, Homo sapiens
  CDR3 for alpha chain variable domain of TCR clone 213584 (TRAV29/DV5, TRAJ52)
CAAGFRGAGGTSYGKLTF

SEQ ID NO: 427168 - protein, 14 aa, Homo sapiens
  CDR3 for beta chain variable domain of TCR clone 213584 (TRBV20-1, TRBJ2-7)
CSAWTALSSYEQYF

SEQ ID NO: 427169 - protein, 16 aa, Homo sapiens
  CDR3 for alpha chain variable domain of TCR clone 213585 (TRAV23/DV6, TRAJ52)
CAASPSGGTSYVKLTF

SEQ ID NO: 427170 - protein, 14 aa, Homo sapiens
  CDR3 for beta chain variable domain of TCR clone 213585 (TRBV20-1, TRBJ2-3)
CSARDASSTDTQYF

SEQ ID NO: 427171 - protein, 15 aa, Homo sapiens
  CDR3 for alpha chain variable domain of TCR clone 213586 (TRAV35, TRAJ40)
CAGQLGTSGTYKYIF

SEQ ID NO: 427172 - protein, 15 aa, Homo sapiens
  CDR3 for beta chain variable domain of TCR clone 213586 (TRBV28, TRBJ2-1)
CASSGLAEVDNEQFF

SEQ ID NO: 427173 - protein, 15 aa, Homo sapiens
  CDR3 for alpha chain variable domain of TCR clone 213587 (TRAV26-1, TRAJ40)
CIDRYATSGTYKYIF

SEQ ID NO: 427174 - protein, 11 aa, Homo sapiens
  CDR3 for beta chain variable domain of TCR clone 213587 (TRBV7-9, TRBJ2-1)
CASSYQNEQFF

SEQ ID NO: 427175 - protein, 22 aa, Homo sapiens
  CDR3 for alpha chain variable domain of TCR clone 213588 (TRAV36/DV7, )
CVANSGNNHIQNPDPAVYQLRD

SEQ ID NO: 427176 - protein, 14 aa, Homo sapiens
  CDR3 for beta chain variable domain of TCR clone 213588 (TRBV7-2, TRBJ2-7)
CASSLRWEVNEQYF

SEQ ID NO: 427177 - protein, 14 aa, Homo sapiens
  CDR3 for alpha chain variable domain of TCR clone 213589 (TRAV8-2, TRAJ4)
CVVSPSGGYNKLIF

SEQ ID NO: 427178 - protein, 15 aa, Homo sapiens
  CDR3 for beta chain variable domain of TCR clone 213589 (TRBV4-1, TRBJ1-4)
CASSDTGGTNEKLFY

SEQ ID NO: 427179 - protein, 23 aa, Homo sapiens
  CDR3 for alpha chain variable domain of TCR clone 213590 (TRAV26-1, )
CIADNAGNNHIQNPDPAVYQLRD

SEQ ID NO: 427180 - protein, 13 aa, Homo sapiens
  CDR3 for beta chain variable domain of TCR clone 213590 (TRBV10-3, TRBJ2-7)
CASKLAVNYEQYF

SEQ ID NO: 427181 - protein, 13 aa, Homo sapiens
  CDR3 for alpha chain variable domain of TCR clone 213591 (TRAV13-2, TRAJ40)
CAEFTSGTYKYIF

SEQ ID NO: 427182 - protein, 14 aa, Homo sapiens
  CDR3 for beta chain variable domain of TCR clone 213591 (TRBV2, TRBJ2-7)
CASSLTSGGYEQYF

SEQ ID NO: 427183 - protein, 14 aa, Homo sapiens
  CDR3 for alpha chain variable domain of TCR clone 213592 (TRAV1-2, TRAJ8)
CAVREDTGFQKLVF

SEQ ID NO: 427184 - protein, 15 aa, Homo sapiens
  CDR3 for beta chain variable domain of TCR clone 213592 (TRBV7-6, TRBJ2-1)
CASSSLAGEGNEQFF

SEQ ID NO: 427185 - protein, 13 aa, Homo sapiens
  CDR3 for alpha chain variable domain of TCR clone 213593 (TRAV13-1, TRAJ39)
CSKYSNAGNMLTF

SEQ ID NO: 427186 - protein, 16 aa, Homo sapiens
  CDR3 for beta chain variable domain of TCR clone 213593 (TRBV20-1, TRBJ1-4)
CSAPGQGLLTNEKPFF

SEQ ID NO: 427187 - protein, 20 aa, Homo sapiens
  CDR3 for alpha chain variable domain of TCR clone 213594 (TRAV12-2, TRAJ52)
SPVIQPPAGAGGTSYGKLTF

SEQ ID NO: 427188 - protein, 15 aa, Homo sapiens
  CDR3 for beta chain variable domain of TCR clone 213594 (TRBV29-1, TRBJ2-6)
CSVGDRGSGANVLTF

SEQ ID NO: 427189 - protein, 14 aa, Homo sapiens
  CDR3 for alpha chain variable domain of TCR clone 213595 (TRAV12-1, TRAJ17)
CVVNYKAAGNKLTF

SEQ ID NO: 427190 - protein, 14 aa, Homo sapiens
  CDR3 for beta chain variable domain of TCR clone 213595 (TRBV28, TRBJ2-1)
CASSPSTGYSEQFF

SEQ ID NO: 427191 - protein, 15 aa, Homo sapiens
  CDR3 for alpha chain variable domain of TCR clone 213596 (TRAV21, TRAJ40)
CAVRPQTSGTYKYIF

SEQ ID NO: 427192 - protein, 15 aa, Homo sapiens
  CDR3 for beta chain variable domain of TCR clone 213596 (TRBV6-3, TRBJ2-7)
CASSSPGTVFYEQYF

SEQ ID NO: 427193 - protein, 16 aa, Homo sapiens
  CDR3 for alpha chain variable domain of TCR clone 213597 (TRAV30, TRAJ24)
CGTEIVDADSWGKFPF

SEQ ID NO: 427194 - protein, 14 aa, Homo sapiens
  CDR3 for beta chain variable domain of TCR clone 213597 (TRBV7-2, TRBJ2-3)
CASRRGLAADTQYF

SEQ ID NO: 427195 - protein, 18 aa, Homo sapiens
  CDR3 for alpha chain variable domain of TCR clone 213598 (TRAV20, TRAJ4)
CAVQPYYMFAGGYNKLIF

SEQ ID NO: 427196 - protein, 13 aa, Homo sapiens
  CDR3 for beta chain variable domain of TCR clone 213598 (TRBV19, TRBJ2-3)
CATWDKITDTQYF

SEQ ID NO: 427197 - protein, 11 aa, Homo sapiens
  CDR3 for alpha chain variable domain of TCR clone 213599 (TRAV2, TRAJ13)
CASGGYQKVTF

SEQ ID NO: 427198 - protein, 13 aa, Homo sapiens
  CDR3 for beta chain variable domain of TCR clone 213599 (TRBV9, TRBJ2-1)
CASSPSGGSEQFF

SEQ ID NO: 427199 - protein, 14 aa, Homo sapiens
  CDR3 for alpha chain variable domain of TCR clone 213600 (TRAV16, TRAJ16)
CSQGGGADGQKLLF

SEQ ID NO: 427200 - protein, 15 aa, Homo sapiens
  CDR3 for beta chain variable domain of TCR clone 213600 (TRBV20-1, TRBJ2-7)
CSARDRVSGMDEQYF

SEQ ID NO: 427201 - protein, 12 aa, Homo sapiens
  CDR3 for alpha chain variable domain of TCR clone 213601 (TRAV27, TRAJ36)
CAGMTGANNLFF

SEQ ID NO: 427202 - protein, 15 aa, Homo sapiens
  CDR3 for beta chain variable domain of TCR clone 213601 (TRBV12-4, TRBJ2-5)
CASSPPTGLQETQYF

SEQ ID NO: 427203 - protein, 10 aa, Homo sapiens
  CDR3 for alpha chain variable domain of TCR clone 213602 (TRAV23/DV6, TRAJ43)
CAAAVAALEQ

SEQ ID NO: 427204 - protein, 16 aa, Homo sapiens
  CDR3 for beta chain variable domain of TCR clone 213602 (TRBV18, TRBJ1-2)
CVSSPPERVTIYGYTF

SEQ ID NO: 427205 - protein, 12 aa, Homo sapiens
  CDR3 for alpha chain variable domain of TCR clone 213603 (TRAV13-1, TRAJ49)
RAASPMGNQFYF

SEQ ID NO: 427206 - protein, 15 aa, Homo sapiens
  CDR3 for beta chain variable domain of TCR clone 213603 (TRBV6-3, TRBJ2-7)
CASSSPGTVFYEQYF

SEQ ID NO: 427207 - protein, 13 aa, Homo sapiens
  CDR3 for alpha chain variable domain of TCR clone 213604 (TRAV12-3, TRAJ54)
CAMFAQGSQKLVF

SEQ ID NO: 427208 - protein, 16 aa, Homo sapiens
  CDR3 for beta chain variable domain of TCR clone 213604 (TRBV7-6, TRBJ2-3)
CASSPRRGGLGDTQYF

SEQ ID NO: 427209 - protein, 15 aa, Homo sapiens
  CDR3 for alpha chain variable domain of TCR clone 213605 (TRAV2, TRAJ44)
CAVEAYTCTASKLTF

SEQ ID NO: 427210 - protein, 14 aa, Homo sapiens
  CDR3 for beta chain variable domain of TCR clone 213605 (TRBV11-2, TRBJ2-1)
CASSPGSRDNEQFF

SEQ ID NO: 427211 - protein, 14 aa, Homo sapiens
  CDR3 for alpha chain variable domain of TCR clone 213606 (TRAV23/DV6, TRAJ5)
CAAKRPAGRRALTF

SEQ ID NO: 427212 - protein, 14 aa, Homo sapiens
  CDR3 for beta chain variable domain of TCR clone 213606 (TRBV12-4, TRBJ1-1)
CASSLGTGGTEAFF

SEQ ID NO: 427213 - protein, 13 aa, Homo sapiens
  CDR3 for alpha chain variable domain of TCR clone 213607 (TRAV13-1, TRAJ37)
CAAVSGNTGKLIF

SEQ ID NO: 427214 - protein, 13 aa, Homo sapiens
  CDR3 for beta chain variable domain of TCR clone 213607 (TRBV7-9, TRBJ1-2)
CASSLKQNYGYSF

SEQ ID NO: 427215 - protein, 12 aa, Homo sapiens
  CDR3 for alpha chain variable domain of TCR clone 213608 (TRAV24, TRAJ26)
CALDNYGQNFVF

SEQ ID NO: 427216 - protein, 15 aa, Homo sapiens
  CDR3 for beta chain variable domain of TCR clone 213608 (TRBV7-2, TRBJ1-1)
CASSVAGDRDTEAFF

SEQ ID NO: 427217 - protein, 17 aa, Homo sapiens
  CDR3 for alpha chain variable domain of TCR clone 213609 (TRAV13-1, TRAJ52)
CAVSSGVGGTSYGKLTF

SEQ ID NO: 427218 - protein, 15 aa, Homo sapiens
  CDR3 for beta chain variable domain of TCR clone 213609 (TRBV2, TRBJ2-1)
CASSELAGSYNEQFF

SEQ ID NO: 427219 - protein, 18 aa, Homo sapiens
  CDR3 for alpha chain variable domain of TCR clone 213610 (TRAV13-1, TRAJ52)
CAAKNPNAGGTSYGKLTF

SEQ ID NO: 427220 - protein, 15 aa, Homo sapiens
  CDR3 for beta chain variable domain of TCR clone 213610 (TRBV7-8, TRBJ1-5)
CAGSLERRGLEPQHF

SEQ ID NO: 427221 - protein, 15 aa, Homo sapiens
  CDR3 for alpha chain variable domain of TCR clone 213611 (TRAV26-2, TRAJ39)
CSFRGNNNAGNMLTF

SEQ ID NO: 427222 - protein, 15 aa, Homo sapiens
  CDR3 for beta chain variable domain of TCR clone 213611 (TRBV5-4, TRBJ1-1)
CASSSLGWANTEAFF

SEQ ID NO: 427223 - protein, 13 aa, Homo sapiens
  CDR3 for alpha chain variable domain of TCR clone 213612 (TRAV1-2, TRAJ33)
CAVSEDSNYQLIW

SEQ ID NO: 427224 - protein, 12 aa, Homo sapiens
  CDR3 for beta chain variable domain of TCR clone 213612 (TRBV14, TRBJ1-1)
CASSQLKGLAFF

SEQ ID NO: 427225 - protein, 15 aa, Homo sapiens
  CDR3 for alpha chain variable domain of TCR clone 213613 (TRAV17, TRAJ57)
CATGPSQGGTEKLVF

SEQ ID NO: 427226 - protein, 16 aa, Homo sapiens
  CDR3 for beta chain variable domain of TCR clone 213613 (TRBV20-1, TRBJ2-2)
CSASASGIPGAGELFF

SEQ ID NO: 427227 - protein, 13 aa, Homo sapiens
  CDR3 for alpha chain variable domain of TCR clone 213614 (TRAV13-2, TRAJ13)
CAERPGGYQKVTF

SEQ ID NO: 427228 - protein, 15 aa, Homo sapiens
  CDR3 for beta chain variable domain of TCR clone 213614 (TRBV20-1, TRBJ2-7)
CSARDRVSGMDEQYF

SEQ ID NO: 427229 - protein, 14 aa, Homo sapiens
  CDR3 for alpha chain variable domain of TCR clone 213615 (TRAV1-2, TRAJ16)
CAVNRFSDGQKLLF

SEQ ID NO: 427230 - protein, 16 aa, Homo sapiens
  CDR3 for beta chain variable domain of TCR clone 213615 (TRBV19, TRBJ2-1)
CASSIQAGGSYNEQFF

SEQ ID NO: 427231 - protein, 15 aa, Homo sapiens
  CDR3 for alpha chain variable domain of TCR clone 213616 (TRAV17, TRAJ57)
CATGPSQGGSEKLVY

SEQ ID NO: 427232 - protein, 15 aa, Homo sapiens
  CDR3 for beta chain variable domain of TCR clone 213616 (TRBV9, TRBJ1-6)
CASSVAGTGDSPLHF

SEQ ID NO: 427233 - protein, 15 aa, Homo sapiens
  CDR3 for alpha chain variable domain of TCR clone 213617 (TRAV25, TRAJ53)
CPTSNSGGSNYKLTF

SEQ ID NO: 427234 - protein, 14 aa, Homo sapiens
  CDR3 for beta chain variable domain of TCR clone 213617 (TRBV7-3, TRBJ1-1)
CASSLKGGNTEAFF

SEQ ID NO: 427235 - protein, 12 aa, Homo sapiens
  CDR3 for alpha chain variable domain of TCR clone 213618 (TRAV1-1, TRAJ23)
CAVTNQGGKLIF

SEQ ID NO: 427236 - protein, 15 aa, Homo sapiens
  CDR3 for beta chain variable domain of TCR clone 213618 (TRBV3-1, TRBJ2-7)
CASSRVRQGAYEQYF

SEQ ID NO: 427237 - protein, 15 aa, Homo sapiens
  CDR3 for alpha chain variable domain of TCR clone 213619 (TRAV8-6, TRAJ13)
CAVSENSGGYQKVTF

SEQ ID NO: 427238 - protein, 14 aa, Homo sapiens
  CDR3 for beta chain variable domain of TCR clone 213619 (TRBV6-6, TRBJ1-3)
CASVAGDSGNTIYF

SEQ ID NO: 427239 - protein, 14 aa, Homo sapiens
  CDR3 for alpha chain variable domain of TCR clone 213620 (TRAV3, TRAJ16)
CCERLKSDGQKLLF

SEQ ID NO: 427240 - protein, 15 aa, Homo sapiens
  CDR3 for beta chain variable domain of TCR clone 213620 (TRBV28, TRBJ2-7)
CASSPGGRGFYEQSF

SEQ ID NO: 427241 - protein, 14 aa, Homo sapiens
  CDR3 for alpha chain variable domain of TCR clone 213621 (TRAV1-2, TRAJ16)
CAVNRFSDGQKLLF

SEQ ID NO: 427242 - protein, 16 aa, Homo sapiens
  CDR3 for beta chain variable domain of TCR clone 213621 (TRBV7-3, TRBJ2-2)
CASSVKRGTLSGELFF

SEQ ID NO: 427243 - protein, 13 aa, Homo sapiens
  CDR3 for alpha chain variable domain of TCR clone 213622 (TRAV17, TRAJ9)
CATDYTGGFKTIF

SEQ ID NO: 427244 - protein, 14 aa, Homo sapiens
  CDR3 for beta chain variable domain of TCR clone 213622 (TRBV19, TRBJ2-5)
CASSMTGKQGTQYF

SEQ ID NO: 427245 - protein, 12 aa, Homo sapiens
  CDR3 for alpha chain variable domain of TCR clone 213623 (TRAV39, TRAJ49)
CAVDKHRSPVLF

SEQ ID NO: 427246 - protein, 17 aa, Homo sapiens
  CDR3 for beta chain variable domain of TCR clone 213623 (TRBV20-1, TRBJ2-1)
CSARDRRRASSYNEQFF

SEQ ID NO: 427247 - protein, 12 aa, Homo sapiens
  CDR3 for alpha chain variable domain of TCR clone 213624 (TRAV20, TRAJ4)
CSASGGYNRLIF

SEQ ID NO: 427248 - protein, 13 aa, Homo sapiens
  CDR3 for beta chain variable domain of TCR clone 213624 (TRBV9, TRBJ2-1)
CASSPSGGNEQFF

SEQ ID NO: 427249 - protein, 15 aa, Homo sapiens
  CDR3 for alpha chain variable domain of TCR clone 213625 (TRAV26-2, TRAJ39)
CSLRVNNNAGNMLTF

SEQ ID NO: 427250 - protein, 15 aa, Homo sapiens
  CDR3 for beta chain variable domain of TCR clone 213625 (TRBV5-4, TRBJ1-1)
CASSSLGWANTEAFF

SEQ ID NO: 427251 - protein, 12 aa, Homo sapiens
  CDR3 for alpha chain variable domain of TCR clone 213626 (TRAV3, TRAJ39)
CAVIEWSNMLTF

SEQ ID NO: 427252 - protein, 14 aa, Homo sapiens
  CDR3 for beta chain variable domain of TCR clone 213626 (TRBV7-8, TRBJ2-3)
CASSFPDWQDTQYF

SEQ ID NO: 427253 - protein, 15 aa, Homo sapiens
  CDR3 for alpha chain variable domain of TCR clone 213627 (TRAV21, TRAJ38)
CAVVSDAGNNRKLVW

SEQ ID NO: 427254 - protein, 13 aa, Homo sapiens
  CDR3 for beta chain variable domain of TCR clone 213627 (TRBV29-1, TRBJ2-1)
CSVEGGRVNEQFF

SEQ ID NO: 427255 - protein, 16 aa, Homo sapiens
  CDR3 for alpha chain variable domain of TCR clone 213628 (TRAV25, TRAJ24)
CAQRGGTTDSWGKLQF

SEQ ID NO: 427256 - protein, 14 aa, Homo sapiens
  CDR3 for beta chain variable domain of TCR clone 213628 (TRBV28, TRBJ2-7)
CASTTDRDGFVQYF

SEQ ID NO: 427257 - protein, 14 aa, Homo sapiens
  CDR3 for alpha chain variable domain of TCR clone 213629 (TRAV1-2, TRAJ16)
CDVNRFSDGQKLLF

SEQ ID NO: 427258 - protein, 16 aa, Homo sapiens
  CDR3 for beta chain variable domain of TCR clone 213629 (TRBV7-3, TRBJ2-2)
CASSLKRGTLSGELFF

SEQ ID NO: 427259 - protein, 13 aa, Homo sapiens
  CDR3 for alpha chain variable domain of TCR clone 213630 (TRAV13-2, TRAJ13)
CAERPGGYQKVTF

SEQ ID NO: 427260 - protein, 14 aa, Homo sapiens
  CDR3 for beta chain variable domain of TCR clone 213630 (TRBV23-1, TRBJ2-5)
CASSVLRSQETQYF

SEQ ID NO: 427261 - protein, 15 aa, Homo sapiens
  CDR3 for alpha chain variable domain of TCR clone 213631 (TRAV2, TRAJ15)
CAVEDREQAGTALIF

SEQ ID NO: 427262 - protein, 13 aa, Homo sapiens
  CDR3 for beta chain variable domain of TCR clone 213631 (TRBV7-3, TRBJ1-1)
CASSQDWGAEAFF

SEQ ID NO: 427263 - protein, 13 aa, Homo sapiens
  CDR3 for alpha chain variable domain of TCR clone 213632 (TRAV20, TRAJ42)
CAVQGGSQGNLIF

SEQ ID NO: 427264 - protein, 15 aa, Homo sapiens
  CDR3 for beta chain variable domain of TCR clone 213632 (TRBV10-1, TRBJ2-1)
CASSEWGGTYNEQFF

SEQ ID NO: 427265 - protein, 11 aa, Homo sapiens
  CDR3 for alpha chain variable domain of TCR clone 213633 (TRAV21, TRAJ41)
CAVRSGYALNF

SEQ ID NO: 427266 - protein, 13 aa, Homo sapiens
  CDR3 for beta chain variable domain of TCR clone 213633 (TRBV7-9, TRBJ1-2)
CASSLKQNYGHTV

SEQ ID NO: 427267 - protein, 16 aa, Homo sapiens
  CDR3 for alpha chain variable domain of TCR clone 213634 (TRAV20, TRAJ22)
CAVQASSSGSARQLTF

SEQ ID NO: 427268 - protein, 13 aa, Homo sapiens
  CDR3 for beta chain variable domain of TCR clone 213634 (TRBV20-1, TRBJ1-1)
CSARGGGNTEAFF

SEQ ID NO: 427269 - protein, 13 aa, Homo sapiens
  CDR3 for alpha chain variable domain of TCR clone 213635 (TRAV21, TRAJ20)
CAGGLRVDYKLSF

SEQ ID NO: 427270 - protein, 13 aa, Homo sapiens
  CDR3 for beta chain variable domain of TCR clone 213635 (TRBV3-1, TRBJ2-2)
CASLARGSGELFF

SEQ ID NO: 427271 - protein, 15 aa, Homo sapiens
  CDR3 for alpha chain variable domain of TCR clone 213636 (TRAV17, TRAJ16)
CATALRFSDGQKLLF

SEQ ID NO: 427272 - protein, 14 aa, Homo sapiens
  CDR3 for beta chain variable domain of TCR clone 213636 (TRBV7-3, TRBJ2-1)
CASSLAGGTNEQFF

SEQ ID NO: 427273 - protein, 13 aa, Homo sapiens
  CDR3 for alpha chain variable domain of TCR clone 213637 (TRAV27, TRAJ40)
CAGPPSGTYKYIF

SEQ ID NO: 427274 - protein, 13 aa, Homo sapiens
  CDR3 for beta chain variable domain of TCR clone 213637 (TRBV28, TRBJ1-2)
YAGRDRGNYGYTF

SEQ ID NO: 427275 - protein, 15 aa, Homo sapiens
  CDR3 for alpha chain variable domain of TCR clone 213638 (TRAV3, TRAJ22)
CAVRDRGGSARQQTF

SEQ ID NO: 427276 - protein, 12 aa, Homo sapiens
  CDR3 for beta chain variable domain of TCR clone 213638 (TRBV7-2, TRBJ2-1)
CASSPQDIEQFF

SEQ ID NO: 427277 - protein, 16 aa, Homo sapiens
  CDR3 for alpha chain variable domain of TCR clone 213639 (TRAV21, TRAJ37)
CAVRPRGSSNTGKLIF

SEQ ID NO: 427278 - protein, 15 aa, Homo sapiens
  CDR3 for beta chain variable domain of TCR clone 213639 (TRBV7-9, TRBJ2-7)
CASSLDLDRGYEQYF

SEQ ID NO: 427279 - protein, 14 aa, Homo sapiens
  CDR3 for alpha chain variable domain of TCR clone 213640 (TRAV12-2, TRAJ17)
CAVNIKDAGNKLTF

SEQ ID NO: 427280 - protein, 13 aa, Homo sapiens
  CDR3 for beta chain variable domain of TCR clone 213640 (TRBV7-8, TRBJ2-7)
CASSLTGGREQYF

SEQ ID NO: 427281 - protein, 14 aa, Homo sapiens
  CDR3 for alpha chain variable domain of TCR clone 213641 (TRAV13-2, TRAJ10)
CREYCRGGGNKLTF

SEQ ID NO: 427282 - protein, 15 aa, Homo sapiens
  CDR3 for beta chain variable domain of TCR clone 213641 (TRBV7-6, TRBJ2-1)
CASSPGQGPYNEQFF

SEQ ID NO: 427283 - protein, 15 aa, Homo sapiens
  CDR3 for alpha chain variable domain of TCR clone 213642 (TRAV3, TRAJ5)
FAVRDRKTGRGALTF

SEQ ID NO: 427284 - protein, 15 aa, Homo sapiens
  CDR3 for beta chain variable domain of TCR clone 213642 (TRBV7-8, TRBJ2-1)
CASSLADSLYNEQFF

SEQ ID NO: 427285 - protein, 15 aa, Homo sapiens
  CDR3 for alpha chain variable domain of TCR clone 213643 (TRAV34, TRAJ38)
CGADFTPGNNRKLIW

SEQ ID NO: 427286 - protein, 14 aa, Homo sapiens
  CDR3 for beta chain variable domain of TCR clone 213643 (TRBV19, TRBJ2-2)
CASSTLHRSGELFF

SEQ ID NO: 427287 - protein, 14 aa, Homo sapiens
  CDR3 for alpha chain variable domain of TCR clone 213644 (TRAV2, TRAJ37)
CAVDFTSNTGKLIF

SEQ ID NO: 427288 - protein, 14 aa, Homo sapiens
  CDR3 for beta chain variable domain of TCR clone 213644 (TRBV7-2, TRBJ2-1)
CASSLGVGYNEQFF

SEQ ID NO: 427289 - protein, 13 aa, Homo sapiens
  CDR3 for alpha chain variable domain of TCR clone 213645 (TRAV8-3, TRAJ28)
CAVGAVGSYQLTF

SEQ ID NO: 427290 - protein, 13 aa, Homo sapiens
  CDR3 for beta chain variable domain of TCR clone 213645 (TRBV29-1, TRBJ2-1)
RSVEGGRVNEQFF

SEQ ID NO: 427291 - protein, 13 aa, Homo sapiens
  CDR3 for alpha chain variable domain of TCR clone 213646 (TRAV23/DV6, TRAJ22)
CAPYSGSARQLTF

SEQ ID NO: 427292 - protein, 14 aa, Homo sapiens
  CDR3 for beta chain variable domain of TCR clone 213646 (TRBV7-2, TRBJ2-7)
CAGSLPPGQGPQYF

SEQ ID NO: 427293 - protein, 22 aa, Homo sapiens
  CDR3 for alpha chain variable domain of TCR clone 213647 (TRAV4, )
CLVGPHNYDIQNPDPSVYQLRN

SEQ ID NO: 427294 - protein, 17 aa, Homo sapiens
  CDR3 for beta chain variable domain of TCR clone 213647 (TRBV24-1, TRBJ2-1)
CATSDVSTSGTYNEQFF

SEQ ID NO: 427295 - protein, 15 aa, Homo sapiens
  CDR3 for alpha chain variable domain of TCR clone 213648 (TRAV3, TRAJ5)
CAVRDLDTGRRALTF

SEQ ID NO: 427296 - protein, 14 aa, Homo sapiens
  CDR3 for beta chain variable domain of TCR clone 213648 (TRBV25-1, TRBJ1-1)
CDSTHLGGNTEAFF

SEQ ID NO: 427297 - protein, 11 aa, Homo sapiens
  CDR3 for alpha chain variable domain of TCR clone 213649 (TRAV17, TRAJ31)
CATSNNARLMF

SEQ ID NO: 427298 - protein, 16 aa, Homo sapiens
  CDR3 for beta chain variable domain of TCR clone 213649 (TRBV28, TRBJ2-2)
CASSLEGGSNTGELFF

SEQ ID NO: 427299 - protein, 14 aa, Homo sapiens
  CDR3 for alpha chain variable domain of TCR clone 213650 (TRAV16, TRAJ33)
CALSAMDSNYQLIW

SEQ ID NO: 427300 - protein, 15 aa, Homo sapiens
  CDR3 for beta chain variable domain of TCR clone 213650 (TRBV9, TRBJ2-1)
CASSLAGSSYNEQFF

SEQ ID NO: 427301 - protein, 11 aa, Homo sapiens
  CDR3 for alpha chain variable domain of TCR clone 213651 (TRAV3, TRAJ21)
CSVGNFNNFYF

SEQ ID NO: 427302 - protein, 16 aa, Homo sapiens
  CDR3 for beta chain variable domain of TCR clone 213651 (TRBV19, TRBJ2-1)
CASSKAGPSSYNEQFF

SEQ ID NO: 427303 - protein, 14 aa, Homo sapiens
  CDR3 for alpha chain variable domain of TCR clone 213652 (TRAV12-3, TRAJ42)
CAMNYGGSQGNLIF

SEQ ID NO: 427304 - protein, 14 aa, Homo sapiens
  CDR3 for beta chain variable domain of TCR clone 213652 (TRBV6-3, TRBJ1-1)
CASSYGGQHTEAFF

SEQ ID NO: 427305 - protein, 14 aa, Homo sapiens
  CDR3 for alpha chain variable domain of TCR clone 213653 (TRAV2, TRAJ9)
CAVEDRSGGFKTIF

SEQ ID NO: 427306 - protein, 17 aa, Homo sapiens
  CDR3 for beta chain variable domain of TCR clone 213653 (TRBV5-1, TRBJ2-5)
CASSPVALGQNQETQYF

SEQ ID NO: 427307 - protein, 13 aa, Homo sapiens
  CDR3 for alpha chain variable domain of TCR clone 213654 (TRAV3, TRAJ43)
CAVRDTRGGDMRF

SEQ ID NO: 427308 - protein, 15 aa, Homo sapiens
  CDR3 for beta chain variable domain of TCR clone 213654 (TRBV6-5, TRBJ1-5)
CASSYSRRSSQPQHF

SEQ ID NO: 427309 - protein, 14 aa, Homo sapiens
  CDR3 for alpha chain variable domain of TCR clone 213655 (TRAV13-1, TRAJ44)
CEAKATGTASKLTF

SEQ ID NO: 427310 - protein, 15 aa, Homo sapiens
  CDR3 for beta chain variable domain of TCR clone 213655 (TRBV4-3, TRBJ1-1)
CASSQELGRGTEAFF

SEQ ID NO: 427311 - protein, 14 aa, Homo sapiens
  CDR3 for alpha chain variable domain of TCR clone 213656 (TRAV9-2, TRAJ39)
CALYIYNAGNMLTF

SEQ ID NO: 427312 - protein, 13 aa, Homo sapiens
  CDR3 for beta chain variable domain of TCR clone 213656 (TRBV6-5, TRBJ2-5)
CASSPQGGETQYF

SEQ ID NO: 427313 - protein, 15 aa, Homo sapiens
  CDR3 for alpha chain variable domain of TCR clone 213657 (TRAV27, TRAJ38)
CAAGRNAGNNRKLIW

SEQ ID NO: 427314 - protein, 13 aa, Homo sapiens
  CDR3 for beta chain variable domain of TCR clone 213657 (TRBV12-5, TRBJ2-3)
CASGDRQSDTQYF

SEQ ID NO: 427315 - protein, 12 aa, Homo sapiens
  CDR3 for alpha chain variable domain of TCR clone 213658 (TRAV13-1, TRAJ49)
CAASIWGNQCYF

SEQ ID NO: 427316 - protein, 14 aa, Homo sapiens
  CDR3 for beta chain variable domain of TCR clone 213658 (TRBV12-4, TRBJ1-1)
CASSLDGLNTEAFF

SEQ ID NO: 427317 - protein, 21 aa, Homo sapiens
  CDR3 for alpha chain variable domain of TCR clone 213659 (TRAV9-2, )
CALIQIGDIQNPDPAVYQLRD

SEQ ID NO: 427318 - protein, 12 aa, Homo sapiens
  CDR3 for beta chain variable domain of TCR clone 213659 (TRBV7-8, TRBJ2-7)
CASSLGDREQYF

SEQ ID NO: 427319 - protein, 14 aa, Homo sapiens
  CDR3 for alpha chain variable domain of TCR clone 213660 (TRAV2, TRAJ9)
CAVEDRSGGFNTIF

SEQ ID NO: 427320 - protein, 11 aa, Homo sapiens
  CDR3 for beta chain variable domain of TCR clone 213660 (TRBV7-9, TRBJ2-5)
CASSLGETQYF

SEQ ID NO: 427321 - protein, 14 aa, Homo sapiens
  CDR3 for alpha chain variable domain of TCR clone 213661 (TRAV2, TRAJ9)
CAVEDRSGGFKTIF

SEQ ID NO: 427322 - protein, 16 aa, Homo sapiens
  CDR3 for beta chain variable domain of TCR clone 213661 (TRBV10-3, TRBJ1-5)
CAISGQGGLSNQPQHF

SEQ ID NO: 427323 - protein, 14 aa, Homo sapiens
  CDR3 for alpha chain variable domain of TCR clone 213662 (TRAV12-2, TRAJ13)
CAVKKTGVYQKVTF

SEQ ID NO: 427324 - protein, 12 aa, Homo sapiens
  CDR3 for beta chain variable domain of TCR clone 213662 (TRBV11-2, TRBJ2-2)
CASSLGGGELFF

SEQ ID NO: 427325 - protein, 11 aa, Homo sapiens
  CDR3 for alpha chain variable domain of TCR clone 213663 (TRAV27, TRAJ45)
CAGAQEEVLTD

SEQ ID NO: 427326 - protein, 13 aa, Homo sapiens
  CDR3 for beta chain variable domain of TCR clone 213663 (TRBV5-1, TRBJ1-1)
CASSLEPRYEAFF

SEQ ID NO: 427327 - protein, 18 aa, Homo sapiens
  CDR3 for alpha chain variable domain of TCR clone 213664 (TRAV8-3, TRAJ13)
CAVGAYPSGGYQKVTLEL

SEQ ID NO: 427328 - protein, 15 aa, Homo sapiens
  CDR3 for beta chain variable domain of TCR clone 213664 (TRBV19, TRBJ1-5)
FASSIVWADNQPQHF

SEQ ID NO: 427329 - protein, 14 aa, Homo sapiens
  CDR3 for alpha chain variable domain of TCR clone 213665 (TRAV8-1, TRAJ5)
CAVRTDTSRRALTF

SEQ ID NO: 427330 - protein, 15 aa, Homo sapiens
  CDR3 for beta chain variable domain of TCR clone 213665 (TRBV7-3, TRBJ2-1)
CASSPTGGGEVEQFF

SEQ ID NO: 427331 - protein, 16 aa, Homo sapiens
  CDR3 for alpha chain variable domain of TCR clone 213666 (TRAV3, TRAJ3)
CDVRDRAKSSASKIIF

SEQ ID NO: 427332 - protein, 13 aa, Homo sapiens
  CDR3 for beta chain variable domain of TCR clone 213666 (TRBV10-3, TRBJ2-7)
CASKLAVNYEQYF

SEQ ID NO: 427333 - protein, 12 aa, Homo sapiens
  CDR3 for alpha chain variable domain of TCR clone 213667 (TRAV21, TRAJ3)
CCFYSSASKIIF

SEQ ID NO: 427334 - protein, 14 aa, Homo sapiens
  CDR3 for beta chain variable domain of TCR clone 213667 (TRBV7-2, TRBJ1-1)
CASSFLTGTTEAFL

SEQ ID NO: 427335 - protein, 16 aa, Homo sapiens
  CDR3 for alpha chain variable domain of TCR clone 213668 (TRAV12-2, TRAJ32)
CAVNLGQGGATNKLIF

SEQ ID NO: 427336 - protein, 16 aa, Homo sapiens
  CDR3 for beta chain variable domain of TCR clone 213668 (TRBV27, TRBJ2-2)
CASSFRGLVRTGELFF

SEQ ID NO: 427337 - protein, 17 aa, Homo sapiens
  CDR3 for alpha chain variable domain of TCR clone 213669 (TRAV4, TRAJ13)
CLVGVQGSSGGYQKVTF

SEQ ID NO: 427338 - protein, 14 aa, Homo sapiens
  CDR3 for beta chain variable domain of TCR clone 213669 (TRBV15, TRBJ2-3)
CATRSGTSTDTQYF

SEQ ID NO: 427339 - protein, 14 aa, Homo sapiens
  CDR3 for alpha chain variable domain of TCR clone 213670 (TRAV2, TRAJ3)
CAVRQYSSASKIIF

SEQ ID NO: 427340 - protein, 17 aa, Homo sapiens
  CDR3 for beta chain variable domain of TCR clone 213670 (TRBV7-6, TRBJ2-5)
CASSSPQAGDPSETQYF

SEQ ID NO: 427341 - protein, 12 aa, Homo sapiens
  CDR3 for alpha chain variable domain of TCR clone 213671 (TRAV13-1, TRAJ15)
FAASQAGTALIF

SEQ ID NO: 427342 - protein, 14 aa, Homo sapiens
  CDR3 for beta chain variable domain of TCR clone 213671 (TRBV19, TRBJ2-2)
CPSSTLHRSGELFF

SEQ ID NO: 427343 - protein, 11 aa, Homo sapiens
  CDR3 for alpha chain variable domain of TCR clone 213672 (TRAV12-1, TRAJ26)
CVVSYGQNFVF

SEQ ID NO: 427344 - protein, 15 aa, Homo sapiens
  CDR3 for beta chain variable domain of TCR clone 213672 (TRBV12-4, TRBJ2-5)
CASSGTGQAQETQYF

SEQ ID NO: 427345 - protein, 13 aa, Homo sapiens
  CDR3 for alpha chain variable domain of TCR clone 213673 (TRAV21, TRAJ57)
CAVTQGVSETLVF

SEQ ID NO: 427346 - protein, 16 aa, Homo sapiens
  CDR3 for beta chain variable domain of TCR clone 213673 (TRBV29-1, TRBJ2-7)
CSVEDAEDGTAYEQYF

SEQ ID NO: 427347 - protein, 14 aa, Homo sapiens
  CDR3 for alpha chain variable domain of TCR clone 213674 (TRAV12-3, TRAJ10)
SHLPLTGGGNKLTF

SEQ ID NO: 427348 - protein, 12 aa, Homo sapiens
  CDR3 for beta chain variable domain of TCR clone 213674 (TRBV7-3, TRBJ2-5)
CASSPPGGTQYF

SEQ ID NO: 427349 - protein, 11 aa, Homo sapiens
  CDR3 for alpha chain variable domain of TCR clone 213675 (TRAV1-1, TRAJ20)
CAVFNDYKLSF

SEQ ID NO: 427350 - protein, 16 aa, Homo sapiens
  CDR3 for beta chain variable domain of TCR clone 213675 (TRBV29-1, TRBJ2-2)
CSVEKTSEGNTGELVF

SEQ ID NO: 427351 - protein, 10 aa, Homo sapiens
  CDR3 for alpha chain variable domain of TCR clone 213676 (TRAV1-2, TRAJ31)
CVSEDARLMF

SEQ ID NO: 427352 - protein, 14 aa, Homo sapiens
  CDR3 for beta chain variable domain of TCR clone 213676 (TRBV19, TRBJ2-1)
CASPAFVLSGEQFF

SEQ ID NO: 427353 - protein, 14 aa, Homo sapiens
  CDR3 for alpha chain variable domain of TCR clone 213677 (TRAV12-1, TRAJ38)
CGELKAGNNRKLIW

SEQ ID NO: 427354 - protein, 15 aa, Homo sapiens
  CDR3 for beta chain variable domain of TCR clone 213677 (TRBV18, TRBJ2-1)
CASSPPSAAYNEQFF

SEQ ID NO: 427355 - protein, 15 aa, Homo sapiens
  CDR3 for alpha chain variable domain of TCR clone 213678 (TRAV3, TRAJ22)
CAVRDRGGSARQLTF

SEQ ID NO: 427356 - protein, 12 aa, Homo sapiens
  CDR3 for beta chain variable domain of TCR clone 213678 (TRBV11-2, TRBJ2-1)
CASSPGNNERFF

SEQ ID NO: 427357 - protein, 20 aa, Homo sapiens
  CDR3 for alpha chain variable domain of TCR clone 213679 (TRAV1-1, TRAJ39)
CLLLLRCESSAYNAGNMLIF

SEQ ID NO: 427358 - protein, 13 aa, Homo sapiens
  CDR3 for beta chain variable domain of TCR clone 213679 (TRBV12-4, TRBJ1-5)
CASSPDRAQPQHF

SEQ ID NO: 427359 - protein, 14 aa, Homo sapiens
  CDR3 for alpha chain variable domain of TCR clone 213680 (TRAV12-1, TRAJ38)
CGELKAGNNRRLIW

SEQ ID NO: 427360 - protein, 12 aa, Homo sapiens
  CDR3 for beta chain variable domain of TCR clone 213680 (TRBV24-1, TRBJ1-1)
CATLYPDTEAFF

SEQ ID NO: 427361 - protein, 15 aa, Homo sapiens
  CDR3 for alpha chain variable domain of TCR clone 213681 (TRAV26-1, TRAJ29)
CVVRVEGSGNTPLAF

SEQ ID NO: 427362 - protein, 15 aa, Homo sapiens
  CDR3 for beta chain variable domain of TCR clone 213681 (TRBV7-9, TRBJ1-5)
CASSQGHQPNQPQHF

SEQ ID NO: 427363 - protein, 11 aa, Homo sapiens
  CDR3 for alpha chain variable domain of TCR clone 213682 (TRAV12-1, TRAJ31)
CVVNEQCQTHV

SEQ ID NO: 427364 - protein, 11 aa, Homo sapiens
  CDR3 for beta chain variable domain of TCR clone 213682 (TRBV11-2, TRBJ1-1)
CASSINTEAFF

SEQ ID NO: 427365 - protein, 16 aa, Homo sapiens
  CDR3 for alpha chain variable domain of TCR clone 213683 (TRAV8-3, TRAJ10)
CAVGPILTGGGNKLTF

SEQ ID NO: 427366 - protein, 20 aa, Homo sapiens
  CDR3 for beta chain variable domain of TCR clone 213683 (TRBV7-2, TRBJ2-5)
CASSSKWLSGQDPVLRARHA

SEQ ID NO: 427367 - protein, 15 aa, Homo sapiens
  CDR3 for alpha chain variable domain of TCR clone 213684 (TRAV8-3, TRAJ15)
CAVGAPNQAGTALIF

SEQ ID NO: 427368 - protein, 16 aa, Homo sapiens
  CDR3 for beta chain variable domain of TCR clone 213684 (TRBV12-5, TRBJ2-5)
CASGPRTSGNQETQYF

SEQ ID NO: 427369 - protein, 16 aa, Homo sapiens
  CDR3 for alpha chain variable domain of TCR clone 213685 (TRAV26-1, TRAJ37)
CIVRGDGSGNTGKLIF

SEQ ID NO: 427370 - protein, 16 aa, Homo sapiens
  CDR3 for beta chain variable domain of TCR clone 213685 (TRBV4-1, TRBJ2-1)
CASSQEAGQGSDEQFF

SEQ ID NO: 427371 - protein, 15 aa, Homo sapiens
  CDR3 for alpha chain variable domain of TCR clone 213686 (TRAV8-3, TRAJ27)
CAVGPSKTNAGKSTF

SEQ ID NO: 427372 - protein, 14 aa, Homo sapiens
  CDR3 for beta chain variable domain of TCR clone 213686 (TRBV7-3, TRBJ2-1)
CASSVAGGTNEQLF

SEQ ID NO: 427373 - protein, 14 aa, Homo sapiens
  CDR3 for alpha chain variable domain of TCR clone 213687 (TRAV2, TRAJ9)
CAVEDRSGGFKTIF

SEQ ID NO: 427374 - protein, 17 aa, Homo sapiens
  CDR3 for beta chain variable domain of TCR clone 213687 (TRBV7-9, TRBJ2-6)
CASSFGAGYSGANVLTF

SEQ ID NO: 427375 - protein, 15 aa, Homo sapiens
  CDR3 for alpha chain variable domain of TCR clone 213688 (TRAV4, TRAJ42)
CRVGGYGGSQGNLIF

SEQ ID NO: 427376 - protein, 16 aa, Homo sapiens
  CDR3 for beta chain variable domain of TCR clone 213688 (TRBV27, TRBJ1-1)
CASSTRTGGVGTEAFV

SEQ ID NO: 427377 - protein, 14 aa, Homo sapiens
  CDR3 for alpha chain variable domain of TCR clone 213689 (TRAV2, TRAJ9)
CAVEDRCGGFKTIF

SEQ ID NO: 427378 - protein, 13 aa, Homo sapiens
  CDR3 for beta chain variable domain of TCR clone 213689 (TRBV12-4, TRBJ1-5)
CASSPDRAQPQHF

SEQ ID NO: 427379 - protein, 18 aa, Homo sapiens
  CDR3 for alpha chain variable domain of TCR clone 213690 (TRAV12-3, TRAJ52)
CAMSARNAGGTSYGKLTF

SEQ ID NO: 427380 - protein, 13 aa, Homo sapiens
  CDR3 for beta chain variable domain of TCR clone 213690 (TRBV27, TRBJ1-1)
CASSLSIGAEAFF

SEQ ID NO: 427381 - protein, 10 aa, Homo sapiens
  CDR3 for alpha chain variable domain of TCR clone 213691 (TRAV12-2, TRAJ22)
CAVSETQLTF

SEQ ID NO: 427382 - protein, 13 aa, Homo sapiens
  CDR3 for beta chain variable domain of TCR clone 213691 (TRBV6-5, TRBJ2-6)
CASSTSGPRRLDF

SEQ ID NO: 427383 - protein, 13 aa, Homo sapiens
  CDR3 for alpha chain variable domain of TCR clone 213692 (TRAV2, TRAJ40)
CAVVTSGTYKYIF

SEQ ID NO: 427384 - protein, 14 aa, Homo sapiens
  CDR3 for beta chain variable domain of TCR clone 213692 (TRBV19, TRBJ2-1)
CASRTFVLSGEQSF

SEQ ID NO: 427385 - protein, 15 aa, Homo sapiens
  CDR3 for alpha chain variable domain of TCR clone 213693 (TRAV21, TRAJ53)
CATLNSGGSNYKLTF

SEQ ID NO: 427386 - protein, 14 aa, Homo sapiens
  CDR3 for beta chain variable domain of TCR clone 213693 (TRBV5-7, TRBJ2-2)
CASSLARNTGELFF

SEQ ID NO: 427387 - protein, 15 aa, Homo sapiens
  CDR3 for alpha chain variable domain of TCR clone 213694 (TRAV26-1, TRAJ17)
CIVRVVKAAGNKLTF

SEQ ID NO: 427388 - protein, 16 aa, Homo sapiens
  CDR3 for beta chain variable domain of TCR clone 213694 (TRBV4-1, TRBJ2-7)
CASSQEWTSGPLEQYF

SEQ ID NO: 427389 - protein, 13 aa, Homo sapiens
  CDR3 for alpha chain variable domain of TCR clone 213695 (TRAV36/DV7, TRAJ37)
FAVFSSNTGKLIF

SEQ ID NO: 427390 - protein, 14 aa, Homo sapiens
  CDR3 for beta chain variable domain of TCR clone 213695 (TRBV6-1, TRBJ1-3)
CASVQGGGGNTIYF

SEQ ID NO: 427391 - protein, 14 aa, Homo sapiens
  CDR3 for alpha chain variable domain of TCR clone 213696 (TRAV8-4, TRAJ9)
CAVRINTGGFKTIF

SEQ ID NO: 427392 - protein, 11 aa, Homo sapiens
  CDR3 for beta chain variable domain of TCR clone 213696 (TRBV10-3, TRBJ2-7)
CAISEGLEQYF

SEQ ID NO: 427393 - protein, 14 aa, Homo sapiens
  CDR3 for alpha chain variable domain of TCR clone 213697 (TRAV1-2, TRAJ10)
CAVRVTGGGNKLTF

SEQ ID NO: 427394 - protein, 13 aa, Homo sapiens
  CDR3 for beta chain variable domain of TCR clone 213697 (TRBV19, TRBJ1-2)
CASSVPGQDGYTF

SEQ ID NO: 427395 - protein, 13 aa, Homo sapiens
  CDR3 for alpha chain variable domain of TCR clone 213698 (TRAV13-1, TRAJ4)
CAASIGGYNKLIF

SEQ ID NO: 427396 - protein, 16 aa, Homo sapiens
  CDR3 for beta chain variable domain of TCR clone 213698 (TRBV20-1, TRBJ2-1)
FSAPGLAGSYSDEQFF

SEQ ID NO: 427397 - protein, 14 aa, Homo sapiens
  CDR3 for alpha chain variable domain of TCR clone 213699 (TRAV2, TRAJ9)
CAVEDRSGGFKTIF

SEQ ID NO: 427398 - protein, 14 aa, Homo sapiens
  CDR3 for beta chain variable domain of TCR clone 213699 (TRBV18, TRBJ1-5)
CASSRQQRNQPQHY

SEQ ID NO: 427399 - protein, 13 aa, Homo sapiens
  CDR3 for alpha chain variable domain of TCR clone 213700 (TRAV21, TRAJ57)
CAVTQGGSEKLVF

SEQ ID NO: 427400 - protein, 15 aa, Homo sapiens
  CDR3 for beta chain variable domain of TCR clone 213700 (TRBV5-1, TRBJ1-1)
CASSSTTGRNTEAFF

SEQ ID NO: 427401 - protein, 12 aa, Homo sapiens
  CDR3 for alpha chain variable domain of TCR clone 213701 (TRAV20, TRAJ57)
CAVGGGSEKLVF

SEQ ID NO: 427402 - protein, 15 aa, Homo sapiens
  CDR3 for beta chain variable domain of TCR clone 213701 (TRBV5-1, TRBJ2-7)
CASSLNGGPAREQYF

SEQ ID NO: 427403 - protein, 14 aa, Homo sapiens
  CDR3 for alpha chain variable domain of TCR clone 213702 (TRAV8-1, TRAJ39)
CAVNASNAGNILTF

SEQ ID NO: 427404 - protein, 13 aa, Homo sapiens
  CDR3 for beta chain variable domain of TCR clone 213702 (TRBV10-3, TRBJ2-7)
CASKLAVNYEQHF

SEQ ID NO: 427405 - protein, 11 aa, Homo sapiens
  CDR3 for alpha chain variable domain of TCR clone 213703 (TRAV12-3, TRAJ54)
CGLQGAQKLVF

SEQ ID NO: 427406 - protein, 12 aa, Homo sapiens
  CDR3 for beta chain variable domain of TCR clone 213703 (TRBV5-1, TRBJ2-7)
CASSSTTYEQYF

SEQ ID NO: 427407 - protein, 13 aa, Homo sapiens
  CDR3 for alpha chain variable domain of TCR clone 213704 (TRAV12-3, TRAJ13)
CAMGTGGYQTVTF

SEQ ID NO: 427408 - protein, 14 aa, Homo sapiens
  CDR3 for beta chain variable domain of TCR clone 213704 (TRBV7-2, TRBJ2-5)
CASSTGGELKTQYF

SEQ ID NO: 427409 - protein, 15 aa, Homo sapiens
  CDR3 for alpha chain variable domain of TCR clone 213705 (TRAV21, TRAJ24)
CAARSSTDSWGQLPF

SEQ ID NO: 427410 - protein, 13 aa, Homo sapiens
  CDR3 for beta chain variable domain of TCR clone 213705 (TRBV11-2, TRBJ2-5)
CASSSTGEETQYF

SEQ ID NO: 427411 - protein, 15 aa, Homo sapiens
  CDR3 for alpha chain variable domain of TCR clone 213706 (TRAV12-3, TRAJ49)
CAMAVTPNTGNQFYF

SEQ ID NO: 427412 - protein, 18 aa, Homo sapiens
  CDR3 for beta chain variable domain of TCR clone 213706 (TRBV4-1, TRBJ1-5)
CASSQDPWGQGLNQPQHF

SEQ ID NO: 427413 - protein, 13 aa, Homo sapiens
  CDR3 for alpha chain variable domain of TCR clone 213707 (TRAV12-3, TRAJ33)
CAMSVNSNDQLIW

SEQ ID NO: 427414 - protein, 16 aa, Homo sapiens
  CDR3 for beta chain variable domain of TCR clone 213707 (TRBV7-3, TRBJ2-3)
CASSLSGYRPEDTQYF

SEQ ID NO: 427415 - protein, 15 aa, Homo sapiens
  CDR3 for alpha chain variable domain of TCR clone 213708 (TRAV8-3, TRAJ45)
CASSYSGGCADGLTF

SEQ ID NO: 427416 - protein, 13 aa, Homo sapiens
  CDR3 for beta chain variable domain of TCR clone 213708 (TRBV10-3, TRBJ2-7)
CASKLAVNYGQYF

SEQ ID NO: 427417 - protein, 15 aa, Homo sapiens
  CDR3 for alpha chain variable domain of TCR clone 213709 (TRAV35, TRAJ52)
CAGPRGGTSYGKLTF

SEQ ID NO: 427418 - protein, 13 aa, Homo sapiens
  CDR3 for beta chain variable domain of TCR clone 213709 (TRBV28, TRBJ1-5)
CASSDRGNQPQHF

SEQ ID NO: 427419 - protein, 14 aa, Homo sapiens
  CDR3 for alpha chain variable domain of TCR clone 213710 (TRAV26-2, TRAJ32)
CCVGYGGATNKLIF

SEQ ID NO: 427420 - protein, 14 aa, Homo sapiens
  CDR3 for beta chain variable domain of TCR clone 213710 (TRBV4-2, TRBJ2-1)
CARGLDRAYNEQFF

SEQ ID NO: 427421 - protein, 17 aa, Homo sapiens
  CDR3 for alpha chain variable domain of TCR clone 213711 (TRAV3, TRAJ12)
CAVRDGGRMDSSYKLIF

SEQ ID NO: 427422 - protein, 12 aa, Homo sapiens
  CDR3 for beta chain variable domain of TCR clone 213711 (TRBV7-2, TRBJ2-1)
CASSPQDIEQFF

SEQ ID NO: 427423 - protein, 12 aa, Homo sapiens
  CDR3 for alpha chain variable domain of TCR clone 213712 (TRAV12-2, TRAJ10)
WGVTGGGNKLTF

SEQ ID NO: 427424 - protein, 15 aa, Homo sapiens
  CDR3 for beta chain variable domain of TCR clone 213712 (TRBV19, TRBJ1-1)
CASTSGQIQNTEAFF

SEQ ID NO: 427425 - protein, 13 aa, Homo sapiens
  CDR3 for alpha chain variable domain of TCR clone 213713 (TRAV21, TRAJ57)
CAVTQGGSEKLVF

SEQ ID NO: 427426 - protein, 15 aa, Homo sapiens
  CDR3 for beta chain variable domain of TCR clone 213713 (TRBV11-2, TRBJ1-3)
CASSAHSSSGNTIYF

SEQ ID NO: 427427 - protein, 14 aa, Homo sapiens
  CDR3 for alpha chain variable domain of TCR clone 213714 (TRAV12-3, TRAJ53)
MSPGSGGSNYKLTF

SEQ ID NO: 427428 - protein, 16 aa, Homo sapiens
  CDR3 for beta chain variable domain of TCR clone 213714 (TRBV4-2, TRBJ1-1)
CASSQAGFGMNTEAFF

SEQ ID NO: 427429 - protein, 12 aa, Homo sapiens
  CDR3 for alpha chain variable domain of TCR clone 213715 (TRAV2, TRAJ9)
CAVGAGGFKTIF

SEQ ID NO: 427430 - protein, 16 aa, Homo sapiens
  CDR3 for beta chain variable domain of TCR clone 213715 (TRBV27, TRBJ2-2)
CASSFRGLVRTGELFF

SEQ ID NO: 427431 - protein, 14 aa, Homo sapiens
  CDR3 for alpha chain variable domain of TCR clone 213716 (TRAV3, TRAJ34)
CAVRAPGNTYKLIF

SEQ ID NO: 427432 - protein, 17 aa, Homo sapiens
  CDR3 for beta chain variable domain of TCR clone 213716 (TRBV20-1, TRBJ2-7)
CSAAPGLARGISYEQYF

SEQ ID NO: 427433 - protein, 15 aa, Homo sapiens
  CDR3 for alpha chain variable domain of TCR clone 213717 (TRAV26-1, TRAJ40)
CIVRVTTSGTYKHIF

SEQ ID NO: 427434 - protein, 16 aa, Homo sapiens
  CDR3 for beta chain variable domain of TCR clone 213717 (TRBV28, TRBJ2-7)
CASSLFFETGGPEQYF

SEQ ID NO: 427435 - protein, 14 aa, Homo sapiens
  CDR3 for alpha chain variable domain of TCR clone 213718 (TRAV8-4, TRAJ48)
CAVSETFGNEKLTF

SEQ ID NO: 427436 - protein, 13 aa, Homo sapiens
  CDR3 for beta chain variable domain of TCR clone 213718 (TRBV7-9, TRBJ2-7)
CASSFYGSYEQYF

SEQ ID NO: 427437 - protein, 15 aa, Homo sapiens
  CDR3 for alpha chain variable domain of TCR clone 213719 (TRAV21, TRAJ40)
CAVRPQTSGTYKYIF

SEQ ID NO: 427438 - protein, 15 aa, Homo sapiens
  CDR3 for beta chain variable domain of TCR clone 213719 (TRBV7-2, TRBJ1-2)
CASSPRAGWNYGYTF

SEQ ID NO: 427439 - protein, 15 aa, Homo sapiens
  CDR3 for alpha chain variable domain of TCR clone 213720 (TRAV2, TRAJ15)
CAVEDREQAGTALIF

SEQ ID NO: 427440 - protein, 15 aa, Homo sapiens
  CDR3 for beta chain variable domain of TCR clone 213720 (TRBV7-3, TRBJ2-3)
CASSLGLTLGDTQYF

SEQ ID NO: 427441 - protein, 16 aa, Homo sapiens
  CDR3 for alpha chain variable domain of TCR clone 213721 (TRAV3, TRAJ3)
CAVRDRAKGSASKIIF

SEQ ID NO: 427442 - protein, 13 aa, Homo sapiens
  CDR3 for beta chain variable domain of TCR clone 213721 (TRBV10-3, TRBJ2-7)
CASKLAVNYEQYF

SEQ ID NO: 427443 - protein, 17 aa, Homo sapiens
  CDR3 for alpha chain variable domain of TCR clone 213722 (TRAV3, TRAJ6)
CAVRDGPRAGGSYIPTF

SEQ ID NO: 427444 - protein, 15 aa, Homo sapiens
  CDR3 for beta chain variable domain of TCR clone 213722 (TRBV11-3, TRBJ2-3)
CASLKDGREGYTQYF

SEQ ID NO: 427445 - protein, 14 aa, Homo sapiens
  CDR3 for alpha chain variable domain of TCR clone 213723 (TRAV26-1, TRAJ45)
CIEVTGGGADGLTF

SEQ ID NO: 427446 - protein, 13 aa, Homo sapiens
  CDR3 for beta chain variable domain of TCR clone 213723 (TRBV12-4, TRBJ2-7)
CASSPTETYEQYF

SEQ ID NO: 427447 - protein, 15 aa, Homo sapiens
  CDR3 for alpha chain variable domain of TCR clone 213724 (TRAV13-1, TRAJ42)
CAAPNYGGSQGNLIF

SEQ ID NO: 427448 - protein, 19 aa, Homo sapiens
  CDR3 for beta chain variable domain of TCR clone 213724 (TRBV7-2, TRBJ2-3)
CASSFLSRNWGGGTDTQYF

SEQ ID NO: 427449 - protein, 15 aa, Homo sapiens
  CDR3 for alpha chain variable domain of TCR clone 213725 (TRAV16, TRAJ16)
CALQGGGSDGQTLLF

SEQ ID NO: 427450 - protein, 15 aa, Homo sapiens
  CDR3 for beta chain variable domain of TCR clone 213725 (TRBV20-1, TRBJ2-7)
CSARDRVSGMDEQYF

SEQ ID NO: 427451 - protein, 18 aa, Homo sapiens
  CDR3 for alpha chain variable domain of TCR clone 213726 (TRAV39, TRAJ43)
CMTSLPPTSVPWANDMRF

SEQ ID NO: 427452 - protein, 15 aa, Homo sapiens
  CDR3 for beta chain variable domain of TCR clone 213726 (TRBV12-4, TRBJ2-5)
CASSPPTGLQETQYF

SEQ ID NO: 427453 - protein, 12 aa, Homo sapiens
  CDR3 for alpha chain variable domain of TCR clone 213727 (TRAV8-3, TRAJ26)
CAGDNYGQNFVF

SEQ ID NO: 427454 - protein, 11 aa, Homo sapiens
  CDR3 for beta chain variable domain of TCR clone 213727 (TRBV19, TRBJ1-1)
CASSIGSDAFF

SEQ ID NO: 427455 - protein, 14 aa, Homo sapiens
  CDR3 for alpha chain variable domain of TCR clone 213728 (TRAV13-1, TRAJ8)
CAASEDTGFQKLVF

SEQ ID NO: 427456 - protein, 13 aa, Homo sapiens
  CDR3 for beta chain variable domain of TCR clone 213728 (TRBV19, TRBJ1-5)
SASSTRRDQPQHF

SEQ ID NO: 427457 - protein, 11 aa, Homo sapiens
  CDR3 for alpha chain variable domain of TCR clone 213729 (TRAV3, TRAJ21)
CAVGNFNKFSF

SEQ ID NO: 427458 - protein, 12 aa, Homo sapiens
  CDR3 for beta chain variable domain of TCR clone 213729 (TRBV14, TRBJ2-5)
CASSHLKETQYF

SEQ ID NO: 427459 - protein, 15 aa, Homo sapiens
  CDR3 for alpha chain variable domain of TCR clone 213730 (TRAV12-3, TRAJ49)
CAMAVTPNTGNQFYF

SEQ ID NO: 427460 - protein, 14 aa, Homo sapiens
  CDR3 for beta chain variable domain of TCR clone 213730 (TRBV4-2, TRBJ2-5)
CARSQDRGRETQYF

SEQ ID NO: 427461 - protein, 11 aa, Homo sapiens
  CDR3 for alpha chain variable domain of TCR clone 213731 (TRAV1-2, TRAJ20)
CAVSNDYKLIF

SEQ ID NO: 427462 - protein, 16 aa, Homo sapiens
  CDR3 for beta chain variable domain of TCR clone 213731 (TRBV29-1, TRBJ2-6)
CSVEDITYSGANVLTF

SEQ ID NO: 427463 - protein, 15 aa, Homo sapiens
  CDR3 for alpha chain variable domain of TCR clone 213732 (TRAV17, TRAJ22)
CATVAPSGSARQLTF

SEQ ID NO: 427464 - protein, 19 aa, Homo sapiens
  CDR3 for beta chain variable domain of TCR clone 213732 (TRBV2, TRBJ2-7)
CASSDDETSGRANDYEQYF

SEQ ID NO: 427465 - protein, 15 aa, Homo sapiens
  CDR3 for alpha chain variable domain of TCR clone 213733 (TRAV8-3, TRAJ11)
CAVGLLNSGYSTLTF

SEQ ID NO: 427466 - protein, 13 aa, Homo sapiens
  CDR3 for beta chain variable domain of TCR clone 213733 (TRBV4-2, TRBJ2-5)
CASSRAGGENQYF

SEQ ID NO: 427467 - protein, 14 aa, Homo sapiens
  CDR3 for alpha chain variable domain of TCR clone 213734 (TRAV12-3, TRAJ10)
SHLPLTVGGNKLTF

SEQ ID NO: 427468 - protein, 12 aa, Homo sapiens
  CDR3 for beta chain variable domain of TCR clone 213734 (TRBV12-4, TRBJ1-3)
CASSFSGNTIYF

SEQ ID NO: 427469 - protein, 14 aa, Homo sapiens
  CDR3 for alpha chain variable domain of TCR clone 213735 (TRAV26-1, TRAJ39)
CIVRVGNAGNMPTF

SEQ ID NO: 427470 - protein, 12 aa, Homo sapiens
  CDR3 for beta chain variable domain of TCR clone 213735 (TRBV11-2, TRBJ2-2)
CASSLGGGELFF

SEQ ID NO: 427471 - protein, 16 aa, Homo sapiens
  CDR3 for alpha chain variable domain of TCR clone 213736 (TRAV3, TRAJ10)
CAVRDMNAGGGNKLTF

SEQ ID NO: 427472 - protein, 14 aa, Homo sapiens
  CDR3 for beta chain variable domain of TCR clone 213736 (TRBV12-5, TRBJ2-5)
CASGSRTHQETQYF

SEQ ID NO: 427473 - protein, 14 aa, Homo sapiens
  CDR3 for alpha chain variable domain of TCR clone 213737 (TRAV35, TRAJ33)
CAGSSQDSNYQLIW

SEQ ID NO: 427474 - protein, 13 aa, Homo sapiens
  CDR3 for beta chain variable domain of TCR clone 213737 (TRBV7-2, TRBJ1-5)
CASSLAEGGANEF

SEQ ID NO: 427475 - protein, 15 aa, Homo sapiens
  CDR3 for alpha chain variable domain of TCR clone 213738 (TRAV21, TRAJ38)
CAVRQDAGNNRKLIW

SEQ ID NO: 427476 - protein, 15 aa, Homo sapiens
  CDR3 for beta chain variable domain of TCR clone 213738 (TRBV4-1, TRBJ1-1)
CASSQEWGHYTEAFF

SEQ ID NO: 427477 - protein, 19 aa, Homo sapiens
  CDR3 for alpha chain variable domain of TCR clone 213739 (TRAV4, TRAJ4)
CTTASWVTQWSGGYNKLIF

SEQ ID NO: 427478 - protein, 15 aa, Homo sapiens
  CDR3 for beta chain variable domain of TCR clone 213739 (TRBV10-3, TRBJ2-3)
CAISLTSGGTDTQYF

SEQ ID NO: 427479 - protein, 14 aa, Homo sapiens
  CDR3 for alpha chain variable domain of TCR clone 213740 (TRAV12-3, TRAJ10)
SHLPLAGGGNKLTF

SEQ ID NO: 427480 - protein, 16 aa, Homo sapiens
  CDR3 for beta chain variable domain of TCR clone 213740 (TRBV7-3, TRBJ2-2)
CASSLKRGTLSGELFF

SEQ ID NO: 427481 - protein, 14 aa, Homo sapiens
  CDR3 for alpha chain variable domain of TCR clone 213741 (TRAV2, TRAJ37)
CAVEGSSNTGKLIF

SEQ ID NO: 427482 - protein, 15 aa, Homo sapiens
  CDR3 for beta chain variable domain of TCR clone 213741 (TRBV27, TRBJ2-1)
CASSNGGGSSNEQFF

SEQ ID NO: 427483 - protein, 11 aa, Homo sapiens
  CDR3 for alpha chain variable domain of TCR clone 213742 (TRAV8-2, TRAJ31)
CVVLRAARLMF

SEQ ID NO: 427484 - protein, 16 aa, Homo sapiens
  CDR3 for beta chain variable domain of TCR clone 213742 (TRBV20-1, TRBJ2-7)
CSATPGQGVLDHEQYF

SEQ ID NO: 427485 - protein, 16 aa, Homo sapiens
  CDR3 for alpha chain variable domain of TCR clone 213743 (TRAV3, TRAJ10)
CAVRDMRAGGGNKLTF

SEQ ID NO: 427486 - protein, 14 aa, Homo sapiens
  CDR3 for beta chain variable domain of TCR clone 213743 (TRBV19, TRBJ1-1)
CASTGHRLNTEAFF

SEQ ID NO: 427487 - protein, 18 aa, Homo sapiens
  CDR3 for alpha chain variable domain of TCR clone 213744 (TRAV26-2, TRAJ54)
CILRDVEVGIQGAQKLVF

SEQ ID NO: 427488 - protein, 13 aa, Homo sapiens
  CDR3 for beta chain variable domain of TCR clone 213744 (TRBV12-4, TRBJ1-2)
CASSLRQGKGYTF

SEQ ID NO: 427489 - protein, 16 aa, Homo sapiens
  CDR3 for alpha chain variable domain of TCR clone 213745 (TRAV30, TRAJ24)
CGTEIVDADSWGKFQF

SEQ ID NO: 427490 - protein, 18 aa, Homo sapiens
  CDR3 for beta chain variable domain of TCR clone 213745 (TRBV20-1, TRBJ2-6)
SAVLRRHQLTALANVLTF

SEQ ID NO: 427491 - protein, 16 aa, Homo sapiens
  CDR3 for alpha chain variable domain of TCR clone 213746 (TRAV12-3, TRAJ53)
CAMSPGSGGSNYELTF

SEQ ID NO: 427492 - protein, 11 aa, Homo sapiens
  CDR3 for beta chain variable domain of TCR clone 213746 (TRBV29-1, TRBJ2-5)
CSEDRMGTQYF

SEQ ID NO: 427493 - protein, 13 aa, Homo sapiens
  CDR3 for alpha chain variable domain of TCR clone 213747 (TRAV13-1, TRAJ17)
CAADGAAGNKLTF

SEQ ID NO: 427494 - protein, 14 aa, Homo sapiens
  CDR3 for beta chain variable domain of TCR clone 213747 (TRBV11-2, TRBJ1-3)
CASSLTQGRNTIYS

SEQ ID NO: 427495 - protein, 14 aa, Homo sapiens
  CDR3 for alpha chain variable domain of TCR clone 213748 (TRAV1-2, TRAJ16)
CAVNRFSDGQKLLF

SEQ ID NO: 427496 - protein, 15 aa, Homo sapiens
  CDR3 for beta chain variable domain of TCR clone 213748 (TRBV12-4, TRBJ2-5)
CASSPPTGLHETQYF

SEQ ID NO: 427497 - protein, 13 aa, Homo sapiens
  CDR3 for alpha chain variable domain of TCR clone 213749 (TRAV23/DV6, TRAJ34)
CAAIENNTDKLIF

SEQ ID NO: 427498 - protein, 13 aa, Homo sapiens
  CDR3 for beta chain variable domain of TCR clone 213749 (TRBV24-1, TRBJ2-2)
CATSDWSTGELFF

SEQ ID NO: 427499 - protein, 17 aa, Homo sapiens
  CDR3 for alpha chain variable domain of TCR clone 213750 (TRAV3, TRAJ42)
CAVRDRDYGGRQGNLIF

SEQ ID NO: 427500 - protein, 15 aa, Homo sapiens
  CDR3 for beta chain variable domain of TCR clone 213750 (TRBV29-1, TRBJ1-2)
CSVVLEAGSNYGYTF

SEQ ID NO: 427501 - protein, 16 aa, Homo sapiens
  CDR3 for alpha chain variable domain of TCR clone 213751 (TRAV20, TRAJ53)
CAVQGNSGGSNYKLTF

SEQ ID NO: 427502 - protein, 16 aa, Homo sapiens
  CDR3 for beta chain variable domain of TCR clone 213751 (TRBV29-1, TRBJ2-6)
CSVEDMTYSGANVLSF

SEQ ID NO: 427503 - protein, 15 aa, Homo sapiens
  CDR3 for alpha chain variable domain of TCR clone 213752 (TRAV14/DV4, TRAJ8)
CAMREGNTGFQKLVF

SEQ ID NO: 427504 - protein, 13 aa, Homo sapiens
  CDR3 for beta chain variable domain of TCR clone 213752 (TRBV7-9, TRBJ2-7)
CASSFAGAYEQYF

SEQ ID NO: 427505 - protein, 13 aa, Homo sapiens
  CDR3 for alpha chain variable domain of TCR clone 213753 (TRAV2, TRAJ13)
CASGVTRKLPLEL

SEQ ID NO: 427506 - protein, 15 aa, Homo sapiens
  CDR3 for beta chain variable domain of TCR clone 213753 (TRBV20-1, TRBJ2-7)
CSARDRVSGMDEQYF

SEQ ID NO: 427507 - protein, 13 aa, Homo sapiens
  CDR3 for alpha chain variable domain of TCR clone 213754 (TRAV8-3, TRAJ48)
CAVVPFGNEKLTF

SEQ ID NO: 427508 - protein, 14 aa, Homo sapiens
  CDR3 for beta chain variable domain of TCR clone 213754 (TRBV18, TRBJ2-7)
CASSPRGGGYEQYF

SEQ ID NO: 427509 - protein, 14 aa, Homo sapiens
  CDR3 for alpha chain variable domain of TCR clone 213755 (TRAV26-1, TRAJ39)
CIVRGSRSGNMLTF

SEQ ID NO: 427510 - protein, 15 aa, Homo sapiens
  CDR3 for beta chain variable domain of TCR clone 213755 (TRBV7-9, TRBJ1-5)
CASSQGHQPNQTQHF

SEQ ID NO: 427511 - protein, 15 aa, Homo sapiens
  CDR3 for alpha chain variable domain of TCR clone 213756 (TRAV38-2/DV8, TRAJ45)
CAYWDSGGGADGLTF

SEQ ID NO: 427512 - protein, 13 aa, Homo sapiens
  CDR3 for beta chain variable domain of TCR clone 213756 (TRBV7-9, TRBJ1-2)
CASSLKQNYGYTV

SEQ ID NO: 427513 - protein, 14 aa, Homo sapiens
  CDR3 for alpha chain variable domain of TCR clone 213757 (TRAV1-2, TRAJ16)
CAVNRFSDGQKLLF

SEQ ID NO: 427514 - protein, 15 aa, Homo sapiens
  CDR3 for beta chain variable domain of TCR clone 213757 (TRBV9, TRBJ1-6)
CASSVAGTGASPLHF

SEQ ID NO: 427515 - protein, 15 aa, Homo sapiens
  CDR3 for alpha chain variable domain of TCR clone 213758 (TRAV26-1, TRAJ23)
CIVRAAGYQGGKLIF

SEQ ID NO: 427516 - protein, 18 aa, Homo sapiens
  CDR3 for beta chain variable domain of TCR clone 213758 (TRBV28, TRBJ2-1)
CASSSTSGRANSYNEQFF

SEQ ID NO: 427517 - protein, 13 aa, Homo sapiens
  CDR3 for alpha chain variable domain of TCR clone 213759 (TRAV17, TRAJ9)
CATDYTGGFKTIF

SEQ ID NO: 427518 - protein, 14 aa, Homo sapiens
  CDR3 for beta chain variable domain of TCR clone 213759 (TRBV19, TRBJ2-5)
CAISMTGQQETQYF

SEQ ID NO: 427519 - protein, 18 aa, Homo sapiens
  CDR3 for alpha chain variable domain of TCR clone 213760 (TRAV13-1, TRAJ52)
CAAKNPNAGGTSYGKLTF

SEQ ID NO: 427520 - protein, 14 aa, Homo sapiens
  CDR3 for beta chain variable domain of TCR clone 213760 (TRBV4-1, TRBJ2-2)
CASSQAVKTGELLF

SEQ ID NO: 427521 - protein, 12 aa, Homo sapiens
  CDR3 for alpha chain variable domain of TCR clone 213761 (TRAV17, TRAJ4)
CATGGGYNQLIF

SEQ ID NO: 427522 - protein, 13 aa, Homo sapiens
  CDR3 for beta chain variable domain of TCR clone 213761 (TRBV29-1, TRBJ2-2)
CSTTGVNTGELFF

SEQ ID NO: 427523 - protein, 18 aa, Homo sapiens
  CDR3 for alpha chain variable domain of TCR clone 213762 (TRAV21, TRAJ52)
CAVRPSPAGGTSYGKLTF

SEQ ID NO: 427524 - protein, 15 aa, Homo sapiens
  CDR3 for beta chain variable domain of TCR clone 213762 (TRBV4-1, TRBJ1-1)
CASSLRGPTEAFLDK

SEQ ID NO: 427525 - protein, 13 aa, Homo sapiens
  CDR3 for alpha chain variable domain of TCR clone 213763 (TRAV12-3, TRAJ6)
CANPSGGSYIPTF

SEQ ID NO: 427526 - protein, 15 aa, Homo sapiens
  CDR3 for beta chain variable domain of TCR clone 213763 (TRBV19, TRBJ1-1)
ISVPVVGRDATEAFF

SEQ ID NO: 427527 - protein, 13 aa, Homo sapiens
  CDR3 for alpha chain variable domain of TCR clone 213764 (TRAV3, TRAJ21)
CALREPDFNKFYF

SEQ ID NO: 427528 - protein, 17 aa, Homo sapiens
  CDR3 for beta chain variable domain of TCR clone 213764 (TRBV7-8, TRBJ2-6)
CASSAGTGGAGANVLTF

SEQ ID NO: 427529 - protein, 14 aa, Homo sapiens
  CDR3 for alpha chain variable domain of TCR clone 213765 (TRAV16, TRAJ48)
CVLTPGFGSEKLTF

SEQ ID NO: 427530 - protein, 14 aa, Homo sapiens
  CDR3 for beta chain variable domain of TCR clone 213765 (TRBV7-2, TRBJ2-7)
CASSSISGFSEQYF

SEQ ID NO: 427531 - protein, 15 aa, Homo sapiens
  CDR3 for alpha chain variable domain of TCR clone 213766 (TRAV12-3, TRAJ54)
CTMSPPFQGAQKLVF

SEQ ID NO: 427532 - protein, 15 aa, Homo sapiens
  CDR3 for beta chain variable domain of TCR clone 213766 (TRBV20-1, TRBJ2-7)
CSARDRVSGMDEPYF

SEQ ID NO: 427533 - protein, 15 aa, Homo sapiens
  CDR3 for alpha chain variable domain of TCR clone 213767 (TRAV3, TRAJ22)
CAVRDRGGSARQLAF

SEQ ID NO: 427534 - protein, 14 aa, Homo sapiens
  CDR3 for beta chain variable domain of TCR clone 213767 (TRBV18, TRBJ2-5)
CASSPGVSQETQYF

SEQ ID NO: 427535 - protein, 17 aa, Homo sapiens
  CDR3 for alpha chain variable domain of TCR clone 213768 (TRAV3, TRAJ42)
CAVRDRDYGGSQGKLTF

SEQ ID NO: 427536 - protein, 12 aa, Homo sapiens
  CDR3 for beta chain variable domain of TCR clone 213768 (TRBV11-2, TRBJ2-1)
CASSPGNNEQFF

SEQ ID NO: 427537 - protein, 11 aa, Homo sapiens
  CDR3 for alpha chain variable domain of TCR clone 213769 (TRAV13-1, TRAJ6)
CATLGSYIPTF

SEQ ID NO: 427538 - protein, 12 aa, Homo sapiens
  CDR3 for beta chain variable domain of TCR clone 213769 (TRBV11-2, TRBJ2-1)
CASSLGNNEQFF

SEQ ID NO: 427539 - protein, 15 aa, Homo sapiens
  CDR3 for alpha chain variable domain of TCR clone 213770 (TRAV21, TRAJ53)
CATLNSGGRNYKLTF

SEQ ID NO: 427540 - protein, 16 aa, Homo sapiens
  CDR3 for beta chain variable domain of TCR clone 213770 (TRBV24-1, TRBJ2-3)
CATSDPGTGATDTQYF

SEQ ID NO: 427541 - protein, 14 aa, Homo sapiens
  CDR3 for alpha chain variable domain of TCR clone 213771 (TRAV8-6, TRAJ49)
CSVSDPGTGNQFYF

SEQ ID NO: 427542 - protein, 13 aa, Homo sapiens
  CDR3 for beta chain variable domain of TCR clone 213771 (TRBV7-9, TRBJ1-2)
CASSLKQNYGYTF

SEQ ID NO: 427543 - protein, 13 aa, Homo sapiens
  CDR3 for alpha chain variable domain of TCR clone 213772 (TRAV21, TRAJ27)
CAARPGNAGKSTF

SEQ ID NO: 427544 - protein, 11 aa, Homo sapiens
  CDR3 for beta chain variable domain of TCR clone 213772 (TRBV5-1, TRBJ2-1)
CASSIGQEQFF

SEQ ID NO: 427545 - protein, 17 aa, Homo sapiens
  CDR3 for alpha chain variable domain of TCR clone 213773 (TRAV3, TRAJ6)
CAVRDGPRAGGSYIPTF

SEQ ID NO: 427546 - protein, 14 aa, Homo sapiens
  CDR3 for beta chain variable domain of TCR clone 213773 (TRBV7-8, TRBJ2-7)
CASSPKTSFYERYF

SEQ ID NO: 427547 - protein, 12 aa, Homo sapiens
  CDR3 for alpha chain variable domain of TCR clone 213774 (TRAV29/DV5, TRAJ43)
CAAQYNNNDMRF

SEQ ID NO: 427548 - protein, 17 aa, Homo sapiens
  CDR3 for beta chain variable domain of TCR clone 213774 (TRBV19, TRBJ2-6)
CASSTGQVFSGANVLTF

SEQ ID NO: 427549 - protein, 11 aa, Homo sapiens
  CDR3 for alpha chain variable domain of TCR clone 213775 (TRAV27, TRAJ47)
CRSNQGNKLVF

SEQ ID NO: 427550 - protein, 16 aa, Homo sapiens
  CDR3 for beta chain variable domain of TCR clone 213775 (TRBV7-9, TRBJ2-1)
CASSDVAGGAYNEQFF

SEQ ID NO: 427551 - protein, 12 aa, Homo sapiens
  CDR3 for alpha chain variable domain of TCR clone 213776 (TRAV16, TRAJ27)
CALNHQCRQINL

SEQ ID NO: 427552 - protein, 15 aa, Homo sapiens
  CDR3 for beta chain variable domain of TCR clone 213776 (TRBV10-2, TRBJ2-6)
CASSEQGTGANVLTF

SEQ ID NO: 427553 - protein, 14 aa, Homo sapiens
  CDR3 for alpha chain variable domain of TCR clone 213777 (TRAV23/DV6, TRAJ17)
CAASIGAAGNKLTL

SEQ ID NO: 427554 - protein, 12 aa, Homo sapiens
  CDR3 for beta chain variable domain of TCR clone 213777 (TRBV20-1, TRBJ2-5)
CSAGGAGETQYF

SEQ ID NO: 427555 - protein, 11 aa, Homo sapiens
  CDR3 for alpha chain variable domain of TCR clone 213778 (TRAV8-3, TRAJ15)
CAVGTGTALIF

SEQ ID NO: 427556 - protein, 18 aa, Homo sapiens
  CDR3 for beta chain variable domain of TCR clone 213778 (TRBV18, TRBJ2-3)
CASSYTSGAAGGTDTQYF

SEQ ID NO: 427557 - protein, 12 aa, Homo sapiens
  CDR3 for alpha chain variable domain of TCR clone 213779 (TRAV1-2, TRAJ29)
CAVPSGNTPLVF

SEQ ID NO: 427558 - protein, 15 aa, Homo sapiens
  CDR3 for beta chain variable domain of TCR clone 213779 (TRBV28, TRBJ2-3)
CAPTFRDWSTDTQYF

SEQ ID NO: 427559 - protein, 15 aa, Homo sapiens
  CDR3 for alpha chain variable domain of TCR clone 213780 (TRAV12-3, TRAJ27)
CAMRAYNTNAGKSTF

SEQ ID NO: 427560 - protein, 14 aa, Homo sapiens
  CDR3 for beta chain variable domain of TCR clone 213780 (TRBV25-1, TRBJ1-1)
CASTHLGGNTEAFF

SEQ ID NO: 427561 - protein, 13 aa, Homo sapiens
  CDR3 for alpha chain variable domain of TCR clone 213781 (TRAV2, TRAJ24)
CAVSTDSWGNLQF

SEQ ID NO: 427562 - protein, 14 aa, Homo sapiens
  CDR3 for beta chain variable domain of TCR clone 213781 (TRBV13, TRBJ2-5)
CASSLGTAQETQYF

SEQ ID NO: 427563 - protein, 10 aa, Homo sapiens
  CDR3 for alpha chain variable domain of TCR clone 213782 (TRAV36/DV7, TRAJ48)
CAVGNEKLTF

SEQ ID NO: 427564 - protein, 15 aa, Homo sapiens
  CDR3 for beta chain variable domain of TCR clone 213782 (TRBV5-1, TRBJ2-7)
CASSLNGGPAREQYF

SEQ ID NO: 427565 - protein, 15 aa, Homo sapiens
  CDR3 for alpha chain variable domain of TCR clone 213783 (TRAV14/DV4, TRAJ46)
RAMREKKSSGDKLNF

SEQ ID NO: 427566 - protein, 13 aa, Homo sapiens
  CDR3 for beta chain variable domain of TCR clone 213783 (TRBV20-1, TRBJ2-5)
CSAREAFQETQYF

SEQ ID NO: 427567 - protein, 15 aa, Homo sapiens
  CDR3 for alpha chain variable domain of TCR clone 213784 (TRAV26-1, TRAJ23)
CIVRVAGYQGGKLIF

SEQ ID NO: 427568 - protein, 15 aa, Homo sapiens
  CDR3 for beta chain variable domain of TCR clone 213784 (TRBV11-2, TRBJ2-1)
CASSLTSGGYNEQFF

SEQ ID NO: 427569 - protein, 12 aa, Homo sapiens
  CDR3 for alpha chain variable domain of TCR clone 213785 (TRAV17, TRAJ20)
CAKQAKEYKLSF

SEQ ID NO: 427570 - protein, 12 aa, Homo sapiens
  CDR3 for beta chain variable domain of TCR clone 213785 (TRBV6-1, TRBJ1-1)
CASNSPTAEAFF

SEQ ID NO: 427571 - protein, 14 aa, Homo sapiens
  CDR3 for alpha chain variable domain of TCR clone 213786 (TRAV22, TRAJ6)
CAGVGPGGSYIPTF

SEQ ID NO: 427572 - protein, 13 aa, Homo sapiens
  CDR3 for beta chain variable domain of TCR clone 213786 (TRBV7-9, TRBJ1-2)
CASSVKQNYGYTF

SEQ ID NO: 427573 - protein, 14 aa, Homo sapiens
  CDR3 for alpha chain variable domain of TCR clone 213787 (TRAV20, TRAJ56)
CAVQFGGANSKLTF

SEQ ID NO: 427574 - protein, 14 aa, Homo sapiens
  CDR3 for beta chain variable domain of TCR clone 213787 (TRBV5-1, TRBJ2-1)
CASSALWAGNEQFF

SEQ ID NO: 427575 - protein, 14 aa, Homo sapiens
  CDR3 for alpha chain variable domain of TCR clone 213788 (TRAV12-3, TRAJ10)
SHLPLTGGGNKLSF

SEQ ID NO: 427576 - protein, 14 aa, Homo sapiens
  CDR3 for beta chain variable domain of TCR clone 213788 (TRBV4-1, TRBJ2-2)
CASSLTENTGELFF

SEQ ID NO: 427577 - protein, 14 aa, Homo sapiens
  CDR3 for alpha chain variable domain of TCR clone 213789 (TRAV12-1, TRAJ45)
CVVRGGGGADGLTF

SEQ ID NO: 427578 - protein, 15 aa, Homo sapiens
  CDR3 for beta chain variable domain of TCR clone 213789 (TRBV11-2, TRBJ2-1)
CASSKNRGLIYEQFF

SEQ ID NO: 427579 - protein, 13 aa, Homo sapiens
  CDR3 for alpha chain variable domain of TCR clone 213790 (TRAV21, TRAJ57)
CAVTQGGSEKLVF

SEQ ID NO: 427580 - protein, 13 aa, Homo sapiens
  CDR3 for beta chain variable domain of TCR clone 213790 (TRBV11-2, TRBJ2-7)
CASSGTRPYEQYF

SEQ ID NO: 427581 - protein, 13 aa, Homo sapiens
  CDR3 for alpha chain variable domain of TCR clone 213791 (TRAV12-1, TRAJ21)
CVVTLYNFNTFYF

SEQ ID NO: 427582 - protein, 13 aa, Homo sapiens
  CDR3 for beta chain variable domain of TCR clone 213791 (TRBV7-2, TRBJ2-2)
CASSLAVTGELFF

SEQ ID NO: 427583 - protein, 16 aa, Homo sapiens
  CDR3 for alpha chain variable domain of TCR clone 213792 (TRAV1-2, TRAJ10)
CAVRGVLTGGGNKLTF

SEQ ID NO: 427584 - protein, 14 aa, Homo sapiens
  CDR3 for beta chain variable domain of TCR clone 213792 (TRBV25-1, TRBJ1-1)
CASTHLGGNTEAFV

SEQ ID NO: 427585 - protein, 15 aa, Homo sapiens
  CDR3 for alpha chain variable domain of TCR clone 213793 (TRAV17, TRAJ57)
CATGPSQGGSEKLVF

SEQ ID NO: 427586 - protein, 14 aa, Homo sapiens
  CDR3 for beta chain variable domain of TCR clone 213793 (TRBV12-5, TRBJ2-5)
CACGSRTHQETQYF

SEQ ID NO: 427587 - protein, 14 aa, Homo sapiens
  CDR3 for alpha chain variable domain of TCR clone 213794 (TRAV8-3, TRAJ4)
CAVGASGGYNKLIF

SEQ ID NO: 427588 - protein, 15 aa, Homo sapiens
  CDR3 for beta chain variable domain of TCR clone 213794 (TRBV19, TRBJ1-6)
CASSTQGAVGSPLHF

SEQ ID NO: 427589 - protein, 20 aa, Homo sapiens
  CDR3 for alpha chain variable domain of TCR clone 213795 (TRAV8-3, TRAJ44)
LSTSVLWVRLYTGTASKLTF

SEQ ID NO: 427590 - protein, 14 aa, Homo sapiens
  CDR3 for beta chain variable domain of TCR clone 213795 (TRBV7-6, TRBJ2-3)
CASSLGTVTDTQYF

SEQ ID NO: 427591 - protein, 14 aa, Homo sapiens
  CDR3 for alpha chain variable domain of TCR clone 213796 (TRAV23/DV6, TRAJ21)
CAAYKSGPGTNFTL

SEQ ID NO: 427592 - protein, 15 aa, Homo sapiens
  CDR3 for beta chain variable domain of TCR clone 213796 (TRBV5-4, TRBJ2-2)
CASSLTSRGTGELFF

SEQ ID NO: 427593 - protein, 13 aa, Homo sapiens
  CDR3 for alpha chain variable domain of TCR clone 213797 (TRAV23/DV6, TRAJ45)
CAARRGGADGLTF

SEQ ID NO: 427594 - protein, 14 aa, Homo sapiens
  CDR3 for beta chain variable domain of TCR clone 213797 (TRBV7-2, TRBJ2-3)
CASSSARGTDTQYF

SEQ ID NO: 427595 - protein, 12 aa, Homo sapiens
  CDR3 for alpha chain variable domain of TCR clone 213798 (TRAV17, TRAJ42)
CFLLLCYANLIF

SEQ ID NO: 427596 - protein, 13 aa, Homo sapiens
  CDR3 for beta chain variable domain of TCR clone 213798 (TRBV18, TRBJ2-7)
CASSPGRNYEQYF

SEQ ID NO: 427597 - protein, 14 aa, Homo sapiens
  CDR3 for alpha chain variable domain of TCR clone 213799 (TRAV1-2, TRAJ16)
CAVNRFSDGQKLLF

SEQ ID NO: 427598 - protein, 14 aa, Homo sapiens
  CDR3 for beta chain variable domain of TCR clone 213799 (TRBV11-2, TRBJ2-3)
CASSSIASTDTQYF

SEQ ID NO: 427599 - protein, 11 aa, Homo sapiens
  CDR3 for alpha chain variable domain of TCR clone 213800 (TRAV12-3, TRAJ43)
CAMSVSNDMRC

SEQ ID NO: 427600 - protein, 20 aa, Homo sapiens
  CDR3 for beta chain variable domain of TCR clone 213800 (TRBV28, TRBJ2-1)
CASTPIGRSPGLAGGNEQFF

SEQ ID NO: 427601 - protein, 12 aa, Homo sapiens
  CDR3 for alpha chain variable domain of TCR clone 213801 (TRAV17, TRAJ12)
CATLRSSYKLIF

SEQ ID NO: 427602 - protein, 16 aa, Homo sapiens
  CDR3 for beta chain variable domain of TCR clone 213801 (TRBV28, TRBJ2-7)
CASSLFFVTGGPGQYF

SEQ ID NO: 427603 - protein, 16 aa, Homo sapiens
  CDR3 for alpha chain variable domain of TCR clone 213802 (TRAV23/DV6, TRAJ48)
CAASGVVNFGKEKLTF

SEQ ID NO: 427604 - protein, 15 aa, Homo sapiens
  CDR3 for beta chain variable domain of TCR clone 213802 (TRBV7-9, TRBJ2-1)
CASSLGWGRANEQFF

SEQ ID NO: 427605 - protein, 13 aa, Homo sapiens
  CDR3 for alpha chain variable domain of TCR clone 213803 (TRAV13-1, TRAJ24)
CAAIDGSWGKLQF

SEQ ID NO: 427606 - protein, 13 aa, Homo sapiens
  CDR3 for beta chain variable domain of TCR clone 213803 (TRBV4-3, TRBJ2-5)
CASSQGGGETQYF

SEQ ID NO: 427607 - protein, 11 aa, Homo sapiens
  CDR3 for alpha chain variable domain of TCR clone 213804 (TRAV2, TRAJ13)
CASGGYQEVTF

SEQ ID NO: 427608 - protein, 14 aa, Homo sapiens
  CDR3 for beta chain variable domain of TCR clone 213804 (TRBV7-2, TRBJ1-2)
CASSQTGSTYGYTF

SEQ ID NO: 427609 - protein, 15 aa, Homo sapiens
  CDR3 for alpha chain variable domain of TCR clone 213805 (TRAV8-3, TRAJ45)
CASSYSGGGADGLTF

SEQ ID NO: 427610 - protein, 15 aa, Homo sapiens
  CDR3 for beta chain variable domain of TCR clone 213805 (TRBV20-1, TRBJ2-7)
CSAESGTSGAYEQYF

SEQ ID NO: 427611 - protein, 13 aa, Homo sapiens
  CDR3 for alpha chain variable domain of TCR clone 213806 (TRAV29/DV5, TRAJ31)
CAASRNNNARLMV

SEQ ID NO: 427612 - protein, 15 aa, Homo sapiens
  CDR3 for beta chain variable domain of TCR clone 213806 (TRBV27, TRBJ2-1)
CASSNGGGSSNEQFF

SEQ ID NO: 427613 - protein, 13 aa, Homo sapiens
  CDR3 for alpha chain variable domain of TCR clone 213807 (TRAV35, TRAJ36)
CAGPRIGAYNLFF

SEQ ID NO: 427614 - protein, 15 aa, Homo sapiens
  CDR3 for beta chain variable domain of TCR clone 213807 (TRBV20-1, TRBJ2-7)
CSARDRVSGMDEQYF

SEQ ID NO: 427615 - protein, 13 aa, Homo sapiens
  CDR3 for alpha chain variable domain of TCR clone 213808 (TRAV27, TRAJ16)
CAGACSDGQKLLF

SEQ ID NO: 427616 - protein, 14 aa, Homo sapiens
  CDR3 for beta chain variable domain of TCR clone 213808 (TRBV11-2, TRBJ2-3)
CASSRLARTDTQYF

SEQ ID NO: 427617 - protein, 14 aa, Homo sapiens
  CDR3 for alpha chain variable domain of TCR clone 213809 (TRAV8-4, TRAJ13)
CAVTLSGGYQNVTF

SEQ ID NO: 427618 - protein, 14 aa, Homo sapiens
  CDR3 for beta chain variable domain of TCR clone 213809 (TRBV7-2, TRBJ1-2)
RASSQTGSTYGCTF

SEQ ID NO: 427619 - protein, 13 aa, Homo sapiens
  CDR3 for alpha chain variable domain of TCR clone 213810 (TRAV21, TRAJ27)
CAARPGSAGKSTF

SEQ ID NO: 427620 - protein, 14 aa, Homo sapiens
  CDR3 for beta chain variable domain of TCR clone 213810 (TRBV18, TRBJ1-2)
CASSPPGQAYGYTF

SEQ ID NO: 427621 - protein, 13 aa, Homo sapiens
  CDR3 for alpha chain variable domain of TCR clone 213811 (TRAV27, TRAJ3)
ASLRGSSASKIIF

SEQ ID NO: 427622 - protein, 13 aa, Homo sapiens
  CDR3 for beta chain variable domain of TCR clone 213811 (TRBV7-6, TRBJ1-2)
CASSLVADYGYTF

SEQ ID NO: 427623 - protein, 13 aa, Homo sapiens
  CDR3 for alpha chain variable domain of TCR clone 213812 (TRAV21, TRAJ20)
CAVGLRVDYKLSF

SEQ ID NO: 427624 - protein, 16 aa, Homo sapiens
  CDR3 for beta chain variable domain of TCR clone 213812 (TRBV13, TRBJ2-2)
CASSPRTGEHTGELVF

SEQ ID NO: 427625 - protein, 14 aa, Homo sapiens
  CDR3 for alpha chain variable domain of TCR clone 213813 (TRAV3, TRAJ9)
CAVRDDTGCFKTIF

SEQ ID NO: 427626 - protein, 18 aa, Homo sapiens
  CDR3 for beta chain variable domain of TCR clone 213813 (TRBV20-1, TRBJ2-6)
CSAETTPTHGSGANVLTF

SEQ ID NO: 427627 - protein, 13 aa, Homo sapiens
  CDR3 for alpha chain variable domain of TCR clone 213814 (TRAV8-6, TRAJ13)
CAVSSGGYQQVTF

SEQ ID NO: 427628 - protein, 15 aa, Homo sapiens
  CDR3 for beta chain variable domain of TCR clone 213814 (TRBV7-9, TRBJ2-7)
CASSLPMGQANEQYF

SEQ ID NO: 427629 - protein, 16 aa, Homo sapiens
  CDR3 for alpha chain variable domain of TCR clone 213815 (TRAV30, TRAJ24)
CGTEIVDADSWGKFQF

SEQ ID NO: 427630 - protein, 14 aa, Homo sapiens
  CDR3 for beta chain variable domain of TCR clone 213815 (TRBV5-7, TRBJ2-7)
CASSYPGLAYEQYF

SEQ ID NO: 427631 - protein, 15 aa, Homo sapiens
  CDR3 for alpha chain variable domain of TCR clone 213816 (TRAV2, TRAJ15)
CAVEDRNQAGTALIF

SEQ ID NO: 427632 - protein, 15 aa, Homo sapiens
  CDR3 for beta chain variable domain of TCR clone 213816 (TRBV6-1, TRBJ2-1)
CASSEAAYSYNEQFF

SEQ ID NO: 427633 - protein, 15 aa, Homo sapiens
  CDR3 for alpha chain variable domain of TCR clone 213817 (TRAV3, TRAJ5)
CAVRDLDTDRRALTF

SEQ ID NO: 427634 - protein, 12 aa, Homo sapiens
  CDR3 for beta chain variable domain of TCR clone 213817 (TRBV11-2, TRBJ2-2)
CASSLGGGELFF

SEQ ID NO: 427635 - protein, 13 aa, Homo sapiens
  CDR3 for alpha chain variable domain of TCR clone 213818 (TRAV20, TRAJ34)
CAVSSYNADKLIF

SEQ ID NO: 427636 - protein, 13 aa, Homo sapiens
  CDR3 for beta chain variable domain of TCR clone 213818 (TRBV7-9, TRBJ1-2)
CASSLKQNYGYTF

SEQ ID NO: 427637 - protein, 13 aa, Homo sapiens
  CDR3 for alpha chain variable domain of TCR clone 213819 (TRAV1-2, TRAJ9)
CAALNNGGFKTIF

SEQ ID NO: 427638 - protein, 14 aa, Homo sapiens
  CDR3 for beta chain variable domain of TCR clone 213819 (TRBV13, TRBJ2-3)
CASSSGSPTDTQYF

SEQ ID NO: 427639 - protein, 10 aa, Homo sapiens
  CDR3 for alpha chain variable domain of TCR clone 213820 (TRAV5, TRAJ34)
CAEDTDKLIF

SEQ ID NO: 427640 - protein, 18 aa, Homo sapiens
  CDR3 for beta chain variable domain of TCR clone 213820 (TRBV11-2, TRBJ2-3)
CASSLGGASRGAPNTQYF

SEQ ID NO: 427641 - protein, 13 aa, Homo sapiens
  CDR3 for alpha chain variable domain of TCR clone 213821 (TRAV8-3, TRAJ36)
CAVGATGANNLFF

SEQ ID NO: 427642 - protein, 17 aa, Homo sapiens
  CDR3 for beta chain variable domain of TCR clone 213821 (TRBV4-2, TRBJ1-1)
CASTQCGGGSGNTEAFF

SEQ ID NO: 427643 - protein, 12 aa, Homo sapiens
  CDR3 for alpha chain variable domain of TCR clone 213822 (TRAV12-3, TRAJ17)
CAMTLTGNKLTF

SEQ ID NO: 427644 - protein, 15 aa, Homo sapiens
  CDR3 for beta chain variable domain of TCR clone 213822 (TRBV10-2, TRBJ2-6)
CASSERGTGANVLTF

SEQ ID NO: 427645 - protein, 15 aa, Homo sapiens
  CDR3 for alpha chain variable domain of TCR clone 213823 (TRAV20, TRAJ6)
CAVRLQSGGSYIPTF

SEQ ID NO: 427646 - protein, 14 aa, Homo sapiens
  CDR3 for beta chain variable domain of TCR clone 213823 (TRBV4-2, TRBJ2-1)
CASGLDRAYNEQFF

SEQ ID NO: 427647 - protein, 12 aa, Homo sapiens
  CDR3 for alpha chain variable domain of TCR clone 213824 (TRAV21, TRAJ33)
CAKMDSNYQLIW

SEQ ID NO: 427648 - protein, 14 aa, Homo sapiens
  CDR3 for beta chain variable domain of TCR clone 213824 (TRBV2, TRBJ2-7)
CASSLTSGGYEKYF

SEQ ID NO: 427649 - protein, 18 aa, Homo sapiens
  CDR3 for alpha chain variable domain of TCR clone 213825 (TRAV13-1, TRAJ52)
CAAKNPNAGVTSYGKLTF

SEQ ID NO: 427650 - protein, 15 aa, Homo sapiens
  CDR3 for beta chain variable domain of TCR clone 213825 (TRBV27, TRBJ2-1)
CASSNGGGSSNEQFF

SEQ ID NO: 427651 - protein, 11 aa, Homo sapiens
  CDR3 for alpha chain variable domain of TCR clone 213826 (TRAV23/DV6, TRAJ56)
CAAPANSKLTS

SEQ ID NO: 427652 - protein, 14 aa, Homo sapiens
  CDR3 for beta chain variable domain of TCR clone 213826 (TRBV27, TRBJ2-1)
CASSFGREANEQFF

SEQ ID NO: 427653 - protein, 15 aa, Homo sapiens
  CDR3 for alpha chain variable domain of TCR clone 213827 (TRAV12-2, TRAJ53)
CRERGGGGSNYKLTF

SEQ ID NO: 427654 - protein, 17 aa, Homo sapiens
  CDR3 for beta chain variable domain of TCR clone 213827 (TRBV7-3, TRBJ2-3)
RASSLMKRMRGADTQYF

SEQ ID NO: 427655 - protein, 20 aa, Homo sapiens
  CDR3 for alpha chain variable domain of TCR clone 213828 (TRAV36/DV7, TRAJ52)
CAVRGRVPDAGGTSYGKLTF

SEQ ID NO: 427656 - protein, 13 aa, Homo sapiens
  CDR3 for beta chain variable domain of TCR clone 213828 (TRBV15, TRBJ1-6)
CATSGGLNSPLHF

SEQ ID NO: 427657 - protein, 13 aa, Homo sapiens
  CDR3 for alpha chain variable domain of TCR clone 213829 (TRAV22, TRAJ44)
CALNPGTASKLTF

SEQ ID NO: 427658 - protein, 14 aa, Homo sapiens
  CDR3 for beta chain variable domain of TCR clone 213829 (TRBV12-4, TRBJ2-7)
CASSASGGWYEQYF

SEQ ID NO: 427659 - protein, 13 aa, Homo sapiens
  CDR3 for alpha chain variable domain of TCR clone 213830 (TRAV3, TRAJ21)
CAVREPDFNKFFF

SEQ ID NO: 427660 - protein, 15 aa, Homo sapiens
  CDR3 for beta chain variable domain of TCR clone 213830 (TRBV2, TRBJ2-1)
CASSELAGGYNEQFF

SEQ ID NO: 427661 - protein, 14 aa, Homo sapiens
  CDR3 for alpha chain variable domain of TCR clone 213831 (TRAV12-2, TRAJ44)
CAVNPAGTASKLTF

SEQ ID NO: 427662 - protein, 14 aa, Homo sapiens
  CDR3 for beta chain variable domain of TCR clone 213831 (TRBV7-2, TRBJ1-3)
RASSRLRSGNTIYF

SEQ ID NO: 427663 - protein, 15 aa, Homo sapiens
  CDR3 for alpha chain variable domain of TCR clone 213832 (TRAV26-1, TRAJ29)
CIVRVEGSGNTPLVF

SEQ ID NO: 427664 - protein, 14 aa, Homo sapiens
  CDR3 for beta chain variable domain of TCR clone 213832 (TRBV7-2, TRBJ2-2)
CASRGQGAAGELFF

SEQ ID NO: 427665 - protein, 14 aa, Homo sapiens
  CDR3 for alpha chain variable domain of TCR clone 213833 (TRAV8-4, TRAJ39)
CAVSDMATCSPLEG

SEQ ID NO: 427666 - protein, 11 aa, Homo sapiens
  CDR3 for beta chain variable domain of TCR clone 213833 (TRBV29-1, TRBJ2-5)
CSEDRTGTQYF

SEQ ID NO: 427667 - protein, 14 aa, Homo sapiens
  CDR3 for alpha chain variable domain of TCR clone 213834 (TRAV3, TRAJ34)
CAVRAPGKTDKLIF

SEQ ID NO: 427668 - protein, 17 aa, Homo sapiens
  CDR3 for beta chain variable domain of TCR clone 213834 (TRBV20-1, TRBJ2-7)
CSAAPGLARGISYEQYF

SEQ ID NO: 427669 - protein, 13 aa, Homo sapiens
  CDR3 for alpha chain variable domain of TCR clone 213835 (TRAV8-6, TRAJ49)
CAAITNTGNQFYF

SEQ ID NO: 427670 - protein, 14 aa, Homo sapiens
  CDR3 for beta chain variable domain of TCR clone 213835 (TRBV4-1, TRBJ2-2)
CASSQAVNTGELFF

SEQ ID NO: 427671 - protein, 15 aa, Homo sapiens
  CDR3 for alpha chain variable domain of TCR clone 213836 (TRAV8-2, TRAJ23)
CVVSPLITREESLSS

SEQ ID NO: 427672 - protein, 14 aa, Homo sapiens
  CDR3 for beta chain variable domain of TCR clone 213836 (TRBV13, TRBJ1-1)
CASTVITVNTEAFF

SEQ ID NO: 427673 - protein, 13 aa, Homo sapiens
  CDR3 for alpha chain variable domain of TCR clone 213837 (TRAV12-2, TRAJ20)
CAVYPSNDYKLSF

SEQ ID NO: 427674 - protein, 16 aa, Homo sapiens
  CDR3 for beta chain variable domain of TCR clone 213837 (TRBV5-1, TRBJ2-7)
CASSYASTSSGGEQYF

SEQ ID NO: 427675 - protein, 16 aa, Homo sapiens
  CDR3 for alpha chain variable domain of TCR clone 213838 (TRAV30, TRAJ24)
CGTEIVDADSSGKFQF

SEQ ID NO: 427676 - protein, 13 aa, Homo sapiens
  CDR3 for beta chain variable domain of TCR clone 213838 (TRBV18, TRBJ1-2)
CASSASATEGYTF

SEQ ID NO: 427677 - protein, 13 aa, Homo sapiens
  CDR3 for alpha chain variable domain of TCR clone 213839 (TRAV16, TRAJ31)
CALSAHNNARLMF

SEQ ID NO: 427678 - protein, 17 aa, Homo sapiens
  CDR3 for beta chain variable domain of TCR clone 213839 (TRBV12-4, TRBJ2-1)
CASSPGLAGGRNNEQFF

SEQ ID NO: 427679 - protein, 15 aa, Homo sapiens
  CDR3 for alpha chain variable domain of TCR clone 213840 (TRAV8-2, TRAJ27)
CVVSDRGTNAGKSTF

SEQ ID NO: 427680 - protein, 14 aa, Homo sapiens
  CDR3 for beta chain variable domain of TCR clone 213840 (TRBV19, TRBJ2-1)
CASPTFVLSGEQFF

SEQ ID NO: 427681 - protein, 14 aa, Homo sapiens
  CDR3 for alpha chain variable domain of TCR clone 213841 (TRAV13-1, TRAJ13)
CAASRVGGYQKVTF

SEQ ID NO: 427682 - protein, 15 aa, Homo sapiens
  CDR3 for beta chain variable domain of TCR clone 213841 (TRBV28, TRBJ1-3)
CASSMGWASGNTIYF

SEQ ID NO: 427683 - protein, 16 aa, Homo sapiens
  CDR3 for alpha chain variable domain of TCR clone 213842 (TRAV4, TRAJ5)
CLVGPDHGHGQESTYF

SEQ ID NO: 427684 - protein, 17 aa, Homo sapiens
  CDR3 for beta chain variable domain of TCR clone 213842 (TRBV11-2, TRBJ2-1)
CVSSLYPPGVEYNEQFF

SEQ ID NO: 427685 - protein, 15 aa, Homo sapiens
  CDR3 for alpha chain variable domain of TCR clone 213843 (TRAV25, TRAJ52)
CAGRPGGTSYGKLTF

SEQ ID NO: 427686 - protein, 13 aa, Homo sapiens
  CDR3 for beta chain variable domain of TCR clone 213843 (TRBV6-5, TRBJ2-5)
CASSPQGGETQYF

SEQ ID NO: 427687 - protein, 14 aa, Homo sapiens
  CDR3 for alpha chain variable domain of TCR clone 213844 (TRAV26-1, TRAJ34)
CIVRVAYNTDKLIF

SEQ ID NO: 427688 - protein, 15 aa, Homo sapiens
  CDR3 for beta chain variable domain of TCR clone 213844 (TRBV20-1, TRBJ2-7)
CSARVPPAYFYEQYF

SEQ ID NO: 427689 - protein, 16 aa, Homo sapiens
  CDR3 for alpha chain variable domain of TCR clone 213845 (TRAV12-3, TRAJ53)
CAMSLGSGGSNYKLTF

SEQ ID NO: 427690 - protein, 20 aa, Homo sapiens
  CDR3 for beta chain variable domain of TCR clone 213845 (TRBV7-8, TRBJ2-2)
CASSHLFPGPTIHITGELFF

SEQ ID NO: 427691 - protein, 17 aa, Homo sapiens
  CDR3 for alpha chain variable domain of TCR clone 213846 (TRAV3, TRAJ42)
CAVRDRDYGGSQGNLIF

SEQ ID NO: 427692 - protein, 14 aa, Homo sapiens
  CDR3 for beta chain variable domain of TCR clone 213846 (TRBV20-1, TRBJ1-1)
CSAQTRIGGTEDFF

SEQ ID NO: 427693 - protein, 17 aa, Homo sapiens
  CDR3 for alpha chain variable domain of TCR clone 213847 (TRAV23/DV6, TRAJ57)
CAASSTLSHGGSEKLVV

SEQ ID NO: 427694 - protein, 14 aa, Homo sapiens
  CDR3 for beta chain variable domain of TCR clone 213847 (TRBV25-1, TRBJ1-1)
CASTHLGGNTEAFF

SEQ ID NO: 427695 - protein, 17 aa, Homo sapiens
  CDR3 for alpha chain variable domain of TCR clone 213848 (TRAV3, TRAJ6)
CAVRDGPRAGGSYIPTF

SEQ ID NO: 427696 - protein, 11 aa, Homo sapiens
  CDR3 for beta chain variable domain of TCR clone 213848 (TRBV29-1, TRBJ2-5)
CSEDRTGTLYF

SEQ ID NO: 427697 - protein, 15 aa, Homo sapiens
  CDR3 for alpha chain variable domain of TCR clone 213849 (TRAV14/DV4, TRAJ5)
CAMREGGTGRRALTF

SEQ ID NO: 427698 - protein, 13 aa, Homo sapiens
  CDR3 for beta chain variable domain of TCR clone 213849 (TRBV10-3, TRBJ2-7)
CASKLAVNYEQYF

SEQ ID NO: 427699 - protein, 15 aa, Homo sapiens
  CDR3 for alpha chain variable domain of TCR clone 213850 (TRAV26-1, TRAJ44)
CIVRPNTGTASKLTF

SEQ ID NO: 427700 - protein, 12 aa, Homo sapiens
  CDR3 for beta chain variable domain of TCR clone 213850 (TRBV2, TRBJ2-1)
GRGLPSYNEQFF

SEQ ID NO: 427701 - protein, 11 aa, Homo sapiens
  CDR3 for alpha chain variable domain of TCR clone 213851 (TRAV12-1, TRAJ33)
CVVMPRIATIS

SEQ ID NO: 427702 - protein, 13 aa, Homo sapiens
  CDR3 for beta chain variable domain of TCR clone 213851 (TRBV7-2, TRBJ2-5)
CASSQTSVETQYF

SEQ ID NO: 427703 - protein, 14 aa, Homo sapiens
  CDR3 for alpha chain variable domain of TCR clone 213852 (TRAV12-3, TRAJ10)
SHLPLTGGGHKLTF

SEQ ID NO: 427704 - protein, 16 aa, Homo sapiens
  CDR3 for beta chain variable domain of TCR clone 213852 (TRBV10-3, TRBJ2-1)
CAISGVGDGGGGEQFF

SEQ ID NO: 427705 - protein, 16 aa, Homo sapiens
  CDR3 for alpha chain variable domain of TCR clone 213853 (TRAV35, TRAJ20)
CWADPSSGFNDYKLSF

SEQ ID NO: 427706 - protein, 16 aa, Homo sapiens
  CDR3 for beta chain variable domain of TCR clone 213853 (TRBV4-3, TRBJ1-6)
CASSAQPGGAGSPLHF

SEQ ID NO: 427707 - protein, 12 aa, Homo sapiens
  CDR3 for alpha chain variable domain of TCR clone 213854 (TRAV12-1, TRAJ40)
CVVYSGTYKYVF

SEQ ID NO: 427708 - protein, 11 aa, Homo sapiens
  CDR3 for beta chain variable domain of TCR clone 213854 (TRBV6-3, TRBJ2-3)
CATGQADTQYF

SEQ ID NO: 427709 - protein, 11 aa, Homo sapiens
  CDR3 for alpha chain variable domain of TCR clone 213855 (TRAV1-2, TRAJ11)
CAVRGYSTLTL

SEQ ID NO: 427710 - protein, 15 aa, Homo sapiens
  CDR3 for beta chain variable domain of TCR clone 213855 (TRBV3-1, TRBJ2-2)
CASSQDWTRAGELFF

SEQ ID NO: 427711 - protein, 16 aa, Homo sapiens
  CDR3 for alpha chain variable domain of TCR clone 213856 (TRAV26-1, TRAJ53)
CIVRVARGGSNYKLTF

SEQ ID NO: 427712 - protein, 12 aa, Homo sapiens
  CDR3 for beta chain variable domain of TCR clone 213856 (TRBV7-9, TRBJ1-5)
CASSPQGQTQHF

SEQ ID NO: 427713 - protein, 12 aa, Homo sapiens
  CDR3 for alpha chain variable domain of TCR clone 213857 (TRAV12-2, TRAJ10)
WGVTGGGNKPTF

SEQ ID NO: 427714 - protein, 15 aa, Homo sapiens
  CDR3 for beta chain variable domain of TCR clone 213857 (TRBV7-8, TRBJ2-7)
CASSLGTGNPYKQYF

SEQ ID NO: 427715 - protein, 12 aa, Homo sapiens
  CDR3 for alpha chain variable domain of TCR clone 213858 (TRAV17, TRAJ53)
CAFGGSNYKLTF

SEQ ID NO: 427716 - protein, 16 aa, Homo sapiens
  CDR3 for beta chain variable domain of TCR clone 213858 (TRBV11-2, TRBJ2-4)
CASSQEGRGGLDNQYF

SEQ ID NO: 427717 - protein, 15 aa, Homo sapiens
  CDR3 for alpha chain variable domain of TCR clone 213859 (TRAV12-2, TRAJ53)
CAVNGGGGSNYKLTL

SEQ ID NO: 427718 - protein, 15 aa, Homo sapiens
  CDR3 for beta chain variable domain of TCR clone 213859 (TRBV28, TRBJ2-1)
CASSGLAEVDNEQFF

SEQ ID NO: 427719 - protein, 12 aa, Homo sapiens
  CDR3 for alpha chain variable domain of TCR clone 213860 (TRAV25, TRAJ38)
CAGTGNNRKLIW

SEQ ID NO: 427720 - protein, 15 aa, Homo sapiens
  CDR3 for beta chain variable domain of TCR clone 213860 (TRBV7-9, TRBJ1-6)
CTSSSPGRGNSHLHF

SEQ ID NO: 427721 - protein, 14 aa, Homo sapiens
  CDR3 for alpha chain variable domain of TCR clone 213861 (TRAV21, TRAJ17)
CAVRSKAAGNKLTF

SEQ ID NO: 427722 - protein, 15 aa, Homo sapiens
  CDR3 for beta chain variable domain of TCR clone 213861 (TRBV4-1, TRBJ2-1)
CASSQVLAGGDEQFF

SEQ ID NO: 427723 - protein, 14 aa, Homo sapiens
  CDR3 for alpha chain variable domain of TCR clone 213862 (TRAV23/DV6, TRAJ11)
CAAGLESGYSTLTF

SEQ ID NO: 427724 - protein, 13 aa, Homo sapiens
  CDR3 for beta chain variable domain of TCR clone 213862 (TRBV4-1, TRBJ2-5)
CASSLTRGETQYF

SEQ ID NO: 427725 - protein, 18 aa, Homo sapiens
  CDR3 for alpha chain variable domain of TCR clone 213863 (TRAV21, TRAJ52)
CAVRPSPAGGTSYGKLTF

SEQ ID NO: 427726 - protein, 15 aa, Homo sapiens
  CDR3 for beta chain variable domain of TCR clone 213863 (TRBV7-9, TRBJ2-7)
CVSGISGLAVYEQYF

SEQ ID NO: 427727 - protein, 14 aa, Homo sapiens
  CDR3 for alpha chain variable domain of TCR clone 213864 (TRAV13-1, TRAJ42)
CAGHYGGSQGNLIF

SEQ ID NO: 427728 - protein, 14 aa, Homo sapiens
  CDR3 for beta chain variable domain of TCR clone 213864 (TRBV5-1, TRBJ2-5)
CASSLGQGRETQYF

SEQ ID NO: 427729 - protein, 15 aa, Homo sapiens
  CDR3 for alpha chain variable domain of TCR clone 213865 (TRAV26-1, TRAJ56)
CIVRVATGANSKLTF

SEQ ID NO: 427730 - protein, 15 aa, Homo sapiens
  CDR3 for beta chain variable domain of TCR clone 213865 (TRBV27, TRBJ2-7)
CASSPQREGQREQYF

SEQ ID NO: 427731 - protein, 11 aa, Homo sapiens
  CDR3 for alpha chain variable domain of TCR clone 213866 (TRAV3, TRAJ21)
RSVGNFNKFYF

SEQ ID NO: 427732 - protein, 16 aa, Homo sapiens
  CDR3 for beta chain variable domain of TCR clone 213866 (TRBV19, TRBJ2-1)
CASSKAGPSSYNEQFF

SEQ ID NO: 427733 - protein, 15 aa, Homo sapiens
  CDR3 for alpha chain variable domain of TCR clone 213867 (TRAV1-2, TRAJ34)
CLLPLSGYNTDKLIF

SEQ ID NO: 427734 - protein, 13 aa, Homo sapiens
  CDR3 for beta chain variable domain of TCR clone 213867 (TRBV11-2, TRBJ1-1)
CASSLGNGAEAFF

SEQ ID NO: 427735 - protein, 15 aa, Homo sapiens
  CDR3 for alpha chain variable domain of TCR clone 213868 (TRAV26-1, TRAJ29)
CIVRVEGSGNTPLVF

SEQ ID NO: 427736 - protein, 13 aa, Homo sapiens
  CDR3 for beta chain variable domain of TCR clone 213868 (TRBV7-2, TRBJ1-6)
CASSLKFDSPLHF

SEQ ID NO: 427737 - protein, 10 aa, Homo sapiens
  CDR3 for alpha chain variable domain of TCR clone 213869 (TRAV36/DV7, TRAJ48)
CAVGTEKLTF

SEQ ID NO: 427738 - protein, 14 aa, Homo sapiens
  CDR3 for beta chain variable domain of TCR clone 213869 (TRBV7-2, TRBJ2-7)
CASSPKTSFYEQYF

SEQ ID NO: 427739 - protein, 12 aa, Homo sapiens
  CDR3 for alpha chain variable domain of TCR clone 213870 (TRAV3, TRAJ26)
CAVRDYGQNFVF

SEQ ID NO: 427740 - protein, 16 aa, Homo sapiens
  CDR3 for beta chain variable domain of TCR clone 213870 (TRBV11-2, TRBJ1-2)
CASTPSGREANYGYTF

SEQ ID NO: 427741 - protein, 16 aa, Homo sapiens
  CDR3 for alpha chain variable domain of TCR clone 213871 (TRAV26-1, TRAJ37)
CIVRGGGSGNTGKLIF

SEQ ID NO: 427742 - protein, 17 aa, Homo sapiens
  CDR3 for beta chain variable domain of TCR clone 213871 (TRBV4-1, TRBJ2-7)
CASSRGPLGVRGGEQYF

SEQ ID NO: 427743 - protein, 21 aa, Homo sapiens
  CDR3 for alpha chain variable domain of TCR clone 213872 (TRAV1-2, TRAJ9)
CAALNTGGFKTILEQEQDYLL

SEQ ID NO: 427744 - protein, 13 aa, Homo sapiens
  CDR3 for beta chain variable domain of TCR clone 213872 (TRBV19, TRBJ1-2)
CASSVPGQEGYTF

SEQ ID NO: 427745 - protein, 14 aa, Homo sapiens
  CDR3 for alpha chain variable domain of TCR clone 213873 (TRAV35, TRAJ22)
CAVLRPGSARQLTF

SEQ ID NO: 427746 - protein, 14 aa, Homo sapiens
  CDR3 for beta chain variable domain of TCR clone 213873 (TRBV4-1, TRBJ2-7)
CASSPVAGGDEQYF

SEQ ID NO: 427747 - protein, 14 aa, Homo sapiens
  CDR3 for alpha chain variable domain of TCR clone 213874 (TRAV12-2, TRAJ13)
CAVKKTGGYQNVTF

SEQ ID NO: 427748 - protein, 16 aa, Homo sapiens
  CDR3 for beta chain variable domain of TCR clone 213874 (TRBV12-4, TRBJ1-5)
CASSRPVGGSNQPQHF

SEQ ID NO: 427749 - protein, 15 aa, Homo sapiens
  CDR3 for alpha chain variable domain of TCR clone 213875 (TRAV21, TRAJ53)
CATLNSGGSNYKLTF

SEQ ID NO: 427750 - protein, 15 aa, Homo sapiens
  CDR3 for beta chain variable domain of TCR clone 213875 (TRBV6-5, TRBJ2-3)
CASSYSGSSTDTQYF

SEQ ID NO: 427751 - protein, 12 aa, Homo sapiens
  CDR3 for alpha chain variable domain of TCR clone 213876 (TRAV23/DV6, TRAJ30)
CAASKGGDKLIF

SEQ ID NO: 427752 - protein, 15 aa, Homo sapiens
  CDR3 for beta chain variable domain of TCR clone 213876 (TRBV12-4, TRBJ2-1)
CASRPTRTGYNEQFF

SEQ ID NO: 427753 - protein, 14 aa, Homo sapiens
  CDR3 for alpha chain variable domain of TCR clone 213877 (TRAV16, TRAJ39)
CALSKNNAGNMLTF

SEQ ID NO: 427754 - protein, 16 aa, Homo sapiens
  CDR3 for beta chain variable domain of TCR clone 213877 (TRBV6-6, TRBJ2-1)
CAGSYSFSGSYNEQFF

SEQ ID NO: 427755 - protein, 14 aa, Homo sapiens
  CDR3 for alpha chain variable domain of TCR clone 213878 (TRAV17, TRAJ57)
CAPDPQGGSEKLVF

SEQ ID NO: 427756 - protein, 18 aa, Homo sapiens
  CDR3 for beta chain variable domain of TCR clone 213878 (TRBV25-1, TRBJ2-1)
CASSESRAGGPGYNEQFF

SEQ ID NO: 427757 - protein, 12 aa, Homo sapiens
  CDR3 for alpha chain variable domain of TCR clone 213879 (TRAV21, TRAJ33)
CAKMDSNYQLLR

SEQ ID NO: 427758 - protein, 14 aa, Homo sapiens
  CDR3 for beta chain variable domain of TCR clone 213879 (TRBV2, TRBJ2-7)
CASSLTSGGYEQYF

SEQ ID NO: 427759 - protein, 17 aa, Homo sapiens
  CDR3 for alpha chain variable domain of TCR clone 213880 (TRAV35, TRAJ45)
SDVGIYPLVGGADGLTF

SEQ ID NO: 427760 - protein, 14 aa, Homo sapiens
  CDR3 for beta chain variable domain of TCR clone 213880 (TRBV19, TRBJ2-2)
CASSTLHRSGELFF

SEQ ID NO: 427761 - protein, 11 aa, Homo sapiens
  CDR3 for alpha chain variable domain of TCR clone 213881 (TRAV2, TRAJ33)
CAVDSNYQLIW

SEQ ID NO: 427762 - protein, 14 aa, Homo sapiens
  CDR3 for beta chain variable domain of TCR clone 213881 (TRBV11-2, TRBJ2-3)
CASSRLARTDTQYY

SEQ ID NO: 427763 - protein, 16 aa, Homo sapiens
  CDR3 for alpha chain variable domain of TCR clone 213882 (TRAV8-3, TRAJ10)
CAVGPGVTGGGNKLTF

SEQ ID NO: 427764 - protein, 13 aa, Homo sapiens
  CDR3 for beta chain variable domain of TCR clone 213882 (TRBV18, TRBJ1-1)
CASSPGPSGEAFY

SEQ ID NO: 427765 - protein, 16 aa, Homo sapiens
  CDR3 for alpha chain variable domain of TCR clone 213883 (TRAV30, TRAJ24)
CGTEIVDADSWGKFQF

SEQ ID NO: 427766 - protein, 12 aa, Homo sapiens
  CDR3 for beta chain variable domain of TCR clone 213883 (TRBV29-1, TRBJ1-2)
CSVNEGIGGYTF

SEQ ID NO: 427767 - protein, 11 aa, Homo sapiens
  CDR3 for alpha chain variable domain of TCR clone 213884 (TRAV29/DV5, TRAJ37)
CATSNTGKLIF

SEQ ID NO: 427768 - protein, 13 aa, Homo sapiens
  CDR3 for beta chain variable domain of TCR clone 213884 (TRBV6-3, TRBJ2-1)
CASSWEGSDEQFF

SEQ ID NO: 427769 - protein, 16 aa, Homo sapiens
  CDR3 for alpha chain variable domain of TCR clone 213885 (TRAV30, TRAJ24)
CGTEIVDADSWGKFQF

SEQ ID NO: 427770 - protein, 12 aa, Homo sapiens
  CDR3 for beta chain variable domain of TCR clone 213885 (TRBV11-2, TRBJ2-2)
CASSLPTGELFL

SEQ ID NO: 427771 - protein, 13 aa, Homo sapiens
  CDR3 for alpha chain variable domain of TCR clone 213886 (TRAV36/DV7, TRAJ57)
CAVGEGGSEKLVF

SEQ ID NO: 427772 - protein, 16 aa, Homo sapiens
  CDR3 for beta chain variable domain of TCR clone 213886 (TRBV2, TRBJ1-4)
CASNLLQGATNEKLFF

SEQ ID NO: 427773 - protein, 15 aa, Homo sapiens
  CDR3 for alpha chain variable domain of TCR clone 213887 (TRAV8-3, TRAJ45)
CASSYSGGCADGLTF

SEQ ID NO: 427774 - protein, 12 aa, Homo sapiens
  CDR3 for beta chain variable domain of TCR clone 213887 (TRBV12-4, TRBJ2-7)
CASSLGGYEQYF

SEQ ID NO: 427775 - protein, 14 aa, Homo sapiens
  CDR3 for alpha chain variable domain of TCR clone 213888 (TRAV2, TRAJ9)
CAVEDRSGGFKTII

SEQ ID NO: 427776 - protein, 16 aa, Homo sapiens
  CDR3 for beta chain variable domain of TCR clone 213888 (TRBV7-3, TRBJ2-2)
CASSLKRGTLSGELFF

SEQ ID NO: 427777 - protein, 14 aa, Homo sapiens
  CDR3 for alpha chain variable domain of TCR clone 213889 (TRAV1-2, TRAJ8)
CAVREDTGFLKLVF

SEQ ID NO: 427778 - protein, 12 aa, Homo sapiens
  CDR3 for beta chain variable domain of TCR clone 213889 (TRBV29-1, TRBJ2-3)
CSVTGGADTQYF

SEQ ID NO: 427779 - protein, 15 aa, Homo sapiens
  CDR3 for alpha chain variable domain of TCR clone 213890 (TRAV12-2, TRAJ53)
CAVNGGGGSNCKLTF

SEQ ID NO: 427780 - protein, 13 aa, Homo sapiens
  CDR3 for beta chain variable domain of TCR clone 213890 (TRBV3-1, TRBJ1-1)
CASSPGVITEAFF

SEQ ID NO: 427781 - protein, 15 aa, Homo sapiens
  CDR3 for alpha chain variable domain of TCR clone 213891 (TRAV8-3, TRAJ11)
CAVGLLNSGYSTLTF

SEQ ID NO: 427782 - protein, 16 aa, Homo sapiens
  CDR3 for beta chain variable domain of TCR clone 213891 (TRBV7-9, TRBJ1-2)
CASSLGVSAGEDGYTF

SEQ ID NO: 427783 - protein, 12 aa, Homo sapiens
  CDR3 for alpha chain variable domain of TCR clone 213892 (TRAV12-3, TRAJ17)
CAMTLTGNKLTF

SEQ ID NO: 427784 - protein, 13 aa, Homo sapiens
  CDR3 for beta chain variable domain of TCR clone 213892 (TRBV10-3, TRBJ2-7)
CASKLAVDYEQYF

SEQ ID NO: 427785 - protein, 12 aa, Homo sapiens
  CDR3 for alpha chain variable domain of TCR clone 213893 (TRAV8-3, TRAJ20)
CAVGANDYKLSF

SEQ ID NO: 427786 - protein, 16 aa, Homo sapiens
  CDR3 for beta chain variable domain of TCR clone 213893 (TRBV7-2, TRBJ2-5)
CASSPRGRGGGETQYF

SEQ ID NO: 427787 - protein, 14 aa, Homo sapiens
  CDR3 for alpha chain variable domain of TCR clone 213894 (TRAV17, TRAJ13)
CATVPGGGYQKVTF

SEQ ID NO: 427788 - protein, 16 aa, Homo sapiens
  CDR3 for beta chain variable domain of TCR clone 213894 (TRBV13, TRBJ2-2)
CASSPRTGEHTGELFF

SEQ ID NO: 427789 - protein, 13 aa, Homo sapiens
  CDR3 for alpha chain variable domain of TCR clone 213895 (TRAV8-1, TRAJ23)
CAVTGAQGGKLIF

SEQ ID NO: 427790 - protein, 14 aa, Homo sapiens
  CDR3 for beta chain variable domain of TCR clone 213895 (TRBV20-1, TRBJ1-1)
CSAQTRIGGTEAFF

SEQ ID NO: 427791 - protein, 11 aa, Homo sapiens
  CDR3 for alpha chain variable domain of TCR clone 213896 (TRAV12-3, TRAJ43)
CAMSVSNDMRF

SEQ ID NO: 427792 - protein, 11 aa, Homo sapiens
  CDR3 for beta chain variable domain of TCR clone 213896 (TRBV12-4, TRBJ2-3)
CASTATDTQYF

SEQ ID NO: 427793 - protein, 13 aa, Homo sapiens
  CDR3 for alpha chain variable domain of TCR clone 213897 (TRAV20, TRAJ54)
CAVQAGGAQKLVF

SEQ ID NO: 427794 - protein, 14 aa, Homo sapiens
  CDR3 for beta chain variable domain of TCR clone 213897 (TRBV7-3, TRBJ1-1)
CASSLKGGNTEAFF

SEQ ID NO: 427795 - protein, 17 aa, Homo sapiens
  CDR3 for alpha chain variable domain of TCR clone 213898 (TRAV3, TRAJ6)
CAVRDGPRAGGSYIPTF

SEQ ID NO: 427796 - protein, 13 aa, Homo sapiens
  CDR3 for beta chain variable domain of TCR clone 213898 (TRBV12-4, TRBJ2-7)
CASSLSGVYEQYF

SEQ ID NO: 427797 - protein, 16 aa, Homo sapiens
  CDR3 for alpha chain variable domain of TCR clone 213899 (TRAV8-1, TRAJ42)
CAVTSRYGGSQGNLIF

SEQ ID NO: 427798 - protein, 12 aa, Homo sapiens
  CDR3 for beta chain variable domain of TCR clone 213899 (TRBV6-3, TRBJ2-5)
CASSLGRRGLYF

SEQ ID NO: 427799 - protein, 13 aa, Homo sapiens
  CDR3 for alpha chain variable domain of TCR clone 213900 (TRAV1-2, TRAJ9)
CAALNTGGFKTTF

SEQ ID NO: 427800 - protein, 14 aa, Homo sapiens
  CDR3 for beta chain variable domain of TCR clone 213900 (TRBV13, TRBJ2-3)
CASSSGSPTDTQYF

SEQ ID NO: 427801 - protein, 10 aa, Homo sapiens
  CDR3 for alpha chain variable domain of TCR clone 213901 (TRAV23/DV6, TRAJ57)
CVASSTLSQG

SEQ ID NO: 427802 - protein, 14 aa, Homo sapiens
  CDR3 for beta chain variable domain of TCR clone 213901 (TRBV20-1, TRBJ2-7)
CSAKRGRSSYEQYF

SEQ ID NO: 427803 - protein, 16 aa, Homo sapiens
  CDR3 for alpha chain variable domain of TCR clone 213902 (TRAV3, TRAJ37)
CAVRGKGSGNTGKLIF

SEQ ID NO: 427804 - protein, 14 aa, Homo sapiens
  CDR3 for beta chain variable domain of TCR clone 213902 (TRBV20-1, TRBJ2-3)
CSARGGTSTDTQYL

SEQ ID NO: 427805 - protein, 11 aa, Homo sapiens
  CDR3 for alpha chain variable domain of TCR clone 213903 (TRAV1-1, TRAJ30)
CAQNRDEKIIF

SEQ ID NO: 427806 - protein, 12 aa, Homo sapiens
  CDR3 for beta chain variable domain of TCR clone 213903 (TRBV11-2, TRBJ2-2)
CASSLGGGELFF

SEQ ID NO: 427807 - protein, 12 aa, Homo sapiens
  CDR3 for alpha chain variable domain of TCR clone 213904 (TRAV17, TRAJ29)
CYASSGNTPLVF

SEQ ID NO: 427808 - protein, 17 aa, Homo sapiens
  CDR3 for beta chain variable domain of TCR clone 213904 (TRBV20-1, TRBJ2-2)
CSASGSGQGGLTGEPFF

SEQ ID NO: 427809 - protein, 12 aa, Homo sapiens
  CDR3 for alpha chain variable domain of TCR clone 213905 (TRAV8-3, TRAJ20)
CAVGANDYKLSF

SEQ ID NO: 427810 - protein, 17 aa, Homo sapiens
  CDR3 for beta chain variable domain of TCR clone 213905 (TRBV7-3, TRBJ2-3)
CASSLMKRMRGADTQYF

SEQ ID NO: 427811 - protein, 17 aa, Homo sapiens
  CDR3 for alpha chain variable domain of TCR clone 213906 (TRAV17, TRAJ7)
CATLGRLAFGKGNQVVV

SEQ ID NO: 427812 - protein, 13 aa, Homo sapiens
  CDR3 for beta chain variable domain of TCR clone 213906 (TRBV12-4, TRBJ2-7)
CASSLDRVREQYF

SEQ ID NO: 427813 - protein, 16 aa, Homo sapiens
  CDR3 for alpha chain variable domain of TCR clone 213907 (TRAV3, TRAJ37)
CAARPHGSGNTGKLIF

SEQ ID NO: 427814 - protein, 16 aa, Homo sapiens
  CDR3 for beta chain variable domain of TCR clone 213907 (TRBV9, TRBJ1-2)
CDSSVEEKVSPYGYTF

SEQ ID NO: 427815 - protein, 14 aa, Homo sapiens
  CDR3 for alpha chain variable domain of TCR clone 213908 (TRAV1-2, TRAJ16)
CAVNRVSDGQKLLF

SEQ ID NO: 427816 - protein, 14 aa, Homo sapiens
  CDR3 for beta chain variable domain of TCR clone 213908 (TRBV7-2, TRBJ1-1)
CASSFLTGTTEAFF

SEQ ID NO: 427817 - protein, 12 aa, Homo sapiens
  CDR3 for alpha chain variable domain of TCR clone 213909 (TRAV38-1, TRAJ20)
CAFIWNDYKLSV

SEQ ID NO: 427818 - protein, 14 aa, Homo sapiens
  CDR3 for beta chain variable domain of TCR clone 213909 (TRBV27, TRBJ1-1)
CASSPQGKRAEAFF

SEQ ID NO: 427819 - protein, 15 aa, Homo sapiens
  CDR3 for alpha chain variable domain of TCR clone 213910 (TRAV35, TRAJ40)
CAGQLGTSGTYKYIF

SEQ ID NO: 427820 - protein, 13 aa, Homo sapiens
  CDR3 for beta chain variable domain of TCR clone 213910 (TRBV11-2, TRBJ2-1)
CASSLRLTHEQFF

SEQ ID NO: 427821 - protein, 12 aa, Homo sapiens
  CDR3 for alpha chain variable domain of TCR clone 213911 (TRAV1-2, TRAJ37)
CAFPGNTGKLIF

SEQ ID NO: 427822 - protein, 18 aa, Homo sapiens
  CDR3 for beta chain variable domain of TCR clone 213911 (TRBV10-3, TRBJ2-3)
CAISESRVGPMRGDTQYF

SEQ ID NO: 427823 - protein, 14 aa, Homo sapiens
  CDR3 for alpha chain variable domain of TCR clone 213912 (TRAV12-3, TRAJ29)
CAMSPYSGNKPLVF

SEQ ID NO: 427824 - protein, 12 aa, Homo sapiens
  CDR3 for beta chain variable domain of TCR clone 213912 (TRBV9, TRBJ2-1)
CASSVGGTDIFF

SEQ ID NO: 427825 - protein, 16 aa, Homo sapiens
  CDR3 for alpha chain variable domain of TCR clone 213913 (TRAV1-2, TRAJ6)
CSVRDQGTGGSYIPTF

SEQ ID NO: 427826 - protein, 13 aa, Homo sapiens
  CDR3 for beta chain variable domain of TCR clone 213913 (TRBV28, TRBJ2-7)
CASTPGLAGEQYF

SEQ ID NO: 427827 - protein, 14 aa, Homo sapiens
  CDR3 for alpha chain variable domain of TCR clone 213914 (TRAV12-2, TRAJ13)
CAVKKTGGYQKVTF

SEQ ID NO: 427828 - protein, 11 aa, Homo sapiens
  CDR3 for beta chain variable domain of TCR clone 213914 (TRBV11-2, TRBJ2-2)
CQQPWRGELFF

SEQ ID NO: 427829 - protein, 12 aa, Homo sapiens
  CDR3 for alpha chain variable domain of TCR clone 213915 (TRAV21, TRAJ29)
CAGTSGNTPLVF

SEQ ID NO: 427830 - protein, 16 aa, Homo sapiens
  CDR3 for beta chain variable domain of TCR clone 213915 (TRBV7-6, TRBJ2-1)
CASSAPGPSSYNEQFF

SEQ ID NO: 427831 - protein, 13 aa, Homo sapiens
  CDR3 for alpha chain variable domain of TCR clone 213916 (TRAV17, TRAJ9)
CATDYTGGLKTIF

SEQ ID NO: 427832 - protein, 13 aa, Homo sapiens
  CDR3 for beta chain variable domain of TCR clone 213916 (TRBV2, TRBJ1-1)
CARNPTGGFHAFF

SEQ ID NO: 427833 - protein, 11 aa, Homo sapiens
  CDR3 for alpha chain variable domain of TCR clone 213917 (TRAV12-1, TRAJ34)
CVVNKGRELIF

SEQ ID NO: 427834 - protein, 13 aa, Homo sapiens
  CDR3 for beta chain variable domain of TCR clone 213917 (TRBV7-3, TRBJ2-1)
CASSPVAYNEQFF

SEQ ID NO: 427835 - protein, 14 aa, Homo sapiens
  CDR3 for alpha chain variable domain of TCR clone 213918 (TRAV12-1, TRAJ30)
CVVNIGGRDDKIIF

SEQ ID NO: 427836 - protein, 16 aa, Homo sapiens
  CDR3 for beta chain variable domain of TCR clone 213918 (TRBV6-1, TRBJ2-5)
CASSETLDRGAETQYF

SEQ ID NO: 427837 - protein, 14 aa, Homo sapiens
  CDR3 for alpha chain variable domain of TCR clone 213919 (TRAV1-2, TRAJ16)
CAVNRFSDGQKLLF

SEQ ID NO: 427838 - protein, 13 aa, Homo sapiens
  CDR3 for beta chain variable domain of TCR clone 213919 (TRBV11-2, TRBJ1-5)
CASSLDLHQPQHF

SEQ ID NO: 427839 - protein, 13 aa, Homo sapiens
  CDR3 for alpha chain variable domain of TCR clone 213920 (TRAV8-6, TRAJ49)
CAVITNTGNQFYF

SEQ ID NO: 427840 - protein, 13 aa, Homo sapiens
  CDR3 for beta chain variable domain of TCR clone 213920 (TRBV20-1, TRBJ1-1)
CSARGGGNTESFF

SEQ ID NO: 427841 - protein, 14 aa, Homo sapiens
  CDR3 for alpha chain variable domain of TCR clone 213921 (TRAV1-2, TRAJ8)
CAVREDTGFQKLVF

SEQ ID NO: 427842 - protein, 17 aa, Homo sapiens
  CDR3 for beta chain variable domain of TCR clone 213921 (TRBV7-2, TRBJ2-3)
CASSLEARGTSTDTQYY

SEQ ID NO: 427843 - protein, 11 aa, Homo sapiens
  CDR3 for alpha chain variable domain of TCR clone 213922 (TRAV39, TRAJ49)
CAVDISTQFYF

SEQ ID NO: 427844 - protein, 14 aa, Homo sapiens
  CDR3 for beta chain variable domain of TCR clone 213922 (TRBV6-1, TRBJ1-3)
CASVQGGGGNTIYF

SEQ ID NO: 427845 - protein, 16 aa, Homo sapiens
  CDR3 for alpha chain variable domain of TCR clone 213923 (TRAV3, TRAJ10)
CAVRDMRAGGGNKLTF

SEQ ID NO: 427846 - protein, 13 aa, Homo sapiens
  CDR3 for beta chain variable domain of TCR clone 213923 (TRBV7-9, TRBJ1-2)
CASSLKQNYGYTC

SEQ ID NO: 427847 - protein, 11 aa, Homo sapiens
  CDR3 for alpha chain variable domain of TCR clone 213924 (TRAV2, TRAJ13)
CAAGGYQKVTF

SEQ ID NO: 427848 - protein, 15 aa, Homo sapiens
  CDR3 for beta chain variable domain of TCR clone 213924 (TRBV6-1, TRBJ2-2)
CASSRLRGDTGELFF

SEQ ID NO: 427849 - protein, 11 aa, Homo sapiens
  CDR3 for alpha chain variable domain of TCR clone 213925 (TRAV17, TRAJ49)
CATDAGNQFYF

SEQ ID NO: 427850 - protein, 14 aa, Homo sapiens
  CDR3 for beta chain variable domain of TCR clone 213925 (TRBV7-3, TRBJ2-1)
CASSLAGGTNEQFF

SEQ ID NO: 427851 - protein, 14 aa, Homo sapiens
  CDR3 for alpha chain variable domain of TCR clone 213926 (TRAV8-2, TRAJ4)
CVVSPSGGYNKLIF

SEQ ID NO: 427852 - protein, 15 aa, Homo sapiens
  CDR3 for beta chain variable domain of TCR clone 213926 (TRBV5-1, TRBJ2-1)
CASSPPRAPYNEQFF

SEQ ID NO: 427853 - protein, 13 aa, Homo sapiens
  CDR3 for alpha chain variable domain of TCR clone 213927 (TRAV13-1, TRAJ39)
CAASIWAGNMLTF

SEQ ID NO: 427854 - protein, 15 aa, Homo sapiens
  CDR3 for beta chain variable domain of TCR clone 213927 (TRBV7-9, TRBJ1-1)
CASSLLEQGGTEACF

SEQ ID NO: 427855 - protein, 14 aa, Homo sapiens
  CDR3 for alpha chain variable domain of TCR clone 213928 (TRAV1-2, TRAJ16)
CAVNRFSDGQKLLF

SEQ ID NO: 427856 - protein, 15 aa, Homo sapiens
  CDR3 for beta chain variable domain of TCR clone 213928 (TRBV7-9, TRBJ1-6)
CASSYPGRGNSTLHF

SEQ ID NO: 427857 - protein, 16 aa, Homo sapiens
  CDR3 for alpha chain variable domain of TCR clone 213929 (TRAV1-1, TRAJ29)
CAVRSTRNSGNTPLVF

SEQ ID NO: 427858 - protein, 16 aa, Homo sapiens
  CDR3 for beta chain variable domain of TCR clone 213929 (TRBV27, TRBJ1-1)
CASRSRGRTGYTEAFF

SEQ ID NO: 427859 - protein, 15 aa, Homo sapiens
  CDR3 for alpha chain variable domain of TCR clone 213930 (TRAV26-1, TRAJ48)
CIVRVGDFGNDKLTF

SEQ ID NO: 427860 - protein, 16 aa, Homo sapiens
  CDR3 for beta chain variable domain of TCR clone 213930 (TRBV4-1, TRBJ2-3)
CASSQRAGGLTDTQYF

SEQ ID NO: 427861 - protein, 13 aa, Homo sapiens
  CDR3 for alpha chain variable domain of TCR clone 213931 (TRAV8-3, TRAJ44)
CAVVPGTASKLTF

SEQ ID NO: 427862 - protein, 14 aa, Homo sapiens
  CDR3 for beta chain variable domain of TCR clone 213931 (TRBV7-2, TRBJ2-7)
CARRSQGAAYEQYF

SEQ ID NO: 427863 - protein, 16 aa, Homo sapiens
  CDR3 for alpha chain variable domain of TCR clone 213932 (TRAV35, TRAJ20)
CWADPSSGFNDYKLSF

SEQ ID NO: 427864 - protein, 16 aa, Homo sapiens
  CDR3 for beta chain variable domain of TCR clone 213932 (TRBV4-3, TRBJ1-6)
CASSAQPGGESSPLHF

SEQ ID NO: 427865 - protein, 14 aa, Homo sapiens
  CDR3 for alpha chain variable domain of TCR clone 213933 (TRAV8-3, TRAJ7)
CAAIELYGNNGLAF

SEQ ID NO: 427866 - protein, 16 aa, Homo sapiens
  CDR3 for beta chain variable domain of TCR clone 213933 (TRBV13, TRBJ2-2)
CASSPRTGEHTGELVF

SEQ ID NO: 427867 - protein, 13 aa, Homo sapiens
  CDR3 for alpha chain variable domain of TCR clone 213934 (TRAV2, TRAJ29)
CAAQNSGNTPLVF

SEQ ID NO: 427868 - protein, 16 aa, Homo sapiens
  CDR3 for beta chain variable domain of TCR clone 213934 (TRBV7-3, TRBJ2-1)
CASSLEGYRSYNEQFF

SEQ ID NO: 427869 - protein, 14 aa, Homo sapiens
  CDR3 for alpha chain variable domain of TCR clone 213935 (TRAV12-2, TRAJ13)
CAVKKTGGYQKVTF

SEQ ID NO: 427870 - protein, 15 aa, Homo sapiens
  CDR3 for beta chain variable domain of TCR clone 213935 (TRBV27, TRBJ2-1)
CAGSNGGGSANEQFF

SEQ ID NO: 427871 - protein, 12 aa, Homo sapiens
  CDR3 for alpha chain variable domain of TCR clone 213936 (TRAV1-1, TRAJ8)
FAGGTGFHKLVF

SEQ ID NO: 427872 - protein, 15 aa, Homo sapiens
  CDR3 for beta chain variable domain of TCR clone 213936 (TRBV7-9, TRBJ1-4)
CASSRTGGFNEKLFF

SEQ ID NO: 427873 - protein, 11 aa, Homo sapiens
  CDR3 for alpha chain variable domain of TCR clone 213937 (TRAV35, TRAJ30)
CAGPGDDKIIF

SEQ ID NO: 427874 - protein, 16 aa, Homo sapiens
  CDR3 for beta chain variable domain of TCR clone 213937 (TRBV13, TRBJ2-2)
CASSPRTGEHTGELFF

SEQ ID NO: 427875 - protein, 14 aa, Homo sapiens
  CDR3 for alpha chain variable domain of TCR clone 213938 (TRAV12-1, TRAJ13)
CVVIDSGGYQKVTF

SEQ ID NO: 427876 - protein, 12 aa, Homo sapiens
  CDR3 for beta chain variable domain of TCR clone 213938 (TRBV29-1, TRBJ2-3)
CSVTGVADTQYF

SEQ ID NO: 427877 - protein, 14 aa, Homo sapiens
  CDR3 for alpha chain variable domain of TCR clone 213939 (TRAV13-1, TRAJ24)
CAASPADSWGKFQF

SEQ ID NO: 427878 - protein, 15 aa, Homo sapiens
  CDR3 for beta chain variable domain of TCR clone 213939 (TRBV11-2, TRBJ2-1)
CASSSPSTRYNEQFF

SEQ ID NO: 427879 - protein, 16 aa, Homo sapiens
  CDR3 for alpha chain variable domain of TCR clone 213940 (TRAV26-1, TRAJ23)
CIVRVANSNQGGKLIS

SEQ ID NO: 427880 - protein, 16 aa, Homo sapiens
  CDR3 for beta chain variable domain of TCR clone 213940 (TRBV10-3, TRBJ2-1)
CAISGVGDGGGGEQFF

SEQ ID NO: 427881 - protein, 14 aa, Homo sapiens
  CDR3 for alpha chain variable domain of TCR clone 213941 (TRAV12-2, TRAJ44)
CAVNKAGTASKLTF

SEQ ID NO: 427882 - protein, 15 aa, Homo sapiens
  CDR3 for beta chain variable domain of TCR clone 213941 (TRBV5-5, TRBJ1-5)
CASSSTPGSNQPQHF

SEQ ID NO: 427883 - protein, 16 aa, Homo sapiens
  CDR3 for alpha chain variable domain of TCR clone 213942 (TRAV3, TRAJ10)
CAVRDMRAGGGNKLTF

SEQ ID NO: 427884 - protein, 17 aa, Homo sapiens
  CDR3 for beta chain variable domain of TCR clone 213942 (TRBV18, TRBJ2-1)
CASSPRVAGGSYNEQFF

SEQ ID NO: 427885 - protein, 16 aa, Homo sapiens
  CDR3 for alpha chain variable domain of TCR clone 213943 (TRAV23/DV6, TRAJ9)
CAASIGGNTGGFKTIF

SEQ ID NO: 427886 - protein, 14 aa, Homo sapiens
  CDR3 for beta chain variable domain of TCR clone 213943 (TRBV6-1, TRBJ1-3)
CGSVKGGGGNTIYF

SEQ ID NO: 427887 - protein, 14 aa, Homo sapiens
  CDR3 for alpha chain variable domain of TCR clone 213944 (TRAV29/DV5, TRAJ36)
CAARRKTGANNLFF

SEQ ID NO: 427888 - protein, 14 aa, Homo sapiens
  CDR3 for beta chain variable domain of TCR clone 213944 (TRBV19, TRBJ2-7)
CASSIFAGTNEQYF

SEQ ID NO: 427889 - protein, 14 aa, Homo sapiens
  CDR3 for alpha chain variable domain of TCR clone 213945 (TRAV12-2, TRAJ17)
CAVNIKAAGNKLTF

SEQ ID NO: 427890 - protein, 16 aa, Homo sapiens
  CDR3 for beta chain variable domain of TCR clone 213945 (TRBV20-1, TRBJ2-6)
CSTSSQGYDGANVLTF

SEQ ID NO: 427891 - protein, 12 aa, Homo sapiens
  CDR3 for alpha chain variable domain of TCR clone 213946 (TRAV2, TRAJ9)
CAVGAGGFKNIL

SEQ ID NO: 427892 - protein, 16 aa, Homo sapiens
  CDR3 for beta chain variable domain of TCR clone 213946 (TRBV13, TRBJ2-2)
CASSPRTGEHTGELFF

SEQ ID NO: 427893 - protein, 14 aa, Homo sapiens
  CDR3 for alpha chain variable domain of TCR clone 213947 (TRAV8-2, TRAJ4)
CVVSPSGGYNKLFF

SEQ ID NO: 427894 - protein, 11 aa, Homo sapiens
  CDR3 for beta chain variable domain of TCR clone 213947 (TRBV12-4, TRBJ2-2)
CASSSAGELFF

SEQ ID NO: 427895 - protein, 15 aa, Homo sapiens
  CDR3 for alpha chain variable domain of TCR clone 213948 (TRAV21, TRAJ38)
CAVRQDAGNNRKMIW

SEQ ID NO: 427896 - protein, 16 aa, Homo sapiens
  CDR3 for beta chain variable domain of TCR clone 213948 (TRBV4-3, TRBJ1-1)
CASRPLDGGGDTEAFF

SEQ ID NO: 427897 - protein, 14 aa, Homo sapiens
  CDR3 for alpha chain variable domain of TCR clone 213949 (TRAV13-1, TRAJ40)
CAARSTSGTYKYIF

SEQ ID NO: 427898 - protein, 15 aa, Homo sapiens
  CDR3 for beta chain variable domain of TCR clone 213949 (TRBV18, TRBJ1-5)
CSSSETGGNNQPQHF

SEQ ID NO: 427899 - protein, 12 aa, Homo sapiens
  CDR3 for alpha chain variable domain of TCR clone 213950 (TRAV26-1, TRAJ43)
CIVRGNNNDMRF

SEQ ID NO: 427900 - protein, 13 aa, Homo sapiens
  CDR3 for beta chain variable domain of TCR clone 213950 (TRBV20-1, TRBJ2-3)
CSAMYPGADTQYF

SEQ ID NO: 427901 - protein, 17 aa, Homo sapiens
  CDR3 for alpha chain variable domain of TCR clone 213951 (TRAV9-2, TRAJ45)
CALSGYYSGGGADGLTF

SEQ ID NO: 427902 - protein, 13 aa, Homo sapiens
  CDR3 for beta chain variable domain of TCR clone 213951 (TRBV7-2, TRBJ2-7)
CASSSPSGSEQYF

SEQ ID NO: 427903 - protein, 14 aa, Homo sapiens
  CDR3 for alpha chain variable domain of TCR clone 213952 (TRAV29/DV5, TRAJ20)
CAATIRYNDYKLSF

SEQ ID NO: 427904 - protein, 15 aa, Homo sapiens
  CDR3 for beta chain variable domain of TCR clone 213952 (TRBV20-1, TRBJ2-1)
CSASSAGSSYNEQFF

SEQ ID NO: 427905 - protein, 12 aa, Homo sapiens
  CDR3 for alpha chain variable domain of TCR clone 213953 (TRAV12-3, TRAJ17)
CAMTLTGNKLTF

SEQ ID NO: 427906 - protein, 15 aa, Homo sapiens
  CDR3 for beta chain variable domain of TCR clone 213953 (TRBV7-9, TRBJ1-4)
CASSARTGGNERLFF

SEQ ID NO: 427907 - protein, 14 aa, Homo sapiens
  CDR3 for alpha chain variable domain of TCR clone 213954 (TRAV17, TRAJ56)
CATVPPGANSKLTF

SEQ ID NO: 427908 - protein, 15 aa, Homo sapiens
  CDR3 for beta chain variable domain of TCR clone 213954 (TRBV6-6, TRBJ2-5)
CASSYGKIIQETQYF

SEQ ID NO: 427909 - protein, 14 aa, Homo sapiens
  CDR3 for alpha chain variable domain of TCR clone 213955 (TRAV25, TRAJ22)
CAVRSSGSARQLTF

SEQ ID NO: 427910 - protein, 16 aa, Homo sapiens
  CDR3 for beta chain variable domain of TCR clone 213955 (TRBV4-2, TRBJ1-1)
CASSPSPGGAAPEAFF

SEQ ID NO: 427911 - protein, 14 aa, Homo sapiens
  CDR3 for alpha chain variable domain of TCR clone 213956 (TRAV23/DV6, TRAJ17)
CAASVQAAGNKLNF

SEQ ID NO: 427912 - protein, 18 aa, Homo sapiens
  CDR3 for beta chain variable domain of TCR clone 213956 (TRBV20-1, TRBJ2-7)
CSAGLPPRSGGSPYEQYF

SEQ ID NO: 427913 - protein, 13 aa, Homo sapiens
  CDR3 for alpha chain variable domain of TCR clone 213957 (TRAV12-3, TRAJ54)
CALVPQGAQKLVF

SEQ ID NO: 427914 - protein, 15 aa, Homo sapiens
  CDR3 for beta chain variable domain of TCR clone 213957 (TRBV4-1, TRBJ2-2)
CTSSQDSRGTGELFF

SEQ ID NO: 427915 - protein, 17 aa, Homo sapiens
  CDR3 for alpha chain variable domain of TCR clone 213958 (TRAV4, TRAJ18)
CLVGERSVGSTLGRTYF

SEQ ID NO: 427916 - protein, 14 aa, Homo sapiens
  CDR3 for beta chain variable domain of TCR clone 213958 (TRBV6-5, TRBJ1-2)
CASSYDGTGGGYTF

SEQ ID NO: 427917 - protein, 20 aa, Homo sapiens
  CDR3 for alpha chain variable domain of TCR clone 213959 (TRAV26-1, TRAJ48)
CCVLLHRREPPNFGNEKLTF

SEQ ID NO: 427918 - protein, 15 aa, Homo sapiens
  CDR3 for beta chain variable domain of TCR clone 213959 (TRBV7-2, TRBJ2-6)
CASSLQEAGANVLTF

SEQ ID NO: 427919 - protein, 13 aa, Homo sapiens
  CDR3 for alpha chain variable domain of TCR clone 213960 (TRAV38-1, TRAJ42)
CARWGGSQGNRIF

SEQ ID NO: 427920 - protein, 17 aa, Homo sapiens
  CDR3 for beta chain variable domain of TCR clone 213960 (TRBV20-1, TRBJ2-1)
CSARDPLAGVWGNEQFF

SEQ ID NO: 427921 - protein, 13 aa, Homo sapiens
  CDR3 for alpha chain variable domain of TCR clone 213961 (TRAV27, TRAJ41)
CAGEGNSGYALNF

SEQ ID NO: 427922 - protein, 14 aa, Homo sapiens
  CDR3 for beta chain variable domain of TCR clone 213961 (TRBV25-1, TRBJ1-1)
SASTHLGGNTEAFF

SEQ ID NO: 427923 - protein, 14 aa, Homo sapiens
  CDR3 for alpha chain variable domain of TCR clone 213962 (TRAV20, TRAJ4)
CAVRLGGGYNKLIF

SEQ ID NO: 427924 - protein, 14 aa, Homo sapiens
  CDR3 for beta chain variable domain of TCR clone 213962 (TRBV7-8, TRBJ2-3)
CASSFPDGQDTQYF

SEQ ID NO: 427925 - protein, 12 aa, Homo sapiens
  CDR3 for alpha chain variable domain of TCR clone 213963 (TRAV13-1, TRAJ32)
VTDGGATNKLIF

SEQ ID NO: 427926 - protein, 14 aa, Homo sapiens
  CDR3 for beta chain variable domain of TCR clone 213963 (TRBV7-2, TRBJ2-7)
CASSPKTSFYEQYF

SEQ ID NO: 427927 - protein, 15 aa, Homo sapiens
  CDR3 for alpha chain variable domain of TCR clone 213964 (TRAV3, TRAJ5)
CAVRDLDTGRRALTF

SEQ ID NO: 427928 - protein, 13 aa, Homo sapiens
  CDR3 for beta chain variable domain of TCR clone 213964 (TRBV12-4, TRBJ2-7)
CARGPTETYEQYF

SEQ ID NO: 427929 - protein, 14 aa, Homo sapiens
  CDR3 for alpha chain variable domain of TCR clone 213965 (TRAV20, TRAJ20)
CGVRRGYNDYKLSF

SEQ ID NO: 427930 - protein, 13 aa, Homo sapiens
  CDR3 for beta chain variable domain of TCR clone 213965 (TRBV19, TRBJ2-5)
CASSETAPETQYF

SEQ ID NO: 427931 - protein, 11 aa, Homo sapiens
  CDR3 for alpha chain variable domain of TCR clone 213966 (TRAV1-2, TRAJ20)
CAVANNYKLSL

SEQ ID NO: 427932 - protein, 18 aa, Homo sapiens
  CDR3 for beta chain variable domain of TCR clone 213966 (TRBV20-1, TRBJ2-6)
CSAETTPTHGSGANVLTF

SEQ ID NO: 427933 - protein, 16 aa, Homo sapiens
  CDR3 for alpha chain variable domain of TCR clone 213967 (TRAV17, TRAJ52)
CATSNAGGTSYGKLTF

SEQ ID NO: 427934 - protein, 13 aa, Homo sapiens
  CDR3 for beta chain variable domain of TCR clone 213967 (TRBV27, TRBJ1-6)
CASSLVLVSPLHF

SEQ ID NO: 427935 - protein, 12 aa, Homo sapiens
  CDR3 for alpha chain variable domain of TCR clone 213968 (TRAV1-1, TRAJ23)
CAVTNQGGKLIF

SEQ ID NO: 427936 - protein, 16 aa, Homo sapiens
  CDR3 for beta chain variable domain of TCR clone 213968 (TRBV12-5, TRBJ2-5)
CASGPRTSGNQETQYF

SEQ ID NO: 427937 - protein, 14 aa, Homo sapiens
  CDR3 for alpha chain variable domain of TCR clone 213969 (TRAV3, TRAJ21)
CALGRGSTNFTLDL

SEQ ID NO: 427938 - protein, 14 aa, Homo sapiens
  CDR3 for beta chain variable domain of TCR clone 213969 (TRBV7-9, TRBJ2-4)
CASSLAMGGNIQYL

SEQ ID NO: 427939 - protein, 10 aa, Homo sapiens
  CDR3 for alpha chain variable domain of TCR clone 213970 (TRAV1-2, TRAJ31)
CAFFDARLMF

SEQ ID NO: 427940 - protein, 17 aa, Homo sapiens
  CDR3 for beta chain variable domain of TCR clone 213970 (TRBV15, TRBJ1-4)
CATGRYGTGDPNEKLFF

SEQ ID NO: 427941 - protein, 14 aa, Homo sapiens
  CDR3 for alpha chain variable domain of TCR clone 213971 (TRAV13-1, TRAJ44)
CAAKATGTASKLTF

SEQ ID NO: 427942 - protein, 17 aa, Homo sapiens
  CDR3 for beta chain variable domain of TCR clone 213971 (TRBV15, TRBJ1-5)
CATSRVKGIYSNQPQHF

SEQ ID NO: 427943 - protein, 23 aa, Homo sapiens
  CDR3 for alpha chain variable domain of TCR clone 213972 (TRAV12-2, TRAJ22)
CAVSFRVHPGPPIVSGSARQLAV

SEQ ID NO: 427944 - protein, 13 aa, Homo sapiens
  CDR3 for beta chain variable domain of TCR clone 213972 (TRBV12-4, TRBJ1-2)
CASSLDSNYGYTF

SEQ ID NO: 427945 - protein, 15 aa, Homo sapiens
  CDR3 for alpha chain variable domain of TCR clone 213973 (TRAV12-1, TRAJ27)
CVVNIEEPMQANQTL

SEQ ID NO: 427946 - protein, 15 aa, Homo sapiens
  CDR3 for beta chain variable domain of TCR clone 213973 (TRBV19, TRBJ1-1)
CASTSGQIQNTEAFF

SEQ ID NO: 427947 - protein, 14 aa, Homo sapiens
  CDR3 for alpha chain variable domain of TCR clone 213974 (TRAV8-2, TRAJ11)
CVVSEKSGYSTLTF

SEQ ID NO: 427948 - protein, 12 aa, Homo sapiens
  CDR3 for beta chain variable domain of TCR clone 213974 (TRBV29-1, TRBJ2-3)
CSVTGGADTQYF

SEQ ID NO: 427949 - protein, 12 aa, Homo sapiens
  CDR3 for alpha chain variable domain of TCR clone 213975 (TRAV23/DV6, TRAJ30)
CAASKGDDKIIF

SEQ ID NO: 427950 - protein, 16 aa, Homo sapiens
  CDR3 for beta chain variable domain of TCR clone 213975 (TRBV19, TRBJ2-3)
CASGTGPNDGTDTQYF

SEQ ID NO: 427951 - protein, 15 aa, Homo sapiens
  CDR3 for alpha chain variable domain of TCR clone 213976 (TRAV17, TRAJ57)
CATGPSQGGSEQLVF

SEQ ID NO: 427952 - protein, 16 aa, Homo sapiens
  CDR3 for beta chain variable domain of TCR clone 213976 (TRBV20-1, TRBJ2-2)
CSASASGIPGAGELFF

SEQ ID NO: 427953 - protein, 12 aa, Homo sapiens
  CDR3 for alpha chain variable domain of TCR clone 213977 (TRAV12-3, TRAJ17)
CAMKLTGNKLTS

SEQ ID NO: 427954 - protein, 15 aa, Homo sapiens
  CDR3 for beta chain variable domain of TCR clone 213977 (TRBV20-1, TRBJ2-7)
CSARDRVSGMDEQYF

SEQ ID NO: 427955 - protein, 15 aa, Homo sapiens
  CDR3 for alpha chain variable domain of TCR clone 213978 (TRAV1-2, TRAJ35)
CAVRDREGCGNVLHC

SEQ ID NO: 427956 - protein, 14 aa, Homo sapiens
  CDR3 for beta chain variable domain of TCR clone 213978 (TRBV25-1, TRBJ1-1)
CASTHLGGNTEAFF

SEQ ID NO: 427957 - protein, 11 aa, Homo sapiens
  CDR3 for alpha chain variable domain of TCR clone 213979 (TRAV2, TRAJ33)
CAVDSNYQLIW

SEQ ID NO: 427958 - protein, 15 aa, Homo sapiens
  CDR3 for beta chain variable domain of TCR clone 213979 (TRBV19, TRBJ1-2)
CASSVGQVLNYGYAV

SEQ ID NO: 427959 - protein, 13 aa, Homo sapiens
  CDR3 for alpha chain variable domain of TCR clone 213980 (TRAV13-1, TRAJ21)
CAARIYNFNKFYF

SEQ ID NO: 427960 - protein, 13 aa, Homo sapiens
  CDR3 for beta chain variable domain of TCR clone 213980 (TRBV27, TRBJ1-4)
CASSLRGDEKLFF

SEQ ID NO: 427961 - protein, 14 aa, Homo sapiens
  CDR3 for alpha chain variable domain of TCR clone 213981 (TRAV17, TRAJ57)
CATDPQGGSEKLVF

SEQ ID NO: 427962 - protein, 12 aa, Homo sapiens
  CDR3 for beta chain variable domain of TCR clone 213981 (TRBV6-5, TRBJ2-7)
CASSDRQNEQYF

SEQ ID NO: 427963 - protein, 18 aa, Homo sapiens
  CDR3 for alpha chain variable domain of TCR clone 213982 (TRAV26-1, TRAJ56)
CIVRVASRVTGAHSKLTF

SEQ ID NO: 427964 - protein, 15 aa, Homo sapiens
  CDR3 for beta chain variable domain of TCR clone 213982 (TRBV7-9, TRBJ2-5)
CASSDTGRGRETQYF

SEQ ID NO: 427965 - protein, 10 aa, Homo sapiens
  CDR3 for alpha chain variable domain of TCR clone 213983 (TRAV2, TRAJ15)
RGQAGTALIF

SEQ ID NO: 427966 - protein, 12 aa, Homo sapiens
  CDR3 for beta chain variable domain of TCR clone 213983 (TRBV11-2, TRBJ2-2)
CASSLGGGELFS

SEQ ID NO: 427967 - protein, 16 aa, Homo sapiens
  CDR3 for alpha chain variable domain of TCR clone 213984 (TRAV12-3, TRAJ53)
CAMSPGSGGSNYKLTF

SEQ ID NO: 427968 - protein, 20 aa, Homo sapiens
  CDR3 for beta chain variable domain of TCR clone 213984 (TRBV7-8, TRBJ2-2)
CASSHLFPGPTIHITGELFL

SEQ ID NO: 427969 - protein, 18 aa, Homo sapiens
  CDR3 for alpha chain variable domain of TCR clone 213985 (TRAV12-3, TRAJ52)
CAMSVGGAGGTSYGKLTF

SEQ ID NO: 427970 - protein, 17 aa, Homo sapiens
  CDR3 for beta chain variable domain of TCR clone 213985 (TRBV13, TRBJ2-3)
WASSLSRVAGGRNTQYF

SEQ ID NO: 427971 - protein, 12 aa, Homo sapiens
  CDR3 for alpha chain variable domain of TCR clone 213986 (TRAV21, TRAJ29)
RAVTSGNTPLVF

SEQ ID NO: 427972 - protein, 15 aa, Homo sapiens
  CDR3 for beta chain variable domain of TCR clone 213986 (TRBV12-4, TRBJ1-2)
CASRLGVAGNYGYTF

SEQ ID NO: 427973 - protein, 14 aa, Homo sapiens
  CDR3 for alpha chain variable domain of TCR clone 213987 (TRAV1-2, TRAJ16)
CAVNRFSDGQKLLF

SEQ ID NO: 427974 - protein, 15 aa, Homo sapiens
  CDR3 for beta chain variable domain of TCR clone 213987 (TRBV9, TRBJ1-4)
CASSDTGGTNEELFF

SEQ ID NO: 427975 - protein, 17 aa, Homo sapiens
  CDR3 for alpha chain variable domain of TCR clone 213988 (TRAV12-2, TRAJ52)
CAVNPYAGGTSYGKLTF

SEQ ID NO: 427976 - protein, 17 aa, Homo sapiens
  CDR3 for beta chain variable domain of TCR clone 213988 (TRBV7-8, TRBJ1-2)
CASSLRPLQGHLYGYTF

SEQ ID NO: 427977 - protein, 14 aa, Homo sapiens
  CDR3 for alpha chain variable domain of TCR clone 213989 (TRAV17, TRAJ54)
CATDANQVAQKLVF

SEQ ID NO: 427978 - protein, 14 aa, Homo sapiens
  CDR3 for beta chain variable domain of TCR clone 213989 (TRBV25-1, TRBJ1-1)
CASTHLGGNTEAFF

SEQ ID NO: 427979 - protein, 15 aa, Homo sapiens
  CDR3 for alpha chain variable domain of TCR clone 213990 (TRAV1-1, TRAJ23)
CAVREGDNQGGKLIF

SEQ ID NO: 427980 - protein, 16 aa, Homo sapiens
  CDR3 for beta chain variable domain of TCR clone 213990 (TRBV5-5, TRBJ2-2)
CASSGRREGATGELFF

SEQ ID NO: 427981 - protein, 14 aa, Homo sapiens
  CDR3 for alpha chain variable domain of TCR clone 213991 (TRAV13-1, TRAJ35)
CAASKGGFGNVLHC

SEQ ID NO: 427982 - protein, 16 aa, Homo sapiens
  CDR3 for beta chain variable domain of TCR clone 213991 (TRBV12-4, TRBJ2-7)
CASRSTGTGPSYEQYF

SEQ ID NO: 427983 - protein, 13 aa, Homo sapiens
  CDR3 for alpha chain variable domain of TCR clone 213992 (TRAV8-1, TRAJ30)
CAVIMNRNDKIIF

SEQ ID NO: 427984 - protein, 14 aa, Homo sapiens
  CDR3 for beta chain variable domain of TCR clone 213992 (TRBV7-2, TRBJ1-6)
CASSLQGANSPLHF

SEQ ID NO: 427985 - protein, 14 aa, Homo sapiens
  CDR3 for alpha chain variable domain of TCR clone 213993 (TRAV13-1, TRAJ35)
CAASKGGFGNVLNC

SEQ ID NO: 427986 - protein, 13 aa, Homo sapiens
  CDR3 for beta chain variable domain of TCR clone 213993 (TRBV5-1, TRBJ1-1)
CASSKLGNTEAFF

SEQ ID NO: 427987 - protein, 14 aa, Homo sapiens
  CDR3 for alpha chain variable domain of TCR clone 213994 (TRAV12-3, TRAJ10)
SHLPLTGGGNKLTF

SEQ ID NO: 427988 - protein, 17 aa, Homo sapiens
  CDR3 for beta chain variable domain of TCR clone 213994 (TRBV19, TRBJ2-2)
CASSITSGRMGTGELFF

SEQ ID NO: 427989 - protein, 14 aa, Homo sapiens
  CDR3 for alpha chain variable domain of TCR clone 213995 (TRAV3, TRAJ6)
CAVRRTGGSYIPTF

SEQ ID NO: 427990 - protein, 14 aa, Homo sapiens
  CDR3 for beta chain variable domain of TCR clone 213995 (TRBV7-2, TRBJ1-1)
CASSFLTGTTEAFF

SEQ ID NO: 427991 - protein, 11 aa, Homo sapiens
  CDR3 for alpha chain variable domain of TCR clone 213996 (TRAV3, TRAJ32)
CAVTEGIMVVL

SEQ ID NO: 427992 - protein, 13 aa, Homo sapiens
  CDR3 for beta chain variable domain of TCR clone 213996 (TRBV2, TRBJ1-1)
CASSEGGNTEAFF

SEQ ID NO: 427993 - protein, 12 aa, Homo sapiens
  CDR3 for alpha chain variable domain of TCR clone 213997 (TRAV12-2, TRAJ4)
GWPEGGYNMLIF

SEQ ID NO: 427994 - protein, 14 aa, Homo sapiens
  CDR3 for beta chain variable domain of TCR clone 213997 (TRBV18, TRBJ1-2)
CASSPDRVVYGYTF

SEQ ID NO: 427995 - protein, 14 aa, Homo sapiens
  CDR3 for alpha chain variable domain of TCR clone 213998 (TRAV1-2, TRAJ8)
CAVREDTGFQKLVF

SEQ ID NO: 427996 - protein, 17 aa, Homo sapiens
  CDR3 for beta chain variable domain of TCR clone 213998 (TRBV28, TRBJ2-5)
CASSRQGGLAGDETQYF

SEQ ID NO: 427997 - protein, 13 aa, Homo sapiens
  CDR3 for alpha chain variable domain of TCR clone 213999 (TRAV12-1, TRAJ6)
CVVFPGGSYIPTF

SEQ ID NO: 427998 - protein, 15 aa, Homo sapiens
  CDR3 for beta chain variable domain of TCR clone 213999 (TRBV7-6, TRBJ1-2)
CASSSGGRGGYGYTF

SEQ ID NO: 427999 - protein, 15 aa, Homo sapiens
  CDR3 for alpha chain variable domain of TCR clone 214000 (TRAV3, TRAJ20)
CAVRDIKLSDYKLSF

SEQ ID NO: 428000 - protein, 15 aa, Homo sapiens
  CDR3 for beta chain variable domain of TCR clone 214000 (TRBV4-1, TRBJ2-5)
CASSQWDLYQETQYF

SEQ ID NO: 428001 - protein, 15 aa, Homo sapiens
  CDR3 for alpha chain variable domain of TCR clone 214001 (TRAV12-3, TRAJ6)
CAMSATSGGSYIPPF

SEQ ID NO: 428002 - protein, 15 aa, Homo sapiens
  CDR3 for beta chain variable domain of TCR clone 214001 (TRBV5-1, TRBJ2-6)
CASSLDPSGANVLTF

SEQ ID NO: 428003 - protein, 14 aa, Homo sapiens
  CDR3 for alpha chain variable domain of TCR clone 214002 (TRAV13-1, TRAJ15)
CAPGGNQAGTALIF

SEQ ID NO: 428004 - protein, 13 aa, Homo sapiens
  CDR3 for beta chain variable domain of TCR clone 214002 (TRBV11-2, TRBJ2-5)
CASSRGPSETQYF

SEQ ID NO: 428005 - protein, 18 aa, Homo sapiens
  CDR3 for alpha chain variable domain of TCR clone 214003 (TRAV12-3, TRAJ52)
CAMSVGGAGGTSYGKLTF

SEQ ID NO: 428006 - protein, 16 aa, Homo sapiens
  CDR3 for beta chain variable domain of TCR clone 214003 (TRBV5-7, TRBJ2-3)
CASSPWTSGGTDTQYF

SEQ ID NO: 428007 - protein, 14 aa, Homo sapiens
  CDR3 for alpha chain variable domain of TCR clone 214004 (TRAV26-1, TRAJ38)
CIADNAGSNRKLIW

SEQ ID NO: 428008 - protein, 14 aa, Homo sapiens
  CDR3 for beta chain variable domain of TCR clone 214004 (TRBV4-1, TRBJ2-2)
CASSQAVNTGELFF

SEQ ID NO: 428009 - protein, 12 aa, Homo sapiens
  CDR3 for alpha chain variable domain of TCR clone 214005 (TRAV17, TRAJ57)
CSTDGGSEKLVF

SEQ ID NO: 428010 - protein, 15 aa, Homo sapiens
  CDR3 for beta chain variable domain of TCR clone 214005 (TRBV6-3, TRBJ2-2)
CASSFLATLTGELFF

SEQ ID NO: 428011 - protein, 13 aa, Homo sapiens
  CDR3 for alpha chain variable domain of TCR clone 214006 (TRAV23/DV6, TRAJ34)
CAAIENNNDKLIF

SEQ ID NO: 428012 - protein, 13 aa, Homo sapiens
  CDR3 for beta chain variable domain of TCR clone 214006 (TRBV29-1, TRBJ2-7)
CSVGPSGGYEQYF

SEQ ID NO: 428013 - protein, 13 aa, Homo sapiens
  CDR3 for alpha chain variable domain of TCR clone 214007 (TRAV3, TRAJ27)
CAVRPLAAGKSTF

SEQ ID NO: 428014 - protein, 14 aa, Homo sapiens
  CDR3 for beta chain variable domain of TCR clone 214007 (TRBV11-2, TRBJ1-2)
CASSLGTANYGYTF

SEQ ID NO: 428015 - protein, 12 aa, Homo sapiens
  CDR3 for alpha chain variable domain of TCR clone 214008 (TRAV2, TRAJ33)
CAVPDSNYQLIW

SEQ ID NO: 428016 - protein, 16 aa, Homo sapiens
  CDR3 for beta chain variable domain of TCR clone 214008 (TRBV7-2, TRBJ2-1)
CASSLLAQLVSKGQFF

SEQ ID NO: 428017 - protein, 10 aa, Homo sapiens
  CDR3 for alpha chain variable domain of TCR clone 214009 (TRAV12-1, TRAJ37)
ARGNTGELIF

SEQ ID NO: 428018 - protein, 15 aa, Homo sapiens
  CDR3 for beta chain variable domain of TCR clone 214009 (TRBV7-2, TRBJ2-3)
CASSLEQGGSDTQYF

SEQ ID NO: 428019 - protein, 15 aa, Homo sapiens
  CDR3 for alpha chain variable domain of TCR clone 214010 (TRAV12-3, TRAJ6)
CAMSAASGGSYIPTF

SEQ ID NO: 428020 - protein, 16 aa, Homo sapiens
  CDR3 for beta chain variable domain of TCR clone 214010 (TRBV2, TRBJ2-1)
CASSVGGSLSYNEQFF

SEQ ID NO: 428021 - protein, 15 aa, Homo sapiens
  CDR3 for alpha chain variable domain of TCR clone 214011 (TRAV12-1, TRAJ45)
CVVLSGGGGADGLTF

SEQ ID NO: 428022 - protein, 14 aa, Homo sapiens
  CDR3 for beta chain variable domain of TCR clone 214011 (TRBV19, TRBJ2-1)
CASPTFVLSGEQFF

SEQ ID NO: 428023 - protein, 18 aa, Homo sapiens
  CDR3 for alpha chain variable domain of TCR clone 214012 (TRAV26-2, TRAJ54)
CILRDVEVGVQGAQKLVF

SEQ ID NO: 428024 - protein, 16 aa, Homo sapiens
  CDR3 for beta chain variable domain of TCR clone 214012 (TRBV6-1, TRBJ2-5)
CASSETLDRGAETQYF

SEQ ID NO: 428025 - protein, 14 aa, Homo sapiens
  CDR3 for alpha chain variable domain of TCR clone 214013 (TRAV27, TRAJ22)
CAGLPSGSARQLTF

SEQ ID NO: 428026 - protein, 17 aa, Homo sapiens
  CDR3 for beta chain variable domain of TCR clone 214013 (TRBV28, TRBJ2-7)
CASSPLPAGGKSYEQYF

SEQ ID NO: 428027 - protein, 12 aa, Homo sapiens
  CDR3 for alpha chain variable domain of TCR clone 214014 (TRAV13-1, TRAJ17)
GAARTAGNKLTF

SEQ ID NO: 428028 - protein, 15 aa, Homo sapiens
  CDR3 for beta chain variable domain of TCR clone 214014 (TRBV7-6, TRBJ1-1)
CASSPQGGANTEAFF

SEQ ID NO: 428029 - protein, 13 aa, Homo sapiens
  CDR3 for alpha chain variable domain of TCR clone 214015 (TRAV12-3, TRAJ9)
CAMSADGGFKTIF

SEQ ID NO: 428030 - protein, 16 aa, Homo sapiens
  CDR3 for beta chain variable domain of TCR clone 214015 (TRBV4-1, TRBJ1-2)
CASSQDAGQVLYGYTF

SEQ ID NO: 428031 - protein, 19 aa, Homo sapiens
  CDR3 for alpha chain variable domain of TCR clone 214016 (TRAV1-1, TRAJ27)
CAGSEMTRSSLEKGHDFIF

SEQ ID NO: 428032 - protein, 14 aa, Homo sapiens
  CDR3 for beta chain variable domain of TCR clone 214016 (TRBV11-3, TRBJ1-6)
CASSFAGGDSPLHF

SEQ ID NO: 428033 - protein, 17 aa, Homo sapiens
  CDR3 for alpha chain variable domain of TCR clone 214017 (TRAV26-2, TRAJ42)
CILRDVGYGGGQGNLIF

SEQ ID NO: 428034 - protein, 16 aa, Homo sapiens
  CDR3 for beta chain variable domain of TCR clone 214017 (TRBV12-4, TRBJ2-7)
CASSWIGGTGTYEQYF

SEQ ID NO: 428035 - protein, 15 aa, Homo sapiens
  CDR3 for alpha chain variable domain of TCR clone 214018 (TRAV25, TRAJ52)
CAGRPGGTSYGKLTF

SEQ ID NO: 428036 - protein, 14 aa, Homo sapiens
  CDR3 for beta chain variable domain of TCR clone 214018 (TRBV10-3, TRBJ2-7)
CAISAPRGAYEQYF

SEQ ID NO: 428037 - protein, 11 aa, Homo sapiens
  CDR3 for alpha chain variable domain of TCR clone 214019 (TRAV2, TRAJ31)
CAAGPPARLMF

SEQ ID NO: 428038 - protein, 16 aa, Homo sapiens
  CDR3 for beta chain variable domain of TCR clone 214019 (TRBV5-7, TRBJ2-7)
CASSSPGGRTPYEQYF

SEQ ID NO: 428039 - protein, 12 aa, Homo sapiens
  CDR3 for alpha chain variable domain of TCR clone 214020 (TRAV12-3, TRAJ42)
CAPGGSQGNLIF

SEQ ID NO: 428040 - protein, 15 aa, Homo sapiens
  CDR3 for beta chain variable domain of TCR clone 214020 (TRBV20-1, TRBJ2-1)
CSASSAGSSYNEQFF

SEQ ID NO: 428041 - protein, 15 aa, Homo sapiens
  CDR3 for alpha chain variable domain of TCR clone 214021 (TRAV20, TRAJ12)
CAVRILMDSSYKLIF

SEQ ID NO: 428042 - protein, 12 aa, Homo sapiens
  CDR3 for beta chain variable domain of TCR clone 214021 (TRBV12-5, TRBJ2-1)
CASGLPPGEQFF

SEQ ID NO: 428043 - protein, 10 aa, Homo sapiens
  CDR3 for alpha chain variable domain of TCR clone 214022 (TRAV26-1, TRAJ22)
CIVSLNFFWF

SEQ ID NO: 428044 - protein, 15 aa, Homo sapiens
  CDR3 for beta chain variable domain of TCR clone 214022 (TRBV15, TRBJ1-3)
CATSRDRGPGNTIYF

SEQ ID NO: 428045 - protein, 17 aa, Homo sapiens
  CDR3 for alpha chain variable domain of TCR clone 214023 (TRAV8-4, TRAJ11)
CAVSDRGENSGYSTLTC

SEQ ID NO: 428046 - protein, 14 aa, Homo sapiens
  CDR3 for beta chain variable domain of TCR clone 214023 (TRBV20-1, TRBJ2-1)
CSPNDEASYNEQFF

SEQ ID NO: 428047 - protein, 11 aa, Homo sapiens
  CDR3 for alpha chain variable domain of TCR clone 214024 (TRAV1-2, TRAJ20)
CAVANDYKLSF

SEQ ID NO: 428048 - protein, 18 aa, Homo sapiens
  CDR3 for beta chain variable domain of TCR clone 214024 (TRBV20-1, TRBJ2-6)
CSAETTPAHGSGADVLTF

SEQ ID NO: 428049 - protein, 14 aa, Homo sapiens
  CDR3 for alpha chain variable domain of TCR clone 214025 (TRAV38-1, TRAJ40)
CALRPTSGTYKYIF

SEQ ID NO: 428050 - protein, 16 aa, Homo sapiens
  CDR3 for beta chain variable domain of TCR clone 214025 (TRBV3-1, TRBJ2-7)
CASSRTSGGSSYEQYF

SEQ ID NO: 428051 - protein, 14 aa, Homo sapiens
  CDR3 for alpha chain variable domain of TCR clone 214026 (TRAV12-2, TRAJ13)
CAVKKTGGYQKVTF

SEQ ID NO: 428052 - protein, 16 aa, Homo sapiens
  CDR3 for beta chain variable domain of TCR clone 214026 (TRBV2, TRBJ2-1)
CASRSTAGGKYNEQFF

SEQ ID NO: 428053 - protein, 13 aa, Homo sapiens
  CDR3 for alpha chain variable domain of TCR clone 214027 (TRAV12-2, TRAJ39)
CAVNNNAGNMLTF

SEQ ID NO: 428054 - protein, 13 aa, Homo sapiens
  CDR3 for beta chain variable domain of TCR clone 214027 (TRBV2, TRBJ1-5)
SATAGPGNQPQHF

SEQ ID NO: 428055 - protein, 16 aa, Homo sapiens
  CDR3 for alpha chain variable domain of TCR clone 214028 (TRAV30, TRAJ24)
CGTEIVDADSWGKFQF

SEQ ID NO: 428056 - protein, 12 aa, Homo sapiens
  CDR3 for beta chain variable domain of TCR clone 214028 (TRBV11-2, TRBJ2-1)
CASGPGNNEQFF

SEQ ID NO: 428057 - protein, 11 aa, Homo sapiens
  CDR3 for alpha chain variable domain of TCR clone 214029 (TRAV8-4, TRAJ20)
CAVTNVLTTTS

SEQ ID NO: 428058 - protein, 14 aa, Homo sapiens
  CDR3 for beta chain variable domain of TCR clone 214029 (TRBV25-1, TRBJ1-1)
CASTHLGGNTEAFF

SEQ ID NO: 428059 - protein, 15 aa, Homo sapiens
  CDR3 for alpha chain variable domain of TCR clone 214030 (TRAV8-2, TRAJ16)
CVVSDGFSDGQKLLF

SEQ ID NO: 428060 - protein, 11 aa, Homo sapiens
  CDR3 for beta chain variable domain of TCR clone 214030 (TRBV18, TRBJ2-5)
CASSPRETQYF

SEQ ID NO: 428061 - protein, 12 aa, Homo sapiens
  CDR3 for alpha chain variable domain of TCR clone 214031 (TRAV13-1, TRAJ21)
CAAKEGFNKFYF

SEQ ID NO: 428062 - protein, 15 aa, Homo sapiens
  CDR3 for beta chain variable domain of TCR clone 214031 (TRBV2, TRBJ2-1)
CASSEIAGSDNEQFF

SEQ ID NO: 428063 - protein, 16 aa, Homo sapiens
  CDR3 for alpha chain variable domain of TCR clone 214032 (TRAV27, TRAJ53)
CAATEGSGGSNDKLTF

SEQ ID NO: 428064 - protein, 15 aa, Homo sapiens
  CDR3 for beta chain variable domain of TCR clone 214032 (TRBV20-1, TRBJ1-1)
CSASRGVTGNTEAFF

SEQ ID NO: 428065 - protein, 13 aa, Homo sapiens
  CDR3 for alpha chain variable domain of TCR clone 214033 (TRAV12-3, TRAJ7)
CAMTPYGNNRLAF

SEQ ID NO: 428066 - protein, 12 aa, Homo sapiens
  CDR3 for beta chain variable domain of TCR clone 214033 (TRBV11-2, TRBJ2-5)
CASSLGQETQYF

SEQ ID NO: 428067 - protein, 13 aa, Homo sapiens
  CDR3 for alpha chain variable domain of TCR clone 214034 (TRAV29/DV5, TRAJ31)
CAASRNNKARLMV

SEQ ID NO: 428068 - protein, 15 aa, Homo sapiens
  CDR3 for beta chain variable domain of TCR clone 214034 (TRBV2, TRBJ2-1)
CASSELAGSYNEQFF

SEQ ID NO: 428069 - protein, 12 aa, Homo sapiens
  CDR3 for alpha chain variable domain of TCR clone 214035 (TRAV23/DV6, TRAJ17)
CAAKAAGNKLTF

SEQ ID NO: 428070 - protein, 17 aa, Homo sapiens
  CDR3 for beta chain variable domain of TCR clone 214035 (TRBV5-5, TRBJ1-1)
CASSLRFRGVMNTEAFF

SEQ ID NO: 428071 - protein, 15 aa, Homo sapiens
  CDR3 for alpha chain variable domain of TCR clone 214036 (TRAV23/DV6, TRAJ45)
CAASSAGGGADGLTF

SEQ ID NO: 428072 - protein, 13 aa, Homo sapiens
  CDR3 for beta chain variable domain of TCR clone 214036 (TRBV3-1, TRBJ2-2)
CASRQTNTGELFF

SEQ ID NO: 428073 - protein, 14 aa, Homo sapiens
  CDR3 for alpha chain variable domain of TCR clone 214037 (TRAV12-1, TRAJ17)
CVVNYKAAGNTLTF

SEQ ID NO: 428074 - protein, 15 aa, Homo sapiens
  CDR3 for beta chain variable domain of TCR clone 214037 (TRBV7-2, TRBJ2-1)
CASTHGAGIYNEQFF

SEQ ID NO: 428075 - protein, 11 aa, Homo sapiens
  CDR3 for alpha chain variable domain of TCR clone 214038 (TRAV27, TRAJ39)
CAGERGQHAHL

SEQ ID NO: 428076 - protein, 14 aa, Homo sapiens
  CDR3 for beta chain variable domain of TCR clone 214038 (TRBV15, TRBJ2-7)
CATSPDRGLYEQYF

SEQ ID NO: 428077 - protein, 12 aa, Homo sapiens
  CDR3 for alpha chain variable domain of TCR clone 214039 (TRAV12-3, TRAJ40)
CAMSSGTYKYIF

SEQ ID NO: 428078 - protein, 14 aa, Homo sapiens
  CDR3 for beta chain variable domain of TCR clone 214039 (TRBV6-5, TRBJ1-2)
CASSYSGQGGGYTF

SEQ ID NO: 428079 - protein, 13 aa, Homo sapiens
  CDR3 for alpha chain variable domain of TCR clone 214040 (TRAV26-1, TRAJ36)
CIVGGTGANNLFF

SEQ ID NO: 428080 - protein, 13 aa, Homo sapiens
  CDR3 for beta chain variable domain of TCR clone 214040 (TRBV6-5, TRBJ2-6)
CASSTSGPLRLDF

SEQ ID NO: 428081 - protein, 14 aa, Homo sapiens
  CDR3 for alpha chain variable domain of TCR clone 214041 (TRAV12-3, TRAJ10)
SHLPLTGGGNKLTF

SEQ ID NO: 428082 - protein, 17 aa, Homo sapiens
  CDR3 for beta chain variable domain of TCR clone 214041 (TRBV5-5, TRBJ1-1)
CASSLRFRGLMNTEAFF

SEQ ID NO: 428083 - protein, 16 aa, Homo sapiens
  CDR3 for alpha chain variable domain of TCR clone 214042 (TRAV27, TRAJ13)
CAGAKSDSGGYQKVTF

SEQ ID NO: 428084 - protein, 15 aa, Homo sapiens
  CDR3 for beta chain variable domain of TCR clone 214042 (TRBV28, TRBJ2-5)
CASSPPWSYQETQYF

SEQ ID NO: 428085 - protein, 14 aa, Homo sapiens
  CDR3 for alpha chain variable domain of TCR clone 214043 (TRAV8-3, TRAJ39)
CAVGANNAGNMLTF

SEQ ID NO: 428086 - protein, 16 aa, Homo sapiens
  CDR3 for beta chain variable domain of TCR clone 214043 (TRBV6-1, TRBJ2-5)
CASSETLDRGAETQYS

SEQ ID NO: 428087 - protein, 14 aa, Homo sapiens
  CDR3 for alpha chain variable domain of TCR clone 214044 (TRAV1-2, TRAJ10)
CAVRVTGGGNKLTF

SEQ ID NO: 428088 - protein, 12 aa, Homo sapiens
  CDR3 for beta chain variable domain of TCR clone 214044 (TRBV5-4, TRBJ1-1)
CASSFGQAEAFF

SEQ ID NO: 428089 - protein, 16 aa, Homo sapiens
  CDR3 for alpha chain variable domain of TCR clone 214045 (TRAV3, TRAJ21)
CAVRDIERGNFNKFYF

SEQ ID NO: 428090 - protein, 14 aa, Homo sapiens
  CDR3 for beta chain variable domain of TCR clone 214045 (TRBV12-4, TRBJ2-5)
CASSLSGGRETQYF

SEQ ID NO: 428091 - protein, 10 aa, Homo sapiens
  CDR3 for alpha chain variable domain of TCR clone 214046 (TRAV21, TRAJ31)
CAVDNARLMF

SEQ ID NO: 428092 - protein, 14 aa, Homo sapiens
  CDR3 for beta chain variable domain of TCR clone 214046 (TRBV13, TRBJ2-5)
CASSLGPRGETQYF

SEQ ID NO: 428093 - protein, 15 aa, Homo sapiens
  CDR3 for alpha chain variable domain of TCR clone 214047 (TRAV8-3, TRAJ45)
CASSYSGGGADGLTF

SEQ ID NO: 428094 - protein, 17 aa, Homo sapiens
  CDR3 for beta chain variable domain of TCR clone 214047 (TRBV7-3, TRBJ2-3)
CASSPRGQGYGTDTQYF

SEQ ID NO: 428095 - protein, 11 aa, Homo sapiens
  CDR3 for alpha chain variable domain of TCR clone 214048 (TRAV12-3, TRAJ20)
CAMSYDYKLSF

SEQ ID NO: 428096 - protein, 14 aa, Homo sapiens
  CDR3 for beta chain variable domain of TCR clone 214048 (TRBV7-2, TRBJ2-7)
CASSFLGRVYEQYF

SEQ ID NO: 428097 - protein, 18 aa, Homo sapiens
  CDR3 for alpha chain variable domain of TCR clone 214049 (TRAV13-1, TRAJ52)
CAAKNPNAGGTSYGKLTF

SEQ ID NO: 428098 - protein, 15 aa, Homo sapiens
  CDR3 for beta chain variable domain of TCR clone 214049 (TRBV11-3, TRBJ2-3)
CASLKDGRVGDTQYF

SEQ ID NO: 428099 - protein, 16 aa, Homo sapiens
  CDR3 for alpha chain variable domain of TCR clone 214050 (TRAV12-3, TRAJ53)
CAMSPGSGGSNDKLTF

SEQ ID NO: 428100 - protein, 13 aa, Homo sapiens
  CDR3 for beta chain variable domain of TCR clone 214050 (TRBV7-8, TRBJ2-7)
CASSLTGGREQYF

SEQ ID NO: 428101 - protein, 12 aa, Homo sapiens
  CDR3 for alpha chain variable domain of TCR clone 214051 (TRAV12-2, TRAJ42)
CAVGGSQGNLIF

SEQ ID NO: 428102 - protein, 15 aa, Homo sapiens
  CDR3 for beta chain variable domain of TCR clone 214051 (TRBV6-3, TRBJ2-7)
CASSSPGTVFYEQYF

SEQ ID NO: 428103 - protein, 15 aa, Homo sapiens
  CDR3 for alpha chain variable domain of TCR clone 214052 (TRAV29/DV5, TRAJ29)
CAASERSSGNTPLVF

SEQ ID NO: 428104 - protein, 15 aa, Homo sapiens
  CDR3 for beta chain variable domain of TCR clone 214052 (TRBV6-6, TRBJ2-7)
CASSYSYGGSYEQYF

SEQ ID NO: 428105 - protein, 14 aa, Homo sapiens
  CDR3 for alpha chain variable domain of TCR clone 214053 (TRAV13-2, TRAJ17)
CAENSKAAGNKLTF

SEQ ID NO: 428106 - protein, 16 aa, Homo sapiens
  CDR3 for beta chain variable domain of TCR clone 214053 (TRBV12-4, TRBJ1-5)
CASRQPVEGSNQPQHF

SEQ ID NO: 428107 - protein, 16 aa, Homo sapiens
  CDR3 for alpha chain variable domain of TCR clone 214054 (TRAV30, TRAJ24)
CGPEIVDADSWGKFQF

SEQ ID NO: 428108 - protein, 12 aa, Homo sapiens
  CDR3 for beta chain variable domain of TCR clone 214054 (TRBV7-8, TRBJ2-7)
CASSLGDREQYF

SEQ ID NO: 428109 - protein, 10 aa, Homo sapiens
  CDR3 for alpha chain variable domain of TCR clone 214055 (TRAV38-1, TRAJ34)
CAFMDDKLIF

SEQ ID NO: 428110 - protein, 17 aa, Homo sapiens
  CDR3 for beta chain variable domain of TCR clone 214055 (TRBV11-3, TRBJ2-3)
YASSLGLTGGGTDTQYF

SEQ ID NO: 428111 - protein, 12 aa, Homo sapiens
  CDR3 for alpha chain variable domain of TCR clone 214056 (TRAV20, TRAJ23)
CAVHNQGGKLIF

SEQ ID NO: 428112 - protein, 12 aa, Homo sapiens
  CDR3 for beta chain variable domain of TCR clone 214056 (TRBV11-2, TRBJ2-1)
CASSPGNNEQFF

SEQ ID NO: 428113 - protein, 13 aa, Homo sapiens
  CDR3 for alpha chain variable domain of TCR clone 214057 (TRAV38-2/DV8, TRAJ53)
CASGGGSNYKLAF

SEQ ID NO: 428114 - protein, 16 aa, Homo sapiens
  CDR3 for beta chain variable domain of TCR clone 214057 (TRBV28, TRBJ1-5)
CASRFRGAVQNQPQHF

SEQ ID NO: 428115 - protein, 13 aa, Homo sapiens
  CDR3 for alpha chain variable domain of TCR clone 214058 (TRAV27, TRAJ41)
CAGEGNSGYALNF

SEQ ID NO: 428116 - protein, 14 aa, Homo sapiens
  CDR3 for beta chain variable domain of TCR clone 214058 (TRBV7-8, TRBJ2-7)
CASSVGQGAYEQYF

SEQ ID NO: 428117 - protein, 11 aa, Homo sapiens
  CDR3 for alpha chain variable domain of TCR clone 214059 (TRAV23/DV6, TRAJ56)
CAAPANSKLTF

SEQ ID NO: 428118 - protein, 14 aa, Homo sapiens
  CDR3 for beta chain variable domain of TCR clone 214059 (TRBV27, TRBJ2-1)
CASSFGRGANEQFF

SEQ ID NO: 428119 - protein, 16 aa, Homo sapiens
  CDR3 for alpha chain variable domain of TCR clone 214060 (TRAV21, TRAJ52)
CAVTNAGGTSYGKLTF

SEQ ID NO: 428120 - protein, 15 aa, Homo sapiens
  CDR3 for beta chain variable domain of TCR clone 214060 (TRBV10-3, TRBJ2-3)
CAISLTSGGTDTQYF

SEQ ID NO: 428121 - protein, 17 aa, Homo sapiens
  CDR3 for alpha chain variable domain of TCR clone 214061 (TRAV3, TRAJ12)
CAVRDGGRMDSSYKLIF

SEQ ID NO: 428122 - protein, 17 aa, Homo sapiens
  CDR3 for beta chain variable domain of TCR clone 214061 (TRBV20-1, TRBJ1-5)
CSASLSPGQGGNQPQHF

SEQ ID NO: 428123 - protein, 22 aa, Homo sapiens
  CDR3 for alpha chain variable domain of TCR clone 214062 (TRAV3, )
CAVRDHTGNNHIQNPDPAVYQL

SEQ ID NO: 428124 - protein, 14 aa, Homo sapiens
  CDR3 for beta chain variable domain of TCR clone 214062 (TRBV7-2, TRBJ2-7)
CASSPKTSFYEQYF

SEQ ID NO: 428125 - protein, 13 aa, Homo sapiens
  CDR3 for alpha chain variable domain of TCR clone 214063 (TRAV3, TRAJ21)
CAVANSTKFNLGL

SEQ ID NO: 428126 - protein, 16 aa, Homo sapiens
  CDR3 for beta chain variable domain of TCR clone 214063 (TRBV19, TRBJ2-1)
CASSKAGPSSYNEQFF

SEQ ID NO: 428127 - protein, 15 aa, Homo sapiens
  CDR3 for alpha chain variable domain of TCR clone 214064 (TRAV3, TRAJ22)
CAVRDRGGSARQLTF

SEQ ID NO: 428128 - protein, 17 aa, Homo sapiens
  CDR3 for beta chain variable domain of TCR clone 214064 (TRBV28, TRBJ2-5)
CASSRQGGLAGAETQYF

SEQ ID NO: 428129 - protein, 14 aa, Homo sapiens
  CDR3 for alpha chain variable domain of TCR clone 214065 (TRAV3, TRAJ36)
CAVGDGTGANNLFF

SEQ ID NO: 428130 - protein, 16 aa, Homo sapiens
  CDR3 for beta chain variable domain of TCR clone 214065 (TRBV20-1, TRBJ2-6)
CSAREGPGVGANVLTF

SEQ ID NO: 428131 - protein, 14 aa, Homo sapiens
  CDR3 for alpha chain variable domain of TCR clone 214066 (TRAV35, TRAJ41)
CAGQSSVWRNALNF

SEQ ID NO: 428132 - protein, 14 aa, Homo sapiens
  CDR3 for beta chain variable domain of TCR clone 214066 (TRBV20-1, TRBJ1-2)
CSASEQGAVYGYTF

SEQ ID NO: 428133 - protein, 12 aa, Homo sapiens
  CDR3 for alpha chain variable domain of TCR clone 214067 (TRAV21, TRAJ40)
CATEPGTYKYIF

SEQ ID NO: 428134 - protein, 11 aa, Homo sapiens
  CDR3 for beta chain variable domain of TCR clone 214067 (TRBV11-2, TRBJ1-1)
CASRGPGNPFF

SEQ ID NO: 428135 - protein, 16 aa, Homo sapiens
  CDR3 for alpha chain variable domain of TCR clone 214068 (TRAV12-3, TRAJ53)
FAMSPGRGGSNYKLTF

SEQ ID NO: 428136 - protein, 11 aa, Homo sapiens
  CDR3 for beta chain variable domain of TCR clone 214068 (TRBV29-1, TRBJ2-5)
CSEDRTGTQYF

SEQ ID NO: 428137 - protein, 12 aa, Homo sapiens
  CDR3 for alpha chain variable domain of TCR clone 214069 (TRAV20, TRAJ23)
CAVHNQGGKLIF

SEQ ID NO: 428138 - protein, 16 aa, Homo sapiens
  CDR3 for beta chain variable domain of TCR clone 214069 (TRBV20-1, TRBJ1-4)
CSAPGQGLLTNEKLFF

SEQ ID NO: 428139 - protein, 17 aa, Homo sapiens
  CDR3 for alpha chain variable domain of TCR clone 214070 (TRAV1-1, TRAJ32)
CAVRVDELWWCYKQAHL

SEQ ID NO: 428140 - protein, 16 aa, Homo sapiens
  CDR3 for beta chain variable domain of TCR clone 214070 (TRBV12-5, TRBJ2-5)
CASGPRTSGNQETQYF

SEQ ID NO: 428141 - protein, 18 aa, Homo sapiens
  CDR3 for alpha chain variable domain of TCR clone 214071 (TRAV26-1, TRAJ23)
CIVRVGLEVWNQGGKLIF

SEQ ID NO: 428142 - protein, 20 aa, Homo sapiens
  CDR3 for beta chain variable domain of TCR clone 214071 (TRBV7-8, TRBJ2-2)
CASSHLFPGPTIHITGELFF

SEQ ID NO: 428143 - protein, 14 aa, Homo sapiens
  CDR3 for alpha chain variable domain of TCR clone 214072 (TRAV26-1, TRAJ49)
CIVRPSNTGNQFYF

SEQ ID NO: 428144 - protein, 15 aa, Homo sapiens
  CDR3 for beta chain variable domain of TCR clone 214072 (TRBV11-3, TRBJ2-3)
CASLKDGREGDTQYF

SEQ ID NO: 428145 - protein, 15 aa, Homo sapiens
  CDR3 for alpha chain variable domain of TCR clone 214073 (TRAV3, TRAJ22)
CAVRYRGGSARQLTS

SEQ ID NO: 428146 - protein, 16 aa, Homo sapiens
  CDR3 for beta chain variable domain of TCR clone 214073 (TRBV5-4, TRBJ2-3)
CASQQPGAGGADTQYF

SEQ ID NO: 428147 - protein, 14 aa, Homo sapiens
  CDR3 for alpha chain variable domain of TCR clone 214074 (TRAV12-2, TRAJ13)
CAVKKTGGYQKVTF

SEQ ID NO: 428148 - protein, 16 aa, Homo sapiens
  CDR3 for beta chain variable domain of TCR clone 214074 (TRBV18, TRBJ2-4)
CASSPPYSGAKNIQYF

SEQ ID NO: 428149 - protein, 14 aa, Homo sapiens
  CDR3 for alpha chain variable domain of TCR clone 214075 (TRAV23/DV6, TRAJ6)
CAASRSGGSYIPTF

SEQ ID NO: 428150 - protein, 15 aa, Homo sapiens
  CDR3 for beta chain variable domain of TCR clone 214075 (TRBV6-5, TRBJ2-1)
CASSYDAGAGNEQFF

SEQ ID NO: 428151 - protein, 13 aa, Homo sapiens
  CDR3 for alpha chain variable domain of TCR clone 214076 (TRAV2, TRAJ40)
CAVVTSGTYKYIF

SEQ ID NO: 428152 - protein, 16 aa, Homo sapiens
  CDR3 for beta chain variable domain of TCR clone 214076 (TRBV19, TRBJ2-2)
WASRSPGTGATGELFF

SEQ ID NO: 428153 - protein, 14 aa, Homo sapiens
  CDR3 for alpha chain variable domain of TCR clone 214077 (TRAV1-2, TRAJ16)
CAVNRFSDGQKLLF

SEQ ID NO: 428154 - protein, 16 aa, Homo sapiens
  CDR3 for beta chain variable domain of TCR clone 214077 (TRBV20-1, TRBJ1-2)
CSASMRQGVANYGYTF

SEQ ID NO: 428155 - protein, 14 aa, Homo sapiens
  CDR3 for alpha chain variable domain of TCR clone 214078 (TRAV12-1, TRAJ13)
CVVIDSGGYQKVTF

SEQ ID NO: 428156 - protein, 14 aa, Homo sapiens
  CDR3 for beta chain variable domain of TCR clone 214078 (TRBV6-1, TRBJ1-3)
CASVQGGGGNTIYF

SEQ ID NO: 428157 - protein, 14 aa, Homo sapiens
  CDR3 for alpha chain variable domain of TCR clone 214079 (TRAV38-1, TRAJ29)
CAFITPSGNTPLVF

SEQ ID NO: 428158 - protein, 12 aa, Homo sapiens
  CDR3 for beta chain variable domain of TCR clone 214079 (TRBV7-9, TRBJ1-2)
CASSPRGNGYTF

SEQ ID NO: 428159 - protein, 15 aa, Homo sapiens
  CDR3 for alpha chain variable domain of TCR clone 214080 (TRAV8-3, TRAJ23)
CAVGDRYNQGGKLIF

SEQ ID NO: 428160 - protein, 13 aa, Homo sapiens
  CDR3 for beta chain variable domain of TCR clone 214080 (TRBV18, TRBJ2-5)
CASSLQGQETQYF

SEQ ID NO: 428161 - protein, 15 aa, Homo sapiens
  CDR3 for alpha chain variable domain of TCR clone 214081 (TRAV13-1, TRAJ44)
CAASRNTGTASKLTF

SEQ ID NO: 428162 - protein, 14 aa, Homo sapiens
  CDR3 for beta chain variable domain of TCR clone 214081 (TRBV2, TRBJ2-7)
CASSLTSGGYEQYV

SEQ ID NO: 428163 - protein, 14 aa, Homo sapiens
  CDR3 for alpha chain variable domain of TCR clone 214082 (TRAV8-3, TRAJ4)
CAVGASGGYNTLIF

SEQ ID NO: 428164 - protein, 14 aa, Homo sapiens
  CDR3 for beta chain variable domain of TCR clone 214082 (TRBV19, TRBJ2-1)
RASPTFVLSGEQFF

SEQ ID NO: 428165 - protein, 13 aa, Homo sapiens
  CDR3 for alpha chain variable domain of TCR clone 214083 (TRAV29/DV5, TRAJ31)
CAASRNNNARLMF

SEQ ID NO: 428166 - protein, 12 aa, Homo sapiens
  CDR3 for beta chain variable domain of TCR clone 214083 (TRBV11-2, TRBJ2-2)
CASSRGGGELFF

SEQ ID NO: 428167 - protein, 12 aa, Homo sapiens
  CDR3 for alpha chain variable domain of TCR clone 214084 (TRAV12-1, TRAJ23)
CVVNWGGGKLIF

SEQ ID NO: 428168 - protein, 14 aa, Homo sapiens
  CDR3 for beta chain variable domain of TCR clone 214084 (TRBV27, TRBJ2-7)
CASRPQRGTYEQYF

SEQ ID NO: 428169 - protein, 14 aa, Homo sapiens
  CDR3 for alpha chain variable domain of TCR clone 214085 (TRAV17, TRAJ22)
CATSPSGSARQLTF

SEQ ID NO: 428170 - protein, 15 aa, Homo sapiens
  CDR3 for beta chain variable domain of TCR clone 214085 (TRBV7-6, TRBJ2-1)
CASSSLAGEGNEQFF

SEQ ID NO: 428171 - protein, 13 aa, Homo sapiens
  CDR3 for alpha chain variable domain of TCR clone 214086 (TRAV2, TRAJ29)
CAAQNSGNTPLVF

SEQ ID NO: 428172 - protein, 14 aa, Homo sapiens
  CDR3 for beta chain variable domain of TCR clone 214086 (TRBV7-9, TRBJ2-4)
CASGLAMGGNIQYF

SEQ ID NO: 428173 - protein, 14 aa, Homo sapiens
  CDR3 for alpha chain variable domain of TCR clone 214087 (TRAV12-3, TRAJ6)
CAMSATGGSYIPTF

SEQ ID NO: 428174 - protein, 15 aa, Homo sapiens
  CDR3 for beta chain variable domain of TCR clone 214087 (TRBV5-1, TRBJ2-7)
CASSLNPAGSYEQYF

SEQ ID NO: 428175 - protein, 17 aa, Homo sapiens
  CDR3 for alpha chain variable domain of TCR clone 214088 (TRAV23/DV6, TRAJ58)
CAARLLRGETSGSGLTF

SEQ ID NO: 428176 - protein, 15 aa, Homo sapiens
  CDR3 for beta chain variable domain of TCR clone 214088 (TRBV9, TRBJ1-6)
CASSVAGTGDSPLHF

SEQ ID NO: 428177 - protein, 14 aa, Homo sapiens
  CDR3 for alpha chain variable domain of TCR clone 214089 (TRAV20, TRAJ35)
CAVQAIGFGNVLHC

SEQ ID NO: 428178 - protein, 14 aa, Homo sapiens
  CDR3 for beta chain variable domain of TCR clone 214089 (TRBV7-6, TRBJ2-3)
CASSLGTVTDTQYF

SEQ ID NO: 428179 - protein, 15 aa, Homo sapiens
  CDR3 for alpha chain variable domain of TCR clone 214090 (TRAV12-3, TRAJ6)
CAMSHASGGSYIPTF

SEQ ID NO: 428180 - protein, 15 aa, Homo sapiens
  CDR3 for beta chain variable domain of TCR clone 214090 (TRBV2, TRBJ1-2)
CASSESRTVNYGYTF

SEQ ID NO: 428181 - protein, 16 aa, Homo sapiens
  CDR3 for alpha chain variable domain of TCR clone 214091 (TRAV12-3, TRAJ53)
CAMSPGRGGSNYKLTF

SEQ ID NO: 428182 - protein, 11 aa, Homo sapiens
  CDR3 for beta chain variable domain of TCR clone 214091 (TRBV29-1, TRBJ2-5)
CSEDRTRTQYF

SEQ ID NO: 428183 - protein, 15 aa, Homo sapiens
  CDR3 for alpha chain variable domain of TCR clone 214092 (TRAV12-2, TRAJ53)
CAVNGGGGGNYNLTF

SEQ ID NO: 428184 - protein, 17 aa, Homo sapiens
  CDR3 for beta chain variable domain of TCR clone 214092 (TRBV7-3, TRBJ2-3)
GASSLMKRMRGADTQYF

SEQ ID NO: 428185 - protein, 15 aa, Homo sapiens
  CDR3 for alpha chain variable domain of TCR clone 214093 (TRAV13-2, TRAJ10)
CAENRDTGGGNKLTF

SEQ ID NO: 428186 - protein, 14 aa, Homo sapiens
  CDR3 for beta chain variable domain of TCR clone 214093 (TRBV7-3, TRBJ2-1)
CASSLSGSYNEQFF

SEQ ID NO: 428187 - protein, 14 aa, Homo sapiens
  CDR3 for alpha chain variable domain of TCR clone 214094 (TRAV12-1, TRAJ30)
CVVNIGGRDDKIIF

SEQ ID NO: 428188 - protein, 15 aa, Homo sapiens
  CDR3 for beta chain variable domain of TCR clone 214094 (TRBV18, TRBJ1-2)
CASSPSNTHNYGYTF

SEQ ID NO: 428189 - protein, 18 aa, Homo sapiens
  CDR3 for alpha chain variable domain of TCR clone 214095 (TRAV29/DV5, TRAJ37)
CSVLLCSECSGNTGKLIF

SEQ ID NO: 428190 - protein, 14 aa, Homo sapiens
  CDR3 for beta chain variable domain of TCR clone 214095 (TRBV5-1, TRBJ1-1)
CASSLAVGSGEAFF

SEQ ID NO: 428191 - protein, 14 aa, Homo sapiens
  CDR3 for alpha chain variable domain of TCR clone 214096 (TRAV16, TRAJ49)
CALSGQSTGNQFYF

SEQ ID NO: 428192 - protein, 15 aa, Homo sapiens
  CDR3 for beta chain variable domain of TCR clone 214096 (TRBV11-1, TRBJ2-1)
CPSSLFRDTYNEQFF

SEQ ID NO: 428193 - protein, 17 aa, Homo sapiens
  CDR3 for alpha chain variable domain of TCR clone 214097 (TRAV3, TRAJ6)
CAVRDGPRAGGSYIPTL

SEQ ID NO: 428194 - protein, 13 aa, Homo sapiens
  CDR3 for beta chain variable domain of TCR clone 214097 (TRBV20-1, TRBJ1-6)
RSAPLGVGSPLHF

SEQ ID NO: 428195 - protein, 14 aa, Homo sapiens
  CDR3 for alpha chain variable domain of TCR clone 214098 (TRAV1-1, TRAJ23)
CAVSIYNQGGKLIF

SEQ ID NO: 428196 - protein, 15 aa, Homo sapiens
  CDR3 for beta chain variable domain of TCR clone 214098 (TRBV7-8, TRBJ2-5)
CASSDAAGSQETQYF

SEQ ID NO: 428197 - protein, 14 aa, Homo sapiens
  CDR3 for alpha chain variable domain of TCR clone 214099 (TRAV27, TRAJ13)
CRSSNSGGYQKVTF

SEQ ID NO: 428198 - protein, 13 aa, Homo sapiens
  CDR3 for beta chain variable domain of TCR clone 214099 (TRBV7-6, TRBJ2-1)
CASSLGGADEQFF

SEQ ID NO: 428199 - protein, 12 aa, Homo sapiens
  CDR3 for alpha chain variable domain of TCR clone 214100 (TRAV27, TRAJ13)
CAGVRGYQKVTF

SEQ ID NO: 428200 - protein, 16 aa, Homo sapiens
  CDR3 for beta chain variable domain of TCR clone 214100 (TRBV28, TRBJ2-1)
CASSSSYSGSLNEQFL

SEQ ID NO: 428201 - protein, 13 aa, Homo sapiens
  CDR3 for alpha chain variable domain of TCR clone 214101 (TRAV26-2, TRAJ57)
CILSRGGSEKLVF

SEQ ID NO: 428202 - protein, 16 aa, Homo sapiens
  CDR3 for beta chain variable domain of TCR clone 214101 (TRBV18, TRBJ1-5)
CASSPRTGGGNQAQHF

SEQ ID NO: 428203 - protein, 16 aa, Homo sapiens
  CDR3 for alpha chain variable domain of TCR clone 214102 (TRAV8-6, TRAJ53)
CAVTSNSGGSNYKLTF

SEQ ID NO: 428204 - protein, 14 aa, Homo sapiens
  CDR3 for beta chain variable domain of TCR clone 214102 (TRBV19, TRBJ2-7)
CASTVQGRPYEQYF

SEQ ID NO: 428205 - protein, 15 aa, Homo sapiens
  CDR3 for alpha chain variable domain of TCR clone 214103 (TRAV12-2, TRAJ20)
CAVKGGFGAGTTVTV

SEQ ID NO: 428206 - protein, 13 aa, Homo sapiens
  CDR3 for beta chain variable domain of TCR clone 214103 (TRBV12-4, TRBJ2-7)
CASSPGQLNEQYF

SEQ ID NO: 428207 - protein, 17 aa, Homo sapiens
  CDR3 for alpha chain variable domain of TCR clone 214104 (TRAV26-1, TRAJ21)
CVANGKFYFGSGTKLNV

SEQ ID NO: 428208 - protein, 15 aa, Homo sapiens
  CDR3 for beta chain variable domain of TCR clone 214104 (TRBV7-2, TRBJ2-1)
CASSSGLAGGNEQFF

SEQ ID NO: 428209 - protein, 18 aa, Homo sapiens
  CDR3 for alpha chain variable domain of TCR clone 214105 (TRAV12-3, TRAJ52)
CALSVGGAGGTSYGKLTF

SEQ ID NO: 428210 - protein, 14 aa, Homo sapiens
  CDR3 for beta chain variable domain of TCR clone 214105 (TRBV7-2, TRBJ2-7)
CASRSQGAAYEQYF

SEQ ID NO: 428211 - protein, 14 aa, Homo sapiens
  CDR3 for alpha chain variable domain of TCR clone 214106 (TRAV9-2, TRAJ39)
CALYIYNAGNMLTF

SEQ ID NO: 428212 - protein, 14 aa, Homo sapiens
  CDR3 for beta chain variable domain of TCR clone 214106 (TRBV4-2, TRBJ2-5)
CASSQDRGRETQYF

SEQ ID NO: 428213 - protein, 15 aa, Homo sapiens
  CDR3 for alpha chain variable domain of TCR clone 214107 (TRAV17, TRAJ57)
CATGPSQGGSEKLVF

SEQ ID NO: 428214 - protein, 14 aa, Homo sapiens
  CDR3 for beta chain variable domain of TCR clone 214107 (TRBV12-5, TRBJ2-5)
CASGSRTLQETQYF

SEQ ID NO: 428215 - protein, 14 aa, Homo sapiens
  CDR3 for alpha chain variable domain of TCR clone 214108 (TRAV30, TRAJ26)
CGTEIVSYGQNFVF

SEQ ID NO: 428216 - protein, 13 aa, Homo sapiens
  CDR3 for beta chain variable domain of TCR clone 214108 (TRBV7-3, TRBJ1-1)
CASSRDWGAEAFF

SEQ ID NO: 428217 - protein, 14 aa, Homo sapiens
  CDR3 for alpha chain variable domain of TCR clone 214109 (TRAV21, TRAJ23)
CAIMVYNQGGKLIF

SEQ ID NO: 428218 - protein, 18 aa, Homo sapiens
  CDR3 for beta chain variable domain of TCR clone 214109 (TRBV20-1, TRBJ2-6)
CSAGTTPTHGSGANVLTF

SEQ ID NO: 428219 - protein, 14 aa, Homo sapiens
  CDR3 for alpha chain variable domain of TCR clone 214110 (TRAV38-1, TRAJ40)
CALRPTSGTYKYIF

SEQ ID NO: 428220 - protein, 11 aa, Homo sapiens
  CDR3 for beta chain variable domain of TCR clone 214110 (TRBV12-4, TRBJ2-3)
CASTATDTQYF

SEQ ID NO: 428221 - protein, 12 aa, Homo sapiens
  CDR3 for alpha chain variable domain of TCR clone 214111 (TRAV13-1, TRAJ15)
CAANQAGTALIF

SEQ ID NO: 428222 - protein, 14 aa, Homo sapiens
  CDR3 for beta chain variable domain of TCR clone 214111 (TRBV7-2, TRBJ2-3)
CASSQTGSSYTQYF

SEQ ID NO: 428223 - protein, 14 aa, Homo sapiens
  CDR3 for alpha chain variable domain of TCR clone 214112 (TRAV6, TRAJ8)
CALERGTGFQKLVF

SEQ ID NO: 428224 - protein, 13 aa, Homo sapiens
  CDR3 for beta chain variable domain of TCR clone 214112 (TRBV6-6, TRBJ2-1)
CASSLHQGDEQFF

SEQ ID NO: 428225 - protein, 15 aa, Homo sapiens
  CDR3 for alpha chain variable domain of TCR clone 214113 (TRAV13-2, TRAJ50)
CAEEPLKTSYDKVIF

SEQ ID NO: 428226 - protein, 14 aa, Homo sapiens
  CDR3 for beta chain variable domain of TCR clone 214113 (TRBV6-6, TRBJ1-6)
CASSFEGTTSPLHF

SEQ ID NO: 428227 - protein, 13 aa, Homo sapiens
  CDR3 for alpha chain variable domain of TCR clone 214114 (TRAV8-3, TRAJ6)
CAVEKGGSYIPTF

SEQ ID NO: 428228 - protein, 15 aa, Homo sapiens
  CDR3 for beta chain variable domain of TCR clone 214114 (TRBV28, TRBJ2-5)
CASSADMGRGETQYF

SEQ ID NO: 428229 - protein, 14 aa, Homo sapiens
  CDR3 for alpha chain variable domain of TCR clone 214115 (TRAV35, TRAJ33)
CAGSSQDSNYQLIW

SEQ ID NO: 428230 - protein, 15 aa, Homo sapiens
  CDR3 for beta chain variable domain of TCR clone 214115 (TRBV20-1, TRBJ2-7)
CSAGAGTSGAYEQYF

SEQ ID NO: 428231 - protein, 13 aa, Homo sapiens
  CDR3 for alpha chain variable domain of TCR clone 214116 (TRAV12-1, TRAJ33)
CGDAPDSNYQLIW

SEQ ID NO: 428232 - protein, 12 aa, Homo sapiens
  CDR3 for beta chain variable domain of TCR clone 214116 (TRBV11-2, TRBJ2-2)
CASSLGSGELFF

SEQ ID NO: 428233 - protein, 11 aa, Homo sapiens
  CDR3 for alpha chain variable domain of TCR clone 214117 (TRAV1-1, TRAJ5)
CAVRVRRALTF

SEQ ID NO: 428234 - protein, 14 aa, Homo sapiens
  CDR3 for beta chain variable domain of TCR clone 214117 (TRBV6-1, TRBJ1-3)
CASVQGGGGNTIYF

SEQ ID NO: 428235 - protein, 11 aa, Homo sapiens
  CDR3 for alpha chain variable domain of TCR clone 214118 (TRAV3, TRAJ49)
CAPIPGNQFYF

SEQ ID NO: 428236 - protein, 16 aa, Homo sapiens
  CDR3 for beta chain variable domain of TCR clone 214118 (TRBV5-1, TRBJ2-3)
CASSVFPVSSTDTQYF

SEQ ID NO: 428237 - protein, 13 aa, Homo sapiens
  CDR3 for alpha chain variable domain of TCR clone 214119 (TRAV35, TRAJ21)
CAGQLRNFNKFYF

SEQ ID NO: 428238 - protein, 11 aa, Homo sapiens
  CDR3 for beta chain variable domain of TCR clone 214119 (TRBV7-6, TRBJ2-5)
CASSSQETQYF

SEQ ID NO: 428239 - protein, 12 aa, Homo sapiens
  CDR3 for alpha chain variable domain of TCR clone 214120 (TRAV35, TRAJ54)
CADLQGAQKLVF

SEQ ID NO: 428240 - protein, 13 aa, Homo sapiens
  CDR3 for beta chain variable domain of TCR clone 214120 (TRBV7-3, TRBJ1-1)
CASSQDWGAEAFF

SEQ ID NO: 428241 - protein, 17 aa, Homo sapiens
  CDR3 for alpha chain variable domain of TCR clone 214121 (TRAV1-2, TRAJ23)
CAVRPSLTYNQGRKLIF

SEQ ID NO: 428242 - protein, 13 aa, Homo sapiens
  CDR3 for beta chain variable domain of TCR clone 214121 (TRBV7-9, TRBJ1-2)
CASSLKQNYGYTF

SEQ ID NO: 428243 - protein, 13 aa, Homo sapiens
  CDR3 for alpha chain variable domain of TCR clone 214122 (TRAV12-1, TRAJ22)
CVSSGGSARQLTF

SEQ ID NO: 428244 - protein, 12 aa, Homo sapiens
  CDR3 for beta chain variable domain of TCR clone 214122 (TRBV29-1, TRBJ2-3)
CSVTGGADTQYF

SEQ ID NO: 428245 - protein, 13 aa, Homo sapiens
  CDR3 for alpha chain variable domain of TCR clone 214123 (TRAV20, TRAJ56)
CCAVWRSNSKLTF

SEQ ID NO: 428246 - protein, 14 aa, Homo sapiens
  CDR3 for beta chain variable domain of TCR clone 214123 (TRBV20-1, TRBJ2-7)
CSAKRGRSSYEQYF

SEQ ID NO: 428247 - protein, 11 aa, Homo sapiens
  CDR3 for alpha chain variable domain of TCR clone 214124 (TRAV39, TRAJ49)
CAVDISTQFYF

SEQ ID NO: 428248 - protein, 14 aa, Homo sapiens
  CDR3 for beta chain variable domain of TCR clone 214124 (TRBV7-2, TRBJ2-7)
CASSPKTSFYEQYF

SEQ ID NO: 428249 - protein, 10 aa, Homo sapiens
  CDR3 for alpha chain variable domain of TCR clone 214125 (TRAV12-3, TRAJ18)
CAMSAEDQPW

SEQ ID NO: 428250 - protein, 13 aa, Homo sapiens
  CDR3 for beta chain variable domain of TCR clone 214125 (TRBV15, TRBJ1-6)
CATSGGLNSPLHF

SEQ ID NO: 428251 - protein, 11 aa, Homo sapiens
  CDR3 for alpha chain variable domain of TCR clone 214126 (TRAV35, TRAJ30)
CAPGGDDKSIF

SEQ ID NO: 428252 - protein, 15 aa, Homo sapiens
  CDR3 for beta chain variable domain of TCR clone 214126 (TRBV9, TRBJ1-6)
CASSVAGTGDSPLHF

SEQ ID NO: 428253 - protein, 14 aa, Homo sapiens
  CDR3 for alpha chain variable domain of TCR clone 214127 (TRAV22, TRAJ6)
CAGVGPGGSYIPTF

SEQ ID NO: 428254 - protein, 12 aa, Homo sapiens
  CDR3 for beta chain variable domain of TCR clone 214127 (TRBV11-2, TRBJ2-2)
CASSLGGGELFF

SEQ ID NO: 428255 - protein, 16 aa, Homo sapiens
  CDR3 for alpha chain variable domain of TCR clone 214128 (TRAV3, TRAJ37)
CAVRPHGAGNPGKLIF

SEQ ID NO: 428256 - protein, 16 aa, Homo sapiens
  CDR3 for beta chain variable domain of TCR clone 214128 (TRBV9, TRBJ1-2)
CASSVEEKVSPYGYTF

SEQ ID NO: 428257 - protein, 14 aa, Homo sapiens
  CDR3 for alpha chain variable domain of TCR clone 214129 (TRAV38-1, TRAJ45)
CASHSGGGADGLTL

SEQ ID NO: 428258 - protein, 13 aa, Homo sapiens
  CDR3 for beta chain variable domain of TCR clone 214129 (TRBV10-3, TRBJ1-2)
CASSERDSYGYTF

SEQ ID NO: 428259 - protein, 14 aa, Homo sapiens
  CDR3 for alpha chain variable domain of TCR clone 214130 (TRAV1-2, TRAJ8)
CAVREDTGFQKLVF

SEQ ID NO: 428260 - protein, 15 aa, Homo sapiens
  CDR3 for beta chain variable domain of TCR clone 214130 (TRBV6-3, TRBJ2-7)
CAGSSPGTVFYEQYL

SEQ ID NO: 428261 - protein, 16 aa, Homo sapiens
  CDR3 for alpha chain variable domain of TCR clone 214131 (TRAV30, TRAJ24)
CGTEIVDADSWGKFQF

SEQ ID NO: 428262 - protein, 15 aa, Homo sapiens
  CDR3 for beta chain variable domain of TCR clone 214131 (TRBV27, TRBJ1-4)
CASSNRRGFNEKLFF

SEQ ID NO: 428263 - protein, 16 aa, Homo sapiens
  CDR3 for alpha chain variable domain of TCR clone 214132 (TRAV12-2, TRAJ50)
CAVGTATKTSYDKEIF

SEQ ID NO: 428264 - protein, 12 aa, Homo sapiens
  CDR3 for beta chain variable domain of TCR clone 214132 (TRBV12-4, TRBJ1-5)
CASSLGRQPQNV

SEQ ID NO: 428265 - protein, 16 aa, Homo sapiens
  CDR3 for alpha chain variable domain of TCR clone 214133 (TRAV8-3, TRAJ10)
CAVGHGVTGGGNKLTF

SEQ ID NO: 428266 - protein, 13 aa, Homo sapiens
  CDR3 for beta chain variable domain of TCR clone 214133 (TRBV18, TRBJ1-1)
CASSPGPSGEAFF

SEQ ID NO: 428267 - protein, 14 aa, Homo sapiens
  CDR3 for alpha chain variable domain of TCR clone 214134 (TRAV12-3, TRAJ56)
CAMSVTGANSKLTF

SEQ ID NO: 428268 - protein, 12 aa, Homo sapiens
  CDR3 for beta chain variable domain of TCR clone 214134 (TRBV12-5, TRBJ2-5)
CASGQGVETQYF

SEQ ID NO: 428269 - protein, 15 aa, Homo sapiens
  CDR3 for alpha chain variable domain of TCR clone 214135 (TRAV12-2, TRAJ53)
CAVNGGGGSNYKLTF

SEQ ID NO: 428270 - protein, 15 aa, Homo sapiens
  CDR3 for beta chain variable domain of TCR clone 214135 (TRBV7-2, TRBJ2-7)
CASSLKGALTYEQYF

SEQ ID NO: 428271 - protein, 13 aa, Homo sapiens
  CDR3 for alpha chain variable domain of TCR clone 214136 (TRAV12-1, TRAJ8)
CVGMGPGFQKVVF

SEQ ID NO: 428272 - protein, 18 aa, Homo sapiens
  CDR3 for beta chain variable domain of TCR clone 214136 (TRBV12-4, TRBJ2-2)
CASSLVAGTRGRTGGLFF

SEQ ID NO: 428273 - protein, 11 aa, Homo sapiens
  CDR3 for alpha chain variable domain of TCR clone 214137 (TRAV1-2, TRAJ40)
CAVPGTYKYIF

SEQ ID NO: 428274 - protein, 16 aa, Homo sapiens
  CDR3 for beta chain variable domain of TCR clone 214137 (TRBV29-1, TRBJ2-7)
CSVDGVGTSGSYEQYF

SEQ ID NO: 428275 - protein, 14 aa, Homo sapiens
  CDR3 for alpha chain variable domain of TCR clone 214138 (TRAV1-2, TRAJ8)
CAVREDTGFQKLVF

SEQ ID NO: 428276 - protein, 16 aa, Homo sapiens
  CDR3 for beta chain variable domain of TCR clone 214138 (TRBV20-1, TRBJ2-2)
CSASASGIPGAGELFF

SEQ ID NO: 428277 - protein, 14 aa, Homo sapiens
  CDR3 for alpha chain variable domain of TCR clone 214139 (TRAV17, TRAJ34)
CATDSLEGTDKFIF

SEQ ID NO: 428278 - protein, 13 aa, Homo sapiens
  CDR3 for beta chain variable domain of TCR clone 214139 (TRBV11-2, TRBJ2-7)
CASSGTRPYEQYF

SEQ ID NO: 428279 - protein, 14 aa, Homo sapiens
  CDR3 for alpha chain variable domain of TCR clone 214140 (TRAV12-2, TRAJ13)
GAVKKTGGYQKVTF

SEQ ID NO: 428280 - protein, 15 aa, Homo sapiens
  CDR3 for beta chain variable domain of TCR clone 214140 (TRBV12-4, TRBJ2-5)
CASSPPTGLQETQYF

SEQ ID NO: 428281 - protein, 14 aa, Homo sapiens
  CDR3 for alpha chain variable domain of TCR clone 214141 (TRAV17, TRAJ12)
CATAEKDSSYKLIF

SEQ ID NO: 428282 - protein, 16 aa, Homo sapiens
  CDR3 for beta chain variable domain of TCR clone 214141 (TRBV11-2, TRBJ2-1)
CASSPRLAGVYNEQFF

SEQ ID NO: 428283 - protein, 16 aa, Homo sapiens
  CDR3 for alpha chain variable domain of TCR clone 214142 (TRAV1-1, TRAJ36)
CAVRDTLLPGANNLSF

SEQ ID NO: 428284 - protein, 15 aa, Homo sapiens
  CDR3 for beta chain variable domain of TCR clone 214142 (TRBV7-2, TRBJ2-5)
CASSLRGASGETQYF

SEQ ID NO: 428285 - protein, 13 aa, Homo sapiens
  CDR3 for alpha chain variable domain of TCR clone 214143 (TRAV2, TRAJ40)
CAVVTSGTYKYIF

SEQ ID NO: 428286 - protein, 13 aa, Homo sapiens
  CDR3 for beta chain variable domain of TCR clone 214143 (TRBV7-9, TRBJ2-5)
CACLPSGRETQYF

SEQ ID NO: 428287 - protein, 14 aa, Homo sapiens
  CDR3 for alpha chain variable domain of TCR clone 214144 (TRAV12-2, TRAJ17)
CAVLFKAAGNKLTF

SEQ ID NO: 428288 - protein, 16 aa, Homo sapiens
  CDR3 for beta chain variable domain of TCR clone 214144 (TRBV2, TRBJ2-5)
CASSTLRDRDRETQYF

SEQ ID NO: 428289 - protein, 11 aa, Homo sapiens
  CDR3 for alpha chain variable domain of TCR clone 214145 (TRAV3, TRAJ31)
CAVRPDARLMF

SEQ ID NO: 428290 - protein, 12 aa, Homo sapiens
  CDR3 for beta chain variable domain of TCR clone 214145 (TRBV19, TRBJ1-5)
CASRASNQPQHF

SEQ ID NO: 428291 - protein, 13 aa, Homo sapiens
  CDR3 for alpha chain variable domain of TCR clone 214146 (TRAV29/DV5, TRAJ44)
CAASTGTASKLTF

SEQ ID NO: 428292 - protein, 16 aa, Homo sapiens
  CDR3 for beta chain variable domain of TCR clone 214146 (TRBV5-4, TRBJ2-3)
CASQQPGAGGADTQYF

SEQ ID NO: 428293 - protein, 12 aa, Homo sapiens
  CDR3 for alpha chain variable domain of TCR clone 214147 (TRAV13-2, TRAJ8)
CAPCLGFQKLVF

SEQ ID NO: 428294 - protein, 15 aa, Homo sapiens
  CDR3 for beta chain variable domain of TCR clone 214147 (TRBV12-4, TRBJ2-5)
CASSLSGAFQETQYF

SEQ ID NO: 428295 - protein, 14 aa, Homo sapiens
  CDR3 for alpha chain variable domain of TCR clone 214148 (TRAV30, TRAJ26)
CGTEIVSYGQHFVF

SEQ ID NO: 428296 - protein, 13 aa, Homo sapiens
  CDR3 for beta chain variable domain of TCR clone 214148 (TRBV19, TRBJ1-3)
CASRLSLGNTIYF

SEQ ID NO: 428297 - protein, 18 aa, Homo sapiens
  CDR3 for alpha chain variable domain of TCR clone 214149 (TRAV21, TRAJ52)
CAVRPSPAGGTSYGKMTF

SEQ ID NO: 428298 - protein, 15 aa, Homo sapiens
  CDR3 for beta chain variable domain of TCR clone 214149 (TRBV19, TRBJ2-7)
CASRPTPGLSIEQYF

SEQ ID NO: 428299 - protein, 13 aa, Homo sapiens
  CDR3 for alpha chain variable domain of TCR clone 214150 (TRAV1-2, TRAJ9)
CAALTTGGFKTSF

SEQ ID NO: 428300 - protein, 13 aa, Homo sapiens
  CDR3 for beta chain variable domain of TCR clone 214150 (TRBV15, TRBJ1-6)
CATSGGLNSPLHF

SEQ ID NO: 428301 - protein, 15 aa, Homo sapiens
  CDR3 for alpha chain variable domain of TCR clone 214151 (TRAV13-2, TRAJ10)
CAENRDTGGGNKLTF

SEQ ID NO: 428302 - protein, 15 aa, Homo sapiens
  CDR3 for beta chain variable domain of TCR clone 214151 (TRBV12-5, TRBJ2-2)
CASGRLGGNTGELFF

SEQ ID NO: 428303 - protein, 11 aa, Homo sapiens
  CDR3 for alpha chain variable domain of TCR clone 214152 (TRAV26-1, TRAJ37)
CIVRVGRKLIF

SEQ ID NO: 428304 - protein, 17 aa, Homo sapiens
  CDR3 for beta chain variable domain of TCR clone 214152 (TRBV7-3, TRBJ2-3)
CASSLSRVAGGRNTQYF

SEQ ID NO: 428305 - protein, 18 aa, Homo sapiens
  CDR3 for alpha chain variable domain of TCR clone 214153 (TRAV9-2, TRAJ52)
CALRGPAPGGTIYGKLTF

SEQ ID NO: 428306 - protein, 15 aa, Homo sapiens
  CDR3 for beta chain variable domain of TCR clone 214153 (TRBV6-3, TRBJ2-7)
CASSSPGTVFYEQYF

SEQ ID NO: 428307 - protein, 12 aa, Homo sapiens
  CDR3 for alpha chain variable domain of TCR clone 214154 (TRAV12-3, TRAJ17)
CAMTLAGNKLTF

SEQ ID NO: 428308 - protein, 15 aa, Homo sapiens
  CDR3 for beta chain variable domain of TCR clone 214154 (TRBV20-1, TRBJ2-7)
CSARDRGSGMDEQYF

SEQ ID NO: 428309 - protein, 14 aa, Homo sapiens
  CDR3 for alpha chain variable domain of TCR clone 214155 (TRAV12-3, TRAJ10)
SHLPLTGGGNKLTF

SEQ ID NO: 428310 - protein, 17 aa, Homo sapiens
  CDR3 for beta chain variable domain of TCR clone 214155 (TRBV24-1, TRBJ2-3)
CATSDLPSGEDTDTQYF

SEQ ID NO: 428311 - protein, 14 aa, Homo sapiens
  CDR3 for alpha chain variable domain of TCR clone 214156 (TRAV1-1, TRAJ27)
CAVIYNTNSGKSTC

SEQ ID NO: 428312 - protein, 15 aa, Homo sapiens
  CDR3 for beta chain variable domain of TCR clone 214156 (TRBV7-2, TRBJ2-1)
CASSSGLAGGNEQFF

SEQ ID NO: 428313 - protein, 14 aa, Homo sapiens
  CDR3 for alpha chain variable domain of TCR clone 214157 (TRAV26-2, TRAJ23)
CSRTLYNQGGKLIF

SEQ ID NO: 428314 - protein, 15 aa, Homo sapiens
  CDR3 for beta chain variable domain of TCR clone 214157 (TRBV20-1, TRBJ2-7)
CSARNRVSGMDEQYF

SEQ ID NO: 428315 - protein, 14 aa, Homo sapiens
  CDR3 for alpha chain variable domain of TCR clone 214158 (TRAV12-2, TRAJ6)
CASTWGGGSYIPTF

SEQ ID NO: 428316 - protein, 13 aa, Homo sapiens
  CDR3 for beta chain variable domain of TCR clone 214158 (TRBV2, TRBJ1-1)
CASSEGGNTEAVF

SEQ ID NO: 428317 - protein, 13 aa, Homo sapiens
  CDR3 for alpha chain variable domain of TCR clone 214159 (TRAV17, TRAJ54)
CAAGIQGAQKLVF

SEQ ID NO: 428318 - protein, 14 aa, Homo sapiens
  CDR3 for beta chain variable domain of TCR clone 214159 (TRBV11-2, TRBJ1-2)
CASSLGTANYGYNF

SEQ ID NO: 428319 - protein, 14 aa, Homo sapiens
  CDR3 for alpha chain variable domain of TCR clone 214160 (TRAV12-3, TRAJ10)
SHLPLTGGGNKLTF

SEQ ID NO: 428320 - protein, 15 aa, Homo sapiens
  CDR3 for beta chain variable domain of TCR clone 214160 (TRBV11-3, TRBJ2-7)
CASSQRTSGSLRAVL

SEQ ID NO: 428321 - protein, 16 aa, Homo sapiens
  CDR3 for alpha chain variable domain of TCR clone 214161 (TRAV38-2/DV8, TRAJ10)
CAYTNILTGGGNKLTF

SEQ ID NO: 428322 - protein, 15 aa, Homo sapiens
  CDR3 for beta chain variable domain of TCR clone 214161 (TRBV7-6, TRBJ1-2)
CASSSGGRGGYGYTF

SEQ ID NO: 428323 - protein, 13 aa, Homo sapiens
  CDR3 for alpha chain variable domain of TCR clone 214162 (TRAV3, TRAJ20)
CCEAFCNDYKLGF

SEQ ID NO: 428324 - protein, 15 aa, Homo sapiens
  CDR3 for beta chain variable domain of TCR clone 214162 (TRBV19, TRBJ2-6)
CASVRRDSGANDLTF

SEQ ID NO: 428325 - protein, 12 aa, Homo sapiens
  CDR3 for alpha chain variable domain of TCR clone 214163 (TRAV13-2, TRAJ23)
CAERHRGGKLIF

SEQ ID NO: 428326 - protein, 15 aa, Homo sapiens
  CDR3 for beta chain variable domain of TCR clone 214163 (TRBV7-8, TRBJ2-1)
RASSLHGGPYNEQFF

SEQ ID NO: 428327 - protein, 12 aa, Homo sapiens
  CDR3 for alpha chain variable domain of TCR clone 214164 (TRAV12-3, TRAJ17)
CALTLTGNKLTF

SEQ ID NO: 428328 - protein, 15 aa, Homo sapiens
  CDR3 for beta chain variable domain of TCR clone 214164 (TRBV20-1, TRBJ2-7)
CSARDWVSGMDEQYF

SEQ ID NO: 428329 - protein, 14 aa, Homo sapiens
  CDR3 for alpha chain variable domain of TCR clone 214165 (TRAV12-3, TRAJ10)
SHLPLTGGGNKLTF

SEQ ID NO: 428330 - protein, 20 aa, Homo sapiens
  CDR3 for beta chain variable domain of TCR clone 214165 (TRBV7-8, TRBJ2-2)
WASSHLFPGPTIHITGELFF

SEQ ID NO: 428331 - protein, 13 aa, Homo sapiens
  CDR3 for alpha chain variable domain of TCR clone 214166 (TRAV12-1, TRAJ9)
CVVLNTGGFKTIF

SEQ ID NO: 428332 - protein, 15 aa, Homo sapiens
  CDR3 for beta chain variable domain of TCR clone 214166 (TRBV7-9, TRBJ1-6)
CASSSPGRGNSPLHF

SEQ ID NO: 428333 - protein, 16 aa, Homo sapiens
  CDR3 for alpha chain variable domain of TCR clone 214167 (TRAV3, TRAJ34)
CAVRARGTPTSSSLGL

SEQ ID NO: 428334 - protein, 15 aa, Homo sapiens
  CDR3 for beta chain variable domain of TCR clone 214167 (TRBV6-3, TRBJ2-7)
CASSSPGTVFYEQYS

SEQ ID NO: 428335 - protein, 14 aa, Homo sapiens
  CDR3 for alpha chain variable domain of TCR clone 214168 (TRAV26-1, TRAJ45)
CIEVTGGGADGLTF

SEQ ID NO: 428336 - protein, 15 aa, Homo sapiens
  CDR3 for beta chain variable domain of TCR clone 214168 (TRBV18, TRBJ2-7)
CASSPSSTGNYEQYF

SEQ ID NO: 428337 - protein, 12 aa, Homo sapiens
  CDR3 for alpha chain variable domain of TCR clone 214169 (TRAV13-2, TRAJ23)
CAERHRGGQLIF

SEQ ID NO: 428338 - protein, 13 aa, Homo sapiens
  CDR3 for beta chain variable domain of TCR clone 214169 (TRBV7-9, TRBJ2-3)
CASSPGSTDTQYF

SEQ ID NO: 428339 - protein, 13 aa, Homo sapiens
  CDR3 for alpha chain variable domain of TCR clone 214170 (TRAV29/DV5, TRAJ31)
CAASRNNNSRLMF

SEQ ID NO: 428340 - protein, 13 aa, Homo sapiens
  CDR3 for beta chain variable domain of TCR clone 214170 (TRBV29-1, TRBJ2-5)
CSVTIASEETQYF

SEQ ID NO: 428341 - protein, 15 aa, Homo sapiens
  CDR3 for alpha chain variable domain of TCR clone 214171 (TRAV2, TRAJ9)
CAVEDRGTGGFKTIF

SEQ ID NO: 428342 - protein, 16 aa, Homo sapiens
  CDR3 for beta chain variable domain of TCR clone 214171 (TRBV24-1, TRBJ2-3)
CATSDPETGATDTQYF

SEQ ID NO: 428343 - protein, 13 aa, Homo sapiens
  CDR3 for alpha chain variable domain of TCR clone 214172 (TRAV12-1, TRAJ33)
CGDAPDSNYQLIW

SEQ ID NO: 428344 - protein, 15 aa, Homo sapiens
  CDR3 for beta chain variable domain of TCR clone 214172 (TRBV27, TRBJ2-1)
CASSNGGGSFNEQFF

SEQ ID NO: 428345 - protein, 14 aa, Homo sapiens
  CDR3 for alpha chain variable domain of TCR clone 214173 (TRAV23/DV6, TRAJ24)
CAASLSDSWGKLQF

SEQ ID NO: 428346 - protein, 15 aa, Homo sapiens
  CDR3 for beta chain variable domain of TCR clone 214173 (TRBV11-2, TRBJ2-1)
CASSLGTSGLNEQFF

SEQ ID NO: 428347 - protein, 13 aa, Homo sapiens
  CDR3 for alpha chain variable domain of TCR clone 214174 (TRAV21, TRAJ20)
CAVGLRVDYKLSF

SEQ ID NO: 428348 - protein, 13 aa, Homo sapiens
  CDR3 for beta chain variable domain of TCR clone 214174 (TRBV6-1, TRBJ1-1)
CASSRQGNTKAFF

SEQ ID NO: 428349 - protein, 13 aa, Homo sapiens
  CDR3 for alpha chain variable domain of TCR clone 214175 (TRAV8-6, TRAJ49)
CAVITNTGNQFYF

SEQ ID NO: 428350 - protein, 15 aa, Homo sapiens
  CDR3 for beta chain variable domain of TCR clone 214175 (TRBV5-7, TRBJ1-5)
CASSYGKLWDQPQHF

SEQ ID NO: 428351 - protein, 15 aa, Homo sapiens
  CDR3 for alpha chain variable domain of TCR clone 214176 (TRAV13-1, TRAJ15)
CAASIERQAGTALIF

SEQ ID NO: 428352 - protein, 14 aa, Homo sapiens
  CDR3 for beta chain variable domain of TCR clone 214176 (TRBV5-1, TRBJ2-7)
CASSLFTGTHEQYF

SEQ ID NO: 428353 - protein, 12 aa, Homo sapiens
  CDR3 for alpha chain variable domain of TCR clone 214177 (TRAV29/DV5, TRAJ34)
CAASGNTDKLIF

SEQ ID NO: 428354 - protein, 15 aa, Homo sapiens
  CDR3 for beta chain variable domain of TCR clone 214177 (TRBV9, TRBJ2-1)
CASSLAGSSYNEQFF

SEQ ID NO: 428355 - protein, 14 aa, Homo sapiens
  CDR3 for alpha chain variable domain of TCR clone 214178 (TRAV12-3, TRAJ13)
CAMKNSGGYQKVTF

SEQ ID NO: 428356 - protein, 16 aa, Homo sapiens
  CDR3 for beta chain variable domain of TCR clone 214178 (TRBV6-6, TRBJ2-1)
CASSYSFSGSYNEQFF

SEQ ID NO: 428357 - protein, 13 aa, Homo sapiens
  CDR3 for alpha chain variable domain of TCR clone 214179 (TRAV1-2, TRAJ16)
CAVNRFSDGQAAL

SEQ ID NO: 428358 - protein, 13 aa, Homo sapiens
  CDR3 for beta chain variable domain of TCR clone 214179 (TRBV4-1, TRBJ2-1)
CASSQAGGDEQFF

SEQ ID NO: 428359 - protein, 15 aa, Homo sapiens
  CDR3 for alpha chain variable domain of TCR clone 214180 (TRAV21, TRAJ56)
CAVTKYTGANSMLTF

SEQ ID NO: 428360 - protein, 14 aa, Homo sapiens
  CDR3 for beta chain variable domain of TCR clone 214180 (TRBV20-1, TRBJ2-3)
CSARVRGSTDTQYF

SEQ ID NO: 428361 - protein, 10 aa, Homo sapiens
  CDR3 for alpha chain variable domain of TCR clone 214181 (TRAV13-2, TRAJ20)
CAENICRLQA

SEQ ID NO: 428362 - protein, 15 aa, Homo sapiens
  CDR3 for beta chain variable domain of TCR clone 214181 (TRBV18, TRBJ1-2)
CASSPGNGLGYGCTF

SEQ ID NO: 428363 - protein, 17 aa, Homo sapiens
  CDR3 for alpha chain variable domain of TCR clone 214182 (TRAV3, TRAJ42)
CAVRDRDYGGIQGNLIF

SEQ ID NO: 428364 - protein, 12 aa, Homo sapiens
  CDR3 for beta chain variable domain of TCR clone 214182 (TRBV7-8, TRBJ2-7)
CASSLGDREQYF

SEQ ID NO: 428365 - protein, 12 aa, Homo sapiens
  CDR3 for alpha chain variable domain of TCR clone 214183 (TRAV29/DV5, TRAJ49)
CAALTTGNQFYF

SEQ ID NO: 428366 - protein, 12 aa, Homo sapiens
  CDR3 for beta chain variable domain of TCR clone 214183 (TRBV12-4, TRBJ2-7)
CASSLGGYEQYF

SEQ ID NO: 428367 - protein, 14 aa, Homo sapiens
  CDR3 for alpha chain variable domain of TCR clone 214184 (TRAV1-2, TRAJ29)
CAVRELTSATPLVF

SEQ ID NO: 428368 - protein, 14 aa, Homo sapiens
  CDR3 for beta chain variable domain of TCR clone 214184 (TRBV6-6, TRBJ2-7)
CASSDSGAGYEQYF

SEQ ID NO: 428369 - protein, 10 aa, Homo sapiens
  CDR3 for alpha chain variable domain of TCR clone 214185 (TRAV8-4, TRAJ43)
CAVSADDMRF

SEQ ID NO: 428370 - protein, 16 aa, Homo sapiens
  CDR3 for beta chain variable domain of TCR clone 214185 (TRBV5-1, TRBJ2-3)
CASSVFTMSSTDTQYF

SEQ ID NO: 428371 - protein, 14 aa, Homo sapiens
  CDR3 for alpha chain variable domain of TCR clone 214186 (TRAV1-2, TRAJ8)
CAVREDTGFQKLVF

SEQ ID NO: 428372 - protein, 14 aa, Homo sapiens
  CDR3 for beta chain variable domain of TCR clone 214186 (TRBV4-1, TRBJ2-5)
CASSQYRDQETQYF

SEQ ID NO: 428373 - protein, 11 aa, Homo sapiens
  CDR3 for alpha chain variable domain of TCR clone 214187 (TRAV17, TRAJ9)
CATTGGFKPIF

SEQ ID NO: 428374 - protein, 13 aa, Homo sapiens
  CDR3 for beta chain variable domain of TCR clone 214187 (TRBV6-5, TRBJ1-1)
VTSGTPPVGEAFF

SEQ ID NO: 428375 - protein, 18 aa, Homo sapiens
  CDR3 for alpha chain variable domain of TCR clone 214188 (TRAV13-1, TRAJ52)
CAASKRSAGGTSYGKLTF

SEQ ID NO: 428376 - protein, 14 aa, Homo sapiens
  CDR3 for beta chain variable domain of TCR clone 214188 (TRBV19, TRBJ2-1)
CASTTFVLSGEQFF

SEQ ID NO: 428377 - protein, 13 aa, Homo sapiens
  CDR3 for alpha chain variable domain of TCR clone 214189 (TRAV21, TRAJ29)
CAAPNSGNTPLVF

SEQ ID NO: 428378 - protein, 15 aa, Homo sapiens
  CDR3 for beta chain variable domain of TCR clone 214189 (TRBV28, TRBJ2-1)
CASSIIAGGRSEQFF

SEQ ID NO: 428379 - protein, 15 aa, Homo sapiens
  CDR3 for alpha chain variable domain of TCR clone 214190 (TRAV3, TRAJ32)
CAVRDPGGATNKLIF

SEQ ID NO: 428380 - protein, 14 aa, Homo sapiens
  CDR3 for beta chain variable domain of TCR clone 214190 (TRBV19, TRBJ2-1)
CASPTFVLSGEQFF

SEQ ID NO: 428381 - protein, 14 aa, Homo sapiens
  CDR3 for alpha chain variable domain of TCR clone 214191 (TRAV3, TRAJ37)
CAVKESGNTGKLIF

SEQ ID NO: 428382 - protein, 15 aa, Homo sapiens
  CDR3 for beta chain variable domain of TCR clone 214191 (TRBV7-9, TRBJ1-6)
CASSSPGRGNSPLHF

SEQ ID NO: 428383 - protein, 11 aa, Homo sapiens
  CDR3 for alpha chain variable domain of TCR clone 214192 (TRAV17, TRAJ9)
CATTGGFKTIF

SEQ ID NO: 428384 - protein, 12 aa, Homo sapiens
  CDR3 for beta chain variable domain of TCR clone 214192 (TRBV7-9, TRBJ2-7)
CASSLEGYEQYF

SEQ ID NO: 428385 - protein, 12 aa, Homo sapiens
  CDR3 for alpha chain variable domain of TCR clone 214193 (TRAV10, TRAJ34)
CVVSGKQRQAHL

SEQ ID NO: 428386 - protein, 14 aa, Homo sapiens
  CDR3 for beta chain variable domain of TCR clone 214193 (TRBV19, TRBJ2-1)
CASPTFVLSGEQFF

SEQ ID NO: 428387 - protein, 11 aa, Homo sapiens
  CDR3 for alpha chain variable domain of TCR clone 214194 (TRAV3, TRAJ21)
CAVGNINKFYF

SEQ ID NO: 428388 - protein, 16 aa, Homo sapiens
  CDR3 for beta chain variable domain of TCR clone 214194 (TRBV19, TRBJ2-1)
CASSKAGPSSYNEQFF

SEQ ID NO: 428389 - protein, 13 aa, Homo sapiens
  CDR3 for alpha chain variable domain of TCR clone 214195 (TRAV16, TRAJ53)
CALRGGSNYKLTF

SEQ ID NO: 428390 - protein, 11 aa, Homo sapiens
  CDR3 for beta chain variable domain of TCR clone 214195 (TRBV2, TRBJ2-4)
CASPTGRVQKH

SEQ ID NO: 428391 - protein, 14 aa, Homo sapiens
  CDR3 for alpha chain variable domain of TCR clone 214196 (TRAV8-3, TRAJ4)
CAVGSAGGYNKLFF

SEQ ID NO: 428392 - protein, 15 aa, Homo sapiens
  CDR3 for beta chain variable domain of TCR clone 214196 (TRBV6-5, TRBJ2-1)
CASSYDAGAGNEQFF

SEQ ID NO: 428393 - protein, 12 aa, Homo sapiens
  CDR3 for alpha chain variable domain of TCR clone 214197 (TRAV16, TRAJ10)
CSRTGGGNKLTF

SEQ ID NO: 428394 - protein, 12 aa, Homo sapiens
  CDR3 for beta chain variable domain of TCR clone 214197 (TRBV7-3, TRBJ1-1)
CQQPGLGAEAFF

SEQ ID NO: 428395 - protein, 11 aa, Homo sapiens
  CDR3 for alpha chain variable domain of TCR clone 214198 (TRAV12-3, TRAJ43)
CAMSVSNDMRF

SEQ ID NO: 428396 - protein, 15 aa, Homo sapiens
  CDR3 for beta chain variable domain of TCR clone 214198 (TRBV5-1, TRBJ2-1)
CASSPPRAAYNEQFF

SEQ ID NO: 428397 - protein, 15 aa, Homo sapiens
  CDR3 for alpha chain variable domain of TCR clone 214199 (TRAV27, TRAJ38)
FAARRNAGHNRKLIW

SEQ ID NO: 428398 - protein, 14 aa, Homo sapiens
  CDR3 for beta chain variable domain of TCR clone 214199 (TRBV7-2, TRBJ2-7)
CASSPRDGAYEQYF

SEQ ID NO: 428399 - protein, 11 aa, Homo sapiens
  CDR3 for alpha chain variable domain of TCR clone 214200 (TRAV13-1, TRAJ44)
PQTGTASKLTF

SEQ ID NO: 428400 - protein, 15 aa, Homo sapiens
  CDR3 for beta chain variable domain of TCR clone 214200 (TRBV11-2, TRBJ2-1)
CASSSPSTRYNEQFF

SEQ ID NO: 428401 - protein, 14 aa, Homo sapiens
  CDR3 for alpha chain variable domain of TCR clone 214201 (TRAV13-2, TRAJ17)
CAENSKAAGNKLTV

SEQ ID NO: 428402 - protein, 11 aa, Homo sapiens
  CDR3 for beta chain variable domain of TCR clone 214201 (TRBV6-3, TRBJ2-3)
CATGQADTQYF

SEQ ID NO: 428403 - protein, 13 aa, Homo sapiens
  CDR3 for alpha chain variable domain of TCR clone 214202 (TRAV1-2, TRAJ9)
CAALNTGGFKTIF

SEQ ID NO: 428404 - protein, 15 aa, Homo sapiens
  CDR3 for beta chain variable domain of TCR clone 214202 (TRBV11-2, TRBJ2-1)
CASSKNRGLIYEQFF

SEQ ID NO: 428405 - protein, 14 aa, Homo sapiens
  CDR3 for alpha chain variable domain of TCR clone 214203 (TRAV4, TRAJ17)
CLVGDMAAGNKLTF

SEQ ID NO: 428406 - protein, 15 aa, Homo sapiens
  CDR3 for beta chain variable domain of TCR clone 214203 (TRBV19, TRBJ2-4)
CASRGPRRGENIQYF

SEQ ID NO: 428407 - protein, 13 aa, Homo sapiens
  CDR3 for alpha chain variable domain of TCR clone 214204 (TRAV2, TRAJ40)
CAVVTSGTYKYIF

SEQ ID NO: 428408 - protein, 15 aa, Homo sapiens
  CDR3 for beta chain variable domain of TCR clone 214204 (TRBV11-2, TRBJ2-3)
CASLKDGREGDTQYF

SEQ ID NO: 428409 - protein, 14 aa, Homo sapiens
  CDR3 for alpha chain variable domain of TCR clone 214205 (TRAV13-1, TRAJ26)
CAASSAHYGQDFGF

SEQ ID NO: 428410 - protein, 17 aa, Homo sapiens
  CDR3 for beta chain variable domain of TCR clone 214205 (TRBV25-1, TRBJ2-5)
CASSRRGGRGGQETQYF

SEQ ID NO: 428411 - protein, 11 aa, Homo sapiens
  CDR3 for alpha chain variable domain of TCR clone 214206 (TRAV12-2, TRAJ31)
CAVTRWARLMF

SEQ ID NO: 428412 - protein, 15 aa, Homo sapiens
  CDR3 for beta chain variable domain of TCR clone 214206 (TRBV6-5, TRBJ2-1)
CASSYDAGAGNEQFF

SEQ ID NO: 428413 - protein, 13 aa, Homo sapiens
  CDR3 for alpha chain variable domain of TCR clone 214207 (TRAV27, TRAJ56)
CAGKPGANSKLTF

SEQ ID NO: 428414 - protein, 13 aa, Homo sapiens
  CDR3 for beta chain variable domain of TCR clone 214207 (TRBV6-3, TRBJ2-3)
CASEGELKDTQYF

SEQ ID NO: 428415 - protein, 13 aa, Homo sapiens
  CDR3 for alpha chain variable domain of TCR clone 214208 (TRAV21, TRAJ26)
CAVIGNYGQNFVF

SEQ ID NO: 428416 - protein, 13 aa, Homo sapiens
  CDR3 for beta chain variable domain of TCR clone 214208 (TRBV5-7, TRBJ2-6)
CASTSSGANVLTF

SEQ ID NO: 428417 - protein, 18 aa, Homo sapiens
  CDR3 for alpha chain variable domain of TCR clone 214209 (TRAV21, TRAJ52)
CSVRPSPAGGTSYGKLTF

SEQ ID NO: 428418 - protein, 16 aa, Homo sapiens
  CDR3 for beta chain variable domain of TCR clone 214209 (TRBV7-3, TRBJ2-1)
CASSLEGYRSYNEQFF

SEQ ID NO: 428419 - protein, 14 aa, Homo sapiens
  CDR3 for alpha chain variable domain of TCR clone 214210 (TRAV12-2, TRAJ13)
CAVKKTGGYQKVTF

SEQ ID NO: 428420 - protein, 13 aa, Homo sapiens
  CDR3 for beta chain variable domain of TCR clone 214210 (TRBV20-1, TRBJ1-3)
CSARLVVGNTIYF

SEQ ID NO: 428421 - protein, 12 aa, Homo sapiens
  CDR3 for alpha chain variable domain of TCR clone 214211 (TRAV3, TRAJ20)
CAVRDPDSKLSF

SEQ ID NO: 428422 - protein, 15 aa, Homo sapiens
  CDR3 for beta chain variable domain of TCR clone 214211 (TRBV6-3, TRBJ2-7)
CASSSPGTVFYEQYF

SEQ ID NO: 428423 - protein, 14 aa, Homo sapiens
  CDR3 for alpha chain variable domain of TCR clone 214212 (TRAV1-2, TRAJ8)
CAVREDTGFQTLVF

SEQ ID NO: 428424 - protein, 14 aa, Homo sapiens
  CDR3 for beta chain variable domain of TCR clone 214212 (TRBV29-1, TRBJ2-3)
CSAGAGVGADTQYF

SEQ ID NO: 428425 - protein, 14 aa, Homo sapiens
  CDR3 for alpha chain variable domain of TCR clone 214213 (TRAV1-2, TRAJ17)
CALRRGAAGNKLTF

SEQ ID NO: 428426 - protein, 13 aa, Homo sapiens
  CDR3 for beta chain variable domain of TCR clone 214213 (TRBV10-3, TRBJ2-7)
CASKLAVNYEQYF

SEQ ID NO: 428427 - protein, 12 aa, Homo sapiens
  CDR3 for alpha chain variable domain of TCR clone 214214 (TRAV13-1, TRAJ49)
FAASIRSNQFYF

SEQ ID NO: 428428 - protein, 14 aa, Homo sapiens
  CDR3 for beta chain variable domain of TCR clone 214214 (TRBV7-2, TRBJ2-1)
CASSPGLAGNEQFF

SEQ ID NO: 428429 - protein, 15 aa, Homo sapiens
  CDR3 for alpha chain variable domain of TCR clone 214215 (TRAV17, TRAJ35)
CATAFVIGFGHVLHF

SEQ ID NO: 428430 - protein, 15 aa, Homo sapiens
  CDR3 for beta chain variable domain of TCR clone 214215 (TRBV7-9, TRBJ2-7)
CASSLALAEAYEQYF

SEQ ID NO: 428431 - protein, 14 aa, Homo sapiens
  CDR3 for alpha chain variable domain of TCR clone 214216 (TRAV12-2, TRAJ13)
CAVKKTGGYQKVTF

SEQ ID NO: 428432 - protein, 13 aa, Homo sapiens
  CDR3 for beta chain variable domain of TCR clone 214216 (TRBV27, TRBJ2-7)
CASSLTTGYEQYF

SEQ ID NO: 428433 - protein, 15 aa, Homo sapiens
  CDR3 for alpha chain variable domain of TCR clone 214217 (TRAV26-2, TRAJ39)
CSLRGNNNAGNMLTF

SEQ ID NO: 428434 - protein, 15 aa, Homo sapiens
  CDR3 for beta chain variable domain of TCR clone 214217 (TRBV5-4, TRBJ1-1)
CASSSLGWANTEAYF

SEQ ID NO: 428435 - protein, 16 aa, Homo sapiens
  CDR3 for alpha chain variable domain of TCR clone 214218 (TRAV12-2, TRAJ32)
CAVNLGQGGATNKLIF

SEQ ID NO: 428436 - protein, 14 aa, Homo sapiens
  CDR3 for beta chain variable domain of TCR clone 214218 (TRBV11-2, TRBJ2-3)
CASSRLARTDAQHF

SEQ ID NO: 428437 - protein, 13 aa, Homo sapiens
  CDR3 for alpha chain variable domain of TCR clone 214219 (TRAV13-1, TRAJ21)
CAASIYNFNKFYF

SEQ ID NO: 428438 - protein, 15 aa, Homo sapiens
  CDR3 for beta chain variable domain of TCR clone 214219 (TRBV2, TRBJ2-1)
CASSEEREGDNEQFF

SEQ ID NO: 428439 - protein, 15 aa, Homo sapiens
  CDR3 for alpha chain variable domain of TCR clone 214220 (TRAV3, TRAJ22)
CAVRDRGGSARQLNF

SEQ ID NO: 428440 - protein, 17 aa, Homo sapiens
  CDR3 for beta chain variable domain of TCR clone 214220 (TRBV11-2, TRBJ2-1)
CASSLYPPGVEYNEQFF

SEQ ID NO: 428441 - protein, 11 aa, Homo sapiens
  CDR3 for alpha chain variable domain of TCR clone 214221 (TRAV17, TRAJ9)
CATTGGFKTIF

SEQ ID NO: 428442 - protein, 16 aa, Homo sapiens
  CDR3 for beta chain variable domain of TCR clone 214221 (TRBV7-9, TRBJ2-2)
CASSGFGGANTGELFF

SEQ ID NO: 428443 - protein, 17 aa, Homo sapiens
  CDR3 for alpha chain variable domain of TCR clone 214222 (TRAV3, TRAJ6)
CAVRVGPRAGGSYIPTF

SEQ ID NO: 428444 - protein, 14 aa, Homo sapiens
  CDR3 for beta chain variable domain of TCR clone 214222 (TRBV25-1, TRBJ1-1)
CASTHLGGNTEAFF

SEQ ID NO: 428445 - protein, 12 aa, Homo sapiens
  CDR3 for alpha chain variable domain of TCR clone 214223 (TRAV21, TRAJ30)
CAVMNRDDKIIF

SEQ ID NO: 428446 - protein, 17 aa, Homo sapiens
  CDR3 for beta chain variable domain of TCR clone 214223 (TRBV5-1, TRBJ1-1)
CASRPIRTRGVNTEAFF

SEQ ID NO: 428447 - protein, 18 aa, Homo sapiens
  CDR3 for alpha chain variable domain of TCR clone 214224 (TRAV13-1, TRAJ52)
CAAKNPNAGGTSYGKPTF

SEQ ID NO: 428448 - protein, 13 aa, Homo sapiens
  CDR3 for beta chain variable domain of TCR clone 214224 (TRBV20-1, TRBJ1-1)
CSARGGGNTEAFF

SEQ ID NO: 428449 - protein, 13 aa, Homo sapiens
  CDR3 for alpha chain variable domain of TCR clone 214225 (TRAV21, TRAJ27)
CAALNTNAGKSTF

SEQ ID NO: 428450 - protein, 13 aa, Homo sapiens
  CDR3 for beta chain variable domain of TCR clone 214225 (TRBV6-3, TRBJ2-7)
CASSSDRDFEQYF

SEQ ID NO: 428451 - protein, 14 aa, Homo sapiens
  CDR3 for alpha chain variable domain of TCR clone 214226 (TRAV30, TRAJ33)
CGTERRFSNYQLIW

SEQ ID NO: 428452 - protein, 16 aa, Homo sapiens
  CDR3 for beta chain variable domain of TCR clone 214226 (TRBV7-3, TRBJ2-2)
CASSFKRGTLSGELFF

SEQ ID NO: 428453 - protein, 15 aa, Homo sapiens
  CDR3 for alpha chain variable domain of TCR clone 214227 (TRAV26-1, TRAJ22)
CIVRVSFWFCKATDL

SEQ ID NO: 428454 - protein, 13 aa, Homo sapiens
  CDR3 for beta chain variable domain of TCR clone 214227 (TRBV7-9, TRBJ1-2)
CAISLKQNYGCTF

SEQ ID NO: 428455 - protein, 14 aa, Homo sapiens
  CDR3 for alpha chain variable domain of TCR clone 214228 (TRAV16, TRAJ33)
CALSAMDSNYQLIW

SEQ ID NO: 428456 - protein, 16 aa, Homo sapiens
  CDR3 for beta chain variable domain of TCR clone 214228 (TRBV12-4, TRBJ2-3)
CASSLPSNTNTDTQYF

SEQ ID NO: 428457 - protein, 11 aa, Homo sapiens
  CDR3 for alpha chain variable domain of TCR clone 214229 (TRAV4, TRAJ20)
CLVGDKVTTTS

SEQ ID NO: 428458 - protein, 15 aa, Homo sapiens
  CDR3 for beta chain variable domain of TCR clone 214229 (TRBV18, TRBJ2-7)
CASSPSSTGNYEQYV

SEQ ID NO: 428459 - protein, 13 aa, Homo sapiens
  CDR3 for alpha chain variable domain of TCR clone 214230 (TRAV21, TRAJ20)
CAVGLRVGYKLSF

SEQ ID NO: 428460 - protein, 11 aa, Homo sapiens
  CDR3 for beta chain variable domain of TCR clone 214230 (TRBV25-1, TRBJ2-1)
CATTRISEQFF

SEQ ID NO: 428461 - protein, 14 aa, Homo sapiens
  CDR3 for alpha chain variable domain of TCR clone 214231 (TRAV20, TRAJ29)
RAVQAWVGNTPLVF

SEQ ID NO: 428462 - protein, 15 aa, Homo sapiens
  CDR3 for beta chain variable domain of TCR clone 214231 (TRBV29-1, TRBJ2-7)
CSVECFDRGSYEQYF

SEQ ID NO: 428463 - protein, 14 aa, Homo sapiens
  CDR3 for alpha chain variable domain of TCR clone 214232 (TRAV12-2, TRAJ17)
CAVNIKAAGNKRTF

SEQ ID NO: 428464 - protein, 13 aa, Homo sapiens
  CDR3 for beta chain variable domain of TCR clone 214232 (TRBV7-8, TRBJ2-7)
CASSLTGGREQYF

SEQ ID NO: 428465 - protein, 14 aa, Homo sapiens
  CDR3 for alpha chain variable domain of TCR clone 214233 (TRAV12-3, TRAJ10)
SHLPLTGGGNKLTF

SEQ ID NO: 428466 - protein, 13 aa, Homo sapiens
  CDR3 for beta chain variable domain of TCR clone 214233 (TRBV2, TRBJ1-6)
CADSGSYSSPLHF

SEQ ID NO: 428467 - protein, 15 aa, Homo sapiens
  CDR3 for alpha chain variable domain of TCR clone 214234 (TRAV3, TRAJ17)
CAVSPKEAAGNKLTF

SEQ ID NO: 428468 - protein, 14 aa, Homo sapiens
  CDR3 for beta chain variable domain of TCR clone 214234 (TRBV5-1, TRBJ2-3)
CASSLFGSTDTQYF

SEQ ID NO: 428469 - protein, 13 aa, Homo sapiens
  CDR3 for alpha chain variable domain of TCR clone 214235 (TRAV21, TRAJ27)
CAARPGNAGKSTF

SEQ ID NO: 428470 - protein, 14 aa, Homo sapiens
  CDR3 for beta chain variable domain of TCR clone 214235 (TRBV7-9, TRBJ2-7)
CASSPSGGQNEQYF

SEQ ID NO: 428471 - protein, 13 aa, Homo sapiens
  CDR3 for alpha chain variable domain of TCR clone 214236 (TRAV21, TRAJ27)
CAARPGNAGKPTL

SEQ ID NO: 428472 - protein, 14 aa, Homo sapiens
  CDR3 for beta chain variable domain of TCR clone 214236 (TRBV7-6, TRBJ2-3)
CASSLGTVTDTQYF

SEQ ID NO: 428473 - protein, 13 aa, Homo sapiens
  CDR3 for alpha chain variable domain of TCR clone 214237 (TRAV8-3, TRAJ28)
CAVGAVGSYQLIF

SEQ ID NO: 428474 - protein, 15 aa, Homo sapiens
  CDR3 for beta chain variable domain of TCR clone 214237 (TRBV28, TRBJ2-5)
CASSPGQGSIETQYF

SEQ ID NO: 428475 - protein, 13 aa, Homo sapiens
  CDR3 for alpha chain variable domain of TCR clone 214238 (TRAV8-4, TRAJ36)
CSVSDSGANNLFF

SEQ ID NO: 428476 - protein, 11 aa, Homo sapiens
  CDR3 for beta chain variable domain of TCR clone 214238 (TRBV29-1, TRBJ1-1)
CSVEVNVITFF

SEQ ID NO: 428477 - protein, 14 aa, Homo sapiens
  CDR3 for alpha chain variable domain of TCR clone 214239 (TRAV12-2, TRAJ40)
CAVKIPSGTYKHIF

SEQ ID NO: 428478 - protein, 13 aa, Homo sapiens
  CDR3 for beta chain variable domain of TCR clone 214239 (TRBV4-1, TRBJ2-2)
CASSQENTGELFF

SEQ ID NO: 428479 - protein, 17 aa, Homo sapiens
  CDR3 for alpha chain variable domain of TCR clone 214240 (TRAV3, TRAJ6)
VAVRDGPRAGGSYIPTF

SEQ ID NO: 428480 - protein, 14 aa, Homo sapiens
  CDR3 for beta chain variable domain of TCR clone 214240 (TRBV7-2, TRBJ2-7)
CASSPKTSFYEQYF

SEQ ID NO: 428481 - protein, 14 aa, Homo sapiens
  CDR3 for alpha chain variable domain of TCR clone 214241 (TRAV3, TRAJ21)
CALGRGSTNFTLDL

SEQ ID NO: 428482 - protein, 15 aa, Homo sapiens
  CDR3 for beta chain variable domain of TCR clone 214241 (TRBV7-2, TRBJ2-1)
CASTHGTGIYNEQFF

SEQ ID NO: 428483 - protein, 16 aa, Homo sapiens
  CDR3 for alpha chain variable domain of TCR clone 214242 (TRAV20, TRAJ22)
CAVQASSSGSARQLTF

SEQ ID NO: 428484 - protein, 13 aa, Homo sapiens
  CDR3 for beta chain variable domain of TCR clone 214242 (TRBV7-2, TRBJ2-5)
CASSQTNVETQYF

SEQ ID NO: 428485 - protein, 12 aa, Homo sapiens
  CDR3 for alpha chain variable domain of TCR clone 214243 (TRAV21, TRAJ33)
CAKMDSNYQLIW

SEQ ID NO: 428486 - protein, 17 aa, Homo sapiens
  CDR3 for beta chain variable domain of TCR clone 214243 (TRBV13, TRBJ2-3)
CASSLSRVAGGGNTQYF

SEQ ID NO: 428487 - protein, 15 aa, Homo sapiens
  CDR3 for alpha chain variable domain of TCR clone 214244 (TRAV12-2, TRAJ23)
CAVNTLYNQGGKLIF

SEQ ID NO: 428488 - protein, 15 aa, Homo sapiens
  CDR3 for beta chain variable domain of TCR clone 214244 (TRBV19, TRBJ2-7)
CASSPAGSGEALRYF

SEQ ID NO: 428489 - protein, 11 aa, Homo sapiens
  CDR3 for alpha chain variable domain of TCR clone 214245 (TRAV12-3, TRAJ43)
CAMSVSNDMRF

SEQ ID NO: 428490 - protein, 12 aa, Homo sapiens
  CDR3 for beta chain variable domain of TCR clone 214245 (TRBV20-1, TRBJ1-1)
KCSTWGGTEAFF

SEQ ID NO: 428491 - protein, 12 aa, Homo sapiens
  CDR3 for alpha chain variable domain of TCR clone 214246 (TRAV21, TRAJ13)
PGPSGGYQKVTF

SEQ ID NO: 428492 - protein, 14 aa, Homo sapiens
  CDR3 for beta chain variable domain of TCR clone 214246 (TRBV20-1, TRBJ2-7)
CSAQDRKGAYEQYF

SEQ ID NO: 428493 - protein, 16 aa, Homo sapiens
  CDR3 for alpha chain variable domain of TCR clone 214247 (TRAV8-3, TRAJ28)
CDVPPQRGAGSYQLTF

SEQ ID NO: 428494 - protein, 13 aa, Homo sapiens
  CDR3 for beta chain variable domain of TCR clone 214247 (TRBV7-6, TRBJ2-3)
CASSLRSDNTQYF

SEQ ID NO: 428495 - protein, 14 aa, Homo sapiens
  CDR3 for alpha chain variable domain of TCR clone 214248 (TRAV12-3, TRAJ10)
SHLPLTGGGNKLTF

SEQ ID NO: 428496 - protein, 16 aa, Homo sapiens
  CDR3 for beta chain variable domain of TCR clone 214248 (TRBV11-2, TRBJ2-3)
CASSSRTSGGAGTQYF

SEQ ID NO: 428497 - protein, 13 aa, Homo sapiens
  CDR3 for alpha chain variable domain of TCR clone 214249 (TRAV30, TRAJ24)
CGTVTDSWGKLQF

SEQ ID NO: 428498 - protein, 16 aa, Homo sapiens
  CDR3 for beta chain variable domain of TCR clone 214249 (TRBV7-3, TRBJ2-2)
CASSLKRRTLSGELFF

SEQ ID NO: 428499 - protein, 14 aa, Homo sapiens
  CDR3 for alpha chain variable domain of TCR clone 214250 (TRAV12-3, TRAJ10)
SHLPLTGGGNKLTF

SEQ ID NO: 428500 - protein, 17 aa, Homo sapiens
  CDR3 for beta chain variable domain of TCR clone 214250 (TRBV5-5, TRBJ1-2)
CASSLGSLDGQSEGYTF

SEQ ID NO: 428501 - protein, 13 aa, Homo sapiens
  CDR3 for alpha chain variable domain of TCR clone 214251 (TRAV16, TRAJ54)
CALMVQRAQKLVF

SEQ ID NO: 428502 - protein, 12 aa, Homo sapiens
  CDR3 for beta chain variable domain of TCR clone 214251 (TRBV18, TRBJ2-7)
CASSTAMGEQYF

SEQ ID NO: 428503 - protein, 12 aa, Homo sapiens
  CDR3 for alpha chain variable domain of TCR clone 214252 (TRAV13-1, TRAJ53)
AASGGSNYKLTF

SEQ ID NO: 428504 - protein, 15 aa, Homo sapiens
  CDR3 for beta chain variable domain of TCR clone 214252 (TRBV5-1, TRBJ2-1)
CASSPPKAPYNEQFF

SEQ ID NO: 428505 - protein, 18 aa, Homo sapiens
  CDR3 for alpha chain variable domain of TCR clone 214253 (TRAV9-2, TRAJ52)
CALRQHNAGGTSYGKLTF

SEQ ID NO: 428506 - protein, 13 aa, Homo sapiens
  CDR3 for beta chain variable domain of TCR clone 214253 (TRBV7-9, TRBJ1-2)
CASSLKQNYGYTF

SEQ ID NO: 428507 - protein, 16 aa, Homo sapiens
  CDR3 for alpha chain variable domain of TCR clone 214254 (TRAV8-3, TRAJ28)
CAVPPQRGAGSYQLTF

SEQ ID NO: 428508 - protein, 14 aa, Homo sapiens
  CDR3 for beta chain variable domain of TCR clone 214254 (TRBV2, TRBJ1-1)
CASTQVGENTEAFF

SEQ ID NO: 428509 - protein, 16 aa, Homo sapiens
  CDR3 for alpha chain variable domain of TCR clone 214255 (TRAV3, TRAJ3)
CAVRDRVKSSASKIIF

SEQ ID NO: 428510 - protein, 16 aa, Homo sapiens
  CDR3 for beta chain variable domain of TCR clone 214255 (TRBV20-1, TRBJ2-4)
CSATSLAELAKNIQYF

SEQ ID NO: 428511 - protein, 14 aa, Homo sapiens
  CDR3 for alpha chain variable domain of TCR clone 214256 (TRAV2, TRAJ9)
CAVEDRSGGFKTIF

SEQ ID NO: 428512 - protein, 17 aa, Homo sapiens
  CDR3 for beta chain variable domain of TCR clone 214256 (TRBV4-1, TRBJ2-7)
YASSRDPLGVRGGEQYF

SEQ ID NO: 428513 - protein, 15 aa, Homo sapiens
  CDR3 for alpha chain variable domain of TCR clone 214257 (TRAV12-2, TRAJ43)
CAFDMRFGAGTRLTV

SEQ ID NO: 428514 - protein, 13 aa, Homo sapiens
  CDR3 for beta chain variable domain of TCR clone 214257 (TRBV27, TRBJ2-7)
CASSFSQGYEQYF

SEQ ID NO: 428515 - protein, 15 aa, Homo sapiens
  CDR3 for alpha chain variable domain of TCR clone 214258 (TRAV13-1, TRAJ15)
CAASIERQAGTALIL

SEQ ID NO: 428516 - protein, 13 aa, Homo sapiens
  CDR3 for beta chain variable domain of TCR clone 214258 (TRBV7-2, TRBJ1-4)
CASSLAGLEKLFF

SEQ ID NO: 428517 - protein, 14 aa, Homo sapiens
  CDR3 for alpha chain variable domain of TCR clone 214259 (TRAV12-1, TRAJ12)
CVVTRMDSSYKLIF

SEQ ID NO: 428518 - protein, 15 aa, Homo sapiens
  CDR3 for beta chain variable domain of TCR clone 214259 (TRBV20-1, TRBJ2-7)
CSARDRVSGMDEQSF

SEQ ID NO: 428519 - protein, 13 aa, Homo sapiens
  CDR3 for alpha chain variable domain of TCR clone 214260 (TRAV2, TRAJ40)
CAVVTSGTYTYIF

SEQ ID NO: 428520 - protein, 14 aa, Homo sapiens
  CDR3 for beta chain variable domain of TCR clone 214260 (TRBV19, TRBJ2-1)
CASPTFVLSGEQFV

SEQ ID NO: 428521 - protein, 12 aa, Homo sapiens
  CDR3 for alpha chain variable domain of TCR clone 214261 (TRAV27, TRAJ35)
CAGADFGNVLHC

SEQ ID NO: 428522 - protein, 15 aa, Homo sapiens
  CDR3 for beta chain variable domain of TCR clone 214261 (TRBV20-1, TRBJ2-7)
CSARDRVSGIDEQYF

SEQ ID NO: 428523 - protein, 15 aa, Homo sapiens
  CDR3 for alpha chain variable domain of TCR clone 214262 (TRAV8-3, TRAJ27)
CAVGPSKTNAGKSTF

SEQ ID NO: 428524 - protein, 12 aa, Homo sapiens
  CDR3 for beta chain variable domain of TCR clone 214262 (TRBV5-1, TRBJ2-5)
CASSLGLETQYF

SEQ ID NO: 428525 - protein, 19 aa, Homo sapiens
  CDR3 for alpha chain variable domain of TCR clone 214263 (TRAV1-2, TRAJ26)
CLLPLCCERPDNYGQNFVF

SEQ ID NO: 428526 - protein, 13 aa, Homo sapiens
  CDR3 for beta chain variable domain of TCR clone 214263 (TRBV19, TRBJ1-2)
CAISQGQVYGYTF

SEQ ID NO: 428527 - protein, 15 aa, Homo sapiens
  CDR3 for alpha chain variable domain of TCR clone 214264 (TRAV25, TRAJ52)
CAGTSGGTSYGKLTF

SEQ ID NO: 428528 - protein, 14 aa, Homo sapiens
  CDR3 for beta chain variable domain of TCR clone 214264 (TRBV7-7, TRBJ2-1)
CASSSGLASNEQFF

SEQ ID NO: 428529 - protein, 15 aa, Homo sapiens
  CDR3 for alpha chain variable domain of TCR clone 214265 (TRAV12-3, TRAJ11)
CAMSEENSGYSTLTF

SEQ ID NO: 428530 - protein, 13 aa, Homo sapiens
  CDR3 for beta chain variable domain of TCR clone 214265 (TRBV7-2, TRBJ1-4)
CASSLAGLEKLFF

SEQ ID NO: 428531 - protein, 12 aa, Homo sapiens
  CDR3 for alpha chain variable domain of TCR clone 214266 (TRAV12-3, TRAJ17)
CAMTLTGNKLTF

SEQ ID NO: 428532 - protein, 16 aa, Homo sapiens
  CDR3 for beta chain variable domain of TCR clone 214266 (TRBV15, TRBJ2-3)
CATSRDLGIITDTQYF

SEQ ID NO: 428533 - protein, 19 aa, Homo sapiens
  CDR3 for alpha chain variable domain of TCR clone 214267 (TRAV27, TRAJ53)
ASTSVQSRNSGGSNYKLTF

SEQ ID NO: 428534 - protein, 14 aa, Homo sapiens
  CDR3 for beta chain variable domain of TCR clone 214267 (TRBV11-1, TRBJ2-7)
CASTFAVPSYDQYF

SEQ ID NO: 428535 - protein, 17 aa, Homo sapiens
  CDR3 for alpha chain variable domain of TCR clone 214268 (TRAV3, TRAJ7)
CAVRDMSPLEGTTDSLL

SEQ ID NO: 428536 - protein, 16 aa, Homo sapiens
  CDR3 for beta chain variable domain of TCR clone 214268 (TRBV19, TRBJ2-1)
CASSKAEPSSYNEQFF

SEQ ID NO: 428537 - protein, 17 aa, Homo sapiens
  CDR3 for alpha chain variable domain of TCR clone 214269 (TRAV3, TRAJ6)
CAVRDGPRAGGSYIPTF

SEQ ID NO: 428538 - protein, 14 aa, Homo sapiens
  CDR3 for beta chain variable domain of TCR clone 214269 (TRBV12-5, TRBJ2-5)
CASGSRTHQEAQYF

SEQ ID NO: 428539 - protein, 10 aa, Homo sapiens
  CDR3 for alpha chain variable domain of TCR clone 214270 (TRAV1-2, TRAJ20)
CACNDYKLSF

SEQ ID NO: 428540 - protein, 20 aa, Homo sapiens
  CDR3 for beta chain variable domain of TCR clone 214270 (TRBV11-2, TRBJ2-1)
CASSPRISALGRGAMNEQFF

SEQ ID NO: 428541 - protein, 17 aa, Homo sapiens
  CDR3 for alpha chain variable domain of TCR clone 214271 (TRAV3, TRAJ6)
CAVRDGPRAGGSYITTF

SEQ ID NO: 428542 - protein, 17 aa, Homo sapiens
  CDR3 for beta chain variable domain of TCR clone 214271 (TRBV25-1, TRBJ2-1)
CASSAYGQGRGVYEQFF

SEQ ID NO: 428543 - protein, 16 aa, Homo sapiens
  CDR3 for alpha chain variable domain of TCR clone 214272 (TRAV8-4, TRAJ18)
CAVTANGGSTRGRLCF

SEQ ID NO: 428544 - protein, 14 aa, Homo sapiens
  CDR3 for beta chain variable domain of TCR clone 214272 (TRBV12-4, TRBJ1-2)
CASSSAGHIYGYTF

SEQ ID NO: 428545 - protein, 15 aa, Homo sapiens
  CDR3 for alpha chain variable domain of TCR clone 214273 (TRAV8-6, TRAJ6)
CAVSGESGGIYIPTF

SEQ ID NO: 428546 - protein, 14 aa, Homo sapiens
  CDR3 for beta chain variable domain of TCR clone 214273 (TRBV7-9, TRBJ2-1)
CASSSMVGFGEQFF

SEQ ID NO: 428547 - protein, 16 aa, Homo sapiens
  CDR3 for alpha chain variable domain of TCR clone 214274 (TRAV3, TRAJ10)
CAVRDMRAGGGNKLTF

SEQ ID NO: 428548 - protein, 12 aa, Homo sapiens
  CDR3 for beta chain variable domain of TCR clone 214274 (TRBV11-2, TRBJ2-7)
CASSPPADEQYF

SEQ ID NO: 428549 - protein, 16 aa, Homo sapiens
  CDR3 for alpha chain variable domain of TCR clone 214275 (TRAV26-1, TRAJ45)
CIVEKYSGGGADGLTF

SEQ ID NO: 428550 - protein, 12 aa, Homo sapiens
  CDR3 for beta chain variable domain of TCR clone 214275 (TRBV7-8, TRBJ2-7)
CASSLGDREQYF

SEQ ID NO: 428551 - protein, 13 aa, Homo sapiens
  CDR3 for alpha chain variable domain of TCR clone 214276 (TRAV26-1, TRAJ48)
CIVLRVRNETLTF

SEQ ID NO: 428552 - protein, 14 aa, Homo sapiens
  CDR3 for beta chain variable domain of TCR clone 214276 (TRBV20-1, TRBJ1-5)
CSARDISKNQPQHF

SEQ ID NO: 428553 - protein, 14 aa, Homo sapiens
  CDR3 for alpha chain variable domain of TCR clone 214277 (TRAV12-1, TRAJ9)
CVVSIITGGFKTIF

SEQ ID NO: 428554 - protein, 17 aa, Homo sapiens
  CDR3 for beta chain variable domain of TCR clone 214277 (TRBV9, TRBJ2-1)
CASSVEPTGMARDEQFF

SEQ ID NO: 428555 - protein, 14 aa, Homo sapiens
  CDR3 for alpha chain variable domain of TCR clone 214278 (TRAV4, TRAJ31)
CLVGDRDNNARLMF

SEQ ID NO: 428556 - protein, 17 aa, Homo sapiens
  CDR3 for beta chain variable domain of TCR clone 214278 (TRBV11-2, TRBJ2-1)
CASSLYPPGVEYNEQFF

SEQ ID NO: 428557 - protein, 13 aa, Homo sapiens
  CDR3 for alpha chain variable domain of TCR clone 214279 (TRAV1-1, TRAJ29)
CAVRDRGNTPLVF

SEQ ID NO: 428558 - protein, 12 aa, Homo sapiens
  CDR3 for beta chain variable domain of TCR clone 214279 (TRBV12-4, TRBJ2-7)
CASSLGGYEQYF

SEQ ID NO: 428559 - protein, 12 aa, Homo sapiens
  CDR3 for alpha chain variable domain of TCR clone 214280 (TRAV8-3, TRAJ20)
CAVDFTDYKLSF

SEQ ID NO: 428560 - protein, 12 aa, Homo sapiens
  CDR3 for beta chain variable domain of TCR clone 214280 (TRBV29-1, TRBJ2-3)
CSVTGGADTQYF

SEQ ID NO: 428561 - protein, 16 aa, Homo sapiens
  CDR3 for alpha chain variable domain of TCR clone 214281 (TRAV3, TRAJ21)
CAVRDIERGNFNKFYF

SEQ ID NO: 428562 - protein, 14 aa, Homo sapiens
  CDR3 for beta chain variable domain of TCR clone 214281 (TRBV7-9, TRBJ2-5)
CASSLAFGQETQYF

SEQ ID NO: 428563 - protein, 12 aa, Homo sapiens
  CDR3 for alpha chain variable domain of TCR clone 214282 (TRAV17, TRAJ4)
CATDGGYNKLIF

SEQ ID NO: 428564 - protein, 13 aa, Homo sapiens
  CDR3 for beta chain variable domain of TCR clone 214282 (TRBV29-1, TRBJ2-2)
CSTTGVNSGELFF

SEQ ID NO: 428565 - protein, 11 aa, Homo sapiens
  CDR3 for alpha chain variable domain of TCR clone 214283 (TRAV13-2, TRAJ15)
CSHQAGTALIF

SEQ ID NO: 428566 - protein, 11 aa, Homo sapiens
  CDR3 for beta chain variable domain of TCR clone 214283 (TRBV7-9, TRBJ2-5)
CASSLGETQYF

SEQ ID NO: 428567 - protein, 13 aa, Homo sapiens
  CDR3 for alpha chain variable domain of TCR clone 214284 (TRAV12-3, TRAJ53)
CAMRGGSNYKLTF

SEQ ID NO: 428568 - protein, 15 aa, Homo sapiens
  CDR3 for beta chain variable domain of TCR clone 214284 (TRBV20-1, TRBJ2-7)
CSARDRVSGMDEQYF

SEQ ID NO: 428569 - protein, 16 aa, Homo sapiens
  CDR3 for alpha chain variable domain of TCR clone 214285 (TRAV21, TRAJ52)
CAVTNAGGTSYGKLTF

SEQ ID NO: 428570 - protein, 13 aa, Homo sapiens
  CDR3 for beta chain variable domain of TCR clone 214285 (TRBV4-1, TRBJ2-2)
CASSQENTGELFF

SEQ ID NO: 428571 - protein, 14 aa, Homo sapiens
  CDR3 for alpha chain variable domain of TCR clone 214286 (TRAV12-1, TRAJ3)
CVVNPGSSPSKIIF

SEQ ID NO: 428572 - protein, 14 aa, Homo sapiens
  CDR3 for beta chain variable domain of TCR clone 214286 (TRBV20-1, TRBJ2-3)
CSARGGTSTDTQYF

SEQ ID NO: 428573 - protein, 14 aa, Homo sapiens
  CDR3 for alpha chain variable domain of TCR clone 214287 (TRAV17, TRAJ39)
CAPDPVRAGNMLTF

SEQ ID NO: 428574 - protein, 13 aa, Homo sapiens
  CDR3 for beta chain variable domain of TCR clone 214287 (TRBV19, TRBJ1-2)
CASSVPGQDGYTF

SEQ ID NO: 428575 - protein, 16 aa, Homo sapiens
  CDR3 for alpha chain variable domain of TCR clone 214288 (TRAV22, TRAJ45)
CAVERGKRGGADGLTF

SEQ ID NO: 428576 - protein, 13 aa, Homo sapiens
  CDR3 for beta chain variable domain of TCR clone 214288 (TRBV7-3, TRBJ1-1)
CASSQDWGAEAFF

SEQ ID NO: 428577 - protein, 14 aa, Homo sapiens
  CDR3 for alpha chain variable domain of TCR clone 214289 (TRAV13-1, TRAJ26)
CAASSAHYGQNCVF

SEQ ID NO: 428578 - protein, 17 aa, Homo sapiens
  CDR3 for beta chain variable domain of TCR clone 214289 (TRBV25-1, TRBJ2-5)
CASSRRGGRGGQETQYF

SEQ ID NO: 428579 - protein, 13 aa, Homo sapiens
  CDR3 for alpha chain variable domain of TCR clone 214290 (TRAV12-2, TRAJ24)
CAVSTDSWGKLKF

SEQ ID NO: 428580 - protein, 12 aa, Homo sapiens
  CDR3 for beta chain variable domain of TCR clone 214290 (TRBV7-6, TRBJ2-7)
CASSLADSEQYF

SEQ ID NO: 428581 - protein, 21 aa, Homo sapiens
  CDR3 for alpha chain variable domain of TCR clone 214291 (TRAV1-1, TRAJ6)
CLLLLRCERLERTGGSYITTF

SEQ ID NO: 428582 - protein, 13 aa, Homo sapiens
  CDR3 for beta chain variable domain of TCR clone 214291 (TRBV5-1, TRBJ1-4)
CASSLNSGEKLFF

SEQ ID NO: 428583 - protein, 11 aa, Homo sapiens
  CDR3 for alpha chain variable domain of TCR clone 214292 (TRAV20, TRAJ31)
CAVQMRARLMF

SEQ ID NO: 428584 - protein, 12 aa, Homo sapiens
  CDR3 for beta chain variable domain of TCR clone 214292 (TRBV5-1, TRBJ2-7)
CASSLDSYEQYF

SEQ ID NO: 428585 - protein, 14 aa, Homo sapiens
  CDR3 for alpha chain variable domain of TCR clone 214293 (TRAV12-2, TRAJ53)
CRERGGGSNYKLTF

SEQ ID NO: 428586 - protein, 17 aa, Homo sapiens
  CDR3 for beta chain variable domain of TCR clone 214293 (TRBV7-3, TRBJ2-3)
RASSLMKRMRGAATQYF

SEQ ID NO: 428587 - protein, 15 aa, Homo sapiens
  CDR3 for alpha chain variable domain of TCR clone 214294 (TRAV2, TRAJ22)
CAVPSRGGSARQLTF

SEQ ID NO: 428588 - protein, 13 aa, Homo sapiens
  CDR3 for beta chain variable domain of TCR clone 214294 (TRBV20-1, TRBJ1-1)
CSARGGGNTEAFF

SEQ ID NO: 428589 - protein, 15 aa, Homo sapiens
  CDR3 for alpha chain variable domain of TCR clone 214295 (TRAV9-2, TRAJ10)
CALIDLGGGGNKLTF

SEQ ID NO: 428590 - protein, 15 aa, Homo sapiens
  CDR3 for beta chain variable domain of TCR clone 214295 (TRBV6-6, TRBJ2-1)
CATRQGVSSYNEQFF

SEQ ID NO: 428591 - protein, 11 aa, Homo sapiens
  CDR3 for alpha chain variable domain of TCR clone 214296 (TRAV13-1, TRAJ6)
CATLGSYIPTF

SEQ ID NO: 428592 - protein, 12 aa, Homo sapiens
  CDR3 for beta chain variable domain of TCR clone 214296 (TRBV11-2, TRBJ2-1)
CASSPGNNEQSF

SEQ ID NO: 428593 - protein, 12 aa, Homo sapiens
  CDR3 for alpha chain variable domain of TCR clone 214297 (TRAV2, TRAJ5)
CALDTVRRALTF

SEQ ID NO: 428594 - protein, 15 aa, Homo sapiens
  CDR3 for beta chain variable domain of TCR clone 214297 (TRBV10-3, TRBJ2-1)
CAISDVQDRAYEQFF

SEQ ID NO: 428595 - protein, 14 aa, Homo sapiens
  CDR3 for alpha chain variable domain of TCR clone 214298 (TRAV38-1, TRAJ43)
CAFMKHNNDNDMRF

SEQ ID NO: 428596 - protein, 17 aa, Homo sapiens
  CDR3 for beta chain variable domain of TCR clone 214298 (TRBV7-7, TRBJ1-4)
CASSLVGQGASNEKLFF

SEQ ID NO: 428597 - protein, 14 aa, Homo sapiens
  CDR3 for alpha chain variable domain of TCR clone 214299 (TRAV8-3, TRAJ39)
CAVGANNAGNMLTF

SEQ ID NO: 428598 - protein, 13 aa, Homo sapiens
  CDR3 for beta chain variable domain of TCR clone 214299 (TRBV3-1, TRBJ2-5)
CATSPVLSETQYF

SEQ ID NO: 428599 - protein, 16 aa, Homo sapiens
  CDR3 for alpha chain variable domain of TCR clone 214300 (TRAV17, TRAJ9)
CATGEWGGTGGFKTIF

SEQ ID NO: 428600 - protein, 15 aa, Homo sapiens
  CDR3 for beta chain variable domain of TCR clone 214300 (TRBV20-1, TRBJ1-2)
CSARDSRGRNYGYAF

SEQ ID NO: 428601 - protein, 15 aa, Homo sapiens
  CDR3 for alpha chain variable domain of TCR clone 214301 (TRAV27, TRAJ38)
CAARRNAGHNRKLLW

SEQ ID NO: 428602 - protein, 13 aa, Homo sapiens
  CDR3 for beta chain variable domain of TCR clone 214301 (TRBV12-5, TRBJ2-3)
CASGERQSDTQYF

SEQ ID NO: 428603 - protein, 15 aa, Homo sapiens
  CDR3 for alpha chain variable domain of TCR clone 214302 (TRAV23/DV6, TRAJ18)
CAARYRGSTPGRLYF

SEQ ID NO: 428604 - protein, 13 aa, Homo sapiens
  CDR3 for beta chain variable domain of TCR clone 214302 (TRBV7-2, TRBJ2-7)
CARSSPSGSEQYF

SEQ ID NO: 428605 - protein, 16 aa, Homo sapiens
  CDR3 for alpha chain variable domain of TCR clone 214303 (TRAV12-3, TRAJ53)
CAMSPGSGGSNYKLTF

SEQ ID NO: 428606 - protein, 17 aa, Homo sapiens
  CDR3 for beta chain variable domain of TCR clone 214303 (TRBV5-5, TRBJ1-2)
CASSLGSLDGQSEGYTF

SEQ ID NO: 428607 - protein, 14 aa, Homo sapiens
  CDR3 for alpha chain variable domain of TCR clone 214304 (TRAV1-2, TRAJ8)
CAVREDTGFQKLVF

SEQ ID NO: 428608 - protein, 13 aa, Homo sapiens
  CDR3 for beta chain variable domain of TCR clone 214304 (TRBV12-4, TRBJ1-2)
CASSSGLTVISTC

SEQ ID NO: 428609 - protein, 14 aa, Homo sapiens
  CDR3 for alpha chain variable domain of TCR clone 214305 (TRAV8-3, TRAJ16)
CAVDRFSDGQKLLF

SEQ ID NO: 428610 - protein, 15 aa, Homo sapiens
  CDR3 for beta chain variable domain of TCR clone 214305 (TRBV7-6, TRBJ2-1)
CASSPGEGRYNEQFF

SEQ ID NO: 428611 - protein, 15 aa, Homo sapiens
  CDR3 for alpha chain variable domain of TCR clone 214306 (TRAV4, TRAJ39)
CLVGPNNNAGNMLTF

SEQ ID NO: 428612 - protein, 13 aa, Homo sapiens
  CDR3 for beta chain variable domain of TCR clone 214306 (TRBV11-2, TRBJ2-5)
CASSSTGEETQHF

SEQ ID NO: 428613 - protein, 15 aa, Homo sapiens
  CDR3 for alpha chain variable domain of TCR clone 214307 (TRAV12-3, TRAJ27)
CAMRAYNTNAGKSTF

SEQ ID NO: 428614 - protein, 13 aa, Homo sapiens
  CDR3 for beta chain variable domain of TCR clone 214307 (TRBV11-2, TRBJ2-5)
CDSSRGPSETQYF

SEQ ID NO: 428615 - protein, 15 aa, Homo sapiens
  CDR3 for alpha chain variable domain of TCR clone 214308 (TRAV27, TRAJ50)
CAGVGRGTSYDNVIF

SEQ ID NO: 428616 - protein, 14 aa, Homo sapiens
  CDR3 for beta chain variable domain of TCR clone 214308 (TRBV7-2, TRBJ1-1)
CASSFYDLNTEAFF

SEQ ID NO: 428617 - protein, 15 aa, Homo sapiens
  CDR3 for alpha chain variable domain of TCR clone 214309 (TRAV2, TRAJ11)
CAVGGRNSGYSTLTF

SEQ ID NO: 428618 - protein, 13 aa, Homo sapiens
  CDR3 for beta chain variable domain of TCR clone 214309 (TRBV20-1, TRBJ2-1)
QCSNRRVRNEQFF

SEQ ID NO: 428619 - protein, 16 aa, Homo sapiens
  CDR3 for alpha chain variable domain of TCR clone 214310 (TRAV26-1, TRAJ32)
FIVRTNYGGATNKPIF

SEQ ID NO: 428620 - protein, 14 aa, Homo sapiens
  CDR3 for beta chain variable domain of TCR clone 214310 (TRBV27, TRBJ1-1)
CASSLLSGLSEAFF

SEQ ID NO: 428621 - protein, 12 aa, Homo sapiens
  CDR3 for alpha chain variable domain of TCR clone 214311 (TRAV23/DV6, TRAJ30)
CAASKGDDKIIF

SEQ ID NO: 428622 - protein, 18 aa, Homo sapiens
  CDR3 for beta chain variable domain of TCR clone 214311 (TRBV10-3, TRBJ2-3)
CAISESRVGPMRGDTQDF

SEQ ID NO: 428623 - protein, 12 aa, Homo sapiens
  CDR3 for alpha chain variable domain of TCR clone 214312 (TRAV1-1, TRAJ39)
CAVPVVGNMLTF

SEQ ID NO: 428624 - protein, 16 aa, Homo sapiens
  CDR3 for beta chain variable domain of TCR clone 214312 (TRBV4-1, TRBJ1-2)
CASSQDAGQVLYGYTF

SEQ ID NO: 428625 - protein, 15 aa, Homo sapiens
  CDR3 for alpha chain variable domain of TCR clone 214313 (TRAV3, TRAJ20)
CAVRDSRSNDYKLSF

SEQ ID NO: 428626 - protein, 14 aa, Homo sapiens
  CDR3 for beta chain variable domain of TCR clone 214313 (TRBV20-1, TRBJ2-7)
RSARRGNGIYEQYF

SEQ ID NO: 428627 - protein, 14 aa, Homo sapiens
  CDR3 for alpha chain variable domain of TCR clone 214314 (TRAV26-1, TRAJ38)
CIADNAGNNRKLIW

SEQ ID NO: 428628 - protein, 15 aa, Homo sapiens
  CDR3 for beta chain variable domain of TCR clone 214314 (TRBV7-6, TRBJ1-4)
CASSLGAGAGKKLFF

SEQ ID NO: 428629 - protein, 15 aa, Homo sapiens
  CDR3 for alpha chain variable domain of TCR clone 214315 (TRAV2, TRAJ24)
CAVVRLKNSWGKLQF

SEQ ID NO: 428630 - protein, 16 aa, Homo sapiens
  CDR3 for beta chain variable domain of TCR clone 214315 (TRBV7-7, TRBJ2-3)
CASSPGTSASTDTQYF

SEQ ID NO: 428631 - protein, 14 aa, Homo sapiens
  CDR3 for alpha chain variable domain of TCR clone 214316 (TRAV9-2, TRAJ39)
CALYIYNAGNMLTF

SEQ ID NO: 428632 - protein, 12 aa, Homo sapiens
  CDR3 for beta chain variable domain of TCR clone 214316 (TRBV28, TRBJ2-7)
CASSGRPYEQYF

SEQ ID NO: 428633 - protein, 14 aa, Homo sapiens
  CDR3 for alpha chain variable domain of TCR clone 214317 (TRAV17, TRAJ57)
CATDASGGSEKLVF

SEQ ID NO: 428634 - protein, 14 aa, Homo sapiens
  CDR3 for beta chain variable domain of TCR clone 214317 (TRBV4-2, TRBJ2-1)
CASGLDRAYNEQFF

SEQ ID NO: 428635 - protein, 17 aa, Homo sapiens
  CDR3 for alpha chain variable domain of TCR clone 214318 (TRAV3, TRAJ7)
CAVREMLPLEGTTDSLL

SEQ ID NO: 428636 - protein, 17 aa, Homo sapiens
  CDR3 for beta chain variable domain of TCR clone 214318 (TRBV15, TRBJ1-2)
CATSGREIDVVNYGYTF

SEQ ID NO: 428637 - protein, 11 aa, Homo sapiens
  CDR3 for alpha chain variable domain of TCR clone 214319 (TRAV20, TRAJ23)
CACNQGGKLIF

SEQ ID NO: 428638 - protein, 16 aa, Homo sapiens
  CDR3 for beta chain variable domain of TCR clone 214319 (TRBV7-8, TRBJ2-5)
CASSFCGQPAQETQYF

SEQ ID NO: 428639 - protein, 14 aa, Homo sapiens
  CDR3 for alpha chain variable domain of TCR clone 214320 (TRAV26-1, TRAJ21)
CIVRPPYNFNKFYF

SEQ ID NO: 428640 - protein, 13 aa, Homo sapiens
  CDR3 for beta chain variable domain of TCR clone 214320 (TRBV7-7, TRBJ2-3)
CASSLSRADTQYF

SEQ ID NO: 428641 - protein, 12 aa, Homo sapiens
  CDR3 for alpha chain variable domain of TCR clone 214321 (TRAV27, TRAJ9)
GAGESGGFKTIF

SEQ ID NO: 428642 - protein, 18 aa, Homo sapiens
  CDR3 for beta chain variable domain of TCR clone 214321 (TRBV10-2, TRBJ2-2)
CISAPAVHRQADAGELFF

SEQ ID NO: 428643 - protein, 13 aa, Homo sapiens
  CDR3 for alpha chain variable domain of TCR clone 214322 (TRAV1-2, TRAJ12)
CAVSMDSSYKLIF

SEQ ID NO: 428644 - protein, 19 aa, Homo sapiens
  CDR3 for beta chain variable domain of TCR clone 214322 (TRBV25-1, TRBJ2-2)
CAILVYRVDRGRKTGELFF

SEQ ID NO: 428645 - protein, 15 aa, Homo sapiens
  CDR3 for alpha chain variable domain of TCR clone 214323 (TRAV21, TRAJ24)
CAARSSTDSWGKLQF

SEQ ID NO: 428646 - protein, 19 aa, Homo sapiens
  CDR3 for beta chain variable domain of TCR clone 214323 (TRBV14, TRBJ2-1)
CASSQDPLWEAPEYNEQFF

SEQ ID NO: 428647 - protein, 14 aa, Homo sapiens
  CDR3 for alpha chain variable domain of TCR clone 214324 (TRAV1-2, TRAJ8)
CAVREDTGFQKLVF

SEQ ID NO: 428648 - protein, 16 aa, Homo sapiens
  CDR3 for beta chain variable domain of TCR clone 214324 (TRBV20-1, TRBJ1-4)
CSAPGQGLLTNAKLFF

SEQ ID NO: 428649 - protein, 15 aa, Homo sapiens
  CDR3 for alpha chain variable domain of TCR clone 214325 (TRAV23/DV6, TRAJ13)
CAAWPGGGGYQKVTF

SEQ ID NO: 428650 - protein, 17 aa, Homo sapiens
  CDR3 for beta chain variable domain of TCR clone 214325 (TRBV19, TRBJ2-7)
CASSISFYDRYPYEQYF

SEQ ID NO: 428651 - protein, 16 aa, Homo sapiens
  CDR3 for alpha chain variable domain of TCR clone 214326 (TRAV17, TRAJ28)
CATASFSGAGSYQLTF

SEQ ID NO: 428652 - protein, 11 aa, Homo sapiens
  CDR3 for beta chain variable domain of TCR clone 214326 (TRBV7-9, TRBJ2-5)
CSSSLGETQYF

SEQ ID NO: 428653 - protein, 13 aa, Homo sapiens
  CDR3 for alpha chain variable domain of TCR clone 214327 (TRAV8-1, TRAJ34)
CAVNGKGTDKLVF

SEQ ID NO: 428654 - protein, 13 aa, Homo sapiens
  CDR3 for beta chain variable domain of TCR clone 214327 (TRBV20-1, TRBJ2-5)
CSARLAGVETQYF

SEQ ID NO: 428655 - protein, 16 aa, Homo sapiens
  CDR3 for alpha chain variable domain of TCR clone 214328 (TRAV13-1, TRAJ48)
CAASIFGNFGNEKLTF

SEQ ID NO: 428656 - protein, 16 aa, Homo sapiens
  CDR3 for beta chain variable domain of TCR clone 214328 (TRBV7-2, TRBJ2-6)
CASSERRASGANVLSF

SEQ ID NO: 428657 - protein, 14 aa, Homo sapiens
  CDR3 for alpha chain variable domain of TCR clone 214329 (TRAV1-2, TRAJ16)
CGVNRFSDGQKLLF

SEQ ID NO: 428658 - protein, 14 aa, Homo sapiens
  CDR3 for beta chain variable domain of TCR clone 214329 (TRBV23-1, TRBJ2-5)
CASSFLRSQETQYF

SEQ ID NO: 428659 - protein, 14 aa, Homo sapiens
  CDR3 for alpha chain variable domain of TCR clone 214330 (TRAV27, TRAJ36)
CAGPPKRGANNLFF

SEQ ID NO: 428660 - protein, 15 aa, Homo sapiens
  CDR3 for beta chain variable domain of TCR clone 214330 (TRBV18, TRBJ2-7)
FPSPPASTPNYEQYF

SEQ ID NO: 428661 - protein, 13 aa, Homo sapiens
  CDR3 for alpha chain variable domain of TCR clone 214331 (TRAV2, TRAJ40)
CAVVTSGTYKYIF

SEQ ID NO: 428662 - protein, 16 aa, Homo sapiens
  CDR3 for beta chain variable domain of TCR clone 214331 (TRBV7-9, TRBJ1-2)
CASSPGGGAINYGYTF

SEQ ID NO: 428663 - protein, 16 aa, Homo sapiens
  CDR3 for alpha chain variable domain of TCR clone 214332 (TRAV3, TRAJ10)
CAVRDMRAGGGNKLTF

SEQ ID NO: 428664 - protein, 16 aa, Homo sapiens
  CDR3 for beta chain variable domain of TCR clone 214332 (TRBV28, TRBJ2-2)
CTSVPARRSGDGELFF

SEQ ID NO: 428665 - protein, 11 aa, Homo sapiens
  CDR3 for alpha chain variable domain of TCR clone 214333 (TRAV12-1, TRAJ21)
CVVYNFNKFYF

SEQ ID NO: 428666 - protein, 16 aa, Homo sapiens
  CDR3 for beta chain variable domain of TCR clone 214333 (TRBV6-5, TRBJ2-7)
GASSYFRVGISDEQYF

SEQ ID NO: 428667 - protein, 14 aa, Homo sapiens
  CDR3 for alpha chain variable domain of TCR clone 214334 (TRAV13-2, TRAJ10)
CAENITGGGNKLTF

SEQ ID NO: 428668 - protein, 14 aa, Homo sapiens
  CDR3 for beta chain variable domain of TCR clone 214334 (TRBV7-2, TRBJ2-7)
CANSPKTSFYEQYF

SEQ ID NO: 428669 - protein, 15 aa, Homo sapiens
  CDR3 for alpha chain variable domain of TCR clone 214335 (TRAV26-1, TRAJ29)
CIVRVEGSGNTPLVF

SEQ ID NO: 428670 - protein, 19 aa, Homo sapiens
  CDR3 for beta chain variable domain of TCR clone 214335 (TRBV7-9, TRBJ2-6)
CASSLESATVLPGANVLTF

SEQ ID NO: 428671 - protein, 13 aa, Homo sapiens
  CDR3 for alpha chain variable domain of TCR clone 214336 (TRAV8-6, TRAJ50)
CALIKTSYDRVIF

SEQ ID NO: 428672 - protein, 15 aa, Homo sapiens
  CDR3 for beta chain variable domain of TCR clone 214336 (TRBV7-2, TRBJ2-2)
CASRRPGQNTGELFF

SEQ ID NO: 428673 - protein, 13 aa, Homo sapiens
  CDR3 for alpha chain variable domain of TCR clone 214337 (TRAV13-1, TRAJ6)
CAARRGGSYIPTF

SEQ ID NO: 428674 - protein, 12 aa, Homo sapiens
  CDR3 for beta chain variable domain of TCR clone 214337 (TRBV11-2, TRBJ2-2)
CASSLGGGELFF

SEQ ID NO: 428675 - protein, 15 aa, Homo sapiens
  CDR3 for alpha chain variable domain of TCR clone 214338 (TRAV8-3, TRAJ23)
CAVGDRYNQGGKLIF

SEQ ID NO: 428676 - protein, 11 aa, Homo sapiens
  CDR3 for beta chain variable domain of TCR clone 214338 (TRBV29-1, TRBJ2-5)
CSEDRTGTQYF

SEQ ID NO: 428677 - protein, 14 aa, Homo sapiens
  CDR3 for alpha chain variable domain of TCR clone 214339 (TRAV8-3, TRAJ39)
CAVGANNAGNMLTF

SEQ ID NO: 428678 - protein, 12 aa, Homo sapiens
  CDR3 for beta chain variable domain of TCR clone 214339 (TRBV11-2, TRBJ2-2)
CASSLGGGELFF

SEQ ID NO: 428679 - protein, 16 aa, Homo sapiens
  CDR3 for alpha chain variable domain of TCR clone 214340 (TRAV17, TRAJ53)
CATDSLRGGSNYKLTF

SEQ ID NO: 428680 - protein, 12 aa, Homo sapiens
  CDR3 for beta chain variable domain of TCR clone 214340 (TRBV5-1, TRBJ2-7)
CASSFRGYEQYF

SEQ ID NO: 428681 - protein, 13 aa, Homo sapiens
  CDR3 for alpha chain variable domain of TCR clone 214341 (TRAV26-1, TRAJ29)
CIVRRSGNTPLVF

SEQ ID NO: 428682 - protein, 14 aa, Homo sapiens
  CDR3 for beta chain variable domain of TCR clone 214341 (TRBV11-2, TRBJ2-7)
CASSLGAGAYEQYF

SEQ ID NO: 428683 - protein, 19 aa, Homo sapiens
  CDR3 for alpha chain variable domain of TCR clone 214342 (TRAV1-2, TRAJ26)
CLLPLCCERPDNYGQNFVF

SEQ ID NO: 428684 - protein, 19 aa, Homo sapiens
  CDR3 for beta chain variable domain of TCR clone 214342 (TRBV20-1, TRBJ2-5)
CSARPQGLAGTSKSGTQYF

SEQ ID NO: 428685 - protein, 18 aa, Homo sapiens
  CDR3 for alpha chain variable domain of TCR clone 214343 (TRAV26-1, TRAJ56)
CIVRGASRVTGANSKLTF

SEQ ID NO: 428686 - protein, 15 aa, Homo sapiens
  CDR3 for beta chain variable domain of TCR clone 214343 (TRBV7-9, TRBJ2-5)
CASSDTGRGRETQYF

SEQ ID NO: 428687 - protein, 12 aa, Homo sapiens
  CDR3 for alpha chain variable domain of TCR clone 214344 (TRAV12-2, TRAJ8)
CAVTTGFQKLVF

SEQ ID NO: 428688 - protein, 15 aa, Homo sapiens
  CDR3 for beta chain variable domain of TCR clone 214344 (TRBV7-8, TRBJ1-5)
CASSLERRGLEPQHF

SEQ ID NO: 428689 - protein, 14 aa, Homo sapiens
  CDR3 for alpha chain variable domain of TCR clone 214345 (TRAV26-1, TRAJ21)
CIVRHPYNFNKFYF

SEQ ID NO: 428690 - protein, 18 aa, Homo sapiens
  CDR3 for beta chain variable domain of TCR clone 214345 (TRBV11-2, TRBJ2-3)
CASSLGGASRGAPNTQYF

SEQ ID NO: 428691 - protein, 16 aa, Homo sapiens
  CDR3 for alpha chain variable domain of TCR clone 214346 (TRAV30, TRAJ24)
CGTEIVDADSWGKFQF

SEQ ID NO: 428692 - protein, 13 aa, Homo sapiens
  CDR3 for beta chain variable domain of TCR clone 214346 (TRBV7-2, TRBJ1-4)
CASSLSGLEKLFF

SEQ ID NO: 428693 - protein, 14 aa, Homo sapiens
  CDR3 for alpha chain variable domain of TCR clone 214347 (TRAV8-4, TRAJ12)
CAVSPMDSSYKLIF

SEQ ID NO: 428694 - protein, 15 aa, Homo sapiens
  CDR3 for beta chain variable domain of TCR clone 214347 (TRBV5-5, TRBJ2-1)
CASSPEAETYNEQCF

SEQ ID NO: 428695 - protein, 18 aa, Homo sapiens
  CDR3 for alpha chain variable domain of TCR clone 214348 (TRAV26-2, TRAJ54)
CVLRDVEVGIQGAQKLVF

SEQ ID NO: 428696 - protein, 16 aa, Homo sapiens
  CDR3 for beta chain variable domain of TCR clone 214348 (TRBV6-1, TRBJ2-5)
CASSETLDRGAETQYF

SEQ ID NO: 428697 - protein, 15 aa, Homo sapiens
  CDR3 for alpha chain variable domain of TCR clone 214349 (TRAV27, TRAJ38)
CAARRNAGNNRKLIW

SEQ ID NO: 428698 - protein, 17 aa, Homo sapiens
  CDR3 for beta chain variable domain of TCR clone 214349 (TRBV20-1, TRBJ2-1)
CSASSSGLAGSYNEQFF

SEQ ID NO: 428699 - protein, 16 aa, Homo sapiens
  CDR3 for alpha chain variable domain of TCR clone 214350 (TRAV3, TRAJ42)
CAVRYIEGGSQGNLIF

SEQ ID NO: 428700 - protein, 14 aa, Homo sapiens
  CDR3 for beta chain variable domain of TCR clone 214350 (TRBV18, TRBJ1-1)
CASSPPTGRTEAFF

SEQ ID NO: 428701 - protein, 14 aa, Homo sapiens
  CDR3 for alpha chain variable domain of TCR clone 214351 (TRAV5, TRAJ4)
CAASFSGGYNKLIF

SEQ ID NO: 428702 - protein, 13 aa, Homo sapiens
  CDR3 for beta chain variable domain of TCR clone 214351 (TRBV2, TRBJ2-7)
CASSVGGSGEQYF

SEQ ID NO: 428703 - protein, 12 aa, Homo sapiens
  CDR3 for alpha chain variable domain of TCR clone 214352 (TRAV12-3, TRAJ17)
RAMTLTGNKLTF

SEQ ID NO: 428704 - protein, 15 aa, Homo sapiens
  CDR3 for beta chain variable domain of TCR clone 214352 (TRBV4-1, TRBJ1-4)
CASSDTGGTNEKLFF

SEQ ID NO: 428705 - protein, 15 aa, Homo sapiens
  CDR3 for alpha chain variable domain of TCR clone 214353 (TRAV1-1, TRAJ24)
CALSGGTDSWGKFTF

SEQ ID NO: 428706 - protein, 16 aa, Homo sapiens
  CDR3 for beta chain variable domain of TCR clone 214353 (TRBV2, TRBJ2-7)
CASSEPWTGPSYEQYF

SEQ ID NO: 428707 - protein, 15 aa, Homo sapiens
  CDR3 for alpha chain variable domain of TCR clone 214354 (TRAV3, TRAJ22)
CAVRDRGGSARQLTF

SEQ ID NO: 428708 - protein, 15 aa, Homo sapiens
  CDR3 for beta chain variable domain of TCR clone 214354 (TRBV11-2, TRBJ1-6)
CASTLRGTGNSPLHF

SEQ ID NO: 428709 - protein, 14 aa, Homo sapiens
  CDR3 for alpha chain variable domain of TCR clone 214355 (TRAV8-3, TRAJ36)
CAAVGNNGANNLFF

SEQ ID NO: 428710 - protein, 14 aa, Homo sapiens
  CDR3 for beta chain variable domain of TCR clone 214355 (TRBV7-9, TRBJ1-2)
CASSRQGANYGYTF

SEQ ID NO: 428711 - protein, 14 aa, Homo sapiens
  CDR3 for alpha chain variable domain of TCR clone 214356 (TRAV16, TRAJ32)
CSKRYDGATNKLIF

SEQ ID NO: 428712 - protein, 12 aa, Homo sapiens
  CDR3 for beta chain variable domain of TCR clone 214356 (TRBV7-9, TRBJ2-7)
CATRTDAYEQYF

SEQ ID NO: 428713 - protein, 13 aa, Homo sapiens
  CDR3 for alpha chain variable domain of TCR clone 214357 (TRAV20, TRAJ48)
CAVQGVENAKLTF

SEQ ID NO: 428714 - protein, 19 aa, Homo sapiens
  CDR3 for beta chain variable domain of TCR clone 214357 (TRBV2, TRBJ2-2)
CASSQPGLAGGGNTGELFF

SEQ ID NO: 428715 - protein, 17 aa, Homo sapiens
  CDR3 for alpha chain variable domain of TCR clone 214358 (TRAV40, TRAJ45)
CLLGDEKGGGGADGLTF

SEQ ID NO: 428716 - protein, 16 aa, Homo sapiens
  CDR3 for beta chain variable domain of TCR clone 214358 (TRBV29-1, TRBJ1-2)
CSVEANRDIANYGYTF

SEQ ID NO: 428717 - protein, 15 aa, Homo sapiens
  CDR3 for alpha chain variable domain of TCR clone 214359 (TRAV21, TRAJ52)
CAVRGGGTSYGTLTF

SEQ ID NO: 428718 - protein, 12 aa, Homo sapiens
  CDR3 for beta chain variable domain of TCR clone 214359 (TRBV11-2, TRBJ2-2)
CASSLGGGELFF

SEQ ID NO: 428719 - protein, 14 aa, Homo sapiens
  CDR3 for alpha chain variable domain of TCR clone 214360 (TRAV1-2, TRAJ29)
CAVRTDSGNTPLVF

SEQ ID NO: 428720 - protein, 15 aa, Homo sapiens
  CDR3 for beta chain variable domain of TCR clone 214360 (TRBV19, TRBJ1-1)
CASTSGQIQNTEAFF

SEQ ID NO: 428721 - protein, 15 aa, Homo sapiens
  CDR3 for alpha chain variable domain of TCR clone 214361 (TRAV8-3, TRAJ11)
CAVGLLNSGYSTLAF

SEQ ID NO: 428722 - protein, 16 aa, Homo sapiens
  CDR3 for beta chain variable domain of TCR clone 214361 (TRBV13, TRBJ2-2)
CASSPRTGEHTGELFF

SEQ ID NO: 428723 - protein, 13 aa, Homo sapiens
  CDR3 for alpha chain variable domain of TCR clone 214362 (TRAV27, TRAJ41)
CAEEGNSGYALNF

SEQ ID NO: 428724 - protein, 14 aa, Homo sapiens
  CDR3 for beta chain variable domain of TCR clone 214362 (TRBV25-1, TRBJ1-1)
CASTHLGGNTEAFF

SEQ ID NO: 428725 - protein, 13 aa, Homo sapiens
  CDR3 for alpha chain variable domain of TCR clone 214363 (TRAV12-3, TRAJ21)
CAPGPHNFNKFYF

SEQ ID NO: 428726 - protein, 20 aa, Homo sapiens
  CDR3 for beta chain variable domain of TCR clone 214363 (TRBV7-8, TRBJ2-2)
CASSHLFPGPTIHITGELFF

SEQ ID NO: 428727 - protein, 16 aa, Homo sapiens
  CDR3 for alpha chain variable domain of TCR clone 214364 (TRAV30, TRAJ24)
CGTEIVDADSWGKFQS

SEQ ID NO: 428728 - protein, 15 aa, Homo sapiens
  CDR3 for beta chain variable domain of TCR clone 214364 (TRBV15, TRBJ1-5)
CATSRDPVSNQPQHF

SEQ ID NO: 428729 - protein, 12 aa, Homo sapiens
  CDR3 for alpha chain variable domain of TCR clone 214365 (TRAV21, TRAJ3)
CCFYSSASKLIF

SEQ ID NO: 428730 - protein, 16 aa, Homo sapiens
  CDR3 for beta chain variable domain of TCR clone 214365 (TRBV19, TRBJ2-1)
CASSKAGPSSYNEQFL

SEQ ID NO: 428731 - protein, 12 aa, Homo sapiens
  CDR3 for alpha chain variable domain of TCR clone 214366 (TRAV13-2, TRAJ8)
CAPWLGFQKLVF

SEQ ID NO: 428732 - protein, 16 aa, Homo sapiens
  CDR3 for beta chain variable domain of TCR clone 214366 (TRBV12-4, TRBJ2-5)
CASSPGTSGRQETQYF

SEQ ID NO: 428733 - protein, 14 aa, Homo sapiens
  CDR3 for alpha chain variable domain of TCR clone 214367 (TRAV17, TRAJ12)
CATDEKDSSYKWIF

SEQ ID NO: 428734 - protein, 16 aa, Homo sapiens
  CDR3 for beta chain variable domain of TCR clone 214367 (TRBV11-2, TRBJ2-1)
CASSPRLAGVYNEQFF

SEQ ID NO: 428735 - protein, 13 aa, Homo sapiens
  CDR3 for alpha chain variable domain of TCR clone 214368 (TRAV12-1, TRAJ34)
CVVTGYNTDKLIF

SEQ ID NO: 428736 - protein, 13 aa, Homo sapiens
  CDR3 for beta chain variable domain of TCR clone 214368 (TRBV28, TRBJ2-7)
CASKGGGVYEQYF

SEQ ID NO: 428737 - protein, 11 aa, Homo sapiens
  CDR3 for alpha chain variable domain of TCR clone 214369 (TRAV12-2, TRAJ33)
CAVTSNSQLIW

SEQ ID NO: 428738 - protein, 14 aa, Homo sapiens
  CDR3 for beta chain variable domain of TCR clone 214369 (TRBV12-4, TRBJ2-2)
CASNQGANTGELFF

SEQ ID NO: 428739 - protein, 14 aa, Homo sapiens
  CDR3 for alpha chain variable domain of TCR clone 214370 (TRAV8-3, TRAJ15)
CAVGRHQAGTALIF

SEQ ID NO: 428740 - protein, 13 aa, Homo sapiens
  CDR3 for beta chain variable domain of TCR clone 214370 (TRBV9, TRBJ2-7)
CASSASDSYGQYF

SEQ ID NO: 428741 - protein, 16 aa, Homo sapiens
  CDR3 for alpha chain variable domain of TCR clone 214371 (TRAV30, TRAJ24)
CGTEIVDADSWGKFQF

SEQ ID NO: 428742 - protein, 13 aa, Homo sapiens
  CDR3 for beta chain variable domain of TCR clone 214371 (TRBV7-6, TRBJ1-2)
CASSLGQGRGYTF

SEQ ID NO: 428743 - protein, 13 aa, Homo sapiens
  CDR3 for alpha chain variable domain of TCR clone 214372 (TRAV29/DV5, TRAJ49)
CAASTNTGNQIYS

SEQ ID NO: 428744 - protein, 14 aa, Homo sapiens
  CDR3 for beta chain variable domain of TCR clone 214372 (TRBV7-2, TRBJ2-7)
CASSLPPGQGPQYF

SEQ ID NO: 428745 - protein, 16 aa, Homo sapiens
  CDR3 for alpha chain variable domain of TCR clone 214373 (TRAV17, TRAJ53)
CATDALSGGSNYKLTF

SEQ ID NO: 428746 - protein, 14 aa, Homo sapiens
  CDR3 for beta chain variable domain of TCR clone 214373 (TRBV7-9, TRBJ1-1)
CASSSTKGNTEAFF

SEQ ID NO: 428747 - protein, 16 aa, Homo sapiens
  CDR3 for alpha chain variable domain of TCR clone 214374 (TRAV26-1, TRAJ37)
CIVRGDGSGNTGKLIV

SEQ ID NO: 428748 - protein, 14 aa, Homo sapiens
  CDR3 for beta chain variable domain of TCR clone 214374 (TRBV19, TRBJ2-2)
CASSGQGIAGELFF

SEQ ID NO: 428749 - protein, 11 aa, Homo sapiens
  CDR3 for alpha chain variable domain of TCR clone 214375 (TRAV12-2, TRAJ21)
CAVEGFNKFYF

SEQ ID NO: 428750 - protein, 15 aa, Homo sapiens
  CDR3 for beta chain variable domain of TCR clone 214375 (TRBV20-1, TRBJ1-5)
CSASRRGDLGQTQHF

SEQ ID NO: 428751 - protein, 14 aa, Homo sapiens
  CDR3 for alpha chain variable domain of TCR clone 214376 (TRAV12-1, TRAJ12)
CVVTRRDSSYKLIF

SEQ ID NO: 428752 - protein, 13 aa, Homo sapiens
  CDR3 for beta chain variable domain of TCR clone 214376 (TRBV20-1, TRBJ1-1)
CSARGGGNTETFF

SEQ ID NO: 428753 - protein, 14 aa, Homo sapiens
  CDR3 for alpha chain variable domain of TCR clone 214377 (TRAV35, TRAJ33)
CAGSSQDSNYQLIW

SEQ ID NO: 428754 - protein, 15 aa, Homo sapiens
  CDR3 for beta chain variable domain of TCR clone 214377 (TRBV28, TRBJ2-5)
CASSSGQGSIETQYF

SEQ ID NO: 428755 - protein, 14 aa, Homo sapiens
  CDR3 for alpha chain variable domain of TCR clone 214378 (TRAV12-2, TRAJ11)
WAVNMNSGYSTLPF

SEQ ID NO: 428756 - protein, 13 aa, Homo sapiens
  CDR3 for beta chain variable domain of TCR clone 214378 (TRBV6-1, TRBJ1-2)
CASSDSPSYGYTF

SEQ ID NO: 428757 - protein, 16 aa, Homo sapiens
  CDR3 for alpha chain variable domain of TCR clone 214379 (TRAV3, TRAJ10)
CAARDMRAGGGNKLTF

SEQ ID NO: 428758 - protein, 14 aa, Homo sapiens
  CDR3 for beta chain variable domain of TCR clone 214379 (TRBV7-2, TRBJ2-7)
CASRSQGAAYEQYF

SEQ ID NO: 428759 - protein, 16 aa, Homo sapiens
  CDR3 for alpha chain variable domain of TCR clone 214380 (TRAV8-4, TRAJ52)
CAATNAGGTSYGKLTF

SEQ ID NO: 428760 - protein, 15 aa, Homo sapiens
  CDR3 for beta chain variable domain of TCR clone 214380 (TRBV6-3, TRBJ2-7)
CASSSPGTVFYVQYF

SEQ ID NO: 428761 - protein, 22 aa, Homo sapiens
  CDR3 for alpha chain variable domain of TCR clone 214381 (TRAV34, TRAJ44)
PAQPCRHLPLEQTTGTASKLTF

SEQ ID NO: 428762 - protein, 15 aa, Homo sapiens
  CDR3 for beta chain variable domain of TCR clone 214381 (TRBV5-7, TRBJ2-7)
CASSLGPGRGHEQYF

SEQ ID NO: 428763 - protein, 15 aa, Homo sapiens
  CDR3 for alpha chain variable domain of TCR clone 214382 (TRAV21, TRAJ38)
CAVRQDAGNNRKLIW

SEQ ID NO: 428764 - protein, 17 aa, Homo sapiens
  CDR3 for beta chain variable domain of TCR clone 214382 (TRBV11-2, TRBJ2-1)
CASSLYPPGVEYNEQFF

SEQ ID NO: 428765 - protein, 14 aa, Homo sapiens
  CDR3 for alpha chain variable domain of TCR clone 214383 (TRAV8-3, TRAJ4)
CAVGAAGGYNKLIF

SEQ ID NO: 428766 - protein, 13 aa, Homo sapiens
  CDR3 for beta chain variable domain of TCR clone 214383 (TRBV4-1, TRBJ2-5)
CASSLTRGETQYF

SEQ ID NO: 428767 - protein, 14 aa, Homo sapiens
  CDR3 for alpha chain variable domain of TCR clone 214384 (TRAV27, TRAJ49)
CAGRPEGTGNQFYF

SEQ ID NO: 428768 - protein, 14 aa, Homo sapiens
  CDR3 for beta chain variable domain of TCR clone 214384 (TRBV10-3, TRBJ2-1)
CAISDRGGVTEQFF

SEQ ID NO: 428769 - protein, 17 aa, Homo sapiens
  CDR3 for alpha chain variable domain of TCR clone 214385 (TRAV3, TRAJ6)
CAVRDGPRAGGSYIPTF

SEQ ID NO: 428770 - protein, 13 aa, Homo sapiens
  CDR3 for beta chain variable domain of TCR clone 214385 (TRBV19, TRBJ1-1)
CASSGQVNTEAFF

SEQ ID NO: 428771 - protein, 15 aa, Homo sapiens
  CDR3 for alpha chain variable domain of TCR clone 214386 (TRAV25, TRAJ52)
CAGTSGGTSYGKLTF

SEQ ID NO: 428772 - protein, 16 aa, Homo sapiens
  CDR3 for beta chain variable domain of TCR clone 214386 (TRBV7-3, TRBJ2-1)
CASSLSSGGGAKEQFF

SEQ ID NO: 428773 - protein, 16 aa, Homo sapiens
  CDR3 for alpha chain variable domain of TCR clone 214387 (TRAV12-3, TRAJ53)
CAMSAGSGGSNYKLPF

SEQ ID NO: 428774 - protein, 13 aa, Homo sapiens
  CDR3 for beta chain variable domain of TCR clone 214387 (TRBV29-1, TRBJ2-3)
CSVGPRGTDTQYF

SEQ ID NO: 428775 - protein, 14 aa, Homo sapiens
  CDR3 for alpha chain variable domain of TCR clone 214388 (TRAV17, TRAJ16)
CATADFSDGQKLLF

SEQ ID NO: 428776 - protein, 14 aa, Homo sapiens
  CDR3 for beta chain variable domain of TCR clone 214388 (TRBV20-1, TRBJ2-7)
CSAPELAGVGEQYF

SEQ ID NO: 428777 - protein, 11 aa, Homo sapiens
  CDR3 for alpha chain variable domain of TCR clone 214389 (TRAV12-1, TRAJ37)
CVVYNTGKLIF

SEQ ID NO: 428778 - protein, 14 aa, Homo sapiens
  CDR3 for beta chain variable domain of TCR clone 214389 (TRBV5-1, TRBJ2-7)
CASSRGESLYEQYF

SEQ ID NO: 428779 - protein, 15 aa, Homo sapiens
  CDR3 for alpha chain variable domain of TCR clone 214390 (TRAV8-3, TRAJ45)
CASSYSGGGADGLTF

SEQ ID NO: 428780 - protein, 15 aa, Homo sapiens
  CDR3 for beta chain variable domain of TCR clone 214390 (TRBV4-1, TRBJ2-1)
CASSQDAGGLYEQFF

SEQ ID NO: 428781 - protein, 18 aa, Homo sapiens
  CDR3 for alpha chain variable domain of TCR clone 214391 (TRAV21, TRAJ52)
CAVRPSPAGGTSYGKLTF

SEQ ID NO: 428782 - protein, 15 aa, Homo sapiens
  CDR3 for beta chain variable domain of TCR clone 214391 (TRBV10-3, TRBJ2-3)
CAFSLTSGGTDTQYF

SEQ ID NO: 428783 - protein, 12 aa, Homo sapiens
  CDR3 for alpha chain variable domain of TCR clone 214392 (TRAV16, TRAJ10)
CSRTGGGNKLTF

SEQ ID NO: 428784 - protein, 14 aa, Homo sapiens
  CDR3 for beta chain variable domain of TCR clone 214392 (TRBV7-2, TRBJ2-7)
CASSPKTSFYEQYF

SEQ ID NO: 428785 - protein, 14 aa, Homo sapiens
  CDR3 for alpha chain variable domain of TCR clone 214393 (TRAV1-2, TRAJ16)
CAVNRFSDGQKLLF

SEQ ID NO: 428786 - protein, 13 aa, Homo sapiens
  CDR3 for beta chain variable domain of TCR clone 214393 (TRBV18, TRBJ2-1)
CASSPPSSNEQFF

SEQ ID NO: 428787 - protein, 12 aa, Homo sapiens
  CDR3 for alpha chain variable domain of TCR clone 214394 (TRAV29/DV5, TRAJ43)
CAAPYNNNDMSF

SEQ ID NO: 428788 - protein, 17 aa, Homo sapiens
  CDR3 for beta chain variable domain of TCR clone 214394 (TRBV19, TRBJ2-6)
CASSTGQVFSGANVLTF

SEQ ID NO: 428789 - protein, 14 aa, Homo sapiens
  CDR3 for alpha chain variable domain of TCR clone 214395 (TRAV17, TRAJ22)
CATSPSGSARQLTF

SEQ ID NO: 428790 - protein, 15 aa, Homo sapiens
  CDR3 for beta chain variable domain of TCR clone 214395 (TRBV9, TRBJ1-6)
CASSVAGTGDSPLHF

SEQ ID NO: 428791 - protein, 14 aa, Homo sapiens
  CDR3 for alpha chain variable domain of TCR clone 214396 (TRAV1-2, TRAJ8)
CAVREDTGFQKLVF

SEQ ID NO: 428792 - protein, 16 aa, Homo sapiens
  CDR3 for beta chain variable domain of TCR clone 214396 (TRBV15, TRBJ1-4)
CATSRDSPPGREKLFF

SEQ ID NO: 428793 - protein, 17 aa, Homo sapiens
  CDR3 for alpha chain variable domain of TCR clone 214397 (TRAV1-2, TRAJ9)
CLLPLSVLNTGGFKTIF

SEQ ID NO: 428794 - protein, 13 aa, Homo sapiens
  CDR3 for beta chain variable domain of TCR clone 214397 (TRBV19, TRBJ2-7)
CASRKAGGSEQYF

SEQ ID NO: 428795 - protein, 15 aa, Homo sapiens
  CDR3 for alpha chain variable domain of TCR clone 214398 (TRAV26-2, TRAJ54)
CILRDVGQGVQKLVF

SEQ ID NO: 428796 - protein, 13 aa, Homo sapiens
  CDR3 for beta chain variable domain of TCR clone 214398 (TRBV7-9, TRBJ1-1)
CASSLAGVTEAFF

SEQ ID NO: 428797 - protein, 17 aa, Homo sapiens
  CDR3 for alpha chain variable domain of TCR clone 214399 (TRAV8-4, TRAJ11)
CAVSERGENSGYSTLTF

SEQ ID NO: 428798 - protein, 14 aa, Homo sapiens
  CDR3 for beta chain variable domain of TCR clone 214399 (TRBV20-1, TRBJ2-1)
CSPNDEASYNEQFF

SEQ ID NO: 428799 - protein, 14 aa, Homo sapiens
  CDR3 for alpha chain variable domain of TCR clone 214400 (TRAV12-1, TRAJ17)
CVVNYKAAGNKLTF

SEQ ID NO: 428800 - protein, 14 aa, Homo sapiens
  CDR3 for beta chain variable domain of TCR clone 214400 (TRBV7-9, TRBJ1-2)
CASSRQGANYGYTF

SEQ ID NO: 428801 - protein, 11 aa, Homo sapiens
  CDR3 for alpha chain variable domain of TCR clone 214401 (TRAV21, TRAJ48)
CAVDGNEKLTF

SEQ ID NO: 428802 - protein, 16 aa, Homo sapiens
  CDR3 for beta chain variable domain of TCR clone 214401 (TRBV19, TRBJ2-1)
CASSKAGPSSYNEQFF

SEQ ID NO: 428803 - protein, 13 aa, Homo sapiens
  CDR3 for alpha chain variable domain of TCR clone 214402 (TRAV1-1, TRAJ15)
CAVVDQAGTALIF

SEQ ID NO: 428804 - protein, 14 aa, Homo sapiens
  CDR3 for beta chain variable domain of TCR clone 214402 (TRBV5-4, TRBJ1-6)
CASSLWSDNSTLHF

SEQ ID NO: 428805 - protein, 14 aa, Homo sapiens
  CDR3 for alpha chain variable domain of TCR clone 214403 (TRAV35, TRAJ50)
CAGHRKTSYDKVLF

SEQ ID NO: 428806 - protein, 16 aa, Homo sapiens
  CDR3 for beta chain variable domain of TCR clone 214403 (TRBV7-2, TRBJ1-2)
CASSSNQDRRGHGYTF

SEQ ID NO: 428807 - protein, 15 aa, Homo sapiens
  CDR3 for alpha chain variable domain of TCR clone 214404 (TRAV17, TRAJ37)
CATDGGYSNTGKLIF

SEQ ID NO: 428808 - protein, 15 aa, Homo sapiens
  CDR3 for beta chain variable domain of TCR clone 214404 (TRBV28, TRBJ2-5)
CASSSGRTIQETQYF

SEQ ID NO: 428809 - protein, 15 aa, Homo sapiens
  CDR3 for alpha chain variable domain of TCR clone 214405 (TRAV38-1, TRAJ57)
CAFMDSQGGSEKLVF

SEQ ID NO: 428810 - protein, 16 aa, Homo sapiens
  CDR3 for beta chain variable domain of TCR clone 214405 (TRBV10-3, TRBJ2-1)
GAIRGGGRGDYNEQFV

SEQ ID NO: 428811 - protein, 14 aa, Homo sapiens
  CDR3 for alpha chain variable domain of TCR clone 214406 (TRAV12-1, TRAJ38)
CGELKAGNNRKLIW

SEQ ID NO: 428812 - protein, 12 aa, Homo sapiens
  CDR3 for beta chain variable domain of TCR clone 214406 (TRBV24-1, TRBJ1-1)
CATLYPDTEDFF

SEQ ID NO: 428813 - protein, 12 aa, Homo sapiens
  CDR3 for alpha chain variable domain of TCR clone 214407 (TRAV13-1, TRAJ36)
WRGGAGANNRFF

SEQ ID NO: 428814 - protein, 16 aa, Homo sapiens
  CDR3 for beta chain variable domain of TCR clone 214407 (TRBV7-9, TRBJ2-5)
CASRLEIGTRKETQYF

SEQ ID NO: 428815 - protein, 15 aa, Homo sapiens
  CDR3 for alpha chain variable domain of TCR clone 214408 (TRAV8-4, TRAJ13)
CAVGDWGGGYQKVTF

SEQ ID NO: 428816 - protein, 15 aa, Homo sapiens
  CDR3 for beta chain variable domain of TCR clone 214408 (TRBV25-1, TRBJ1-4)
CASSPGDSTNEKLFF

SEQ ID NO: 428817 - protein, 14 aa, Homo sapiens
  CDR3 for alpha chain variable domain of TCR clone 214409 (TRAV12-3, TRAJ29)
CAMSPYSGNTPLVF

SEQ ID NO: 428818 - protein, 15 aa, Homo sapiens
  CDR3 for beta chain variable domain of TCR clone 214409 (TRBV27, TRBJ2-1)
CASSNGGGSSNQQFF

SEQ ID NO: 428819 - protein, 12 aa, Homo sapiens
  CDR3 for alpha chain variable domain of TCR clone 214410 (TRAV21, TRAJ31)
CAVSPARGRLMF

SEQ ID NO: 428820 - protein, 15 aa, Homo sapiens
  CDR3 for beta chain variable domain of TCR clone 214410 (TRBV2, TRBJ2-2)
CASSRETVGTGELFF

SEQ ID NO: 428821 - protein, 13 aa, Homo sapiens
  CDR3 for alpha chain variable domain of TCR clone 214411 (TRAV8-1, TRAJ34)
CAGRPYNTDKLIF

SEQ ID NO: 428822 - protein, 15 aa, Homo sapiens
  CDR3 for beta chain variable domain of TCR clone 214411 (TRBV7-9, TRBJ1-3)
CASSLRSGSGNTIYF

SEQ ID NO: 428823 - protein, 15 aa, Homo sapiens
  CDR3 for alpha chain variable domain of TCR clone 214412 (TRAV13-1, TRAJ32)
CAASNGWWCYKQAHL

SEQ ID NO: 428824 - protein, 17 aa, Homo sapiens
  CDR3 for beta chain variable domain of TCR clone 214412 (TRBV20-1, TRBJ1-2)
CSAIRTGAFNYGYTLFG

SEQ ID NO: 428825 - protein, 15 aa, Homo sapiens
  CDR3 for alpha chain variable domain of TCR clone 214413 (TRAV2, TRAJ9)
CAVEDRGTGGFKTIF

SEQ ID NO: 428826 - protein, 15 aa, Homo sapiens
  CDR3 for beta chain variable domain of TCR clone 214413 (TRBV7-2, TRBJ2-7)
CASSLSSGRTYEQYF

SEQ ID NO: 428827 - protein, 12 aa, Homo sapiens
  CDR3 for alpha chain variable domain of TCR clone 214414 (TRAV8-3, TRAJ44)
RLYTGTASKLTF

SEQ ID NO: 428828 - protein, 15 aa, Homo sapiens
  CDR3 for beta chain variable domain of TCR clone 214414 (TRBV6-5, TRBJ1-2)
CASSYSQAFNYGYTF

SEQ ID NO: 428829 - protein, 14 aa, Homo sapiens
  CDR3 for alpha chain variable domain of TCR clone 214415 (TRAV30, TRAJ43)
CGPKRHALWSRTQT

SEQ ID NO: 428830 - protein, 13 aa, Homo sapiens
  CDR3 for beta chain variable domain of TCR clone 214415 (TRBV12-4, TRBJ2-2)
CASSITGSGELFF

SEQ ID NO: 428831 - protein, 14 aa, Homo sapiens
  CDR3 for alpha chain variable domain of TCR clone 214416 (TRAV16, TRAJ15)
CALSGPQAGTALIF

SEQ ID NO: 428832 - protein, 12 aa, Homo sapiens
  CDR3 for beta chain variable domain of TCR clone 214416 (TRBV18, TRBJ2-5)
CASSSSKETQYF

SEQ ID NO: 428833 - protein, 17 aa, Homo sapiens
  CDR3 for alpha chain variable domain of TCR clone 214417 (TRAV12-2, TRAJ52)
CAVNPYAGGTSYGKLTF

SEQ ID NO: 428834 - protein, 13 aa, Homo sapiens
  CDR3 for beta chain variable domain of TCR clone 214417 (TRBV7-9, TRBJ1-4)
CASSLPGIEKLFF

SEQ ID NO: 428835 - protein, 13 aa, Homo sapiens
  CDR3 for alpha chain variable domain of TCR clone 214418 (TRAV10, TRAJ40)
CVVSALGTYNYIF

SEQ ID NO: 428836 - protein, 13 aa, Homo sapiens
  CDR3 for beta chain variable domain of TCR clone 214418 (TRBV20-1, TRBJ2-3)
CSARLAGTDTQYF

SEQ ID NO: 428837 - protein, 14 aa, Homo sapiens
  CDR3 for alpha chain variable domain of TCR clone 214419 (TRAV17, TRAJ57)
CATDPQGGSEKLVF

SEQ ID NO: 428838 - protein, 15 aa, Homo sapiens
  CDR3 for beta chain variable domain of TCR clone 214419 (TRBV25-1, TRBJ1-4)
CASSGSGTGIEKLFF

SEQ ID NO: 428839 - protein, 12 aa, Homo sapiens
  CDR3 for alpha chain variable domain of TCR clone 214420 (TRAV16, TRAJ49)
CALNEGGNQFYF

SEQ ID NO: 428840 - protein, 14 aa, Homo sapiens
  CDR3 for beta chain variable domain of TCR clone 214420 (TRBV7-9, TRBJ2-1)
CASRPTGLRNEQLF

SEQ ID NO: 428841 - protein, 12 aa, Homo sapiens
  CDR3 for alpha chain variable domain of TCR clone 214421 (TRAV8-2, TRAJ45)
CVQGGGADGLTF

SEQ ID NO: 428842 - protein, 15 aa, Homo sapiens
  CDR3 for beta chain variable domain of TCR clone 214421 (TRBV7-9, TRBJ1-4)
CASSARTGGNEKLFF

SEQ ID NO: 428843 - protein, 16 aa, Homo sapiens
  CDR3 for alpha chain variable domain of TCR clone 214422 (TRAV12-2, TRAJ10)
CAVNRVLTGGGTKLTF

SEQ ID NO: 428844 - protein, 14 aa, Homo sapiens
  CDR3 for beta chain variable domain of TCR clone 214422 (TRBV9, TRBJ2-1)
CASSVALAVNEQFF

SEQ ID NO: 428845 - protein, 12 aa, Homo sapiens
  CDR3 for alpha chain variable domain of TCR clone 214423 (TRAV13-2, TRAJ54)
CGAHEGAQELVF

SEQ ID NO: 428846 - protein, 16 aa, Homo sapiens
  CDR3 for beta chain variable domain of TCR clone 214423 (TRBV12-5, TRBJ2-5)
CASGPRTSGNQETQYF

SEQ ID NO: 428847 - protein, 14 aa, Homo sapiens
  CDR3 for alpha chain variable domain of TCR clone 214424 (TRAV12-3, TRAJ10)
SHLPMKGGGNKLTF

SEQ ID NO: 428848 - protein, 13 aa, Homo sapiens
  CDR3 for beta chain variable domain of TCR clone 214424 (TRBV12-4, TRBJ1-1)
CASSPGTGFEAFF

SEQ ID NO: 428849 - protein, 16 aa, Homo sapiens
  CDR3 for alpha chain variable domain of TCR clone 214425 (TRAV12-2, TRAJ32)
CAVNLGQGGATNKLIF

SEQ ID NO: 428850 - protein, 15 aa, Homo sapiens
  CDR3 for beta chain variable domain of TCR clone 214425 (TRBV20-1, TRBJ2-7)
CSDRGPLAGGREQYF

SEQ ID NO: 428851 - protein, 13 aa, Homo sapiens
  CDR3 for alpha chain variable domain of TCR clone 214426 (TRAV3, TRAJ21)
CAVREPDFNKFYF

SEQ ID NO: 428852 - protein, 12 aa, Homo sapiens
  CDR3 for beta chain variable domain of TCR clone 214426 (TRBV5-1, TRBJ2-4)
LAGEWAKNMQYF

SEQ ID NO: 428853 - protein, 14 aa, Homo sapiens
  CDR3 for alpha chain variable domain of TCR clone 214427 (TRAV17, TRAJ56)
GATHPTGANSKLTF

SEQ ID NO: 428854 - protein, 17 aa, Homo sapiens
  CDR3 for beta chain variable domain of TCR clone 214427 (TRBV2, TRBJ1-1)
CASSEELLRGVDAEAFF

SEQ ID NO: 428855 - protein, 15 aa, Homo sapiens
  CDR3 for alpha chain variable domain of TCR clone 214428 (TRAV20, TRAJ53)
CAVQASGGSNYKLTF

SEQ ID NO: 428856 - protein, 12 aa, Homo sapiens
  CDR3 for beta chain variable domain of TCR clone 214428 (TRBV7-6, TRBJ2-5)
CASRLSQETQYF

SEQ ID NO: 428857 - protein, 16 aa, Homo sapiens
  CDR3 for alpha chain variable domain of TCR clone 214429 (TRAV36/DV7, TRAJ38)
CAVTTSNSGNNRKLIW

SEQ ID NO: 428858 - protein, 12 aa, Homo sapiens
  CDR3 for beta chain variable domain of TCR clone 214429 (TRBV20-1, TRBJ1-1)
CSASGYTLRAFF

SEQ ID NO: 428859 - protein, 11 aa, Homo sapiens
  CDR3 for alpha chain variable domain of TCR clone 214430 (TRAV12-2, TRAJ31)
CAVLNNARLMF

SEQ ID NO: 428860 - protein, 17 aa, Homo sapiens
  CDR3 for beta chain variable domain of TCR clone 214430 (TRBV11-2, TRBJ2-1)
CASSLYPPGVEYNEQFF

SEQ ID NO: 428861 - protein, 15 aa, Homo sapiens
  CDR3 for alpha chain variable domain of TCR clone 214431 (TRAV8-4, TRAJ15)
CAVSDPVQAGTALIF

SEQ ID NO: 428862 - protein, 14 aa, Homo sapiens
  CDR3 for beta chain variable domain of TCR clone 214431 (TRBV27, TRBJ1-1)
CASSLLSGLSEAFF

SEQ ID NO: 428863 - protein, 11 aa, Homo sapiens
  CDR3 for alpha chain variable domain of TCR clone 214432 (TRAV23/DV6, TRAJ48)
CAPRWGEKLTF

SEQ ID NO: 428864 - protein, 13 aa, Homo sapiens
  CDR3 for beta chain variable domain of TCR clone 214432 (TRBV12-4, TRBJ2-5)
CASIPGTEETQYF

SEQ ID NO: 428865 - protein, 15 aa, Homo sapiens
  CDR3 for alpha chain variable domain of TCR clone 214433 (TRAV12-1, TRAJ44)
CVVFVNTGTASKLTF

SEQ ID NO: 428866 - protein, 15 aa, Homo sapiens
  CDR3 for beta chain variable domain of TCR clone 214433 (TRBV5-1, TRBJ2-2)
CASRQDTGDTGELFF

SEQ ID NO: 428867 - protein, 12 aa, Homo sapiens
  CDR3 for alpha chain variable domain of TCR clone 214434 (TRAV2, TRAJ36)
CAELTGANNLFF

SEQ ID NO: 428868 - protein, 13 aa, Homo sapiens
  CDR3 for beta chain variable domain of TCR clone 214434 (TRBV6-1, TRBJ1-1)
CASSRQGNTEAFF

SEQ ID NO: 428869 - protein, 14 aa, Homo sapiens
  CDR3 for alpha chain variable domain of TCR clone 214435 (TRAV12-1, TRAJ15)
CLPPANPAGTALIF

SEQ ID NO: 428870 - protein, 13 aa, Homo sapiens
  CDR3 for beta chain variable domain of TCR clone 214435 (TRBV7-2, TRBJ2-4)
CASSREHANIQYF

SEQ ID NO: 428871 - protein, 14 aa, Homo sapiens
  CDR3 for alpha chain variable domain of TCR clone 214436 (TRAV2, TRAJ9)
CAVEDRSGGFKTIF

SEQ ID NO: 428872 - protein, 17 aa, Homo sapiens
  CDR3 for beta chain variable domain of TCR clone 214436 (TRBV4-1, TRBJ2-5)
CASSQEGSRSGRETQYF

SEQ ID NO: 428873 - protein, 14 aa, Homo sapiens
  CDR3 for alpha chain variable domain of TCR clone 214437 (TRAV16, TRAJ33)
CALSAMDSIYQLIW

SEQ ID NO: 428874 - protein, 16 aa, Homo sapiens
  CDR3 for beta chain variable domain of TCR clone 214437 (TRBV12-4, TRBJ2-3)
CASSFPSNTNTDTQYF

SEQ ID NO: 428875 - protein, 12 aa, Homo sapiens
  CDR3 for alpha chain variable domain of TCR clone 214438 (TRAV8-3, TRAJ26)
CAGDNYGQNFVF

SEQ ID NO: 428876 - protein, 12 aa, Homo sapiens
  CDR3 for beta chain variable domain of TCR clone 214438 (TRBV11-2, TRBJ2-5)
CASSLVGETQYF

SEQ ID NO: 428877 - protein, 11 aa, Homo sapiens
  CDR3 for alpha chain variable domain of TCR clone 214439 (TRAV2, TRAJ21)
CAVFNFNKFYF

SEQ ID NO: 428878 - protein, 19 aa, Homo sapiens
  CDR3 for beta chain variable domain of TCR clone 214439 (TRBV7-9, TRBJ2-1)
CASSHNRGALLRSYNEQFF

SEQ ID NO: 428879 - protein, 14 aa, Homo sapiens
  CDR3 for alpha chain variable domain of TCR clone 214440 (TRAV8-3, TRAJ35)
CAVVPQGFGHVLHC

SEQ ID NO: 428880 - protein, 15 aa, Homo sapiens
  CDR3 for beta chain variable domain of TCR clone 214440 (TRBV6-1, TRBJ2-2)
CASSAGQGYTGELFF

SEQ ID NO: 428881 - protein, 13 aa, Homo sapiens
  CDR3 for alpha chain variable domain of TCR clone 214441 (TRAV27, TRAJ41)
CAGEGIPGMHSTS

SEQ ID NO: 428882 - protein, 14 aa, Homo sapiens
  CDR3 for beta chain variable domain of TCR clone 214441 (TRBV25-1, TRBJ1-1)
CASTHLGGNTEAFF

SEQ ID NO: 428883 - protein, 12 aa, Homo sapiens
  CDR3 for alpha chain variable domain of TCR clone 214442 (TRAV12-1, TRAJ40)
CVFYSGTYKDIF

SEQ ID NO: 428884 - protein, 18 aa, Homo sapiens
  CDR3 for beta chain variable domain of TCR clone 214442 (TRBV12-4, TRBJ2-2)
CASSLVAGARGRTGELFF

SEQ ID NO: 428885 - protein, 15 aa, Homo sapiens
  CDR3 for alpha chain variable domain of TCR clone 214443 (TRAV17, TRAJ57)
CATGPSQGGSEKRVC

SEQ ID NO: 428886 - protein, 16 aa, Homo sapiens
  CDR3 for beta chain variable domain of TCR clone 214443 (TRBV12-4, TRBJ1-5)
CASSRPVGGSNQPQHF

SEQ ID NO: 428887 - protein, 14 aa, Homo sapiens
  CDR3 for alpha chain variable domain of TCR clone 214444 (TRAV35, TRAJ13)
CAGSPSGGYQKVTF

SEQ ID NO: 428888 - protein, 13 aa, Homo sapiens
  CDR3 for beta chain variable domain of TCR clone 214444 (TRBV29-1, TRBJ1-1)
CSGGDSRNTEAFF

SEQ ID NO: 428889 - protein, 12 aa, Homo sapiens
  CDR3 for alpha chain variable domain of TCR clone 214445 (TRAV12-3, TRAJ17)
CAMTLTGNKLAF

SEQ ID NO: 428890 - protein, 15 aa, Homo sapiens
  CDR3 for beta chain variable domain of TCR clone 214445 (TRBV20-1, TRBJ2-7)
RSARDRVSGMDEQYF

SEQ ID NO: 428891 - protein, 11 aa, Homo sapiens
  CDR3 for alpha chain variable domain of TCR clone 214446 (TRAV2, TRAJ13)
CASVGYQKVTF

SEQ ID NO: 428892 - protein, 15 aa, Homo sapiens
  CDR3 for beta chain variable domain of TCR clone 214446 (TRBV5-1, TRBJ2-1)
CASSPPRAPYNEQFF

SEQ ID NO: 428893 - protein, 14 aa, Homo sapiens
  CDR3 for alpha chain variable domain of TCR clone 214447 (TRAV12-2, TRAJ17)
CDVLFKAAGNKLTF

SEQ ID NO: 428894 - protein, 14 aa, Homo sapiens
  CDR3 for beta chain variable domain of TCR clone 214447 (TRBV7-3, TRBJ1-1)
CASSLKGGNTEAFF

SEQ ID NO: 428895 - protein, 18 aa, Homo sapiens
  CDR3 for alpha chain variable domain of TCR clone 214448 (TRAV21, TRAJ52)
CAVRPSPAGGTSYGKLTF

SEQ ID NO: 428896 - protein, 15 aa, Homo sapiens
  CDR3 for beta chain variable domain of TCR clone 214448 (TRBV20-1, TRBJ2-7)
CSARDRVSGMDEPYF

SEQ ID NO: 428897 - protein, 18 aa, Homo sapiens
  CDR3 for alpha chain variable domain of TCR clone 214449 (TRAV13-1, TRAJ52)
CAASKRGAGGTSYGKLTF

SEQ ID NO: 428898 - protein, 12 aa, Homo sapiens
  CDR3 for beta chain variable domain of TCR clone 214449 (TRBV11-2, TRBJ2-2)
CASSLGGGELLF

SEQ ID NO: 428899 - protein, 14 aa, Homo sapiens
  CDR3 for alpha chain variable domain of TCR clone 214450 (TRAV12-2, TRAJ13)
CAVQKTGGYKQVTF

SEQ ID NO: 428900 - protein, 15 aa, Homo sapiens
  CDR3 for beta chain variable domain of TCR clone 214450 (TRBV27, TRBJ2-1)
CASSNGGGSSNEQFF

SEQ ID NO: 428901 - protein, 15 aa, Homo sapiens
  CDR3 for alpha chain variable domain of TCR clone 214451 (TRAV17, TRAJ57)
CATGPSQGGSERLVL

SEQ ID NO: 428902 - protein, 14 aa, Homo sapiens
  CDR3 for beta chain variable domain of TCR clone 214451 (TRBV12-5, TRBJ2-5)
CASGSRTHQETQYF

SEQ ID NO: 428903 - protein, 13 aa, Homo sapiens
  CDR3 for alpha chain variable domain of TCR clone 214452 (TRAV3, TRAJ40)
CAVRGSGAYKYIF

SEQ ID NO: 428904 - protein, 15 aa, Homo sapiens
  CDR3 for beta chain variable domain of TCR clone 214452 (TRBV5-1, TRBJ2-3)
CASSVTSGSTDTQYF

SEQ ID NO: 428905 - protein, 14 aa, Homo sapiens
  CDR3 for alpha chain variable domain of TCR clone 214453 (TRAV1-2, TRAJ16)
CAVNRFSDGQKLLF

SEQ ID NO: 428906 - protein, 13 aa, Homo sapiens
  CDR3 for beta chain variable domain of TCR clone 214453 (TRBV4-2, TRBJ1-1)
YASSQAGNTEAFF

SEQ ID NO: 428907 - protein, 12 aa, Homo sapiens
  CDR3 for alpha chain variable domain of TCR clone 214454 (TRAV1-1, TRAJ23)
CAVTNQGGKLIF

SEQ ID NO: 428908 - protein, 17 aa, Homo sapiens
  CDR3 for beta chain variable domain of TCR clone 214454 (TRBV4-1, TRBJ2-5)
CASSHDLTGGPIETQYF

SEQ ID NO: 428909 - protein, 11 aa, Homo sapiens
  CDR3 for alpha chain variable domain of TCR clone 214455 (TRAV29/DV5, TRAJ43)
CAAKTNNDMRF

SEQ ID NO: 428910 - protein, 14 aa, Homo sapiens
  CDR3 for beta chain variable domain of TCR clone 214455 (TRBV11-2, TRBJ2-5)
CASRPLAGRETQYF

SEQ ID NO: 428911 - protein, 13 aa, Homo sapiens
  CDR3 for alpha chain variable domain of TCR clone 214456 (TRAV12-2, TRAJ20)
CAVNRFDDYKLSF

SEQ ID NO: 428912 - protein, 12 aa, Homo sapiens
  CDR3 for beta chain variable domain of TCR clone 214456 (TRBV5-5, TRBJ2-5)
CASSYFGETQYF

SEQ ID NO: 428913 - protein, 14 aa, Homo sapiens
  CDR3 for alpha chain variable domain of TCR clone 214457 (TRAV26-1, TRAJ49)
CIVRPSNTGNQFYF

SEQ ID NO: 428914 - protein, 15 aa, Homo sapiens
  CDR3 for beta chain variable domain of TCR clone 214457 (TRBV5-1, TRBJ2-3)
CASSSTSGSTDTQYF

SEQ ID NO: 428915 - protein, 14 aa, Homo sapiens
  CDR3 for alpha chain variable domain of TCR clone 214458 (TRAV8-3, TRAJ48)
CCGCGQFGNEKLTF

SEQ ID NO: 428916 - protein, 15 aa, Homo sapiens
  CDR3 for beta chain variable domain of TCR clone 214458 (TRBV28, TRBJ2-4)
CAAGSGTLFMGIQYF

SEQ ID NO: 428917 - protein, 15 aa, Homo sapiens
  CDR3 for alpha chain variable domain of TCR clone 214459 (TRAV26-1, TRAJ37)
CIVRVATGNTGKLIF

SEQ ID NO: 428918 - protein, 13 aa, Homo sapiens
  CDR3 for beta chain variable domain of TCR clone 214459 (TRBV7-9, TRBJ1-2)
CASSLKQNYGYTF

SEQ ID NO: 428919 - protein, 14 aa, Homo sapiens
  CDR3 for alpha chain variable domain of TCR clone 214460 (TRAV8-4, TRAJ54)
CAVSEVLGAQKLVF

SEQ ID NO: 428920 - protein, 16 aa, Homo sapiens
  CDR3 for beta chain variable domain of TCR clone 214460 (TRBV4-1, TRBJ1-4)
CASSQEGPRGVEEKLF

SEQ ID NO: 428921 - protein, 15 aa, Homo sapiens
  CDR3 for alpha chain variable domain of TCR clone 214461 (TRAV12-2, TRAJ48)
CAAQLSNFGNEKLTF

SEQ ID NO: 428922 - protein, 17 aa, Homo sapiens
  CDR3 for beta chain variable domain of TCR clone 214461 (TRBV7-3, TRBJ2-3)
CASSLMKRMRGADTQYF

SEQ ID NO: 428923 - protein, 14 aa, Homo sapiens
  CDR3 for alpha chain variable domain of TCR clone 214462 (TRAV26-1, TRAJ38)
CIADNAGNNRKLIW

SEQ ID NO: 428924 - protein, 13 aa, Homo sapiens
  CDR3 for beta chain variable domain of TCR clone 214462 (TRBV7-9, TRBJ1-2)
CTSSLKQNYGYTF

SEQ ID NO: 428925 - protein, 15 aa, Homo sapiens
  CDR3 for alpha chain variable domain of TCR clone 214463 (TRAV13-1, TRAJ45)
CAASGSGGGADGFTF

SEQ ID NO: 428926 - protein, 12 aa, Homo sapiens
  CDR3 for beta chain variable domain of TCR clone 214463 (TRBV11-2, TRBJ2-2)
CASSLGGGELFF

SEQ ID NO: 428927 - protein, 15 aa, Homo sapiens
  CDR3 for alpha chain variable domain of TCR clone 214464 (TRAV8-2, TRAJ36)
CVVSENWGKQPRLWD

SEQ ID NO: 428928 - protein, 15 aa, Homo sapiens
  CDR3 for beta chain variable domain of TCR clone 214464 (TRBV20-1, TRBJ2-5)
CSAEGTGGLQETQYF

SEQ ID NO: 428929 - protein, 16 aa, Homo sapiens
  CDR3 for alpha chain variable domain of TCR clone 214465 (TRAV3, TRAJ37)
CAVRPHGSGNTGKLIF

SEQ ID NO: 428930 - protein, 14 aa, Homo sapiens
  CDR3 for beta chain variable domain of TCR clone 214465 (TRBV13, TRBJ2-5)
CASSLGRGQETQSF

SEQ ID NO: 428931 - protein, 14 aa, Homo sapiens
  CDR3 for alpha chain variable domain of TCR clone 214466 (TRAV38-1, TRAJ29)
CAFITPSGNTPLVF

SEQ ID NO: 428932 - protein, 14 aa, Homo sapiens
  CDR3 for beta chain variable domain of TCR clone 214466 (TRBV15, TRBJ2-5)
CATSMGGCGETQYF

SEQ ID NO: 428933 - protein, 16 aa, Homo sapiens
  CDR3 for alpha chain variable domain of TCR clone 214467 (TRAV30, TRAJ24)
CGTQIVDADSWGKFQF

SEQ ID NO: 428934 - protein, 17 aa, Homo sapiens
  CDR3 for beta chain variable domain of TCR clone 214467 (TRBV7-2, TRBJ2-7)
CASSPFGSSGPSPEQYF

SEQ ID NO: 428935 - protein, 12 aa, Homo sapiens
  CDR3 for alpha chain variable domain of TCR clone 214468 (TRAV36/DV7, TRAJ54)
CAVVRGAQKLVF

SEQ ID NO: 428936 - protein, 15 aa, Homo sapiens
  CDR3 for beta chain variable domain of TCR clone 214468 (TRBV9, TRBJ1-6)
CASSVAGTGDSPLHF

SEQ ID NO: 428937 - protein, 16 aa, Homo sapiens
  CDR3 for alpha chain variable domain of TCR clone 214469 (TRAV3, TRAJ3)
CAVRDRAKSSASKIIF

SEQ ID NO: 428938 - protein, 16 aa, Homo sapiens
  CDR3 for beta chain variable domain of TCR clone 214469 (TRBV20-1, TRBJ2-4)
YSATSLAELAKNIQYF

SEQ ID NO: 428939 - protein, 20 aa, Homo sapiens
  CDR3 for alpha chain variable domain of TCR clone 214470 (TRAV13-1, TRAJ28)
CAASPVPILWGWELPTPFRE

SEQ ID NO: 428940 - protein, 13 aa, Homo sapiens
  CDR3 for beta chain variable domain of TCR clone 214470 (TRBV15, TRBJ2-7)
CATSATGHYEQYF

SEQ ID NO: 428941 - protein, 19 aa, Homo sapiens
  CDR3 for alpha chain variable domain of TCR clone 214471 (TRAV26-1, TRAJ52)
CIVRAHRNAGGTSYGKLTF

SEQ ID NO: 428942 - protein, 15 aa, Homo sapiens
  CDR3 for beta chain variable domain of TCR clone 214471 (TRBV29-1, TRBJ2-1)
CSGRDRKTSYNEQFF

SEQ ID NO: 428943 - protein, 14 aa, Homo sapiens
  CDR3 for alpha chain variable domain of TCR clone 214472 (TRAV16, TRAJ17)
CALSGRTAGNKLTF

SEQ ID NO: 428944 - protein, 15 aa, Homo sapiens
  CDR3 for beta chain variable domain of TCR clone 214472 (TRBV3-1, TRBJ1-2)
CASSPTRLPEGGYTF

SEQ ID NO: 428945 - protein, 14 aa, Homo sapiens
  CDR3 for alpha chain variable domain of TCR clone 214473 (TRAV27, TRAJ36)
CAGARQTGANNLFF

SEQ ID NO: 428946 - protein, 17 aa, Homo sapiens
  CDR3 for beta chain variable domain of TCR clone 214473 (TRBV20-1, TRBJ2-2)
CSASGSGQGGLTGELFF

SEQ ID NO: 428947 - protein, 13 aa, Homo sapiens
  CDR3 for alpha chain variable domain of TCR clone 214474 (TRAV2, TRAJ29)
CAEQNSGNTPLFF

SEQ ID NO: 428948 - protein, 13 aa, Homo sapiens
  CDR3 for beta chain variable domain of TCR clone 214474 (TRBV28, TRBJ1-2)
CASSPGNRNGYTF

SEQ ID NO: 428949 - protein, 14 aa, Homo sapiens
  CDR3 for alpha chain variable domain of TCR clone 214475 (TRAV16, TRAJ17)
CAPRIKAAGNKLTF

SEQ ID NO: 428950 - protein, 15 aa, Homo sapiens
  CDR3 for beta chain variable domain of TCR clone 214475 (TRBV3-1, TRBJ1-2)
CASSQEVRANYGYTF

SEQ ID NO: 428951 - protein, 12 aa, Homo sapiens
  CDR3 for alpha chain variable domain of TCR clone 214476 (TRAV35, TRAJ12)
CAGMDSSYKLIF

SEQ ID NO: 428952 - protein, 14 aa, Homo sapiens
  CDR3 for beta chain variable domain of TCR clone 214476 (TRBV28, TRBJ2-5)
CASSLYRGTETRYF

SEQ ID NO: 428953 - protein, 13 aa, Homo sapiens
  CDR3 for alpha chain variable domain of TCR clone 214477 (TRAV8-3, TRAJ47)
CAVGALGGNKLVF

SEQ ID NO: 428954 - protein, 14 aa, Homo sapiens
  CDR3 for beta chain variable domain of TCR clone 214477 (TRBV19, TRBJ2-1)
CASPTFVLSGEQFF

SEQ ID NO: 428955 - protein, 15 aa, Homo sapiens
  CDR3 for alpha chain variable domain of TCR clone 214478 (TRAV19, TRAJ45)
CALSASGGGADGLTF

SEQ ID NO: 428956 - protein, 15 aa, Homo sapiens
  CDR3 for beta chain variable domain of TCR clone 214478 (TRBV13, TRBJ1-5)
CASSLTGRGHQHQHF

SEQ ID NO: 428957 - protein, 15 aa, Homo sapiens
  CDR3 for alpha chain variable domain of TCR clone 214479 (TRAV21, TRAJ53)
CATVNSGGSNYKLTF

SEQ ID NO: 428958 - protein, 13 aa, Homo sapiens
  CDR3 for beta chain variable domain of TCR clone 214479 (TRBV7-9, TRBJ2-3)
CASSPGSTDTQYF

SEQ ID NO: 428959 - protein, 14 aa, Homo sapiens
  CDR3 for alpha chain variable domain of TCR clone 214480 (TRAV12-3, TRAJ22)
CAMSLFGSARQLTF

SEQ ID NO: 428960 - protein, 15 aa, Homo sapiens
  CDR3 for beta chain variable domain of TCR clone 214480 (TRBV5-8, TRBJ1-5)
CASSLVRTGNQPQHF

SEQ ID NO: 428961 - protein, 11 aa, Homo sapiens
  CDR3 for alpha chain variable domain of TCR clone 214481 (TRAV1-1, TRAJ16)
WAAGDGQKLLF

SEQ ID NO: 428962 - protein, 15 aa, Homo sapiens
  CDR3 for beta chain variable domain of TCR clone 214481 (TRBV28, TRBJ1-2)
CASIPQGSDDYGYTF

SEQ ID NO: 428963 - protein, 18 aa, Homo sapiens
  CDR3 for alpha chain variable domain of TCR clone 214482 (TRAV21, TRAJ52)
CAVRPSPAGGNSYGKLTF

SEQ ID NO: 428964 - protein, 15 aa, Homo sapiens
  CDR3 for beta chain variable domain of TCR clone 214482 (TRBV28, TRBJ2-1)
CASSIIAGGRSEQFF

SEQ ID NO: 428965 - protein, 14 aa, Homo sapiens
  CDR3 for alpha chain variable domain of TCR clone 214483 (TRAV2, TRAJ9)
CAVEDRSGGVKTIF

SEQ ID NO: 428966 - protein, 22 aa, Homo sapiens
  CDR3 for beta chain variable domain of TCR clone 214483 (TRBV11-2, TRBJ1-4)
CASSLDITRRGIPRKDNEKLFF

SEQ ID NO: 428967 - protein, 13 aa, Homo sapiens
  CDR3 for alpha chain variable domain of TCR clone 214484 (TRAV2, TRAJ15)
CAVASQAGTALLF

SEQ ID NO: 428968 - protein, 12 aa, Homo sapiens
  CDR3 for beta chain variable domain of TCR clone 214484 (TRBV7-8, TRBJ2-7)
CASSLGDREQYF

SEQ ID NO: 428969 - protein, 14 aa, Homo sapiens
  CDR3 for alpha chain variable domain of TCR clone 214485 (TRAV1-2, TRAJ33)
CAVRAPDSDYQLIW

SEQ ID NO: 428970 - protein, 14 aa, Homo sapiens
  CDR3 for beta chain variable domain of TCR clone 214485 (TRBV19, TRBJ2-1)
CASPTFVLSGEQFF

SEQ ID NO: 428971 - protein, 14 aa, Homo sapiens
  CDR3 for alpha chain variable domain of TCR clone 214486 (TRAV1-2, TRAJ8)
CAVREDTGFQKLVF

SEQ ID NO: 428972 - protein, 12 aa, Homo sapiens
  CDR3 for beta chain variable domain of TCR clone 214486 (TRBV11-2, TRBJ2-2)
CASSIPTGELFF

SEQ ID NO: 428973 - protein, 16 aa, Homo sapiens
  CDR3 for alpha chain variable domain of TCR clone 214487 (TRAV26-1, TRAJ48)
CIVREPPNFGNEKLTF

SEQ ID NO: 428974 - protein, 13 aa, Homo sapiens
  CDR3 for beta chain variable domain of TCR clone 214487 (TRBV7-3, TRBJ1-1)
CASSQDWGAEAFF

SEQ ID NO: 428975 - protein, 17 aa, Homo sapiens
  CDR3 for alpha chain variable domain of TCR clone 214488 (TRAV3, TRAJ42)
CAVRDRDYGGSQGNLIF

SEQ ID NO: 428976 - protein, 14 aa, Homo sapiens
  CDR3 for beta chain variable domain of TCR clone 214488 (TRBV19, TRBJ2-5)
CASSITGQQETQYF

SEQ ID NO: 428977 - protein, 18 aa, Homo sapiens
  CDR3 for alpha chain variable domain of TCR clone 214489 (TRAV2, TRAJ32)
CCLLLCFHYGGATNKLIF

SEQ ID NO: 428978 - protein, 13 aa, Homo sapiens
  CDR3 for beta chain variable domain of TCR clone 214489 (TRBV20-1, TRBJ2-2)
CSASAAGTGELFF

SEQ ID NO: 428979 - protein, 14 aa, Homo sapiens
  CDR3 for alpha chain variable domain of TCR clone 214490 (TRAV12-3, TRAJ15)
CAMIPPQAGTALIF

SEQ ID NO: 428980 - protein, 14 aa, Homo sapiens
  CDR3 for beta chain variable domain of TCR clone 214490 (TRBV20-1, TRBJ2-2)
CSARKRRATGELFF

SEQ ID NO: 428981 - protein, 13 aa, Homo sapiens
  CDR3 for alpha chain variable domain of TCR clone 214491 (TRAV8-1, TRAJ7)
CAVMPYGNNRLAF

SEQ ID NO: 428982 - protein, 15 aa, Homo sapiens
  CDR3 for beta chain variable domain of TCR clone 214491 (TRBV19, TRBJ1-1)
CASTSGQIQNTEAFF

SEQ ID NO: 428983 - protein, 14 aa, Homo sapiens
  CDR3 for alpha chain variable domain of TCR clone 214492 (TRAV17, TRAJ57)
CATDPQGGSEKLVF

SEQ ID NO: 428984 - protein, 14 aa, Homo sapiens
  CDR3 for beta chain variable domain of TCR clone 214492 (TRBV7-6, TRBJ2-3)
CASSLGTVTDTQYF

SEQ ID NO: 428985 - protein, 13 aa, Homo sapiens
  CDR3 for alpha chain variable domain of TCR clone 214493 (TRAV8-3, TRAJ48)
CAVVPCGNEKLTF

SEQ ID NO: 428986 - protein, 15 aa, Homo sapiens
  CDR3 for beta chain variable domain of TCR clone 214493 (TRBV11-2, TRBJ2-1)
CASSSPSTRYNEQFF

SEQ ID NO: 428987 - protein, 12 aa, Homo sapiens
  CDR3 for alpha chain variable domain of TCR clone 214494 (TRAV12-3, TRAJ34)
CAMGYNTDQLIF

SEQ ID NO: 428988 - protein, 14 aa, Homo sapiens
  CDR3 for beta chain variable domain of TCR clone 214494 (TRBV5-7, TRBJ1-5)
CASSRTGGGQPQHF

SEQ ID NO: 428989 - protein, 13 aa, Homo sapiens
  CDR3 for alpha chain variable domain of TCR clone 214495 (TRAV36/DV7, TRAJ49)
CAGDSNTGNQFYF

SEQ ID NO: 428990 - protein, 11 aa, Homo sapiens
  CDR3 for beta chain variable domain of TCR clone 214495 (TRBV29-1, TRBJ2-5)
CSEDRTGTQYF

SEQ ID NO: 428991 - protein, 14 aa, Homo sapiens
  CDR3 for alpha chain variable domain of TCR clone 214496 (TRAV26-1, TRAJ22)
CIVRVYGSARQLTF

SEQ ID NO: 428992 - protein, 17 aa, Homo sapiens
  CDR3 for beta chain variable domain of TCR clone 214496 (TRBV7-3, TRBJ2-3)
CASSPGGLAGFGDTHYF

SEQ ID NO: 428993 - protein, 16 aa, Homo sapiens
  CDR3 for alpha chain variable domain of TCR clone 214497 (TRAV3, TRAJ37)
CAVRGKGSGTTGKLIF

SEQ ID NO: 428994 - protein, 13 aa, Homo sapiens
  CDR3 for beta chain variable domain of TCR clone 214497 (TRBV7-3, TRBJ1-1)
CASSQDWGAEAFF

SEQ ID NO: 428995 - protein, 15 aa, Homo sapiens
  CDR3 for alpha chain variable domain of TCR clone 214498 (TRAV17, TRAJ57)
CATGPSQGGSETLVF

SEQ ID NO: 428996 - protein, 12 aa, Homo sapiens
  CDR3 for beta chain variable domain of TCR clone 214498 (TRBV11-2, TRBJ2-4)
CASSSASGSEYF

SEQ ID NO: 428997 - protein, 16 aa, Homo sapiens
  CDR3 for alpha chain variable domain of TCR clone 214499 (TRAV3, TRAJ21)
CAVRDIYRGNFNKFYF

SEQ ID NO: 428998 - protein, 13 aa, Homo sapiens
  CDR3 for beta chain variable domain of TCR clone 214499 (TRBV27, TRBJ2-7)
CASSLTTGYEQYF

SEQ ID NO: 428999 - protein, 13 aa, Homo sapiens
  CDR3 for alpha chain variable domain of TCR clone 214500 (TRAV3, TRAJ15)
CAVRDQAGTAVIF

SEQ ID NO: 429000 - protein, 15 aa, Homo sapiens
  CDR3 for beta chain variable domain of TCR clone 214500 (TRBV11-1, TRBJ2-7)
CASSLNYGASYEQYF

SEQ ID NO: 429001 - protein, 14 aa, Homo sapiens
  CDR3 for alpha chain variable domain of TCR clone 214501 (TRAV12-2, TRAJ5)
CAVNRSTGRRALTY

SEQ ID NO: 429002 - protein, 12 aa, Homo sapiens
  CDR3 for beta chain variable domain of TCR clone 214501 (TRBV19, TRBJ1-5)
CASSIAQQPQHF

SEQ ID NO: 429003 - protein, 16 aa, Homo sapiens
  CDR3 for alpha chain variable domain of TCR clone 214502 (TRAV12-3, TRAJ53)
CAMSPGSGGSTDKLTF

SEQ ID NO: 429004 - protein, 11 aa, Homo sapiens
  CDR3 for beta chain variable domain of TCR clone 214502 (TRBV29-1, TRBJ2-5)
CSEDRTGTQYF

SEQ ID NO: 429005 - protein, 14 aa, Homo sapiens
  CDR3 for alpha chain variable domain of TCR clone 214503 (TRAV1-2, TRAJ16)
CTVNRFSDGQKLLF

SEQ ID NO: 429006 - protein, 13 aa, Homo sapiens
  CDR3 for beta chain variable domain of TCR clone 214503 (TRBV10-3, TRBJ2-7)
CASKLAVNYEQYF

SEQ ID NO: 429007 - protein, 16 aa, Homo sapiens
  CDR3 for alpha chain variable domain of TCR clone 214504 (TRAV12-1, TRAJ12)
CVVNTLLLDSRYKLIF

SEQ ID NO: 429008 - protein, 13 aa, Homo sapiens
  CDR3 for beta chain variable domain of TCR clone 214504 (TRBV14, TRBJ2-7)
CASSQDRRYEQYF

SEQ ID NO: 429009 - protein, 23 aa, Homo sapiens
  CDR3 for alpha chain variable domain of TCR clone 214505 (TRAV12-2, TRAJ36)
SLLIRDSQPSDSATLERANNLFF

SEQ ID NO: 429010 - protein, 15 aa, Homo sapiens
  CDR3 for beta chain variable domain of TCR clone 214505 (TRBV7-9, TRBJ1-6)
CASSSPGRGNSPLHF

SEQ ID NO: 429011 - protein, 16 aa, Homo sapiens
  CDR3 for alpha chain variable domain of TCR clone 214506 (TRAV26-1, TRAJ38)
CIVRVELGVNNRKLIW

SEQ ID NO: 429012 - protein, 14 aa, Homo sapiens
  CDR3 for beta chain variable domain of TCR clone 214506 (TRBV5-1, TRBJ2-3)
CASSPGLAADTQYF

SEQ ID NO: 429013 - protein, 14 aa, Homo sapiens
  CDR3 for alpha chain variable domain of TCR clone 214507 (TRAV26-1, TRAJ39)
CIVRGSRAGNMLTF

SEQ ID NO: 429014 - protein, 14 aa, Homo sapiens
  CDR3 for beta chain variable domain of TCR clone 214507 (TRBV6-1, TRBJ2-2)
CASTWQGNTGELFF

SEQ ID NO: 429015 - protein, 14 aa, Homo sapiens
  CDR3 for alpha chain variable domain of TCR clone 214508 (TRAV17, TRAJ57)
CATDPQGGSEKLVF

SEQ ID NO: 429016 - protein, 17 aa, Homo sapiens
  CDR3 for beta chain variable domain of TCR clone 214508 (TRBV7-9, TRBJ2-5)
CASSPGLAGGGREPQYF

SEQ ID NO: 429017 - protein, 13 aa, Homo sapiens
  CDR3 for alpha chain variable domain of TCR clone 214509 (TRAV12-3, TRAJ43)
CSMIRPNNNDMRF

SEQ ID NO: 429018 - protein, 12 aa, Homo sapiens
  CDR3 for beta chain variable domain of TCR clone 214509 (TRBV11-2, TRBJ2-5)
CASSLGQETQYF

SEQ ID NO: 429019 - protein, 16 aa, Homo sapiens
  CDR3 for alpha chain variable domain of TCR clone 214510 (TRAV16, TRAJ42)
CARKMNYGGSQGNLIF

SEQ ID NO: 429020 - protein, 14 aa, Homo sapiens
  CDR3 for beta chain variable domain of TCR clone 214510 (TRBV14, TRBJ2-3)
CQQPDYRDTDTQYF

SEQ ID NO: 429021 - protein, 14 aa, Homo sapiens
  CDR3 for alpha chain variable domain of TCR clone 214511 (TRAV2, TRAJ37)
CAVDLTSNTGKLIF

SEQ ID NO: 429022 - protein, 13 aa, Homo sapiens
  CDR3 for beta chain variable domain of TCR clone 214511 (TRBV29-1, TRBJ2-2)
CSTTGVNTGELFF

SEQ ID NO: 429023 - protein, 13 aa, Homo sapiens
  CDR3 for alpha chain variable domain of TCR clone 214512 (TRAV13-2, TRAJ48)
CAEMDFGNEKLTF

SEQ ID NO: 429024 - protein, 16 aa, Homo sapiens
  CDR3 for beta chain variable domain of TCR clone 214512 (TRBV28, TRBJ2-7)
CASSLFFETGGPEQYF

SEQ ID NO: 429025 - protein, 16 aa, Homo sapiens
  CDR3 for alpha chain variable domain of TCR clone 214513 (TRAV12-3, TRAJ53)
CAMSPGSGGSNYKLTF

SEQ ID NO: 429026 - protein, 16 aa, Homo sapiens
  CDR3 for beta chain variable domain of TCR clone 214513 (TRBV11-3, TRBJ2-3)
CASSPGGLLGTDTQYF

SEQ ID NO: 429027 - protein, 14 aa, Homo sapiens
  CDR3 for alpha chain variable domain of TCR clone 214514 (TRAV35, TRAJ34)
CAGRGTPTSPSLGL

SEQ ID NO: 429028 - protein, 12 aa, Homo sapiens
  CDR3 for beta chain variable domain of TCR clone 214514 (TRBV12-5, TRBJ2-5)
CASGQGVETQYF

SEQ ID NO: 429029 - protein, 13 aa, Homo sapiens
  CDR3 for alpha chain variable domain of TCR clone 214515 (TRAV13-2, TRAJ48)
CAEMDFGNEKLTF

SEQ ID NO: 429030 - protein, 13 aa, Homo sapiens
  CDR3 for beta chain variable domain of TCR clone 214515 (TRBV7-9, TRBJ1-2)
CASSLKQNYGYVF

SEQ ID NO: 429031 - protein, 13 aa, Homo sapiens
  CDR3 for alpha chain variable domain of TCR clone 214516 (TRAV8-3, TRAJ43)
CAVVPYNNNDMRF

SEQ ID NO: 429032 - protein, 16 aa, Homo sapiens
  CDR3 for beta chain variable domain of TCR clone 214516 (TRBV7-2, TRBJ2-5)
CASSPFPTGGEETQYF

SEQ ID NO: 429033 - protein, 20 aa, Homo sapiens
  CDR3 for alpha chain variable domain of TCR clone 214517 (TRAV12-1, TRAJ42)
SSVIQPPTSVKGGSQGKLIF

SEQ ID NO: 429034 - protein, 18 aa, Homo sapiens
  CDR3 for beta chain variable domain of TCR clone 214517 (TRBV11-2, TRBJ2-3)
CASSLGGASRGAPNTQYF

SEQ ID NO: 429035 - protein, 13 aa, Homo sapiens
  CDR3 for alpha chain variable domain of TCR clone 214518 (TRAV1-2, TRAJ9)
CAALNTGGFKTIF

SEQ ID NO: 429036 - protein, 14 aa, Homo sapiens
  CDR3 for beta chain variable domain of TCR clone 214518 (TRBV20-1, TRBJ2-1)
CSAQIGGSANEQFF

SEQ ID NO: 429037 - protein, 14 aa, Homo sapiens
  CDR3 for alpha chain variable domain of TCR clone 214519 (TRAV13-2, TRAJ17)
CEENSKAAGNKLTF

SEQ ID NO: 429038 - protein, 14 aa, Homo sapiens
  CDR3 for beta chain variable domain of TCR clone 214519 (TRBV19, TRBJ2-1)
CASPTFVLSGEQFF

SEQ ID NO: 429039 - protein, 14 aa, Homo sapiens
  CDR3 for alpha chain variable domain of TCR clone 214520 (TRAV21, TRAJ58)
CAVGEETSGSRLTF

SEQ ID NO: 429040 - protein, 13 aa, Homo sapiens
  CDR3 for beta chain variable domain of TCR clone 214520 (TRBV12-5, TRBJ2-3)
CASGDRQSDTQYF

SEQ ID NO: 429041 - protein, 11 aa, Homo sapiens
  CDR3 for alpha chain variable domain of TCR clone 214521 (TRAV12-3, TRAJ49)
CAMSSGNQCYF

SEQ ID NO: 429042 - protein, 17 aa, Homo sapiens
  CDR3 for beta chain variable domain of TCR clone 214521 (TRBV5-7, TRBJ2-7)
CASSLWRVLAGSYEQYL

SEQ ID NO: 429043 - protein, 14 aa, Homo sapiens
  CDR3 for alpha chain variable domain of TCR clone 214522 (TRAV1-1, TRAJ27)
CAVIYNTNAGKSTF

SEQ ID NO: 429044 - protein, 15 aa, Homo sapiens
  CDR3 for beta chain variable domain of TCR clone 214522 (TRBV4-1, TRBJ2-7)
CASSQQGQGFDEQYF

SEQ ID NO: 429045 - protein, 14 aa, Homo sapiens
  CDR3 for alpha chain variable domain of TCR clone 214523 (TRAV2, TRAJ37)
CAVDFTSNTGKLIF

SEQ ID NO: 429046 - protein, 17 aa, Homo sapiens
  CDR3 for beta chain variable domain of TCR clone 214523 (TRBV20-1, TRBJ2-7)
CSARDPEGDHREYEQYF

SEQ ID NO: 429047 - protein, 15 aa, Homo sapiens
  CDR3 for alpha chain variable domain of TCR clone 214524 (TRAV26-1, TRAJ29)
CIVRVEGSGNSPLVF

SEQ ID NO: 429048 - protein, 14 aa, Homo sapiens
  CDR3 for beta chain variable domain of TCR clone 214524 (TRBV7-6, TRBJ2-3)
CASSLGTVTDTQYF

SEQ ID NO: 429049 - protein, 12 aa, Homo sapiens
  CDR3 for alpha chain variable domain of TCR clone 214525 (TRAV2, TRAJ9)
CAVGAGGFKTIF

SEQ ID NO: 429050 - protein, 14 aa, Homo sapiens
  CDR3 for beta chain variable domain of TCR clone 214525 (TRBV15, TRBJ2-3)
CATRSGTSTDTQYF

SEQ ID NO: 429051 - protein, 14 aa, Homo sapiens
  CDR3 for alpha chain variable domain of TCR clone 214526 (TRAV12-1, TRAJ13)
CVVSLSGGYQKVTF

SEQ ID NO: 429052 - protein, 15 aa, Homo sapiens
  CDR3 for beta chain variable domain of TCR clone 214526 (TRBV6-3, TRBJ2-7)
CASSSPGTVFYEQYF

SEQ ID NO: 429053 - protein, 13 aa, Homo sapiens
  CDR3 for alpha chain variable domain of TCR clone 214527 (TRAV27, TRAJ8)
CAGGPTGFQKLVF

SEQ ID NO: 429054 - protein, 14 aa, Homo sapiens
  CDR3 for beta chain variable domain of TCR clone 214527 (TRBV6-1, TRBJ2-7)
CSSESMGDFYEQYF

SEQ ID NO: 429055 - protein, 15 aa, Homo sapiens
  CDR3 for alpha chain variable domain of TCR clone 214528 (TRAV13-1, TRAJ45)
CAASGSGGGADGLTF

SEQ ID NO: 429056 - protein, 14 aa, Homo sapiens
  CDR3 for beta chain variable domain of TCR clone 214528 (TRBV12-4, TRBJ1-2)
CASSFIGTAYGYTF

SEQ ID NO: 429057 - protein, 14 aa, Homo sapiens
  CDR3 for alpha chain variable domain of TCR clone 214529 (TRAV27, TRAJ17)
CRSTIRAAGNKLTF

SEQ ID NO: 429058 - protein, 16 aa, Homo sapiens
  CDR3 for beta chain variable domain of TCR clone 214529 (TRBV5-7, TRBJ2-5)
CASTFAPAGGRETQYF

SEQ ID NO: 429059 - protein, 13 aa, Homo sapiens
  CDR3 for alpha chain variable domain of TCR clone 214530 (TRAV38-1, TRAJ42)
YARWGGSQGNPIF

SEQ ID NO: 429060 - protein, 10 aa, Homo sapiens
  CDR3 for beta chain variable domain of TCR clone 214530 (TRBV2, TRBJ2-5)
CASSAATQYF

SEQ ID NO: 429061 - protein, 17 aa, Homo sapiens
  CDR3 for alpha chain variable domain of TCR clone 214531 (TRAV3, TRAJ42)
CAVRDRDYGGSQGNLIF

SEQ ID NO: 429062 - protein, 15 aa, Homo sapiens
  CDR3 for beta chain variable domain of TCR clone 214531 (TRBV5-1, TRBJ2-1)
CASSPPRARYNEQFF

SEQ ID NO: 429063 - protein, 11 aa, Homo sapiens
  CDR3 for alpha chain variable domain of TCR clone 214532 (TRAV21, TRAJ34)
CAHYNTDKLIF

SEQ ID NO: 429064 - protein, 16 aa, Homo sapiens
  CDR3 for beta chain variable domain of TCR clone 214532 (TRBV11-2, TRBJ1-2)
CASSLDTGGADYGYTF

SEQ ID NO: 429065 - protein, 13 aa, Homo sapiens
  CDR3 for alpha chain variable domain of TCR clone 214533 (TRAV26-1, )
CIVSHGVEGFWNQ

SEQ ID NO: 429066 - protein, 14 aa, Homo sapiens
  CDR3 for beta chain variable domain of TCR clone 214533 (TRBV20-1, TRBJ2-7)
CSAWTALSSYEQCF

SEQ ID NO: 429067 - protein, 12 aa, Homo sapiens
  CDR3 for alpha chain variable domain of TCR clone 214534 (TRAV30, TRAJ20)
CGTESNDYKLSF

SEQ ID NO: 429068 - protein, 15 aa, Homo sapiens
  CDR3 for beta chain variable domain of TCR clone 214534 (TRBV20-1, TRBJ2-7)
CSARVRVSGMDEQYF

SEQ ID NO: 429069 - protein, 15 aa, Homo sapiens
  CDR3 for alpha chain variable domain of TCR clone 214535 (TRAV2, TRAJ15)
CAVEDREQAGTALIF

SEQ ID NO: 429070 - protein, 13 aa, Homo sapiens
  CDR3 for beta chain variable domain of TCR clone 214535 (TRBV10-2, TRBJ2-7)
CASGTSGGYEQYC

SEQ ID NO: 429071 - protein, 10 aa, Homo sapiens
  CDR3 for alpha chain variable domain of TCR clone 214536 (TRAV9-2, TRAJ49)
CALTGNQFYF

SEQ ID NO: 429072 - protein, 16 aa, Homo sapiens
  CDR3 for beta chain variable domain of TCR clone 214536 (TRBV19, TRBJ2-3)
CASSPGAASRTDEQYF

SEQ ID NO: 429073 - protein, 12 aa, Homo sapiens
  CDR3 for alpha chain variable domain of TCR clone 214537 (TRAV12-2, TRAJ10)
WGVTGGGNKLTF

SEQ ID NO: 429074 - protein, 16 aa, Homo sapiens
  CDR3 for beta chain variable domain of TCR clone 214537 (TRBV6-4, TRBJ1-2)
CASSEAVVDPNYGYTF

SEQ ID NO: 429075 - protein, 16 aa, Homo sapiens
  CDR3 for alpha chain variable domain of TCR clone 214538 (TRAV3, TRAJ4)
CAVRPSPSGGYNKLIF

SEQ ID NO: 429076 - protein, 12 aa, Homo sapiens
  CDR3 for beta chain variable domain of TCR clone 214538 (TRBV7-9, TRBJ2-7)
GASSQGVYEQYF

SEQ ID NO: 429077 - protein, 16 aa, Homo sapiens
  CDR3 for alpha chain variable domain of TCR clone 214539 (TRAV8-3, TRAJ44)
CAVGTLMTGTASKLTF

SEQ ID NO: 429078 - protein, 14 aa, Homo sapiens
  CDR3 for beta chain variable domain of TCR clone 214539 (TRBV20-1, TRBJ2-5)
CSAHRQGLWETQYF

SEQ ID NO: 429079 - protein, 18 aa, Homo sapiens
  CDR3 for alpha chain variable domain of TCR clone 214540 (TRAV12-3, TRAJ52)
CAMSVGGAGGTSYGKLTF

SEQ ID NO: 429080 - protein, 18 aa, Homo sapiens
  CDR3 for beta chain variable domain of TCR clone 214540 (TRBV20-1, TRBJ2-6)
CSARTLAGGPSGANVLTF

SEQ ID NO: 429081 - protein, 13 aa, Homo sapiens
  CDR3 for alpha chain variable domain of TCR clone 214541 (TRAV13-1, TRAJ5)
CAASDTGRRALTF

SEQ ID NO: 429082 - protein, 12 aa, Homo sapiens
  CDR3 for beta chain variable domain of TCR clone 214541 (TRBV28, TRBJ2-3)
CANSLYRDTQYF

SEQ ID NO: 429083 - protein, 16 aa, Homo sapiens
  CDR3 for alpha chain variable domain of TCR clone 214542 (TRAV13-1, TRAJ18)
CAASRMRGSTLGRLYF

SEQ ID NO: 429084 - protein, 16 aa, Homo sapiens
  CDR3 for beta chain variable domain of TCR clone 214542 (TRBV27, TRBJ1-1)
CASSSRGRTGYAEAFF

SEQ ID NO: 429085 - protein, 17 aa, Homo sapiens
  CDR3 for alpha chain variable domain of TCR clone 214543 (TRAV12-3, TRAJ41)
CAMRFTKLKFRISRTLN

SEQ ID NO: 429086 - protein, 15 aa, Homo sapiens
  CDR3 for beta chain variable domain of TCR clone 214543 (TRBV3-1, TRBJ2-5)
CASSANLGGPETQYF

SEQ ID NO: 429087 - protein, 11 aa, Homo sapiens
  CDR3 for alpha chain variable domain of TCR clone 214544 (TRAV13-1, TRAJ6)
CATLGSYIPTF

SEQ ID NO: 429088 - protein, 12 aa, Homo sapiens
  CDR3 for beta chain variable domain of TCR clone 214544 (TRBV11-2, TRBJ2-1)
WASSPGNNEQFF

SEQ ID NO: 429089 - protein, 12 aa, Homo sapiens
  CDR3 for alpha chain variable domain of TCR clone 214545 (TRAV2, TRAJ33)
CAVPDSNYRLIW

SEQ ID NO: 429090 - protein, 20 aa, Homo sapiens
  CDR3 for beta chain variable domain of TCR clone 214545 (TRBV19, TRBJ2-1)
CASSISRTVTSTRLNNEQFF

SEQ ID NO: 429091 - protein, 11 aa, Homo sapiens
  CDR3 for alpha chain variable domain of TCR clone 214546 (TRAV12-2, TRAJ31)
CAILNNARLMF

SEQ ID NO: 429092 - protein, 15 aa, Homo sapiens
  CDR3 for beta chain variable domain of TCR clone 214546 (TRBV4-1, TRBJ2-5)
CASSQWDLYQETQYF

SEQ ID NO: 429093 - protein, 16 aa, Homo sapiens
  CDR3 for alpha chain variable domain of TCR clone 214547 (TRAV30, TRAJ24)
CGTEIVDADSWGKFKF

SEQ ID NO: 429094 - protein, 17 aa, Homo sapiens
  CDR3 for beta chain variable domain of TCR clone 214547 (TRBV12-4, TRBJ2-3)
CASSGPGLAGGADTQYF

SEQ ID NO: 429095 - protein, 12 aa, Homo sapiens
  CDR3 for alpha chain variable domain of TCR clone 214548 (TRAV12-3, TRAJ17)
CAMTLTGNKLTF

SEQ ID NO: 429096 - protein, 16 aa, Homo sapiens
  CDR3 for beta chain variable domain of TCR clone 214548 (TRBV3-1, TRBJ2-5)
CASSPGQFNGFGTQYF

SEQ ID NO: 429097 - protein, 15 aa, Homo sapiens
  CDR3 for alpha chain variable domain of TCR clone 214549 (TRAV3, TRAJ5)
CAVRDLDTGRRALTS

SEQ ID NO: 429098 - protein, 15 aa, Homo sapiens
  CDR3 for beta chain variable domain of TCR clone 214549 (TRBV20-1, TRBJ2-7)
CSARDRVSGMDEQYF

SEQ ID NO: 429099 - protein, 14 aa, Homo sapiens
  CDR3 for alpha chain variable domain of TCR clone 214550 (TRAV6, TRAJ6)
CALPTSGGSYIPTF

SEQ ID NO: 429100 - protein, 15 aa, Homo sapiens
  CDR3 for beta chain variable domain of TCR clone 214550 (TRBV9, TRBJ1-6)
CASSVAGTGDSPLHF

SEQ ID NO: 429101 - protein, 14 aa, Homo sapiens
  CDR3 for alpha chain variable domain of TCR clone 214551 (TRAV8-3, TRAJ4)
CAVGAAGGYSKLIF

SEQ ID NO: 429102 - protein, 15 aa, Homo sapiens
  CDR3 for beta chain variable domain of TCR clone 214551 (TRBV20-1, TRBJ2-5)
CSAPPRTGFGETQYF

SEQ ID NO: 429103 - protein, 14 aa, Homo sapiens
  CDR3 for alpha chain variable domain of TCR clone 214552 (TRAV1-2, TRAJ8)
CAVREDTGFPKLVF

SEQ ID NO: 429104 - protein, 14 aa, Homo sapiens
  CDR3 for beta chain variable domain of TCR clone 214552 (TRBV4-2, TRBJ2-1)
CASGLDRAYNEQFF

SEQ ID NO: 429105 - protein, 13 aa, Homo sapiens
  CDR3 for alpha chain variable domain of TCR clone 214553 (TRAV1-2, TRAJ6)
CAVREGGSYIPTF

SEQ ID NO: 429106 - protein, 16 aa, Homo sapiens
  CDR3 for beta chain variable domain of TCR clone 214553 (TRBV12-5, TRBJ2-5)
CASGPRTSGNQETQYF

SEQ ID NO: 429107 - protein, 11 aa, Homo sapiens
  CDR3 for alpha chain variable domain of TCR clone 214554 (TRAV3, TRAJ21)
CAVGTFNTFYF

SEQ ID NO: 429108 - protein, 16 aa, Homo sapiens
  CDR3 for beta chain variable domain of TCR clone 214554 (TRBV19, TRBJ2-1)
CASSKAGPSSYNEQFF

SEQ ID NO: 429109 - protein, 14 aa, Homo sapiens
  CDR3 for alpha chain variable domain of TCR clone 214555 (TRAV12-1, TRAJ43)
CVVNGRSNNNDMRF

SEQ ID NO: 429110 - protein, 15 aa, Homo sapiens
  CDR3 for beta chain variable domain of TCR clone 214555 (TRBV4-1, TRBJ2-5)
CASSQWDLYQETQYF

SEQ ID NO: 429111 - protein, 12 aa, Homo sapiens
  CDR3 for alpha chain variable domain of TCR clone 214556 (TRAV12-2, TRAJ29)
CAVDSGNTPLVF

SEQ ID NO: 429112 - protein, 16 aa, Homo sapiens
  CDR3 for beta chain variable domain of TCR clone 214556 (TRBV7-3, TRBJ2-2)
CASSLKRGTLSGELFF

SEQ ID NO: 429113 - protein, 15 aa, Homo sapiens
  CDR3 for alpha chain variable domain of TCR clone 214557 (TRAV12-3, TRAJ6)
CAMSATTGGSYIPTF

SEQ ID NO: 429114 - protein, 14 aa, Homo sapiens
  CDR3 for beta chain variable domain of TCR clone 214557 (TRBV13, TRBJ2-5)
CASSLERVGEAQYF

SEQ ID NO: 429115 - protein, 10 aa, Homo sapiens
  CDR3 for alpha chain variable domain of TCR clone 214558 (TRAV2, TRAJ34)
CAVVNDKRIF

SEQ ID NO: 429116 - protein, 14 aa, Homo sapiens
  CDR3 for beta chain variable domain of TCR clone 214558 (TRBV20-1, TRBJ2-3)
CSARGGTSTDTQYF

SEQ ID NO: 429117 - protein, 15 aa, Homo sapiens
  CDR3 for alpha chain variable domain of TCR clone 214559 (TRAV8-3, TRAJ11)
CAVGLLNSGYSTLTF

SEQ ID NO: 429118 - protein, 13 aa, Homo sapiens
  CDR3 for beta chain variable domain of TCR clone 214559 (TRBV7-9, TRBJ2-5)
CASLSPGQETQYF

SEQ ID NO: 429119 - protein, 12 aa, Homo sapiens
  CDR3 for alpha chain variable domain of TCR clone 214560 (TRAV13-2, TRAJ23)
CAERHRGGKLIF

SEQ ID NO: 429120 - protein, 16 aa, Homo sapiens
  CDR3 for beta chain variable domain of TCR clone 214560 (TRBV2, TRBJ2-2)
CASSAFGDANTGELFF

SEQ ID NO: 429121 - protein, 14 aa, Homo sapiens
  CDR3 for alpha chain variable domain of TCR clone 214561 (TRAV38-1, TRAJ45)
CASHSGGGADGLTF

SEQ ID NO: 429122 - protein, 16 aa, Homo sapiens
  CDR3 for beta chain variable domain of TCR clone 214561 (TRBV3-1, TRBJ2-5)
CASSPGQFNGFGTQYF

SEQ ID NO: 429123 - protein, 16 aa, Homo sapiens
  CDR3 for alpha chain variable domain of TCR clone 214562 (TRAV26-1, TRAJ38)
CIVRVSGAGNNRKRIW

SEQ ID NO: 429124 - protein, 17 aa, Homo sapiens
  CDR3 for beta chain variable domain of TCR clone 214562 (TRBV5-1, TRBJ1-5)
CASSLGLYRVRNQPQHF

SEQ ID NO: 429125 - protein, 11 aa, Homo sapiens
  CDR3 for alpha chain variable domain of TCR clone 214563 (TRAV17, TRAJ39)
CATDPYNMLTF

SEQ ID NO: 429126 - protein, 13 aa, Homo sapiens
  CDR3 for beta chain variable domain of TCR clone 214563 (TRBV7-8, TRBJ2-1)
CASTRDAVGEQFF

SEQ ID NO: 429127 - protein, 14 aa, Homo sapiens
  CDR3 for alpha chain variable domain of TCR clone 214564 (TRAV12-2, TRAJ5)
CAVNRSTGRRALTF

SEQ ID NO: 429128 - protein, 12 aa, Homo sapiens
  CDR3 for beta chain variable domain of TCR clone 214564 (TRBV19, TRBJ1-5)
CASSIAQQTQNL

SEQ ID NO: 429129 - protein, 11 aa, Homo sapiens
  CDR3 for alpha chain variable domain of TCR clone 214565 (TRAV4, TRAJ23)
CLVAPGGKLIF

SEQ ID NO: 429130 - protein, 15 aa, Homo sapiens
  CDR3 for beta chain variable domain of TCR clone 214565 (TRBV11-3, TRBJ2-7)
CASSPGPASSYEQYV

SEQ ID NO: 429131 - protein, 15 aa, Homo sapiens
  CDR3 for alpha chain variable domain of TCR clone 214566 (TRAV3, TRAJ22)
CAVRDRGGSARQPTF

SEQ ID NO: 429132 - protein, 13 aa, Homo sapiens
  CDR3 for beta chain variable domain of TCR clone 214566 (TRBV7-3, TRBJ2-1)
CASSPVAYNEQFF

SEQ ID NO: 429133 - protein, 17 aa, Homo sapiens
  CDR3 for alpha chain variable domain of TCR clone 214567 (TRAV3, )
CAVSSNSGYPEPLPCRV

SEQ ID NO: 429134 - protein, 13 aa, Homo sapiens
  CDR3 for beta chain variable domain of TCR clone 214567 (TRBV20-1, TRBJ2-2)
CSALSGGAGELFF

SEQ ID NO: 429135 - protein, 17 aa, Homo sapiens
  CDR3 for alpha chain variable domain of TCR clone 214568 (TRAV3, TRAJ6)
CAVRDGPRSGGSYIPTF

SEQ ID NO: 429136 - protein, 14 aa, Homo sapiens
  CDR3 for beta chain variable domain of TCR clone 214568 (TRBV11-2, TRBJ2-3)
CASSRLARTDTQYF

SEQ ID NO: 429137 - protein, 16 aa, Homo sapiens
  CDR3 for alpha chain variable domain of TCR clone 214569 (TRAV12-2, TRAJ40)
CAVIRGGTSGTYKYIF

SEQ ID NO: 429138 - protein, 19 aa, Homo sapiens
  CDR3 for beta chain variable domain of TCR clone 214569 (TRBV11-2, TRBJ2-2)
LRTRPCISVPAAYPGSCFF

SEQ ID NO: 429139 - protein, 15 aa, Homo sapiens
  CDR3 for alpha chain variable domain of TCR clone 214570 (TRAV10, TRAJ6)
RVVRPRTGGSYIPTF

SEQ ID NO: 429140 - protein, 14 aa, Homo sapiens
  CDR3 for beta chain variable domain of TCR clone 214570 (TRBV20-1, TRBJ2-4)
CSASGRVGENMQYF

SEQ ID NO: 429141 - protein, 14 aa, Homo sapiens
  CDR3 for alpha chain variable domain of TCR clone 214571 (TRAV1-2, TRAJ4)
CAVRSPGGYNKLIF

SEQ ID NO: 429142 - protein, 16 aa, Homo sapiens
  CDR3 for beta chain variable domain of TCR clone 214571 (TRBV20-1, TRBJ2-3)
CSAAGGRGVSTDTQYF

SEQ ID NO: 429143 - protein, 15 aa, Homo sapiens
  CDR3 for alpha chain variable domain of TCR clone 214572 (TRAV8-4, TRAJ37)
CAVTYGSSNTGKLIF

SEQ ID NO: 429144 - protein, 13 aa, Homo sapiens
  CDR3 for beta chain variable domain of TCR clone 214572 (TRBV12-3, TRBJ2-5)
CASSLGGSRTQYF

SEQ ID NO: 429145 - protein, 22 aa, Homo sapiens
  CDR3 for alpha chain variable domain of TCR clone 214573 (TRAV13-1, TRAJ37)
CAARIGGLWQHRQTNLWARDNF

SEQ ID NO: 429146 - protein, 12 aa, Homo sapiens
  CDR3 for beta chain variable domain of TCR clone 214573 (TRBV11-2, TRBJ2-2)
CASSLGGGELFF

SEQ ID NO: 429147 - protein, 17 aa, Homo sapiens
  CDR3 for alpha chain variable domain of TCR clone 214574 (TRAV4, TRAJ42)
CLVGVLNYGGSQGNLIF

SEQ ID NO: 429148 - protein, 12 aa, Homo sapiens
  CDR3 for beta chain variable domain of TCR clone 214574 (TRBV9, TRBJ1-2)
CASSVGDYGYTF

SEQ ID NO: 429149 - protein, 12 aa, Homo sapiens
  CDR3 for alpha chain variable domain of TCR clone 214575 (TRAV21, TRAJ8)
CAVNTGFQTLVF

SEQ ID NO: 429150 - protein, 14 aa, Homo sapiens
  CDR3 for beta chain variable domain of TCR clone 214575 (TRBV6-1, TRBJ1-1)
CASSGTGLNTEAFF

SEQ ID NO: 429151 - protein, 14 aa, Homo sapiens
  CDR3 for alpha chain variable domain of TCR clone 214576 (TRAV26-1, TRAJ29)
CIVRGTSGNTPLVF

SEQ ID NO: 429152 - protein, 15 aa, Homo sapiens
  CDR3 for beta chain variable domain of TCR clone 214576 (TRBV20-1, TRBJ2-7)
CSARDRVSGMDEQYF

SEQ ID NO: 429153 - protein, 13 aa, Homo sapiens
  CDR3 for alpha chain variable domain of TCR clone 214577 (TRAV2, TRAJ40)
FALVTSGTYKYIF

SEQ ID NO: 429154 - protein, 14 aa, Homo sapiens
  CDR3 for beta chain variable domain of TCR clone 214577 (TRBV19, TRBJ2-1)
CASPTFVLSGEQFF

SEQ ID NO: 429155 - protein, 14 aa, Homo sapiens
  CDR3 for alpha chain variable domain of TCR clone 214578 (TRAV12-2, TRAJ40)
CAVNIPSGTYKYIF

SEQ ID NO: 429156 - protein, 14 aa, Homo sapiens
  CDR3 for beta chain variable domain of TCR clone 214578 (TRBV18, TRBJ2-5)
CASSPLRVQETQYF

SEQ ID NO: 429157 - protein, 17 aa, Homo sapiens
  CDR3 for alpha chain variable domain of TCR clone 214579 (TRAV38-2/DV8, TRAJ45)
CADRSRYSGGGADGLTF

SEQ ID NO: 429158 - protein, 15 aa, Homo sapiens
  CDR3 for beta chain variable domain of TCR clone 214579 (TRBV19, TRBJ2-1)
CASIKGRGPYNEQFF

SEQ ID NO: 429159 - protein, 19 aa, Homo sapiens
  CDR3 for alpha chain variable domain of TCR clone 214580 (TRAV26-1, TRAJ28)
CIVRVAHAYSGAGSYQLTF

SEQ ID NO: 429160 - protein, 15 aa, Homo sapiens
  CDR3 for beta chain variable domain of TCR clone 214580 (TRBV5-1, TRBJ1-3)
CASSLKTGAGNTIYF

SEQ ID NO: 429161 - protein, 14 aa, Homo sapiens
  CDR3 for alpha chain variable domain of TCR clone 214581 (TRAV12-2, TRAJ17)
CAVLFKAAGNKLTF

SEQ ID NO: 429162 - protein, 17 aa, Homo sapiens
  CDR3 for beta chain variable domain of TCR clone 214581 (TRBV18, TRBJ2-1)
CASSKGLSGGADNEQFF

SEQ ID NO: 429163 - protein, 14 aa, Homo sapiens
  CDR3 for alpha chain variable domain of TCR clone 214582 (TRAV1-2, TRAJ16)
CAVNRFSYGQKLLF

SEQ ID NO: 429164 - protein, 14 aa, Homo sapiens
  CDR3 for beta chain variable domain of TCR clone 214582 (TRBV7-2, TRBJ2-7)
CASSLRWEVNEQYF

SEQ ID NO: 429165 - protein, 14 aa, Homo sapiens
  CDR3 for alpha chain variable domain of TCR clone 214583 (TRAV1-2, TRAJ16)
CAVNRFSDGQKLLF

SEQ ID NO: 429166 - protein, 12 aa, Homo sapiens
  CDR3 for beta chain variable domain of TCR clone 214583 (TRBV3-1, TRBJ2-7)
CASSQDRDEQYF

SEQ ID NO: 429167 - protein, 13 aa, Homo sapiens
  CDR3 for alpha chain variable domain of TCR clone 214584 (TRAV8-1, TRAJ30)
CAVLMNRDDKIIF

SEQ ID NO: 429168 - protein, 14 aa, Homo sapiens
  CDR3 for beta chain variable domain of TCR clone 214584 (TRBV7-2, TRBJ1-6)
CASSLQGANSPLHF

SEQ ID NO: 429169 - protein, 14 aa, Homo sapiens
  CDR3 for alpha chain variable domain of TCR clone 214585 (TRAV1-2, TRAJ16)
CAVNRFSAGQKLLF

SEQ ID NO: 429170 - protein, 15 aa, Homo sapiens
  CDR3 for beta chain variable domain of TCR clone 214585 (TRBV7-9, TRBJ1-6)
CASSSPGRGNSTLHF

SEQ ID NO: 429171 - protein, 14 aa, Homo sapiens
  CDR3 for alpha chain variable domain of TCR clone 214586 (TRAV9-2, TRAJ39)
CALYIYNAGNMPTF

SEQ ID NO: 429172 - protein, 15 aa, Homo sapiens
  CDR3 for beta chain variable domain of TCR clone 214586 (TRBV5-1, TRBJ2-1)
CASSPPRAPYNEQFF

SEQ ID NO: 429173 - protein, 12 aa, Homo sapiens
  CDR3 for alpha chain variable domain of TCR clone 214587 (TRAV35, TRAJ49)
CAGWNTGNQFYF

SEQ ID NO: 429174 - protein, 16 aa, Homo sapiens
  CDR3 for beta chain variable domain of TCR clone 214587 (TRBV5-1, TRBJ2-2)
CASSLWDTTNTGALFF

SEQ ID NO: 429175 - protein, 14 aa, Homo sapiens
  CDR3 for alpha chain variable domain of TCR clone 214588 (TRAV1-2, TRAJ8)
RAVREDTGFQKLVF

SEQ ID NO: 429176 - protein, 12 aa, Homo sapiens
  CDR3 for beta chain variable domain of TCR clone 214588 (TRBV7-9, TRBJ2-7)
CASSFGSYEQYF

SEQ ID NO: 429177 - protein, 14 aa, Homo sapiens
  CDR3 for alpha chain variable domain of TCR clone 214589 (TRAV12-3, TRAJ6)
CAMSATGGSYIPTF

SEQ ID NO: 429178 - protein, 16 aa, Homo sapiens
  CDR3 for beta chain variable domain of TCR clone 214589 (TRBV4-2, TRBJ2-1)
CASSPRAGQGANELFF

SEQ ID NO: 429179 - protein, 14 aa, Homo sapiens
  CDR3 for alpha chain variable domain of TCR clone 214590 (TRAV6, TRAJ5)
CALDAPTGRRALTS

SEQ ID NO: 429180 - protein, 15 aa, Homo sapiens
  CDR3 for beta chain variable domain of TCR clone 214590 (TRBV27, TRBJ2-7)
CASRLWGQGADEQYF

SEQ ID NO: 429181 - protein, 14 aa, Homo sapiens
  CDR3 for alpha chain variable domain of TCR clone 214591 (TRAV8-6, TRAJ8)
CAVNENTGFQKLVF

SEQ ID NO: 429182 - protein, 11 aa, Homo sapiens
  CDR3 for beta chain variable domain of TCR clone 214591 (TRBV29-1, TRBJ2-5)
CSEDRTGTQYV

SEQ ID NO: 429183 - protein, 13 aa, Homo sapiens
  CDR3 for alpha chain variable domain of TCR clone 214592 (TRAV2, TRAJ40)
CAVVTSGTYRYIF

SEQ ID NO: 429184 - protein, 16 aa, Homo sapiens
  CDR3 for beta chain variable domain of TCR clone 214592 (TRBV19, TRBJ2-1)
CASSKAGPSSYNEQFF

SEQ ID NO: 429185 - protein, 17 aa, Homo sapiens
  CDR3 for alpha chain variable domain of TCR clone 214593 (TRAV12-3, TRAJ6)
CSMSARGGAGGSYIPTF

SEQ ID NO: 429186 - protein, 12 aa, Homo sapiens
  CDR3 for beta chain variable domain of TCR clone 214593 (TRBV12-4, TRBJ2-3)
CASSTLPDTQYF

SEQ ID NO: 429187 - protein, 15 aa, Homo sapiens
  CDR3 for alpha chain variable domain of TCR clone 214594 (TRAV27, TRAJ38)
CAARRNAGNNRKPIL

SEQ ID NO: 429188 - protein, 13 aa, Homo sapiens
  CDR3 for beta chain variable domain of TCR clone 214594 (TRBV12-5, TRBJ2-3)
CASGERQSDTQYF

SEQ ID NO: 429189 - protein, 15 aa, Homo sapiens
  CDR3 for alpha chain variable domain of TCR clone 214595 (TRAV26-1, TRAJ40)
CIVRAVPAGTYKYIF

SEQ ID NO: 429190 - protein, 14 aa, Homo sapiens
  CDR3 for beta chain variable domain of TCR clone 214595 (TRBV19, TRBJ2-1)
CASKDPGLANEQFF

SEQ ID NO: 429191 - protein, 13 aa, Homo sapiens
  CDR3 for alpha chain variable domain of TCR clone 214596 (TRAV4, TRAJ34)
CLVGDYNTDKLIF

SEQ ID NO: 429192 - protein, 18 aa, Homo sapiens
  CDR3 for beta chain variable domain of TCR clone 214596 (TRBV20-1, TRBJ2-6)
CSAETTPTHGSGANVLTF

SEQ ID NO: 429193 - protein, 16 aa, Homo sapiens
  CDR3 for alpha chain variable domain of TCR clone 214597 (TRAV4, TRAJ42)
CLVGPIYGRSQGNLIF

SEQ ID NO: 429194 - protein, 13 aa, Homo sapiens
  CDR3 for beta chain variable domain of TCR clone 214597 (TRBV11-2, TRBJ2-7)
CASSPLGSYEQYF

SEQ ID NO: 429195 - protein, 11 aa, Homo sapiens
  CDR3 for alpha chain variable domain of TCR clone 214598 (TRAV35, TRAJ34)
CWARNTDKLIF

SEQ ID NO: 429196 - protein, 15 aa, Homo sapiens
  CDR3 for beta chain variable domain of TCR clone 214598 (TRBV7-9, TRBJ1-6)
CASSSPGRGNSPLHF

SEQ ID NO: 429197 - protein, 14 aa, Homo sapiens
  CDR3 for alpha chain variable domain of TCR clone 214599 (TRAV23/DV6, TRAJ37)
CAASTSSNTGKLIF

SEQ ID NO: 429198 - protein, 16 aa, Homo sapiens
  CDR3 for beta chain variable domain of TCR clone 214599 (TRBV7-2, TRBJ1-2)
CASSSNQDRRGHGYTF

SEQ ID NO: 429199 - protein, 13 aa, Homo sapiens
  CDR3 for alpha chain variable domain of TCR clone 214600 (TRAV8-1, TRAJ30)
CAVTMNRDDKIIL

SEQ ID NO: 429200 - protein, 14 aa, Homo sapiens
  CDR3 for beta chain variable domain of TCR clone 214600 (TRBV7-2, TRBJ1-6)
CASSLQGANSPLHF

SEQ ID NO: 429201 - protein, 13 aa, Homo sapiens
  CDR3 for alpha chain variable domain of TCR clone 214601 (TRAV3, TRAJ36)
CAVKRTGANNLFF

SEQ ID NO: 429202 - protein, 14 aa, Homo sapiens
  CDR3 for beta chain variable domain of TCR clone 214601 (TRBV4-2, TRBJ2-1)
CASGLDRAYNEQFF

SEQ ID NO: 429203 - protein, 16 aa, Homo sapiens
  CDR3 for alpha chain variable domain of TCR clone 214602 (TRAV12-3, TRAJ53)
CAMSPGSGGSNYKLTF

SEQ ID NO: 429204 - protein, 12 aa, Homo sapiens
  CDR3 for beta chain variable domain of TCR clone 214602 (TRBV14, TRBJ2-5)
CASSQLKETQYF

SEQ ID NO: 429205 - protein, 14 aa, Homo sapiens
  CDR3 for alpha chain variable domain of TCR clone 214603 (TRAV2, TRAJ29)
CAGPFQYGNTPLVF

SEQ ID NO: 429206 - protein, 11 aa, Homo sapiens
  CDR3 for beta chain variable domain of TCR clone 214603 (TRBV29-1, TRBJ2-5)
CSEDRTGTHYF

SEQ ID NO: 429207 - protein, 13 aa, Homo sapiens
  CDR3 for alpha chain variable domain of TCR clone 214604 (TRAV23/DV6, TRAJ27)
CAASKPMQANQPF

SEQ ID NO: 429208 - protein, 14 aa, Homo sapiens
  CDR3 for beta chain variable domain of TCR clone 214604 (TRBV5-4, TRBJ1-1)
CASSLDSGRDEAFF

SEQ ID NO: 429209 - protein, 13 aa, Homo sapiens
  CDR3 for alpha chain variable domain of TCR clone 214605 (TRAV35, TRAJ44)
CAWLSGTASKLTF

SEQ ID NO: 429210 - protein, 17 aa, Homo sapiens
  CDR3 for beta chain variable domain of TCR clone 214605 (TRBV7-8, TRBJ1-2)
CASSLRPLQGHLYGYTF

SEQ ID NO: 429211 - protein, 11 aa, Homo sapiens
  CDR3 for alpha chain variable domain of TCR clone 214606 (TRAV13-1, TRAJ6)
CATLGSYIPTF

SEQ ID NO: 429212 - protein, 13 aa, Homo sapiens
  CDR3 for beta chain variable domain of TCR clone 214606 (TRBV6-6, TRBJ2-1)
CASSWHQGDEQFF

SEQ ID NO: 429213 - protein, 12 aa, Homo sapiens
  CDR3 for alpha chain variable domain of TCR clone 214607 (TRAV13-1, TRAJ3)
CAATSTASKIIF

SEQ ID NO: 429214 - protein, 15 aa, Homo sapiens
  CDR3 for beta chain variable domain of TCR clone 214607 (TRBV20-1, TRBJ2-5)
CSAPPRTGFGETQYF

SEQ ID NO: 429215 - protein, 12 aa, Homo sapiens
  CDR3 for alpha chain variable domain of TCR clone 214608 (TRAV29/DV5, TRAJ34)
CASRHNTDKLIF

SEQ ID NO: 429216 - protein, 15 aa, Homo sapiens
  CDR3 for beta chain variable domain of TCR clone 214608 (TRBV19, TRBJ2-7)
CASSPAGSGEALRYF

SEQ ID NO: 429217 - protein, 16 aa, Homo sapiens
  CDR3 for alpha chain variable domain of TCR clone 214609 (TRAV20, TRAJ22)
CAVQASSSGSARQLTF

SEQ ID NO: 429218 - protein, 13 aa, Homo sapiens
  CDR3 for beta chain variable domain of TCR clone 214609 (TRBV7-2, TRBJ2-5)
CASSQTSEETQYF

SEQ ID NO: 429219 - protein, 13 aa, Homo sapiens
  CDR3 for alpha chain variable domain of TCR clone 214610 (TRAV14/DV4, TRAJ20)
RAMRESKDYKLSF

SEQ ID NO: 429220 - protein, 15 aa, Homo sapiens
  CDR3 for beta chain variable domain of TCR clone 214610 (TRBV7-9, TRBJ1-1)
CASSRPGTANTEAFF

SEQ ID NO: 429221 - protein, 16 aa, Homo sapiens
  CDR3 for alpha chain variable domain of TCR clone 214611 (TRAV8-4, TRAJ5)
CAVSPLTDTGRRALTF

SEQ ID NO: 429222 - protein, 13 aa, Homo sapiens
  CDR3 for beta chain variable domain of TCR clone 214611 (TRBV20-1, TRBJ2-2)
CSASAAGTGELFF

SEQ ID NO: 429223 - protein, 17 aa, Homo sapiens
  CDR3 for alpha chain variable domain of TCR clone 214612 (TRAV13-1, TRAJ31)
CAPRDRLMFGDGTQLVV

SEQ ID NO: 429224 - protein, 16 aa, Homo sapiens
  CDR3 for beta chain variable domain of TCR clone 214612 (TRBV10-3, TRBJ2-1)
CAISGVGDGGGGEQFF

SEQ ID NO: 429225 - protein, 14 aa, Homo sapiens
  CDR3 for alpha chain variable domain of TCR clone 214613 (TRAV26-1, TRAJ48)
CIVRVGFGDEKLTF

SEQ ID NO: 429226 - protein, 14 aa, Homo sapiens
  CDR3 for beta chain variable domain of TCR clone 214613 (TRBV12-4, TRBJ1-1)
CASSLGTGGTEAFF

SEQ ID NO: 429227 - protein, 18 aa, Homo sapiens
  CDR3 for alpha chain variable domain of TCR clone 214614 (TRAV21, TRAJ52)
CAVRPSPTGGTSYGKLTF

SEQ ID NO: 429228 - protein, 17 aa, Homo sapiens
  CDR3 for beta chain variable domain of TCR clone 214614 (TRBV13, TRBJ2-3)
CASSLARVAGGRNTQYF

SEQ ID NO: 429229 - protein, 12 aa, Homo sapiens
  CDR3 for alpha chain variable domain of TCR clone 214615 (TRAV8-3, TRAJ20)
CAVDFNDYKLSF

SEQ ID NO: 429230 - protein, 11 aa, Homo sapiens
  CDR3 for beta chain variable domain of TCR clone 214615 (TRBV11-2, TRBJ2-2)
CASSLPGELFF

SEQ ID NO: 429231 - protein, 12 aa, Homo sapiens
  CDR3 for alpha chain variable domain of TCR clone 214616 (TRAV6, TRAJ27)
CSRIRGAGKSTF

SEQ ID NO: 429232 - protein, 15 aa, Homo sapiens
  CDR3 for beta chain variable domain of TCR clone 214616 (TRBV7-9, TRBJ1-5)
CASSQGHQPNQPQHF

SEQ ID NO: 429233 - protein, 17 aa, Homo sapiens
  CDR3 for alpha chain variable domain of TCR clone 214617 (TRAV13-1, TRAJ52)
CAASAGAGCTSYGKLTF

SEQ ID NO: 429234 - protein, 15 aa, Homo sapiens
  CDR3 for beta chain variable domain of TCR clone 214617 (TRBV7-8, TRBJ2-7)
CDSSLRHFEAYEQYF

SEQ ID NO: 429235 - protein, 18 aa, Homo sapiens
  CDR3 for alpha chain variable domain of TCR clone 214618 (TRAV21, TRAJ52)
CAVRPSPAGGTIYGKLAF

SEQ ID NO: 429236 - protein, 15 aa, Homo sapiens
  CDR3 for beta chain variable domain of TCR clone 214618 (TRBV20-1, TRBJ2-5)
CSATPLTGDQETQYF

SEQ ID NO: 429237 - protein, 13 aa, Homo sapiens
  CDR3 for alpha chain variable domain of TCR clone 214619 (TRAV3, TRAJ21)
CAVRDPDFNKFYF

SEQ ID NO: 429238 - protein, 18 aa, Homo sapiens
  CDR3 for beta chain variable domain of TCR clone 214619 (TRBV20-1, TRBJ2-6)
CSAETTPTHGSGANVLTF

SEQ ID NO: 429239 - protein, 15 aa, Homo sapiens
  CDR3 for alpha chain variable domain of TCR clone 214620 (TRAV4, TRAJ39)
CLVGTNNNAGNMLTF

SEQ ID NO: 429240 - protein, 16 aa, Homo sapiens
  CDR3 for beta chain variable domain of TCR clone 214620 (TRBV13, TRBJ2-2)
CASSPRTGEHTGELFF

SEQ ID NO: 429241 - protein, 14 aa, Homo sapiens
  CDR3 for alpha chain variable domain of TCR clone 214621 (TRAV9-2, TRAJ22)
CALTGASSARQLTF

SEQ ID NO: 429242 - protein, 15 aa, Homo sapiens
  CDR3 for beta chain variable domain of TCR clone 214621 (TRBV29-1, TRBJ2-1)
CSGRDRKSSYNEQFF

SEQ ID NO: 429243 - protein, 11 aa, Homo sapiens
  CDR3 for alpha chain variable domain of TCR clone 214622 (TRAV12-2, TRAJ30)
CAVGRDDKIIF

SEQ ID NO: 429244 - protein, 14 aa, Homo sapiens
  CDR3 for beta chain variable domain of TCR clone 214622 (TRBV5-7, TRBJ1-1)
CASSLAGDWTEAFF

SEQ ID NO: 429245 - protein, 11 aa, Homo sapiens
  CDR3 for alpha chain variable domain of TCR clone 214623 (TRAV2, TRAJ33)
CAVESNYQLIW

SEQ ID NO: 429246 - protein, 16 aa, Homo sapiens
  CDR3 for beta chain variable domain of TCR clone 214623 (TRBV10-3, TRBJ2-7)
CAISADFADRPYEQYF

SEQ ID NO: 429247 - protein, 16 aa, Homo sapiens
  CDR3 for alpha chain variable domain of TCR clone 214624 (TRAV12-2, TRAJ32)
CAVDMNYGGATNKLIF

SEQ ID NO: 429248 - protein, 16 aa, Homo sapiens
  CDR3 for beta chain variable domain of TCR clone 214624 (TRBV7-8, TRBJ2-3)
CASSTEGQRETDTQYF

SEQ ID NO: 429249 - protein, 11 aa, Homo sapiens
  CDR3 for alpha chain variable domain of TCR clone 214625 (TRAV3, TRAJ21)
CALVNFNKFYF

SEQ ID NO: 429250 - protein, 16 aa, Homo sapiens
  CDR3 for beta chain variable domain of TCR clone 214625 (TRBV19, TRBJ2-1)
CASSKAGPSSYNEQFF

SEQ ID NO: 429251 - protein, 14 aa, Homo sapiens
  CDR3 for alpha chain variable domain of TCR clone 214626 (TRAV1-2, TRAJ16)
CAVNRFSDGQKLLF

SEQ ID NO: 429252 - protein, 14 aa, Homo sapiens
  CDR3 for beta chain variable domain of TCR clone 214626 (TRBV19, TRBJ2-1)
CASSKDRGQDEQFF

SEQ ID NO: 429253 - protein, 15 aa, Homo sapiens
  CDR3 for alpha chain variable domain of TCR clone 214627 (TRAV40, TRAJ45)
CLLGDRGGGADGLTF

SEQ ID NO: 429254 - protein, 13 aa, Homo sapiens
  CDR3 for beta chain variable domain of TCR clone 214627 (TRBV7-9, TRBJ1-2)
CASSLKQNYGYTF

SEQ ID NO: 429255 - protein, 10 aa, Homo sapiens
  CDR3 for alpha chain variable domain of TCR clone 214628 (TRAV12-1, TRAJ20)
CAIYFQRLQA

SEQ ID NO: 429256 - protein, 16 aa, Homo sapiens
  CDR3 for beta chain variable domain of TCR clone 214628 (TRBV13, TRBJ2-2)
CASSPRTGEHTGELFF

SEQ ID NO: 429257 - protein, 15 aa, Homo sapiens
  CDR3 for alpha chain variable domain of TCR clone 214629 (TRAV2, TRAJ13)
CATPSYSGGYQKVTF

SEQ ID NO: 429258 - protein, 16 aa, Homo sapiens
  CDR3 for beta chain variable domain of TCR clone 214629 (TRBV5-4, TRBJ2-3)
CASQQPGAGGADTQYF

SEQ ID NO: 429259 - protein, 16 aa, Homo sapiens
  CDR3 for alpha chain variable domain of TCR clone 214630 (TRAV3, TRAJ21)
CAVRDIARGNFNKFYF

SEQ ID NO: 429260 - protein, 13 aa, Homo sapiens
  CDR3 for beta chain variable domain of TCR clone 214630 (TRBV27, TRBJ2-7)
CAGSLTTGYEQYF

SEQ ID NO: 429261 - protein, 12 aa, Homo sapiens
  CDR3 for alpha chain variable domain of TCR clone 214631 (TRAV13-1, TRAJ39)
CAASNAGNMLTF

SEQ ID NO: 429262 - protein, 15 aa, Homo sapiens
  CDR3 for beta chain variable domain of TCR clone 214631 (TRBV29-1, TRBJ2-5)
CSVAGASGTQETQYF

SEQ ID NO: 429263 - protein, 17 aa, Homo sapiens
  CDR3 for alpha chain variable domain of TCR clone 214632 (TRAV13-2, TRAJ28)
CAEEPAGSGAGSYQLNF

SEQ ID NO: 429264 - protein, 15 aa, Homo sapiens
  CDR3 for beta chain variable domain of TCR clone 214632 (TRBV5-5, TRBJ1-1)
CASSLVGKDNTEAFF

SEQ ID NO: 429265 - protein, 12 aa, Homo sapiens
  CDR3 for alpha chain variable domain of TCR clone 214633 (TRAV17, TRAJ29)
CYASSGNTPLVF

SEQ ID NO: 429266 - protein, 17 aa, Homo sapiens
  CDR3 for beta chain variable domain of TCR clone 214633 (TRBV5-1, TRBJ1-5)
CASSLVGREEGNQPQHF

SEQ ID NO: 429267 - protein, 13 aa, Homo sapiens
  CDR3 for alpha chain variable domain of TCR clone 214634 (TRAV26-2, TRAJ43)
CILRAVNNNDIRF

SEQ ID NO: 429268 - protein, 17 aa, Homo sapiens
  CDR3 for beta chain variable domain of TCR clone 214634 (TRBV20-1, TRBJ2-2)
CSASGSGQGGLTGELFF

SEQ ID NO: 429269 - protein, 16 aa, Homo sapiens
  CDR3 for alpha chain variable domain of TCR clone 214635 (TRAV8-3, TRAJ44)
CAVGTLMTGPASKLPF

SEQ ID NO: 429270 - protein, 13 aa, Homo sapiens
  CDR3 for beta chain variable domain of TCR clone 214635 (TRBV11-2, TRBJ2-1)
CASSLRLTHEQFF

SEQ ID NO: 429271 - protein, 13 aa, Homo sapiens
  CDR3 for alpha chain variable domain of TCR clone 214636 (TRAV8-4, TRAJ30)
CATYKNRDDKIIF

SEQ ID NO: 429272 - protein, 11 aa, Homo sapiens
  CDR3 for beta chain variable domain of TCR clone 214636 (TRBV6-1, TRBJ2-1)
CASRGYNEQFY

SEQ ID NO: 429273 - protein, 14 aa, Homo sapiens
  CDR3 for alpha chain variable domain of TCR clone 214637 (TRAV1-1, TRAJ28)
CAAPSGAGIYQLTF

SEQ ID NO: 429274 - protein, 15 aa, Homo sapiens
  CDR3 for beta chain variable domain of TCR clone 214637 (TRBV7-2, TRBJ1-2)
CASSLVSGGDYGYTF

SEQ ID NO: 429275 - protein, 16 aa, Homo sapiens
  CDR3 for alpha chain variable domain of TCR clone 214638 (TRAV3, TRAJ10)
CAVRDLRAGGGNKLTF

SEQ ID NO: 429276 - protein, 15 aa, Homo sapiens
  CDR3 for beta chain variable domain of TCR clone 214638 (TRBV20-1, TRBJ2-7)
CSARVPAAYFYEQYF

SEQ ID NO: 429277 - protein, 13 aa, Homo sapiens
  CDR3 for alpha chain variable domain of TCR clone 214639 (TRAV21, TRAJ15)
CAVANQAGTALIF

SEQ ID NO: 429278 - protein, 15 aa, Homo sapiens
  CDR3 for beta chain variable domain of TCR clone 214639 (TRBV27, TRBJ2-7)
CASSLGSSVSREQYF

SEQ ID NO: 429279 - protein, 14 aa, Homo sapiens
  CDR3 for alpha chain variable domain of TCR clone 214640 (TRAV38-1, TRAJ29)
CAFITPSGNTPLVF

SEQ ID NO: 429280 - protein, 14 aa, Homo sapiens
  CDR3 for beta chain variable domain of TCR clone 214640 (TRBV18, TRBJ2-7)
CASTPRGGAYEQYF

SEQ ID NO: 429281 - protein, 14 aa, Homo sapiens
  CDR3 for alpha chain variable domain of TCR clone 214641 (TRAV17, TRAJ35)
CATDRPGFGNVLHC

SEQ ID NO: 429282 - protein, 19 aa, Homo sapiens
  CDR3 for beta chain variable domain of TCR clone 214641 (TRBV11-3, TRBJ2-2)
CASSTRPGAKTTNTGELVF

SEQ ID NO: 429283 - protein, 12 aa, Homo sapiens
  CDR3 for alpha chain variable domain of TCR clone 214642 (TRAV13-1, TRAJ5)
CAAKAARRALTF

SEQ ID NO: 429284 - protein, 13 aa, Homo sapiens
  CDR3 for beta chain variable domain of TCR clone 214642 (TRBV7-9, TRBJ1-2)
CASSLKQNYGYTF

SEQ ID NO: 429285 - protein, 15 aa, Homo sapiens
  CDR3 for alpha chain variable domain of TCR clone 214643 (TRAV16, TRAJ17)
CALSGNKAAGNKLTF

SEQ ID NO: 429286 - protein, 16 aa, Homo sapiens
  CDR3 for beta chain variable domain of TCR clone 214643 (TRBV7-6, TRBJ1-6)
CASSSLPGGEYSPLHF

SEQ ID NO: 429287 - protein, 15 aa, Homo sapiens
  CDR3 for alpha chain variable domain of TCR clone 214644 (TRAV3, TRAJ3)
CAVRDRHSSASKIIF

SEQ ID NO: 429288 - protein, 17 aa, Homo sapiens
  CDR3 for beta chain variable domain of TCR clone 214644 (TRBV25-1, TRBJ2-7)
CASSDARVVFSSYEQYF

SEQ ID NO: 429289 - protein, 12 aa, Homo sapiens
  CDR3 for alpha chain variable domain of TCR clone 214645 (TRAV8-3, TRAJ7)
CAVGAGEQQTRF

SEQ ID NO: 429290 - protein, 15 aa, Homo sapiens
  CDR3 for beta chain variable domain of TCR clone 214645 (TRBV20-1, TRBJ2-7)
CSARDRVSGMDEQYF

SEQ ID NO: 429291 - protein, 14 aa, Homo sapiens
  CDR3 for alpha chain variable domain of TCR clone 214646 (TRAV3, TRAJ7)
CAVREEEREQQTRF

SEQ ID NO: 429292 - protein, 12 aa, Homo sapiens
  CDR3 for beta chain variable domain of TCR clone 214646 (TRBV7-8, TRBJ2-7)
CARSLGDREQYF

SEQ ID NO: 429293 - protein, 13 aa, Homo sapiens
  CDR3 for alpha chain variable domain of TCR clone 214647 (TRAV13-1, TRAJ13)
CAASEGGYQKVPF

SEQ ID NO: 429294 - protein, 16 aa, Homo sapiens
  CDR3 for beta chain variable domain of TCR clone 214647 (TRBV18, TRBJ1-2)
CASSPPERVTIYGYTF

SEQ ID NO: 429295 - protein, 22 aa, Homo sapiens
  CDR3 for alpha chain variable domain of TCR clone 214648 (TRAV8-3, TRAJ32)
CAVEVVLQTSSSLELALCLLSS

SEQ ID NO: 429296 - protein, 14 aa, Homo sapiens
  CDR3 for beta chain variable domain of TCR clone 214648 (TRBV7-8, TRBJ2-3)
CASSSRDSTDTQYF

SEQ ID NO: 429297 - protein, 18 aa, Homo sapiens
  CDR3 for alpha chain variable domain of TCR clone 214649 (TRAV21, TRAJ52)
CAVRPSPAVGTSYGKLTF

SEQ ID NO: 429298 - protein, 11 aa, Homo sapiens
  CDR3 for beta chain variable domain of TCR clone 214649 (TRBV12-4, TRBJ2-3)
CASTATDTQYF

SEQ ID NO: 429299 - protein, 13 aa, Homo sapiens
  CDR3 for alpha chain variable domain of TCR clone 214650 (TRAV12-3, TRAJ33)
CAMSVNSNYQLIW

SEQ ID NO: 429300 - protein, 16 aa, Homo sapiens
  CDR3 for beta chain variable domain of TCR clone 214650 (TRBV18, TRBJ1-6)
CASSQTEISYDSPLHS

SEQ ID NO: 429301 - protein, 13 aa, Homo sapiens
  CDR3 for alpha chain variable domain of TCR clone 214651 (TRAV24, TRAJ44)
CALLTGTASKLTF

SEQ ID NO: 429302 - protein, 16 aa, Homo sapiens
  CDR3 for beta chain variable domain of TCR clone 214651 (TRBV2, TRBJ2-3)
CASSTAVEGVTDTQYF

SEQ ID NO: 429303 - protein, 12 aa, Homo sapiens
  CDR3 for alpha chain variable domain of TCR clone 214652 (TRAV13-1, TRAJ15)
CAASQAGTALIF

SEQ ID NO: 429304 - protein, 18 aa, Homo sapiens
  CDR3 for beta chain variable domain of TCR clone 214652 (TRBV7-9, TRBJ2-3)
FASSLPINGQISTDTQYF

SEQ ID NO: 429305 - protein, 14 aa, Homo sapiens
  CDR3 for alpha chain variable domain of TCR clone 214653 (TRAV17, TRAJ16)
CATADFSDGQKLLF

SEQ ID NO: 429306 - protein, 12 aa, Homo sapiens
  CDR3 for beta chain variable domain of TCR clone 214653 (TRBV24-1, TRBJ1-1)
CATLYPDTEVFF

SEQ ID NO: 429307 - protein, 13 aa, Homo sapiens
  CDR3 for alpha chain variable domain of TCR clone 214654 (TRAV1-2, TRAJ20)
FAVPRSNDYKLSF

SEQ ID NO: 429308 - protein, 14 aa, Homo sapiens
  CDR3 for beta chain variable domain of TCR clone 214654 (TRBV20-1, TRBJ2-7)
CSARYGTTYYEQYF

SEQ ID NO: 429309 - protein, 17 aa, Homo sapiens
  CDR3 for alpha chain variable domain of TCR clone 214655 (TRAV4, TRAJ18)
CLVVAAGRGSTLGRLYF

SEQ ID NO: 429310 - protein, 17 aa, Homo sapiens
  CDR3 for beta chain variable domain of TCR clone 214655 (TRBV28, TRBJ2-2)
CASSLATGMGDAGELFF

SEQ ID NO: 429311 - protein, 12 aa, Homo sapiens
  CDR3 for alpha chain variable domain of TCR clone 214656 (TRAV13-1, TRAJ21)
CAAKEGFNKCYF

SEQ ID NO: 429312 - protein, 15 aa, Homo sapiens
  CDR3 for beta chain variable domain of TCR clone 214656 (TRBV25-1, TRBJ1-4)
CASSPGDSTNEKLFF

SEQ ID NO: 429313 - protein, 13 aa, Homo sapiens
  CDR3 for alpha chain variable domain of TCR clone 214657 (TRAV21, TRAJ27)
CSALNTNAGKSTF

SEQ ID NO: 429314 - protein, 14 aa, Homo sapiens
  CDR3 for beta chain variable domain of TCR clone 214657 (TRBV27, TRBJ1-1)
CASSLLSGLSEAFL

SEQ ID NO: 429315 - protein, 14 aa, Homo sapiens
  CDR3 for alpha chain variable domain of TCR clone 214658 (TRAV12-3, TRAJ10)
SHLPLTGGGNKLTF

SEQ ID NO: 429316 - protein, 12 aa, Homo sapiens
  CDR3 for beta chain variable domain of TCR clone 214658 (TRBV7-9, TRBJ2-7)
CASSIKREGQYF

SEQ ID NO: 429317 - protein, 14 aa, Homo sapiens
  CDR3 for alpha chain variable domain of TCR clone 214659 (TRAV8-3, TRAJ37)
CAVGPYDNTGKLIF

SEQ ID NO: 429318 - protein, 14 aa, Homo sapiens
  CDR3 for beta chain variable domain of TCR clone 214659 (TRBV19, TRBJ2-1)
CASPTFVLSGEQFF

SEQ ID NO: 429319 - protein, 14 aa, Homo sapiens
  CDR3 for alpha chain variable domain of TCR clone 214660 (TRAV26-1, TRAJ49)
CIVRVATGGNQFYF

SEQ ID NO: 429320 - protein, 16 aa, Homo sapiens
  CDR3 for beta chain variable domain of TCR clone 214660 (TRBV6-6, TRBJ1-6)
CASSLHGPGRGSPLLF

SEQ ID NO: 429321 - protein, 16 aa, Homo sapiens
  CDR3 for alpha chain variable domain of TCR clone 214661 (TRAV4, TRAJ6)
CLVGVYASGGSYIPTF

SEQ ID NO: 429322 - protein, 14 aa, Homo sapiens
  CDR3 for beta chain variable domain of TCR clone 214661 (TRBV14, TRBJ2-5)
CQQPRGQDQETQYF

SEQ ID NO: 429323 - protein, 12 aa, Homo sapiens
  CDR3 for alpha chain variable domain of TCR clone 214662 (TRAV8-6, TRAJ8)
CAVTPGFQKLVF

SEQ ID NO: 429324 - protein, 16 aa, Homo sapiens
  CDR3 for beta chain variable domain of TCR clone 214662 (TRBV7-3, TRBJ2-2)
CASSLKRGTLSGELFS

SEQ ID NO: 429325 - protein, 16 aa, Homo sapiens
  CDR3 for alpha chain variable domain of TCR clone 214663 (TRAV21, TRAJ52)
CAVTNAGGTSYGKLTF

SEQ ID NO: 429326 - protein, 11 aa, Homo sapiens
  CDR3 for beta chain variable domain of TCR clone 214663 (TRBV2, TRBJ1-1)
YASREGTEAFF

SEQ ID NO: 429327 - protein, 14 aa, Homo sapiens
  CDR3 for alpha chain variable domain of TCR clone 214664 (TRAV29/DV5, TRAJ37)
CAASGSGNTGKLIF

SEQ ID NO: 429328 - protein, 13 aa, Homo sapiens
  CDR3 for beta chain variable domain of TCR clone 214664 (TRBV2, TRBJ2-3)
FASILAGGQGQYF

SEQ ID NO: 429329 - protein, 11 aa, Homo sapiens
  CDR3 for alpha chain variable domain of TCR clone 214665 (TRAV2, TRAJ13)
CASGGYQKVTF

SEQ ID NO: 429330 - protein, 16 aa, Homo sapiens
  CDR3 for beta chain variable domain of TCR clone 214665 (TRBV6-1, TRBJ2-5)
CGCSETLDRGAETQYF

SEQ ID NO: 429331 - protein, 15 aa, Homo sapiens
  CDR3 for alpha chain variable domain of TCR clone 214666 (TRAV13-1, TRAJ57)
CAASNTQGGSEKLVF

SEQ ID NO: 429332 - protein, 16 aa, Homo sapiens
  CDR3 for beta chain variable domain of TCR clone 214666 (TRBV19, TRBJ2-1)
CASSKAGPCSYNEQFF

SEQ ID NO: 429333 - protein, 21 aa, Homo sapiens
  CDR3 for alpha chain variable domain of TCR clone 214667 (TRAV36/DV7, TRAJ39)
TATQTGDSAIYLPNAGNMLTF

SEQ ID NO: 429334 - protein, 13 aa, Homo sapiens
  CDR3 for beta chain variable domain of TCR clone 214667 (TRBV6-6, TRBJ2-7)
CASSPKHLAEQYF

SEQ ID NO: 429335 - protein, 12 aa, Homo sapiens
  CDR3 for alpha chain variable domain of TCR clone 214668 (TRAV12-1, TRAJ40)
CVLYSGTYKYIF

SEQ ID NO: 429336 - protein, 18 aa, Homo sapiens
  CDR3 for beta chain variable domain of TCR clone 214668 (TRBV11-2, TRBJ2-3)
CASSFGGASRGAPNTQYF

SEQ ID NO: 429337 - protein, 16 aa, Homo sapiens
  CDR3 for alpha chain variable domain of TCR clone 214669 (TRAV27, TRAJ37)
CVLLSVGSGNTGKLIF

SEQ ID NO: 429338 - protein, 14 aa, Homo sapiens
  CDR3 for beta chain variable domain of TCR clone 214669 (TRBV7-9, TRBJ2-2)
CASSLVQDTGELFF

SEQ ID NO: 429339 - protein, 17 aa, Homo sapiens
  CDR3 for alpha chain variable domain of TCR clone 214670 (TRAV26-1, TRAJ53)
CIVRVDDSGGSNYKLTF

SEQ ID NO: 429340 - protein, 19 aa, Homo sapiens
  CDR3 for beta chain variable domain of TCR clone 214670 (TRBV25-1, TRBJ2-2)
CAILVYRVDRGRKTEELFF

SEQ ID NO: 429341 - protein, 14 aa, Homo sapiens
  CDR3 for alpha chain variable domain of TCR clone 214671 (TRAV8-1, TRAJ4)
CAVPLSGGYNKLIF

SEQ ID NO: 429342 - protein, 16 aa, Homo sapiens
  CDR3 for beta chain variable domain of TCR clone 214671 (TRBV6-1, TRBJ1-2)
CASSGAWQGRSHGYTF

SEQ ID NO: 429343 - protein, 17 aa, Homo sapiens
  CDR3 for alpha chain variable domain of TCR clone 214672 (TRAV8-6, TRAJ58)
CAVSSWVGETSGSRLTF

SEQ ID NO: 429344 - protein, 14 aa, Homo sapiens
  CDR3 for beta chain variable domain of TCR clone 214672 (TRBV2, TRBJ2-7)
CASRPPGGHYEQYL

SEQ ID NO: 429345 - protein, 12 aa, Homo sapiens
  CDR3 for alpha chain variable domain of TCR clone 214673 (TRAV30, TRAJ43)
CGTEERANDMRF

SEQ ID NO: 429346 - protein, 13 aa, Homo sapiens
  CDR3 for beta chain variable domain of TCR clone 214673 (TRBV27, TRBJ2-7)
CASSFSQGYEQYF

SEQ ID NO: 429347 - protein, 12 aa, Homo sapiens
  CDR3 for alpha chain variable domain of TCR clone 214674 (TRAV35, TRAJ39)
LAPNHAGNMLTF

SEQ ID NO: 429348 - protein, 16 aa, Homo sapiens
  CDR3 for beta chain variable domain of TCR clone 214674 (TRBV2, TRBJ2-3)
CASSTSVEGVTDTQYF

SEQ ID NO: 429349 - protein, 13 aa, Homo sapiens
  CDR3 for alpha chain variable domain of TCR clone 214675 (TRAV16, TRAJ20)
CALGPSNDYKLSF

SEQ ID NO: 429350 - protein, 15 aa, Homo sapiens
  CDR3 for beta chain variable domain of TCR clone 214675 (TRBV5-1, TRBJ2-2)
CASSRVGYDTGELFF

SEQ ID NO: 429351 - protein, 14 aa, Homo sapiens
  CDR3 for alpha chain variable domain of TCR clone 214676 (TRAV8-1, TRAJ5)
CAVRTDTGRRALTS

SEQ ID NO: 429352 - protein, 13 aa, Homo sapiens
  CDR3 for beta chain variable domain of TCR clone 214676 (TRBV11-2, TRBJ2-7)
CASSGTRPYEQYF

SEQ ID NO: 429353 - protein, 10 aa, Homo sapiens
  CDR3 for alpha chain variable domain of TCR clone 214677 (TRAV29/DV5, TRAJ48)
CAAGGEKLTF

SEQ ID NO: 429354 - protein, 14 aa, Homo sapiens
  CDR3 for beta chain variable domain of TCR clone 214677 (TRBV7-9, TRBJ2-5)
CASSLAPDQGTQYF

SEQ ID NO: 429355 - protein, 13 aa, Homo sapiens
  CDR3 for alpha chain variable domain of TCR clone 214678 (TRAV17, TRAJ9)
CATDYTGGFKTIF

SEQ ID NO: 429356 - protein, 12 aa, Homo sapiens
  CDR3 for beta chain variable domain of TCR clone 214678 (TRBV7-7, TRBJ2-1)
CASSFINNEQFF

SEQ ID NO: 429357 - protein, 13 aa, Homo sapiens
  CDR3 for alpha chain variable domain of TCR clone 214679 (TRAV12-2, TRAJ6)
CAVNVSRKLHTYI

SEQ ID NO: 429358 - protein, 16 aa, Homo sapiens
  CDR3 for beta chain variable domain of TCR clone 214679 (TRBV11-2, TRBJ2-7)
CASSPTTGGVSYEQYF

SEQ ID NO: 429359 - protein, 14 aa, Homo sapiens
  CDR3 for alpha chain variable domain of TCR clone 214680 (TRAV8-4, TRAJ16)
CSVSPVGRWPEAAL

SEQ ID NO: 429360 - protein, 15 aa, Homo sapiens
  CDR3 for beta chain variable domain of TCR clone 214680 (TRBV7-3, TRBJ1-6)
CASSLGRGAGSPLHF

SEQ ID NO: 429361 - protein, 13 aa, Homo sapiens
  CDR3 for alpha chain variable domain of TCR clone 214681 (TRAV10, TRAJ45)
CVGSGGGADGLTF

SEQ ID NO: 429362 - protein, 15 aa, Homo sapiens
  CDR3 for beta chain variable domain of TCR clone 214681 (TRBV5-1, TRBJ2-7)
CASSLYPDGGDEQYF

SEQ ID NO: 429363 - protein, 14 aa, Homo sapiens
  CDR3 for alpha chain variable domain of TCR clone 214682 (TRAV1-2, TRAJ16)
CAVNRFTDGQKLLF

SEQ ID NO: 429364 - protein, 13 aa, Homo sapiens
  CDR3 for beta chain variable domain of TCR clone 214682 (TRBV7-3, TRBJ1-1)
CASSQDWGAEAFF

SEQ ID NO: 429365 - protein, 14 aa, Homo sapiens
  CDR3 for alpha chain variable domain of TCR clone 214683 (TRAV12-2, TRAJ40)
CAVKIPSGTYKYIF

SEQ ID NO: 429366 - protein, 12 aa, Homo sapiens
  CDR3 for beta chain variable domain of TCR clone 214683 (TRBV11-2, TRBJ2-2)
CASSLGGGKLFF

SEQ ID NO: 429367 - protein, 13 aa, Homo sapiens
  CDR3 for alpha chain variable domain of TCR clone 214684 (TRAV8-6, TRAJ21)
CAVSASSLNKFYF

SEQ ID NO: 429368 - protein, 14 aa, Homo sapiens
  CDR3 for beta chain variable domain of TCR clone 214684 (TRBV7-9, TRBJ2-5)
CASSLDTAQETQYF

SEQ ID NO: 429369 - protein, 16 aa, Homo sapiens
  CDR3 for alpha chain variable domain of TCR clone 214685 (TRAV26-1, TRAJ38)
CIVRPLNAGNNRKLIW

SEQ ID NO: 429370 - protein, 13 aa, Homo sapiens
  CDR3 for beta chain variable domain of TCR clone 214685 (TRBV18, TRBJ1-1)
CASSPNGDTEVFF

SEQ ID NO: 429371 - protein, 13 aa, Homo sapiens
  CDR3 for alpha chain variable domain of TCR clone 214686 (TRAV1-2, TRAJ30)
CAVRDDRDDKIIF

SEQ ID NO: 429372 - protein, 15 aa, Homo sapiens
  CDR3 for beta chain variable domain of TCR clone 214686 (TRBV6-1, TRBJ2-1)
CASSEAAYSYNEQFF

SEQ ID NO: 429373 - protein, 14 aa, Homo sapiens
  CDR3 for alpha chain variable domain of TCR clone 214687 (TRAV17, TRAJ54)
CATDANQGAQKLVF

SEQ ID NO: 429374 - protein, 12 aa, Homo sapiens
  CDR3 for beta chain variable domain of TCR clone 214687 (TRBV7-9, TRBJ2-7)
CASSIKRGEQYF

SEQ ID NO: 429375 - protein, 14 aa, Homo sapiens
  CDR3 for alpha chain variable domain of TCR clone 214688 (TRAV12-1, TRAJ27)
CGEHIRTNAGKSTF

SEQ ID NO: 429376 - protein, 15 aa, Homo sapiens
  CDR3 for beta chain variable domain of TCR clone 214688 (TRBV19, TRBJ1-1)
CDSTSGQIQNTEAFF

SEQ ID NO: 429377 - protein, 12 aa, Homo sapiens
  CDR3 for alpha chain variable domain of TCR clone 214689 (TRAV12-1, TRAJ40)
CVVPSGTYKYIF

SEQ ID NO: 429378 - protein, 15 aa, Homo sapiens
  CDR3 for beta chain variable domain of TCR clone 214689 (TRBV12-4, TRBJ2-1)
CAGSPLSGRNNEQFF

SEQ ID NO: 429379 - protein, 15 aa, Homo sapiens
  CDR3 for alpha chain variable domain of TCR clone 214690 (TRAV8-3, TRAJ45)
CASSYSGGGADGLTF

SEQ ID NO: 429380 - protein, 12 aa, Homo sapiens
  CDR3 for beta chain variable domain of TCR clone 214690 (TRBV11-3, TRBJ1-1)
CASSHRQGEAFF

SEQ ID NO: 429381 - protein, 14 aa, Homo sapiens
  CDR3 for alpha chain variable domain of TCR clone 214691 (TRAV1-2, TRAJ16)
CAVNRFSDGQKLLF

SEQ ID NO: 429382 - protein, 14 aa, Homo sapiens
  CDR3 for beta chain variable domain of TCR clone 214691 (TRBV20-1, TRBJ2-1)
CSPNDEASYNEQFF

SEQ ID NO: 429383 - protein, 15 aa, Homo sapiens
  CDR3 for alpha chain variable domain of TCR clone 214692 (TRAV13-1, TRAJ5)
CAVSPIDTGRRGPTF

SEQ ID NO: 429384 - protein, 11 aa, Homo sapiens
  CDR3 for beta chain variable domain of TCR clone 214692 (TRBV4-1, TRBJ2-2)
CASSFRTSGGR

SEQ ID NO: 429385 - protein, 14 aa, Homo sapiens
  CDR3 for alpha chain variable domain of TCR clone 214693 (TRAV26-1, TRAJ38)
CIADNAVNNRKLIW

SEQ ID NO: 429386 - protein, 16 aa, Homo sapiens
  CDR3 for beta chain variable domain of TCR clone 214693 (TRBV10-2, TRBJ1-5)
CASSVRDRASNQTQHF

SEQ ID NO: 429387 - protein, 16 aa, Homo sapiens
  CDR3 for alpha chain variable domain of TCR clone 214694 (TRAV30, TRAJ24)
CGTEFVDADSWGKFQF

SEQ ID NO: 429388 - protein, 17 aa, Homo sapiens
  CDR3 for beta chain variable domain of TCR clone 214694 (TRBV20-1, TRBJ2-2)
CSASGSGQGGLTGELFF

SEQ ID NO: 429389 - protein, 14 aa, Homo sapiens
  CDR3 for alpha chain variable domain of TCR clone 214695 (TRAV12-2, TRAJ40)
CAVKIPSGTYKYIF

SEQ ID NO: 429390 - protein, 16 aa, Homo sapiens
  CDR3 for beta chain variable domain of TCR clone 214695 (TRBV28, TRBJ2-2)
CASSLEGGSNTGELFF

SEQ ID NO: 429391 - protein, 14 aa, Homo sapiens
  CDR3 for alpha chain variable domain of TCR clone 214696 (TRAV12-1, TRAJ30)
CVVSIGGRDDKIIF

SEQ ID NO: 429392 - protein, 13 aa, Homo sapiens
  CDR3 for beta chain variable domain of TCR clone 214696 (TRBV12-5, TRBJ2-1)
CASGLGRGNEQFF

SEQ ID NO: 429393 - protein, 13 aa, Homo sapiens
  CDR3 for alpha chain variable domain of TCR clone 214697 (TRAV12-1, TRAJ44)
CVVLTGTASKLTF

SEQ ID NO: 429394 - protein, 16 aa, Homo sapiens
  CDR3 for beta chain variable domain of TCR clone 214697 (TRBV12-5, TRBJ2-5)
CASGPRTSGNQETQDF

SEQ ID NO: 429395 - protein, 12 aa, Homo sapiens
  CDR3 for alpha chain variable domain of TCR clone 214698 (TRAV3, TRAJ39)
CAVIEWSNMLTF

SEQ ID NO: 429396 - protein, 15 aa, Homo sapiens
  CDR3 for beta chain variable domain of TCR clone 214698 (TRBV4-1, TRBJ2-7)
CASSQNTGRLYEQYF

SEQ ID NO: 429397 - protein, 11 aa, Homo sapiens
  CDR3 for alpha chain variable domain of TCR clone 214699 (TRAV1-2, TRAJ20)
CAVSNAYKLSF

SEQ ID NO: 429398 - protein, 16 aa, Homo sapiens
  CDR3 for beta chain variable domain of TCR clone 214699 (TRBV29-1, TRBJ2-6)
CSVEDITDSGANDLTF

SEQ ID NO: 429399 - protein, 14 aa, Homo sapiens
  CDR3 for alpha chain variable domain of TCR clone 214700 (TRAV29/DV5, TRAJ32)
CAAAYGGATNKLIF

SEQ ID NO: 429400 - protein, 13 aa, Homo sapiens
  CDR3 for beta chain variable domain of TCR clone 214700 (TRBV20-1, TRBJ1-1)
CSARVGGNTEACF

SEQ ID NO: 429401 - protein, 16 aa, Homo sapiens
  CDR3 for alpha chain variable domain of TCR clone 214701 (TRAV30, TRAJ24)
CGTEIVDADSWGKFPF

SEQ ID NO: 429402 - protein, 13 aa, Homo sapiens
  CDR3 for beta chain variable domain of TCR clone 214701 (TRBV24-1, TRBJ2-2)
CATSDWSTGELFF

SEQ ID NO: 429403 - protein, 13 aa, Homo sapiens
  CDR3 for alpha chain variable domain of TCR clone 214702 (TRAV3, TRAJ8)
CAVRFTGFQKLVF

SEQ ID NO: 429404 - protein, 15 aa, Homo sapiens
  CDR3 for beta chain variable domain of TCR clone 214702 (TRBV20-1, TRBJ2-7)
CSARDRISGMDEQYF

SEQ ID NO: 429405 - protein, 14 aa, Homo sapiens
  CDR3 for alpha chain variable domain of TCR clone 214703 (TRAV26-1, TRAJ21)
CIVRVVYNFNKFYF

SEQ ID NO: 429406 - protein, 14 aa, Homo sapiens
  CDR3 for beta chain variable domain of TCR clone 214703 (TRBV19, TRBJ2-1)
CASPTFVLSGEQFF

SEQ ID NO: 429407 - protein, 16 aa, Homo sapiens
  CDR3 for alpha chain variable domain of TCR clone 214704 (TRAV3, TRAJ37)
CAVRVRGSGSTGKLIF

SEQ ID NO: 429408 - protein, 13 aa, Homo sapiens
  CDR3 for beta chain variable domain of TCR clone 214704 (TRBV14, TRBJ2-1)
CASSQDRRNEQFF

SEQ ID NO: 429409 - protein, 14 aa, Homo sapiens
  CDR3 for alpha chain variable domain of TCR clone 214705 (TRAV20, TRAJ29)
CAVQDWVGNTPLVF

SEQ ID NO: 429410 - protein, 15 aa, Homo sapiens
  CDR3 for beta chain variable domain of TCR clone 214705 (TRBV29-1, TRBJ2-7)
CSVECFDRGSYEQYF

SEQ ID NO: 429411 - protein, 16 aa, Homo sapiens
  CDR3 for alpha chain variable domain of TCR clone 214706 (TRAV8-4, TRAJ18)
CAVTTNGGSTLGRLSF

SEQ ID NO: 429412 - protein, 14 aa, Homo sapiens
  CDR3 for beta chain variable domain of TCR clone 214706 (TRBV12-4, TRBJ1-2)
CASSSAGHIYGYTF

SEQ ID NO: 429413 - protein, 16 aa, Homo sapiens
  CDR3 for alpha chain variable domain of TCR clone 214707 (TRAV16, TRAJ42)
CARNMNYGGSQGNLIF

SEQ ID NO: 429414 - protein, 13 aa, Homo sapiens
  CDR3 for beta chain variable domain of TCR clone 214707 (TRBV20-1, TRBJ2-7)
CSASPPSSYEQYF

SEQ ID NO: 429415 - protein, 15 aa, Homo sapiens
  CDR3 for alpha chain variable domain of TCR clone 214708 (TRAV26-2, TRAJ57)
CILRDIRGGSEKLVF

SEQ ID NO: 429416 - protein, 15 aa, Homo sapiens
  CDR3 for beta chain variable domain of TCR clone 214708 (TRBV2, TRBJ2-1)
CASDIGLAGEGEQCF

SEQ ID NO: 429417 - protein, 15 aa, Homo sapiens
  CDR3 for alpha chain variable domain of TCR clone 214709 (TRAV3, TRAJ40)
CAVRDVTSGTYKYTF

SEQ ID NO: 429418 - protein, 13 aa, Homo sapiens
  CDR3 for beta chain variable domain of TCR clone 214709 (TRBV7-9, TRBJ1-2)
CASSLKQNYGYTF

SEQ ID NO: 429419 - protein, 12 aa, Homo sapiens
  CDR3 for alpha chain variable domain of TCR clone 214710 (TRAV12-2, TRAJ10)
WGVTGGGNKLTF

SEQ ID NO: 429420 - protein, 15 aa, Homo sapiens
  CDR3 for beta chain variable domain of TCR clone 214710 (TRBV19, TRBJ2-1)
CASSGGGTRDNEQFF

SEQ ID NO: 429421 - protein, 14 aa, Homo sapiens
  CDR3 for alpha chain variable domain of TCR clone 214711 (TRAV14/DV4, TRAJ41)
CARGGPDSVYALNF

SEQ ID NO: 429422 - protein, 15 aa, Homo sapiens
  CDR3 for beta chain variable domain of TCR clone 214711 (TRBV19, TRBJ2-1)
CASSIQATSYNEQFF

SEQ ID NO: 429423 - protein, 23 aa, Homo sapiens
  CDR3 for alpha chain variable domain of TCR clone 214712 (TRAV23/DV6, TRAJ15)
PSLETQPPTSEQPSQPAGTALIF

SEQ ID NO: 429424 - protein, 14 aa, Homo sapiens
  CDR3 for beta chain variable domain of TCR clone 214712 (TRBV7-9, TRBJ1-2)
CASSRQGANYGYTF

SEQ ID NO: 429425 - protein, 19 aa, Homo sapiens
  CDR3 for alpha chain variable domain of TCR clone 214713 (TRAV2, TRAJ20)
ILQVREADAAVYRDCKLSF

SEQ ID NO: 429426 - protein, 15 aa, Homo sapiens
  CDR3 for beta chain variable domain of TCR clone 214713 (TRBV2, TRBJ2-1)
CASSETGGNYNEQFF

SEQ ID NO: 429427 - protein, 14 aa, Homo sapiens
  CDR3 for alpha chain variable domain of TCR clone 214714 (TRAV1-2, TRAJ8)
CAVREDTGFQKLVF

SEQ ID NO: 429428 - protein, 14 aa, Homo sapiens
  CDR3 for beta chain variable domain of TCR clone 214714 (TRBV13, TRBJ2-7)
RASSLKGASYEQYF

SEQ ID NO: 429429 - protein, 18 aa, Homo sapiens
  CDR3 for alpha chain variable domain of TCR clone 214715 (TRAV21, TRAJ52)
CAVRPSPAGGTSYGKLTF

SEQ ID NO: 429430 - protein, 13 aa, Homo sapiens
  CDR3 for beta chain variable domain of TCR clone 214715 (TRBV7-7, TRBJ2-3)
CASSLSRADTQYF

SEQ ID NO: 429431 - protein, 14 aa, Homo sapiens
  CDR3 for alpha chain variable domain of TCR clone 214716 (TRAV12-2, TRAJ40)
CAVKIPSGTYKYIF

SEQ ID NO: 429432 - protein, 14 aa, Homo sapiens
  CDR3 for beta chain variable domain of TCR clone 214716 (TRBV2, TRBJ2-3)
CASSEGQNTDTQYF

SEQ ID NO: 429433 - protein, 12 aa, Homo sapiens
  CDR3 for alpha chain variable domain of TCR clone 214717 (TRAV1-1, TRAJ9)
CAPNTGGFKTIF

SEQ ID NO: 429434 - protein, 13 aa, Homo sapiens
  CDR3 for beta chain variable domain of TCR clone 214717 (TRBV29-1, TRBJ2-4)
CSALQGGENIQYF

SEQ ID NO: 429435 - protein, 14 aa, Homo sapiens
  CDR3 for alpha chain variable domain of TCR clone 214718 (TRAV30, TRAJ26)
CGTEIVSYGQNFVF

SEQ ID NO: 429436 - protein, 13 aa, Homo sapiens
  CDR3 for beta chain variable domain of TCR clone 214718 (TRBV19, TRBJ1-3)
CASKLSLGNTIYF

SEQ ID NO: 429437 - protein, 23 aa, Homo sapiens
  CDR3 for alpha chain variable domain of TCR clone 214719 (TRAV1-1, TRAJ4)
LLQELQMKDSASYFCALYNKLIF

SEQ ID NO: 429438 - protein, 15 aa, Homo sapiens
  CDR3 for beta chain variable domain of TCR clone 214719 (TRBV9, TRBJ1-6)
CASSVAGTGDSPLHF

SEQ ID NO: 429439 - protein, 13 aa, Homo sapiens
  CDR3 for alpha chain variable domain of TCR clone 214720 (TRAV3, TRAJ27)
CAVRPLGAGKSTF

SEQ ID NO: 429440 - protein, 12 aa, Homo sapiens
  CDR3 for beta chain variable domain of TCR clone 214720 (TRBV5-1, TRBJ1-2)
CASSWDRDGYTF

SEQ ID NO: 429441 - protein, 16 aa, Homo sapiens
  CDR3 for alpha chain variable domain of TCR clone 214721 (TRAV3, TRAJ10)
CAVRDMRAGGGNKITF

SEQ ID NO: 429442 - protein, 15 aa, Homo sapiens
  CDR3 for beta chain variable domain of TCR clone 214721 (TRBV5-1, TRBJ2-1)
CASSPPRAPYNEQFF

SEQ ID NO: 429443 - protein, 17 aa, Homo sapiens
  CDR3 for alpha chain variable domain of TCR clone 214722 (TRAV26-1, TRAJ53)
CIVRVDDSGGSNYKLTF

SEQ ID NO: 429444 - protein, 14 aa, Homo sapiens
  CDR3 for beta chain variable domain of TCR clone 214722 (TRBV20-1, TRBJ1-1)
CSAMGGTANTEAFF

SEQ ID NO: 429445 - protein, 13 aa, Homo sapiens
  CDR3 for alpha chain variable domain of TCR clone 214723 (TRAV25, TRAJ10)
CAGRTGGGNKLTF

SEQ ID NO: 429446 - protein, 15 aa, Homo sapiens
  CDR3 for beta chain variable domain of TCR clone 214723 (TRBV19, TRBJ2-1)
CASSSPGVPLDEQVF

SEQ ID NO: 429447 - protein, 13 aa, Homo sapiens
  CDR3 for alpha chain variable domain of TCR clone 214724 (TRAV12-3, TRAJ7)
CAMTQYGNNRLAF

SEQ ID NO: 429448 - protein, 13 aa, Homo sapiens
  CDR3 for beta chain variable domain of TCR clone 214724 (TRBV10-3, TRBJ1-2)
CAINADLNYGYTF

SEQ ID NO: 429449 - protein, 12 aa, Homo sapiens
  CDR3 for alpha chain variable domain of TCR clone 214725 (TRAV3, TRAJ20)
CAVRDHDYKLSF

SEQ ID NO: 429450 - protein, 19 aa, Homo sapiens
  CDR3 for beta chain variable domain of TCR clone 214725 (TRBV2, TRBJ2-7)
CASSDDETSGRANDYEQYF

SEQ ID NO: 429451 - protein, 13 aa, Homo sapiens
  CDR3 for alpha chain variable domain of TCR clone 214726 (TRAV36/DV7, TRAJ54)
CAVLIQGAQKLGF

SEQ ID NO: 429452 - protein, 13 aa, Homo sapiens
  CDR3 for beta chain variable domain of TCR clone 214726 (TRBV29-1, TRBJ2-4)
CSVGEGTKNNQYF

SEQ ID NO: 429453 - protein, 16 aa, Homo sapiens
  CDR3 for alpha chain variable domain of TCR clone 214727 (TRAV14/DV4, TRAJ54)
CPMREGRIQGAQKLVF

SEQ ID NO: 429454 - protein, 13 aa, Homo sapiens
  CDR3 for beta chain variable domain of TCR clone 214727 (TRBV7-3, TRBJ1-1)
CASSQDWGAEAFF

SEQ ID NO: 429455 - protein, 14 aa, Homo sapiens
  CDR3 for alpha chain variable domain of TCR clone 214728 (TRAV8-4, TRAJ43)
CAVSDPRNNNDMRF

SEQ ID NO: 429456 - protein, 15 aa, Homo sapiens
  CDR3 for beta chain variable domain of TCR clone 214728 (TRBV4-2, TRBJ1-2)
CASSQGTGGRDGDTF

SEQ ID NO: 429457 - protein, 14 aa, Homo sapiens
  CDR3 for alpha chain variable domain of TCR clone 214729 (TRAV30, TRAJ33)
CGTVAPRSNYQLIW

SEQ ID NO: 429458 - protein, 16 aa, Homo sapiens
  CDR3 for beta chain variable domain of TCR clone 214729 (TRBV19, TRBJ2-1)
CASSIETGSPYNEQFF

SEQ ID NO: 429459 - protein, 11 aa, Homo sapiens
  CDR3 for alpha chain variable domain of TCR clone 214730 (TRAV2, TRAJ33)
CAVESNYQLIW

SEQ ID NO: 429460 - protein, 13 aa, Homo sapiens
  CDR3 for beta chain variable domain of TCR clone 214730 (TRBV20-1, TRBJ2-5)
CSARGDYQETQYF

SEQ ID NO: 429461 - protein, 11 aa, Homo sapiens
  CDR3 for alpha chain variable domain of TCR clone 214731 (TRAV3, TRAJ21)
FAVGNFNKFYF

SEQ ID NO: 429462 - protein, 12 aa, Homo sapiens
  CDR3 for beta chain variable domain of TCR clone 214731 (TRBV14, TRBJ2-5)
CASSHLKETQYF

SEQ ID NO: 429463 - protein, 13 aa, Homo sapiens
  CDR3 for alpha chain variable domain of TCR clone 214732 (TRAV29/DV5, TRAJ47)
CAASAEYGNKLVF

SEQ ID NO: 429464 - protein, 18 aa, Homo sapiens
  CDR3 for beta chain variable domain of TCR clone 214732 (TRBV6-6, TRBJ1-3)
CASSYSKWDSISGNTIYF

SEQ ID NO: 429465 - protein, 12 aa, Homo sapiens
  CDR3 for alpha chain variable domain of TCR clone 214733 (TRAV8-4, TRAJ31)
CAVSDSNASLMF

SEQ ID NO: 429466 - protein, 15 aa, Homo sapiens
  CDR3 for beta chain variable domain of TCR clone 214733 (TRBV27, TRBJ2-7)
CASRFWGQGADEQYF

SEQ ID NO: 429467 - protein, 13 aa, Homo sapiens
  CDR3 for alpha chain variable domain of TCR clone 214734 (TRAV21, TRAJ27)
CAARPGNAGKSTF

SEQ ID NO: 429468 - protein, 17 aa, Homo sapiens
  CDR3 for beta chain variable domain of TCR clone 214734 (TRBV5-4, TRBJ2-2)
CASSSNLAGGGTGELFF

SEQ ID NO: 429469 - protein, 17 aa, Homo sapiens
  CDR3 for alpha chain variable domain of TCR clone 214735 (TRAV3, TRAJ6)
CAVRDGPRAGGSCITTF

SEQ ID NO: 429470 - protein, 19 aa, Homo sapiens
  CDR3 for beta chain variable domain of TCR clone 214735 (TRBV19, TRBJ2-5)
CASSIGQVTDFFLGETQYF

SEQ ID NO: 429471 - protein, 14 aa, Homo sapiens
  CDR3 for alpha chain variable domain of TCR clone 214736 (TRAV8-3, TRAJ4)
CAVGASGGDNKLFF

SEQ ID NO: 429472 - protein, 16 aa, Homo sapiens
  CDR3 for beta chain variable domain of TCR clone 214736 (TRBV4-3, TRBJ2-2)
CASSHLQGSGTGELFF

SEQ ID NO: 429473 - protein, 15 aa, Homo sapiens
  CDR3 for alpha chain variable domain of TCR clone 214737 (TRAV8-6, TRAJ20)
CAVTRPGSNDYKLSF

SEQ ID NO: 429474 - protein, 13 aa, Homo sapiens
  CDR3 for beta chain variable domain of TCR clone 214737 (TRBV10-3, TRBJ2-7)
CASKLAVNYEQYF

SEQ ID NO: 429475 - protein, 11 aa, Homo sapiens
  CDR3 for alpha chain variable domain of TCR clone 214738 (TRAV26-1, TRAJ37)
CIVRVGRKLIF

SEQ ID NO: 429476 - protein, 14 aa, Homo sapiens
  CDR3 for beta chain variable domain of TCR clone 214738 (TRBV11-3, TRBJ2-7)
CASSARTGRYEQYF

SEQ ID NO: 429477 - protein, 16 aa, Homo sapiens
  CDR3 for alpha chain variable domain of TCR clone 214739 (TRAV38-1, TRAJ37)
CAFMGDGSSNTGKLIF

SEQ ID NO: 429478 - protein, 13 aa, Homo sapiens
  CDR3 for beta chain variable domain of TCR clone 214739 (TRBV12-4, TRBJ2-5)
CASSLFRRETQYF

SEQ ID NO: 429479 - protein, 15 aa, Homo sapiens
  CDR3 for alpha chain variable domain of TCR clone 214740 (TRAV12-2, TRAJ56)
CAVNPFTGANSKLNF

SEQ ID NO: 429480 - protein, 13 aa, Homo sapiens
  CDR3 for beta chain variable domain of TCR clone 214740 (TRBV20-1, TRBJ1-2)
CSARDRVYGGYTF

SEQ ID NO: 429481 - protein, 12 aa, Homo sapiens
  CDR3 for alpha chain variable domain of TCR clone 214741 (TRAV21, TRAJ3)
CCFYSSASKIIF

SEQ ID NO: 429482 - protein, 16 aa, Homo sapiens
  CDR3 for beta chain variable domain of TCR clone 214741 (TRBV19, TRBJ2-1)
CVSNKAGPSSYNEQFF

SEQ ID NO: 429483 - protein, 14 aa, Homo sapiens
  CDR3 for alpha chain variable domain of TCR clone 214742 (TRAV13-1, TRAJ10)
CAAKEPGGGNKLTF

SEQ ID NO: 429484 - protein, 17 aa, Homo sapiens
  CDR3 for beta chain variable domain of TCR clone 214742 (TRBV11-2, TRBJ2-1)
CASSLYPPGVEYNEQFF

SEQ ID NO: 429485 - protein, 16 aa, Homo sapiens
  CDR3 for alpha chain variable domain of TCR clone 214743 (TRAV8-1, TRAJ52)
CRDLPAGGTSYGKLTF

SEQ ID NO: 429486 - protein, 12 aa, Homo sapiens
  CDR3 for beta chain variable domain of TCR clone 214743 (TRBV27, TRBJ2-7)
CASSGGFYEQYF

SEQ ID NO: 429487 - protein, 16 aa, Homo sapiens
  CDR3 for alpha chain variable domain of TCR clone 214744 (TRAV14/DV4, TRAJ54)
CAMREGRIQGAQKLVF

SEQ ID NO: 429488 - protein, 14 aa, Homo sapiens
  CDR3 for beta chain variable domain of TCR clone 214744 (TRBV5-7, TRBJ2-7)
CASSGGLSSYEQYF

SEQ ID NO: 429489 - protein, 15 aa, Homo sapiens
  CDR3 for alpha chain variable domain of TCR clone 214745 (TRAV3, TRAJ22)
CAVRDRGGSARQLTF

SEQ ID NO: 429490 - protein, 17 aa, Homo sapiens
  CDR3 for beta chain variable domain of TCR clone 214745 (TRBV13, TRBJ2-3)
YASSLSRVAGGRNTQYF

SEQ ID NO: 429491 - protein, 13 aa, Homo sapiens
  CDR3 for alpha chain variable domain of TCR clone 214746 (TRAV9-2, TRAJ49)
CALRHFAGNQFYF

SEQ ID NO: 429492 - protein, 15 aa, Homo sapiens
  CDR3 for beta chain variable domain of TCR clone 214746 (TRBV5-1, TRBJ2-7)
CASSLNGGPAREQYF

SEQ ID NO: 429493 - protein, 15 aa, Homo sapiens
  CDR3 for alpha chain variable domain of TCR clone 214747 (TRAV2, TRAJ45)
CAVDGTGGGAGGLTF

SEQ ID NO: 429494 - protein, 14 aa, Homo sapiens
  CDR3 for beta chain variable domain of TCR clone 214747 (TRBV20-1, TRBJ1-2)
CSASGQGDSYGYTF

SEQ ID NO: 429495 - protein, 15 aa, Homo sapiens
  CDR3 for alpha chain variable domain of TCR clone 214748 (TRAV21, TRAJ24)
CAARSSTGSWAKLQF

SEQ ID NO: 429496 - protein, 13 aa, Homo sapiens
  CDR3 for beta chain variable domain of TCR clone 214748 (TRBV10-3, TRBJ2-7)
CASKLAVNYEQYF

SEQ ID NO: 429497 - protein, 11 aa, Homo sapiens
  CDR3 for alpha chain variable domain of TCR clone 214749 (TRAV2, TRAJ37)
CAADNTGKLIF

SEQ ID NO: 429498 - protein, 16 aa, Homo sapiens
  CDR3 for beta chain variable domain of TCR clone 214749 (TRBV9, TRBJ2-1)
CASSVGGGGNYNEQFF

SEQ ID NO: 429499 - protein, 13 aa, Homo sapiens
  CDR3 for alpha chain variable domain of TCR clone 214750 (TRAV21, TRAJ27)
RAARPGNAGKSTF

SEQ ID NO: 429500 - protein, 11 aa, Homo sapiens
  CDR3 for beta chain variable domain of TCR clone 214750 (TRBV7-9, TRBJ2-1)
CASSLTYEQFF

SEQ ID NO: 429501 - protein, 12 aa, Homo sapiens
  CDR3 for alpha chain variable domain of TCR clone 214751 (TRAV12-3, TRAJ17)
CAMTLTGNKLTF

SEQ ID NO: 429502 - protein, 16 aa, Homo sapiens
  CDR3 for beta chain variable domain of TCR clone 214751 (TRBV29-1, TRBJ2-7)
CSVEDAVDGTAYEKYF

SEQ ID NO: 429503 - protein, 12 aa, Homo sapiens
  CDR3 for alpha chain variable domain of TCR clone 214752 (TRAV34, TRAJ27)
CGAGTNAGKSTF

SEQ ID NO: 429504 - protein, 17 aa, Homo sapiens
  CDR3 for beta chain variable domain of TCR clone 214752 (TRBV7-3, TRBJ2-2)
CASSLSGTSGGTGELFF

SEQ ID NO: 429505 - protein, 18 aa, Homo sapiens
  CDR3 for alpha chain variable domain of TCR clone 214753 (TRAV12-3, TRAJ52)
CAMSVGGAGGTSYGKLTF

SEQ ID NO: 429506 - protein, 17 aa, Homo sapiens
  CDR3 for beta chain variable domain of TCR clone 214753 (TRBV20-1, TRBJ2-2)
CSASGSGQGGLTGELFF

SEQ ID NO: 429507 - protein, 14 aa, Homo sapiens
  CDR3 for alpha chain variable domain of TCR clone 214754 (TRAV2, TRAJ9)
CAVEDRCGGFKTIF

SEQ ID NO: 429508 - protein, 15 aa, Homo sapiens
  CDR3 for beta chain variable domain of TCR clone 214754 (TRBV10-3, TRBJ2-1)
CAIRNGTSGHNEQFF

SEQ ID NO: 429509 - protein, 14 aa, Homo sapiens
  CDR3 for alpha chain variable domain of TCR clone 214755 (TRAV17, TRAJ56)
CATVPAGANSKLTF

SEQ ID NO: 429510 - protein, 14 aa, Homo sapiens
  CDR3 for beta chain variable domain of TCR clone 214755 (TRBV7-3, TRBJ2-2)
CASSSGGYTGELFF

SEQ ID NO: 429511 - protein, 19 aa, Homo sapiens
  CDR3 for alpha chain variable domain of TCR clone 214756 (TRAV2, TRAJ20)
ILQVREADAAVYRDRKLSF

SEQ ID NO: 429512 - protein, 13 aa, Homo sapiens
  CDR3 for beta chain variable domain of TCR clone 214756 (TRBV10-3, TRBJ2-7)
CASKLAVNYEQYF

SEQ ID NO: 429513 - protein, 14 aa, Homo sapiens
  CDR3 for alpha chain variable domain of TCR clone 214757 (TRAV12-2, TRAJ40)
CAVKIPSGTYKYIF

SEQ ID NO: 429514 - protein, 17 aa, Homo sapiens
  CDR3 for beta chain variable domain of TCR clone 214757 (TRBV3-1, TRBJ2-2)
CASSQFRDKVDTGELFF

SEQ ID NO: 429515 - protein, 18 aa, Homo sapiens
  CDR3 for alpha chain variable domain of TCR clone 214758 (TRAV21, TRAJ52)
CAVRPSPAGGPSYGKLTF

SEQ ID NO: 429516 - protein, 13 aa, Homo sapiens
  CDR3 for beta chain variable domain of TCR clone 214758 (TRBV7-3, TRBJ1-1)
YASSQDWGAEAFF

SEQ ID NO: 429517 - protein, 15 aa, Homo sapiens
  CDR3 for alpha chain variable domain of TCR clone 214759 (TRAV29/DV5, TRAJ29)
CAASERSSGNTPLVF

SEQ ID NO: 429518 - protein, 15 aa, Homo sapiens
  CDR3 for beta chain variable domain of TCR clone 214759 (TRBV28, TRBJ2-1)
CASSGLAEVDNEQFF

SEQ ID NO: 429519 - protein, 15 aa, Homo sapiens
  CDR3 for alpha chain variable domain of TCR clone 214760 (TRAV8-3, TRAJ33)
LSTSLHGDSNYQLIW

SEQ ID NO: 429520 - protein, 13 aa, Homo sapiens
  CDR3 for beta chain variable domain of TCR clone 214760 (TRBV12-5, TRBJ2-3)
CASQNRGTDTQYF

SEQ ID NO: 429521 - protein, 14 aa, Homo sapiens
  CDR3 for alpha chain variable domain of TCR clone 214761 (TRAV1-2, TRAJ16)
CAVNRFSDGQKLLF

SEQ ID NO: 429522 - protein, 15 aa, Homo sapiens
  CDR3 for beta chain variable domain of TCR clone 214761 (TRBV9, TRBJ1-6)
CASSVAGTGDSRLYF

SEQ ID NO: 429523 - protein, 12 aa, Homo sapiens
  CDR3 for alpha chain variable domain of TCR clone 214762 (TRAV21, TRAJ12)
CAVMDSSYKFIF

SEQ ID NO: 429524 - protein, 16 aa, Homo sapiens
  CDR3 for beta chain variable domain of TCR clone 214762 (TRBV7-9, TRBJ2-5)
CASRLEIGTRKETQYF

SEQ ID NO: 429525 - protein, 13 aa, Homo sapiens
  CDR3 for alpha chain variable domain of TCR clone 214763 (TRAV2, TRAJ29)
CAAGGPGNTPLVF

SEQ ID NO: 429526 - protein, 13 aa, Homo sapiens
  CDR3 for beta chain variable domain of TCR clone 214763 (TRBV7-2, TRBJ2-5)
CASSQTSVETQYF

SEQ ID NO: 429527 - protein, 14 aa, Homo sapiens
  CDR3 for alpha chain variable domain of TCR clone 214764 (TRAV1-2, TRAJ8)
CAVREDPGFQKLVF

SEQ ID NO: 429528 - protein, 13 aa, Homo sapiens
  CDR3 for beta chain variable domain of TCR clone 214764 (TRBV14, TRBJ1-1)
CASSREFGTEAFF

SEQ ID NO: 429529 - protein, 14 aa, Homo sapiens
  CDR3 for alpha chain variable domain of TCR clone 214765 (TRAV14/DV4, TRAJ15)
CAMRRRQAGTARIF

SEQ ID NO: 429530 - protein, 16 aa, Homo sapiens
  CDR3 for beta chain variable domain of TCR clone 214765 (TRBV15, TRBJ2-3)
CATSRDLGIVTDTQYF

SEQ ID NO: 429531 - protein, 10 aa, Homo sapiens
  CDR3 for alpha chain variable domain of TCR clone 214766 (TRAV1-2, TRAJ23)
CAGQGGNLIF

SEQ ID NO: 429532 - protein, 16 aa, Homo sapiens
  CDR3 for beta chain variable domain of TCR clone 214766 (TRBV11-2, TRBJ1-1)
CASSLRQGGEHSKAFF

SEQ ID NO: 429533 - protein, 13 aa, Homo sapiens
  CDR3 for alpha chain variable domain of TCR clone 214767 (TRAV20, TRAJ45)
CAVKKRRCRRTHL

SEQ ID NO: 429534 - protein, 14 aa, Homo sapiens
  CDR3 for beta chain variable domain of TCR clone 214767 (TRBV15, TRBJ2-5)
CATSIVGLGETQYF

SEQ ID NO: 429535 - protein, 18 aa, Homo sapiens
  CDR3 for alpha chain variable domain of TCR clone 214768 (TRAV21, TRAJ52)
CAVMPSPAGGTSFGKLTF

SEQ ID NO: 429536 - protein, 17 aa, Homo sapiens
  CDR3 for beta chain variable domain of TCR clone 214768 (TRBV25-1, TRBJ2-1)
CASSAYGQGRGVYEQFF

SEQ ID NO: 429537 - protein, 11 aa, Homo sapiens
  CDR3 for alpha chain variable domain of TCR clone 214769 (TRAV21, TRAJ39)
LLANAGNMLTF

SEQ ID NO: 429538 - protein, 16 aa, Homo sapiens
  CDR3 for beta chain variable domain of TCR clone 214769 (TRBV9, TRBJ2-7)
CASSVGLGEGTYEQYF

SEQ ID NO: 429539 - protein, 14 aa, Homo sapiens
  CDR3 for alpha chain variable domain of TCR clone 214770 (TRAV23/DV6, TRAJ22)
CAASVSGSARQLTF

SEQ ID NO: 429540 - protein, 14 aa, Homo sapiens
  CDR3 for beta chain variable domain of TCR clone 214770 (TRBV4-1, TRBJ2-2)
CASSQAVNTGELFF

SEQ ID NO: 429541 - protein, 13 aa, Homo sapiens
  CDR3 for alpha chain variable domain of TCR clone 214771 (TRAV12-1, TRAJ20)
CVVNVPNDYKLSF

SEQ ID NO: 429542 - protein, 14 aa, Homo sapiens
  CDR3 for beta chain variable domain of TCR clone 214771 (TRBV5-4, TRBJ1-1)
CASSLDSRRDEAFF

SEQ ID NO: 429543 - protein, 13 aa, Homo sapiens
  CDR3 for alpha chain variable domain of TCR clone 214772 (TRAV8-3, TRAJ37)
CAVPSSNTGKLII

SEQ ID NO: 429544 - protein, 12 aa, Homo sapiens
  CDR3 for beta chain variable domain of TCR clone 214772 (TRBV11-2, TRBJ2-1)
CASSPGNNEQFF

SEQ ID NO: 429545 - protein, 14 aa, Homo sapiens
  CDR3 for alpha chain variable domain of TCR clone 214773 (TRAV29/DV5, TRAJ36)
CAARRKTGANNLFF

SEQ ID NO: 429546 - protein, 14 aa, Homo sapiens
  CDR3 for beta chain variable domain of TCR clone 214773 (TRBV12-5, TRBJ2-5)
CTSGSRTHQETQYF

SEQ ID NO: 429547 - protein, 11 aa, Homo sapiens
  CDR3 for alpha chain variable domain of TCR clone 214774 (TRAV12-2, TRAJ33)
CAVTSNYQLIW

SEQ ID NO: 429548 - protein, 15 aa, Homo sapiens
  CDR3 for beta chain variable domain of TCR clone 214774 (TRBV20-1, TRBJ2-7)
CSARDRVSGMDEQYF

SEQ ID NO: 429549 - protein, 14 aa, Homo sapiens
  CDR3 for alpha chain variable domain of TCR clone 214775 (TRAV1-2, TRAJ16)
CAVNRFSDGQKLLF

SEQ ID NO: 429550 - protein, 12 aa, Homo sapiens
  CDR3 for beta chain variable domain of TCR clone 214775 (TRBV28, TRBJ2-6)
CASQAGANVLTF

SEQ ID NO: 429551 - protein, 14 aa, Homo sapiens
  CDR3 for alpha chain variable domain of TCR clone 214776 (TRAV17, TRAJ20)
CATPHPSNDYKLSF

SEQ ID NO: 429552 - protein, 14 aa, Homo sapiens
  CDR3 for beta chain variable domain of TCR clone 214776 (TRBV19, TRBJ2-1)
CASPTFVLSGEQFF

SEQ ID NO: 429553 - protein, 14 aa, Homo sapiens
  CDR3 for alpha chain variable domain of TCR clone 214777 (TRAV9-2, TRAJ39)
CALYIYNAGNMLTS

SEQ ID NO: 429554 - protein, 14 aa, Homo sapiens
  CDR3 for beta chain variable domain of TCR clone 214777 (TRBV19, TRBJ2-1)
CASPTFVLSGEQFF

SEQ ID NO: 429555 - protein, 15 aa, Homo sapiens
  CDR3 for alpha chain variable domain of TCR clone 214778 (TRAV17, TRAJ16)
CATALRLSDGRKLLF

SEQ ID NO: 429556 - protein, 15 aa, Homo sapiens
  CDR3 for beta chain variable domain of TCR clone 214778 (TRBV20-1, TRBJ1-1)
CSASRGVTGNTEAFF

SEQ ID NO: 429557 - protein, 14 aa, Homo sapiens
  CDR3 for alpha chain variable domain of TCR clone 214779 (TRAV12-1, TRAJ17)
CVVNYKAAGNKLTF

SEQ ID NO: 429558 - protein, 14 aa, Homo sapiens
  CDR3 for beta chain variable domain of TCR clone 214779 (TRBV28, TRBJ2-5)
CACSLGDRAETQYF

SEQ ID NO: 429559 - protein, 17 aa, Homo sapiens
  CDR3 for alpha chain variable domain of TCR clone 214780 (TRAV3, TRAJ6)
CAVRDGPRAGGSYIPTF

SEQ ID NO: 429560 - protein, 14 aa, Homo sapiens
  CDR3 for beta chain variable domain of TCR clone 214780 (TRBV7-9, TRBJ2-2)
CASSFDRGTGELFF

SEQ ID NO: 429561 - protein, 15 aa, Homo sapiens
  CDR3 for alpha chain variable domain of TCR clone 214781 (TRAV13-1, TRAJ32)
CAASIAGGATNKLIF

SEQ ID NO: 429562 - protein, 17 aa, Homo sapiens
  CDR3 for beta chain variable domain of TCR clone 214781 (TRBV7-3, TRBJ2-5)
CASSLGSGRSGSETQYF

SEQ ID NO: 429563 - protein, 14 aa, Homo sapiens
  CDR3 for alpha chain variable domain of TCR clone 214782 (TRAV23/DV6, TRAJ13)
CAAMYSGGYQKVTF

SEQ ID NO: 429564 - protein, 16 aa, Homo sapiens
  CDR3 for beta chain variable domain of TCR clone 214782 (TRBV7-9, TRBJ1-2)
CASSLGFSSGEDGYTF

SEQ ID NO: 429565 - protein, 13 aa, Homo sapiens
  CDR3 for alpha chain variable domain of TCR clone 214783 (TRAV3, TRAJ21)
CAVREPDFNKSYF

SEQ ID NO: 429566 - protein, 14 aa, Homo sapiens
  CDR3 for beta chain variable domain of TCR clone 214783 (TRBV4-1, TRBJ2-2)
CASSQAVNTGELFF

SEQ ID NO: 429567 - protein, 14 aa, Homo sapiens
  CDR3 for alpha chain variable domain of TCR clone 214784 (TRAV8-4, TRAJ8)
CAVSEDTGFQKLVF

SEQ ID NO: 429568 - protein, 12 aa, Homo sapiens
  CDR3 for beta chain variable domain of TCR clone 214784 (TRBV7-9, TRBJ1-5)
CASSPQGQPQHF

SEQ ID NO: 429569 - protein, 19 aa, Homo sapiens
  CDR3 for alpha chain variable domain of TCR clone 214785 (TRAV2, TRAJ20)
ILQVREADAAVYRDCKLSF

SEQ ID NO: 429570 - protein, 13 aa, Homo sapiens
  CDR3 for beta chain variable domain of TCR clone 214785 (TRBV12-5, TRBJ2-3)
CASGDRQSDTQYF

SEQ ID NO: 429571 - protein, 18 aa, Homo sapiens
  CDR3 for alpha chain variable domain of TCR clone 214786 (TRAV26-1, TRAJ56)
CIARVASRVTGANSKLTF

SEQ ID NO: 429572 - protein, 15 aa, Homo sapiens
  CDR3 for beta chain variable domain of TCR clone 214786 (TRBV7-9, TRBJ2-5)
CASSDTGRGRETQYF

SEQ ID NO: 429573 - protein, 16 aa, Homo sapiens
  CDR3 for alpha chain variable domain of TCR clone 214787 (TRAV30, TRAJ24)
CGTEIVDADSWGKFQF

SEQ ID NO: 429574 - protein, 15 aa, Homo sapiens
  CDR3 for beta chain variable domain of TCR clone 214787 (TRBV6-3, TRBJ2-7)
CASSFPGTVFYEQYF

SEQ ID NO: 429575 - protein, 15 aa, Homo sapiens
  CDR3 for alpha chain variable domain of TCR clone 214788 (TRAV12-3, TRAJ27)
CAMRAYNTNAGKSTF

SEQ ID NO: 429576 - protein, 13 aa, Homo sapiens
  CDR3 for beta chain variable domain of TCR clone 214788 (TRBV27, TRBJ1-1)
CASSLSIGAEAFF

SEQ ID NO: 429577 - protein, 18 aa, Homo sapiens
  CDR3 for alpha chain variable domain of TCR clone 214789 (TRAV26-2, TRAJ33)
CCVLLHPEEPASHYQLIW

SEQ ID NO: 429578 - protein, 13 aa, Homo sapiens
  CDR3 for beta chain variable domain of TCR clone 214789 (TRBV24-1, TRBJ2-2)
CATSDWSTGELFF

SEQ ID NO: 429579 - protein, 12 aa, Homo sapiens
  CDR3 for alpha chain variable domain of TCR clone 214790 (TRAV13-2, TRAJ23)
CAERHRGGKLIF

SEQ ID NO: 429580 - protein, 13 aa, Homo sapiens
  CDR3 for beta chain variable domain of TCR clone 214790 (TRBV19, TRBJ1-2)
CASSVPGQDGYTF

SEQ ID NO: 429581 - protein, 15 aa, Homo sapiens
  CDR3 for alpha chain variable domain of TCR clone 214791 (TRAV12-2, TRAJ20)
CAVKGGFGAGTTVTV

SEQ ID NO: 429582 - protein, 15 aa, Homo sapiens
  CDR3 for beta chain variable domain of TCR clone 214791 (TRBV7-8, TRBJ2-1)
CASSLAGGLYNEQFF

SEQ ID NO: 429583 - protein, 16 aa, Homo sapiens
  CDR3 for alpha chain variable domain of TCR clone 214792 (TRAV30, TRAJ24)
CGTEIVDADSWGKFQF

SEQ ID NO: 429584 - protein, 13 aa, Homo sapiens
  CDR3 for beta chain variable domain of TCR clone 214792 (TRBV10-3, TRBJ2-3)
CAIRDTGADTQYF

SEQ ID NO: 429585 - protein, 14 aa, Homo sapiens
  CDR3 for alpha chain variable domain of TCR clone 214793 (TRAV4, TRAJ9)
CLVGSGTGGFKTIF

SEQ ID NO: 429586 - protein, 15 aa, Homo sapiens
  CDR3 for beta chain variable domain of TCR clone 214793 (TRBV7-2, TRBJ2-1)
CASSLASGRVSEQFF

SEQ ID NO: 429587 - protein, 16 aa, Homo sapiens
  CDR3 for alpha chain variable domain of TCR clone 214794 (TRAV17, TRAJ52)
CATSNAGGTSYGKLTF

SEQ ID NO: 429588 - protein, 17 aa, Homo sapiens
  CDR3 for beta chain variable domain of TCR clone 214794 (TRBV27, TRBJ2-1)
CASSSERGGQSADEQFF

SEQ ID NO: 429589 - protein, 12 aa, Homo sapiens
  CDR3 for alpha chain variable domain of TCR clone 214795 (TRAV27, TRAJ42)
CAGGGSEGNLIF

SEQ ID NO: 429590 - protein, 13 aa, Homo sapiens
  CDR3 for beta chain variable domain of TCR clone 214795 (TRBV19, TRBJ2-7)
CASSIRSSYEQYF

SEQ ID NO: 429591 - protein, 11 aa, Homo sapiens
  CDR3 for alpha chain variable domain of TCR clone 214796 (TRAV2, TRAJ33)
CAVDSNYQLIW

SEQ ID NO: 429592 - protein, 15 aa, Homo sapiens
  CDR3 for beta chain variable domain of TCR clone 214796 (TRBV7-3, TRBJ2-3)
CASSLGLTLGDTQYF

SEQ ID NO: 429593 - protein, 14 aa, Homo sapiens
  CDR3 for alpha chain variable domain of TCR clone 214797 (TRAV1-2, TRAJ15)
CAVRDRQAGTALIF

SEQ ID NO: 429594 - protein, 20 aa, Homo sapiens
  CDR3 for beta chain variable domain of TCR clone 214797 (TRBV7-3, TRBJ2-3)
CISVPAAPPLGTRVTDTQYF

SEQ ID NO: 429595 - protein, 18 aa, Homo sapiens
  CDR3 for alpha chain variable domain of TCR clone 214798 (TRAV26-1, TRAJ23)
CIVRVGLGVWNQGGKLIF

SEQ ID NO: 429596 - protein, 14 aa, Homo sapiens
  CDR3 for beta chain variable domain of TCR clone 214798 (TRBV12-4, TRBJ1-3)
CASGQTVSGNTIYF

SEQ ID NO: 429597 - protein, 14 aa, Homo sapiens
  CDR3 for alpha chain variable domain of TCR clone 214799 (TRAV8-3, TRAJ10)
CAVGNAGGGNKHTF

SEQ ID NO: 429598 - protein, 16 aa, Homo sapiens
  CDR3 for beta chain variable domain of TCR clone 214799 (TRBV11-2, TRBJ1-2)
CASSLDTGGADYGYTF

SEQ ID NO: 429599 - protein, 14 aa, Homo sapiens
  CDR3 for alpha chain variable domain of TCR clone 214800 (TRAV12-2, TRAJ17)
CAVLFKAAGNKLTF

SEQ ID NO: 429600 - protein, 17 aa, Homo sapiens
  CDR3 for beta chain variable domain of TCR clone 214800 (TRBV5-1, TRBJ1-5)
CASSLVGREEGNQPQHF

SEQ ID NO: 429601 - protein, 15 aa, Homo sapiens
  CDR3 for alpha chain variable domain of TCR clone 214801 (TRAV38-2/DV8, TRAJ57)
CAYKSGLGGSEQLVF

SEQ ID NO: 429602 - protein, 16 aa, Homo sapiens
  CDR3 for beta chain variable domain of TCR clone 214801 (TRBV28, TRBJ1-5)
CASSFRGGYSNQPQHF

SEQ ID NO: 429603 - protein, 14 aa, Homo sapiens
  CDR3 for alpha chain variable domain of TCR clone 214802 (TRAV1-2, TRAJ8)
CAVREDTGFQKLVF

SEQ ID NO: 429604 - protein, 15 aa, Homo sapiens
  CDR3 for beta chain variable domain of TCR clone 214802 (TRBV5-4, TRBJ2-6)
CASSSGRTGANVLTF

SEQ ID NO: 429605 - protein, 14 aa, Homo sapiens
  CDR3 for alpha chain variable domain of TCR clone 214803 (TRAV30, TRAJ26)
CGTEIVSYGQNFVF

SEQ ID NO: 429606 - protein, 12 aa, Homo sapiens
  CDR3 for beta chain variable domain of TCR clone 214803 (TRBV19, TRBJ1-3)
CQQISLGNTIYF

SEQ ID NO: 429607 - protein, 13 aa, Homo sapiens
  CDR3 for alpha chain variable domain of TCR clone 214804 (TRAV3, TRAJ21)
CAVREPDFNKFYF

SEQ ID NO: 429608 - protein, 13 aa, Homo sapiens
  CDR3 for beta chain variable domain of TCR clone 214804 (TRBV19, TRBJ2-1)
CASSIRSSWEQFF

SEQ ID NO: 429609 - protein, 13 aa, Homo sapiens
  CDR3 for alpha chain variable domain of TCR clone 214805 (TRAV2, TRAJ15)
CAVEAQAGTALLF

SEQ ID NO: 429610 - protein, 14 aa, Homo sapiens
  CDR3 for beta chain variable domain of TCR clone 214805 (TRBV6-5, TRBJ2-7)
CASVASGGAHEQYF

SEQ ID NO: 429611 - protein, 10 aa, Homo sapiens
  CDR3 for alpha chain variable domain of TCR clone 214806 (TRAV23/DV6, TRAJ57)
CAASSTLSQG

SEQ ID NO: 429612 - protein, 13 aa, Homo sapiens
  CDR3 for beta chain variable domain of TCR clone 214806 (TRBV11-2, TRBJ2-5)
CASSRGPSETQYF

SEQ ID NO: 429613 - protein, 13 aa, Homo sapiens
  CDR3 for alpha chain variable domain of TCR clone 214807 (TRAV20, TRAJ34)
SAVSSYNTDKLIF

SEQ ID NO: 429614 - protein, 15 aa, Homo sapiens
  CDR3 for beta chain variable domain of TCR clone 214807 (TRBV20-1, TRBJ1-2)
CSAAGEGARIYGYTF

SEQ ID NO: 429615 - protein, 15 aa, Homo sapiens
  CDR3 for alpha chain variable domain of TCR clone 214808 (TRAV26-1, TRAJ17)
CIVRVVKAAGNKLTF

SEQ ID NO: 429616 - protein, 16 aa, Homo sapiens
  CDR3 for beta chain variable domain of TCR clone 214808 (TRBV7-3, TRBJ2-2)
CASSLKRGTLSGELFF

SEQ ID NO: 429617 - protein, 11 aa, Homo sapiens
  CDR3 for alpha chain variable domain of TCR clone 214809 (TRAV2, TRAJ13)
CASGGYQKATF

SEQ ID NO: 429618 - protein, 14 aa, Homo sapiens
  CDR3 for beta chain variable domain of TCR clone 214809 (TRBV19, TRBJ2-1)
CASPTFVLSGEQFF

SEQ ID NO: 429619 - protein, 14 aa, Homo sapiens
  CDR3 for alpha chain variable domain of TCR clone 214810 (TRAV1-2, TRAJ33)
CAVRAPDSNNQLIW

SEQ ID NO: 429620 - protein, 15 aa, Homo sapiens
  CDR3 for beta chain variable domain of TCR clone 214810 (TRBV10-3, TRBJ2-3)
CAISLTSGGTDTQYF

SEQ ID NO: 429621 - protein, 14 aa, Homo sapiens
  CDR3 for alpha chain variable domain of TCR clone 214811 (TRAV9-2, TRAJ39)
CALYIYNAGNMLTF

SEQ ID NO: 429622 - protein, 15 aa, Homo sapiens
  CDR3 for beta chain variable domain of TCR clone 214811 (TRBV13, TRBJ2-1)
CASSLLSGLNNEQFF

SEQ ID NO: 429623 - protein, 16 aa, Homo sapiens
  CDR3 for alpha chain variable domain of TCR clone 214812 (TRAV16, TRAJ4)
CALSRMFSGGSNKLIF

SEQ ID NO: 429624 - protein, 16 aa, Homo sapiens
  CDR3 for beta chain variable domain of TCR clone 214812 (TRBV24-1, TRBJ2-3)
CATSDPGTRATDTHYF

SEQ ID NO: 429625 - protein, 13 aa, Homo sapiens
  CDR3 for alpha chain variable domain of TCR clone 214813 (TRAV26-1, TRAJ35)
CIVSRRVGEMLHC

SEQ ID NO: 429626 - protein, 14 aa, Homo sapiens
  CDR3 for beta chain variable domain of TCR clone 214813 (TRBV12-4, TRBJ1-1)
CASTWTGHDTEAFF

SEQ ID NO: 429627 - protein, 14 aa, Homo sapiens
  CDR3 for alpha chain variable domain of TCR clone 214814 (TRAV12-2, TRAJ13)
CAVKKTGGYQKVTF

SEQ ID NO: 429628 - protein, 15 aa, Homo sapiens
  CDR3 for beta chain variable domain of TCR clone 214814 (TRBV7-2, TRBJ2-1)
GASSSGLAGGNEQFF

SEQ ID NO: 429629 - protein, 13 aa, Homo sapiens
  CDR3 for alpha chain variable domain of TCR clone 214815 (TRAV13-1, TRAJ21)
WAASIYNFNKFYF

SEQ ID NO: 429630 - protein, 13 aa, Homo sapiens
  CDR3 for beta chain variable domain of TCR clone 214815 (TRBV4-2, TRBJ2-3)
CASSQGNTDTQYF

SEQ ID NO: 429631 - protein, 12 aa, Homo sapiens
  CDR3 for alpha chain variable domain of TCR clone 214816 (TRAV10, TRAJ43)
CVVVRVGNDKRF

SEQ ID NO: 429632 - protein, 15 aa, Homo sapiens
  CDR3 for beta chain variable domain of TCR clone 214816 (TRBV2, TRBJ2-7)
CASSEGLARSYEQYF

SEQ ID NO: 429633 - protein, 15 aa, Homo sapiens
  CDR3 for alpha chain variable domain of TCR clone 214817 (TRAV35, TRAJ40)
CAGQLWDSGTYQYIF

SEQ ID NO: 429634 - protein, 12 aa, Homo sapiens
  CDR3 for beta chain variable domain of TCR clone 214817 (TRBV7-8, TRBJ2-7)
CASSSAGYEQYF

SEQ ID NO: 429635 - protein, 15 aa, Homo sapiens
  CDR3 for alpha chain variable domain of TCR clone 214818 (TRAV8-3, TRAJ15)
CAVGAPNQAGTALIF

SEQ ID NO: 429636 - protein, 14 aa, Homo sapiens
  CDR3 for beta chain variable domain of TCR clone 214818 (TRBV20-1, TRBJ2-1)
CSPNDDASYNEQFF

SEQ ID NO: 429637 - protein, 15 aa, Homo sapiens
  CDR3 for alpha chain variable domain of TCR clone 214819 (TRAV13-1, TRAJ44)
CAASRGGGAASKLTF

SEQ ID NO: 429638 - protein, 14 aa, Homo sapiens
  CDR3 for beta chain variable domain of TCR clone 214819 (TRBV7-2, TRBJ2-5)
CASSPRGSSETQYF

SEQ ID NO: 429639 - protein, 13 aa, Homo sapiens
  CDR3 for alpha chain variable domain of TCR clone 214820 (TRAV21, TRAJ57)
CAVTQGGSEKMVF

SEQ ID NO: 429640 - protein, 16 aa, Homo sapiens
  CDR3 for beta chain variable domain of TCR clone 214820 (TRBV29-1, TRBJ2-7)
CSVEDAEDGTDYEQYF

SEQ ID NO: 429641 - protein, 14 aa, Homo sapiens
  CDR3 for alpha chain variable domain of TCR clone 214821 (TRAV12-2, TRAJ13)
CAVKKTGGTQKVTF

SEQ ID NO: 429642 - protein, 15 aa, Homo sapiens
  CDR3 for beta chain variable domain of TCR clone 214821 (TRBV27, TRBJ2-1)
CASSNGGRSSNEHFF

SEQ ID NO: 429643 - protein, 13 aa, Homo sapiens
  CDR3 for alpha chain variable domain of TCR clone 214822 (TRAV27, TRAJ41)
CAGEGNSGYALNF

SEQ ID NO: 429644 - protein, 13 aa, Homo sapiens
  CDR3 for beta chain variable domain of TCR clone 214822 (TRBV11-2, TRBJ1-6)
CASSLAGVSPLHF

SEQ ID NO: 429645 - protein, 21 aa, Homo sapiens
  CDR3 for alpha chain variable domain of TCR clone 214823 (TRAV30, TRAJ43)
GLPAQLLRNLLPIIELNDMRF

SEQ ID NO: 429646 - protein, 16 aa, Homo sapiens
  CDR3 for beta chain variable domain of TCR clone 214823 (TRBV19, TRBJ2-3)
CASSPGAASRTDTQYF

SEQ ID NO: 429647 - protein, 15 aa, Homo sapiens
  CDR3 for alpha chain variable domain of TCR clone 214824 (TRAV8-3, TRAJ27)
CAVGPSKNNQANQPL

SEQ ID NO: 429648 - protein, 15 aa, Homo sapiens
  CDR3 for beta chain variable domain of TCR clone 214824 (TRBV5-1, TRBJ2-3)
CASSVTSGSTDTQYF

SEQ ID NO: 429649 - protein, 13 aa, Homo sapiens
  CDR3 for alpha chain variable domain of TCR clone 214825 (TRAV23/DV6, TRAJ16)
CAASISDGQKLLF

SEQ ID NO: 429650 - protein, 15 aa, Homo sapiens
  CDR3 for beta chain variable domain of TCR clone 214825 (TRBV6-1, TRBJ2-3)
CASSERGGITDTQYF

SEQ ID NO: 429651 - protein, 14 aa, Homo sapiens
  CDR3 for alpha chain variable domain of TCR clone 214826 (TRAV12-2, TRAJ45)
CAVNIGGGADGLTL

SEQ ID NO: 429652 - protein, 14 aa, Homo sapiens
  CDR3 for beta chain variable domain of TCR clone 214826 (TRBV11-2, TRBJ2-5)
CASSRTGGIETQYF

SEQ ID NO: 429653 - protein, 15 aa, Homo sapiens
  CDR3 for alpha chain variable domain of TCR clone 214827 (TRAV13-1, TRAJ10)
CAATILTGGGNKLTF

SEQ ID NO: 429654 - protein, 15 aa, Homo sapiens
  CDR3 for beta chain variable domain of TCR clone 214827 (TRBV29-1, TRBJ2-7)
CSVEFFDRGSYEQYF

SEQ ID NO: 429655 - protein, 14 aa, Homo sapiens
  CDR3 for alpha chain variable domain of TCR clone 214828 (TRAV12-3, TRAJ10)
SQLPLTGGGNKLTF

SEQ ID NO: 429656 - protein, 12 aa, Homo sapiens
  CDR3 for beta chain variable domain of TCR clone 214828 (TRBV7-3, TRBJ2-5)
CASSSPGGTQYF

SEQ ID NO: 429657 - protein, 13 aa, Homo sapiens
  CDR3 for alpha chain variable domain of TCR clone 214829 (TRAV35, TRAJ57)
CAGSRGGSEKLVF

SEQ ID NO: 429658 - protein, 14 aa, Homo sapiens
  CDR3 for beta chain variable domain of TCR clone 214829 (TRBV25-1, TRBJ1-1)
CASTHLGGNTEAFF

SEQ ID NO: 429659 - protein, 16 aa, Homo sapiens
  CDR3 for alpha chain variable domain of TCR clone 214830 (TRAV30, TRAJ24)
SVTEIVDADSWGKFQF

SEQ ID NO: 429660 - protein, 14 aa, Homo sapiens
  CDR3 for beta chain variable domain of TCR clone 214830 (TRBV12-5, TRBJ2-5)
CASGSRTHQETQYF

SEQ ID NO: 429661 - protein, 13 aa, Homo sapiens
  CDR3 for alpha chain variable domain of TCR clone 214831 (TRAV27, TRAJ45)
CRGGGGGADGLTV

SEQ ID NO: 429662 - protein, 13 aa, Homo sapiens
  CDR3 for beta chain variable domain of TCR clone 214831 (TRBV20-1, TRBJ1-1)
CSAPEGGNTEAFF

SEQ ID NO: 429663 - protein, 18 aa, Homo sapiens
  CDR3 for alpha chain variable domain of TCR clone 214832 (TRAV2, TRAJ32)
CCLLLCFHYGGATNKLIF

SEQ ID NO: 429664 - protein, 16 aa, Homo sapiens
  CDR3 for beta chain variable domain of TCR clone 214832 (TRBV7-9, TRBJ2-7)
CPSSYPDREGGYEQYF

SEQ ID NO: 429665 - protein, 12 aa, Homo sapiens
  CDR3 for alpha chain variable domain of TCR clone 214833 (TRAV12-3, TRAJ40)
CAMSSGTYKYIF

SEQ ID NO: 429666 - protein, 15 aa, Homo sapiens
  CDR3 for beta chain variable domain of TCR clone 214833 (TRBV7-3, TRBJ2-2)
CASSETGQGTGELFC

SEQ ID NO: 429667 - protein, 11 aa, Homo sapiens
  CDR3 for alpha chain variable domain of TCR clone 214834 (TRAV21, TRAJ57)
CAVMAPEKLVF

SEQ ID NO: 429668 - protein, 15 aa, Homo sapiens
  CDR3 for beta chain variable domain of TCR clone 214834 (TRBV13, TRBJ2-5)
CASRLSGRWQETQYF

SEQ ID NO: 429669 - protein, 15 aa, Homo sapiens
  CDR3 for alpha chain variable domain of TCR clone 214835 (TRAV21, TRAJ53)
CATLNSGGSNYKLTF

SEQ ID NO: 429670 - protein, 17 aa, Homo sapiens
  CDR3 for beta chain variable domain of TCR clone 214835 (TRBV20-1, TRBJ2-2)
CSASGTGQGGLTGELFF

SEQ ID NO: 429671 - protein, 16 aa, Homo sapiens
  CDR3 for alpha chain variable domain of TCR clone 214836 (TRAV3, TRAJ37)
CAVRLHGSGNTGKLIF

SEQ ID NO: 429672 - protein, 14 aa, Homo sapiens
  CDR3 for beta chain variable domain of TCR clone 214836 (TRBV25-1, TRBJ1-1)
CASTHLGGNTEAFF

SEQ ID NO: 429673 - protein, 14 aa, Homo sapiens
  CDR3 for alpha chain variable domain of TCR clone 214837 (TRAV13-1, TRAJ20)
CATRPASNDYKLSF

SEQ ID NO: 429674 - protein, 13 aa, Homo sapiens
  CDR3 for beta chain variable domain of TCR clone 214837 (TRBV20-1, TRBJ1-1)
CSAPPGGHTEAFF

SEQ ID NO: 429675 - protein, 13 aa, Homo sapiens
  CDR3 for alpha chain variable domain of TCR clone 214838 (TRAV8-3, TRAJ36)
CAVCATGANNLFF

SEQ ID NO: 429676 - protein, 15 aa, Homo sapiens
  CDR3 for beta chain variable domain of TCR clone 214838 (TRBV5-1, TRBJ2-7)
CASSLYPDGGYEQYF

SEQ ID NO: 429677 - protein, 14 aa, Homo sapiens
  CDR3 for alpha chain variable domain of TCR clone 214839 (TRAV26-1, TRAJ34)
CIVRESYNTDKLIF

SEQ ID NO: 429678 - protein, 13 aa, Homo sapiens
  CDR3 for beta chain variable domain of TCR clone 214839 (TRBV7-3, TRBJ1-1)
CASSQDWGAEAFF

SEQ ID NO: 429679 - protein, 13 aa, Homo sapiens
  CDR3 for alpha chain variable domain of TCR clone 214840 (TRAV27, TRAJ45)
CRSSGGGADGLTF

SEQ ID NO: 429680 - protein, 15 aa, Homo sapiens
  CDR3 for beta chain variable domain of TCR clone 214840 (TRBV20-1, TRBJ2-7)
CSARVPAAYFYEQYF

SEQ ID NO: 429681 - protein, 15 aa, Homo sapiens
  CDR3 for alpha chain variable domain of TCR clone 214841 (TRAV13-1, TRAJ50)
CAAKGSETSYDNVIF

SEQ ID NO: 429682 - protein, 18 aa, Homo sapiens
  CDR3 for beta chain variable domain of TCR clone 214841 (TRBV10-3, TRBJ2-1)
CTSVPSVSLRGGVDEQFF

SEQ ID NO: 429683 - protein, 11 aa, Homo sapiens
  CDR3 for alpha chain variable domain of TCR clone 214842 (TRAV21, TRAJ34)
CAHYNTDKLIF

SEQ ID NO: 429684 - protein, 15 aa, Homo sapiens
  CDR3 for beta chain variable domain of TCR clone 214842 (TRBV2, TRBJ2-1)
CASSEEREGDNEQFF

SEQ ID NO: 429685 - protein, 15 aa, Homo sapiens
  CDR3 for alpha chain variable domain of TCR clone 214843 (TRAV26-1, TRAJ16)
CIVSFRFSDGQKLLF

SEQ ID NO: 429686 - protein, 15 aa, Homo sapiens
  CDR3 for beta chain variable domain of TCR clone 214843 (TRBV7-9, TRBJ1-4)
CASSARTGGNEKLFF

SEQ ID NO: 429687 - protein, 13 aa, Homo sapiens
  CDR3 for alpha chain variable domain of TCR clone 214844 (TRAV21, TRAJ44)
CAGMTGTASKLTF

SEQ ID NO: 429688 - protein, 13 aa, Homo sapiens
  CDR3 for beta chain variable domain of TCR clone 214844 (TRBV19, TRBJ1-2)
CASSVPGQDGYTF

SEQ ID NO: 429689 - protein, 12 aa, Homo sapiens
  CDR3 for alpha chain variable domain of TCR clone 214845 (TRAV12-3, TRAJ40)
CAMSSGTYKYIF

SEQ ID NO: 429690 - protein, 15 aa, Homo sapiens
  CDR3 for beta chain variable domain of TCR clone 214845 (TRBV27, TRBJ2-1)
CASSNGGGSSNEQFF

SEQ ID NO: 429691 - protein, 13 aa, Homo sapiens
  CDR3 for alpha chain variable domain of TCR clone 214846 (TRAV35, TRAJ42)
CAGFPGSQGNLIF

SEQ ID NO: 429692 - protein, 13 aa, Homo sapiens
  CDR3 for beta chain variable domain of TCR clone 214846 (TRBV29-1, TRBJ2-1)
CSVEGGRVNEQCF

SEQ ID NO: 429693 - protein, 13 aa, Homo sapiens
  CDR3 for alpha chain variable domain of TCR clone 214847 (TRAV13-1, TRAJ12)
CAASPDSSYKLIF

SEQ ID NO: 429694 - protein, 15 aa, Homo sapiens
  CDR3 for beta chain variable domain of TCR clone 214847 (TRBV2, TRBJ2-7)
CASSEGLARSYEQYF

SEQ ID NO: 429695 - protein, 11 aa, Homo sapiens
  CDR3 for alpha chain variable domain of TCR clone 214848 (TRAV19, TRAJ24)
CAPLHYRQLTA

SEQ ID NO: 429696 - protein, 14 aa, Homo sapiens
  CDR3 for beta chain variable domain of TCR clone 214848 (TRBV27, TRBJ1-5)
CASSLDRSNQPQHF

SEQ ID NO: 429697 - protein, 14 aa, Homo sapiens
  CDR3 for alpha chain variable domain of TCR clone 214849 (TRAV23/DV6, TRAJ57)
CAAALKGGSEKLVF

SEQ ID NO: 429698 - protein, 14 aa, Homo sapiens
  CDR3 for beta chain variable domain of TCR clone 214849 (TRBV7-6, TRBJ2-3)
CASSLGTVTDTQCF

SEQ ID NO: 429699 - protein, 12 aa, Homo sapiens
  CDR3 for alpha chain variable domain of TCR clone 214850 (TRAV8-1, TRAJ6)
CASSGGSYIPTF

SEQ ID NO: 429700 - protein, 12 aa, Homo sapiens
  CDR3 for beta chain variable domain of TCR clone 214850 (TRBV19, TRBJ1-1)
CSSMNRYTEAFF

SEQ ID NO: 429701 - protein, 12 aa, Homo sapiens
  CDR3 for alpha chain variable domain of TCR clone 214851 (TRAV12-3, TRAJ17)
CAMTLTGNKLTF

SEQ ID NO: 429702 - protein, 15 aa, Homo sapiens
  CDR3 for beta chain variable domain of TCR clone 214851 (TRBV20-1, TRBJ2-7)
CSARDWVSGMDEQYF

SEQ ID NO: 429703 - protein, 16 aa, Homo sapiens
  CDR3 for alpha chain variable domain of TCR clone 214852 (TRAV35, TRAJ42)
GRMERYYGVSQGNLIF

SEQ ID NO: 429704 - protein, 15 aa, Homo sapiens
  CDR3 for beta chain variable domain of TCR clone 214852 (TRBV6-1, TRBJ2-7)
CASSDWDKPNYEQYF

SEQ ID NO: 429705 - protein, 16 aa, Homo sapiens
  CDR3 for alpha chain variable domain of TCR clone 214853 (TRAV4, TRAJ5)
CLVGPDPGHGQESTYF

SEQ ID NO: 429706 - protein, 15 aa, Homo sapiens
  CDR3 for beta chain variable domain of TCR clone 214853 (TRBV27, TRBJ2-5)
CASSLIPSGGETQYF

SEQ ID NO: 429707 - protein, 14 aa, Homo sapiens
  CDR3 for alpha chain variable domain of TCR clone 214854 (TRAV17, TRAJ40)
CATALTSGTYKYIF

SEQ ID NO: 429708 - protein, 13 aa, Homo sapiens
  CDR3 for beta chain variable domain of TCR clone 214854 (TRBV20-1, TRBJ1-1)
CSGGTVGNTEAFF

SEQ ID NO: 429709 - protein, 11 aa, Homo sapiens
  CDR3 for alpha chain variable domain of TCR clone 214855 (TRAV3, TRAJ21)
RALGNFNKFYF

SEQ ID NO: 429710 - protein, 16 aa, Homo sapiens
  CDR3 for beta chain variable domain of TCR clone 214855 (TRBV19, TRBJ2-1)
CASSKAGPSSYNEQCF

SEQ ID NO: 429711 - protein, 12 aa, Homo sapiens
  CDR3 for alpha chain variable domain of TCR clone 214856 (TRAV12-3, TRAJ17)
CAMTITGNKLTF

SEQ ID NO: 429712 - protein, 15 aa, Homo sapiens
  CDR3 for beta chain variable domain of TCR clone 214856 (TRBV20-1, TRBJ2-7)
CSARDRASGMDEQYF

SEQ ID NO: 429713 - protein, 12 aa, Homo sapiens
  CDR3 for alpha chain variable domain of TCR clone 214857 (TRAV13-2, TRAJ39)
CAENNAGNMLTI

SEQ ID NO: 429714 - protein, 12 aa, Homo sapiens
  CDR3 for beta chain variable domain of TCR clone 214857 (TRBV11-2, TRBJ2-2)
CASSLGGGELFF

SEQ ID NO: 429715 - protein, 13 aa, Homo sapiens
  CDR3 for alpha chain variable domain of TCR clone 214858 (TRAV22, TRAJ48)
CAVPNFGNEKLTF

SEQ ID NO: 429716 - protein, 14 aa, Homo sapiens
  CDR3 for beta chain variable domain of TCR clone 214858 (TRBV20-1, TRBJ2-7)
CSAKRGRSSYEQYF

SEQ ID NO: 429717 - protein, 14 aa, Homo sapiens
  CDR3 for alpha chain variable domain of TCR clone 214859 (TRAV1-2, TRAJ8)
CAVREDTGFQKLVF

SEQ ID NO: 429718 - protein, 15 aa, Homo sapiens
  CDR3 for beta chain variable domain of TCR clone 214859 (TRBV7-9, TRBJ1-6)
CASSSPGRGNSPLLF

SEQ ID NO: 429719 - protein, 14 aa, Homo sapiens
  CDR3 for alpha chain variable domain of TCR clone 214860 (TRAV29/DV5, TRAJ36)
CAARRKTGANNLFF

SEQ ID NO: 429720 - protein, 14 aa, Homo sapiens
  CDR3 for beta chain variable domain of TCR clone 214860 (TRBV12-5, TRBJ2-5)
CASGSRTHQWTQYF

SEQ ID NO: 429721 - protein, 11 aa, Homo sapiens
  CDR3 for alpha chain variable domain of TCR clone 214861 (TRAV8-6, TRAJ42)
CALRGRKPMKF

SEQ ID NO: 429722 - protein, 13 aa, Homo sapiens
  CDR3 for beta chain variable domain of TCR clone 214861 (TRBV7-3, TRBJ1-1)
CASSQDWGAEAFF

SEQ ID NO: 429723 - protein, 14 aa, Homo sapiens
  CDR3 for alpha chain variable domain of TCR clone 214862 (TRAV26-1, TRAJ22)
CIVIVYGSARQLTF

SEQ ID NO: 429724 - protein, 17 aa, Homo sapiens
  CDR3 for beta chain variable domain of TCR clone 214862 (TRBV7-3, TRBJ2-3)
CASSPGGLAGFGDTQYF

SEQ ID NO: 429725 - protein, 15 aa, Homo sapiens
  CDR3 for alpha chain variable domain of TCR clone 214863 (TRAV34, TRAJ38)
CGADFTPGNNRKLIL

SEQ ID NO: 429726 - protein, 16 aa, Homo sapiens
  CDR3 for beta chain variable domain of TCR clone 214863 (TRBV12-5, TRBJ2-5)
CASGPRNSGNQETQYF

SEQ ID NO: 429727 - protein, 16 aa, Homo sapiens
  CDR3 for alpha chain variable domain of TCR clone 214864 (TRAV12-2, TRAJ13)
CAVDSAGAGGYQTVTF

SEQ ID NO: 429728 - protein, 14 aa, Homo sapiens
  CDR3 for beta chain variable domain of TCR clone 214864 (TRBV20-1, TRBJ1-4)
CSARDGSGWEKLFF

SEQ ID NO: 429729 - protein, 14 aa, Homo sapiens
  CDR3 for alpha chain variable domain of TCR clone 214865 (TRAV21, TRAJ35)
CAVMPIGFGNVLHC

SEQ ID NO: 429730 - protein, 12 aa, Homo sapiens
  CDR3 for beta chain variable domain of TCR clone 214865 (TRBV7-9, TRBJ2-7)
CGSSSKREEQYF

SEQ ID NO: 429731 - protein, 16 aa, Homo sapiens
  CDR3 for alpha chain variable domain of TCR clone 214866 (TRAV30, TRAJ24)
CGTEIVDADSWGKFQF

SEQ ID NO: 429732 - protein, 15 aa, Homo sapiens
  CDR3 for beta chain variable domain of TCR clone 214866 (TRBV7-3, TRBJ2-1)
CQQLQTSGRYNEQFF

SEQ ID NO: 429733 - protein, 14 aa, Homo sapiens
  CDR3 for alpha chain variable domain of TCR clone 214867 (TRAV12-3, TRAJ35)
CAMSLIGFGNVRHC

SEQ ID NO: 429734 - protein, 12 aa, Homo sapiens
  CDR3 for beta chain variable domain of TCR clone 214867 (TRBV12-4, TRBJ1-1)
CASSLAGHEAFF

SEQ ID NO: 429735 - protein, 17 aa, Homo sapiens
  CDR3 for alpha chain variable domain of TCR clone 214868 (TRAV8-6, TRAJ58)
CAVSSWVGETSGSRLTF

SEQ ID NO: 429736 - protein, 11 aa, Homo sapiens
  CDR3 for beta chain variable domain of TCR clone 214868 (TRBV7-8, TRBJ2-7)
CASSLSLEQYF

SEQ ID NO: 429737 - protein, 14 aa, Homo sapiens
  CDR3 for alpha chain variable domain of TCR clone 214869 (TRAV3, TRAJ22)
CAVRDTGSARQLTF

SEQ ID NO: 429738 - protein, 15 aa, Homo sapiens
  CDR3 for beta chain variable domain of TCR clone 214869 (TRBV11-2, TRBJ2-5)
CASSLVSYSGETQYF

SEQ ID NO: 429739 - protein, 15 aa, Homo sapiens
  CDR3 for alpha chain variable domain of TCR clone 214870 (TRAV13-1, TRAJ32)
CAASINGGATNKLIF

SEQ ID NO: 429740 - protein, 14 aa, Homo sapiens
  CDR3 for beta chain variable domain of TCR clone 214870 (TRBV7-9, TRBJ2-1)
CASSLASGSNEQFF

SEQ ID NO: 429741 - protein, 12 aa, Homo sapiens
  CDR3 for alpha chain variable domain of TCR clone 214871 (TRAV12-3, TRAJ17)
CAMTLTGNKQTF

SEQ ID NO: 429742 - protein, 15 aa, Homo sapiens
  CDR3 for beta chain variable domain of TCR clone 214871 (TRBV11-3, TRBJ2-3)
CASLRDGREGDTQYF

SEQ ID NO: 429743 - protein, 14 aa, Homo sapiens
  CDR3 for alpha chain variable domain of TCR clone 214872 (TRAV29/DV5, TRAJ6)
CAARVSGGSYIPTF

SEQ ID NO: 429744 - protein, 14 aa, Homo sapiens
  CDR3 for beta chain variable domain of TCR clone 214872 (TRBV7-3, TRBJ2-2)
CASSSGGYTGELFF

SEQ ID NO: 429745 - protein, 16 aa, Homo sapiens
  CDR3 for alpha chain variable domain of TCR clone 214873 (TRAV12-2, TRAJ32)
CAVNLGQGGATNRLIF

SEQ ID NO: 429746 - protein, 15 aa, Homo sapiens
  CDR3 for beta chain variable domain of TCR clone 214873 (TRBV20-1, TRBJ2-7)
CSARGPLAGGREQYF

SEQ ID NO: 429747 - protein, 15 aa, Homo sapiens
  CDR3 for alpha chain variable domain of TCR clone 214874 (TRAV3, TRAJ5)
FAVRDLYTGRRALTF

SEQ ID NO: 429748 - protein, 16 aa, Homo sapiens
  CDR3 for beta chain variable domain of TCR clone 214874 (TRBV20-1, TRBJ1-4)
CSAPGQGLLTNEKLFF

SEQ ID NO: 429749 - protein, 23 aa, Homo sapiens
  CDR3 for alpha chain variable domain of TCR clone 214875 (TRAV26-1, TRAJ38)
CIADNAGNNHIQNPEPAVYQLRD

SEQ ID NO: 429750 - protein, 14 aa, Homo sapiens
  CDR3 for beta chain variable domain of TCR clone 214875 (TRBV7-2, TRBJ2-7)
CASRAQGAAYEQYF

SEQ ID NO: 429751 - protein, 10 aa, Homo sapiens
  CDR3 for alpha chain variable domain of TCR clone 214876 (TRAV2, TRAJ43)
CCGNNNDMRF

SEQ ID NO: 429752 - protein, 16 aa, Homo sapiens
  CDR3 for beta chain variable domain of TCR clone 214876 (TRBV12-5, TRBJ2-5)
CASGPRTSGNQETQYF

SEQ ID NO: 429753 - protein, 14 aa, Homo sapiens
  CDR3 for alpha chain variable domain of TCR clone 214877 (TRAV34, TRAJ44)
CGADGTGTASKLTF

SEQ ID NO: 429754 - protein, 12 aa, Homo sapiens
  CDR3 for beta chain variable domain of TCR clone 214877 (TRBV12-4, TRBJ1-3)
CASSFSGNTIYF

SEQ ID NO: 429755 - protein, 14 aa, Homo sapiens
  CDR3 for alpha chain variable domain of TCR clone 214878 (TRAV3, TRAJ6)
CAVRDWGGSYIPTF

SEQ ID NO: 429756 - protein, 20 aa, Homo sapiens
  CDR3 for beta chain variable domain of TCR clone 214878 (TRBV7-8, TRBJ2-2)
CASSHLFPGPTSHITGELFF

SEQ ID NO: 429757 - protein, 13 aa, Homo sapiens
  CDR3 for alpha chain variable domain of TCR clone 214879 (TRAV2, TRAJ15)
CAVASQARTALIF

SEQ ID NO: 429758 - protein, 16 aa, Homo sapiens
  CDR3 for beta chain variable domain of TCR clone 214879 (TRBV5-1, TRBJ1-1)
CASSSGGNSSNTEAFF

SEQ ID NO: 429759 - protein, 15 aa, Homo sapiens
  CDR3 for alpha chain variable domain of TCR clone 214880 (TRAV3, TRAJ22)
CAVRDRGGSARQLTF

SEQ ID NO: 429760 - protein, 13 aa, Homo sapiens
  CDR3 for beta chain variable domain of TCR clone 214880 (TRBV2, TRBJ2-3)
CASILAGGQEQYF

SEQ ID NO: 429761 - protein, 14 aa, Homo sapiens
  CDR3 for alpha chain variable domain of TCR clone 214881 (TRAV17, TRAJ57)
CATGPSQGGSKAGL

SEQ ID NO: 429762 - protein, 16 aa, Homo sapiens
  CDR3 for beta chain variable domain of TCR clone 214881 (TRBV12-4, TRBJ1-5)
CASSRPVGGSNQPQHF

SEQ ID NO: 429763 - protein, 12 aa, Homo sapiens
  CDR3 for alpha chain variable domain of TCR clone 214882 (TRAV3, TRAJ39)
CAVIEWSNTPTF

SEQ ID NO: 429764 - protein, 14 aa, Homo sapiens
  CDR3 for beta chain variable domain of TCR clone 214882 (TRBV7-8, TRBJ2-3)
CASSFPDGQDTQYF

SEQ ID NO: 429765 - protein, 13 aa, Homo sapiens
  CDR3 for alpha chain variable domain of TCR clone 214883 (TRAV21, TRAJ20)
CAVGLRVDYKLSF

SEQ ID NO: 429766 - protein, 14 aa, Homo sapiens
  CDR3 for beta chain variable domain of TCR clone 214883 (TRBV28, TRBJ2-7)
CAGSLGTATYEQYF

SEQ ID NO: 429767 - protein, 16 aa, Homo sapiens
  CDR3 for alpha chain variable domain of TCR clone 214884 (TRAV8-3, TRAJ13)
CGVGAYPSGGYQKVTF

SEQ ID NO: 429768 - protein, 15 aa, Homo sapiens
  CDR3 for beta chain variable domain of TCR clone 214884 (TRBV19, TRBJ1-5)
CASSIVWADNQPQHF

SEQ ID NO: 429769 - protein, 13 aa, Homo sapiens
  CDR3 for alpha chain variable domain of TCR clone 214885 (TRAV27, TRAJ11)
CAVARSGYSTLTF

SEQ ID NO: 429770 - protein, 14 aa, Homo sapiens
  CDR3 for beta chain variable domain of TCR clone 214885 (TRBV12-4, TRBJ1-4)
CASRTTGRSEKLFF

SEQ ID NO: 429771 - protein, 12 aa, Homo sapiens
  CDR3 for alpha chain variable domain of TCR clone 214886 (TRAV16, TRAJ13)
CITLLGYQKVTF

SEQ ID NO: 429772 - protein, 17 aa, Homo sapiens
  CDR3 for beta chain variable domain of TCR clone 214886 (TRBV28, TRBJ2-5)
CASSRQGGLAGAETQYF

SEQ ID NO: 429773 - protein, 10 aa, Homo sapiens
  CDR3 for alpha chain variable domain of TCR clone 214887 (TRAV26-1, TRAJ40)
CIAGTYKYIF

SEQ ID NO: 429774 - protein, 12 aa, Homo sapiens
  CDR3 for beta chain variable domain of TCR clone 214887 (TRBV11-2, TRBJ2-2)
CASSLGGGEPFF

SEQ ID NO: 429775 - protein, 15 aa, Homo sapiens
  CDR3 for alpha chain variable domain of TCR clone 214888 (TRAV3, TRAJ3)
CAVRDWDSSASKIIF

SEQ ID NO: 429776 - protein, 12 aa, Homo sapiens
  CDR3 for beta chain variable domain of TCR clone 214888 (TRBV29-1, TRBJ2-3)
CSVTGGADTQYF

SEQ ID NO: 429777 - protein, 17 aa, Homo sapiens
  CDR3 for alpha chain variable domain of TCR clone 214889 (TRAV23/DV6, TRAJ57)
CAASSTLAQGGSEKLVF

SEQ ID NO: 429778 - protein, 14 aa, Homo sapiens
  CDR3 for beta chain variable domain of TCR clone 214889 (TRBV25-1, TRBJ1-1)
CASTHLGGNTEAFF

SEQ ID NO: 429779 - protein, 12 aa, Homo sapiens
  CDR3 for alpha chain variable domain of TCR clone 214890 (TRAV38-1, TRAJ20)
CAFIWNDYKLTF

SEQ ID NO: 429780 - protein, 14 aa, Homo sapiens
  CDR3 for beta chain variable domain of TCR clone 214890 (TRBV19, TRBJ2-1)
CASSMGSGATEQFF

SEQ ID NO: 429781 - protein, 13 aa, Homo sapiens
  CDR3 for alpha chain variable domain of TCR clone 214891 (TRAV27, TRAJ6)
CSGGTRGSYIPTF

SEQ ID NO: 429782 - protein, 15 aa, Homo sapiens
  CDR3 for beta chain variable domain of TCR clone 214891 (TRBV11-2, TRBJ1-3)
CASSLSPLVRDTIYF

SEQ ID NO: 429783 - protein, 16 aa, Homo sapiens
  CDR3 for alpha chain variable domain of TCR clone 214892 (TRAV23/DV6, TRAJ9)
CAASIGGNTGGFKTNF

SEQ ID NO: 429784 - protein, 13 aa, Homo sapiens
  CDR3 for beta chain variable domain of TCR clone 214892 (TRBV7-9, TRBJ1-2)
CASSLKQNYGDTF

SEQ ID NO: 429785 - protein, 15 aa, Homo sapiens
  CDR3 for alpha chain variable domain of TCR clone 214893 (TRAV25, TRAJ52)
CAGTSGGTSYGKLTI

SEQ ID NO: 429786 - protein, 16 aa, Homo sapiens
  CDR3 for beta chain variable domain of TCR clone 214893 (TRBV15, TRBJ1-2)
CATSRGPRTGGGGYTF

SEQ ID NO: 429787 - protein, 12 aa, Homo sapiens
  CDR3 for alpha chain variable domain of TCR clone 214894 (TRAV12-3, TRAJ21)
CAMFNNFDKFYF

SEQ ID NO: 429788 - protein, 14 aa, Homo sapiens
  CDR3 for beta chain variable domain of TCR clone 214894 (TRBV28, TRBJ2-1)
CASSIQGTVGEQFF

SEQ ID NO: 429789 - protein, 13 aa, Homo sapiens
  CDR3 for alpha chain variable domain of TCR clone 214895 (TRAV29/DV5, TRAJ31)
CAASRNNNARLMF

SEQ ID NO: 429790 - protein, 12 aa, Homo sapiens
  CDR3 for beta chain variable domain of TCR clone 214895 (TRBV14, TRBJ2-5)
CACSQLKETQYF

SEQ ID NO: 429791 - protein, 10 aa, Homo sapiens
  CDR3 for alpha chain variable domain of TCR clone 214896 (TRAV23/DV6, TRAJ57)
CAASSTLSQG

SEQ ID NO: 429792 - protein, 13 aa, Homo sapiens
  CDR3 for beta chain variable domain of TCR clone 214896 (TRBV12-5, TRBJ2-3)
CASGDRRSDTQYF

SEQ ID NO: 429793 - protein, 18 aa, Homo sapiens
  CDR3 for alpha chain variable domain of TCR clone 214897 (TRAV21, TRAJ52)
CAVRPSPAGGTSYGKLTF

SEQ ID NO: 429794 - protein, 16 aa, Homo sapiens
  CDR3 for beta chain variable domain of TCR clone 214897 (TRBV10-3, TRBJ1-5)
CAISGQGGLSNQPQHF

SEQ ID NO: 429795 - protein, 14 aa, Homo sapiens
  CDR3 for alpha chain variable domain of TCR clone 214898 (TRAV12-2, TRAJ13)
CAVKRTGGYPKVTF

SEQ ID NO: 429796 - protein, 16 aa, Homo sapiens
  CDR3 for beta chain variable domain of TCR clone 214898 (TRBV20-1, TRBJ1-2)
CSASMGQGVANYGYTF

SEQ ID NO: 429797 - protein, 11 aa, Homo sapiens
  CDR3 for alpha chain variable domain of TCR clone 214899 (TRAV26-1, TRAJ37)
CIVRVGRKLIF

SEQ ID NO: 429798 - protein, 13 aa, Homo sapiens
  CDR3 for beta chain variable domain of TCR clone 214899 (TRBV4-1, TRBJ2-7)
CASSQGQAYEQYF

SEQ ID NO: 429799 - protein, 11 aa, Homo sapiens
  CDR3 for alpha chain variable domain of TCR clone 214900 (TRAV1-1, TRAJ23)
CAVRQGGKLIF

SEQ ID NO: 429800 - protein, 16 aa, Homo sapiens
  CDR3 for beta chain variable domain of TCR clone 214900 (TRBV10-3, TRBJ2-1)
CAISGVGDGGGGEQFF

SEQ ID NO: 429801 - protein, 14 aa, Homo sapiens
  CDR3 for alpha chain variable domain of TCR clone 214901 (TRAV2, TRAJ37)
CAVDFTSNTGKLIF

SEQ ID NO: 429802 - protein, 16 aa, Homo sapiens
  CDR3 for beta chain variable domain of TCR clone 214901 (TRBV18, TRBJ2-7)
CASSPYRDGQTYEQYF

SEQ ID NO: 429803 - protein, 14 aa, Homo sapiens
  CDR3 for alpha chain variable domain of TCR clone 214902 (TRAV8-3, TRAJ4)
CAVGAAGGYNKLIF

SEQ ID NO: 429804 - protein, 14 aa, Homo sapiens
  CDR3 for beta chain variable domain of TCR clone 214902 (TRBV5-1, TRBJ2-7)
CASSRGESLYEQYF

SEQ ID NO: 429805 - protein, 15 aa, Homo sapiens
  CDR3 for alpha chain variable domain of TCR clone 214903 (TRAV17, TRAJ4)
CATGTWSGGYNKLIF

SEQ ID NO: 429806 - protein, 15 aa, Homo sapiens
  CDR3 for beta chain variable domain of TCR clone 214903 (TRBV2, TRBJ2-2)
CASSEQGLDTGELFF

SEQ ID NO: 429807 - protein, 19 aa, Homo sapiens
  CDR3 for alpha chain variable domain of TCR clone 214904 (TRAV16, )
CALSGDIQNPDPAVYQLRD

SEQ ID NO: 429808 - protein, 16 aa, Homo sapiens
  CDR3 for beta chain variable domain of TCR clone 214904 (TRBV12-5, TRBJ2-5)
CASGPRTSGNQETQYV

SEQ ID NO: 429809 - protein, 20 aa, Homo sapiens
  CDR3 for alpha chain variable domain of TCR clone 214905 (TRAV1-1, TRAJ4)
CLLLLRCGGFLSGGYNKLIF

SEQ ID NO: 429810 - protein, 12 aa, Homo sapiens
  CDR3 for beta chain variable domain of TCR clone 214905 (TRBV11-2, TRBJ2-2)
CASSLGGGELFF

SEQ ID NO: 429811 - protein, 11 aa, Homo sapiens
  CDR3 for alpha chain variable domain of TCR clone 214906 (TRAV3, TRAJ21)
CAVGNFNKFYF

SEQ ID NO: 429812 - protein, 14 aa, Homo sapiens
  CDR3 for beta chain variable domain of TCR clone 214906 (TRBV19, TRBJ1-5)
CASRAPDSFLSQHF

SEQ ID NO: 429813 - protein, 15 aa, Homo sapiens
  CDR3 for alpha chain variable domain of TCR clone 214907 (TRAV21, TRAJ24)
CAARSSTDGWGKLQF

SEQ ID NO: 429814 - protein, 13 aa, Homo sapiens
  CDR3 for beta chain variable domain of TCR clone 214907 (TRBV11-2, TRBJ2-5)
CASSSTGEKTQYF

SEQ ID NO: 429815 - protein, 13 aa, Homo sapiens
  CDR3 for alpha chain variable domain of TCR clone 214908 (TRAV8-6, TRAJ54)
CAVSEEGAQKLVF

SEQ ID NO: 429816 - protein, 13 aa, Homo sapiens
  CDR3 for beta chain variable domain of TCR clone 214908 (TRBV19, TRBJ2-2)
CASQEGIHGELFF

SEQ ID NO: 429817 - protein, 11 aa, Homo sapiens
  CDR3 for alpha chain variable domain of TCR clone 214909 (TRAV12-2, TRAJ15)
CAVMSRTALIF

SEQ ID NO: 429818 - protein, 18 aa, Homo sapiens
  CDR3 for beta chain variable domain of TCR clone 214909 (TRBV5-1, TRBJ1-1)
CASSWATGKGATNTEAFF

SEQ ID NO: 429819 - protein, 11 aa, Homo sapiens
  CDR3 for alpha chain variable domain of TCR clone 214910 (TRAV12-1, TRAJ34)
CVVNKGRELIF

SEQ ID NO: 429820 - protein, 14 aa, Homo sapiens
  CDR3 for beta chain variable domain of TCR clone 214910 (TRBV7-2, TRBJ2-7)
CASSPNTSFYEQYF

SEQ ID NO: 429821 - protein, 15 aa, Homo sapiens
  CDR3 for alpha chain variable domain of TCR clone 214911 (TRAV13-1, TRAJ44)
CAASRNTGTASKLTF

SEQ ID NO: 429822 - protein, 12 aa, Homo sapiens
  CDR3 for beta chain variable domain of TCR clone 214911 (TRBV7-9, TRBJ2-7)
CASSLEGYEQYF

SEQ ID NO: 429823 - protein, 12 aa, Homo sapiens
  CDR3 for alpha chain variable domain of TCR clone 214912 (TRAV30, TRAJ43)
FGTEERGNDMRF

SEQ ID NO: 429824 - protein, 13 aa, Homo sapiens
  CDR3 for beta chain variable domain of TCR clone 214912 (TRBV12-4, TRBJ1-2)
CASSSGSKDGYTF

SEQ ID NO: 429825 - protein, 15 aa, Homo sapiens
  CDR3 for alpha chain variable domain of TCR clone 214913 (TRAV12-3, TRAJ6)
CAMSATTGGSYIPTL

SEQ ID NO: 429826 - protein, 15 aa, Homo sapiens
  CDR3 for beta chain variable domain of TCR clone 214913 (TRBV28, TRBJ2-1)
CASSIIAGGRSEQFF

SEQ ID NO: 429827 - protein, 16 aa, Homo sapiens
  CDR3 for alpha chain variable domain of TCR clone 214914 (TRAV16, TRAJ4)
CALSRMFSGGYNKLIF

SEQ ID NO: 429828 - protein, 15 aa, Homo sapiens
  CDR3 for beta chain variable domain of TCR clone 214914 (TRBV19, TRBJ1-6)
CASSAQGAVGSPLHF

SEQ ID NO: 429829 - protein, 17 aa, Homo sapiens
  CDR3 for alpha chain variable domain of TCR clone 214915 (TRAV14/DV4, TRAJ28)
CAMREVSSGAGSYQLTL

SEQ ID NO: 429830 - protein, 15 aa, Homo sapiens
  CDR3 for beta chain variable domain of TCR clone 214915 (TRBV11-2, TRBJ1-6)
CASTLRETGNPPLHF

SEQ ID NO: 429831 - protein, 14 aa, Homo sapiens
  CDR3 for alpha chain variable domain of TCR clone 214916 (TRAV2, TRAJ37)
CAVDFTSNTGKLIF

SEQ ID NO: 429832 - protein, 12 aa, Homo sapiens
  CDR3 for beta chain variable domain of TCR clone 214916 (TRBV12-4, TRBJ2-3)
CASSSTTDTQYF

SEQ ID NO: 429833 - protein, 15 aa, Homo sapiens
  CDR3 for alpha chain variable domain of TCR clone 214917 (TRAV17, TRAJ57)
CATGPSQGGSETLVF

SEQ ID NO: 429834 - protein, 12 aa, Homo sapiens
  CDR3 for beta chain variable domain of TCR clone 214917 (TRBV11-2, TRBJ2-2)
CASSLGGGELFF

SEQ ID NO: 429835 - protein, 12 aa, Homo sapiens
  CDR3 for alpha chain variable domain of TCR clone 214918 (TRAV17, TRAJ49)
CAMASTGNQFYF

SEQ ID NO: 429836 - protein, 15 aa, Homo sapiens
  CDR3 for beta chain variable domain of TCR clone 214918 (TRBV15, TRBJ2-1)
CATSRDLGSYNEQFF

SEQ ID NO: 429837 - protein, 15 aa, Homo sapiens
  CDR3 for alpha chain variable domain of TCR clone 214919 (TRAV17, TRAJ54)
CATTRSEQGTQKLVF

SEQ ID NO: 429838 - protein, 16 aa, Homo sapiens
  CDR3 for beta chain variable domain of TCR clone 214919 (TRBV12-4, TRBJ2-3)
CASSLRLAETTDTQYF

SEQ ID NO: 429839 - protein, 15 aa, Homo sapiens
  CDR3 for alpha chain variable domain of TCR clone 214920 (TRAV4, TRAJ39)
CLVGPNNNAGNMLTF

SEQ ID NO: 429840 - protein, 14 aa, Homo sapiens
  CDR3 for beta chain variable domain of TCR clone 214920 (TRBV19, TRBJ2-1)
CDSPTFVVSGEQFF

SEQ ID NO: 429841 - protein, 12 aa, Homo sapiens
  CDR3 for alpha chain variable domain of TCR clone 214921 (TRAV12-2, TRAJ44)
CADTGTASKLTF

SEQ ID NO: 429842 - protein, 17 aa, Homo sapiens
  CDR3 for beta chain variable domain of TCR clone 214921 (TRBV10-3, TRBJ2-6)
CAISESTAPSGANVLTF

SEQ ID NO: 429843 - protein, 19 aa, Homo sapiens
  CDR3 for alpha chain variable domain of TCR clone 214922 (TRAV17, TRAJ40)
TASRAADTASYFCASKYIF

SEQ ID NO: 429844 - protein, 14 aa, Homo sapiens
  CDR3 for beta chain variable domain of TCR clone 214922 (TRBV6-1, TRBJ1-3)
CASVQGGGGNTIYF

SEQ ID NO: 429845 - protein, 13 aa, Homo sapiens
  CDR3 for alpha chain variable domain of TCR clone 214923 (TRAV3, TRAJ27)
CAVRPLGAGKSTF

SEQ ID NO: 429846 - protein, 15 aa, Homo sapiens
  CDR3 for beta chain variable domain of TCR clone 214923 (TRBV9, TRBJ1-6)
CAISVAGTGDSPLHF

SEQ ID NO: 429847 - protein, 14 aa, Homo sapiens
  CDR3 for alpha chain variable domain of TCR clone 214924 (TRAV2, TRAJ21)
CAVEDLNNFNKFYF

SEQ ID NO: 429848 - protein, 11 aa, Homo sapiens
  CDR3 for beta chain variable domain of TCR clone 214924 (TRBV10-3, TRBJ2-1)
CASSDRGLQFF

SEQ ID NO: 429849 - protein, 13 aa, Homo sapiens
  CDR3 for alpha chain variable domain of TCR clone 214925 (TRAV21, TRAJ20)
CAVGLRVDYKLSF

SEQ ID NO: 429850 - protein, 14 aa, Homo sapiens
  CDR3 for beta chain variable domain of TCR clone 214925 (TRBV7-2, TRBJ2-7)
CASSFLERVYEQYF

SEQ ID NO: 429851 - protein, 14 aa, Homo sapiens
  CDR3 for alpha chain variable domain of TCR clone 214926 (TRAV2, TRAJ9)
CAVEDRSGGFKTIV

SEQ ID NO: 429852 - protein, 17 aa, Homo sapiens
  CDR3 for beta chain variable domain of TCR clone 214926 (TRBV11-2, TRBJ2-1)
CASSLYPPGVEYNEQFF

SEQ ID NO: 429853 - protein, 11 aa, Homo sapiens
  CDR3 for alpha chain variable domain of TCR clone 214927 (TRAV1-2, TRAJ40)
CAVPGTYKYIF

SEQ ID NO: 429854 - protein, 15 aa, Homo sapiens
  CDR3 for beta chain variable domain of TCR clone 214927 (TRBV25-1, TRBJ1-4)
CASSPGDSTNEKLLF

SEQ ID NO: 429855 - protein, 14 aa, Homo sapiens
  CDR3 for alpha chain variable domain of TCR clone 214928 (TRAV12-1, TRAJ30)
CVVDIGGRDDKIIV

SEQ ID NO: 429856 - protein, 15 aa, Homo sapiens
  CDR3 for beta chain variable domain of TCR clone 214928 (TRBV18, TRBJ1-2)
CASSPSNTPNYGYTF

SEQ ID NO: 429857 - protein, 12 aa, Homo sapiens
  CDR3 for alpha chain variable domain of TCR clone 214929 (TRAV17, TRAJ57)
CATDGGSEKLVF

SEQ ID NO: 429858 - protein, 13 aa, Homo sapiens
  CDR3 for beta chain variable domain of TCR clone 214929 (TRBV7-9, TRBJ2-1)
CASSFEGAYEQYF

SEQ ID NO: 429859 - protein, 20 aa, Homo sapiens
  CDR3 for alpha chain variable domain of TCR clone 214930 (TRAV12-2, TRAJ52)
SPVIQPPARAGGTSYGKLTF

SEQ ID NO: 429860 - protein, 11 aa, Homo sapiens
  CDR3 for beta chain variable domain of TCR clone 214930 (TRBV12-4, TRBJ2-3)
CASTATDTQYF

SEQ ID NO: 429861 - protein, 16 aa, Homo sapiens
  CDR3 for alpha chain variable domain of TCR clone 214931 (TRAV12-2, TRAJ40)
CAVIRGGTSGTYKYIF

SEQ ID NO: 429862 - protein, 15 aa, Homo sapiens
  CDR3 for beta chain variable domain of TCR clone 214931 (TRBV27, TRBJ2-1)
CASSNGGGSSNEQFF

SEQ ID NO: 429863 - protein, 15 aa, Homo sapiens
  CDR3 for alpha chain variable domain of TCR clone 214932 (TRAV12-1, TRAJ45)
CVVLSGGGGAEGLTF

SEQ ID NO: 429864 - protein, 15 aa, Homo sapiens
  CDR3 for beta chain variable domain of TCR clone 214932 (TRBV12-5, TRBJ2-5)
CASGSGLAGRETQYF

SEQ ID NO: 429865 - protein, 16 aa, Homo sapiens
  CDR3 for alpha chain variable domain of TCR clone 214933 (TRAV38-2/DV8, TRAJ45)
CAYRGNSGGGAEGLTF

SEQ ID NO: 429866 - protein, 17 aa, Homo sapiens
  CDR3 for beta chain variable domain of TCR clone 214933 (TRBV11-3, TRBJ2-5)
CASSLPGVRGGKETQYF

SEQ ID NO: 429867 - protein, 13 aa, Homo sapiens
  CDR3 for alpha chain variable domain of TCR clone 214934 (TRAV27, TRAJ41)
CAGEGNSGYALNF

SEQ ID NO: 429868 - protein, 17 aa, Homo sapiens
  CDR3 for beta chain variable domain of TCR clone 214934 (TRBV7-2, TRBJ2-5)
CASSSGLAGDGQETQYF

SEQ ID NO: 429869 - protein, 12 aa, Homo sapiens
  CDR3 for alpha chain variable domain of TCR clone 214935 (TRAV27, TRAJ35)
CAGADFGNVLHF

SEQ ID NO: 429870 - protein, 16 aa, Homo sapiens
  CDR3 for beta chain variable domain of TCR clone 214935 (TRBV6-1, TRBJ2-1)
CATISRQGSSYNEQFF

SEQ ID NO: 429871 - protein, 14 aa, Homo sapiens
  CDR3 for alpha chain variable domain of TCR clone 214936 (TRAV3, TRAJ5)
FAVRSDTGRRALTF

SEQ ID NO: 429872 - protein, 14 aa, Homo sapiens
  CDR3 for beta chain variable domain of TCR clone 214936 (TRBV7-9, TRBJ2-1)
CASSPRDSLYEQFF

SEQ ID NO: 429873 - protein, 14 aa, Homo sapiens
  CDR3 for alpha chain variable domain of TCR clone 214937 (TRAV1-1, TRAJ23)
CAVSIYNQGGKLIF

SEQ ID NO: 429874 - protein, 12 aa, Homo sapiens
  CDR3 for beta chain variable domain of TCR clone 214937 (TRBV20-1, TRBJ2-5)
CSATRNQETQYF

SEQ ID NO: 429875 - protein, 11 aa, Homo sapiens
  CDR3 for alpha chain variable domain of TCR clone 214938 (TRAV8-1, TRAJ8)
CAMTGFQKLVF

SEQ ID NO: 429876 - protein, 16 aa, Homo sapiens
  CDR3 for beta chain variable domain of TCR clone 214938 (TRBV7-9, TRBJ2-3)
CASSPWREVGTDTQYF

SEQ ID NO: 429877 - protein, 16 aa, Homo sapiens
  CDR3 for alpha chain variable domain of TCR clone 214939 (TRAV12-3, TRAJ53)
CAMSPGSGGSNYKLTF

SEQ ID NO: 429878 - protein, 16 aa, Homo sapiens
  CDR3 for beta chain variable domain of TCR clone 214939 (TRBV4-1, TRBJ2-7)
CASRPSGGGADNEQYF

SEQ ID NO: 429879 - protein, 13 aa, Homo sapiens
  CDR3 for alpha chain variable domain of TCR clone 214940 (TRAV2, TRAJ40)
CAVVTSGTYKYIF

SEQ ID NO: 429880 - protein, 13 aa, Homo sapiens
  CDR3 for beta chain variable domain of TCR clone 214940 (TRBV27, TRBJ2-7)
CASSFSQGYEQYF

SEQ ID NO: 429881 - protein, 14 aa, Homo sapiens
  CDR3 for alpha chain variable domain of TCR clone 214941 (TRAV20, TRAJ10)
CAVRVEGGGNKLTF

SEQ ID NO: 429882 - protein, 15 aa, Homo sapiens
  CDR3 for beta chain variable domain of TCR clone 214941 (TRBV12-4, TRBJ2-5)
CASSPPTGLQETQYF

SEQ ID NO: 429883 - protein, 14 aa, Homo sapiens
  CDR3 for alpha chain variable domain of TCR clone 214942 (TRAV8-6, TRAJ34)
CAVSDQGNTDKLIF

SEQ ID NO: 429884 - protein, 13 aa, Homo sapiens
  CDR3 for beta chain variable domain of TCR clone 214942 (TRBV19, TRBJ2-7)
CASSPRQSYEQYF

SEQ ID NO: 429885 - protein, 12 aa, Homo sapiens
  CDR3 for alpha chain variable domain of TCR clone 214943 (TRAV26-1, TRAJ26)
CIVYNYGQNFVF

SEQ ID NO: 429886 - protein, 12 aa, Homo sapiens
  CDR3 for beta chain variable domain of TCR clone 214943 (TRBV11-2, TRBJ2-1)
CASSPGNNGQFF

SEQ ID NO: 429887 - protein, 13 aa, Homo sapiens
  CDR3 for alpha chain variable domain of TCR clone 214944 (TRAV13-1, TRAJ39)
CSKYSNASNMLTF

SEQ ID NO: 429888 - protein, 16 aa, Homo sapiens
  CDR3 for beta chain variable domain of TCR clone 214944 (TRBV20-1, TRBJ1-4)
CSAPGQGLLTNEKLFF

SEQ ID NO: 429889 - protein, 15 aa, Homo sapiens
  CDR3 for alpha chain variable domain of TCR clone 214945 (TRAV2, TRAJ9)
CAVEGRGTGGFKTSF

SEQ ID NO: 429890 - protein, 16 aa, Homo sapiens
  CDR3 for beta chain variable domain of TCR clone 214945 (TRBV24-1, TRBJ2-3)
CATSDPGTGATDTQYF

SEQ ID NO: 429891 - protein, 14 aa, Homo sapiens
  CDR3 for alpha chain variable domain of TCR clone 214946 (TRAV12-2, TRAJ17)
CAVLFKAAGNKLTF

SEQ ID NO: 429892 - protein, 12 aa, Homo sapiens
  CDR3 for beta chain variable domain of TCR clone 214946 (TRBV29-1, TRBJ2-3)
CSVTGGADTQYL

SEQ ID NO: 429893 - protein, 11 aa, Homo sapiens
  CDR3 for alpha chain variable domain of TCR clone 214947 (TRAV21, TRAJ11)
CAVNGYSTLTF

SEQ ID NO: 429894 - protein, 15 aa, Homo sapiens
  CDR3 for beta chain variable domain of TCR clone 214947 (TRBV11-3, TRBJ2-2)
CASSLGGRPTGELFF

SEQ ID NO: 429895 - protein, 14 aa, Homo sapiens
  CDR3 for alpha chain variable domain of TCR clone 214948 (TRAV1-2, TRAJ16)
CAVNRFSDGQKLLL

SEQ ID NO: 429896 - protein, 15 aa, Homo sapiens
  CDR3 for beta chain variable domain of TCR clone 214948 (TRBV9, TRBJ1-6)
CASSVAGTGDSTLHF

SEQ ID NO: 429897 - protein, 13 aa, Homo sapiens
  CDR3 for alpha chain variable domain of TCR clone 214949 (TRAV12-1, TRAJ34)
CVVTGYNTDKLIF

SEQ ID NO: 429898 - protein, 15 aa, Homo sapiens
  CDR3 for beta chain variable domain of TCR clone 214949 (TRBV9, TRBJ1-6)
CASSVAGTGDSPLHF

SEQ ID NO: 429899 - protein, 14 aa, Homo sapiens
  CDR3 for alpha chain variable domain of TCR clone 214950 (TRAV8-2, TRAJ4)
CVVSPSGGYNKLIF

SEQ ID NO: 429900 - protein, 15 aa, Homo sapiens
  CDR3 for beta chain variable domain of TCR clone 214950 (TRBV4-1, TRBJ1-4)
CASSDTGVTNEKLFF

SEQ ID NO: 429901 - protein, 15 aa, Homo sapiens
  CDR3 for alpha chain variable domain of TCR clone 214951 (TRAV3, TRAJ5)
CAVRDLDTGRRALTF

SEQ ID NO: 429902 - protein, 13 aa, Homo sapiens
  CDR3 for beta chain variable domain of TCR clone 214951 (TRBV20-1, TRBJ2-5)
CSARDSKRATQYF

SEQ ID NO: 429903 - protein, 10 aa, Homo sapiens
  CDR3 for alpha chain variable domain of TCR clone 214952 (TRAV23/DV6, TRAJ57)
CAASSTLSQG

SEQ ID NO: 429904 - protein, 14 aa, Homo sapiens
  CDR3 for beta chain variable domain of TCR clone 214952 (TRBV2, TRBJ2-1)
CASRTGSSYNEQFF

SEQ ID NO: 429905 - protein, 15 aa, Homo sapiens
  CDR3 for alpha chain variable domain of TCR clone 214953 (TRAV23/DV6, TRAJ18)
CAARYRGSTLGRLYF

SEQ ID NO: 429906 - protein, 17 aa, Homo sapiens
  CDR3 for beta chain variable domain of TCR clone 214953 (TRBV7-2, TRBJ1-4)
CASSFKAGPTTNEKLFF

SEQ ID NO: 429907 - protein, 15 aa, Homo sapiens
  CDR3 for alpha chain variable domain of TCR clone 214954 (TRAV29/DV5, TRAJ29)
CAASERSSGNTPLVF

SEQ ID NO: 429908 - protein, 14 aa, Homo sapiens
  CDR3 for beta chain variable domain of TCR clone 214954 (TRBV28, TRBJ2-1)
CASSPGEGGNEQFF

SEQ ID NO: 429909 - protein, 18 aa, Homo sapiens
  CDR3 for alpha chain variable domain of TCR clone 214955 (TRAV21, TRAJ52)
CAVRPSPAGGTSYGKLTF

SEQ ID NO: 429910 - protein, 16 aa, Homo sapiens
  CDR3 for beta chain variable domain of TCR clone 214955 (TRBV20-1, TRBJ2-3)
CSGEAGLAGGQDTQYF

SEQ ID NO: 429911 - protein, 13 aa, Homo sapiens
  CDR3 for alpha chain variable domain of TCR clone 214956 (TRAV13-1, TRAJ37)
CAARSCNTGKLIF

SEQ ID NO: 429912 - protein, 14 aa, Homo sapiens
  CDR3 for beta chain variable domain of TCR clone 214956 (TRBV12-4, TRBJ2-3)
CASSLGQGTDTQYF

SEQ ID NO: 429913 - protein, 15 aa, Homo sapiens
  CDR3 for alpha chain variable domain of TCR clone 214957 (TRAV8-3, TRAJ23)
CAVGDRYNQGGKLIF

SEQ ID NO: 429914 - protein, 22 aa, Homo sapiens
  CDR3 for beta chain variable domain of TCR clone 214957 (TRBV29-1, TRBJ2-5)
TGSNMSPEGSSIYLCSAGTQYF

SEQ ID NO: 429915 - protein, 16 aa, Homo sapiens
  CDR3 for alpha chain variable domain of TCR clone 214958 (TRAV12-1, TRAJ48)
CVVNMVSNFGNEKLTF

SEQ ID NO: 429916 - protein, 13 aa, Homo sapiens
  CDR3 for beta chain variable domain of TCR clone 214958 (TRBV7-3, TRBJ1-1)
CASSQDWGAEAFF

SEQ ID NO: 429917 - protein, 15 aa, Homo sapiens
  CDR3 for alpha chain variable domain of TCR clone 214959 (TRAV8-6, TRAJ23)
CAVRLIYNQGGKLIF

SEQ ID NO: 429918 - protein, 15 aa, Homo sapiens
  CDR3 for beta chain variable domain of TCR clone 214959 (TRBV6-5, TRBJ2-1)
CASSYDAGAGNEQFF

SEQ ID NO: 429919 - protein, 14 aa, Homo sapiens
  CDR3 for alpha chain variable domain of TCR clone 214960 (TRAV17, TRAJ35)
CATDRLGFVNVLHC

SEQ ID NO: 429920 - protein, 14 aa, Homo sapiens
  CDR3 for beta chain variable domain of TCR clone 214960 (TRBV7-8, TRBJ2-3)
CASSLEAGTDTQYF

SEQ ID NO: 429921 - protein, 10 aa, Homo sapiens
  CDR3 for alpha chain variable domain of TCR clone 214961 (TRAV8-3, TRAJ45)
SGGGADGLTF

SEQ ID NO: 429922 - protein, 16 aa, Homo sapiens
  CDR3 for beta chain variable domain of TCR clone 214961 (TRBV20-1, TRBJ2-2)
CSASASGIPGAGELFF

SEQ ID NO: 429923 - protein, 15 aa, Homo sapiens
  CDR3 for alpha chain variable domain of TCR clone 214962 (TRAV13-2, TRAJ16)
CAENDRFSDVQKLLF

SEQ ID NO: 429924 - protein, 14 aa, Homo sapiens
  CDR3 for beta chain variable domain of TCR clone 214962 (TRBV4-2, TRBJ1-5)
CASSRDRGNQPQHF

SEQ ID NO: 429925 - protein, 13 aa, Homo sapiens
  CDR3 for alpha chain variable domain of TCR clone 214963 (TRAV27, TRAJ45)
CRSSGGGADGLTF

SEQ ID NO: 429926 - protein, 13 aa, Homo sapiens
  CDR3 for beta chain variable domain of TCR clone 214963 (TRBV28, TRBJ1-2)
CASRGPGIYGYTF

SEQ ID NO: 429927 - protein, 14 aa, Homo sapiens
  CDR3 for alpha chain variable domain of TCR clone 214964 (TRAV35, TRAJ33)
CAGWSQDSNYQLIW

SEQ ID NO: 429928 - protein, 15 aa, Homo sapiens
  CDR3 for beta chain variable domain of TCR clone 214964 (TRBV20-1, TRBJ2-7)
CSAESGTSGAYEQYF

SEQ ID NO: 429929 - protein, 12 aa, Homo sapiens
  CDR3 for alpha chain variable domain of TCR clone 214965 (TRAV12-3, TRAJ40)
CAMSSGTYKYIF

SEQ ID NO: 429930 - protein, 15 aa, Homo sapiens
  CDR3 for beta chain variable domain of TCR clone 214965 (TRBV12-4, TRBJ2-5)
CASSPPTGLQETQYF

SEQ ID NO: 429931 - protein, 12 aa, Homo sapiens
  CDR3 for alpha chain variable domain of TCR clone 214966 (TRAV8-3, TRAJ20)
CAVGANDYKPSF

SEQ ID NO: 429932 - protein, 17 aa, Homo sapiens
  CDR3 for beta chain variable domain of TCR clone 214966 (TRBV13, TRBJ2-3)
CASSLSRVAGGRNTQYF

SEQ ID NO: 429933 - protein, 12 aa, Homo sapiens
  CDR3 for alpha chain variable domain of TCR clone 214967 (TRAV13-1, TRAJ11)
CAGPSGYSTLTF

SEQ ID NO: 429934 - protein, 16 aa, Homo sapiens
  CDR3 for beta chain variable domain of TCR clone 214967 (TRBV12-4, TRBJ1-5)
CASSRPVGGSNQPQHF

SEQ ID NO: 429935 - protein, 11 aa, Homo sapiens
  CDR3 for alpha chain variable domain of TCR clone 214968 (TRAV12-2, TRAJ31)
WAILNNARLMF

SEQ ID NO: 429936 - protein, 13 aa, Homo sapiens
  CDR3 for beta chain variable domain of TCR clone 214968 (TRBV20-1, TRBJ1-1)
CSARLGQGTEAFF

SEQ ID NO: 429937 - protein, 14 aa, Homo sapiens
  CDR3 for alpha chain variable domain of TCR clone 214969 (TRAV17, TRAJ6)
CATPAMGGSYVPTF

SEQ ID NO: 429938 - protein, 14 aa, Homo sapiens
  CDR3 for beta chain variable domain of TCR clone 214969 (TRBV12-5, TRBJ2-5)
CASGSRTHQETQYF

SEQ ID NO: 429939 - protein, 13 aa, Homo sapiens
  CDR3 for alpha chain variable domain of TCR clone 214970 (TRAV13-2, TRAJ40)
CAEFTSGTYKYNF

SEQ ID NO: 429940 - protein, 14 aa, Homo sapiens
  CDR3 for beta chain variable domain of TCR clone 214970 (TRBV10-2, TRBJ1-5)
CASSSTGRNQPQHF

SEQ ID NO: 429941 - protein, 12 aa, Homo sapiens
  CDR3 for alpha chain variable domain of TCR clone 214971 (TRAV2, TRAJ31)
CAVEDNNARLMF

SEQ ID NO: 429942 - protein, 14 aa, Homo sapiens
  CDR3 for beta chain variable domain of TCR clone 214971 (TRBV19, TRBJ2-5)
CASRMTGQQETQYF

SEQ ID NO: 429943 - protein, 14 aa, Homo sapiens
  CDR3 for alpha chain variable domain of TCR clone 214972 (TRAV8-6, TRAJ40)
CTVSATSGTYKYIF

SEQ ID NO: 429944 - protein, 16 aa, Homo sapiens
  CDR3 for beta chain variable domain of TCR clone 214972 (TRBV4-2, TRBJ2-7)
CASSQDGGSLRGEQYF

SEQ ID NO: 429945 - protein, 12 aa, Homo sapiens
  CDR3 for alpha chain variable domain of TCR clone 214973 (TRAV21, TRAJ31)
CAVWGNNARLMF

SEQ ID NO: 429946 - protein, 14 aa, Homo sapiens
  CDR3 for beta chain variable domain of TCR clone 214973 (TRBV6-1, TRBJ1-3)
CASGQGGGGNTIYF

SEQ ID NO: 429947 - protein, 23 aa, Homo sapiens
  CDR3 for alpha chain variable domain of TCR clone 214974 (TRAV12-2, TRAJ43)
SLLIRDSQPSDSATYLCGFDMRF

SEQ ID NO: 429948 - protein, 13 aa, Homo sapiens
  CDR3 for beta chain variable domain of TCR clone 214974 (TRBV4-2, TRBJ1-1)
CASSQAGNTEAFF

SEQ ID NO: 429949 - protein, 19 aa, Homo sapiens
  CDR3 for alpha chain variable domain of TCR clone 214975 (TRAV1-2, TRAJ26)
CLLPLCCERPVNYGQNFVF

SEQ ID NO: 429950 - protein, 12 aa, Homo sapiens
  CDR3 for beta chain variable domain of TCR clone 214975 (TRBV20-1, TRBJ2-1)
CSAQYTYNEQFF

SEQ ID NO: 429951 - protein, 16 aa, Homo sapiens
  CDR3 for alpha chain variable domain of TCR clone 214976 (TRAV30, TRAJ24)
CGTEIVDADSCGKFQF

SEQ ID NO: 429952 - protein, 17 aa, Homo sapiens
  CDR3 for beta chain variable domain of TCR clone 214976 (TRBV28, TRBJ2-1)
CASSSARQALTYNEQFF

SEQ ID NO: 429953 - protein, 14 aa, Homo sapiens
  CDR3 for alpha chain variable domain of TCR clone 214977 (TRAV35, TRAJ33)
CAGSPQDSNYQLIW

SEQ ID NO: 429954 - protein, 15 aa, Homo sapiens
  CDR3 for beta chain variable domain of TCR clone 214977 (TRBV20-1, TRBJ2-7)
CSDESGTSGAYEQYF

SEQ ID NO: 429955 - protein, 13 aa, Homo sapiens
  CDR3 for alpha chain variable domain of TCR clone 214978 (TRAV8-3, TRAJ21)
CAVGAYNFNKFYF

SEQ ID NO: 429956 - protein, 15 aa, Homo sapiens
  CDR3 for beta chain variable domain of TCR clone 214978 (TRBV7-8, TRBJ2-1)
CASSLAGGLYNEQFF

SEQ ID NO: 429957 - protein, 13 aa, Homo sapiens
  CDR3 for alpha chain variable domain of TCR clone 214979 (TRAV27, TRAJ8)
CAGGPTGVQKLVF

SEQ ID NO: 429958 - protein, 14 aa, Homo sapiens
  CDR3 for beta chain variable domain of TCR clone 214979 (TRBV23-1, TRBJ2-5)
CASSFLRSQETQYF

SEQ ID NO: 429959 - protein, 15 aa, Homo sapiens
  CDR3 for alpha chain variable domain of TCR clone 214980 (TRAV20, TRAJ43)
CAVQAGKSSNNDMRF

SEQ ID NO: 429960 - protein, 13 aa, Homo sapiens
  CDR3 for beta chain variable domain of TCR clone 214980 (TRBV7-9, TRBJ1-2)
CASSLKQNYGYTF

SEQ ID NO: 429961 - protein, 13 aa, Homo sapiens
  CDR3 for alpha chain variable domain of TCR clone 214981 (TRAV13-1, TRAJ52)
CAAGGTSYGKLTF

SEQ ID NO: 429962 - protein, 13 aa, Homo sapiens
  CDR3 for beta chain variable domain of TCR clone 214981 (TRBV2, TRBJ1-5)
CASGTGGYQPQHF

SEQ ID NO: 429963 - protein, 16 aa, Homo sapiens
  CDR3 for alpha chain variable domain of TCR clone 214982 (TRAV8-3, TRAJ8)
CAVPRDGNTGFQKLAF

SEQ ID NO: 429964 - protein, 14 aa, Homo sapiens
  CDR3 for beta chain variable domain of TCR clone 214982 (TRBV4-1, TRBJ2-2)
CASSQAVNTGELFF

SEQ ID NO: 429965 - protein, 14 aa, Homo sapiens
  CDR3 for alpha chain variable domain of TCR clone 214983 (TRAV29/DV5, TRAJ34)
CAASENPNTDKLIF

SEQ ID NO: 429966 - protein, 16 aa, Homo sapiens
  CDR3 for beta chain variable domain of TCR clone 214983 (TRBV5-5, TRBJ2-2)
CASSGRREGATGELFF

SEQ ID NO: 429967 - protein, 12 aa, Homo sapiens
  CDR3 for alpha chain variable domain of TCR clone 214984 (TRAV12-3, TRAJ17)
CAMTLTGNKLTF

SEQ ID NO: 429968 - protein, 17 aa, Homo sapiens
  CDR3 for beta chain variable domain of TCR clone 214984 (TRBV6-5, TRBJ2-3)
CASSYTTGTGRGDTQYF

SEQ ID NO: 429969 - protein, 10 aa, Homo sapiens
  CDR3 for alpha chain variable domain of TCR clone 214985 (TRAV21, TRAJ34)
CAADTDKLIF

SEQ ID NO: 429970 - protein, 14 aa, Homo sapiens
  CDR3 for beta chain variable domain of TCR clone 214985 (TRBV5-4, TRBJ1-2)
CASSSAGSYVGYAF

SEQ ID NO: 429971 - protein, 11 aa, Homo sapiens
  CDR3 for alpha chain variable domain of TCR clone 214986 (TRAV12-3, TRAJ49)
CAMSSGNKFYF

SEQ ID NO: 429972 - protein, 17 aa, Homo sapiens
  CDR3 for beta chain variable domain of TCR clone 214986 (TRBV5-7, TRBJ2-7)
CASSLWRVLAGSYEQYF

SEQ ID NO: 429973 - protein, 12 aa, Homo sapiens
  CDR3 for alpha chain variable domain of TCR clone 214987 (TRAV35, TRAJ39)
LAPNNAGNMLTF

SEQ ID NO: 429974 - protein, 16 aa, Homo sapiens
  CDR3 for beta chain variable domain of TCR clone 214987 (TRBV7-3, TRBJ2-2)
CASSLKRGTLSGELFF

SEQ ID NO: 429975 - protein, 13 aa, Homo sapiens
  CDR3 for alpha chain variable domain of TCR clone 214988 (TRAV12-3, TRAJ7)
CAMSASGNNRLAF

SEQ ID NO: 429976 - protein, 14 aa, Homo sapiens
  CDR3 for beta chain variable domain of TCR clone 214988 (TRBV7-6, TRBJ2-3)
CASSLGTVTDTQYF

SEQ ID NO: 429977 - protein, 11 aa, Homo sapiens
  CDR3 for alpha chain variable domain of TCR clone 214989 (TRAV13-1, TRAJ52)
PGGTSYGKLTF

SEQ ID NO: 429978 - protein, 16 aa, Homo sapiens
  CDR3 for beta chain variable domain of TCR clone 214989 (TRBV28, TRBJ2-7)
CASNPWVATGDLSQYF

SEQ ID NO: 429979 - protein, 16 aa, Homo sapiens
  CDR3 for alpha chain variable domain of TCR clone 214990 (TRAV12-2, TRAJ32)
CAVNFGQGGATNKLIF

SEQ ID NO: 429980 - protein, 15 aa, Homo sapiens
  CDR3 for beta chain variable domain of TCR clone 214990 (TRBV20-1, TRBJ2-7)
CSARGPLAGGREQYF

SEQ ID NO: 429981 - protein, 15 aa, Homo sapiens
  CDR3 for alpha chain variable domain of TCR clone 214991 (TRAV12-3, TRAJ6)
CAMSATTGGSYIPTF

SEQ ID NO: 429982 - protein, 15 aa, Homo sapiens
  CDR3 for beta chain variable domain of TCR clone 214991 (TRBV7-6, TRBJ1-5)
CASSQSSGINQPQHL

SEQ ID NO: 429983 - protein, 14 aa, Homo sapiens
  CDR3 for alpha chain variable domain of TCR clone 214992 (TRAV25, TRAJ22)
CAVRSSGSARQLTF

SEQ ID NO: 429984 - protein, 16 aa, Homo sapiens
  CDR3 for beta chain variable domain of TCR clone 214992 (TRBV4-2, TRBJ1-1)
CASSPSPGRAAPEDFF

SEQ ID NO: 429985 - protein, 14 aa, Homo sapiens
  CDR3 for alpha chain variable domain of TCR clone 214993 (TRAV16, TRAJ8)
CALLLNTGFQKLVF

SEQ ID NO: 429986 - protein, 13 aa, Homo sapiens
  CDR3 for beta chain variable domain of TCR clone 214993 (TRBV7-6, TRBJ2-3)
YASSLRSDNTQYF

SEQ ID NO: 429987 - protein, 14 aa, Homo sapiens
  CDR3 for alpha chain variable domain of TCR clone 214994 (TRAV17, TRAJ54)
CATDANQGAQKLVF

SEQ ID NO: 429988 - protein, 12 aa, Homo sapiens
  CDR3 for beta chain variable domain of TCR clone 214994 (TRBV14, TRBJ2-7)
CASSSLKGEQYF

SEQ ID NO: 429989 - protein, 15 aa, Homo sapiens
  CDR3 for alpha chain variable domain of TCR clone 214995 (TRAV23/DV6, TRAJ15)
CAASRRNQAGTALIF

SEQ ID NO: 429990 - protein, 13 aa, Homo sapiens
  CDR3 for beta chain variable domain of TCR clone 214995 (TRBV7-9, TRBJ1-2)
CASSLKQNYGYTF

SEQ ID NO: 429991 - protein, 15 aa, Homo sapiens
  CDR3 for alpha chain variable domain of TCR clone 214996 (TRAV17, TRAJ56)
CATEPFTGANRKLTF

SEQ ID NO: 429992 - protein, 12 aa, Homo sapiens
  CDR3 for beta chain variable domain of TCR clone 214996 (TRBV7-8, TRBJ2-7)
CASSLGDREQYF

SEQ ID NO: 429993 - protein, 16 aa, Homo sapiens
  CDR3 for alpha chain variable domain of TCR clone 214997 (TRAV12-2, TRAJ28)
CAVITDSGAGSYQLTF

SEQ ID NO: 429994 - protein, 11 aa, Homo sapiens
  CDR3 for beta chain variable domain of TCR clone 214997 (TRBV9, TRBJ2-2)
CQQPRHRELFF

SEQ ID NO: 429995 - protein, 16 aa, Homo sapiens
  CDR3 for alpha chain variable domain of TCR clone 214998 (TRAV4, TRAJ18)
CCVLLFRGSTLGRLYF

SEQ ID NO: 429996 - protein, 12 aa, Homo sapiens
  CDR3 for beta chain variable domain of TCR clone 214998 (TRBV6-3, TRBJ2-7)
CASSLTPYEQYF

SEQ ID NO: 429997 - protein, 16 aa, Homo sapiens
  CDR3 for alpha chain variable domain of TCR clone 214999 (TRAV17, TRAJ52)
CATGIIGGTSYGKLRF

SEQ ID NO: 429998 - protein, 14 aa, Homo sapiens
  CDR3 for beta chain variable domain of TCR clone 214999 (TRBV7-3, TRBJ2-2)
CASSSGGYAGELFF

SEQ ID NO: 429999 - protein, 15 aa, Homo sapiens
  CDR3 for alpha chain variable domain of TCR clone 215000 (TRAV12-2, TRAJ13)
CRESLRSGGYQKVTF

SEQ ID NO: 430000 - protein, 15 aa, Homo sapiens
  CDR3 for beta chain variable domain of TCR clone 215000 (TRBV6-5, TRBJ2-1)
CASRRAQLSYNEQFF

SEQ ID NO: 430001 - protein, 12 aa, Homo sapiens
  CDR3 for alpha chain variable domain of TCR clone 215001 (TRAV22, TRAJ22)
CAPGGSARQLTF

SEQ ID NO: 430002 - protein, 13 aa, Homo sapiens
  CDR3 for beta chain variable domain of TCR clone 215001 (TRBV15, TRBJ1-6)
CATSGALNSPLHF

SEQ ID NO: 430003 - protein, 13 aa, Homo sapiens
  CDR3 for alpha chain variable domain of TCR clone 215002 (TRAV16, TRAJ10)
CALLTVGGNKLTF

SEQ ID NO: 430004 - protein, 12 aa, Homo sapiens
  CDR3 for beta chain variable domain of TCR clone 215002 (TRBV28, TRBJ2-7)
CASTGNHYEQYF

SEQ ID NO: 430005 - protein, 13 aa, Homo sapiens
  CDR3 for alpha chain variable domain of TCR clone 215003 (TRAV13-1, TRAJ39)
CSKYSNAGNMLTF

SEQ ID NO: 430006 - protein, 16 aa, Homo sapiens
  CDR3 for beta chain variable domain of TCR clone 215003 (TRBV20-1, TRBJ1-4)
CSAPGQGLLTNAKLFF

SEQ ID NO: 430007 - protein, 14 aa, Homo sapiens
  CDR3 for alpha chain variable domain of TCR clone 215004 (TRAV29/DV5, TRAJ36)
CAARRKTGANNRFF

SEQ ID NO: 430008 - protein, 16 aa, Homo sapiens
  CDR3 for beta chain variable domain of TCR clone 215004 (TRBV29-1, TRBJ2-7)
CSVEVVGTSGSYEQYF

SEQ ID NO: 430009 - protein, 17 aa, Homo sapiens
  CDR3 for alpha chain variable domain of TCR clone 215005 (TRAV3, TRAJ6)
CALRDGPRAGGSYIPTF

SEQ ID NO: 430010 - protein, 15 aa, Homo sapiens
  CDR3 for beta chain variable domain of TCR clone 215005 (TRBV20-1, TRBJ1-1)
CSASWDRFLNTEAFF

SEQ ID NO: 430011 - protein, 14 aa, Homo sapiens
  CDR3 for alpha chain variable domain of TCR clone 215006 (TRAV17, TRAJ16)
CATADFSDGQKLLF

SEQ ID NO: 430012 - protein, 13 aa, Homo sapiens
  CDR3 for beta chain variable domain of TCR clone 215006 (TRBV20-1, TRBJ2-5)
CSAREGGKETQYF

SEQ ID NO: 430013 - protein, 11 aa, Homo sapiens
  CDR3 for alpha chain variable domain of TCR clone 215007 (TRAV1-2, TRAJ20)
CAVSNDYKLSC

SEQ ID NO: 430014 - protein, 16 aa, Homo sapiens
  CDR3 for beta chain variable domain of TCR clone 215007 (TRBV29-1, TRBJ2-6)
CSVEDITYSGANILTF

SEQ ID NO: 430015 - protein, 12 aa, Homo sapiens
  CDR3 for alpha chain variable domain of TCR clone 215008 (TRAV1-1, TRAJ39)
SAVPVVGNMLTF

SEQ ID NO: 430016 - protein, 16 aa, Homo sapiens
  CDR3 for beta chain variable domain of TCR clone 215008 (TRBV19, TRBJ2-3)
CASSPGAASRTDTQYF

SEQ ID NO: 430017 - protein, 12 aa, Homo sapiens
  CDR3 for alpha chain variable domain of TCR clone 215009 (TRAV8-3, TRAJ20)
CALGANDHKLSF

SEQ ID NO: 430018 - protein, 16 aa, Homo sapiens
  CDR3 for beta chain variable domain of TCR clone 215009 (TRBV19, TRBJ2-2)
CASRSPGTGATGELFF

SEQ ID NO: 430019 - protein, 13 aa, Homo sapiens
  CDR3 for alpha chain variable domain of TCR clone 215010 (TRAV27, TRAJ45)
CRSSGGGADGLTF

SEQ ID NO: 430020 - protein, 15 aa, Homo sapiens
  CDR3 for beta chain variable domain of TCR clone 215010 (TRBV20-1, TRBJ2-5)
CSAGLLPSGQETQYF

SEQ ID NO: 430021 - protein, 12 aa, Homo sapiens
  CDR3 for alpha chain variable domain of TCR clone 215011 (TRAV3, TRAJ27)
CAVRDGAGKSTF

SEQ ID NO: 430022 - protein, 15 aa, Homo sapiens
  CDR3 for beta chain variable domain of TCR clone 215011 (TRBV13, TRBJ2-2)
CASGYRGRRTGELFS

SEQ ID NO: 430023 - protein, 16 aa, Homo sapiens
  CDR3 for alpha chain variable domain of TCR clone 215012 (TRAV16, TRAJ52)
CALSAAGGTSYGKLTF

SEQ ID NO: 430024 - protein, 17 aa, Homo sapiens
  CDR3 for beta chain variable domain of TCR clone 215012 (TRBV11-2, TRBJ2-7)
CTSSLYPPGVEYNEQFF

SEQ ID NO: 430025 - protein, 14 aa, Homo sapiens
  CDR3 for alpha chain variable domain of TCR clone 215013 (TRAV2, TRAJ29)
CAGPFLYGNTPLVF

SEQ ID NO: 430026 - protein, 11 aa, Homo sapiens
  CDR3 for beta chain variable domain of TCR clone 215013 (TRBV29-1, TRBJ2-5)
CSEDRTGTQYF

SEQ ID NO: 430027 - protein, 14 aa, Homo sapiens
  CDR3 for alpha chain variable domain of TCR clone 215014 (TRAV26-1, TRAJ38)
CIADNAGNNRKLIW

SEQ ID NO: 430028 - protein, 15 aa, Homo sapiens
  CDR3 for beta chain variable domain of TCR clone 215014 (TRBV7-2, TRBJ2-1)
CASSSVAGRYNEQFF

SEQ ID NO: 430029 - protein, 12 aa, Homo sapiens
  CDR3 for alpha chain variable domain of TCR clone 215015 (TRAV3, TRAJ15)
CAVRDQAGTADL

SEQ ID NO: 430030 - protein, 15 aa, Homo sapiens
  CDR3 for beta chain variable domain of TCR clone 215015 (TRBV11-1, TRBJ2-7)
CASSLNYGASYEQYF

SEQ ID NO: 430031 - protein, 12 aa, Homo sapiens
  CDR3 for alpha chain variable domain of TCR clone 215016 (TRAV1-2, TRAJ33)
CAALDRNYQLIW

SEQ ID NO: 430032 - protein, 13 aa, Homo sapiens
  CDR3 for beta chain variable domain of TCR clone 215016 (TRBV4-1, TRBJ1-1)
CASSQLGTGEAFF

SEQ ID NO: 430033 - protein, 14 aa, Homo sapiens
  CDR3 for alpha chain variable domain of TCR clone 215017 (TRAV8-6, TRAJ34)
FAVSDQGNTDKLIF

SEQ ID NO: 430034 - protein, 15 aa, Homo sapiens
  CDR3 for beta chain variable domain of TCR clone 215017 (TRBV2, TRBJ2-7)
CASGEGLARSYEQYF

SEQ ID NO: 430035 - protein, 16 aa, Homo sapiens
  CDR3 for alpha chain variable domain of TCR clone 215018 (TRAV14/DV4, TRAJ53)
CAMREGGGGSNYKLTF

SEQ ID NO: 430036 - protein, 15 aa, Homo sapiens
  CDR3 for beta chain variable domain of TCR clone 215018 (TRBV19, TRBJ2-1)
CASSSPGVPLDEQFF

SEQ ID NO: 430037 - protein, 15 aa, Homo sapiens
  CDR3 for alpha chain variable domain of TCR clone 215019 (TRAV3, TRAJ22)
CAVRDRGGAARQLPF

SEQ ID NO: 430038 - protein, 16 aa, Homo sapiens
  CDR3 for beta chain variable domain of TCR clone 215019 (TRBV5-4, TRBJ2-3)
CASQQPGAGGADTQYF

SEQ ID NO: 430039 - protein, 15 aa, Homo sapiens
  CDR3 for alpha chain variable domain of TCR clone 215020 (TRAV1-2, TRAJ12)
CAVIPEVDSSCKLIF

SEQ ID NO: 430040 - protein, 12 aa, Homo sapiens
  CDR3 for beta chain variable domain of TCR clone 215020 (TRBV11-2, TRBJ2-2)
CASSLPTGELFF

SEQ ID NO: 430041 - protein, 13 aa, Homo sapiens
  CDR3 for alpha chain variable domain of TCR clone 215021 (TRAV13-2, TRAJ8)
CAFMNTGFQKPVF

SEQ ID NO: 430042 - protein, 15 aa, Homo sapiens
  CDR3 for beta chain variable domain of TCR clone 215021 (TRBV19, TRBJ2-3)
CAAGGTNAPNDTQYF

SEQ ID NO: 430043 - protein, 15 aa, Homo sapiens
  CDR3 for alpha chain variable domain of TCR clone 215022 (TRAV27, TRAJ45)
CAPVDSGGGAHGLTF

SEQ ID NO: 430044 - protein, 15 aa, Homo sapiens
  CDR3 for beta chain variable domain of TCR clone 215022 (TRBV5-1, TRBJ1-1)
CASSVDRLGNTEAFF

SEQ ID NO: 430045 - protein, 14 aa, Homo sapiens
  CDR3 for alpha chain variable domain of TCR clone 215023 (TRAV26-1, TRAJ34)
CIVRVAYNTDKLIF

SEQ ID NO: 430046 - protein, 14 aa, Homo sapiens
  CDR3 for beta chain variable domain of TCR clone 215023 (TRBV12-4, TRBJ1-1)
CASSLGTGGTEAFF

SEQ ID NO: 430047 - protein, 18 aa, Homo sapiens
  CDR3 for alpha chain variable domain of TCR clone 215024 (TRAV21, TRAJ52)
CAVRPSPAGGTSYGKLTF

SEQ ID NO: 430048 - protein, 14 aa, Homo sapiens
  CDR3 for beta chain variable domain of TCR clone 215024 (TRBV7-3, TRBJ2-1)
CASSLSGSYNEQFF

SEQ ID NO: 430049 - protein, 14 aa, Homo sapiens
  CDR3 for alpha chain variable domain of TCR clone 215025 (TRAV17, TRAJ16)
CATADFSDGQKLFF

SEQ ID NO: 430050 - protein, 12 aa, Homo sapiens
  CDR3 for beta chain variable domain of TCR clone 215025 (TRBV24-1, TRBJ1-1)
CATLYPDTEAFF

SEQ ID NO: 430051 - protein, 12 aa, Homo sapiens
  CDR3 for alpha chain variable domain of TCR clone 215026 (TRAV1-1, TRAJ24)
CAVRGSWGKFPF

SEQ ID NO: 430052 - protein, 15 aa, Homo sapiens
  CDR3 for beta chain variable domain of TCR clone 215026 (TRBV7-2, TRBJ2-3)
CASSSTGLETDTQYF

SEQ ID NO: 430053 - protein, 16 aa, Homo sapiens
  CDR3 for alpha chain variable domain of TCR clone 215027 (TRAV12-2, TRAJ50)
CAVVTATKTSYAKVIF

SEQ ID NO: 430054 - protein, 12 aa, Homo sapiens
  CDR3 for beta chain variable domain of TCR clone 215027 (TRBV12-4, TRBJ1-5)
CASSLGRQPQHF

SEQ ID NO: 430055 - protein, 11 aa, Homo sapiens
  CDR3 for alpha chain variable domain of TCR clone 215028 (TRAV1-1, TRAJ23)
CAVRQGGKLIF

SEQ ID NO: 430056 - protein, 12 aa, Homo sapiens
  CDR3 for beta chain variable domain of TCR clone 215028 (TRBV12-4, TRBJ2-1)
CASSPGRNEQFF

SEQ ID NO: 430057 - protein, 15 aa, Homo sapiens
  CDR3 for alpha chain variable domain of TCR clone 215029 (TRAV21, TRAJ53)
CATLNSGGSNYKLTF

SEQ ID NO: 430058 - protein, 15 aa, Homo sapiens
  CDR3 for beta chain variable domain of TCR clone 215029 (TRBV9, TRBJ1-6)
CAGSVAGTGDSPLHF

SEQ ID NO: 430059 - protein, 15 aa, Homo sapiens
  CDR3 for alpha chain variable domain of TCR clone 215030 (TRAV3, TRAJ22)
CAVRDRGGSASQLTL

SEQ ID NO: 430060 - protein, 14 aa, Homo sapiens
  CDR3 for beta chain variable domain of TCR clone 215030 (TRBV20-1, TRBJ2-5)
CSALVPGYQETQYF

SEQ ID NO: 430061 - protein, 11 aa, Homo sapiens
  CDR3 for alpha chain variable domain of TCR clone 215031 (TRAV3, TRAJ21)
CAVGNFDKFYF

SEQ ID NO: 430062 - protein, 16 aa, Homo sapiens
  CDR3 for beta chain variable domain of TCR clone 215031 (TRBV19, TRBJ2-1)
CASSRAGPGSYNEQFF

SEQ ID NO: 430063 - protein, 15 aa, Homo sapiens
  CDR3 for alpha chain variable domain of TCR clone 215032 (TRAV12-3, TRAJ6)
CALSATSGGSYIPTF

SEQ ID NO: 430064 - protein, 11 aa, Homo sapiens
  CDR3 for beta chain variable domain of TCR clone 215032 (TRBV20-1, TRBJ1-5)
CSAQGDQPQHF

SEQ ID NO: 430065 - protein, 15 aa, Homo sapiens
  CDR3 for alpha chain variable domain of TCR clone 215033 (TRAV10, TRAJ39)
CVVSASGNAGNMLTL

SEQ ID NO: 430066 - protein, 13 aa, Homo sapiens
  CDR3 for beta chain variable domain of TCR clone 215033 (TRBV18, TRBJ2-7)
CASQSGGGYEQYF

SEQ ID NO: 430067 - protein, 13 aa, Homo sapiens
  CDR3 for alpha chain variable domain of TCR clone 215034 (TRAV23/DV6, TRAJ24)
CAASEDSWGRLQF

SEQ ID NO: 430068 - protein, 12 aa, Homo sapiens
  CDR3 for beta chain variable domain of TCR clone 215034 (TRBV5-1, TRBJ2-7)
CASSDSTYEQYF

SEQ ID NO: 430069 - protein, 11 aa, Homo sapiens
  CDR3 for alpha chain variable domain of TCR clone 215035 (TRAV12-1, TRAJ8)
CVVTGFQKLVF

SEQ ID NO: 430070 - protein, 16 aa, Homo sapiens
  CDR3 for beta chain variable domain of TCR clone 215035 (TRBV5-1, TRBJ2-1)
CASSTRSGGSYNEQFF

SEQ ID NO: 430071 - protein, 14 aa, Homo sapiens
  CDR3 for alpha chain variable domain of TCR clone 215036 (TRAV12-2, TRAJ17)
CAVNIKAAGNKLPF

SEQ ID NO: 430072 - protein, 13 aa, Homo sapiens
  CDR3 for beta chain variable domain of TCR clone 215036 (TRBV7-8, TRBJ2-7)
CASSLTGGREQYF

SEQ ID NO: 430073 - protein, 13 aa, Homo sapiens
  CDR3 for alpha chain variable domain of TCR clone 215037 (TRAV27, TRAJ29)
CAGAHSGNTPLVF

SEQ ID NO: 430074 - protein, 13 aa, Homo sapiens
  CDR3 for beta chain variable domain of TCR clone 215037 (TRBV19, TRBJ2-1)
CATSRGVYNEQFF

SEQ ID NO: 430075 - protein, 14 aa, Homo sapiens
  CDR3 for alpha chain variable domain of TCR clone 215038 (TRAV30, TRAJ33)
CGTERRFSNYQLIW

SEQ ID NO: 430076 - protein, 16 aa, Homo sapiens
  CDR3 for beta chain variable domain of TCR clone 215038 (TRBV7-3, TRBJ2-2)
CASSLKPGTLSGELFF

SEQ ID NO: 430077 - protein, 16 aa, Homo sapiens
  CDR3 for alpha chain variable domain of TCR clone 215039 (TRAV8-3, TRAJ28)
CAVGATLGRGVTNSLS

SEQ ID NO: 430078 - protein, 14 aa, Homo sapiens
  CDR3 for beta chain variable domain of TCR clone 215039 (TRBV7-2, TRBJ2-1)
CASSLGVGYNEQFF

SEQ ID NO: 430079 - protein, 13 aa, Homo sapiens
  CDR3 for alpha chain variable domain of TCR clone 215040 (TRAV12-3, TRAJ7)
CPMTPYGNNRLAF

SEQ ID NO: 430080 - protein, 16 aa, Homo sapiens
  CDR3 for beta chain variable domain of TCR clone 215040 (TRBV20-1, TRBJ1-4)
CSARPYGGELNEKLFF

SEQ ID NO: 430081 - protein, 16 aa, Homo sapiens
  CDR3 for alpha chain variable domain of TCR clone 215041 (TRAV23/DV6, TRAJ10)
CAASIGTHGRRKQTQL

SEQ ID NO: 430082 - protein, 13 aa, Homo sapiens
  CDR3 for beta chain variable domain of TCR clone 215041 (TRBV11-1, TRBJ1-2)
CASVGSWGYGYAF

SEQ ID NO: 430083 - protein, 12 aa, Homo sapiens
  CDR3 for alpha chain variable domain of TCR clone 215042 (TRAV16, TRAJ27)
CALNTNAGKSTF

SEQ ID NO: 430084 - protein, 12 aa, Homo sapiens
  CDR3 for beta chain variable domain of TCR clone 215042 (TRBV11-2, TRBJ2-1)
CASSPGNNGQFF

SEQ ID NO: 430085 - protein, 11 aa, Homo sapiens
  CDR3 for alpha chain variable domain of TCR clone 215043 (TRAV1-2, TRAJ13)
GRSGGYQKVTF

SEQ ID NO: 430086 - protein, 16 aa, Homo sapiens
  CDR3 for beta chain variable domain of TCR clone 215043 (TRBV19, TRBJ2-7)
CASNFRDTFTGMYFGR

SEQ ID NO: 430087 - protein, 17 aa, Homo sapiens
  CDR3 for alpha chain variable domain of TCR clone 215044 (TRAV26-2, TRAJ37)
CILRDRGGSSNTGKLIF

SEQ ID NO: 430088 - protein, 15 aa, Homo sapiens
  CDR3 for beta chain variable domain of TCR clone 215044 (TRBV19, TRBJ2-1)
CASSSPGVPLDEQFF

SEQ ID NO: 430089 - protein, 13 aa, Homo sapiens
  CDR3 for alpha chain variable domain of TCR clone 215045 (TRAV12-2, TRAJ10)
CAVPTGGGNKLTF

SEQ ID NO: 430090 - protein, 14 aa, Homo sapiens
  CDR3 for beta chain variable domain of TCR clone 215045 (TRBV19, TRBJ2-5)
CASSMTGQQETQYF

SEQ ID NO: 430091 - protein, 13 aa, Homo sapiens
  CDR3 for alpha chain variable domain of TCR clone 215046 (TRAV12-1, TRAJ33)
CGDAPDSNYQLIW

SEQ ID NO: 430092 - protein, 15 aa, Homo sapiens
  CDR3 for beta chain variable domain of TCR clone 215046 (TRBV27, TRBJ2-1)
CGSSNGGGSSNEQFF

SEQ ID NO: 430093 - protein, 11 aa, Homo sapiens
  CDR3 for alpha chain variable domain of TCR clone 215047 (TRAV21, TRAJ20)
GAVRDDYKLSF

SEQ ID NO: 430094 - protein, 14 aa, Homo sapiens
  CDR3 for beta chain variable domain of TCR clone 215047 (TRBV12-4, TRBJ1-1)
CASSFSQMNTEAFF

SEQ ID NO: 430095 - protein, 19 aa, Homo sapiens
  CDR3 for alpha chain variable domain of TCR clone 215048 (TRAV16, TRAJ22)
KKPFAQGEDSAMYLRQLTF

SEQ ID NO: 430096 - protein, 15 aa, Homo sapiens
  CDR3 for beta chain variable domain of TCR clone 215048 (TRBV7-9, TRBJ1-6)
CASSSPGRGNSPLHF

SEQ ID NO: 430097 - protein, 14 aa, Homo sapiens
  CDR3 for alpha chain variable domain of TCR clone 215049 (TRAV2, TRAJ37)
CAVDFTSNTGKLIF

SEQ ID NO: 430098 - protein, 17 aa, Homo sapiens
  CDR3 for beta chain variable domain of TCR clone 215049 (TRBV28, TRBJ2-5)
CASSTPEGDALQETQYF

SEQ ID NO: 430099 - protein, 16 aa, Homo sapiens
  CDR3 for alpha chain variable domain of TCR clone 215050 (TRAV4, TRAJ22)
FLVGDLYSGSARQLTF

SEQ ID NO: 430100 - protein, 15 aa, Homo sapiens
  CDR3 for beta chain variable domain of TCR clone 215050 (TRBV11-3, TRBJ2-3)
CASLKDGREGDTQYF

SEQ ID NO: 430101 - protein, 14 aa, Homo sapiens
  CDR3 for alpha chain variable domain of TCR clone 215051 (TRAV12-2, TRAJ13)
YAVKKTGGYPKVTF

SEQ ID NO: 430102 - protein, 17 aa, Homo sapiens
  CDR3 for beta chain variable domain of TCR clone 215051 (TRBV20-1, TRBJ2-2)
CSASGSGQGGLTGELFF

SEQ ID NO: 430103 - protein, 14 aa, Homo sapiens
  CDR3 for alpha chain variable domain of TCR clone 215052 (TRAV2, TRAJ37)
CAVDFTSNTGKLIF

SEQ ID NO: 430104 - protein, 17 aa, Homo sapiens
  CDR3 for beta chain variable domain of TCR clone 215052 (TRBV19, TRBJ2-7)
CASSISLYDSYPYEQYF

SEQ ID NO: 430105 - protein, 14 aa, Homo sapiens
  CDR3 for alpha chain variable domain of TCR clone 215053 (TRAV21, TRAJ18)
CAVTRGSTLGRLYF

SEQ ID NO: 430106 - protein, 12 aa, Homo sapiens
  CDR3 for beta chain variable domain of TCR clone 215053 (TRBV3-1, TRBJ2-5)
CASSQDRETQYF

SEQ ID NO: 430107 - protein, 13 aa, Homo sapiens
  CDR3 for alpha chain variable domain of TCR clone 215054 (TRAV13-1, TRAJ43)
CAASMNNNNDMRF

SEQ ID NO: 430108 - protein, 13 aa, Homo sapiens
  CDR3 for beta chain variable domain of TCR clone 215054 (TRBV29-1, TRBJ2-1)
CSVDGGASDEQFF

SEQ ID NO: 430109 - protein, 12 aa, Homo sapiens
  CDR3 for alpha chain variable domain of TCR clone 215055 (TRAV2, TRAJ33)
CAFMDSNYQLIW

SEQ ID NO: 430110 - protein, 16 aa, Homo sapiens
  CDR3 for beta chain variable domain of TCR clone 215055 (TRBV2, TRBJ2-7)
CASSEPWTGPSYEQYV

SEQ ID NO: 430111 - protein, 15 aa, Homo sapiens
  CDR3 for alpha chain variable domain of TCR clone 215056 (TRAV3, TRAJ5)
CAVRDRDTGRRALTF

SEQ ID NO: 430112 - protein, 16 aa, Homo sapiens
  CDR3 for beta chain variable domain of TCR clone 215056 (TRBV20-1, TRBJ1-2)
CSASMGQGVANYGYTF

SEQ ID NO: 430113 - protein, 15 aa, Homo sapiens
  CDR3 for alpha chain variable domain of TCR clone 215057 (TRAV3, TRAJ4)
CAVRDPSGGYNKLIF

SEQ ID NO: 430114 - protein, 15 aa, Homo sapiens
  CDR3 for beta chain variable domain of TCR clone 215057 (TRBV7-2, TRBJ2-7)
CASSLAVGQVYEQYF

SEQ ID NO: 430115 - protein, 16 aa, Homo sapiens
  CDR3 for alpha chain variable domain of TCR clone 215058 (TRAV21, TRAJ58)
CAVRGDRETSGARLTF

SEQ ID NO: 430116 - protein, 12 aa, Homo sapiens
  CDR3 for beta chain variable domain of TCR clone 215058 (TRBV19, TRBJ2-3)
CASAGGADTQYF

SEQ ID NO: 430117 - protein, 13 aa, Homo sapiens
  CDR3 for alpha chain variable domain of TCR clone 215059 (TRAV2, TRAJ15)
CAVASQAGTALIF

SEQ ID NO: 430118 - protein, 14 aa, Homo sapiens
  CDR3 for beta chain variable domain of TCR clone 215059 (TRBV7-2, TRBJ2-5)
CASSLSGGGETQYF

SEQ ID NO: 430119 - protein, 13 aa, Homo sapiens
  CDR3 for alpha chain variable domain of TCR clone 215060 (TRAV17, TRAJ26)
CATVDNYGQNFVF

SEQ ID NO: 430120 - protein, 13 aa, Homo sapiens
  CDR3 for beta chain variable domain of TCR clone 215060 (TRBV7-6, TRBJ2-1)
CASSSFRDNEQFF

SEQ ID NO: 430121 - protein, 14 aa, Homo sapiens
  CDR3 for alpha chain variable domain of TCR clone 215061 (TRAV16, TRAJ37)
CALDISGNTSKLIF

SEQ ID NO: 430122 - protein, 14 aa, Homo sapiens
  CDR3 for beta chain variable domain of TCR clone 215061 (TRBV4-1, TRBJ2-2)
CASSQAVNTGELFF

SEQ ID NO: 430123 - protein, 16 aa, Homo sapiens
  CDR3 for alpha chain variable domain of TCR clone 215062 (TRAV8-3, TRAJ13)
CAVCAYPSGGYQKVTY

SEQ ID NO: 430124 - protein, 15 aa, Homo sapiens
  CDR3 for beta chain variable domain of TCR clone 215062 (TRBV19, TRBJ1-5)
CASSIVWADNQPQHF

SEQ ID NO: 430125 - protein, 15 aa, Homo sapiens
  CDR3 for alpha chain variable domain of TCR clone 215063 (TRAV27, TRAJ38)
CAARRNADNNRKLIW

SEQ ID NO: 430126 - protein, 15 aa, Homo sapiens
  CDR3 for beta chain variable domain of TCR clone 215063 (TRBV9, TRBJ1-6)
CASSVAGTGDSPLHF

SEQ ID NO: 430127 - protein, 16 aa, Homo sapiens
  CDR3 for alpha chain variable domain of TCR clone 215064 (TRAV16, TRAJ4)
CALSRMFSGGYNKLIF

SEQ ID NO: 430128 - protein, 16 aa, Homo sapiens
  CDR3 for beta chain variable domain of TCR clone 215064 (TRBV24-1, TRBJ2-3)
CATCDPGTVATDTQYF

SEQ ID NO: 430129 - protein, 13 aa, Homo sapiens
  CDR3 for alpha chain variable domain of TCR clone 215065 (TRAV17, TRAJ9)
CATDYTGGVKTIF

SEQ ID NO: 430130 - protein, 14 aa, Homo sapiens
  CDR3 for beta chain variable domain of TCR clone 215065 (TRBV19, TRBJ2-5)
CASSMTGQQATQYF

SEQ ID NO: 430131 - protein, 13 aa, Homo sapiens
  CDR3 for alpha chain variable domain of TCR clone 215066 (TRAV17, TRAJ9)
CATDYTGGCKTIF

SEQ ID NO: 430132 - protein, 16 aa, Homo sapiens
  CDR3 for beta chain variable domain of TCR clone 215066 (TRBV7-7, TRBJ2-1)
CASSLASGTSYNEQLF

SEQ ID NO: 430133 - protein, 12 aa, Homo sapiens
  CDR3 for alpha chain variable domain of TCR clone 215067 (TRAV29/DV5, TRAJ49)
CAATDTGNQFYF

SEQ ID NO: 430134 - protein, 15 aa, Homo sapiens
  CDR3 for beta chain variable domain of TCR clone 215067 (TRBV12-4, TRBJ2-5)
CASTLNSGRGETQYF

SEQ ID NO: 430135 - protein, 14 aa, Homo sapiens
  CDR3 for alpha chain variable domain of TCR clone 215068 (TRAV8-2, TRAJ4)
CVVSPSGGYIKLIF

SEQ ID NO: 430136 - protein, 14 aa, Homo sapiens
  CDR3 for beta chain variable domain of TCR clone 215068 (TRBV19, TRBJ2-5)
CASSSSGIQETQYF

SEQ ID NO: 430137 - protein, 12 aa, Homo sapiens
  CDR3 for alpha chain variable domain of TCR clone 215069 (TRAV12-3, TRAJ17)
CAMTLTGNKLTF

SEQ ID NO: 430138 - protein, 15 aa, Homo sapiens
  CDR3 for beta chain variable domain of TCR clone 215069 (TRBV5-1, TRBJ2-3)
CASSLETASTDTQYF

SEQ ID NO: 430139 - protein, 16 aa, Homo sapiens
  CDR3 for alpha chain variable domain of TCR clone 215070 (TRAV12-2, TRAJ32)
CAVNMNYGGATNKLIF

SEQ ID NO: 430140 - protein, 16 aa, Homo sapiens
  CDR3 for beta chain variable domain of TCR clone 215070 (TRBV7-8, TRBJ2-3)
CASSTEGQRETDTKYF

SEQ ID NO: 430141 - protein, 15 aa, Homo sapiens
  CDR3 for alpha chain variable domain of TCR clone 215071 (TRAV40, TRAJ45)
CLLGDLGGGADGLTF

SEQ ID NO: 430142 - protein, 17 aa, Homo sapiens
  CDR3 for beta chain variable domain of TCR clone 215071 (TRBV18, TRBJ1-5)
CASSPTMGQGTNQTQHF

SEQ ID NO: 430143 - protein, 14 aa, Homo sapiens
  CDR3 for alpha chain variable domain of TCR clone 215072 (TRAV12-2, TRAJ13)
CAVKKTGGYQKVTF

SEQ ID NO: 430144 - protein, 12 aa, Homo sapiens
  CDR3 for beta chain variable domain of TCR clone 215072 (TRBV2, TRBJ2-7)
CASSDPDYEQYF

SEQ ID NO: 430145 - protein, 15 aa, Homo sapiens
  CDR3 for alpha chain variable domain of TCR clone 215073 (TRAV12-1, TRAJ44)
CVVDEYTGSASKLTF

SEQ ID NO: 430146 - protein, 14 aa, Homo sapiens
  CDR3 for beta chain variable domain of TCR clone 215073 (TRBV5-1, TRBJ1-2)
CASSLEPVNYGYTF

SEQ ID NO: 430147 - protein, 13 aa, Homo sapiens
  CDR3 for alpha chain variable domain of TCR clone 215074 (TRAV21, TRAJ27)
CAARPGNAGKSTF

SEQ ID NO: 430148 - protein, 13 aa, Homo sapiens
  CDR3 for beta chain variable domain of TCR clone 215074 (TRBV20-1, TRBJ1-1)
CRARGGGNTEAFF

SEQ ID NO: 430149 - protein, 15 aa, Homo sapiens
  CDR3 for alpha chain variable domain of TCR clone 215075 (TRAV8-2, TRAJ24)
CVVSDRTDSWGKLKF

SEQ ID NO: 430150 - protein, 14 aa, Homo sapiens
  CDR3 for beta chain variable domain of TCR clone 215075 (TRBV19, TRBJ2-7)
CASSIEASSYEQYF

SEQ ID NO: 430151 - protein, 17 aa, Homo sapiens
  CDR3 for alpha chain variable domain of TCR clone 215076 (TRAV3, TRAJ6)
CAVRDGPRAGGSYIPTF

SEQ ID NO: 430152 - protein, 15 aa, Homo sapiens
  CDR3 for beta chain variable domain of TCR clone 215076 (TRBV4-2, TRBJ1-1)
CASSQRSSGRTEAFF

SEQ ID NO: 430153 - protein, 12 aa, Homo sapiens
  CDR3 for alpha chain variable domain of TCR clone 215077 (TRAV3, TRAJ43)
CAVRDPNNDMRF

SEQ ID NO: 430154 - protein, 17 aa, Homo sapiens
  CDR3 for beta chain variable domain of TCR clone 215077 (TRBV7-8, TRBJ2-6)
CGSSAGTGGAGANVLTF

SEQ ID NO: 430155 - protein, 16 aa, Homo sapiens
  CDR3 for alpha chain variable domain of TCR clone 215078 (TRAV16, TRAJ52)
CALSAAGGTSYGKLTF

SEQ ID NO: 430156 - protein, 13 aa, Homo sapiens
  CDR3 for beta chain variable domain of TCR clone 215078 (TRBV13, TRBJ2-4)
CASSLAGADIQYF

SEQ ID NO: 430157 - protein, 12 aa, Homo sapiens
  CDR3 for alpha chain variable domain of TCR clone 215079 (TRAV13-1, TRAJ49)
CSASIRSNQFYF

SEQ ID NO: 430158 - protein, 13 aa, Homo sapiens
  CDR3 for beta chain variable domain of TCR clone 215079 (TRBV7-2, TRBJ2-4)
CASSREHANSQYF

SEQ ID NO: 430159 - protein, 13 aa, Homo sapiens
  CDR3 for alpha chain variable domain of TCR clone 215080 (TRAV12-1, TRAJ30)
CVVNTYRDDKIIF

SEQ ID NO: 430160 - protein, 18 aa, Homo sapiens
  CDR3 for beta chain variable domain of TCR clone 215080 (TRBV6-6, TRBJ1-3)
CASSYSKWDSISGNTIYF

SEQ ID NO: 430161 - protein, 12 aa, Homo sapiens
  CDR3 for alpha chain variable domain of TCR clone 215081 (TRAV13-1, TRAJ21)
CAAKEGFNKFYF

SEQ ID NO: 430162 - protein, 14 aa, Homo sapiens
  CDR3 for beta chain variable domain of TCR clone 215081 (TRBV19, TRBJ2-2)
CASTVMANTGELFF

SEQ ID NO: 430163 - protein, 14 aa, Homo sapiens
  CDR3 for alpha chain variable domain of TCR clone 215082 (TRAV26-1, TRAJ38)
CIADNAGNNRKLIG

SEQ ID NO: 430164 - protein, 13 aa, Homo sapiens
  CDR3 for beta chain variable domain of TCR clone 215082 (TRBV20-1, TRBJ1-1)
CSARGGGNTEALF

SEQ ID NO: 430165 - protein, 13 aa, Homo sapiens
  CDR3 for alpha chain variable domain of TCR clone 215083 (TRAV12-1, TRAJ33)
CVVNRKSNYQLIW

SEQ ID NO: 430166 - protein, 16 aa, Homo sapiens
  CDR3 for beta chain variable domain of TCR clone 215083 (TRBV2, TRBJ2-3)
CASSTSVEGVTDTQYF

SEQ ID NO: 430167 - protein, 15 aa, Homo sapiens
  CDR3 for alpha chain variable domain of TCR clone 215084 (TRAV26-1, TRAJ48)
CIVRVGDFGNEKLTF

SEQ ID NO: 430168 - protein, 16 aa, Homo sapiens
  CDR3 for beta chain variable domain of TCR clone 215084 (TRBV4-1, TRBJ2-3)
CASSQRAGGLTDTQCF

SEQ ID NO: 430169 - protein, 15 aa, Homo sapiens
  CDR3 for alpha chain variable domain of TCR clone 215085 (TRAV26-1, TRAJ56)
CIVRVATGANSKLTF

SEQ ID NO: 430170 - protein, 15 aa, Homo sapiens
  CDR3 for beta chain variable domain of TCR clone 215085 (TRBV27, TRBJ2-7)
CASSPRREGQREQYF

SEQ ID NO: 430171 - protein, 14 aa, Homo sapiens
  CDR3 for alpha chain variable domain of TCR clone 215086 (TRAV2, TRAJ41)
CAVGTSNSGYALNF

SEQ ID NO: 430172 - protein, 14 aa, Homo sapiens
  CDR3 for beta chain variable domain of TCR clone 215086 (TRBV25-1, TRBJ1-1)
CASTHLGGNTEAFF

SEQ ID NO: 430173 - protein, 10 aa, Homo sapiens
  CDR3 for alpha chain variable domain of TCR clone 215087 (TRAV25, TRAJ20)
CAVNDYKLSF

SEQ ID NO: 430174 - protein, 18 aa, Homo sapiens
  CDR3 for beta chain variable domain of TCR clone 215087 (TRBV20-1, TRBJ2-6)
CSAETTPTHGPGANVLTF

SEQ ID NO: 430175 - protein, 14 aa, Homo sapiens
  CDR3 for alpha chain variable domain of TCR clone 215088 (TRAV12-2, TRAJ45)
CAVYSGGGADRLTF

SEQ ID NO: 430176 - protein, 14 aa, Homo sapiens
  CDR3 for beta chain variable domain of TCR clone 215088 (TRBV19, TRBJ2-1)
CASSRLASINEQFS

SEQ ID NO: 430177 - protein, 14 aa, Homo sapiens
  CDR3 for alpha chain variable domain of TCR clone 215089 (TRAV23/DV6, TRAJ40)
CAARKNYGTYKYIF

SEQ ID NO: 430178 - protein, 14 aa, Homo sapiens
  CDR3 for beta chain variable domain of TCR clone 215089 (TRBV10-3, TRBJ2-5)
CAISEIDYQETQYF

SEQ ID NO: 430179 - protein, 11 aa, Homo sapiens
  CDR3 for alpha chain variable domain of TCR clone 215090 (TRAV12-2, TRAJ36)
CAVDGANNLFF

SEQ ID NO: 430180 - protein, 13 aa, Homo sapiens
  CDR3 for beta chain variable domain of TCR clone 215090 (TRBV28, TRBJ2-5)
CAGVSRGEETQYS

SEQ ID NO: 430181 - protein, 13 aa, Homo sapiens
  CDR3 for alpha chain variable domain of TCR clone 215091 (TRAV25, TRAJ35)
CAGGGGFGNVLHC

SEQ ID NO: 430182 - protein, 10 aa, Homo sapiens
  CDR3 for beta chain variable domain of TCR clone 215091 (TRBV23-1, TRBJ2-1)
KWSSYNEQFF

SEQ ID NO: 430183 - protein, 14 aa, Homo sapiens
  CDR3 for alpha chain variable domain of TCR clone 215092 (TRAV1-2, TRAJ16)
CAVNRFSDGQKLLF

SEQ ID NO: 430184 - protein, 14 aa, Homo sapiens
  CDR3 for beta chain variable domain of TCR clone 215092 (TRBV6-1, TRBJ1-3)
CASVQVEGGNTIYF

SEQ ID NO: 430185 - protein, 14 aa, Homo sapiens
  CDR3 for alpha chain variable domain of TCR clone 215093 (TRAV29/DV5, TRAJ36)
CAARRKTGANNIFF

SEQ ID NO: 430186 - protein, 19 aa, Homo sapiens
  CDR3 for beta chain variable domain of TCR clone 215093 (TRBV28, TRBJ2-4)
CASSFQPGGPAHSKNIQYF

SEQ ID NO: 430187 - protein, 14 aa, Homo sapiens
  CDR3 for alpha chain variable domain of TCR clone 215094 (TRAV1-2, TRAJ16)
CAVNRFSDGQKLLF

SEQ ID NO: 430188 - protein, 17 aa, Homo sapiens
  CDR3 for beta chain variable domain of TCR clone 215094 (TRBV5-1, TRBJ2-2)
CASSLAGVSGGTGELFF

SEQ ID NO: 430189 - protein, 14 aa, Homo sapiens
  CDR3 for alpha chain variable domain of TCR clone 215095 (TRAV12-2, TRAJ6)
CAVNIKGGSYIPTF

SEQ ID NO: 430190 - protein, 14 aa, Homo sapiens
  CDR3 for beta chain variable domain of TCR clone 215095 (TRBV20-1, TRBJ2-7)
CSARDPTGLDEHYF

SEQ ID NO: 430191 - protein, 16 aa, Homo sapiens
  CDR3 for alpha chain variable domain of TCR clone 215096 (TRAV30, TRAJ37)
CGTEIKGSSNTGKLIF

SEQ ID NO: 430192 - protein, 14 aa, Homo sapiens
  CDR3 for beta chain variable domain of TCR clone 215096 (TRBV7-9, TRBJ2-7)
CASSLSILVYEQYF

SEQ ID NO: 430193 - protein, 18 aa, Homo sapiens
  CDR3 for alpha chain variable domain of TCR clone 215097 (TRAV35, TRAJ52)
CAGLLRYPGGTSYGKLTF

SEQ ID NO: 430194 - protein, 16 aa, Homo sapiens
  CDR3 for beta chain variable domain of TCR clone 215097 (TRBV7-9, TRBJ2-1)
CASSDVAGGSYNEQFF

SEQ ID NO: 430195 - protein, 16 aa, Homo sapiens
  CDR3 for alpha chain variable domain of TCR clone 215098 (TRAV30, TRAJ24)
CGTEIVDADSWGKFQF

SEQ ID NO: 430196 - protein, 14 aa, Homo sapiens
  CDR3 for beta chain variable domain of TCR clone 215098 (TRBV12-5, TRBJ2-5)
CASGSRTHQATKYF

SEQ ID NO: 430197 - protein, 17 aa, Homo sapiens
  CDR3 for alpha chain variable domain of TCR clone 215099 (TRAV3, TRAJ38)
CAVRDCLNAGINRKLIW

SEQ ID NO: 430198 - protein, 13 aa, Homo sapiens
  CDR3 for beta chain variable domain of TCR clone 215099 (TRBV23-1, TRBJ1-4)
CASRGKFNEKLFF

SEQ ID NO: 430199 - protein, 14 aa, Homo sapiens
  CDR3 for alpha chain variable domain of TCR clone 215100 (TRAV1-2, TRAJ16)
CAVNRFSDGQKLLF

SEQ ID NO: 430200 - protein, 15 aa, Homo sapiens
  CDR3 for beta chain variable domain of TCR clone 215100 (TRBV4-1, TRBJ2-7)
CASSQNTGRLYVQYF

SEQ ID NO: 430201 - protein, 18 aa, Homo sapiens
  CDR3 for alpha chain variable domain of TCR clone 215101 (TRAV26-2, TRAJ45)
CILRVDKYSGGGADGLTF

SEQ ID NO: 430202 - protein, 16 aa, Homo sapiens
  CDR3 for beta chain variable domain of TCR clone 215101 (TRBV2, TRBJ1-4)
CASNLLQGANNETLFF

SEQ ID NO: 430203 - protein, 16 aa, Homo sapiens
  CDR3 for alpha chain variable domain of TCR clone 215102 (TRAV16, TRAJ52)
CSLSAAGGTSYGKLTF

SEQ ID NO: 430204 - protein, 16 aa, Homo sapiens
  CDR3 for beta chain variable domain of TCR clone 215102 (TRBV12-4, TRBJ1-5)
CASSRPVGGSNQPQHF

SEQ ID NO: 430205 - protein, 12 aa, Homo sapiens
  CDR3 for alpha chain variable domain of TCR clone 215103 (TRAV12-1, TRAJ40)
CVVYSRTYKYIF

SEQ ID NO: 430206 - protein, 14 aa, Homo sapiens
  CDR3 for beta chain variable domain of TCR clone 215103 (TRBV7-9, TRBJ2-5)
CASSLDTAQETQYF

SEQ ID NO: 430207 - protein, 18 aa, Homo sapiens
  CDR3 for alpha chain variable domain of TCR clone 215104 (TRAV21, TRAJ52)
CAVRPSPAGGTSYGKLTF

SEQ ID NO: 430208 - protein, 16 aa, Homo sapiens
  CDR3 for beta chain variable domain of TCR clone 215104 (TRBV13, TRBJ2-3)
CRRPLQGSGGRNTQYF

SEQ ID NO: 430209 - protein, 13 aa, Homo sapiens
  CDR3 for alpha chain variable domain of TCR clone 215105 (TRAV29/DV5, TRAJ31)
CAASRNNNDRLMF

SEQ ID NO: 430210 - protein, 12 aa, Homo sapiens
  CDR3 for beta chain variable domain of TCR clone 215105 (TRBV14, TRBJ2-5)
CASSQLKETQYF

SEQ ID NO: 430211 - protein, 14 aa, Homo sapiens
  CDR3 for alpha chain variable domain of TCR clone 215106 (TRAV17, TRAJ16)
CATADFSDGQKLLF

SEQ ID NO: 430212 - protein, 15 aa, Homo sapiens
  CDR3 for beta chain variable domain of TCR clone 215106 (TRBV28, TRBJ1-1)
CASGRLAGLNTEAFF

SEQ ID NO: 430213 - protein, 15 aa, Homo sapiens
  CDR3 for alpha chain variable domain of TCR clone 215107 (TRAV27, TRAJ38)
CAARRNAGNNRKLIW

SEQ ID NO: 430214 - protein, 18 aa, Homo sapiens
  CDR3 for beta chain variable domain of TCR clone 215107 (TRBV7-2, TRBJ2-3)
CASSLKREGSGITDTQYF

SEQ ID NO: 430215 - protein, 14 aa, Homo sapiens
  CDR3 for alpha chain variable domain of TCR clone 215108 (TRAV17, TRAJ4)
CATAPLGGYNKLIF

SEQ ID NO: 430216 - protein, 15 aa, Homo sapiens
  CDR3 for beta chain variable domain of TCR clone 215108 (TRBV5-1, TRBJ2-3)
CASSVTSGSTDTQYF

SEQ ID NO: 430217 - protein, 15 aa, Homo sapiens
  CDR3 for alpha chain variable domain of TCR clone 215109 (TRAV35, TRAJ40)
CAGQLGTSGTYKYIF

SEQ ID NO: 430218 - protein, 17 aa, Homo sapiens
  CDR3 for beta chain variable domain of TCR clone 215109 (TRBV12-4, TRBJ1-1)
CASSLSGFRTMNTEAFF

SEQ ID NO: 430219 - protein, 15 aa, Homo sapiens
  CDR3 for alpha chain variable domain of TCR clone 215110 (TRAV3, TRAJ22)
CALRDRGGSARQLTF

SEQ ID NO: 430220 - protein, 15 aa, Homo sapiens
  CDR3 for beta chain variable domain of TCR clone 215110 (TRBV27, TRBJ2-5)
CASSLIPSGGETQYF

SEQ ID NO: 430221 - protein, 11 aa, Homo sapiens
  CDR3 for alpha chain variable domain of TCR clone 215111 (TRAV8-6, TRAJ42)
CAVRGRKPRKP

SEQ ID NO: 430222 - protein, 13 aa, Homo sapiens
  CDR3 for beta chain variable domain of TCR clone 215111 (TRBV7-3, TRBJ1-1)
CASSQDWGAEAFF

SEQ ID NO: 430223 - protein, 13 aa, Homo sapiens
  CDR3 for alpha chain variable domain of TCR clone 215112 (TRAV2, TRAJ29)
CAVEPSGNTPLVF

SEQ ID NO: 430224 - protein, 12 aa, Homo sapiens
  CDR3 for beta chain variable domain of TCR clone 215112 (TRBV11-2, TRBJ2-1)
CASSPGNNEQFF

SEQ ID NO: 430225 - protein, 12 aa, Homo sapiens
  CDR3 for alpha chain variable domain of TCR clone 215113 (TRAV8-3, TRAJ20)
CAVDFNDYKLSF

SEQ ID NO: 430226 - protein, 11 aa, Homo sapiens
  CDR3 for beta chain variable domain of TCR clone 215113 (TRBV29-1, TRBJ2-5)
CSEDRTGTQYF

SEQ ID NO: 430227 - protein, 14 aa, Homo sapiens
  CDR3 for alpha chain variable domain of TCR clone 215114 (TRAV29/DV5, TRAJ36)
CAARRKTGANNLFF

SEQ ID NO: 430228 - protein, 14 aa, Homo sapiens
  CDR3 for beta chain variable domain of TCR clone 215114 (TRBV28, TRBJ2-3)
CASSFASGTDTQYF

SEQ ID NO: 430229 - protein, 13 aa, Homo sapiens
  CDR3 for alpha chain variable domain of TCR clone 215115 (TRAV21, TRAJ57)
CAVTQGGSEKLVF

SEQ ID NO: 430230 - protein, 15 aa, Homo sapiens
  CDR3 for beta chain variable domain of TCR clone 215115 (TRBV7-9, TRBJ1-5)
CASSQGNQPNQPQHF

SEQ ID NO: 430231 - protein, 12 aa, Homo sapiens
  CDR3 for alpha chain variable domain of TCR clone 215116 (TRAV13-1, TRAJ15)
CAASQAGTALIF

SEQ ID NO: 430232 - protein, 14 aa, Homo sapiens
  CDR3 for beta chain variable domain of TCR clone 215116 (TRBV11-2, TRBJ2-1)
CASSLEVANNEQFF

SEQ ID NO: 430233 - protein, 14 aa, Homo sapiens
  CDR3 for alpha chain variable domain of TCR clone 215117 (TRAV12-2, TRAJ45)
CAVNKGGGADGLTF

SEQ ID NO: 430234 - protein, 15 aa, Homo sapiens
  CDR3 for beta chain variable domain of TCR clone 215117 (TRBV28, TRBJ2-1)
CASSIIAGGRSEQFY

SEQ ID NO: 430235 - protein, 11 aa, Homo sapiens
  CDR3 for alpha chain variable domain of TCR clone 215118 (TRAV1-1, TRAJ23)
CAVRQGGRLIF

SEQ ID NO: 430236 - protein, 20 aa, Homo sapiens
  CDR3 for beta chain variable domain of TCR clone 215118 (TRBV7-8, TRBJ2-2)
CASSHLFPGPTIHITGELFV

SEQ ID NO: 430237 - protein, 18 aa, Homo sapiens
  CDR3 for alpha chain variable domain of TCR clone 215119 (TRAV21, TRAJ52)
CAVRPSPAGGTSYGKLTF

SEQ ID NO: 430238 - protein, 15 aa, Homo sapiens
  CDR3 for beta chain variable domain of TCR clone 215119 (TRBV20-1, TRBJ2-3)
CSAGPLAGHGDTQYF

SEQ ID NO: 430239 - protein, 14 aa, Homo sapiens
  CDR3 for alpha chain variable domain of TCR clone 215120 (TRAV21, TRAJ58)
CAVRRGRSGSRLTF

SEQ ID NO: 430240 - protein, 13 aa, Homo sapiens
  CDR3 for beta chain variable domain of TCR clone 215120 (TRBV7-2, TRBJ1-6)
CASSLKFESTLHF

SEQ ID NO: 430241 - protein, 10 aa, Homo sapiens
  CDR3 for alpha chain variable domain of TCR clone 215121 (TRAV16, TRAJ22)
SAMYLRQLTF

SEQ ID NO: 430242 - protein, 17 aa, Homo sapiens
  CDR3 for beta chain variable domain of TCR clone 215121 (TRBV7-8, TRBJ2-6)
CASSAGTGGAGATVLTF

SEQ ID NO: 430243 - protein, 12 aa, Homo sapiens
  CDR3 for alpha chain variable domain of TCR clone 215122 (TRAV12-3, TRAJ17)
SAMTLTGNKLTF

SEQ ID NO: 430244 - protein, 14 aa, Homo sapiens
  CDR3 for beta chain variable domain of TCR clone 215122 (TRBV12-4, TRBJ2-5)
CASSLWQKQETQYF

SEQ ID NO: 430245 - protein, 15 aa, Homo sapiens
  CDR3 for alpha chain variable domain of TCR clone 215123 (TRAV21, TRAJ52)
CAVRGGGTSYGKLTF

SEQ ID NO: 430246 - protein, 16 aa, Homo sapiens
  CDR3 for beta chain variable domain of TCR clone 215123 (TRBV7-8, TRBJ2-4)
CASSAERTLAKNIQYF

SEQ ID NO: 430247 - protein, 17 aa, Homo sapiens
  CDR3 for alpha chain variable domain of TCR clone 215124 (TRAV19, TRAJ28)
CALSESSSGAGSYQLTF

SEQ ID NO: 430248 - protein, 20 aa, Homo sapiens
  CDR3 for beta chain variable domain of TCR clone 215124 (TRBV28, TRBJ2-1)
CASTPIGRSPGLAGGNEQFF

SEQ ID NO: 430249 - protein, 15 aa, Homo sapiens
  CDR3 for alpha chain variable domain of TCR clone 215125 (TRAV8-3, TRAJ45)
CASSYSGGGADGLTF

SEQ ID NO: 430250 - protein, 13 aa, Homo sapiens
  CDR3 for beta chain variable domain of TCR clone 215125 (TRBV10-3, TRBJ2-7)
CASKLAVHYEQYF

SEQ ID NO: 430251 - protein, 15 aa, Homo sapiens
  CDR3 for alpha chain variable domain of TCR clone 215126 (TRAV12-3, TRAJ6)
CAMSATTGGSYIPTF

SEQ ID NO: 430252 - protein, 14 aa, Homo sapiens
  CDR3 for beta chain variable domain of TCR clone 215126 (TRBV5-1, TRBJ2-7)
CASSRGESLYEQYF

SEQ ID NO: 430253 - protein, 14 aa, Homo sapiens
  CDR3 for alpha chain variable domain of TCR clone 215127 (TRAV16, TRAJ32)
CALKSGGATNKLIF

SEQ ID NO: 430254 - protein, 13 aa, Homo sapiens
  CDR3 for beta chain variable domain of TCR clone 215127 (TRBV15, TRBJ1-6)
CATTGGLNSPLHF

SEQ ID NO: 430255 - protein, 13 aa, Homo sapiens
  CDR3 for alpha chain variable domain of TCR clone 215128 (TRAV21, TRAJ15)
CAVANQAGTALIF

SEQ ID NO: 430256 - protein, 14 aa, Homo sapiens
  CDR3 for beta chain variable domain of TCR clone 215128 (TRBV11-2, TRBJ2-5)
CASSRTGGIETQYF

SEQ ID NO: 430257 - protein, 14 aa, Homo sapiens
  CDR3 for alpha chain variable domain of TCR clone 215129 (TRAV12-1, TRAJ17)
CVVNFKAAGNKLTF

SEQ ID NO: 430258 - protein, 12 aa, Homo sapiens
  CDR3 for beta chain variable domain of TCR clone 215129 (TRBV14, TRBJ1-1)
CASSQLKGLAFF

SEQ ID NO: 430259 - protein, 16 aa, Homo sapiens
  CDR3 for alpha chain variable domain of TCR clone 215130 (TRAV27, TRAJ53)
CAAPEGSGCSNYKLTF

SEQ ID NO: 430260 - protein, 14 aa, Homo sapiens
  CDR3 for beta chain variable domain of TCR clone 215130 (TRBV4-3, TRBJ1-5)
CASSQGGQGWPQHF

SEQ ID NO: 430261 - protein, 11 aa, Homo sapiens
  CDR3 for alpha chain variable domain of TCR clone 215131 (TRAV9-2, TRAJ49)
CALSAGNQFYF

SEQ ID NO: 430262 - protein, 16 aa, Homo sapiens
  CDR3 for beta chain variable domain of TCR clone 215131 (TRBV28, TRBJ2-6)
CASSDRRGSGANVLTF

SEQ ID NO: 430263 - protein, 13 aa, Homo sapiens
  CDR3 for alpha chain variable domain of TCR clone 215132 (TRAV12-1, TRAJ6)
CEVLPGGSYIPTF

SEQ ID NO: 430264 - protein, 14 aa, Homo sapiens
  CDR3 for beta chain variable domain of TCR clone 215132 (TRBV20-1, TRBJ1-3)
CSASPTGAGNTIYF

SEQ ID NO: 430265 - protein, 13 aa, Homo sapiens
  CDR3 for alpha chain variable domain of TCR clone 215133 (TRAV34, TRAJ33)
CGADMNSNYQLIW

SEQ ID NO: 430266 - protein, 13 aa, Homo sapiens
  CDR3 for beta chain variable domain of TCR clone 215133 (TRBV7-9, TRBJ2-1)
CASSLDVGNEQFF

SEQ ID NO: 430267 - protein, 18 aa, Homo sapiens
  CDR3 for alpha chain variable domain of TCR clone 215134 (TRAV12-3, TRAJ52)
RAMSRTNAGGTSYGKLTF

SEQ ID NO: 430268 - protein, 17 aa, Homo sapiens
  CDR3 for beta chain variable domain of TCR clone 215134 (TRBV7-3, TRBJ2-3)
CASSLMKRMRGAETQYF

SEQ ID NO: 430269 - protein, 13 aa, Homo sapiens
  CDR3 for alpha chain variable domain of TCR clone 215135 (TRAV3, TRAJ20)
CAVRDGGDYKLSF

SEQ ID NO: 430270 - protein, 16 aa, Homo sapiens
  CDR3 for beta chain variable domain of TCR clone 215135 (TRBV4-1, TRBJ2-5)
CARSPTSGGPLEAQYF

SEQ ID NO: 430271 - protein, 15 aa, Homo sapiens
  CDR3 for alpha chain variable domain of TCR clone 215136 (TRAV26-1, TRAJ21)
CIVRVPNDNFNKFYF

SEQ ID NO: 430272 - protein, 16 aa, Homo sapiens
  CDR3 for beta chain variable domain of TCR clone 215136 (TRBV7-9, TRBJ2-3)
CASSLQGNPGTDTQYF

SEQ ID NO: 430273 - protein, 12 aa, Homo sapiens
  CDR3 for alpha chain variable domain of TCR clone 215137 (TRAV12-3, TRAJ17)
CAMTLTGNKLTF

SEQ ID NO: 430274 - protein, 15 aa, Homo sapiens
  CDR3 for beta chain variable domain of TCR clone 215137 (TRBV7-6, TRBJ1-5)
CASSQSSGINQPQHF

SEQ ID NO: 430275 - protein, 15 aa, Homo sapiens
  CDR3 for alpha chain variable domain of TCR clone 215138 (TRAV3, TRAJ20)
CAVRDIKLSDYKLIF

SEQ ID NO: 430276 - protein, 15 aa, Homo sapiens
  CDR3 for beta chain variable domain of TCR clone 215138 (TRBV7-9, TRBJ1-6)
CASSSPGRGNSPLHL

SEQ ID NO: 430277 - protein, 14 aa, Homo sapiens
  CDR3 for alpha chain variable domain of TCR clone 215139 (TRAV8-4, TRAJ26)
CAVSEDNYGQNFVF

SEQ ID NO: 430278 - protein, 15 aa, Homo sapiens
  CDR3 for beta chain variable domain of TCR clone 215139 (TRBV5-1, TRBJ2-3)
CASSVTSGSTDTQYF

SEQ ID NO: 430279 - protein, 14 aa, Homo sapiens
  CDR3 for alpha chain variable domain of TCR clone 215140 (TRAV1-2, TRAJ8)
CAVREDTVFQKLVF

SEQ ID NO: 430280 - protein, 17 aa, Homo sapiens
  CDR3 for beta chain variable domain of TCR clone 215140 (TRBV13, TRBJ2-3)
CASSLSRVAGGRNTQYF

SEQ ID NO: 430281 - protein, 14 aa, Homo sapiens
  CDR3 for alpha chain variable domain of TCR clone 215141 (TRAV12-2, TRAJ53)
CRERGGGRNYKLTF

SEQ ID NO: 430282 - protein, 14 aa, Homo sapiens
  CDR3 for beta chain variable domain of TCR clone 215141 (TRBV19, TRBJ2-2)
CASSTLHRSGELFF

SEQ ID NO: 430283 - protein, 15 aa, Homo sapiens
  CDR3 for alpha chain variable domain of TCR clone 215142 (TRAV36/DV7, TRAJ54)
CAVEKPVQGAQKLVS

SEQ ID NO: 430284 - protein, 14 aa, Homo sapiens
  CDR3 for beta chain variable domain of TCR clone 215142 (TRBV4-3, TRBJ2-2)
CASSQGHVTGELFF

SEQ ID NO: 430285 - protein, 15 aa, Homo sapiens
  CDR3 for alpha chain variable domain of TCR clone 215143 (TRAV12-3, TRAJ42)
CAMSGHGGSQGNLIF

SEQ ID NO: 430286 - protein, 17 aa, Homo sapiens
  CDR3 for beta chain variable domain of TCR clone 215143 (TRBV13, TRBJ2-3)
CASSLSRVAGGRNTQYF

SEQ ID NO: 430287 - protein, 15 aa, Homo sapiens
  CDR3 for alpha chain variable domain of TCR clone 215144 (TRAV12-2, TRAJ53)
CAVNGAGGSNYKLTF

SEQ ID NO: 430288 - protein, 16 aa, Homo sapiens
  CDR3 for beta chain variable domain of TCR clone 215144 (TRBV6-1, TRBJ1-2)
CASSGAWQGRSHGYTF

SEQ ID NO: 430289 - protein, 14 aa, Homo sapiens
  CDR3 for alpha chain variable domain of TCR clone 215145 (TRAV23/DV6, TRAJ22)
CAASVSGSARQVTF

SEQ ID NO: 430290 - protein, 16 aa, Homo sapiens
  CDR3 for beta chain variable domain of TCR clone 215145 (TRBV19, TRBJ2-2)
CASSFPGQGLAGELFF

SEQ ID NO: 430291 - protein, 20 aa, Homo sapiens
  CDR3 for alpha chain variable domain of TCR clone 215146 (TRAV1-2, TRAJ34)
LLKELQMKDSASPNTDKLIF

SEQ ID NO: 430292 - protein, 15 aa, Homo sapiens
  CDR3 for beta chain variable domain of TCR clone 215146 (TRBV28, TRBJ2-1)
CASSFQERVYNEQFF

SEQ ID NO: 430293 - protein, 13 aa, Homo sapiens
  CDR3 for alpha chain variable domain of TCR clone 215147 (TRAV12-1, TRAJ33)
FGDAPDSNFQLIW

SEQ ID NO: 430294 - protein, 15 aa, Homo sapiens
  CDR3 for beta chain variable domain of TCR clone 215147 (TRBV27, TRBJ2-1)
CASSNGGGSSNEQFF

SEQ ID NO: 430295 - protein, 14 aa, Homo sapiens
  CDR3 for alpha chain variable domain of TCR clone 215148 (TRAV8-4, TRAJ37)
CAVSESSNTGKLVY

SEQ ID NO: 430296 - protein, 16 aa, Homo sapiens
  CDR3 for beta chain variable domain of TCR clone 215148 (TRBV27, TRBJ2-2)
CASSFRGLVRTGELFF

SEQ ID NO: 430297 - protein, 14 aa, Homo sapiens
  CDR3 for alpha chain variable domain of TCR clone 215149 (TRAV13-1, TRAJ36)
CAASINTGANNLFF

SEQ ID NO: 430298 - protein, 18 aa, Homo sapiens
  CDR3 for beta chain variable domain of TCR clone 215149 (TRBV20-1, TRBJ2-3)
CSDRDPWGQGLSTDTQYF

SEQ ID NO: 430299 - protein, 14 aa, Homo sapiens
  CDR3 for alpha chain variable domain of TCR clone 215150 (TRAV13-1, TRAJ31)
CAASTRPNNARLMF

SEQ ID NO: 430300 - protein, 15 aa, Homo sapiens
  CDR3 for beta chain variable domain of TCR clone 215150 (TRBV4-2, TRBJ2-4)
CASSPLGAAKNIQYF

SEQ ID NO: 430301 - protein, 14 aa, Homo sapiens
  CDR3 for alpha chain variable domain of TCR clone 215151 (TRAV1-2, TRAJ8)
CAVREDTGLQKLVF

SEQ ID NO: 430302 - protein, 15 aa, Homo sapiens
  CDR3 for beta chain variable domain of TCR clone 215151 (TRBV6-3, TRBJ2-7)
YASSSPGTVFYEQYF

SEQ ID NO: 430303 - protein, 15 aa, Homo sapiens
  CDR3 for alpha chain variable domain of TCR clone 215152 (TRAV12-1, TRAJ9)
CVVSFWDTGGFKTIF

SEQ ID NO: 430304 - protein, 12 aa, Homo sapiens
  CDR3 for beta chain variable domain of TCR clone 215152 (TRBV14, TRBJ2-7)
CASSLYKDEQYF

SEQ ID NO: 430305 - protein, 18 aa, Homo sapiens
  CDR3 for alpha chain variable domain of TCR clone 215153 (TRAV13-1, TRAJ52)
CAASKRSAGVTSYGKLTF

SEQ ID NO: 430306 - protein, 13 aa, Homo sapiens
  CDR3 for beta chain variable domain of TCR clone 215153 (TRBV12-4, TRBJ1-2)
CASSLRQGKGYTI

SEQ ID NO: 430307 - protein, 16 aa, Homo sapiens
  CDR3 for alpha chain variable domain of TCR clone 215154 (TRAV12-2, TRAJ32)
CAVNLGQGGATNKPIF

SEQ ID NO: 430308 - protein, 15 aa, Homo sapiens
  CDR3 for beta chain variable domain of TCR clone 215154 (TRBV20-1, TRBJ2-7)
CSARGTLAGGREQYF

SEQ ID NO: 430309 - protein, 13 aa, Homo sapiens
  CDR3 for alpha chain variable domain of TCR clone 215155 (TRAV21, TRAJ20)
CAVGVFADYKLSF

SEQ ID NO: 430310 - protein, 15 aa, Homo sapiens
  CDR3 for beta chain variable domain of TCR clone 215155 (TRBV11-2, TRBJ2-2)
CASSSDRVNAGELFF

SEQ ID NO: 430311 - protein, 18 aa, Homo sapiens
  CDR3 for alpha chain variable domain of TCR clone 215156 (TRAV12-2, )
CAVEDIQNPDPAVYQLRD

SEQ ID NO: 430312 - protein, 18 aa, Homo sapiens
  CDR3 for beta chain variable domain of TCR clone 215156 (TRBV7-9, TRBJ2-7)
CASSLTTSGSRTWYEQYF

SEQ ID NO: 430313 - protein, 13 aa, Homo sapiens
  CDR3 for alpha chain variable domain of TCR clone 215157 (TRAV1-1, TRAJ9)
CAAKNTGGFKAIF

SEQ ID NO: 430314 - protein, 14 aa, Homo sapiens
  CDR3 for beta chain variable domain of TCR clone 215157 (TRBV20-1, TRBJ2-1)
CSAQIGRSANEQFF

SEQ ID NO: 430315 - protein, 13 aa, Homo sapiens
  CDR3 for alpha chain variable domain of TCR clone 215158 (TRAV38-1, TRAJ57)
CALVQGGTEKLVF

SEQ ID NO: 430316 - protein, 17 aa, Homo sapiens
  CDR3 for beta chain variable domain of TCR clone 215158 (TRBV29-1, TRBJ2-3)
CSVDSPPRGARTDTQYF

SEQ ID NO: 430317 - protein, 11 aa, Homo sapiens
  CDR3 for alpha chain variable domain of TCR clone 215159 (TRAV21, TRAJ48)
CAVDGNERLTF

SEQ ID NO: 430318 - protein, 16 aa, Homo sapiens
  CDR3 for beta chain variable domain of TCR clone 215159 (TRBV19, TRBJ2-1)
CASSSKGTRSYNEQFF

SEQ ID NO: 430319 - protein, 12 aa, Homo sapiens
  CDR3 for alpha chain variable domain of TCR clone 215160 (TRAV12-3, TRAJ20)
CAMVRGDYKLSF

SEQ ID NO: 430320 - protein, 19 aa, Homo sapiens
  CDR3 for beta chain variable domain of TCR clone 215160 (TRBV14, TRBJ2-1)
CASSQDQLWEAPEYNEQFF

SEQ ID NO: 430321 - protein, 14 aa, Homo sapiens
  CDR3 for alpha chain variable domain of TCR clone 215161 (TRAV3, TRAJ9)
CAVRLNTGGFKTIF

SEQ ID NO: 430322 - protein, 17 aa, Homo sapiens
  CDR3 for beta chain variable domain of TCR clone 215161 (TRBV18, TRBJ2-1)
CASSKGLSGGADNEQFF

SEQ ID NO: 430323 - protein, 15 aa, Homo sapiens
  CDR3 for alpha chain variable domain of TCR clone 215162 (TRAV23/DV6, TRAJ33)
CAASNSGGGNHQLIW

SEQ ID NO: 430324 - protein, 14 aa, Homo sapiens
  CDR3 for beta chain variable domain of TCR clone 215162 (TRBV7-2, TRBJ2-7)
CASSLYPGRYEQYF

SEQ ID NO: 430325 - protein, 15 aa, Homo sapiens
  CDR3 for alpha chain variable domain of TCR clone 215163 (TRAV2, TRAJ9)
CAVAALNTGGFKTIF

SEQ ID NO: 430326 - protein, 17 aa, Homo sapiens
  CDR3 for beta chain variable domain of TCR clone 215163 (TRBV4-2, TRBJ2-1)
CASSQVSGLAMNSEQFF

SEQ ID NO: 430327 - protein, 11 aa, Homo sapiens
  CDR3 for alpha chain variable domain of TCR clone 215164 (TRAV3, TRAJ17)
CAEAAGNKLTF

SEQ ID NO: 430328 - protein, 13 aa, Homo sapiens
  CDR3 for beta chain variable domain of TCR clone 215164 (TRBV3-1, TRBJ1-1)
CASSPGVITEAFF

SEQ ID NO: 430329 - protein, 14 aa, Homo sapiens
  CDR3 for alpha chain variable domain of TCR clone 215165 (TRAV9-2, TRAJ39)
CALYISNAGNMLTF

SEQ ID NO: 430330 - protein, 14 aa, Homo sapiens
  CDR3 for beta chain variable domain of TCR clone 215165 (TRBV6-1, TRBJ1-3)
CASVQGGGGNTIYF

SEQ ID NO: 430331 - protein, 13 aa, Homo sapiens
  CDR3 for alpha chain variable domain of TCR clone 215166 (TRAV13-2, TRAJ21)
CAENLYNFNKFYF

SEQ ID NO: 430332 - protein, 17 aa, Homo sapiens
  CDR3 for beta chain variable domain of TCR clone 215166 (TRBV28, TRBJ2-5)
CASSTPEGDALQETQYF

SEQ ID NO: 430333 - protein, 13 aa, Homo sapiens
  CDR3 for alpha chain variable domain of TCR clone 215167 (TRAV8-3, TRAJ28)
CAVGAVGSYQLTF

SEQ ID NO: 430334 - protein, 17 aa, Homo sapiens
  CDR3 for beta chain variable domain of TCR clone 215167 (TRBV3-1, TRBJ2-3)
CASSQLLDRGHTDTQYF

SEQ ID NO: 430335 - protein, 16 aa, Homo sapiens
  CDR3 for alpha chain variable domain of TCR clone 215168 (TRAV3, TRAJ5)
CAVRNLMDTGRRALTF

SEQ ID NO: 430336 - protein, 16 aa, Homo sapiens
  CDR3 for beta chain variable domain of TCR clone 215168 (TRBV4-2, TRBJ2-7)
SASSQEGLANSYEQYF

SEQ ID NO: 430337 - protein, 13 aa, Homo sapiens
  CDR3 for alpha chain variable domain of TCR clone 215169 (TRAV20, TRAJ20)
CAVRWVRDYKLSF

SEQ ID NO: 430338 - protein, 15 aa, Homo sapiens
  CDR3 for beta chain variable domain of TCR clone 215169 (TRBV6-3, TRBJ2-2)
CASSCLATLTGELFF

SEQ ID NO: 430339 - protein, 16 aa, Homo sapiens
  CDR3 for alpha chain variable domain of TCR clone 215170 (TRAV21, TRAJ33)
CAVSPASMDRNYQLIW

SEQ ID NO: 430340 - protein, 17 aa, Homo sapiens
  CDR3 for beta chain variable domain of TCR clone 215170 (TRBV2, TRBJ1-4)
CASSKRELTQGEEKLFF

SEQ ID NO: 430341 - protein, 11 aa, Homo sapiens
  CDR3 for alpha chain variable domain of TCR clone 215171 (TRAV8-3, TRAJ18)
CAVGGRQGLNP

SEQ ID NO: 430342 - protein, 12 aa, Homo sapiens
  CDR3 for beta chain variable domain of TCR clone 215171 (TRBV28, TRBJ2-6)
CAIQAGANVLTF

SEQ ID NO: 430343 - protein, 13 aa, Homo sapiens
  CDR3 for alpha chain variable domain of TCR clone 215172 (TRAV36/DV7, TRAJ54)
CAVLIQGDQKLVF

SEQ ID NO: 430344 - protein, 13 aa, Homo sapiens
  CDR3 for beta chain variable domain of TCR clone 215172 (TRBV29-1, TRBJ2-4)
CSVGEGTKNIQYF

SEQ ID NO: 430345 - protein, 13 aa, Homo sapiens
  CDR3 for alpha chain variable domain of TCR clone 215173 (TRAV12-1, TRAJ33)
CGDAPDSNYQLIW

SEQ ID NO: 430346 - protein, 12 aa, Homo sapiens
  CDR3 for beta chain variable domain of TCR clone 215173 (TRBV13, TRBJ2-1)
CASSLGAQEQFF

SEQ ID NO: 430347 - protein, 14 aa, Homo sapiens
  CDR3 for alpha chain variable domain of TCR clone 215174 (TRAV1-2, TRAJ8)
RAVREDTGFQKLVF

SEQ ID NO: 430348 - protein, 15 aa, Homo sapiens
  CDR3 for beta chain variable domain of TCR clone 215174 (TRBV28, TRBJ2-1)
CASSIIAGGRSEQFF

SEQ ID NO: 430349 - protein, 15 aa, Homo sapiens
  CDR3 for alpha chain variable domain of TCR clone 215175 (TRAV2, TRAJ9)
CAVAALNTGGFKTIF

SEQ ID NO: 430350 - protein, 15 aa, Homo sapiens
  CDR3 for beta chain variable domain of TCR clone 215175 (TRBV4-1, TRBJ1-3)
CASSHPGTSGNTIYF

SEQ ID NO: 430351 - protein, 19 aa, Homo sapiens
  CDR3 for alpha chain variable domain of TCR clone 215176 (TRAV38-1, TRAJ37)
CDVFLCFHTGSGNTGKLIF

SEQ ID NO: 430352 - protein, 12 aa, Homo sapiens
  CDR3 for beta chain variable domain of TCR clone 215176 (TRBV7-9, TRBJ2-7)
CASSFGSYEQYF

SEQ ID NO: 430353 - protein, 13 aa, Homo sapiens
  CDR3 for alpha chain variable domain of TCR clone 215177 (TRAV36/DV7, TRAJ41)
CAVEANSGYALNF

SEQ ID NO: 430354 - protein, 12 aa, Homo sapiens
  CDR3 for beta chain variable domain of TCR clone 215177 (TRBV7-9, TRBJ1-4)
CASSTDREKLFF

SEQ ID NO: 430355 - protein, 14 aa, Homo sapiens
  CDR3 for alpha chain variable domain of TCR clone 215178 (TRAV29/DV5, TRAJ36)
CAARRKTGANNLCF

SEQ ID NO: 430356 - protein, 19 aa, Homo sapiens
  CDR3 for beta chain variable domain of TCR clone 215178 (TRBV7-2, TRBJ2-3)
CASSFLSRNWGGGTDTQYF

SEQ ID NO: 430357 - protein, 13 aa, Homo sapiens
  CDR3 for alpha chain variable domain of TCR clone 215179 (TRAV3, TRAJ3)
CAVADSGASKIIF

SEQ ID NO: 430358 - protein, 16 aa, Homo sapiens
  CDR3 for beta chain variable domain of TCR clone 215179 (TRBV5-1, TRBJ2-3)
CASSLGLAVYTDTQYF

SEQ ID NO: 430359 - protein, 12 aa, Homo sapiens
  CDR3 for alpha chain variable domain of TCR clone 215180 (TRAV2, TRAJ33)
CAVPDSNYQLIW

SEQ ID NO: 430360 - protein, 15 aa, Homo sapiens
  CDR3 for beta chain variable domain of TCR clone 215180 (TRBV10-2, TRBJ2-6)
CASSEQGTGANDLTF

SEQ ID NO: 430361 - protein, 11 aa, Homo sapiens
  CDR3 for alpha chain variable domain of TCR clone 215181 (TRAV17, TRAJ9)
CATTGGFKTIF

SEQ ID NO: 430362 - protein, 13 aa, Homo sapiens
  CDR3 for beta chain variable domain of TCR clone 215181 (TRBV20-1, TRBJ2-5)
CSAREAFQETQYF

SEQ ID NO: 430363 - protein, 13 aa, Homo sapiens
  CDR3 for alpha chain variable domain of TCR clone 215182 (TRAV23/DV6, TRAJ22)
CACGAGSARQLTF

SEQ ID NO: 430364 - protein, 16 aa, Homo sapiens
  CDR3 for beta chain variable domain of TCR clone 215182 (TRBV7-2, TRBJ2-7)
CASSLDLSGGAHEQYF

SEQ ID NO: 430365 - protein, 12 aa, Homo sapiens
  CDR3 for alpha chain variable domain of TCR clone 215183 (TRAV12-3, TRAJ17)
CAMTLTGNKLTF

SEQ ID NO: 430366 - protein, 15 aa, Homo sapiens
  CDR3 for beta chain variable domain of TCR clone 215183 (TRBV28, TRBJ1-5)
CASSDQVYSNQPQHF

SEQ ID NO: 430367 - protein, 10 aa, Homo sapiens
  CDR3 for alpha chain variable domain of TCR clone 215184 (TRAV1-2, TRAJ31)
CVSEDARLMF

SEQ ID NO: 430368 - protein, 15 aa, Homo sapiens
  CDR3 for beta chain variable domain of TCR clone 215184 (TRBV5-7, TRBJ2-7)
CASSLGPGRGHEQYF

SEQ ID NO: 430369 - protein, 17 aa, Homo sapiens
  CDR3 for alpha chain variable domain of TCR clone 215185 (TRAV3, TRAJ12)
CAVRDGGRMDSSYKLIF

SEQ ID NO: 430370 - protein, 13 aa, Homo sapiens
  CDR3 for beta chain variable domain of TCR clone 215185 (TRBV15, TRBJ1-6)
CATSGGLNSPIHF

SEQ ID NO: 430371 - protein, 14 aa, Homo sapiens
  CDR3 for alpha chain variable domain of TCR clone 215186 (TRAV35, TRAJ50)
CAGHRKTSYDKVIF

SEQ ID NO: 430372 - protein, 19 aa, Homo sapiens
  CDR3 for beta chain variable domain of TCR clone 215186 (TRBV7-2, TRBJ2-3)
CASSFLSRNWGGGTDTQYF

SEQ ID NO: 430373 - protein, 21 aa, Homo sapiens
  CDR3 for alpha chain variable domain of TCR clone 215187 (TRAV1-1, TRAJ6)
CLLLLRCERLERTGGSYIPTF

SEQ ID NO: 430374 - protein, 13 aa, Homo sapiens
  CDR3 for beta chain variable domain of TCR clone 215187 (TRBV20-1, TRBJ2-2)
CSASAAGTGELFF

SEQ ID NO: 430375 - protein, 16 aa, Homo sapiens
  CDR3 for alpha chain variable domain of TCR clone 215188 (TRAV30, TRAJ24)
CGTEIVDADSWGKFQL

SEQ ID NO: 430376 - protein, 14 aa, Homo sapiens
  CDR3 for beta chain variable domain of TCR clone 215188 (TRBV19, TRBJ2-1)
CASKDPSSYNEQFF

SEQ ID NO: 430377 - protein, 18 aa, Homo sapiens
  CDR3 for alpha chain variable domain of TCR clone 215189 (TRAV29/DV5, TRAJ37)
CSVLLCSEGSGNPGKLIF

SEQ ID NO: 430378 - protein, 14 aa, Homo sapiens
  CDR3 for beta chain variable domain of TCR clone 215189 (TRBV5-1, TRBJ1-1)
CASSLAVGSGEAFF

SEQ ID NO: 430379 - protein, 15 aa, Homo sapiens
  CDR3 for alpha chain variable domain of TCR clone 215190 (TRAV8-3, TRAJ11)
CAVGLLNSGYSTLTF

SEQ ID NO: 430380 - protein, 12 aa, Homo sapiens
  CDR3 for beta chain variable domain of TCR clone 215190 (TRBV14, TRBJ2-7)
CASSSLKGEQYF

SEQ ID NO: 430381 - protein, 15 aa, Homo sapiens
  CDR3 for alpha chain variable domain of TCR clone 215191 (TRAV2, TRAJ22)
CAVPSRGGSARQLTF

SEQ ID NO: 430382 - protein, 10 aa, Homo sapiens
  CDR3 for beta chain variable domain of TCR clone 215191 (TRBV27, TRBJ2-3)
CSSLGDTQYF

SEQ ID NO: 430383 - protein, 12 aa, Homo sapiens
  CDR3 for alpha chain variable domain of TCR clone 215192 (TRAV12-3, TRAJ17)
CAMTLTGNKLTF

SEQ ID NO: 430384 - protein, 15 aa, Homo sapiens
  CDR3 for beta chain variable domain of TCR clone 215192 (TRBV11-2, TRBJ1-6)
CASTLRGTGNSHLHF

SEQ ID NO: 430385 - protein, 18 aa, Homo sapiens
  CDR3 for alpha chain variable domain of TCR clone 215193 (TRAV13-1, TRAJ52)
CAAKNPNAGGTTYGKLTF

SEQ ID NO: 430386 - protein, 14 aa, Homo sapiens
  CDR3 for beta chain variable domain of TCR clone 215193 (TRBV7-3, TRBJ2-1)
CASSLAGGTNEQFF

SEQ ID NO: 430387 - protein, 15 aa, Homo sapiens
  CDR3 for alpha chain variable domain of TCR clone 215194 (TRAV3, TRAJ22)
RAVRDRGGSARQLTS

SEQ ID NO: 430388 - protein, 16 aa, Homo sapiens
  CDR3 for beta chain variable domain of TCR clone 215194 (TRBV5-4, TRBJ2-3)
CASQQPGAGGADTQYF

SEQ ID NO: 430389 - protein, 15 aa, Homo sapiens
  CDR3 for alpha chain variable domain of TCR clone 215195 (TRAV13-1, TRAJ44)
CGASRGGGTASKLTF

SEQ ID NO: 430390 - protein, 14 aa, Homo sapiens
  CDR3 for beta chain variable domain of TCR clone 215195 (TRBV7-2, TRBJ2-5)
CASSPRGSSETQYF

SEQ ID NO: 430391 - protein, 14 aa, Homo sapiens
  CDR3 for alpha chain variable domain of TCR clone 215196 (TRAV1-2, TRAJ8)
CASREDTGFQKLVF

SEQ ID NO: 430392 - protein, 15 aa, Homo sapiens
  CDR3 for beta chain variable domain of TCR clone 215196 (TRBV6-3, TRBJ2-7)
CASSSPGTVFYEQYF

SEQ ID NO: 430393 - protein, 12 aa, Homo sapiens
  CDR3 for alpha chain variable domain of TCR clone 215197 (TRAV1-1, TRAJ39)
CVVPVVGNMLTF

SEQ ID NO: 430394 - protein, 15 aa, Homo sapiens
  CDR3 for beta chain variable domain of TCR clone 215197 (TRBV19, TRBJ1-6)
CASSTQGAVGSHLHF

SEQ ID NO: 430395 - protein, 14 aa, Homo sapiens
  CDR3 for alpha chain variable domain of TCR clone 215198 (TRAV17, TRAJ57)
CATDPQGGSEKLVF

SEQ ID NO: 430396 - protein, 16 aa, Homo sapiens
  CDR3 for beta chain variable domain of TCR clone 215198 (TRBV20-1, TRBJ1-4)
SSAPGQGLLTNEKLFF

SEQ ID NO: 430397 - protein, 13 aa, Homo sapiens
  CDR3 for alpha chain variable domain of TCR clone 215199 (TRAV12-3, TRAJ13)
CAMSAGGYQKVTF

SEQ ID NO: 430398 - protein, 13 aa, Homo sapiens
  CDR3 for beta chain variable domain of TCR clone 215199 (TRBV7-7, TRBJ2-2)
CASSLTSAGELFF

SEQ ID NO: 430399 - protein, 15 aa, Homo sapiens
  CDR3 for alpha chain variable domain of TCR clone 215200 (TRAV21, TRAJ53)
CATLNSGGSNYKLTF

SEQ ID NO: 430400 - protein, 17 aa, Homo sapiens
  CDR3 for beta chain variable domain of TCR clone 215200 (TRBV20-1, TRBJ2-4)
CSARDWASGGRENIQYF

SEQ ID NO: 430401 - protein, 14 aa, Homo sapiens
  CDR3 for alpha chain variable domain of TCR clone 215201 (TRAV12-3, TRAJ5)
CAMTWDTGRRALTF

SEQ ID NO: 430402 - protein, 16 aa, Homo sapiens
  CDR3 for beta chain variable domain of TCR clone 215201 (TRBV13, TRBJ2-2)
CASSPRTGEHTGELFF

SEQ ID NO: 430403 - protein, 15 aa, Homo sapiens
  CDR3 for alpha chain variable domain of TCR clone 215202 (TRAV36/DV7, TRAJ44)
CAVCRNTGTASKLTF

SEQ ID NO: 430404 - protein, 11 aa, Homo sapiens
  CDR3 for beta chain variable domain of TCR clone 215202 (TRBV11-2, TRBJ2-2)
CASSLPGELFF

SEQ ID NO: 430405 - protein, 14 aa, Homo sapiens
  CDR3 for alpha chain variable domain of TCR clone 215203 (TRAV12-2, TRAJ45)
CALPERGGAEGLTF

SEQ ID NO: 430406 - protein, 16 aa, Homo sapiens
  CDR3 for beta chain variable domain of TCR clone 215203 (TRBV7-9, TRBJ2-1)
CASSDVAGGSYNEQFF

SEQ ID NO: 430407 - protein, 16 aa, Homo sapiens
  CDR3 for alpha chain variable domain of TCR clone 215204 (TRAV17, TRAJ23)
CATDAEDNRRKAYLRT

SEQ ID NO: 430408 - protein, 12 aa, Homo sapiens
  CDR3 for beta chain variable domain of TCR clone 215204 (TRBV2, TRBJ2-1)
CAKREGYNEQFF

SEQ ID NO: 430409 - protein, 15 aa, Homo sapiens
  CDR3 for alpha chain variable domain of TCR clone 215205 (TRAV17, TRAJ13)
CATVPNSGGYQKVTF

SEQ ID NO: 430410 - protein, 20 aa, Homo sapiens
  CDR3 for beta chain variable domain of TCR clone 215205 (TRBV28, TRBJ2-1)
CASTPIGRSPGLAGGNEQFF

SEQ ID NO: 430411 - protein, 14 aa, Homo sapiens
  CDR3 for alpha chain variable domain of TCR clone 215206 (TRAV3, TRAJ40)
CAVRDRRGTYKYIF

SEQ ID NO: 430412 - protein, 15 aa, Homo sapiens
  CDR3 for beta chain variable domain of TCR clone 215206 (TRBV11-1, TRBJ1-3)
CASTDPRAVGNTIYF

SEQ ID NO: 430413 - protein, 12 aa, Homo sapiens
  CDR3 for alpha chain variable domain of TCR clone 215207 (TRAV17, TRAJ6)
CATGGGSYIPTF

SEQ ID NO: 430414 - protein, 15 aa, Homo sapiens
  CDR3 for beta chain variable domain of TCR clone 215207 (TRBV19, TRBJ1-6)
CASSTQGAVGSPLHF

SEQ ID NO: 430415 - protein, 16 aa, Homo sapiens
  CDR3 for alpha chain variable domain of TCR clone 215208 (TRAV12-2, TRAJ6)
CATPLAGSGGSYIPPF

SEQ ID NO: 430416 - protein, 10 aa, Homo sapiens
  CDR3 for beta chain variable domain of TCR clone 215208 (TRBV28, TRBJ1-2)
CASSSDRAVF

SEQ ID NO: 430417 - protein, 15 aa, Homo sapiens
  CDR3 for alpha chain variable domain of TCR clone 215209 (TRAV23/DV6, TRAJ21)
CSKQRGRDNFNKFYF

SEQ ID NO: 430418 - protein, 11 aa, Homo sapiens
  CDR3 for beta chain variable domain of TCR clone 215209 (TRBV7-8, TRBJ2-7)
CASSLSLEQYF

SEQ ID NO: 430419 - protein, 12 aa, Homo sapiens
  CDR3 for alpha chain variable domain of TCR clone 215210 (TRAV21, TRAJ8)
CALNTGFQKLVF

SEQ ID NO: 430420 - protein, 15 aa, Homo sapiens
  CDR3 for beta chain variable domain of TCR clone 215210 (TRBV7-2, TRBJ2-5)
CASSLRGASGETQYV

SEQ ID NO: 430421 - protein, 12 aa, Homo sapiens
  CDR3 for alpha chain variable domain of TCR clone 215211 (TRAV17, TRAJ28)
WDSGAGSYQLTF

SEQ ID NO: 430422 - protein, 16 aa, Homo sapiens
  CDR3 for beta chain variable domain of TCR clone 215211 (TRBV7-9, TRBJ2-1)
CASSDVAGGSYNEQFF

SEQ ID NO: 430423 - protein, 13 aa, Homo sapiens
  CDR3 for alpha chain variable domain of TCR clone 215212 (TRAV13-2, TRAJ48)
CAEMDFGNEKLTF

SEQ ID NO: 430424 - protein, 20 aa, Homo sapiens
  CDR3 for beta chain variable domain of TCR clone 215212 (TRBV7-8, TRBJ2-2)
CASSHLFPGPTIHITGELFF

SEQ ID NO: 430425 - protein, 15 aa, Homo sapiens
  CDR3 for alpha chain variable domain of TCR clone 215213 (TRAV8-3, TRAJ11)
CAVGLLNSGYSTSPL

SEQ ID NO: 430426 - protein, 14 aa, Homo sapiens
  CDR3 for beta chain variable domain of TCR clone 215213 (TRBV4-1, TRBJ2-5)
CASSRSGSGETQYF

SEQ ID NO: 430427 - protein, 14 aa, Homo sapiens
  CDR3 for alpha chain variable domain of TCR clone 215214 (TRAV29/DV5, TRAJ44)
CAAFLVGTASKLTF

SEQ ID NO: 430428 - protein, 14 aa, Homo sapiens
  CDR3 for beta chain variable domain of TCR clone 215214 (TRBV7-3, TRBJ2-1)
CARSLTGGANEQFF

SEQ ID NO: 430429 - protein, 11 aa, Homo sapiens
  CDR3 for alpha chain variable domain of TCR clone 215215 (TRAV12-3, TRAJ41)
CAMNARKALNF

SEQ ID NO: 430430 - protein, 16 aa, Homo sapiens
  CDR3 for beta chain variable domain of TCR clone 215215 (TRBV7-8, TRBJ2-3)
CASSTEGQRETDTQYF

SEQ ID NO: 430431 - protein, 14 aa, Homo sapiens
  CDR3 for alpha chain variable domain of TCR clone 215216 (TRAV1-2, TRAJ16)
CAVNRFSEGHKLLF

SEQ ID NO: 430432 - protein, 15 aa, Homo sapiens
  CDR3 for beta chain variable domain of TCR clone 215216 (TRBV7-9, TRBJ1-6)
CASSSPGRGNSALHF

SEQ ID NO: 430433 - protein, 15 aa, Homo sapiens
  CDR3 for alpha chain variable domain of TCR clone 215217 (TRAV27, TRAJ38)
CAARRNAGNNRKLIW

SEQ ID NO: 430434 - protein, 15 aa, Homo sapiens
  CDR3 for beta chain variable domain of TCR clone 215217 (TRBV4-1, TRBJ2-7)
YASSQQGQGFDEQYF

SEQ ID NO: 430435 - protein, 12 aa, Homo sapiens
  CDR3 for alpha chain variable domain of TCR clone 215218 (TRAV21, TRAJ31)
CALAGNNARLMF

SEQ ID NO: 430436 - protein, 16 aa, Homo sapiens
  CDR3 for beta chain variable domain of TCR clone 215218 (TRBV27, TRBJ2-5)
CASSFGPGGTKETQYF

SEQ ID NO: 430437 - protein, 14 aa, Homo sapiens
  CDR3 for alpha chain variable domain of TCR clone 215219 (TRAV4, TRAJ41)
CLVGDGDSGYALNF

SEQ ID NO: 430438 - protein, 15 aa, Homo sapiens
  CDR3 for beta chain variable domain of TCR clone 215219 (TRBV27, TRBJ2-7)
CASSLVGGGADEQYF

SEQ ID NO: 430439 - protein, 12 aa, Homo sapiens
  CDR3 for alpha chain variable domain of TCR clone 215220 (TRAV3, TRAJ43)
CAVRDPNNDMRF

SEQ ID NO: 430440 - protein, 11 aa, Homo sapiens
  CDR3 for beta chain variable domain of TCR clone 215220 (TRBV12-4, TRBJ2-3)
CASTATDTQYF

SEQ ID NO: 430441 - protein, 15 aa, Homo sapiens
  CDR3 for alpha chain variable domain of TCR clone 215221 (TRAV3, TRAJ27)
CAVRDPLTNAGKSTF

SEQ ID NO: 430442 - protein, 15 aa, Homo sapiens
  CDR3 for beta chain variable domain of TCR clone 215221 (TRBV28, TRBJ2-1)
CASSIIAAGRSEQFF

SEQ ID NO: 430443 - protein, 15 aa, Homo sapiens
  CDR3 for alpha chain variable domain of TCR clone 215222 (TRAV8-3, TRAJ23)
CAVGDRYNQGGKLIF

SEQ ID NO: 430444 - protein, 16 aa, Homo sapiens
  CDR3 for beta chain variable domain of TCR clone 215222 (TRBV7-2, TRBJ2-1)
CASSLVAGAGYNEQFF

SEQ ID NO: 430445 - protein, 11 aa, Homo sapiens
  CDR3 for alpha chain variable domain of TCR clone 215223 (TRAV1-2, TRAJ20)
CAVSNDYKLSF

SEQ ID NO: 430446 - protein, 15 aa, Homo sapiens
  CDR3 for beta chain variable domain of TCR clone 215223 (TRBV27, TRBJ1-1)
CQQFIAGTGETEAFF

SEQ ID NO: 430447 - protein, 13 aa, Homo sapiens
  CDR3 for alpha chain variable domain of TCR clone 215224 (TRAV36/DV7, TRAJ54)
CAVCTQGAQKLVF

SEQ ID NO: 430448 - protein, 13 aa, Homo sapiens
  CDR3 for beta chain variable domain of TCR clone 215224 (TRBV7-6, TRBJ2-7)
CVSSLDHTHEQYF

SEQ ID NO: 430449 - protein, 16 aa, Homo sapiens
  CDR3 for alpha chain variable domain of TCR clone 215225 (TRAV3, TRAJ10)
CAVRDMRAGGGNKLTF

SEQ ID NO: 430450 - protein, 14 aa, Homo sapiens
  CDR3 for beta chain variable domain of TCR clone 215225 (TRBV28, TRBJ2-7)
CASSLYGGTYEQYF

SEQ ID NO: 430451 - protein, 15 aa, Homo sapiens
  CDR3 for alpha chain variable domain of TCR clone 215226 (TRAV4, TRAJ32)
CLVGEDGGATNKLIF

SEQ ID NO: 430452 - protein, 13 aa, Homo sapiens
  CDR3 for beta chain variable domain of TCR clone 215226 (TRBV7-3, TRBJ1-1)
CASSQDWGAEAFF

SEQ ID NO: 430453 - protein, 12 aa, Homo sapiens
  CDR3 for alpha chain variable domain of TCR clone 215227 (TRAV3, TRAJ20)
CAVRDGDYKLSF

SEQ ID NO: 430454 - protein, 13 aa, Homo sapiens
  CDR3 for beta chain variable domain of TCR clone 215227 (TRBV9, TRBJ2-1)
SASSVGQGGEQFF

SEQ ID NO: 430455 - protein, 12 aa, Homo sapiens
  CDR3 for alpha chain variable domain of TCR clone 215228 (TRAV8-4, TRAJ37)
CAVSGNTGKIIF

SEQ ID NO: 430456 - protein, 17 aa, Homo sapiens
  CDR3 for beta chain variable domain of TCR clone 215228 (TRBV7-2, TRBJ2-3)
CASSPQGRARVQDTQYF

SEQ ID NO: 430457 - protein, 14 aa, Homo sapiens
  CDR3 for alpha chain variable domain of TCR clone 215229 (TRAV13-1, TRAJ35)
CAASKGGLGNVLHC

SEQ ID NO: 430458 - protein, 15 aa, Homo sapiens
  CDR3 for beta chain variable domain of TCR clone 215229 (TRBV20-1, TRBJ2-7)
CSARDRVSGMDEQYF

SEQ ID NO: 430459 - protein, 11 aa, Homo sapiens
  CDR3 for alpha chain variable domain of TCR clone 215230 (TRAV12-1, TRAJ30)
CVVNGQDKIIF

SEQ ID NO: 430460 - protein, 17 aa, Homo sapiens
  CDR3 for beta chain variable domain of TCR clone 215230 (TRBV7-3, TRBJ2-3)
CASSLMKRMRGADTQYF

SEQ ID NO: 430461 - protein, 14 aa, Homo sapiens
  CDR3 for alpha chain variable domain of TCR clone 215231 (TRAV8-3, TRAJ12)
CAVGARDSSYKLIF

SEQ ID NO: 430462 - protein, 18 aa, Homo sapiens
  CDR3 for beta chain variable domain of TCR clone 215231 (TRBV11-2, TRBJ2-3)
CASSLGGASRGAPNTQYF

SEQ ID NO: 430463 - protein, 12 aa, Homo sapiens
  CDR3 for alpha chain variable domain of TCR clone 215232 (TRAV21, TRAJ23)
CAVMLQGAKLIF

SEQ ID NO: 430464 - protein, 14 aa, Homo sapiens
  CDR3 for beta chain variable domain of TCR clone 215232 (TRBV7-9, TRBJ1-4)
CAITEGEANEKLFF

SEQ ID NO: 430465 - protein, 12 aa, Homo sapiens
  CDR3 for alpha chain variable domain of TCR clone 215233 (TRAV13-1, TRAJ21)
CAAKEGFNKFYF

SEQ ID NO: 430466 - protein, 15 aa, Homo sapiens
  CDR3 for beta chain variable domain of TCR clone 215233 (TRBV27, TRBJ2-1)
CASSNGGGASNEQFF

SEQ ID NO: 430467 - protein, 16 aa, Homo sapiens
  CDR3 for alpha chain variable domain of TCR clone 215234 (TRAV26-1, TRAJ23)
CIVRVHPYNQGGKLIF

SEQ ID NO: 430468 - protein, 15 aa, Homo sapiens
  CDR3 for beta chain variable domain of TCR clone 215234 (TRBV7-9, TRBJ1-4)
CASSARTGGNEKLFF

SEQ ID NO: 430469 - protein, 21 aa, Homo sapiens
  CDR3 for alpha chain variable domain of TCR clone 215235 (TRAV1-1, TRAJ6)
CLLLLCCERLERTGGSYIPTF

SEQ ID NO: 430470 - protein, 13 aa, Homo sapiens
  CDR3 for beta chain variable domain of TCR clone 215235 (TRBV10-2, TRBJ2-7)
CASGASGGYEQYF

SEQ ID NO: 430471 - protein, 15 aa, Homo sapiens
  CDR3 for alpha chain variable domain of TCR clone 215236 (TRAV27, TRAJ45)
CRSPQSGGGADVLTF

SEQ ID NO: 430472 - protein, 12 aa, Homo sapiens
  CDR3 for beta chain variable domain of TCR clone 215236 (TRBV24-1, TRBJ2-7)
CATSDPGYEQYF

SEQ ID NO: 430473 - protein, 13 aa, Homo sapiens
  CDR3 for alpha chain variable domain of TCR clone 215237 (TRAV9-2, TRAJ58)
CSATGTSGSRLTF

SEQ ID NO: 430474 - protein, 14 aa, Homo sapiens
  CDR3 for beta chain variable domain of TCR clone 215237 (TRBV7-9, TRBJ2-1)
CASSPRDSLYEQFL

SEQ ID NO: 430475 - protein, 18 aa, Homo sapiens
  CDR3 for alpha chain variable domain of TCR clone 215238 (TRAV26-1, TRAJ27)
CIVRPCFNYNTNAGKSTF

SEQ ID NO: 430476 - protein, 14 aa, Homo sapiens
  CDR3 for beta chain variable domain of TCR clone 215238 (TRBV10-3, TRBJ1-6)
CAISVDGDESPLHF

SEQ ID NO: 430477 - protein, 13 aa, Homo sapiens
  CDR3 for alpha chain variable domain of TCR clone 215239 (TRAV27, TRAJ29)
CAGAHSGNTHLVF

SEQ ID NO: 430478 - protein, 15 aa, Homo sapiens
  CDR3 for beta chain variable domain of TCR clone 215239 (TRBV15, TRBJ1-4)
CATSRDMGSYEKLFF

SEQ ID NO: 430479 - protein, 16 aa, Homo sapiens
  CDR3 for alpha chain variable domain of TCR clone 215240 (TRAV16, TRAJ4)
CALSRMFSGGYNKLIF

SEQ ID NO: 430480 - protein, 13 aa, Homo sapiens
  CDR3 for beta chain variable domain of TCR clone 215240 (TRBV9, TRBJ2-1)
CASSPSGGNEQFF

SEQ ID NO: 430481 - protein, 15 aa, Homo sapiens
  CDR3 for alpha chain variable domain of TCR clone 215241 (TRAV12-2, TRAJ26)
CAVNSHSNYGQNFVF

SEQ ID NO: 430482 - protein, 13 aa, Homo sapiens
  CDR3 for beta chain variable domain of TCR clone 215241 (TRBV10-3, TRBJ1-2)
CAINADLNYGYTF

SEQ ID NO: 430483 - protein, 14 aa, Homo sapiens
  CDR3 for alpha chain variable domain of TCR clone 215242 (TRAV12-2, TRAJ13)
CAVKKTGGYQKVTF

SEQ ID NO: 430484 - protein, 14 aa, Homo sapiens
  CDR3 for beta chain variable domain of TCR clone 215242 (TRBV12-4, TRBJ2-7)
CASSLTGRAYEQYF

SEQ ID NO: 430485 - protein, 16 aa, Homo sapiens
  CDR3 for alpha chain variable domain of TCR clone 215243 (TRAV16, TRAJ4)
CITVLPFSSGYNKLIF

SEQ ID NO: 430486 - protein, 14 aa, Homo sapiens
  CDR3 for beta chain variable domain of TCR clone 215243 (TRBV19, TRBJ2-7)
CASSMGQGAIEQYF

SEQ ID NO: 430487 - protein, 15 aa, Homo sapiens
  CDR3 for alpha chain variable domain of TCR clone 215244 (TRAV8-3, TRAJ11)
CAVGLLNSGCSTLTF

SEQ ID NO: 430488 - protein, 16 aa, Homo sapiens
  CDR3 for beta chain variable domain of TCR clone 215244 (TRBV7-9, TRBJ1-2)
CASSLGFSSGEDRYTF

SEQ ID NO: 430489 - protein, 14 aa, Homo sapiens
  CDR3 for alpha chain variable domain of TCR clone 215245 (TRAV13-2, TRAJ32)
CAENYGGATNKLIF

SEQ ID NO: 430490 - protein, 15 aa, Homo sapiens
  CDR3 for beta chain variable domain of TCR clone 215245 (TRBV12-4, TRBJ2-5)
CASTLNSGRGKTQYF

SEQ ID NO: 430491 - protein, 14 aa, Homo sapiens
  CDR3 for alpha chain variable domain of TCR clone 215246 (TRAV21, TRAJ23)
CAIMIYNQGGKLIF

SEQ ID NO: 430492 - protein, 18 aa, Homo sapiens
  CDR3 for beta chain variable domain of TCR clone 215246 (TRBV20-1, TRBJ2-6)
SAVLRRHQLTARANVLTF

SEQ ID NO: 430493 - protein, 14 aa, Homo sapiens
  CDR3 for alpha chain variable domain of TCR clone 215247 (TRAV17, TRAJ57)
CATDPQGGSEKLVF

SEQ ID NO: 430494 - protein, 15 aa, Homo sapiens
  CDR3 for beta chain variable domain of TCR clone 215247 (TRBV6-1, TRBJ2-4)
CASSEAVWTINIQYF

SEQ ID NO: 430495 - protein, 13 aa, Homo sapiens
  CDR3 for alpha chain variable domain of TCR clone 215248 (TRAV26-1, TRAJ33)
CIVRVEDNYQLIW

SEQ ID NO: 430496 - protein, 16 aa, Homo sapiens
  CDR3 for beta chain variable domain of TCR clone 215248 (TRBV15, TRBJ2-7)
CATSRDRGRRSGEQYF

SEQ ID NO: 430497 - protein, 16 aa, Homo sapiens
  CDR3 for alpha chain variable domain of TCR clone 215249 (TRAV12-3, TRAJ53)
CAMSPGSGGSNYKLTF

SEQ ID NO: 430498 - protein, 16 aa, Homo sapiens
  CDR3 for beta chain variable domain of TCR clone 215249 (TRBV27, TRBJ2-2)
CASSSSGVSNTGELFF

SEQ ID NO: 430499 - protein, 13 aa, Homo sapiens
  CDR3 for alpha chain variable domain of TCR clone 215250 (TRAV12-3, TRAJ43)
CAMIRPNNNDMRF

SEQ ID NO: 430500 - protein, 16 aa, Homo sapiens
  CDR3 for beta chain variable domain of TCR clone 215250 (TRBV7-9, TRBJ2-3)
CASSLGAGGPTDTQYF

SEQ ID NO: 430501 - protein, 15 aa, Homo sapiens
  CDR3 for alpha chain variable domain of TCR clone 215251 (TRAV21, TRAJ24)
CAARSSTDSWEKLQF

SEQ ID NO: 430502 - protein, 14 aa, Homo sapiens
  CDR3 for beta chain variable domain of TCR clone 215251 (TRBV11-2, TRBJ2-5)
CASSRTGGIETQYF

SEQ ID NO: 430503 - protein, 15 aa, Homo sapiens
  CDR3 for alpha chain variable domain of TCR clone 215252 (TRAV26-1, TRAJ21)
CIVIVPNYNFNKFYF

SEQ ID NO: 430504 - protein, 16 aa, Homo sapiens
  CDR3 for beta chain variable domain of TCR clone 215252 (TRBV7-9, TRBJ2-3)
CASSLQGNPGTDTQYF

SEQ ID NO: 430505 - protein, 16 aa, Homo sapiens
  CDR3 for alpha chain variable domain of TCR clone 215253 (TRAV23/DV6, TRAJ48)
CAASGVVNFGNEKLTF

SEQ ID NO: 430506 - protein, 15 aa, Homo sapiens
  CDR3 for beta chain variable domain of TCR clone 215253 (TRBV7-2, TRBJ2-3)
CASSLNLRDTDTQYF

SEQ ID NO: 430507 - protein, 13 aa, Homo sapiens
  CDR3 for alpha chain variable domain of TCR clone 215254 (TRAV13-2, TRAJ15)
CAERPQAGTALIF

SEQ ID NO: 430508 - protein, 15 aa, Homo sapiens
  CDR3 for beta chain variable domain of TCR clone 215254 (TRBV11-2, TRBJ2-7)
CASRSPGTGGYEQYF

SEQ ID NO: 430509 - protein, 17 aa, Homo sapiens
  CDR3 for alpha chain variable domain of TCR clone 215255 (TRAV8-6, TRAJ8)
CAVKEGVENTGLQKLVF

SEQ ID NO: 430510 - protein, 12 aa, Homo sapiens
  CDR3 for beta chain variable domain of TCR clone 215255 (TRBV19, TRBJ1-4)
CASKDWPGGLFF

SEQ ID NO: 430511 - protein, 15 aa, Homo sapiens
  CDR3 for alpha chain variable domain of TCR clone 215256 (TRAV26-1, TRAJ37)
CIVENGSGNTGKLIF

SEQ ID NO: 430512 - protein, 15 aa, Homo sapiens
  CDR3 for beta chain variable domain of TCR clone 215256 (TRBV12-4, TRBJ2-1)
CASSLLATGNNEQFF

SEQ ID NO: 430513 - protein, 12 aa, Homo sapiens
  CDR3 for alpha chain variable domain of TCR clone 215257 (TRAV21, TRAJ33)
CAKMDSNYQLIW

SEQ ID NO: 430514 - protein, 13 aa, Homo sapiens
  CDR3 for beta chain variable domain of TCR clone 215257 (TRBV2, TRBJ2-7)
CSSLTSGGYEQYF

SEQ ID NO: 430515 - protein, 16 aa, Homo sapiens
  CDR3 for alpha chain variable domain of TCR clone 215258 (TRAV4, TRAJ18)
CCVLLIGGSTLGRLYF

SEQ ID NO: 430516 - protein, 14 aa, Homo sapiens
  CDR3 for beta chain variable domain of TCR clone 215258 (TRBV19, TRBJ2-7)
CASTVQGRPYEQYF

SEQ ID NO: 430517 - protein, 16 aa, Homo sapiens
  CDR3 for alpha chain variable domain of TCR clone 215259 (TRAV4, TRAJ18)
CCVLLIGGSTLVRLYF

SEQ ID NO: 430518 - protein, 12 aa, Homo sapiens
  CDR3 for beta chain variable domain of TCR clone 215259 (TRBV6-3, TRBJ2-7)
CASSLTPYEQYF

SEQ ID NO: 430519 - protein, 14 aa, Homo sapiens
  CDR3 for alpha chain variable domain of TCR clone 215260 (TRAV12-2, TRAJ17)
CAVLVKAAGNKRTF

SEQ ID NO: 430520 - protein, 17 aa, Homo sapiens
  CDR3 for beta chain variable domain of TCR clone 215260 (TRBV20-1, TRBJ2-2)
CSASGSGQGGLTGELFF

SEQ ID NO: 430521 - protein, 15 aa, Homo sapiens
  CDR3 for alpha chain variable domain of TCR clone 215261 (TRAV3, TRAJ3)
CAVRDRDSSASKIIF

SEQ ID NO: 430522 - protein, 18 aa, Homo sapiens
  CDR3 for beta chain variable domain of TCR clone 215261 (TRBV25-1, TRBJ1-2)
CASSRLQNGQGLIFGYTF

SEQ ID NO: 430523 - protein, 14 aa, Homo sapiens
  CDR3 for alpha chain variable domain of TCR clone 215262 (TRAV30, TRAJ26)
CGTEIVSYGQNFVF

SEQ ID NO: 430524 - protein, 13 aa, Homo sapiens
  CDR3 for beta chain variable domain of TCR clone 215262 (TRBV7-3, TRBJ1-1)
CASRQDWGAEAFF

SEQ ID NO: 430525 - protein, 15 aa, Homo sapiens
  CDR3 for alpha chain variable domain of TCR clone 215263 (TRAV21, TRAJ38)
CAVRQDAGNNRKLIW

SEQ ID NO: 430526 - protein, 16 aa, Homo sapiens
  CDR3 for beta chain variable domain of TCR clone 215263 (TRBV4-2, TRBJ1-1)
CASRPLDGGGDTEALF

SEQ ID NO: 430527 - protein, 15 aa, Homo sapiens
  CDR3 for alpha chain variable domain of TCR clone 215264 (TRAV12-1, TRAJ44)
WVADLPTGTASKLTF

SEQ ID NO: 430528 - protein, 16 aa, Homo sapiens
  CDR3 for beta chain variable domain of TCR clone 215264 (TRBV12-5, TRBJ2-5)
CASGPRTSGNQETQYF

SEQ ID NO: 430529 - protein, 14 aa, Homo sapiens
  CDR3 for alpha chain variable domain of TCR clone 215265 (TRAV12-1, TRAJ46)
CVVTAKSSGDKLTF

SEQ ID NO: 430530 - protein, 16 aa, Homo sapiens
  CDR3 for beta chain variable domain of TCR clone 215265 (TRBV4-1, TRBJ2-3)
RQQQDPAGGPLDTQYF

SEQ ID NO: 430531 - protein, 11 aa, Homo sapiens
  CDR3 for alpha chain variable domain of TCR clone 215266 (TRAV16, TRAJ49)
FSLNTGNQFYF

SEQ ID NO: 430532 - protein, 12 aa, Homo sapiens
  CDR3 for beta chain variable domain of TCR clone 215266 (TRBV7-9, TRBJ1-4)
CASSTDREKLFF

SEQ ID NO: 430533 - protein, 14 aa, Homo sapiens
  CDR3 for alpha chain variable domain of TCR clone 215267 (TRAV14/DV4, TRAJ42)
CPRGSLRSQGNLIF

SEQ ID NO: 430534 - protein, 14 aa, Homo sapiens
  CDR3 for beta chain variable domain of TCR clone 215267 (TRBV18, TRBJ2-5)
CASSPGVSQETQYF

SEQ ID NO: 430535 - protein, 12 aa, Homo sapiens
  CDR3 for alpha chain variable domain of TCR clone 215268 (TRAV12-3, TRAJ31)
CAMSVPNARLMF

SEQ ID NO: 430536 - protein, 12 aa, Homo sapiens
  CDR3 for beta chain variable domain of TCR clone 215268 (TRBV11-2, TRBJ2-1)
CASSVRREGQFF

SEQ ID NO: 430537 - protein, 14 aa, Homo sapiens
  CDR3 for alpha chain variable domain of TCR clone 215269 (TRAV12-2, TRAJ6)
CASKWGGGSYIPTF

SEQ ID NO: 430538 - protein, 15 aa, Homo sapiens
  CDR3 for beta chain variable domain of TCR clone 215269 (TRBV7-2, TRBJ2-3)
CASSLAGAFIDTQYF

SEQ ID NO: 430539 - protein, 12 aa, Homo sapiens
  CDR3 for alpha chain variable domain of TCR clone 215270 (TRAV12-3, TRAJ21)
CAMFNNFNKFYF

SEQ ID NO: 430540 - protein, 16 aa, Homo sapiens
  CDR3 for beta chain variable domain of TCR clone 215270 (TRBV7-9, TRBJ1-2)
CASSVAPLRAAYGYTF

SEQ ID NO: 430541 - protein, 13 aa, Homo sapiens
  CDR3 for alpha chain variable domain of TCR clone 215271 (TRAV26-2, TRAJ43)
CILIAVNNNNMRF

SEQ ID NO: 430542 - protein, 15 aa, Homo sapiens
  CDR3 for beta chain variable domain of TCR clone 215271 (TRBV7-2, TRBJ2-1)
CASTHGTGIYNEQFF

SEQ ID NO: 430543 - protein, 10 aa, Homo sapiens
  CDR3 for alpha chain variable domain of TCR clone 215272 (TRAV30, TRAJ48)
CGIGNEKLTF

SEQ ID NO: 430544 - protein, 13 aa, Homo sapiens
  CDR3 for beta chain variable domain of TCR clone 215272 (TRBV10-3, TRBJ2-7)
CASKLTVNYEQYF

SEQ ID NO: 430545 - protein, 14 aa, Homo sapiens
  CDR3 for alpha chain variable domain of TCR clone 215273 (TRAV16, TRAJ33)
CAPSAMDSNYQLIW

SEQ ID NO: 430546 - protein, 15 aa, Homo sapiens
  CDR3 for beta chain variable domain of TCR clone 215273 (TRBV28, TRBJ2-7)
CASSLEAYPIYEQYF

SEQ ID NO: 430547 - protein, 13 aa, Homo sapiens
  CDR3 for alpha chain variable domain of TCR clone 215274 (TRAV17, TRAJ26)
CATVDNYGQNFVF

SEQ ID NO: 430548 - protein, 16 aa, Homo sapiens
  CDR3 for beta chain variable domain of TCR clone 215274 (TRBV2, TRBJ2-1)
CASSVGRSLSYNEQFF

SEQ ID NO: 430549 - protein, 18 aa, Homo sapiens
  CDR3 for alpha chain variable domain of TCR clone 215275 (TRAV29/DV5, TRAJ52)
CAAGFRGAGGTSYGKLTF

SEQ ID NO: 430550 - protein, 19 aa, Homo sapiens
  CDR3 for beta chain variable domain of TCR clone 215275 (TRBV6-3, TRBJ1-2)
CASSYSKGRTGPPNYGYTF

SEQ ID NO: 430551 - protein, 14 aa, Homo sapiens
  CDR3 for alpha chain variable domain of TCR clone 215276 (TRAV4, TRAJ17)
CLVGDMAAGNKLTF

SEQ ID NO: 430552 - protein, 17 aa, Homo sapiens
  CDR3 for beta chain variable domain of TCR clone 215276 (TRBV4-1, TRBJ2-7)
CASSPVAGGGTSSTSGR

SEQ ID NO: 430553 - protein, 12 aa, Homo sapiens
  CDR3 for alpha chain variable domain of TCR clone 215277 (TRAV21, TRAJ12)
FAVMDSSYKLIF

SEQ ID NO: 430554 - protein, 16 aa, Homo sapiens
  CDR3 for beta chain variable domain of TCR clone 215277 (TRBV7-9, TRBJ2-5)
CASRLEIGTRKETQYF

SEQ ID NO: 430555 - protein, 12 aa, Homo sapiens
  CDR3 for alpha chain variable domain of TCR clone 215278 (TRAV12-2, TRAJ47)
CAVAEYGNKLVF

SEQ ID NO: 430556 - protein, 16 aa, Homo sapiens
  CDR3 for beta chain variable domain of TCR clone 215278 (TRBV13, TRBJ2-2)
CASSPRTGEHTGELFF

SEQ ID NO: 430557 - protein, 12 aa, Homo sapiens
  CDR3 for alpha chain variable domain of TCR clone 215279 (TRAV12-1, TRAJ40)
CVVYSGTYKYIF

SEQ ID NO: 430558 - protein, 16 aa, Homo sapiens
  CDR3 for beta chain variable domain of TCR clone 215279 (TRBV3-1, TRBJ2-5)
CASSPGQFNGFGTQCF

SEQ ID NO: 430559 - protein, 14 aa, Homo sapiens
  CDR3 for alpha chain variable domain of TCR clone 215280 (TRAV12-1, TRAJ17)
CVVNYKAAGNKLTF

SEQ ID NO: 430560 - protein, 17 aa, Homo sapiens
  CDR3 for beta chain variable domain of TCR clone 215280 (TRBV18, TRBJ2-2)
CASSPPGLNANTGELFF

SEQ ID NO: 430561 - protein, 17 aa, Homo sapiens
  CDR3 for alpha chain variable domain of TCR clone 215281 (TRAV3, TRAJ42)
CAVRDRDYGGSQGNLIF

SEQ ID NO: 430562 - protein, 13 aa, Homo sapiens
  CDR3 for beta chain variable domain of TCR clone 215281 (TRBV5-5, TRBJ1-2)
CASSFWRGEDYTF

SEQ ID NO: 430563 - protein, 17 aa, Homo sapiens
  CDR3 for alpha chain variable domain of TCR clone 215282 (TRAV8-1, TRAJ42)
CAVISMNYGGSQGNLIF

SEQ ID NO: 430564 - protein, 16 aa, Homo sapiens
  CDR3 for beta chain variable domain of TCR clone 215282 (TRBV7-3, TRBJ2-2)
CASSLKRGTLSGELFF

SEQ ID NO: 430565 - protein, 10 aa, Homo sapiens
  CDR3 for alpha chain variable domain of TCR clone 215283 (TRAV1-2, TRAJ31)
CVSEDARLMF

SEQ ID NO: 430566 - protein, 16 aa, Homo sapiens
  CDR3 for beta chain variable domain of TCR clone 215283 (TRBV5-1, TRBJ2-1)
CASSIRSGGSYNEQFF

SEQ ID NO: 430567 - protein, 14 aa, Homo sapiens
  CDR3 for alpha chain variable domain of TCR clone 215284 (TRAV23/DV6, TRAJ8)
CAASKNTGFQKPVF

SEQ ID NO: 430568 - protein, 16 aa, Homo sapiens
  CDR3 for beta chain variable domain of TCR clone 215284 (TRBV4-1, TRBJ2-6)
CASSQVGDPGANVLTF

SEQ ID NO: 430569 - protein, 17 aa, Homo sapiens
  CDR3 for alpha chain variable domain of TCR clone 215285 (TRAV16, TRAJ58)
CITVLSNGETSGSRLTF

SEQ ID NO: 430570 - protein, 13 aa, Homo sapiens
  CDR3 for beta chain variable domain of TCR clone 215285 (TRBV20-1, TRBJ2-2)
CGASAAGTGELFF

SEQ ID NO: 430571 - protein, 14 aa, Homo sapiens
  CDR3 for alpha chain variable domain of TCR clone 215286 (TRAV12-3, TRAJ10)
SHLPLTGGGNNLTF

SEQ ID NO: 430572 - protein, 17 aa, Homo sapiens
  CDR3 for beta chain variable domain of TCR clone 215286 (TRBV28, TRBJ2-3)
CASSPTPAGGRVDTQYF

SEQ ID NO: 430573 - protein, 14 aa, Homo sapiens
  CDR3 for alpha chain variable domain of TCR clone 215287 (TRAV13-1, TRAJ44)
CAAKATGTASKLTF

SEQ ID NO: 430574 - protein, 14 aa, Homo sapiens
  CDR3 for beta chain variable domain of TCR clone 215287 (TRBV5-7, TRBJ2-4)
CASTLSGVKNIQYF

SEQ ID NO: 430575 - protein, 11 aa, Homo sapiens
  CDR3 for alpha chain variable domain of TCR clone 215288 (TRAV12-1, TRAJ34)
CVVNKGRELIF

SEQ ID NO: 430576 - protein, 12 aa, Homo sapiens
  CDR3 for beta chain variable domain of TCR clone 215288 (TRBV2, TRBJ2-1)
CAYGPPGNEQCF

SEQ ID NO: 430577 - protein, 16 aa, Homo sapiens
  CDR3 for alpha chain variable domain of TCR clone 215289 (TRAV3, TRAJ27)
CAVRDPHGTNAGKSTF

SEQ ID NO: 430578 - protein, 15 aa, Homo sapiens
  CDR3 for beta chain variable domain of TCR clone 215289 (TRBV20-1, TRBJ2-7)
CSARDRVSGMDEQYF

SEQ ID NO: 430579 - protein, 11 aa, Homo sapiens
  CDR3 for alpha chain variable domain of TCR clone 215290 (TRAV13-1, TRAJ40)
CAVSGTYKYIL

SEQ ID NO: 430580 - protein, 13 aa, Homo sapiens
  CDR3 for beta chain variable domain of TCR clone 215290 (TRBV19, TRBJ1-5)
CASSIGGNQPQHF

SEQ ID NO: 430581 - protein, 14 aa, Homo sapiens
  CDR3 for alpha chain variable domain of TCR clone 215291 (TRAV35, TRAJ46)
CAGPQKSSGDKLTF

SEQ ID NO: 430582 - protein, 12 aa, Homo sapiens
  CDR3 for beta chain variable domain of TCR clone 215291 (TRBV19, TRBJ2-1)
CASSMQYTEQFF

SEQ ID NO: 430583 - protein, 12 aa, Homo sapiens
  CDR3 for alpha chain variable domain of TCR clone 215292 (TRAV13-1, TRAJ40)
CAAIAYLRNLQI

SEQ ID NO: 430584 - protein, 16 aa, Homo sapiens
  CDR3 for beta chain variable domain of TCR clone 215292 (TRBV3-1, TRBJ2-3)
CISGPAAKGGGDTQYF

SEQ ID NO: 430585 - protein, 18 aa, Homo sapiens
  CDR3 for alpha chain variable domain of TCR clone 215293 (TRAV21, TRAJ52)
CAVRPSPAGGTSYGKLPF

SEQ ID NO: 430586 - protein, 15 aa, Homo sapiens
  CDR3 for beta chain variable domain of TCR clone 215293 (TRBV2, TRBJ2-1)
CASSELAGSYNEQFF

SEQ ID NO: 430587 - protein, 14 aa, Homo sapiens
  CDR3 for alpha chain variable domain of TCR clone 215294 (TRAV12-2, TRAJ22)
CAARFSGSARQLTF

SEQ ID NO: 430588 - protein, 13 aa, Homo sapiens
  CDR3 for beta chain variable domain of TCR clone 215294 (TRBV6-1, TRBJ2-1)
CASTGTGLNEQFF

SEQ ID NO: 430589 - protein, 14 aa, Homo sapiens
  CDR3 for alpha chain variable domain of TCR clone 215295 (TRAV13-1, TRAJ9)
CAASALIGGFKTIF

SEQ ID NO: 430590 - protein, 13 aa, Homo sapiens
  CDR3 for beta chain variable domain of TCR clone 215295 (TRBV20-1, TRBJ1-1)
CSAGTVGNAEAFF

SEQ ID NO: 430591 - protein, 15 aa, Homo sapiens
  CDR3 for alpha chain variable domain of TCR clone 215296 (TRAV23/DV6, TRAJ28)
CAALLAYSEAGSYQL

SEQ ID NO: 430592 - protein, 15 aa, Homo sapiens
  CDR3 for beta chain variable domain of TCR clone 215296 (TRBV7-2, TRBJ2-1)
CASSLVAGRYNEQFF

SEQ ID NO: 430593 - protein, 16 aa, Homo sapiens
  CDR3 for alpha chain variable domain of TCR clone 215297 (TRAV23/DV6, TRAJ52)
CAASMNGGTSYGKLTF

SEQ ID NO: 430594 - protein, 15 aa, Homo sapiens
  CDR3 for beta chain variable domain of TCR clone 215297 (TRBV7-3, TRBJ2-2)
CASSLYGGDTGELFF

SEQ ID NO: 430595 - protein, 15 aa, Homo sapiens
  CDR3 for alpha chain variable domain of TCR clone 215298 (TRAV8-3, TRAJ45)
CASSYSGGGADGFTF

SEQ ID NO: 430596 - protein, 15 aa, Homo sapiens
  CDR3 for beta chain variable domain of TCR clone 215298 (TRBV27, TRBJ1-4)
CASSPRHATNEKLFF

SEQ ID NO: 430597 - protein, 12 aa, Homo sapiens
  CDR3 for alpha chain variable domain of TCR clone 215299 (TRAV12-2, TRAJ20)
CAVRPSDYKRSF

SEQ ID NO: 430598 - protein, 13 aa, Homo sapiens
  CDR3 for beta chain variable domain of TCR clone 215299 (TRBV5-1, TRBJ1-5)
CASSPGTGGGPYI

SEQ ID NO: 430599 - protein, 11 aa, Homo sapiens
  CDR3 for alpha chain variable domain of TCR clone 215300 (TRAV27, TRAJ47)
CRSNQGNKLVF

SEQ ID NO: 430600 - protein, 16 aa, Homo sapiens
  CDR3 for beta chain variable domain of TCR clone 215300 (TRBV7-9, TRBJ2-1)
CASSDVAGGSYNEQFC

SEQ ID NO: 430601 - protein, 13 aa, Homo sapiens
  CDR3 for alpha chain variable domain of TCR clone 215301 (TRAV38-1, TRAJ42)
CARWGGCQGNLIF

SEQ ID NO: 430602 - protein, 17 aa, Homo sapiens
  CDR3 for beta chain variable domain of TCR clone 215301 (TRBV20-1, TRBJ2-1)
CSARDPLAGVWDNEQFF

SEQ ID NO: 430603 - protein, 19 aa, Homo sapiens
  CDR3 for alpha chain variable domain of TCR clone 215302 (TRAV21, TRAJ20)
RLVTQPPTSVLPNDYKLSF

SEQ ID NO: 430604 - protein, 14 aa, Homo sapiens
  CDR3 for beta chain variable domain of TCR clone 215302 (TRBV4-3, TRBJ2-2)
CASSQGHVTGELFF

SEQ ID NO: 430605 - protein, 12 aa, Homo sapiens
  CDR3 for alpha chain variable domain of TCR clone 215303 (TRAV12-2, TRAJ52)
IGGGTRYGKLTF

SEQ ID NO: 430606 - protein, 13 aa, Homo sapiens
  CDR3 for beta chain variable domain of TCR clone 215303 (TRBV12-4, TRBJ1-1)
CASSPGTGFGAFF

SEQ ID NO: 430607 - protein, 17 aa, Homo sapiens
  CDR3 for alpha chain variable domain of TCR clone 215304 (TRAV3, TRAJ12)
CAVRDGGRMDSSYKLIF

SEQ ID NO: 430608 - protein, 12 aa, Homo sapiens
  CDR3 for beta chain variable domain of TCR clone 215304 (TRBV12-5, TRBJ2-5)
CASGQGVETQYF

SEQ ID NO: 430609 - protein, 14 aa, Homo sapiens
  CDR3 for alpha chain variable domain of TCR clone 215305 (TRAV12-2, TRAJ40)
CAVKIPSGTYKYIF

SEQ ID NO: 430610 - protein, 14 aa, Homo sapiens
  CDR3 for beta chain variable domain of TCR clone 215305 (TRBV20-1, TRBJ1-1)
CSAQAWIGGTEAFF

SEQ ID NO: 430611 - protein, 14 aa, Homo sapiens
  CDR3 for alpha chain variable domain of TCR clone 215306 (TRAV36/DV7, TRAJ48)
CAQRRDSGNEKLTF

SEQ ID NO: 430612 - protein, 14 aa, Homo sapiens
  CDR3 for beta chain variable domain of TCR clone 215306 (TRBV28, TRBJ2-4)
CASTQVTGVNIQYF

SEQ ID NO: 430613 - protein, 15 aa, Homo sapiens
  CDR3 for alpha chain variable domain of TCR clone 215307 (TRAV8-3, TRAJ45)
CASSYSGGGADGLTF

SEQ ID NO: 430614 - protein, 19 aa, Homo sapiens
  CDR3 for beta chain variable domain of TCR clone 215307 (TRBV7-2, TRBJ2-3)
WASSFLSRNWGGGTDTQYF

SEQ ID NO: 430615 - protein, 14 aa, Homo sapiens
  CDR3 for alpha chain variable domain of TCR clone 215308 (TRAV3, TRAJ21)
CALGRGSTNFTLDL

SEQ ID NO: 430616 - protein, 15 aa, Homo sapiens
  CDR3 for beta chain variable domain of TCR clone 215308 (TRBV11-3, TRBJ2-3)
CASLKDGREGDTQYF

SEQ ID NO: 430617 - protein, 16 aa, Homo sapiens
  CDR3 for alpha chain variable domain of TCR clone 215309 (TRAV12-1, TRAJ45)
CVVIRYSGGGADGITF

SEQ ID NO: 430618 - protein, 12 aa, Homo sapiens
  CDR3 for beta chain variable domain of TCR clone 215309 (TRBV6-5, TRBJ2-2)
CASRQITGELFF

SEQ ID NO: 430619 - protein, 14 aa, Homo sapiens
  CDR3 for alpha chain variable domain of TCR clone 215310 (TRAV3, TRAJ33)
CAVRDMDSNYQLIC

SEQ ID NO: 430620 - protein, 19 aa, Homo sapiens
  CDR3 for beta chain variable domain of TCR clone 215310 (TRBV7-3, TRBJ1-2)
CASSFPQGNDGELWLHLRF

SEQ ID NO: 430621 - protein, 16 aa, Homo sapiens
  CDR3 for alpha chain variable domain of TCR clone 215311 (TRAV23/DV6, )
CAEPDIQNPDAAVYQL

SEQ ID NO: 430622 - protein, 15 aa, Homo sapiens
  CDR3 for beta chain variable domain of TCR clone 215311 (TRBV12-4, TRBJ2-5)
CASTLNSGRGETQYF

SEQ ID NO: 430623 - protein, 13 aa, Homo sapiens
  CDR3 for alpha chain variable domain of TCR clone 215312 (TRAV16, TRAJ48)
CSPLNFGNEKLTF

SEQ ID NO: 430624 - protein, 10 aa, Homo sapiens
  CDR3 for beta chain variable domain of TCR clone 215312 (TRBV7-9, TRBJ2-3)
CQQPTDTQYF

SEQ ID NO: 430625 - protein, 11 aa, Homo sapiens
  CDR3 for alpha chain variable domain of TCR clone 215313 (TRAV21, TRAJ11)
RAVNGYSTLTF

SEQ ID NO: 430626 - protein, 11 aa, Homo sapiens
  CDR3 for beta chain variable domain of TCR clone 215313 (TRBV19, TRBJ1-1)
CASSIGSETFF

SEQ ID NO: 430627 - protein, 16 aa, Homo sapiens
  CDR3 for alpha chain variable domain of TCR clone 215314 (TRAV30, TRAJ24)
CGTEIVDADSWGNFQL

SEQ ID NO: 430628 - protein, 14 aa, Homo sapiens
  CDR3 for beta chain variable domain of TCR clone 215314 (TRBV12-5, TRBJ2-5)
CASGSRTHQETQYF

SEQ ID NO: 430629 - protein, 15 aa, Homo sapiens
  CDR3 for alpha chain variable domain of TCR clone 215315 (TRAV3, )
CAVRDCLNACNNHIQ

SEQ ID NO: 430630 - protein, 15 aa, Homo sapiens
  CDR3 for beta chain variable domain of TCR clone 215315 (TRBV6-5, TRBJ2-1)
CASSYDAGAGNEQFF

SEQ ID NO: 430631 - protein, 13 aa, Homo sapiens
  CDR3 for alpha chain variable domain of TCR clone 215316 (TRAV8-3, TRAJ36)
CAVGATGANNLFF

SEQ ID NO: 430632 - protein, 12 aa, Homo sapiens
  CDR3 for beta chain variable domain of TCR clone 215316 (TRBV19, TRBJ2-1)
CASSMQDTEQFF

SEQ ID NO: 430633 - protein, 14 aa, Homo sapiens
  CDR3 for alpha chain variable domain of TCR clone 215317 (TRAV1-2, TRAJ16)
CAVNRFSDGQKQLF

SEQ ID NO: 430634 - protein, 14 aa, Homo sapiens
  CDR3 for beta chain variable domain of TCR clone 215317 (TRBV7-2, TRBJ2-7)
CASRSQGAAYEQFF

SEQ ID NO: 430635 - protein, 18 aa, Homo sapiens
  CDR3 for alpha chain variable domain of TCR clone 215318 (TRAV21, TRAJ52)
CAVGPSPAGGTSYGKLTF

SEQ ID NO: 430636 - protein, 15 aa, Homo sapiens
  CDR3 for beta chain variable domain of TCR clone 215318 (TRBV6-3, TRBJ2-7)
CASSSPGTVFYEQYF

SEQ ID NO: 430637 - protein, 13 aa, Homo sapiens
  CDR3 for alpha chain variable domain of TCR clone 215319 (TRAV23/DV6, TRAJ34)
CAAIENNTDKLIF

SEQ ID NO: 430638 - protein, 14 aa, Homo sapiens
  CDR3 for beta chain variable domain of TCR clone 215319 (TRBV12-5, TRBJ2-5)
CASGSRTHQETQYF

SEQ ID NO: 430639 - protein, 16 aa, Homo sapiens
  CDR3 for alpha chain variable domain of TCR clone 215320 (TRAV20, TRAJ52)
CAVLPDGGTSYGKLTF

SEQ ID NO: 430640 - protein, 12 aa, Homo sapiens
  CDR3 for beta chain variable domain of TCR clone 215320 (TRBV19, TRBJ2-1)
CASAQISNEQFY

SEQ ID NO: 430641 - protein, 12 aa, Homo sapiens
  CDR3 for alpha chain variable domain of TCR clone 215321 (TRAV21, TRAJ13)
PGPSGGYQKVTF

SEQ ID NO: 430642 - protein, 14 aa, Homo sapiens
  CDR3 for beta chain variable domain of TCR clone 215321 (TRBV12-5, TRBJ2-5)
CSSGSRTHQETQYF

SEQ ID NO: 430643 - protein, 13 aa, Homo sapiens
  CDR3 for alpha chain variable domain of TCR clone 215322 (TRAV3, TRAJ21)
CAVREPDFNKFYF

SEQ ID NO: 430644 - protein, 15 aa, Homo sapiens
  CDR3 for beta chain variable domain of TCR clone 215322 (TRBV27, TRBJ2-1)
CASSNGGGSSNEQFF

SEQ ID NO: 430645 - protein, 13 aa, Homo sapiens
  CDR3 for alpha chain variable domain of TCR clone 215323 (TRAV3, TRAJ43)
CAVKARNNNDMPF

SEQ ID NO: 430646 - protein, 16 aa, Homo sapiens
  CDR3 for beta chain variable domain of TCR clone 215323 (TRBV7-9, TRBJ2-3)
CASSFSVAGGTDTQYF

SEQ ID NO: 430647 - protein, 15 aa, Homo sapiens
  CDR3 for alpha chain variable domain of TCR clone 215324 (TRAV34, TRAJ38)
CGADFTPGNNRKLIW

SEQ ID NO: 430648 - protein, 14 aa, Homo sapiens
  CDR3 for beta chain variable domain of TCR clone 215324 (TRBV5-1, TRBJ2-7)
CASSLVRGSGEQYF

SEQ ID NO: 430649 - protein, 14 aa, Homo sapiens
  CDR3 for alpha chain variable domain of TCR clone 215325 (TRAV1-2, TRAJ16)
CAVNRCSDGQKLLF

SEQ ID NO: 430650 - protein, 16 aa, Homo sapiens
  CDR3 for beta chain variable domain of TCR clone 215325 (TRBV7-3, TRBJ2-2)
CASSLKRGTLSGELFF

SEQ ID NO: 430651 - protein, 16 aa, Homo sapiens
  CDR3 for alpha chain variable domain of TCR clone 215326 (TRAV30, TRAJ24)
CGTEIVDADSWGKCQF

SEQ ID NO: 430652 - protein, 14 aa, Homo sapiens
  CDR3 for beta chain variable domain of TCR clone 215326 (TRBV19, TRBJ2-7)
CASNFRDTFTGMYF

SEQ ID NO: 430653 - protein, 12 aa, Homo sapiens
  CDR3 for alpha chain variable domain of TCR clone 215327 (TRAV26-1, TRAJ13)
CIVSRGYQKVTF

SEQ ID NO: 430654 - protein, 18 aa, Homo sapiens
  CDR3 for beta chain variable domain of TCR clone 215327 (TRBV7-2, TRBJ2-7)
CASSPKTSLRAVLRAGHQ

SEQ ID NO: 430655 - protein, 13 aa, Homo sapiens
  CDR3 for alpha chain variable domain of TCR clone 215328 (TRAV12-1, TRAJ15)
CVAQNQAGTALIF

SEQ ID NO: 430656 - protein, 14 aa, Homo sapiens
  CDR3 for beta chain variable domain of TCR clone 215328 (TRBV6-1, TRBJ1-3)
CASVQGGGGNTIYF

SEQ ID NO: 430657 - protein, 14 aa, Homo sapiens
  CDR3 for alpha chain variable domain of TCR clone 215329 (TRAV12-2, TRAJ13)
CAVKKTGCYQKVTF

SEQ ID NO: 430658 - protein, 14 aa, Homo sapiens
  CDR3 for beta chain variable domain of TCR clone 215329 (TRBV12-5, TRBJ2-5)
CASGSRTHQETQYF

SEQ ID NO: 430659 - protein, 16 aa, Homo sapiens
  CDR3 for alpha chain variable domain of TCR clone 215330 (TRAV16, TRAJ57)
CPPYLITQGGSERLVF

SEQ ID NO: 430660 - protein, 17 aa, Homo sapiens
  CDR3 for beta chain variable domain of TCR clone 215330 (TRBV24-1, TRBJ2-4)
CAASDAEARGVRNSQYF

SEQ ID NO: 430661 - protein, 13 aa, Homo sapiens
  CDR3 for alpha chain variable domain of TCR clone 215331 (TRAV13-1, TRAJ20)
CAARVSNDYKLSF

SEQ ID NO: 430662 - protein, 16 aa, Homo sapiens
  CDR3 for beta chain variable domain of TCR clone 215331 (TRBV11-1, TRBJ1-1)
CATNPRDRAFDTEAFF

SEQ ID NO: 430663 - protein, 15 aa, Homo sapiens
  CDR3 for alpha chain variable domain of TCR clone 215332 (TRAV3, TRAJ13)
CAVRVYSGGYQKVTF

SEQ ID NO: 430664 - protein, 13 aa, Homo sapiens
  CDR3 for beta chain variable domain of TCR clone 215332 (TRBV7-9, TRBJ2-2)
CASSLDPTGELFF

SEQ ID NO: 430665 - protein, 13 aa, Homo sapiens
  CDR3 for alpha chain variable domain of TCR clone 215333 (TRAV20, TRAJ34)
CAVSSYNTDKLIF

SEQ ID NO: 430666 - protein, 15 aa, Homo sapiens
  CDR3 for beta chain variable domain of TCR clone 215333 (TRBV20-1, TRBJ1-2)
CRAAGEGARIYGYTF

SEQ ID NO: 430667 - protein, 16 aa, Homo sapiens
  CDR3 for alpha chain variable domain of TCR clone 215334 (TRAV23/DV6, TRAJ9)
CAASIGGNTGGFKTIF

SEQ ID NO: 430668 - protein, 14 aa, Homo sapiens
  CDR3 for beta chain variable domain of TCR clone 215334 (TRBV19, TRBJ2-1)
CASSKDRGQDEQFF

SEQ ID NO: 430669 - protein, 17 aa, Homo sapiens
  CDR3 for alpha chain variable domain of TCR clone 215335 (TRAV12-2, TRAJ53)
CAPLTDSQEGSNYKLTF

SEQ ID NO: 430670 - protein, 13 aa, Homo sapiens
  CDR3 for beta chain variable domain of TCR clone 215335 (TRBV29-1, TRBJ1-1)
CSVGDSRNTEAFF

SEQ ID NO: 430671 - protein, 12 aa, Homo sapiens
  CDR3 for alpha chain variable domain of TCR clone 215336 (TRAV8-3, TRAJ20)
CAVGANDYKLSF

SEQ ID NO: 430672 - protein, 16 aa, Homo sapiens
  CDR3 for beta chain variable domain of TCR clone 215336 (TRBV19, TRBJ2-2)
CASRSPGTWATGEMFF

SEQ ID NO: 430673 - protein, 14 aa, Homo sapiens
  CDR3 for alpha chain variable domain of TCR clone 215337 (TRAV35, TRAJ33)
CAGSSQDSNYQLIW

SEQ ID NO: 430674 - protein, 15 aa, Homo sapiens
  CDR3 for beta chain variable domain of TCR clone 215337 (TRBV20-1, TRBJ2-7)
CSAESGTSGAYEPYF

SEQ ID NO: 430675 - protein, 21 aa, Homo sapiens
  CDR3 for alpha chain variable domain of TCR clone 215338 (TRAV21, TRAJ27)
CAARPGNAGNSTIVDETTLTV

SEQ ID NO: 430676 - protein, 14 aa, Homo sapiens
  CDR3 for beta chain variable domain of TCR clone 215338 (TRBV7-6, TRBJ2-3)
CASSLGTVTDTQYF

SEQ ID NO: 430677 - protein, 16 aa, Homo sapiens
  CDR3 for alpha chain variable domain of TCR clone 215339 (TRAV30, TRAJ24)
CGTEIVDADGWGKFQF

SEQ ID NO: 430678 - protein, 16 aa, Homo sapiens
  CDR3 for beta chain variable domain of TCR clone 215339 (TRBV6-1, TRBJ2-1)
CASILRQGSSYNEQFF

SEQ ID NO: 430679 - protein, 15 aa, Homo sapiens
  CDR3 for alpha chain variable domain of TCR clone 215340 (TRAV17, TRAJ57)
CATGPSQGGSETLVF

SEQ ID NO: 430680 - protein, 14 aa, Homo sapiens
  CDR3 for beta chain variable domain of TCR clone 215340 (TRBV25-1, TRBJ1-1)
CASTHLGGNTEAFF

SEQ ID NO: 430681 - protein, 14 aa, Homo sapiens
  CDR3 for alpha chain variable domain of TCR clone 215341 (TRAV26-1, TRAJ38)
CIADNAGNNGKLIW

SEQ ID NO: 430682 - protein, 13 aa, Homo sapiens
  CDR3 for beta chain variable domain of TCR clone 215341 (TRBV15, TRBJ1-6)
CATSGGLNSPLHF

SEQ ID NO: 430683 - protein, 18 aa, Homo sapiens
  CDR3 for alpha chain variable domain of TCR clone 215342 (TRAV26-1, TRAJ23)
CIVRVGLEVWNQGVKLIF

SEQ ID NO: 430684 - protein, 14 aa, Homo sapiens
  CDR3 for beta chain variable domain of TCR clone 215342 (TRBV7-6, TRBJ2-3)
CASSLGTVTDTQYF

SEQ ID NO: 430685 - protein, 17 aa, Homo sapiens
  CDR3 for alpha chain variable domain of TCR clone 215343 (TRAV26-1, TRAJ37)
CIVRVITVSSHTGKLIF

SEQ ID NO: 430686 - protein, 14 aa, Homo sapiens
  CDR3 for beta chain variable domain of TCR clone 215343 (TRBV7-7, TRBJ2-2)
CATRQDSDTGELFF

SEQ ID NO: 430687 - protein, 12 aa, Homo sapiens
  CDR3 for alpha chain variable domain of TCR clone 215344 (TRAV26-1, TRAJ26)
CIVFIYGQNFVF

SEQ ID NO: 430688 - protein, 15 aa, Homo sapiens
  CDR3 for beta chain variable domain of TCR clone 215344 (TRBV14, TRBJ2-5)
CASSHGEAVQETQYF

SEQ ID NO: 430689 - protein, 12 aa, Homo sapiens
  CDR3 for alpha chain variable domain of TCR clone 215345 (TRAV13-2, TRAJ23)
CAERHRGGKLIC

SEQ ID NO: 430690 - protein, 14 aa, Homo sapiens
  CDR3 for beta chain variable domain of TCR clone 215345 (TRBV2, TRBJ2-7)
CASSLTSGGYEQYF

SEQ ID NO: 430691 - protein, 15 aa, Homo sapiens
  CDR3 for alpha chain variable domain of TCR clone 215346 (TRAV13-1, TRAJ5)
CAVSPIDTGRRALTF

SEQ ID NO: 430692 - protein, 15 aa, Homo sapiens
  CDR3 for beta chain variable domain of TCR clone 215346 (TRBV28, TRBJ2-5)
CASSSGRTIQETQYF

SEQ ID NO: 430693 - protein, 14 aa, Homo sapiens
  CDR3 for alpha chain variable domain of TCR clone 215347 (TRAV23/DV6, TRAJ22)
CAASASGSARQLTF

SEQ ID NO: 430694 - protein, 19 aa, Homo sapiens
  CDR3 for beta chain variable domain of TCR clone 215347 (TRBV4-3, TRBJ2-7)
CASSQEFIGWQVTPYEQYF

SEQ ID NO: 430695 - protein, 12 aa, Homo sapiens
  CDR3 for alpha chain variable domain of TCR clone 215348 (TRAV16, TRAJ10)
CSRTGGGNKLTF

SEQ ID NO: 430696 - protein, 13 aa, Homo sapiens
  CDR3 for beta chain variable domain of TCR clone 215348 (TRBV7-9, TRBJ2-5)
CASLPSGRETQYF

SEQ ID NO: 430697 - protein, 12 aa, Homo sapiens
  CDR3 for alpha chain variable domain of TCR clone 215349 (TRAV3, TRAJ43)
CAVRDPNNDMRF

SEQ ID NO: 430698 - protein, 15 aa, Homo sapiens
  CDR3 for beta chain variable domain of TCR clone 215349 (TRBV27, TRBJ1-5)
CASSLGTGIDQPQHF

SEQ ID NO: 430699 - protein, 14 aa, Homo sapiens
  CDR3 for alpha chain variable domain of TCR clone 215350 (TRAV26-1, TRAJ49)
CIVRPSNTGNQFYF

SEQ ID NO: 430700 - protein, 16 aa, Homo sapiens
  CDR3 for beta chain variable domain of TCR clone 215350 (TRBV12-5, TRBJ2-5)
CASGPRTSGNQETQYF

SEQ ID NO: 430701 - protein, 14 aa, Homo sapiens
  CDR3 for alpha chain variable domain of TCR clone 215351 (TRAV12-2, TRAJ9)
CAVNMEGGGFKTIF

SEQ ID NO: 430702 - protein, 14 aa, Homo sapiens
  CDR3 for beta chain variable domain of TCR clone 215351 (TRBV2, TRBJ2-5)
CDSSEVLAQETQYF

SEQ ID NO: 430703 - protein, 13 aa, Homo sapiens
  CDR3 for alpha chain variable domain of TCR clone 215352 (TRAV17, TRAJ5)
CAPMATGRRALTF

SEQ ID NO: 430704 - protein, 15 aa, Homo sapiens
  CDR3 for beta chain variable domain of TCR clone 215352 (TRBV6-6, TRBJ2-5)
CASSPGGGLEETQYF

SEQ ID NO: 430705 - protein, 17 aa, Homo sapiens
  CDR3 for alpha chain variable domain of TCR clone 215353 (TRAV13-1, TRAJ28)
CAASTPYSGAGSYQLTF

SEQ ID NO: 430706 - protein, 16 aa, Homo sapiens
  CDR3 for beta chain variable domain of TCR clone 215353 (TRBV19, TRBJ2-2)
CASRSPGTGATGELFF

SEQ ID NO: 430707 - protein, 16 aa, Homo sapiens
  CDR3 for alpha chain variable domain of TCR clone 215354 (TRAV38-1, TRAJ32)
CAFMKGGGGATNKPIF

SEQ ID NO: 430708 - protein, 15 aa, Homo sapiens
  CDR3 for beta chain variable domain of TCR clone 215354 (TRBV6-3, TRBJ2-7)
CASSSPGTVFYEQYF

SEQ ID NO: 430709 - protein, 16 aa, Homo sapiens
  CDR3 for alpha chain variable domain of TCR clone 215355 (TRAV12-2, TRAJ43)
CAGDDMRFGAGARLTV

SEQ ID NO: 430710 - protein, 16 aa, Homo sapiens
  CDR3 for beta chain variable domain of TCR clone 215355 (TRBV2, TRBJ2-4)
CASSEAPVGEQNIQYF

SEQ ID NO: 430711 - protein, 18 aa, Homo sapiens
  CDR3 for alpha chain variable domain of TCR clone 215356 (TRAV21, TRAJ52)
CAVRPSPAGGTSYVKLTF

SEQ ID NO: 430712 - protein, 13 aa, Homo sapiens
  CDR3 for beta chain variable domain of TCR clone 215356 (TRBV29-1, TRBJ2-2)
CSVYREDTGELFF

SEQ ID NO: 430713 - protein, 15 aa, Homo sapiens
  CDR3 for alpha chain variable domain of TCR clone 215357 (TRAV17, TRAJ13)
CATVPNSGGYQKVTF

SEQ ID NO: 430714 - protein, 15 aa, Homo sapiens
  CDR3 for beta chain variable domain of TCR clone 215357 (TRBV2, TRBJ2-1)
CASRESGGAYNEQFF

SEQ ID NO: 430715 - protein, 16 aa, Homo sapiens
  CDR3 for alpha chain variable domain of TCR clone 215358 (TRAV3, TRAJ37)
CAVRVRGSGNTGKQIF

SEQ ID NO: 430716 - protein, 11 aa, Homo sapiens
  CDR3 for beta chain variable domain of TCR clone 215358 (TRBV11-2, TRBJ2-2)
CASSLPGELFF

SEQ ID NO: 430717 - protein, 14 aa, Homo sapiens
  CDR3 for alpha chain variable domain of TCR clone 215359 (TRAV35, TRAJ33)
CAGSSQDSNYQLIW

SEQ ID NO: 430718 - protein, 13 aa, Homo sapiens
  CDR3 for beta chain variable domain of TCR clone 215359 (TRBV12-4, TRBJ1-2)
CASSLRQGKGYTF

SEQ ID NO: 430719 - protein, 14 aa, Homo sapiens
  CDR3 for alpha chain variable domain of TCR clone 215360 (TRAV29/DV5, TRAJ43)
CAAIHSYNNNDMRF

SEQ ID NO: 430720 - protein, 14 aa, Homo sapiens
  CDR3 for beta chain variable domain of TCR clone 215360 (TRBV12-4, TRBJ2-5)
CASSSTEGTKTQYL

SEQ ID NO: 430721 - protein, 10 aa, Homo sapiens
  CDR3 for alpha chain variable domain of TCR clone 215361 (TRAV2, TRAJ15)
RGQAGTALIF

SEQ ID NO: 430722 - protein, 12 aa, Homo sapiens
  CDR3 for beta chain variable domain of TCR clone 215361 (TRBV11-2, TRBJ2-2)
CATSLGGGELFF

SEQ ID NO: 430723 - protein, 16 aa, Homo sapiens
  CDR3 for alpha chain variable domain of TCR clone 215362 (TRAV8-3, TRAJ28)
CAVGATLGLGVTNSLS

SEQ ID NO: 430724 - protein, 14 aa, Homo sapiens
  CDR3 for beta chain variable domain of TCR clone 215362 (TRBV7-3, TRBJ2-1)
CASSLAGGTNEQFF

SEQ ID NO: 430725 - protein, 13 aa, Homo sapiens
  CDR3 for alpha chain variable domain of TCR clone 215363 (TRAV2, TRAJ40)
CAVVTSGTYKFIF

SEQ ID NO: 430726 - protein, 14 aa, Homo sapiens
  CDR3 for beta chain variable domain of TCR clone 215363 (TRBV19, TRBJ2-1)
CAGPTFVLSGEQFF

SEQ ID NO: 430727 - protein, 12 aa, Homo sapiens
  CDR3 for alpha chain variable domain of TCR clone 215364 (TRAV12-3, TRAJ17)
CAMTLTGNKLTF

SEQ ID NO: 430728 - protein, 16 aa, Homo sapiens
  CDR3 for beta chain variable domain of TCR clone 215364 (TRBV18, TRBJ1-1)
CASSPGVGGRGGEAFF

SEQ ID NO: 430729 - protein, 15 aa, Homo sapiens
  CDR3 for alpha chain variable domain of TCR clone 215365 (TRAV3, TRAJ3)
CAVRDMSSSASKTIF

SEQ ID NO: 430730 - protein, 14 aa, Homo sapiens
  CDR3 for beta chain variable domain of TCR clone 215365 (TRBV6-6, TRBJ2-7)
CASSIAGGVDEQYF

SEQ ID NO: 430731 - protein, 15 aa, Homo sapiens
  CDR3 for alpha chain variable domain of TCR clone 215366 (TRAV2, TRAJ13)
CCLLLCFRGYQKVTF

SEQ ID NO: 430732 - protein, 14 aa, Homo sapiens
  CDR3 for beta chain variable domain of TCR clone 215366 (TRBV6-1, TRBJ1-3)
CASVQGGGGNTIYF

SEQ ID NO: 430733 - protein, 13 aa, Homo sapiens
  CDR3 for alpha chain variable domain of TCR clone 215367 (TRAV8-3, TRAJ36)
CAVGATGANNLFF

SEQ ID NO: 430734 - protein, 15 aa, Homo sapiens
  CDR3 for beta chain variable domain of TCR clone 215367 (TRBV7-2, TRBJ1-2)
CASGPRAGWNYGYSF

SEQ ID NO: 430735 - protein, 15 aa, Homo sapiens
  CDR3 for alpha chain variable domain of TCR clone 215368 (TRAV38-1, TRAJ37)
CAFIHGSGNAGKLIF

SEQ ID NO: 430736 - protein, 14 aa, Homo sapiens
  CDR3 for beta chain variable domain of TCR clone 215368 (TRBV19, TRBJ2-1)
CASPTFALSGEQFF

SEQ ID NO: 430737 - protein, 17 aa, Homo sapiens
  CDR3 for alpha chain variable domain of TCR clone 215369 (TRAV3, TRAJ6)
CAVRDGPRAGGGYIPTF

SEQ ID NO: 430738 - protein, 14 aa, Homo sapiens
  CDR3 for beta chain variable domain of TCR clone 215369 (TRBV7-2, TRBJ2-7)
CASSPKTSFHEQYF

SEQ ID NO: 430739 - protein, 14 aa, Homo sapiens
  CDR3 for alpha chain variable domain of TCR clone 215370 (TRAV12-3, TRAJ42)
CAMNYGGSQGNLIF

SEQ ID NO: 430740 - protein, 17 aa, Homo sapiens
  CDR3 for beta chain variable domain of TCR clone 215370 (TRBV19, TRBJ2-6)
CASSTGQVFSGANVLTF

SEQ ID NO: 430741 - protein, 16 aa, Homo sapiens
  CDR3 for alpha chain variable domain of TCR clone 215371 (TRAV16, TRAJ52)
CALSAAGGTSYGKLTF

SEQ ID NO: 430742 - protein, 17 aa, Homo sapiens
  CDR3 for beta chain variable domain of TCR clone 215371 (TRBV11-2, TRBJ2-1)
CAGSLYPPGVEYNEQFF

SEQ ID NO: 430743 - protein, 13 aa, Homo sapiens
  CDR3 for alpha chain variable domain of TCR clone 215372 (TRAV6, TRAJ20)
CALAVSNDYKLSF

SEQ ID NO: 430744 - protein, 16 aa, Homo sapiens
  CDR3 for beta chain variable domain of TCR clone 215372 (TRBV7-9, TRBJ2-1)
CASSDVAGCSYNEQFF

SEQ ID NO: 430745 - protein, 10 aa, Homo sapiens
  CDR3 for alpha chain variable domain of TCR clone 215373 (TRAV36/DV7, TRAJ48)
CAVGNEKLTF

SEQ ID NO: 430746 - protein, 16 aa, Homo sapiens
  CDR3 for beta chain variable domain of TCR clone 215373 (TRBV15, TRBJ2-3)
CATRISGGRAPDTQYF

SEQ ID NO: 430747 - protein, 11 aa, Homo sapiens
  CDR3 for alpha chain variable domain of TCR clone 215374 (TRAV17, TRAJ9)
CATTGGFKAIF

SEQ ID NO: 430748 - protein, 14 aa, Homo sapiens
  CDR3 for beta chain variable domain of TCR clone 215374 (TRBV7-9, TRBJ2-2)
CASSGLADTGELSF

SEQ ID NO: 430749 - protein, 12 aa, Homo sapiens
  CDR3 for alpha chain variable domain of TCR clone 215375 (TRAV21, TRAJ12)
CAAMDSSYKLIF

SEQ ID NO: 430750 - protein, 16 aa, Homo sapiens
  CDR3 for beta chain variable domain of TCR clone 215375 (TRBV7-9, TRBJ2-5)
CASRLEIGTRKETQYF

SEQ ID NO: 430751 - protein, 15 aa, Homo sapiens
  CDR3 for alpha chain variable domain of TCR clone 215376 (TRAV26-1, TRAJ44)
CIVRANTGTASKLTF

SEQ ID NO: 430752 - protein, 16 aa, Homo sapiens
  CDR3 for beta chain variable domain of TCR clone 215376 (TRBV7-7, TRBJ2-1)
CASSLASGTAYNGQFF

SEQ ID NO: 430753 - protein, 13 aa, Homo sapiens
  CDR3 for alpha chain variable domain of TCR clone 215377 (TRAV8-3, TRAJ43)
CAVGPDNNNDMRF

SEQ ID NO: 430754 - protein, 19 aa, Homo sapiens
  CDR3 for beta chain variable domain of TCR clone 215377 (TRBV7-2, TRBJ2-3)
CASSFLSRNWGGGTDTQYI

SEQ ID NO: 430755 - protein, 12 aa, Homo sapiens
  CDR3 for alpha chain variable domain of TCR clone 215378 (TRAV12-1, TRAJ40)
CVVYSGTYKYIF

SEQ ID NO: 430756 - protein, 18 aa, Homo sapiens
  CDR3 for beta chain variable domain of TCR clone 215378 (TRBV11-2, TRBJ2-6)
CASSLNPFLGTGANVLTF

SEQ ID NO: 430757 - protein, 11 aa, Homo sapiens
  CDR3 for alpha chain variable domain of TCR clone 215379 (TRAV17, TRAJ31)
CATSNNARLMF

SEQ ID NO: 430758 - protein, 16 aa, Homo sapiens
  CDR3 for beta chain variable domain of TCR clone 215379 (TRBV7-8, TRBJ2-4)
CASSAERTLAKIIQYF

SEQ ID NO: 430759 - protein, 14 aa, Homo sapiens
  CDR3 for alpha chain variable domain of TCR clone 215380 (TRAV8-2, TRAJ23)
CVVSDDNQGGTLIF

SEQ ID NO: 430760 - protein, 13 aa, Homo sapiens
  CDR3 for beta chain variable domain of TCR clone 215380 (TRBV7-7, TRBJ2-2)
CASSLTSAGELFF

SEQ ID NO: 430761 - protein, 12 aa, Homo sapiens
  CDR3 for alpha chain variable domain of TCR clone 215381 (TRAV12-3, TRAJ17)
CAMTLTGNKLTF

SEQ ID NO: 430762 - protein, 14 aa, Homo sapiens
  CDR3 for beta chain variable domain of TCR clone 215381 (TRBV12-4, TRBJ1-1)
CASRQTGLNTEAFF

SEQ ID NO: 430763 - protein, 12 aa, Homo sapiens
  CDR3 for alpha chain variable domain of TCR clone 215382 (TRAV12-3, TRAJ34)
CAMGYNTEKLIF

SEQ ID NO: 430764 - protein, 15 aa, Homo sapiens
  CDR3 for beta chain variable domain of TCR clone 215382 (TRBV28, TRBJ2-1)
CASSIIAGGRSEQFF

SEQ ID NO: 430765 - protein, 16 aa, Homo sapiens
  CDR3 for alpha chain variable domain of TCR clone 215383 (TRAV16, TRAJ4)
CALSRMFSGGYNKLIF

SEQ ID NO: 430766 - protein, 11 aa, Homo sapiens
  CDR3 for beta chain variable domain of TCR clone 215383 (TRBV10-3, TRBJ2-7)
CAISEGLEQYF

SEQ ID NO: 430767 - protein, 14 aa, Homo sapiens
  CDR3 for alpha chain variable domain of TCR clone 215384 (TRAV8-1, TRAJ23)
CAVGTCNQGGKLIF

SEQ ID NO: 430768 - protein, 16 aa, Homo sapiens
  CDR3 for beta chain variable domain of TCR clone 215384 (TRBV18, TRBJ1-5)
CASSPSTGNSNQPQHF

SEQ ID NO: 430769 - protein, 14 aa, Homo sapiens
  CDR3 for alpha chain variable domain of TCR clone 215385 (TRAV2, TRAJ9)
CAVEDRSRGFKTIF

SEQ ID NO: 430770 - protein, 13 aa, Homo sapiens
  CDR3 for beta chain variable domain of TCR clone 215385 (TRBV7-3, TRBJ1-1)
CASSQDWGAEAFF

SEQ ID NO: 430771 - protein, 15 aa, Homo sapiens
  CDR3 for alpha chain variable domain of TCR clone 215386 (TRAV21, TRAJ40)
CAVRPQTSGTYKYIF

SEQ ID NO: 430772 - protein, 15 aa, Homo sapiens
  CDR3 for beta chain variable domain of TCR clone 215386 (TRBV5-1, TRBJ2-1)
CASSPPRATYNEQSF

SEQ ID NO: 430773 - protein, 14 aa, Homo sapiens
  CDR3 for alpha chain variable domain of TCR clone 215387 (TRAV35, TRAJ42)
CAGRYGGSQGNLIF

SEQ ID NO: 430774 - protein, 15 aa, Homo sapiens
  CDR3 for beta chain variable domain of TCR clone 215387 (TRBV7-9, TRBJ2-1)
CASSLGWGRANEQFF

SEQ ID NO: 430775 - protein, 14 aa, Homo sapiens
  CDR3 for alpha chain variable domain of TCR clone 215388 (TRAV1-2, TRAJ6)
CAVSLSGGSYIPAF

SEQ ID NO: 430776 - protein, 15 aa, Homo sapiens
  CDR3 for beta chain variable domain of TCR clone 215388 (TRBV7-9, TRBJ2-7)
CASSPGGSLTYEQYF

SEQ ID NO: 430777 - protein, 15 aa, Homo sapiens
  CDR3 for alpha chain variable domain of TCR clone 215389 (TRAV8-4, TRAJ3)
CAVTGENLVQQCFQD

SEQ ID NO: 430778 - protein, 16 aa, Homo sapiens
  CDR3 for beta chain variable domain of TCR clone 215389 (TRBV4-2, TRBJ1-1)
CASSQAGFGMNTAAFF

SEQ ID NO: 430779 - protein, 17 aa, Homo sapiens
  CDR3 for alpha chain variable domain of TCR clone 215390 (TRAV23/DV6, TRAJ57)
CAASSTLSQGGSEKLVF

SEQ ID NO: 430780 - protein, 16 aa, Homo sapiens
  CDR3 for beta chain variable domain of TCR clone 215390 (TRBV4-2, TRBJ2-3)
CASSQELARDTDTQYF

SEQ ID NO: 430781 - protein, 11 aa, Homo sapiens
  CDR3 for alpha chain variable domain of TCR clone 215391 (TRAV27, TRAJ45)
CAGAQEEVLTD

SEQ ID NO: 430782 - protein, 15 aa, Homo sapiens
  CDR3 for beta chain variable domain of TCR clone 215391 (TRBV20-1, TRBJ2-7)
CSARGRVSGMDEQYF

SEQ ID NO: 430783 - protein, 11 aa, Homo sapiens
  CDR3 for alpha chain variable domain of TCR clone 215392 (TRAV12-3, TRAJ43)
CAMSVSNDMRF

SEQ ID NO: 430784 - protein, 16 aa, Homo sapiens
  CDR3 for beta chain variable domain of TCR clone 215392 (TRBV7-3, TRBJ2-1)
CASSKPLAGGYNEQFF

SEQ ID NO: 430785 - protein, 19 aa, Homo sapiens
  CDR3 for alpha chain variable domain of TCR clone 215393 (TRAV1-2, TRAJ18)
CLLPLCCERRGSTLVRLYF

SEQ ID NO: 430786 - protein, 14 aa, Homo sapiens
  CDR3 for beta chain variable domain of TCR clone 215393 (TRBV7-2, TRBJ2-7)
CASSFKGQDHEQYF

SEQ ID NO: 430787 - protein, 14 aa, Homo sapiens
  CDR3 for alpha chain variable domain of TCR clone 215394 (TRAV1-2, TRAJ8)
CAVREDTGFQKLVF

SEQ ID NO: 430788 - protein, 16 aa, Homo sapiens
  CDR3 for beta chain variable domain of TCR clone 215394 (TRBV12-5, TRBJ2-5)
CASGPRTSGSQETQYF

SEQ ID NO: 430789 - protein, 14 aa, Homo sapiens
  CDR3 for alpha chain variable domain of TCR clone 215395 (TRAV13-1, TRAJ44)
CAAKATGTASKLTF

SEQ ID NO: 430790 - protein, 17 aa, Homo sapiens
  CDR3 for beta chain variable domain of TCR clone 215395 (TRBV7-3, TRBJ2-3)
CASSLMKRMRGADTEYF

SEQ ID NO: 430791 - protein, 11 aa, Homo sapiens
  CDR3 for alpha chain variable domain of TCR clone 215396 (TRAV12-3, TRAJ43)
CAMSVSNDMRF

SEQ ID NO: 430792 - protein, 13 aa, Homo sapiens
  CDR3 for beta chain variable domain of TCR clone 215396 (TRBV20-1, TRBJ1-1)
CSPPLGGGTEAFF

SEQ ID NO: 430793 - protein, 16 aa, Homo sapiens
  CDR3 for alpha chain variable domain of TCR clone 215397 (TRAV26-1, TRAJ37)
CIVRGDGSGNTGKLIF

SEQ ID NO: 430794 - protein, 15 aa, Homo sapiens
  CDR3 for beta chain variable domain of TCR clone 215397 (TRBV7-9, TRBJ1-6)
CASSSPGRGNSPLHF

SEQ ID NO: 430795 - protein, 14 aa, Homo sapiens
  CDR3 for alpha chain variable domain of TCR clone 215398 (TRAV12-1, TRAJ45)
CVVNENAGADGLTF

SEQ ID NO: 430796 - protein, 15 aa, Homo sapiens
  CDR3 for beta chain variable domain of TCR clone 215398 (TRBV5-7, TRBJ2-7)
CASSLGPGRGNEQYF

SEQ ID NO: 430797 - protein, 14 aa, Homo sapiens
  CDR3 for alpha chain variable domain of TCR clone 215399 (TRAV12-1, TRAJ27)
CGEHIRTNAGKSTF

SEQ ID NO: 430798 - protein, 13 aa, Homo sapiens
  CDR3 for beta chain variable domain of TCR clone 215399 (TRBV4-1, TRBJ1-1)
CASSLRGPTEAFF

SEQ ID NO: 430799 - protein, 10 aa, Homo sapiens
  CDR3 for alpha chain variable domain of TCR clone 215400 (TRAV23/DV6, TRAJ57)
CAASSTLSQV

SEQ ID NO: 430800 - protein, 13 aa, Homo sapiens
  CDR3 for beta chain variable domain of TCR clone 215400 (TRBV25-1, TRBJ1-1)
CQHPPGGNTEAFF

SEQ ID NO: 430801 - protein, 12 aa, Homo sapiens
  CDR3 for alpha chain variable domain of TCR clone 215401 (TRAV1-1, TRAJ39)
CAVPVVGNTLTF

SEQ ID NO: 430802 - protein, 21 aa, Homo sapiens
  CDR3 for beta chain variable domain of TCR clone 215401 (TRBV4-1, TRBJ2-7)
CASSLTAGLAEGGVTSSTSGR

SEQ ID NO: 430803 - protein, 16 aa, Homo sapiens
  CDR3 for alpha chain variable domain of TCR clone 215402 (TRAV3, TRAJ10)
CAVRDMRAGGGNKLTF

SEQ ID NO: 430804 - protein, 15 aa, Homo sapiens
  CDR3 for beta chain variable domain of TCR clone 215402 (TRBV5-8, TRBJ2-7)
CASSYTGTGPREQYF

SEQ ID NO: 430805 - protein, 14 aa, Homo sapiens
  CDR3 for alpha chain variable domain of TCR clone 215403 (TRAV2, TRAJ39)
CAVEGDNAGNMLTF

SEQ ID NO: 430806 - protein, 14 aa, Homo sapiens
  CDR3 for beta chain variable domain of TCR clone 215403 (TRBV28, TRBJ2-4)
CVSSPRARGNIQYF

SEQ ID NO: 430807 - protein, 12 aa, Homo sapiens
  CDR3 for alpha chain variable domain of TCR clone 215404 (TRAV13-1, TRAJ11)
CAASNGYSTLTF

SEQ ID NO: 430808 - protein, 14 aa, Homo sapiens
  CDR3 for beta chain variable domain of TCR clone 215404 (TRBV19, TRBJ2-2)
CASSIAGAFGELFF

SEQ ID NO: 430809 - protein, 14 aa, Homo sapiens
  CDR3 for alpha chain variable domain of TCR clone 215405 (TRAV12-2, TRAJ48)
CAVNAFFGNEKLTF

SEQ ID NO: 430810 - protein, 15 aa, Homo sapiens
  CDR3 for beta chain variable domain of TCR clone 215405 (TRBV7-9, TRBJ1-6)
CASSSPGRGNSPLHF

SEQ ID NO: 430811 - protein, 15 aa, Homo sapiens
  CDR3 for alpha chain variable domain of TCR clone 215406 (TRAV8-4, TRAJ15)
CAVSDPVQAGTALIF

SEQ ID NO: 430812 - protein, 13 aa, Homo sapiens
  CDR3 for beta chain variable domain of TCR clone 215406 (TRBV7-9, TRBJ1-2)
CASSLKQNYGYTF

SEQ ID NO: 430813 - protein, 13 aa, Homo sapiens
  CDR3 for alpha chain variable domain of TCR clone 215407 (TRAV12-3, TRAJ29)
CAMTLSGNTPLVF

SEQ ID NO: 430814 - protein, 14 aa, Homo sapiens
  CDR3 for beta chain variable domain of TCR clone 215407 (TRBV11-2, TRBJ2-3)
CASSRLARTDTQYF

SEQ ID NO: 430815 - protein, 14 aa, Homo sapiens
  CDR3 for alpha chain variable domain of TCR clone 215408 (TRAV23/DV6, TRAJ37)
CAASTSSNTGTLIF

SEQ ID NO: 430816 - protein, 17 aa, Homo sapiens
  CDR3 for beta chain variable domain of TCR clone 215408 (TRBV13, TRBJ2-3)
CASSLSRVAGGRNTQYF

SEQ ID NO: 430817 - protein, 15 aa, Homo sapiens
  CDR3 for alpha chain variable domain of TCR clone 215409 (TRAV12-3, TRAJ6)
CAMSPASGGSYIPTF

SEQ ID NO: 430818 - protein, 15 aa, Homo sapiens
  CDR3 for beta chain variable domain of TCR clone 215409 (TRBV2, TRBJ1-2)
CASSESRRVNYGYTF

SEQ ID NO: 430819 - protein, 13 aa, Homo sapiens
  CDR3 for alpha chain variable domain of TCR clone 215410 (TRAV12-2, TRAJ39)
CAVNNNAGNMLTF

SEQ ID NO: 430820 - protein, 12 aa, Homo sapiens
  CDR3 for beta chain variable domain of TCR clone 215410 (TRBV5-1, TRBJ2-7)
CASSFRGYEQSF

SEQ ID NO: 430821 - protein, 14 aa, Homo sapiens
  CDR3 for alpha chain variable domain of TCR clone 215411 (TRAV1-2, TRAJ16)
CAVNRFSDGQKLLF

SEQ ID NO: 430822 - protein, 15 aa, Homo sapiens
  CDR3 for beta chain variable domain of TCR clone 215411 (TRBV27, TRBJ2-1)
CASSNGGGSSNEQFC

SEQ ID NO: 430823 - protein, 11 aa, Homo sapiens
  CDR3 for alpha chain variable domain of TCR clone 215412 (TRAV3, TRAJ21)
CAVGNFNKFYF

SEQ ID NO: 430824 - protein, 15 aa, Homo sapiens
  CDR3 for beta chain variable domain of TCR clone 215412 (TRBV7-8, TRBJ2-1)
CASSLHGGPYNEQFF

SEQ ID NO: 430825 - protein, 14 aa, Homo sapiens
  CDR3 for alpha chain variable domain of TCR clone 215413 (TRAV1-1, TRAJ27)
CAVIYTPMQANQPL

SEQ ID NO: 430826 - protein, 15 aa, Homo sapiens
  CDR3 for beta chain variable domain of TCR clone 215413 (TRBV7-2, TRBJ2-1)
CASSSGLAGGNEQFF

SEQ ID NO: 430827 - protein, 13 aa, Homo sapiens
  CDR3 for alpha chain variable domain of TCR clone 215414 (TRAV21, TRAJ27)
CAALNTNAGKSTF

SEQ ID NO: 430828 - protein, 13 aa, Homo sapiens
  CDR3 for beta chain variable domain of TCR clone 215414 (TRBV12-5, TRBJ2-3)
CASGDRQSDTQYF

SEQ ID NO: 430829 - protein, 12 aa, Homo sapiens
  CDR3 for alpha chain variable domain of TCR clone 215415 (TRAV8-3, TRAJ5)
CAVGGGLRALTF

SEQ ID NO: 430830 - protein, 13 aa, Homo sapiens
  CDR3 for beta chain variable domain of TCR clone 215415 (TRBV12-4, TRBJ1-5)
CASSPDRAQPQHF

SEQ ID NO: 430831 - protein, 12 aa, Homo sapiens
  CDR3 for alpha chain variable domain of TCR clone 215416 (TRAV13-2, TRAJ23)
CAERHSGGKLIF

SEQ ID NO: 430832 - protein, 12 aa, Homo sapiens
  CDR3 for beta chain variable domain of TCR clone 215416 (TRBV11-2, TRBJ2-2)
CASSLGGGELFF

SEQ ID NO: 430833 - protein, 14 aa, Homo sapiens
  CDR3 for alpha chain variable domain of TCR clone 215417 (TRAV4, TRAJ32)
CLVGLGGATNKLIF

SEQ ID NO: 430834 - protein, 15 aa, Homo sapiens
  CDR3 for beta chain variable domain of TCR clone 215417 (TRBV28, TRBJ2-1)
CASSIIAGGRSEQFF

SEQ ID NO: 430835 - protein, 11 aa, Homo sapiens
  CDR3 for alpha chain variable domain of TCR clone 215418 (TRAV12-1, TRAJ27)
CVVNNAGKSTF

SEQ ID NO: 430836 - protein, 13 aa, Homo sapiens
  CDR3 for beta chain variable domain of TCR clone 215418 (TRBV2, TRBJ2-5)
CASGTPYQETQYF

SEQ ID NO: 430837 - protein, 23 aa, Homo sapiens
  CDR3 for alpha chain variable domain of TCR clone 215419 (TRAV12-2, TRAJ36)
SLLIRDSQPSDSATLERANNLFF

SEQ ID NO: 430838 - protein, 14 aa, Homo sapiens
  CDR3 for beta chain variable domain of TCR clone 215419 (TRBV2, TRBJ2-1)
CASSYRGTHNEQFF

SEQ ID NO: 430839 - protein, 14 aa, Homo sapiens
  CDR3 for alpha chain variable domain of TCR clone 215420 (TRAV26-1, TRAJ34)
CIVRVAYNTDKIIF

SEQ ID NO: 430840 - protein, 14 aa, Homo sapiens
  CDR3 for beta chain variable domain of TCR clone 215420 (TRBV20-1, TRBJ1-3)
CSASPTGAGNTIYF

SEQ ID NO: 430841 - protein, 14 aa, Homo sapiens
  CDR3 for alpha chain variable domain of TCR clone 215421 (TRAV26-2, TRAJ38)
CILYNAVNNRKLIW

SEQ ID NO: 430842 - protein, 14 aa, Homo sapiens
  CDR3 for beta chain variable domain of TCR clone 215421 (TRBV19, TRBJ2-1)
CASPTFVLSGEQFF

SEQ ID NO: 430843 - protein, 16 aa, Homo sapiens
  CDR3 for alpha chain variable domain of TCR clone 215422 (TRAV23/DV6, TRAJ9)
CAASIGGNTGGFKTIF

SEQ ID NO: 430844 - protein, 14 aa, Homo sapiens
  CDR3 for beta chain variable domain of TCR clone 215422 (TRBV20-1, TRBJ1-1)
CSAMGGTANTEAFF

SEQ ID NO: 430845 - protein, 15 aa, Homo sapiens
  CDR3 for alpha chain variable domain of TCR clone 215423 (TRAV3, TRAJ20)
SAVRDIKLSDYKLSF

SEQ ID NO: 430846 - protein, 13 aa, Homo sapiens
  CDR3 for beta chain variable domain of TCR clone 215423 (TRBV5-7, TRBJ1-1)
CASSLFQNTEAFL

SEQ ID NO: 430847 - protein, 13 aa, Homo sapiens
  CDR3 for alpha chain variable domain of TCR clone 215424 (TRAV1-2, TRAJ31)
CAVRGYNNARLMF

SEQ ID NO: 430848 - protein, 17 aa, Homo sapiens
  CDR3 for beta chain variable domain of TCR clone 215424 (TRBV9, TRBJ2-6)
CASSVDGRGPGANVLTF

SEQ ID NO: 430849 - protein, 12 aa, Homo sapiens
  CDR3 for alpha chain variable domain of TCR clone 215425 (TRAV12-3, TRAJ17)
CATTLTGNKLTF

SEQ ID NO: 430850 - protein, 15 aa, Homo sapiens
  CDR3 for beta chain variable domain of TCR clone 215425 (TRBV19, TRBJ2-1)
CASSILGEGRNEQFF

SEQ ID NO: 430851 - protein, 14 aa, Homo sapiens
  CDR3 for alpha chain variable domain of TCR clone 215426 (TRAV35, TRAJ29)
CAGQLISGNTPLVF

SEQ ID NO: 430852 - protein, 11 aa, Homo sapiens
  CDR3 for beta chain variable domain of TCR clone 215426 (TRBV29-1, TRBJ2-5)
CSEDRTGTQYF

SEQ ID NO: 430853 - protein, 11 aa, Homo sapiens
  CDR3 for alpha chain variable domain of TCR clone 215427 (TRAV12-1, TRAJ33)
CVVNMNYQLIW

SEQ ID NO: 430854 - protein, 11 aa, Homo sapiens
  CDR3 for beta chain variable domain of TCR clone 215427 (TRBV10-1, TRBJ2-3)
FASSDSDTQYF

SEQ ID NO: 430855 - protein, 14 aa, Homo sapiens
  CDR3 for alpha chain variable domain of TCR clone 215428 (TRAV26-1, TRAJ21)
CIVRPPYNFNKFNF

SEQ ID NO: 430856 - protein, 14 aa, Homo sapiens
  CDR3 for beta chain variable domain of TCR clone 215428 (TRBV19, TRBJ2-1)
CASPTFVLSGEQFF

SEQ ID NO: 430857 - protein, 14 aa, Homo sapiens
  CDR3 for alpha chain variable domain of TCR clone 215429 (TRAV12-2, TRAJ33)
CAVKRARSNYQLIW

SEQ ID NO: 430858 - protein, 12 aa, Homo sapiens
  CDR3 for beta chain variable domain of TCR clone 215429 (TRBV24-1, TRBJ2-3)
CATSDATDTQYF

SEQ ID NO: 430859 - protein, 14 aa, Homo sapiens
  CDR3 for alpha chain variable domain of TCR clone 215430 (TRAV12-1, TRAJ3)
CGAARYSSASKIIF

SEQ ID NO: 430860 - protein, 15 aa, Homo sapiens
  CDR3 for beta chain variable domain of TCR clone 215430 (TRBV7-2, TRBJ2-6)
CASSREGSVANVLTF

SEQ ID NO: 430861 - protein, 18 aa, Homo sapiens
  CDR3 for alpha chain variable domain of TCR clone 215431 (TRAV21, TRAJ52)
CAVRPSPAGGTSYGKMTL

SEQ ID NO: 430862 - protein, 17 aa, Homo sapiens
  CDR3 for beta chain variable domain of TCR clone 215431 (TRBV13, TRBJ2-3)
CASSLSRVAGGRNTQHF

SEQ ID NO: 430863 - protein, 15 aa, Homo sapiens
  CDR3 for alpha chain variable domain of TCR clone 215432 (TRAV17, TRAJ26)
CATVDNYGQNFSLVP

SEQ ID NO: 430864 - protein, 16 aa, Homo sapiens
  CDR3 for beta chain variable domain of TCR clone 215432 (TRBV2, TRBJ2-1)
CASSVGGSLSYNEQFF

SEQ ID NO: 430865 - protein, 17 aa, Homo sapiens
  CDR3 for alpha chain variable domain of TCR clone 215433 (TRAV3, TRAJ12)
CAVRDGGRMDSSYKLIF

SEQ ID NO: 430866 - protein, 12 aa, Homo sapiens
  CDR3 for beta chain variable domain of TCR clone 215433 (TRBV12-4, TRBJ2-7)
CASSLGGYEQYF

SEQ ID NO: 430867 - protein, 14 aa, Homo sapiens
  CDR3 for alpha chain variable domain of TCR clone 215434 (TRAV3, TRAJ33)
CAVRDMDSNYQLIW

SEQ ID NO: 430868 - protein, 19 aa, Homo sapiens
  CDR3 for beta chain variable domain of TCR clone 215434 (TRBV7-3, TRBJ1-2)
CARSFPQGNDGELWLRLRF

SEQ ID NO: 430869 - protein, 13 aa, Homo sapiens
  CDR3 for alpha chain variable domain of TCR clone 215435 (TRAV27, TRAJ6)
CAGGTRGSCIPTF

SEQ ID NO: 430870 - protein, 16 aa, Homo sapiens
  CDR3 for beta chain variable domain of TCR clone 215435 (TRBV25-1, TRBJ2-7)
CASSELTGGGIYEQYF

SEQ ID NO: 430871 - protein, 11 aa, Homo sapiens
  CDR3 for alpha chain variable domain of TCR clone 215436 (TRAV21, TRAJ49)
CAVSFGNKFYF

SEQ ID NO: 430872 - protein, 15 aa, Homo sapiens
  CDR3 for beta chain variable domain of TCR clone 215436 (TRBV10-3, TRBJ2-1)
CATNGGPGQGDEQFF

SEQ ID NO: 430873 - protein, 12 aa, Homo sapiens
  CDR3 for alpha chain variable domain of TCR clone 215437 (TRAV8-6, TRAJ4)
CAVSDHPNKLIF

SEQ ID NO: 430874 - protein, 15 aa, Homo sapiens
  CDR3 for beta chain variable domain of TCR clone 215437 (TRBV19, TRBJ1-2)
CASSVGQVLNYGYTF

SEQ ID NO: 430875 - protein, 11 aa, Homo sapiens
  CDR3 for alpha chain variable domain of TCR clone 215438 (TRAV26-1, TRAJ37)
CIVRVGRKLIF

SEQ ID NO: 430876 - protein, 15 aa, Homo sapiens
  CDR3 for beta chain variable domain of TCR clone 215438 (TRBV7-3, TRBJ2-1)
CASSLSSGSFDEQFF

SEQ ID NO: 430877 - protein, 14 aa, Homo sapiens
  CDR3 for alpha chain variable domain of TCR clone 215439 (TRAV12-2, TRAJ18)
CAVKRGSTLGRRYF

SEQ ID NO: 430878 - protein, 16 aa, Homo sapiens
  CDR3 for beta chain variable domain of TCR clone 215439 (TRBV27, TRBJ2-3)
CASSFRGQLLRDTQYF

SEQ ID NO: 430879 - protein, 14 aa, Homo sapiens
  CDR3 for alpha chain variable domain of TCR clone 215440 (TRAV25, TRAJ23)
CAGQGDNQGGKLIF

SEQ ID NO: 430880 - protein, 12 aa, Homo sapiens
  CDR3 for beta chain variable domain of TCR clone 215440 (TRBV7-9, TRBJ1-1)
CASSLVRGDAFF

SEQ ID NO: 430881 - protein, 15 aa, Homo sapiens
  CDR3 for alpha chain variable domain of TCR clone 215441 (TRAV3, TRAJ20)
CAVRDIKLSDYKLSF

SEQ ID NO: 430882 - protein, 13 aa, Homo sapiens
  CDR3 for beta chain variable domain of TCR clone 215441 (TRBV27, TRBJ1-4)
CASSLMGDEKLFF

SEQ ID NO: 430883 - protein, 12 aa, Homo sapiens
  CDR3 for alpha chain variable domain of TCR clone 215442 (TRAV13-1, TRAJ22)
DLSSGSARQLTF

SEQ ID NO: 430884 - protein, 13 aa, Homo sapiens
  CDR3 for beta chain variable domain of TCR clone 215442 (TRBV7-7, TRBJ1-5)
CASSPGKKQPQHF

SEQ ID NO: 430885 - protein, 12 aa, Homo sapiens
  CDR3 for alpha chain variable domain of TCR clone 215443 (TRAV17, TRAJ30)
CATDARDDKIIF

SEQ ID NO: 430886 - protein, 14 aa, Homo sapiens
  CDR3 for beta chain variable domain of TCR clone 215443 (TRBV12-5, TRBJ2-5)
CASGSRTHQETQYF

SEQ ID NO: 430887 - protein, 23 aa, Homo sapiens
  CDR3 for alpha chain variable domain of TCR clone 215444 (TRAV26-1, TRAJ38)
CIADNAGNNHIQNPDPAVYQLRD

SEQ ID NO: 430888 - protein, 17 aa, Homo sapiens
  CDR3 for beta chain variable domain of TCR clone 215444 (TRBV11-2, TRBJ2-6)
CASSQRDIFSGANVLTS

SEQ ID NO: 430889 - protein, 16 aa, Homo sapiens
  CDR3 for alpha chain variable domain of TCR clone 215445 (TRAV30, TRAJ24)
CGTEIVDADSWGKFQF

SEQ ID NO: 430890 - protein, 18 aa, Homo sapiens
  CDR3 for beta chain variable domain of TCR clone 215445 (TRBV28, TRBJ2-7)
CASSLFLRQGAPSSTSGR

SEQ ID NO: 430891 - protein, 14 aa, Homo sapiens
  CDR3 for alpha chain variable domain of TCR clone 215446 (TRAV29/DV5, TRAJ45)
FAPYSGGGADGLTF

SEQ ID NO: 430892 - protein, 13 aa, Homo sapiens
  CDR3 for beta chain variable domain of TCR clone 215446 (TRBV29-1, TRBJ2-3)
CSATRGGRDTQYF

SEQ ID NO: 430893 - protein, 13 aa, Homo sapiens
  CDR3 for alpha chain variable domain of TCR clone 215447 (TRAV27, TRAJ8)
CAGGPTGFQKLVF

SEQ ID NO: 430894 - protein, 16 aa, Homo sapiens
  CDR3 for beta chain variable domain of TCR clone 215447 (TRBV20-1, TRBJ2-1)
CSARGSSSGMVNEQFF

SEQ ID NO: 430895 - protein, 12 aa, Homo sapiens
  CDR3 for alpha chain variable domain of TCR clone 215448 (TRAV13-1, TRAJ49)
CAASPMGTQFYF

SEQ ID NO: 430896 - protein, 13 aa, Homo sapiens
  CDR3 for beta chain variable domain of TCR clone 215448 (TRBV20-1, TRBJ2-2)
CSASAAGTGELFF

SEQ ID NO: 430897 - protein, 12 aa, Homo sapiens
  CDR3 for alpha chain variable domain of TCR clone 215449 (TRAV12-3, TRAJ3)
CAIDSSAPKIIF

SEQ ID NO: 430898 - protein, 17 aa, Homo sapiens
  CDR3 for beta chain variable domain of TCR clone 215449 (TRBV7-9, TRBJ2-3)
CASSLEEAGAYPDTQYF

SEQ ID NO: 430899 - protein, 13 aa, Homo sapiens
  CDR3 for alpha chain variable domain of TCR clone 215450 (TRAV25, TRAJ21)
CAGLRGNFNKFYF

SEQ ID NO: 430900 - protein, 16 aa, Homo sapiens
  CDR3 for beta chain variable domain of TCR clone 215450 (TRBV27, TRBJ2-2)
CASSFRGLVRTGELFF

SEQ ID NO: 430901 - protein, 18 aa, Homo sapiens
  CDR3 for alpha chain variable domain of TCR clone 215451 (TRAV13-1, TRAJ52)
CAASKRSAGGTSYGKLTF

SEQ ID NO: 430902 - protein, 14 aa, Homo sapiens
  CDR3 for beta chain variable domain of TCR clone 215451 (TRBV6-3, TRBJ2-2)
CASTYTPDTGELFF

SEQ ID NO: 430903 - protein, 18 aa, Homo sapiens
  CDR3 for alpha chain variable domain of TCR clone 215452 (TRAV21, TRAJ52)
CAVRPSPAGGTSYGKLTF

SEQ ID NO: 430904 - protein, 13 aa, Homo sapiens
  CDR3 for beta chain variable domain of TCR clone 215452 (TRBV5-7, TRBJ1-2)
CASSLGTGYGYTF

SEQ ID NO: 430905 - protein, 12 aa, Homo sapiens
  CDR3 for alpha chain variable domain of TCR clone 215453 (TRAV8-3, TRAJ26)
CAGDNYGQNFVS

SEQ ID NO: 430906 - protein, 13 aa, Homo sapiens
  CDR3 for beta chain variable domain of TCR clone 215453 (TRBV10-3, TRBJ2-7)
CASKLAVNYEQYF

SEQ ID NO: 430907 - protein, 10 aa, Homo sapiens
  CDR3 for alpha chain variable domain of TCR clone 215454 (TRAV36/DV7, TRAJ49)
CALTGNQFYF

SEQ ID NO: 430908 - protein, 12 aa, Homo sapiens
  CDR3 for beta chain variable domain of TCR clone 215454 (TRBV11-2, TRBJ2-2)
CASSLGGGELFF

SEQ ID NO: 430909 - protein, 14 aa, Homo sapiens
  CDR3 for alpha chain variable domain of TCR clone 215455 (TRAV2, TRAJ37)
CAVDFTSNTGKLIF

SEQ ID NO: 430910 - protein, 15 aa, Homo sapiens
  CDR3 for beta chain variable domain of TCR clone 215455 (TRBV11-2, TRBJ2-2)
CASSSDRVNAGELFF

SEQ ID NO: 430911 - protein, 12 aa, Homo sapiens
  CDR3 for alpha chain variable domain of TCR clone 215456 (TRAV12-1, TRAJ31)
CVSWNNNARLMF

SEQ ID NO: 430912 - protein, 15 aa, Homo sapiens
  CDR3 for beta chain variable domain of TCR clone 215456 (TRBV7-2, TRBJ1-5)
CASSRDRGQDPPQHF

SEQ ID NO: 430913 - protein, 17 aa, Homo sapiens
  CDR3 for alpha chain variable domain of TCR clone 215457 (TRAV27, TRAJ52)
CVGAGWAGGTSYGKLTF

SEQ ID NO: 430914 - protein, 16 aa, Homo sapiens
  CDR3 for beta chain variable domain of TCR clone 215457 (TRBV19, TRBJ2-1)
CASSKAGPSSYNEQFF

SEQ ID NO: 430915 - protein, 17 aa, Homo sapiens
  CDR3 for alpha chain variable domain of TCR clone 215458 (TRAV3, TRAJ28)
CAVRPLYSGAGSYQLTF

SEQ ID NO: 430916 - protein, 17 aa, Homo sapiens
  CDR3 for beta chain variable domain of TCR clone 215458 (TRBV7-3, TRBJ2-3)
CASSLMKRMRGADTQYF

SEQ ID NO: 430917 - protein, 14 aa, Homo sapiens
  CDR3 for alpha chain variable domain of TCR clone 215459 (TRAV21, TRAJ45)
CAVHSGGGADGLTF

SEQ ID NO: 430918 - protein, 14 aa, Homo sapiens
  CDR3 for beta chain variable domain of TCR clone 215459 (TRBV20-1, TRBJ2-1)
CSARRLAEANAQFF

SEQ ID NO: 430919 - protein, 17 aa, Homo sapiens
  CDR3 for alpha chain variable domain of TCR clone 215460 (TRAV3, TRAJ42)
CAVREREYGGSQGNLIF

SEQ ID NO: 430920 - protein, 15 aa, Homo sapiens
  CDR3 for beta chain variable domain of TCR clone 215460 (TRBV2, TRBJ2-7)
CASSEGLARSYEQYF

SEQ ID NO: 430921 - protein, 18 aa, Homo sapiens
  CDR3 for alpha chain variable domain of TCR clone 215461 (TRAV21, TRAJ52)
CAVRPSPASGTSYGKLTF

SEQ ID NO: 430922 - protein, 17 aa, Homo sapiens
  CDR3 for beta chain variable domain of TCR clone 215461 (TRBV25-1, TRBJ2-1)
CASSAYGQGRGVYEQFF

SEQ ID NO: 430923 - protein, 14 aa, Homo sapiens
  CDR3 for alpha chain variable domain of TCR clone 215462 (TRAV1-2, TRAJ16)
CAVNRFSDGQKLLF

SEQ ID NO: 430924 - protein, 14 aa, Homo sapiens
  CDR3 for beta chain variable domain of TCR clone 215462 (TRBV13, TRBJ2-1)
CASSAGQGAYEQFF

SEQ ID NO: 430925 - protein, 14 aa, Homo sapiens
  CDR3 for alpha chain variable domain of TCR clone 215463 (TRAV1-2, TRAJ6)
CAVSLSGGSYIPTF

SEQ ID NO: 430926 - protein, 12 aa, Homo sapiens
  CDR3 for beta chain variable domain of TCR clone 215463 (TRBV11-2, TRBJ2-2)
CASSLGGGELFF

SEQ ID NO: 430927 - protein, 15 aa, Homo sapiens
  CDR3 for alpha chain variable domain of TCR clone 215464 (TRAV27, TRAJ38)
CAARRNAGNNRKLFG

SEQ ID NO: 430928 - protein, 13 aa, Homo sapiens
  CDR3 for beta chain variable domain of TCR clone 215464 (TRBV12-5, TRBJ2-3)
CASGDRQSDTQYF

SEQ ID NO: 430929 - protein, 12 aa, Homo sapiens
  CDR3 for alpha chain variable domain of TCR clone 215465 (TRAV21, TRAJ13)
PGPSGGYQKVTF

SEQ ID NO: 430930 - protein, 16 aa, Homo sapiens
  CDR3 for beta chain variable domain of TCR clone 215465 (TRBV12-4, TRBJ1-5)
CASSRPVGGSNQPQHF

SEQ ID NO: 430931 - protein, 14 aa, Homo sapiens
  CDR3 for alpha chain variable domain of TCR clone 215466 (TRAV6, TRAJ17)
CALDLKAAGNKLTF

SEQ ID NO: 430932 - protein, 15 aa, Homo sapiens
  CDR3 for beta chain variable domain of TCR clone 215466 (TRBV18, TRBJ2-7)
CASSPRSGTAYEQYF

SEQ ID NO: 430933 - protein, 14 aa, Homo sapiens
  CDR3 for alpha chain variable domain of TCR clone 215467 (TRAV27, TRAJ23)
CAGLSYNQEGKLIF

SEQ ID NO: 430934 - protein, 15 aa, Homo sapiens
  CDR3 for beta chain variable domain of TCR clone 215467 (TRBV19, TRBJ2-2)
CASSLNRGVTGELFF

SEQ ID NO: 430935 - protein, 12 aa, Homo sapiens
  CDR3 for alpha chain variable domain of TCR clone 215468 (TRAV12-2, TRAJ10)
WGVTGGGNKLTF

SEQ ID NO: 430936 - protein, 16 aa, Homo sapiens
  CDR3 for beta chain variable domain of TCR clone 215468 (TRBV6-4, TRBJ1-2)
CASSGAVGDPNYGYAF

SEQ ID NO: 430937 - protein, 13 aa, Homo sapiens
  CDR3 for alpha chain variable domain of TCR clone 215469 (TRAV12-1, TRAJ16)
CVVNGPDGQKLLF

SEQ ID NO: 430938 - protein, 14 aa, Homo sapiens
  CDR3 for beta chain variable domain of TCR clone 215469 (TRBV27, TRBJ2-2)
CASRPGVNTGELFF

SEQ ID NO: 430939 - protein, 14 aa, Homo sapiens
  CDR3 for alpha chain variable domain of TCR clone 215470 (TRAV1-2, TRAJ16)
CAFNRFSDGKKLLF

SEQ ID NO: 430940 - protein, 15 aa, Homo sapiens
  CDR3 for beta chain variable domain of TCR clone 215470 (TRBV20-1, TRBJ2-7)
CSARDRVSGMDEQYF

SEQ ID NO: 430941 - protein, 17 aa, Homo sapiens
  CDR3 for alpha chain variable domain of TCR clone 215471 (TRAV8-1, TRAJ43)
CAVTNDMRFGAGTRLTV

SEQ ID NO: 430942 - protein, 13 aa, Homo sapiens
  CDR3 for beta chain variable domain of TCR clone 215471 (TRBV7-3, TRBJ1-1)
CASSQDWGAEAVF

SEQ ID NO: 430943 - protein, 14 aa, Homo sapiens
  CDR3 for alpha chain variable domain of TCR clone 215472 (TRAV8-2, TRAJ6)
CVVISAGGSYIPTS

SEQ ID NO: 430944 - protein, 16 aa, Homo sapiens
  CDR3 for beta chain variable domain of TCR clone 215472 (TRBV7-6, TRBJ2-6)
CASSLPGLSGANVLTF

SEQ ID NO: 430945 - protein, 18 aa, Homo sapiens
  CDR3 for alpha chain variable domain of TCR clone 215473 (TRAV13-1, TRAJ52)
CAANNPNAGGTSYGKLTF

SEQ ID NO: 430946 - protein, 14 aa, Homo sapiens
  CDR3 for beta chain variable domain of TCR clone 215473 (TRBV4-3, TRBJ2-2)
CASSQGHVTGELFF

SEQ ID NO: 430947 - protein, 13 aa, Homo sapiens
  CDR3 for alpha chain variable domain of TCR clone 215474 (TRAV8-3, TRAJ6)
CSARRGGSYIPTF

SEQ ID NO: 430948 - protein, 15 aa, Homo sapiens
  CDR3 for beta chain variable domain of TCR clone 215474 (TRBV4-1, TRBJ2-3)
CASSNLAGGRDTQYF

SEQ ID NO: 430949 - protein, 16 aa, Homo sapiens
  CDR3 for alpha chain variable domain of TCR clone 215475 (TRAV16, TRAJ4)
CITVLPFSGGYNKLIF

SEQ ID NO: 430950 - protein, 15 aa, Homo sapiens
  CDR3 for beta chain variable domain of TCR clone 215475 (TRBV20-1, TRBJ2-7)
CSARDRVSGMDEQYF

SEQ ID NO: 430951 - protein, 14 aa, Homo sapiens
  CDR3 for alpha chain variable domain of TCR clone 215476 (TRAV1-2, TRAJ8)
CAVREDAGFQELVF

SEQ ID NO: 430952 - protein, 14 aa, Homo sapiens
  CDR3 for beta chain variable domain of TCR clone 215476 (TRBV20-1, TRBJ1-1)
CSAQTRIGCTEAFF

SEQ ID NO: 430953 - protein, 13 aa, Homo sapiens
  CDR3 for alpha chain variable domain of TCR clone 215477 (TRAV8-6, TRAJ49)
CAVITNTGNQFSF

SEQ ID NO: 430954 - protein, 13 aa, Homo sapiens
  CDR3 for beta chain variable domain of TCR clone 215477 (TRBV7-9, TRBJ1-2)
CASSLKQNYGYTF

SEQ ID NO: 430955 - protein, 17 aa, Homo sapiens
  CDR3 for alpha chain variable domain of TCR clone 215478 (TRAV1-2, TRAJ23)
CAVRPHSIYNQGGKLIF

SEQ ID NO: 430956 - protein, 15 aa, Homo sapiens
  CDR3 for beta chain variable domain of TCR clone 215478 (TRBV12-4, TRBJ2-5)
CASSPPTGLQETQYF

SEQ ID NO: 430957 - protein, 15 aa, Homo sapiens
  CDR3 for alpha chain variable domain of TCR clone 215479 (TRAV35, TRAJ23)
CAGQLGYNQGGKLIF

SEQ ID NO: 430958 - protein, 16 aa, Homo sapiens
  CDR3 for beta chain variable domain of TCR clone 215479 (TRBV27, TRBJ2-1)
CASSSRLAGNYNEQFF

SEQ ID NO: 430959 - protein, 10 aa, Homo sapiens
  CDR3 for alpha chain variable domain of TCR clone 215480 (TRAV12-2, TRAJ43)
CAVKILSMRF

SEQ ID NO: 430960 - protein, 14 aa, Homo sapiens
  CDR3 for beta chain variable domain of TCR clone 215480 (TRBV11-2, TRBJ2-7)
CASSLGNNLYEQYF

SEQ ID NO: 430961 - protein, 10 aa, Homo sapiens
  CDR3 for alpha chain variable domain of TCR clone 215481 (TRAV36/DV7, TRAJ49)
CALTGNQFYF

SEQ ID NO: 430962 - protein, 15 aa, Homo sapiens
  CDR3 for beta chain variable domain of TCR clone 215481 (TRBV5-1, TRBJ2-7)
CASSLNGGPAREQYF

SEQ ID NO: 430963 - protein, 14 aa, Homo sapiens
  CDR3 for alpha chain variable domain of TCR clone 215482 (TRAV12-2, TRAJ5)
CAVNSSTGRRALTF

SEQ ID NO: 430964 - protein, 15 aa, Homo sapiens
  CDR3 for beta chain variable domain of TCR clone 215482 (TRBV20-1, TRBJ2-5)
CSAPPRTGFGETQYF

SEQ ID NO: 430965 - protein, 10 aa, Homo sapiens
  CDR3 for alpha chain variable domain of TCR clone 215483 (TRAV8-4, TRAJ43)
CAVSADDMRF

SEQ ID NO: 430966 - protein, 10 aa, Homo sapiens
  CDR3 for beta chain variable domain of TCR clone 215483 (TRBV4-1, TRBJ2-7)
SRGDRHEQYF

SEQ ID NO: 430967 - protein, 15 aa, Homo sapiens
  CDR3 for alpha chain variable domain of TCR clone 215484 (TRAV2, TRAJ9)
CAVENRGTGGFRTIF

SEQ ID NO: 430968 - protein, 16 aa, Homo sapiens
  CDR3 for beta chain variable domain of TCR clone 215484 (TRBV24-1, TRBJ2-3)
CATSDPGTGATDTQYF

SEQ ID NO: 430969 - protein, 23 aa, Homo sapiens
  CDR3 for alpha chain variable domain of TCR clone 215485 (TRAV26-1, )
CIADNAGNNYIQNPDPAVYQLRD

SEQ ID NO: 430970 - protein, 13 aa, Homo sapiens
  CDR3 for beta chain variable domain of TCR clone 215485 (TRBV10-3, TRBJ2-7)
CASKLAVNYEQYF

SEQ ID NO: 430971 - protein, 14 aa, Homo sapiens
  CDR3 for alpha chain variable domain of TCR clone 215486 (TRAV3, TRAJ21)
CALGRGSTNFILDL

SEQ ID NO: 430972 - protein, 14 aa, Homo sapiens
  CDR3 for beta chain variable domain of TCR clone 215486 (TRBV7-9, TRBJ2-4)
CASSLAMGGNMQYF

SEQ ID NO: 430973 - protein, 12 aa, Homo sapiens
  CDR3 for alpha chain variable domain of TCR clone 215487 (TRAV13-1, TRAJ5)
CAAKAGRRALTF

SEQ ID NO: 430974 - protein, 13 aa, Homo sapiens
  CDR3 for beta chain variable domain of TCR clone 215487 (TRBV7-9, TRBJ1-2)
CASSLKQNYGYSF

SEQ ID NO: 430975 - protein, 15 aa, Homo sapiens
  CDR3 for alpha chain variable domain of TCR clone 215488 (TRAV38-2/DV8, TRAJ45)
CAYWDSGGGADGLTF

SEQ ID NO: 430976 - protein, 16 aa, Homo sapiens
  CDR3 for beta chain variable domain of TCR clone 215488 (TRBV19, TRBJ1-1)
CASSPTRFWPGTEAFL

SEQ ID NO: 430977 - protein, 11 aa, Homo sapiens
  CDR3 for alpha chain variable domain of TCR clone 215489 (TRAV6, TRAJ39)
CAPDAGNMLTF

SEQ ID NO: 430978 - protein, 14 aa, Homo sapiens
  CDR3 for beta chain variable domain of TCR clone 215489 (TRBV5-1, TRBJ2-7)
CASSRGESLYEQYF

SEQ ID NO: 430979 - protein, 13 aa, Homo sapiens
  CDR3 for alpha chain variable domain of TCR clone 215490 (TRAV2, TRAJ21)
CAVEDLNFNKFYF

SEQ ID NO: 430980 - protein, 15 aa, Homo sapiens
  CDR3 for beta chain variable domain of TCR clone 215490 (TRBV28, TRBJ2-5)
CASSPGQWSIETQYF

SEQ ID NO: 430981 - protein, 19 aa, Homo sapiens
  CDR3 for alpha chain variable domain of TCR clone 215491 (TRAV25, TRAJ20)
TATQTTDVGILPHDYKLSF

SEQ ID NO: 430982 - protein, 17 aa, Homo sapiens
  CDR3 for beta chain variable domain of TCR clone 215491 (TRBV7-2, TRBJ1-4)
CASSFKAGPTTNEKLFF

SEQ ID NO: 430983 - protein, 13 aa, Homo sapiens
  CDR3 for alpha chain variable domain of TCR clone 215492 (TRAV21, TRAJ15)
CAVANQPGTALIF

SEQ ID NO: 430984 - protein, 14 aa, Homo sapiens
  CDR3 for beta chain variable domain of TCR clone 215492 (TRBV27, TRBJ2-2)
CASSLGAATGELFF

SEQ ID NO: 430985 - protein, 13 aa, Homo sapiens
  CDR3 for alpha chain variable domain of TCR clone 215493 (TRAV3, TRAJ27)
CAVRPLGAGKSPF

SEQ ID NO: 430986 - protein, 12 aa, Homo sapiens
  CDR3 for beta chain variable domain of TCR clone 215493 (TRBV11-2, TRBJ2-2)
CASSLGGGELFF

SEQ ID NO: 430987 - protein, 16 aa, Homo sapiens
  CDR3 for alpha chain variable domain of TCR clone 215494 (TRAV8-3, TRAJ10)
CAVGPILTGGGNKLTF

SEQ ID NO: 430988 - protein, 15 aa, Homo sapiens
  CDR3 for beta chain variable domain of TCR clone 215494 (TRBV7-2, TRBJ2-2)
CASRCPGQNTGELFF

SEQ ID NO: 430989 - protein, 10 aa, Homo sapiens
  CDR3 for alpha chain variable domain of TCR clone 215495 (TRAV3, TRAJ30)
WAVREIEIIF

SEQ ID NO: 430990 - protein, 14 aa, Homo sapiens
  CDR3 for beta chain variable domain of TCR clone 215495 (TRBV15, TRBJ2-3)
CATRSGTSTDTQYF

SEQ ID NO: 430991 - protein, 16 aa, Homo sapiens
  CDR3 for alpha chain variable domain of TCR clone 215496 (TRAV16, TRAJ42)
CARKMNYGGSQGNLIF

SEQ ID NO: 430992 - protein, 14 aa, Homo sapiens
  CDR3 for beta chain variable domain of TCR clone 215496 (TRBV14, TRBJ2-3)
CQQPNDRDTDTQYF

SEQ ID NO: 430993 - protein, 14 aa, Homo sapiens
  CDR3 for alpha chain variable domain of TCR clone 215497 (TRAV21, TRAJ35)
CAVMPIGLGNVLHC

SEQ ID NO: 430994 - protein, 12 aa, Homo sapiens
  CDR3 for beta chain variable domain of TCR clone 215497 (TRBV7-9, TRBJ2-7)
CASSIKGEEQYF

SEQ ID NO: 430995 - protein, 14 aa, Homo sapiens
  CDR3 for alpha chain variable domain of TCR clone 215498 (TRAV12-2, TRAJ11)
CAVNRESGYSTLTF

SEQ ID NO: 430996 - protein, 13 aa, Homo sapiens
  CDR3 for beta chain variable domain of TCR clone 215498 (TRBV12-4, TRBJ2-5)
CASRLAVQETQYF

SEQ ID NO: 430997 - protein, 14 aa, Homo sapiens
  CDR3 for alpha chain variable domain of TCR clone 215499 (TRAV38-2/DV8, TRAJ49)
CAYRSAMAGNQFYF

SEQ ID NO: 430998 - protein, 16 aa, Homo sapiens
  CDR3 for beta chain variable domain of TCR clone 215499 (TRBV2, TRBJ1-4)
CASNLLQGATNEKLFF

SEQ ID NO: 430999 - protein, 12 aa, Homo sapiens
  CDR3 for alpha chain variable domain of TCR clone 215500 (TRAV13-1, TRAJ21)
CAAKEGFNRFYF

SEQ ID NO: 431000 - protein, 15 aa, Homo sapiens
  CDR3 for beta chain variable domain of TCR clone 215500 (TRBV25-1, TRBJ1-4)
CASSPRDSTNEKLFF

SEQ ID NO: 431001 - protein, 15 aa, Homo sapiens
  CDR3 for alpha chain variable domain of TCR clone 215501 (TRAV13-2, TRAJ37)
CAEPHGASNTGKLIF

SEQ ID NO: 431002 - protein, 16 aa, Homo sapiens
  CDR3 for beta chain variable domain of TCR clone 215501 (TRBV18, TRBJ1-1)
CASSPGVGGRGGEAFF

SEQ ID NO: 431003 - protein, 14 aa, Homo sapiens
  CDR3 for alpha chain variable domain of TCR clone 215502 (TRAV12-2, TRAJ13)
CAVTKTGGYQKVTF

SEQ ID NO: 431004 - protein, 15 aa, Homo sapiens
  CDR3 for beta chain variable domain of TCR clone 215502 (TRBV28, TRBJ2-5)
CASSPPWSYQETQYF

SEQ ID NO: 431005 - protein, 12 aa, Homo sapiens
  CDR3 for alpha chain variable domain of TCR clone 215503 (TRAV17, TRAJ29)
CYASSGNTPLVF

SEQ ID NO: 431006 - protein, 16 aa, Homo sapiens
  CDR3 for beta chain variable domain of TCR clone 215503 (TRBV25-1, TRBJ1-5)
CASGAPTVNSNQPQHF

SEQ ID NO: 431007 - protein, 18 aa, Homo sapiens
  CDR3 for alpha chain variable domain of TCR clone 215504 (TRAV21, TRAJ52)
CAVRPSPAGGTSDGKLTF

SEQ ID NO: 431008 - protein, 17 aa, Homo sapiens
  CDR3 for beta chain variable domain of TCR clone 215504 (TRBV13, TRBJ2-3)
CASSFSRVAGGRNTQYF

SEQ ID NO: 431009 - protein, 16 aa, Homo sapiens
  CDR3 for alpha chain variable domain of TCR clone 215505 (TRAV8-3, TRAJ28)
CAVPPQRGAGSYQLNF

SEQ ID NO: 431010 - protein, 13 aa, Homo sapiens
  CDR3 for beta chain variable domain of TCR clone 215505 (TRBV7-6, TRBJ2-3)
CASSLRSDNTQYF

SEQ ID NO: 431011 - protein, 11 aa, Homo sapiens
  CDR3 for alpha chain variable domain of TCR clone 215506 (TRAV1-1, TRAJ23)
CAVRQGGKLIF

SEQ ID NO: 431012 - protein, 14 aa, Homo sapiens
  CDR3 for beta chain variable domain of TCR clone 215506 (TRBV5-4, TRBJ1-1)
CASSLDSRRDEAFF

SEQ ID NO: 431013 - protein, 16 aa, Homo sapiens
  CDR3 for alpha chain variable domain of TCR clone 215507 (TRAV3, TRAJ10)
CAVRDMRAGGGNKLTF

SEQ ID NO: 431014 - protein, 14 aa, Homo sapiens
  CDR3 for beta chain variable domain of TCR clone 215507 (TRBV5-5, TRBJ1-5)
CASSGQGVDQAQHF

SEQ ID NO: 431015 - protein, 13 aa, Homo sapiens
  CDR3 for alpha chain variable domain of TCR clone 215508 (TRAV3, TRAJ21)
CAVRDPDLNKFYF

SEQ ID NO: 431016 - protein, 13 aa, Homo sapiens
  CDR3 for beta chain variable domain of TCR clone 215508 (TRBV9, TRBJ2-1)
CASSPSGGNEQFF

SEQ ID NO: 431017 - protein, 15 aa, Homo sapiens
  CDR3 for alpha chain variable domain of TCR clone 215509 (TRAV23/DV6, TRAJ18)
CAARYRGSTLGRRDF

SEQ ID NO: 431018 - protein, 13 aa, Homo sapiens
  CDR3 for beta chain variable domain of TCR clone 215509 (TRBV7-2, TRBJ2-7)
CASSSPSGSEQYF

SEQ ID NO: 431019 - protein, 13 aa, Homo sapiens
  CDR3 for alpha chain variable domain of TCR clone 215510 (TRAV8-1, TRAJ32)
CAADGGATNKLIF

SEQ ID NO: 431020 - protein, 15 aa, Homo sapiens
  CDR3 for beta chain variable domain of TCR clone 215510 (TRBV7-9, TRBJ1-4)
CASSARTGGNEKLFF

SEQ ID NO: 431021 - protein, 14 aa, Homo sapiens
  CDR3 for alpha chain variable domain of TCR clone 215511 (TRAV1-2, TRAJ8)
CVVREDTGFQKLVF

SEQ ID NO: 431022 - protein, 15 aa, Homo sapiens
  CDR3 for beta chain variable domain of TCR clone 215511 (TRBV12-4, TRBJ2-5)
CASSPPTGLQETQYS

SEQ ID NO: 431023 - protein, 16 aa, Homo sapiens
  CDR3 for alpha chain variable domain of TCR clone 215512 (TRAV3, TRAJ18)
CAVRDGRGSTLGRLYF

SEQ ID NO: 431024 - protein, 13 aa, Homo sapiens
  CDR3 for beta chain variable domain of TCR clone 215512 (TRBV7-3, TRBJ1-1)
CASSQDWGAEAFF

SEQ ID NO: 431025 - protein, 14 aa, Homo sapiens
  CDR3 for alpha chain variable domain of TCR clone 215513 (TRAV29/DV5, TRAJ44)
CAASALGTASKLTV

SEQ ID NO: 431026 - protein, 13 aa, Homo sapiens
  CDR3 for beta chain variable domain of TCR clone 215513 (TRBV29-1, TRBJ2-7)
CSVKRGGNYEQYF

SEQ ID NO: 431027 - protein, 13 aa, Homo sapiens
  CDR3 for alpha chain variable domain of TCR clone 215514 (TRAV27, TRAJ6)
CAGGTRGSYIPTF

SEQ ID NO: 431028 - protein, 15 aa, Homo sapiens
  CDR3 for beta chain variable domain of TCR clone 215514 (TRBV19, TRBJ1-2)
CASSVGQVLNYGYTF

SEQ ID NO: 431029 - protein, 15 aa, Homo sapiens
  CDR3 for alpha chain variable domain of TCR clone 215515 (TRAV8-3, TRAJ32)
CAVGPYGGATNKLIF

SEQ ID NO: 431030 - protein, 19 aa, Homo sapiens
  CDR3 for beta chain variable domain of TCR clone 215515 (TRBV19, TRBJ2-5)
CASSIGQVTDFFLGETQYF

SEQ ID NO: 431031 - protein, 16 aa, Homo sapiens
  CDR3 for alpha chain variable domain of TCR clone 215516 (TRAV4, TRAJ5)
CLVGPDHGHGQESTYF

SEQ ID NO: 431032 - protein, 16 aa, Homo sapiens
  CDR3 for beta chain variable domain of TCR clone 215516 (TRBV12-4, TRBJ2-5)
CASSFFVRGRQETQYF

SEQ ID NO: 431033 - protein, 15 aa, Homo sapiens
  CDR3 for alpha chain variable domain of TCR clone 215517 (TRAV27, TRAJ22)
CAGAPLQGSARQLTF

SEQ ID NO: 431034 - protein, 16 aa, Homo sapiens
  CDR3 for beta chain variable domain of TCR clone 215517 (TRBV19, TRBJ2-2)
CASTLGASGAPGELFF

SEQ ID NO: 431035 - protein, 14 aa, Homo sapiens
  CDR3 for alpha chain variable domain of TCR clone 215518 (TRAV1-2, TRAJ8)
CAVRDDTGFQKLVF

SEQ ID NO: 431036 - protein, 15 aa, Homo sapiens
  CDR3 for beta chain variable domain of TCR clone 215518 (TRBV5-7, TRBJ2-3)
CASSPGLATTDTQYF

SEQ ID NO: 431037 - protein, 13 aa, Homo sapiens
  CDR3 for alpha chain variable domain of TCR clone 215519 (TRAV3, TRAJ43)
CAVRDTRGGDMRF

SEQ ID NO: 431038 - protein, 15 aa, Homo sapiens
  CDR3 for beta chain variable domain of TCR clone 215519 (TRBV6-5, TRBJ1-5)
CASSYSRRSNQPQQF

SEQ ID NO: 431039 - protein, 13 aa, Homo sapiens
  CDR3 for alpha chain variable domain of TCR clone 215520 (TRAV2, TRAJ40)
CAVVTSGTYKYIF

SEQ ID NO: 431040 - protein, 14 aa, Homo sapiens
  CDR3 for beta chain variable domain of TCR clone 215520 (TRBV7-3, TRBJ2-7)
CASSLKADSYEQYF

SEQ ID NO: 431041 - protein, 15 aa, Homo sapiens
  CDR3 for alpha chain variable domain of TCR clone 215521 (TRAV39, TRAJ32)
CAVAMEGGATNKLIF

SEQ ID NO: 431042 - protein, 17 aa, Homo sapiens
  CDR3 for beta chain variable domain of TCR clone 215521 (TRBV7-2, TRBJ1-4)
CASSFKAGPTTNEKLFF

SEQ ID NO: 431043 - protein, 14 aa, Homo sapiens
  CDR3 for alpha chain variable domain of TCR clone 215522 (TRAV4, TRAJ20)
RLVGDFINDYKLSF

SEQ ID NO: 431044 - protein, 15 aa, Homo sapiens
  CDR3 for beta chain variable domain of TCR clone 215522 (TRBV9, TRBJ1-6)
CASSVAGTGDSPLHF

SEQ ID NO: 431045 - protein, 16 aa, Homo sapiens
  CDR3 for alpha chain variable domain of TCR clone 215523 (TRAV30, TRAJ24)
CGTEIVDADSWGKFQF

SEQ ID NO: 431046 - protein, 12 aa, Homo sapiens
  CDR3 for beta chain variable domain of TCR clone 215523 (TRBV14, TRBJ2-7)
CASSLYKDEQYF

SEQ ID NO: 431047 - protein, 14 aa, Homo sapiens
  CDR3 for alpha chain variable domain of TCR clone 215524 (TRAV1-2, TRAJ8)
CAMREDTGFQKLVF

SEQ ID NO: 431048 - protein, 15 aa, Homo sapiens
  CDR3 for beta chain variable domain of TCR clone 215524 (TRBV9, TRBJ1-6)
CASSVAGTGDSPLHF

SEQ ID NO: 431049 - protein, 12 aa, Homo sapiens
  CDR3 for alpha chain variable domain of TCR clone 215525 (TRAV8-3, TRAJ7)
CAVGAGEQQTRF

SEQ ID NO: 431050 - protein, 17 aa, Homo sapiens
  CDR3 for beta chain variable domain of TCR clone 215525 (TRBV7-8, TRBJ2-6)
CASSAGTGGAGANVLTF

SEQ ID NO: 431051 - protein, 10 aa, Homo sapiens
  CDR3 for alpha chain variable domain of TCR clone 215526 (TRAV21, TRAJ31)
CAVDNARLMF

SEQ ID NO: 431052 - protein, 12 aa, Homo sapiens
  CDR3 for beta chain variable domain of TCR clone 215526 (TRBV7-6, TRBJ2-7)
CASSLADSEQYF

SEQ ID NO: 431053 - protein, 15 aa, Homo sapiens
  CDR3 for alpha chain variable domain of TCR clone 215527 (TRAV13-2, TRAJ53)
CAERGSRGSNYKLTF

SEQ ID NO: 431054 - protein, 14 aa, Homo sapiens
  CDR3 for beta chain variable domain of TCR clone 215527 (TRBV4-1, TRBJ2-2)
RASSQYPDTGELFF

SEQ ID NO: 431055 - protein, 17 aa, Homo sapiens
  CDR3 for alpha chain variable domain of TCR clone 215528 (TRAV8-2, )
CVVNIQNPDPAVYQLRD

SEQ ID NO: 431056 - protein, 14 aa, Homo sapiens
  CDR3 for beta chain variable domain of TCR clone 215528 (TRBV7-9, TRBJ2-5)
CASSLVGSEETQYF

SEQ ID NO: 431057 - protein, 13 aa, Homo sapiens
  CDR3 for alpha chain variable domain of TCR clone 215529 (TRAV16, TRAJ31)
CALSAHNNARLMF

SEQ ID NO: 431058 - protein, 17 aa, Homo sapiens
  CDR3 for beta chain variable domain of TCR clone 215529 (TRBV12-4, TRBJ2-1)
FASSPGLAGGRINEQFF

SEQ ID NO: 431059 - protein, 14 aa, Homo sapiens
  CDR3 for alpha chain variable domain of TCR clone 215530 (TRAV2, TRAJ9)
CAVEDRSGGFKTIF

SEQ ID NO: 431060 - protein, 17 aa, Homo sapiens
  CDR3 for beta chain variable domain of TCR clone 215530 (TRBV4-3, TRBJ1-5)
CASSQWGDGGPNQPQHF

SEQ ID NO: 431061 - protein, 14 aa, Homo sapiens
  CDR3 for alpha chain variable domain of TCR clone 215531 (TRAV17, TRAJ57)
CATDPQGGSEKLVF

SEQ ID NO: 431062 - protein, 15 aa, Homo sapiens
  CDR3 for beta chain variable domain of TCR clone 215531 (TRBV20-1, TRBJ2-7)
CSARREAGAPREQYF

SEQ ID NO: 431063 - protein, 18 aa, Homo sapiens
  CDR3 for alpha chain variable domain of TCR clone 215532 (TRAV21, TRAJ52)
FAVMPSPAGGTSYVKLTF

SEQ ID NO: 431064 - protein, 17 aa, Homo sapiens
  CDR3 for beta chain variable domain of TCR clone 215532 (TRBV13, TRBJ2-3)
CASSLSRVSGGRNTQYF

SEQ ID NO: 431065 - protein, 14 aa, Homo sapiens
  CDR3 for alpha chain variable domain of TCR clone 215533 (TRAV26-1, TRAJ38)
CIADNAGNNRKLVW

SEQ ID NO: 431066 - protein, 17 aa, Homo sapiens
  CDR3 for beta chain variable domain of TCR clone 215533 (TRBV7-9, TRBJ2-3)
CASSPTVAGDLTDTQYF

SEQ ID NO: 431067 - protein, 11 aa, Homo sapiens
  CDR3 for alpha chain variable domain of TCR clone 215534 (TRAV2, TRAJ13)
CASGGYQKVTF

SEQ ID NO: 431068 - protein, 15 aa, Homo sapiens
  CDR3 for beta chain variable domain of TCR clone 215534 (TRBV27, TRBJ2-2)
CQQFIRLWVTGELFF

SEQ ID NO: 431069 - protein, 15 aa, Homo sapiens
  CDR3 for alpha chain variable domain of TCR clone 215535 (TRAV3, TRAJ20)
CAERDVKLSDYKLSF

SEQ ID NO: 431070 - protein, 15 aa, Homo sapiens
  CDR3 for beta chain variable domain of TCR clone 215535 (TRBV7-9, TRBJ1-6)
CASSSPGRGNSPLHF

SEQ ID NO: 431071 - protein, 11 aa, Homo sapiens
  CDR3 for alpha chain variable domain of TCR clone 215536 (TRAV12-2, TRAJ49)
CAVTGGNQFYF

SEQ ID NO: 431072 - protein, 13 aa, Homo sapiens
  CDR3 for beta chain variable domain of TCR clone 215536 (TRBV12-4, TRBJ1-1)
CASSPGTGFEAFF

SEQ ID NO: 431073 - protein, 13 aa, Homo sapiens
  CDR3 for alpha chain variable domain of TCR clone 215537 (TRAV8-6, TRAJ13)
CAVRYGGYQKVTF

SEQ ID NO: 431074 - protein, 15 aa, Homo sapiens
  CDR3 for beta chain variable domain of TCR clone 215537 (TRBV7-9, TRBJ2-2)
CASRPEGTSTGELFF

SEQ ID NO: 431075 - protein, 15 aa, Homo sapiens
  CDR3 for alpha chain variable domain of TCR clone 215538 (TRAV13-1, TRAJ18)
CAASGGGSNLGRLYF

SEQ ID NO: 431076 - protein, 13 aa, Homo sapiens
  CDR3 for beta chain variable domain of TCR clone 215538 (TRBV18, TRBJ2-1)
CASGLASNNEQFF

SEQ ID NO: 431077 - protein, 13 aa, Homo sapiens
  CDR3 for alpha chain variable domain of TCR clone 215539 (TRAV8-2, TRAJ36)
CVVSHLPTNNLFF

SEQ ID NO: 431078 - protein, 18 aa, Homo sapiens
  CDR3 for beta chain variable domain of TCR clone 215539 (TRBV7-9, TRBJ2-6)
CASSCPGAGISGANVLTF

SEQ ID NO: 431079 - protein, 14 aa, Homo sapiens
  CDR3 for alpha chain variable domain of TCR clone 215540 (TRAV26-1, TRAJ11)
CIVPLYSGYSTLTF

SEQ ID NO: 431080 - protein, 15 aa, Homo sapiens
  CDR3 for beta chain variable domain of TCR clone 215540 (TRBV11-3, TRBJ2-3)
CASLKDGREGDTQYF

SEQ ID NO: 431081 - protein, 12 aa, Homo sapiens
  CDR3 for alpha chain variable domain of TCR clone 215541 (TRAV12-2, TRAJ3)
CAVWSSASKIIF

SEQ ID NO: 431082 - protein, 16 aa, Homo sapiens
  CDR3 for beta chain variable domain of TCR clone 215541 (TRBV12-5, TRBJ2-5)
CASGPRTSGNQGTQYF

SEQ ID NO: 431083 - protein, 14 aa, Homo sapiens
  CDR3 for alpha chain variable domain of TCR clone 215542 (TRAV8-3, TRAJ4)
CAVGAAGGYNKLIF

SEQ ID NO: 431084 - protein, 16 aa, Homo sapiens
  CDR3 for beta chain variable domain of TCR clone 215542 (TRBV7-9, TRBJ2-1)
CTSSLVSGPSYNEQFF

SEQ ID NO: 431085 - protein, 13 aa, Homo sapiens
  CDR3 for alpha chain variable domain of TCR clone 215543 (TRAV1-2, TRAJ9)
CAVLNTGGFKTIF

SEQ ID NO: 431086 - protein, 17 aa, Homo sapiens
  CDR3 for beta chain variable domain of TCR clone 215543 (TRBV28, TRBJ2-5)
CASSTPEGDALQETQYF

SEQ ID NO: 431087 - protein, 12 aa, Homo sapiens
  CDR3 for alpha chain variable domain of TCR clone 215544 (TRAV13-1, TRAJ49)
CAASPMGNQFYI

SEQ ID NO: 431088 - protein, 17 aa, Homo sapiens
  CDR3 for beta chain variable domain of TCR clone 215544 (TRBV11-2, TRBJ2-1)
CASSLYPPGVEYNEQFF

SEQ ID NO: 431089 - protein, 16 aa, Homo sapiens
  CDR3 for alpha chain variable domain of TCR clone 215545 (TRAV13-1, TRAJ48)
CAASIFGNFGNEKLTF

SEQ ID NO: 431090 - protein, 16 aa, Homo sapiens
  CDR3 for beta chain variable domain of TCR clone 215545 (TRBV18, TRBJ1-5)
GASSPYRVEGNQPQHF

SEQ ID NO: 431091 - protein, 16 aa, Homo sapiens
  CDR3 for alpha chain variable domain of TCR clone 215546 (TRAV12-1, TRAJ12)
CVVNTLPMDSSYKLIF

SEQ ID NO: 431092 - protein, 13 aa, Homo sapiens
  CDR3 for beta chain variable domain of TCR clone 215546 (TRBV11-2, TRBJ2-1)
CASSSEAYNEQFF

SEQ ID NO: 431093 - protein, 16 aa, Homo sapiens
  CDR3 for alpha chain variable domain of TCR clone 215547 (TRAV30, TRAJ24)
CGTEIGDADSWGKFQF

SEQ ID NO: 431094 - protein, 16 aa, Homo sapiens
  CDR3 for beta chain variable domain of TCR clone 215547 (TRBV2, TRBJ1-3)
CASSGGAGRSGNTIYF

SEQ ID NO: 431095 - protein, 13 aa, Homo sapiens
  CDR3 for alpha chain variable domain of TCR clone 215548 (TRAV8-4, TRAJ29)
CAVSATGNTPRVF

SEQ ID NO: 431096 - protein, 14 aa, Homo sapiens
  CDR3 for beta chain variable domain of TCR clone 215548 (TRBV6-1, TRBJ1-1)
CASRYAQRNTEAFF

SEQ ID NO: 431097 - protein, 15 aa, Homo sapiens
  CDR3 for alpha chain variable domain of TCR clone 215549 (TRAV13-1, TRAJ44)
CAASRGGGTASKLTF

SEQ ID NO: 431098 - protein, 13 aa, Homo sapiens
  CDR3 for beta chain variable domain of TCR clone 215549 (TRBV5-1, TRBJ2-3)
CASSLKGQYTQYF

SEQ ID NO: 431099 - protein, 17 aa, Homo sapiens
  CDR3 for alpha chain variable domain of TCR clone 215550 (TRAV8-3, TRAJ42)
CAVGNPEERRSQGNLIF

SEQ ID NO: 431100 - protein, 13 aa, Homo sapiens
  CDR3 for beta chain variable domain of TCR clone 215550 (TRBV20-1, TRBJ1-1)
CSARGGGNTEAFF

SEQ ID NO: 431101 - protein, 14 aa, Homo sapiens
  CDR3 for alpha chain variable domain of TCR clone 215551 (TRAV12-3, TRAJ30)
CAMSLLNRDNKIIV

SEQ ID NO: 431102 - protein, 12 aa, Homo sapiens
  CDR3 for beta chain variable domain of TCR clone 215551 (TRBV11-2, TRBJ2-2)
CASSLGGGELFF

SEQ ID NO: 431103 - protein, 14 aa, Homo sapiens
  CDR3 for alpha chain variable domain of TCR clone 215552 (TRAV12-2, TRAJ17)
CAVNIKAAGNKLTF

SEQ ID NO: 431104 - protein, 15 aa, Homo sapiens
  CDR3 for beta chain variable domain of TCR clone 215552 (TRBV6-5, TRBJ1-2)
CASSYSQAFNYGYTF

SEQ ID NO: 431105 - protein, 12 aa, Homo sapiens
  CDR3 for alpha chain variable domain of TCR clone 215553 (TRAV21, TRAJ37)
CAVRGNTGKLIF

SEQ ID NO: 431106 - protein, 14 aa, Homo sapiens
  CDR3 for beta chain variable domain of TCR clone 215553 (TRBV19, TRBJ2-1)
CASEVTGARDEQFF

SEQ ID NO: 431107 - protein, 21 aa, Homo sapiens
  CDR3 for alpha chain variable domain of TCR clone 215554 (TRAV29/DV5, TRAJ52)
CSVLLCSKREAAGPSYGKLTF

SEQ ID NO: 431108 - protein, 13 aa, Homo sapiens
  CDR3 for beta chain variable domain of TCR clone 215554 (TRBV27, TRBJ1-4)
CASSLMGDEKLFF

SEQ ID NO: 431109 - protein, 16 aa, Homo sapiens
  CDR3 for alpha chain variable domain of TCR clone 215555 (TRAV14/DV4, TRAJ54)
CAMRECRIQGAQKRVC

SEQ ID NO: 431110 - protein, 15 aa, Homo sapiens
  CDR3 for beta chain variable domain of TCR clone 215555 (TRBV7-8, TRBJ2-1)
CASSLAGGLYNEQFF

SEQ ID NO: 431111 - protein, 14 aa, Homo sapiens
  CDR3 for alpha chain variable domain of TCR clone 215556 (TRAV1-2, TRAJ8)
CAVREDTGFQKLVF

SEQ ID NO: 431112 - protein, 15 aa, Homo sapiens
  CDR3 for beta chain variable domain of TCR clone 215556 (TRBV5-7, TRBJ1-2)
CASSLAWTGGYGYTF

SEQ ID NO: 431113 - protein, 13 aa, Homo sapiens
  CDR3 for alpha chain variable domain of TCR clone 215557 (TRAV12-3, TRAJ33)
CAMSVNGNYQLIC

SEQ ID NO: 431114 - protein, 13 aa, Homo sapiens
  CDR3 for beta chain variable domain of TCR clone 215557 (TRBV7-2, TRBJ2-2)
CASSLAVTGELFF

SEQ ID NO: 431115 - protein, 12 aa, Homo sapiens
  CDR3 for alpha chain variable domain of TCR clone 215558 (TRAV12-3, TRAJ17)
CAMTLTGNKLTF

SEQ ID NO: 431116 - protein, 14 aa, Homo sapiens
  CDR3 for beta chain variable domain of TCR clone 215558 (TRBV12-4, TRBJ1-1)
CASSSARGYTEAFF

SEQ ID NO: 431117 - protein, 16 aa, Homo sapiens
  CDR3 for alpha chain variable domain of TCR clone 215559 (TRAV30, TRAJ24)
CGTEIVDADSWGKFQF

SEQ ID NO: 431118 - protein, 15 aa, Homo sapiens
  CDR3 for beta chain variable domain of TCR clone 215559 (TRBV9, TRBJ1-6)
CASRVAGTGDSPLHF

SEQ ID NO: 431119 - protein, 11 aa, Homo sapiens
  CDR3 for alpha chain variable domain of TCR clone 215560 (TRAV12-1, TRAJ30)
CGVNGQDRIIF

SEQ ID NO: 431120 - protein, 12 aa, Homo sapiens
  CDR3 for beta chain variable domain of TCR clone 215560 (TRBV27, TRBJ2-2)
CASKLFTGELFF

SEQ ID NO: 431121 - protein, 17 aa, Homo sapiens
  CDR3 for alpha chain variable domain of TCR clone 215561 (TRAV1-2, TRAJ9)
CLLPLCCLKYWRLQTIF

SEQ ID NO: 431122 - protein, 13 aa, Homo sapiens
  CDR3 for beta chain variable domain of TCR clone 215561 (TRBV19, TRBJ1-2)
CASSVPGQDGYTF

SEQ ID NO: 431123 - protein, 13 aa, Homo sapiens
  CDR3 for alpha chain variable domain of TCR clone 215562 (TRAV12-3, TRAJ47)
CAMKKEYGNKLVF

SEQ ID NO: 431124 - protein, 16 aa, Homo sapiens
  CDR3 for beta chain variable domain of TCR clone 215562 (TRBV3-1, TRBJ2-6)
CASSLPWVSGANVLTF

SEQ ID NO: 431125 - protein, 19 aa, Homo sapiens
  CDR3 for alpha chain variable domain of TCR clone 215563 (TRAV3, TRAJ6)
CAVRDGPRAGEATYLHLEE

SEQ ID NO: 431126 - protein, 15 aa, Homo sapiens
  CDR3 for beta chain variable domain of TCR clone 215563 (TRBV7-3, TRBJ2-2)
CASSETGQGTGELFF

SEQ ID NO: 431127 - protein, 13 aa, Homo sapiens
  CDR3 for alpha chain variable domain of TCR clone 215564 (TRAV35, TRAJ36)
CAGPRIGANNLFF

SEQ ID NO: 431128 - protein, 15 aa, Homo sapiens
  CDR3 for beta chain variable domain of TCR clone 215564 (TRBV28, TRBJ2-5)
CASSPPWSYLETQYF

SEQ ID NO: 431129 - protein, 13 aa, Homo sapiens
  CDR3 for alpha chain variable domain of TCR clone 215565 (TRAV26-1, TRAJ29)
CIVRRSGNTPLVF

SEQ ID NO: 431130 - protein, 16 aa, Homo sapiens
  CDR3 for beta chain variable domain of TCR clone 215565 (TRBV11-2, TRBJ2-7)
CASSLAPTGVNYEQYS

SEQ ID NO: 431131 - protein, 13 aa, Homo sapiens
  CDR3 for alpha chain variable domain of TCR clone 215566 (TRAV24, TRAJ42)
CAFSTGSQGNLIF

SEQ ID NO: 431132 - protein, 14 aa, Homo sapiens
  CDR3 for beta chain variable domain of TCR clone 215566 (TRBV7-2, TRBJ2-7)
CASRSQGAAYEQYF

SEQ ID NO: 431133 - protein, 12 aa, Homo sapiens
  CDR3 for alpha chain variable domain of TCR clone 215567 (TRAV13-2, TRAJ23)
CAERHRGGRLNF

SEQ ID NO: 431134 - protein, 16 aa, Homo sapiens
  CDR3 for beta chain variable domain of TCR clone 215567 (TRBV20-1, TRBJ1-4)
CSAPGQGLLTNEKLFF

SEQ ID NO: 431135 - protein, 13 aa, Homo sapiens
  CDR3 for alpha chain variable domain of TCR clone 215568 (TRAV2, TRAJ21)
CDVEDLNFNKFYF

SEQ ID NO: 431136 - protein, 15 aa, Homo sapiens
  CDR3 for beta chain variable domain of TCR clone 215568 (TRBV28, TRBJ2-5)
CASSPGQGSIETQYF

SEQ ID NO: 431137 - protein, 13 aa, Homo sapiens
  CDR3 for alpha chain variable domain of TCR clone 215569 (TRAV21, TRAJ27)
CAARPGNAGKSTF

SEQ ID NO: 431138 - protein, 16 aa, Homo sapiens
  CDR3 for beta chain variable domain of TCR clone 215569 (TRBV7-8, TRBJ1-5)
CASSGAQSSSNQPQHF

SEQ ID NO: 431139 - protein, 13 aa, Homo sapiens
  CDR3 for alpha chain variable domain of TCR clone 215570 (TRAV12-3, TRAJ50)
CARGGTSYDKVIF

SEQ ID NO: 431140 - protein, 14 aa, Homo sapiens
  CDR3 for beta chain variable domain of TCR clone 215570 (TRBV12-5, TRBJ2-5)
CASGSRTHQETQYF

SEQ ID NO: 431141 - protein, 12 aa, Homo sapiens
  CDR3 for alpha chain variable domain of TCR clone 215571 (TRAV8-3, TRAJ26)
CAGDNYGQNFVF

SEQ ID NO: 431142 - protein, 13 aa, Homo sapiens
  CDR3 for beta chain variable domain of TCR clone 215571 (TRBV3-1, TRBJ1-1)
CASSPGVITEAFF

SEQ ID NO: 431143 - protein, 15 aa, Homo sapiens
  CDR3 for alpha chain variable domain of TCR clone 215572 (TRAV12-1, TRAJ44)
CVVDTPQGIASKLTF

SEQ ID NO: 431144 - protein, 13 aa, Homo sapiens
  CDR3 for beta chain variable domain of TCR clone 215572 (TRBV27, TRBJ2-1)
CASSSGSYNEQFF

SEQ ID NO: 431145 - protein, 12 aa, Homo sapiens
  CDR3 for alpha chain variable domain of TCR clone 215573 (TRAV12-3, TRAJ17)
CAMTLTGNKLTF

SEQ ID NO: 431146 - protein, 14 aa, Homo sapiens
  CDR3 for beta chain variable domain of TCR clone 215573 (TRBV4-1, TRBJ2-7)
CASSQYREHVEQYF

SEQ ID NO: 431147 - protein, 14 aa, Homo sapiens
  CDR3 for alpha chain variable domain of TCR clone 215574 (TRAV13-1, TRAJ35)
CAASKGGFGNVLHY

SEQ ID NO: 431148 - protein, 13 aa, Homo sapiens
  CDR3 for beta chain variable domain of TCR clone 215574 (TRBV7-3, TRBJ1-1)
CASSQEWGAEAFF

SEQ ID NO: 431149 - protein, 13 aa, Homo sapiens
  CDR3 for alpha chain variable domain of TCR clone 215575 (TRAV27, TRAJ45)
CRSSGGGADGLTF

SEQ ID NO: 431150 - protein, 14 aa, Homo sapiens
  CDR3 for beta chain variable domain of TCR clone 215575 (TRBV7-2, TRBJ2-2)
CASRGQGAAGELFF

SEQ ID NO: 431151 - protein, 11 aa, Homo sapiens
  CDR3 for alpha chain variable domain of TCR clone 215576 (TRAV21, TRAJ34)
CAVTNTDKLIF

SEQ ID NO: 431152 - protein, 15 aa, Homo sapiens
  CDR3 for beta chain variable domain of TCR clone 215576 (TRBV7-9, TRBJ1-6)
CASSSPGRGNSPLHF

SEQ ID NO: 431153 - protein, 13 aa, Homo sapiens
  CDR3 for alpha chain variable domain of TCR clone 215577 (TRAV27, TRAJ37)
CAGGPSNTGKLIF

SEQ ID NO: 431154 - protein, 13 aa, Homo sapiens
  CDR3 for beta chain variable domain of TCR clone 215577 (TRBV19, TRBJ1-2)
CASSVPGQDGYTF

SEQ ID NO: 431155 - protein, 18 aa, Homo sapiens
  CDR3 for alpha chain variable domain of TCR clone 215578 (TRAV12-3, TRAJ52)
CAMSVGGAGGTSYGELTF

SEQ ID NO: 431156 - protein, 15 aa, Homo sapiens
  CDR3 for beta chain variable domain of TCR clone 215578 (TRBV27, TRBJ1-6)
CASSFDRGLGSTLHF

SEQ ID NO: 431157 - protein, 13 aa, Homo sapiens
  CDR3 for alpha chain variable domain of TCR clone 215579 (TRAV2, TRAJ40)
CAVVTSGTYKYIL

SEQ ID NO: 431158 - protein, 13 aa, Homo sapiens
  CDR3 for beta chain variable domain of TCR clone 215579 (TRBV4-2, TRBJ1-1)
CASSQAGNTEAFF

SEQ ID NO: 431159 - protein, 11 aa, Homo sapiens
  CDR3 for alpha chain variable domain of TCR clone 215580 (TRAV12-1, TRAJ21)
CLVNNFNKFYF

SEQ ID NO: 431160 - protein, 17 aa, Homo sapiens
  CDR3 for beta chain variable domain of TCR clone 215580 (TRBV7-8, TRBJ2-1)
CASSPPTGTLAYNEQFF

SEQ ID NO: 431161 - protein, 13 aa, Homo sapiens
  CDR3 for alpha chain variable domain of TCR clone 215581 (TRAV13-1, TRAJ6)
CAARRGGSYIPPF

SEQ ID NO: 431162 - protein, 16 aa, Homo sapiens
  CDR3 for beta chain variable domain of TCR clone 215581 (TRBV7-9, TRBJ2-2)
CASSLATGVGTGELFF

SEQ ID NO: 431163 - protein, 16 aa, Homo sapiens
  CDR3 for alpha chain variable domain of TCR clone 215582 (TRAV30, TRAJ24)
CGTEIVDADSWGKFQF

SEQ ID NO: 431164 - protein, 14 aa, Homo sapiens
  CDR3 for beta chain variable domain of TCR clone 215582 (TRBV9, TRBJ2-4)
CASSPSWTSGFQYF

SEQ ID NO: 431165 - protein, 15 aa, Homo sapiens
  CDR3 for alpha chain variable domain of TCR clone 215583 (TRAV3, TRAJ3)
CAVRDRRSSASKIIF

SEQ ID NO: 431166 - protein, 17 aa, Homo sapiens
  CDR3 for beta chain variable domain of TCR clone 215583 (TRBV5-6, TRBJ2-5)
CQQHARFGQLYQETQYF

SEQ ID NO: 431167 - protein, 14 aa, Homo sapiens
  CDR3 for alpha chain variable domain of TCR clone 215584 (TRAV23/DV6, TRAJ22)
CAASVSGSARKLTF

SEQ ID NO: 431168 - protein, 13 aa, Homo sapiens
  CDR3 for beta chain variable domain of TCR clone 215584 (TRBV29-1, TRBJ2-1)
CSVEGGRVNEQFF

SEQ ID NO: 431169 - protein, 14 aa, Homo sapiens
  CDR3 for alpha chain variable domain of TCR clone 215585 (TRAV1-2, TRAJ8)
CAVREDTGFQKIVF

SEQ ID NO: 431170 - protein, 14 aa, Homo sapiens
  CDR3 for beta chain variable domain of TCR clone 215585 (TRBV20-1, TRBJ1-1)
CSAQTRIGGTEAFF

SEQ ID NO: 431171 - protein, 11 aa, Homo sapiens
  CDR3 for alpha chain variable domain of TCR clone 215586 (TRAV12-2, TRAJ31)
CAVTRWARPMF

SEQ ID NO: 431172 - protein, 15 aa, Homo sapiens
  CDR3 for beta chain variable domain of TCR clone 215586 (TRBV19, TRBJ2-7)
CASSIGGGLVSEQYF

SEQ ID NO: 431173 - protein, 16 aa, Homo sapiens
  CDR3 for alpha chain variable domain of TCR clone 215587 (TRAV3, TRAJ10)
CAVRDMGAGGGKKLTF

SEQ ID NO: 431174 - protein, 14 aa, Homo sapiens
  CDR3 for beta chain variable domain of TCR clone 215587 (TRBV25-1, TRBJ1-1)
CASTHLGGNTEAFF

SEQ ID NO: 431175 - protein, 17 aa, Homo sapiens
  CDR3 for alpha chain variable domain of TCR clone 215588 (TRAV12-3, TRAJ18)
CAMIRADRGSTLGRLYF

SEQ ID NO: 431176 - protein, 14 aa, Homo sapiens
  CDR3 for beta chain variable domain of TCR clone 215588 (TRBV5-7, TRBJ1-6)
CASTRWPADSPLHF

SEQ ID NO: 431177 - protein, 13 aa, Homo sapiens
  CDR3 for alpha chain variable domain of TCR clone 215589 (TRAV8-3, TRAJ36)
CAVGATGANNLFF

SEQ ID NO: 431178 - protein, 12 aa, Homo sapiens
  CDR3 for beta chain variable domain of TCR clone 215589 (TRBV5-1, TRBJ2-3)
CASSLAADTQYF

SEQ ID NO: 431179 - protein, 15 aa, Homo sapiens
  CDR3 for alpha chain variable domain of TCR clone 215590 (TRAV12-3, TRAJ27)
CAMRAYNTNAGKSTF

SEQ ID NO: 431180 - protein, 15 aa, Homo sapiens
  CDR3 for beta chain variable domain of TCR clone 215590 (TRBV5-1, TRBJ1-1)
CASSSTTGTNTEAFF

SEQ ID NO: 431181 - protein, 14 aa, Homo sapiens
  CDR3 for alpha chain variable domain of TCR clone 215591 (TRAV12-2, TRAJ13)
CAVKKTGGYQKVTF

SEQ ID NO: 431182 - protein, 12 aa, Homo sapiens
  CDR3 for beta chain variable domain of TCR clone 215591 (TRBV7-9, TRBJ2-7)
CASSIKREEQYY

SEQ ID NO: 431183 - protein, 17 aa, Homo sapiens
  CDR3 for alpha chain variable domain of TCR clone 215592 (TRAV3, TRAJ42)
CAVRDRDYGGSQGNLIF

SEQ ID NO: 431184 - protein, 16 aa, Homo sapiens
  CDR3 for beta chain variable domain of TCR clone 215592 (TRBV27, TRBJ2-5)
CASSYGPGGQKETQYF

SEQ ID NO: 431185 - protein, 12 aa, Homo sapiens
  CDR3 for alpha chain variable domain of TCR clone 215593 (TRAV13-2, TRAJ23)
CAERHTGGKLIF

SEQ ID NO: 431186 - protein, 15 aa, Homo sapiens
  CDR3 for beta chain variable domain of TCR clone 215593 (TRBV6-3, TRBJ2-7)
CASSSPGTVFYEQYF

SEQ ID NO: 431187 - protein, 17 aa, Homo sapiens
  CDR3 for alpha chain variable domain of TCR clone 215594 (TRAV13-1, TRAJ31)
CAPRDRPMFGDGTQMVV

SEQ ID NO: 431188 - protein, 15 aa, Homo sapiens
  CDR3 for beta chain variable domain of TCR clone 215594 (TRBV5-1, TRBJ2-7)
CASSLYPDGGYEQYF

SEQ ID NO: 431189 - protein, 11 aa, Homo sapiens
  CDR3 for alpha chain variable domain of TCR clone 215595 (TRAV21, TRAJ27)
CAVRMQANQPL

SEQ ID NO: 431190 - protein, 16 aa, Homo sapiens
  CDR3 for beta chain variable domain of TCR clone 215595 (TRBV13, TRBJ2-2)
CASSPRTGEHTGELFF

SEQ ID NO: 431191 - protein, 13 aa, Homo sapiens
  CDR3 for alpha chain variable domain of TCR clone 215596 (TRAV2, TRAJ40)
CALVTSGTYKYIF

SEQ ID NO: 431192 - protein, 15 aa, Homo sapiens
  CDR3 for beta chain variable domain of TCR clone 215596 (TRBV20-1, TRBJ2-7)
CSARDRVSGMDEQYF

SEQ ID NO: 431193 - protein, 12 aa, Homo sapiens
  CDR3 for alpha chain variable domain of TCR clone 215597 (TRAV1-1, TRAJ39)
CAVPVVGNMLTF

SEQ ID NO: 431194 - protein, 13 aa, Homo sapiens
  CDR3 for beta chain variable domain of TCR clone 215597 (TRBV10-2, TRBJ2-3)
CASSESGDHTQYF

SEQ ID NO: 431195 - protein, 12 aa, Homo sapiens
  CDR3 for alpha chain variable domain of TCR clone 215598 (TRAV13-1, TRAJ21)
CAAKEGFNKFYF

SEQ ID NO: 431196 - protein, 14 aa, Homo sapiens
  CDR3 for beta chain variable domain of TCR clone 215598 (TRBV10-3, TRBJ2-3)
CAISVTRSRDTQYF

SEQ ID NO: 431197 - protein, 14 aa, Homo sapiens
  CDR3 for alpha chain variable domain of TCR clone 215599 (TRAV1-2, TRAJ8)
CAVREDTGFQKRVF

SEQ ID NO: 431198 - protein, 13 aa, Homo sapiens
  CDR3 for beta chain variable domain of TCR clone 215599 (TRBV27, TRBJ1-1)
CASSLSIGAEAFF

SEQ ID NO: 431199 - protein, 14 aa, Homo sapiens
  CDR3 for alpha chain variable domain of TCR clone 215600 (TRAV13-2, TRAJ12)
CAETLMDSSYKLIF

SEQ ID NO: 431200 - protein, 13 aa, Homo sapiens
  CDR3 for beta chain variable domain of TCR clone 215600 (TRBV7-9, TRBJ1-2)
CASSLKQNYGYTF

SEQ ID NO: 431201 - protein, 18 aa, Homo sapiens
  CDR3 for alpha chain variable domain of TCR clone 215601 (TRAV13-1, TRAJ52)
CSASKRSAGGTSYGKLTS

SEQ ID NO: 431202 - protein, 13 aa, Homo sapiens
  CDR3 for beta chain variable domain of TCR clone 215601 (TRBV12-4, TRBJ1-2)
CASSLRQGKGYTF

SEQ ID NO: 431203 - protein, 14 aa, Homo sapiens
  CDR3 for alpha chain variable domain of TCR clone 215602 (TRAV13-2, TRAJ32)
CAESLGGDTNKLIF

SEQ ID NO: 431204 - protein, 14 aa, Homo sapiens
  CDR3 for beta chain variable domain of TCR clone 215602 (TRBV5-7, TRBJ1-1)
CASSLAGDWTEAFF

SEQ ID NO: 431205 - protein, 14 aa, Homo sapiens
  CDR3 for alpha chain variable domain of TCR clone 215603 (TRAV1-2, TRAJ8)
WAVREDTGFQKLVF

SEQ ID NO: 431206 - protein, 17 aa, Homo sapiens
  CDR3 for beta chain variable domain of TCR clone 215603 (TRBV20-1, TRBJ2-2)
CSASGSGQGGLTGELFF

SEQ ID NO: 431207 - protein, 14 aa, Homo sapiens
  CDR3 for alpha chain variable domain of TCR clone 215604 (TRAV12-2, TRAJ13)
CAVKKAGGYQKVTF

SEQ ID NO: 431208 - protein, 15 aa, Homo sapiens
  CDR3 for beta chain variable domain of TCR clone 215604 (TRBV27, TRBJ2-1)
CASSNGGGSSNEQLF

SEQ ID NO: 431209 - protein, 18 aa, Homo sapiens
  CDR3 for alpha chain variable domain of TCR clone 215605 (TRAV9-2, TRAJ10)
CALSDGALASGGVNKLTF

SEQ ID NO: 431210 - protein, 16 aa, Homo sapiens
  CDR3 for beta chain variable domain of TCR clone 215605 (TRBV28, TRBJ2-7)
CASSSSGTSGSYEQYF

SEQ ID NO: 431211 - protein, 14 aa, Homo sapiens
  CDR3 for alpha chain variable domain of TCR clone 215606 (TRAV38-1, TRAJ45)
CAYYSGGGSDGLTF

SEQ ID NO: 431212 - protein, 20 aa, Homo sapiens
  CDR3 for beta chain variable domain of TCR clone 215606 (TRBV28, TRBJ2-1)
CDSTPIGRSPGLAGGNEQFF

SEQ ID NO: 431213 - protein, 14 aa, Homo sapiens
  CDR3 for alpha chain variable domain of TCR clone 215607 (TRAV13-2, TRAJ23)
CADNIGPLGGKLIF

SEQ ID NO: 431214 - protein, 17 aa, Homo sapiens
  CDR3 for beta chain variable domain of TCR clone 215607 (TRBV5-1, TRBJ1-1)
CASSFMTGGKRDTEAFF

SEQ ID NO: 431215 - protein, 11 aa, Homo sapiens
  CDR3 for alpha chain variable domain of TCR clone 215608 (TRAV13-1, TRAJ39)
CASHAGNMLTF

SEQ ID NO: 431216 - protein, 14 aa, Homo sapiens
  CDR3 for beta chain variable domain of TCR clone 215608 (TRBV11-2, TRBJ1-5)
CASSSDRGRQPQHF

SEQ ID NO: 431217 - protein, 12 aa, Homo sapiens
  CDR3 for alpha chain variable domain of TCR clone 215609 (TRAV12-1, TRAJ16)
CVVFRDGQKLLF

SEQ ID NO: 431218 - protein, 17 aa, Homo sapiens
  CDR3 for beta chain variable domain of TCR clone 215609 (TRBV11-2, TRBJ2-6)
CASSQRDIFSGANVLTF

SEQ ID NO: 431219 - protein, 18 aa, Homo sapiens
  CDR3 for alpha chain variable domain of TCR clone 215610 (TRAV21, TRAJ52)
CAVRPSPAGGTSYGKLTF

SEQ ID NO: 431220 - protein, 17 aa, Homo sapiens
  CDR3 for beta chain variable domain of TCR clone 215610 (TRBV7-3, TRBJ2-3)
CASSLRKRMRGADTQYF

SEQ ID NO: 431221 - protein, 13 aa, Homo sapiens
  CDR3 for alpha chain variable domain of TCR clone 215611 (TRAV12-1, TRAJ16)
CVVNEPDGQKLLF

SEQ ID NO: 431222 - protein, 15 aa, Homo sapiens
  CDR3 for beta chain variable domain of TCR clone 215611 (TRBV6-3, TRBJ2-7)
CASSSPGTVFYEQFF

SEQ ID NO: 431223 - protein, 15 aa, Homo sapiens
  CDR3 for alpha chain variable domain of TCR clone 215612 (TRAV20, TRAJ43)
CAVQAGKSSNNDMRF

SEQ ID NO: 431224 - protein, 13 aa, Homo sapiens
  CDR3 for beta chain variable domain of TCR clone 215612 (TRBV10-2, TRBJ2-7)
CASGASGGYEQYF

SEQ ID NO: 431225 - protein, 19 aa, Homo sapiens
  CDR3 for alpha chain variable domain of TCR clone 215613 (TRAV26-1, TRAJ52)
CIVRAHRNAGGTSYGKLTF

SEQ ID NO: 431226 - protein, 15 aa, Homo sapiens
  CDR3 for beta chain variable domain of TCR clone 215613 (TRBV29-1, TRBJ2-1)
CSGRDRKSSYNEQFI

SEQ ID NO: 431227 - protein, 13 aa, Homo sapiens
  CDR3 for alpha chain variable domain of TCR clone 215614 (TRAV13-1, TRAJ17)
CAADGAAGNKLTF

SEQ ID NO: 431228 - protein, 15 aa, Homo sapiens
  CDR3 for beta chain variable domain of TCR clone 215614 (TRBV11-2, TRBJ1-2)
CASSLEGVQRNGYTF

SEQ ID NO: 431229 - protein, 17 aa, Homo sapiens
  CDR3 for alpha chain variable domain of TCR clone 215615 (TRAV3, TRAJ6)
CAVRDGPRAGGSYIPTF

SEQ ID NO: 431230 - protein, 16 aa, Homo sapiens
  CDR3 for beta chain variable domain of TCR clone 215615 (TRBV4-2, TRBJ2-5)
CASSQELVGSQETQYF

SEQ ID NO: 431231 - protein, 15 aa, Homo sapiens
  CDR3 for alpha chain variable domain of TCR clone 215616 (TRAV12-2, TRAJ43)
CAFDMRFGAGNRLTV

SEQ ID NO: 431232 - protein, 13 aa, Homo sapiens
  CDR3 for beta chain variable domain of TCR clone 215616 (TRBV4-2, TRBJ1-1)
CASSQAGNTEAFF

SEQ ID NO: 431233 - protein, 15 aa, Homo sapiens
  CDR3 for alpha chain variable domain of TCR clone 215617 (TRAV26-1, TRAJ22)
CIVRVSFWFCKATDL

SEQ ID NO: 431234 - protein, 15 aa, Homo sapiens
  CDR3 for beta chain variable domain of TCR clone 215617 (TRBV7-9, TRBJ2-1)
CASSLASGRVNEQFF

SEQ ID NO: 431235 - protein, 15 aa, Homo sapiens
  CDR3 for alpha chain variable domain of TCR clone 215618 (TRAV2, TRAJ15)
CAVEDRGQAGTALIF

SEQ ID NO: 431236 - protein, 15 aa, Homo sapiens
  CDR3 for beta chain variable domain of TCR clone 215618 (TRBV5-1, TRBJ2-7)
CASSLNGGPAREQYF

SEQ ID NO: 431237 - protein, 14 aa, Homo sapiens
  CDR3 for alpha chain variable domain of TCR clone 215619 (TRAV13-1, TRAJ10)
CAAKEPGGGNKLTF

SEQ ID NO: 431238 - protein, 15 aa, Homo sapiens
  CDR3 for beta chain variable domain of TCR clone 215619 (TRBV28, TRBJ1-3)
CASSMGWASGNTIYF

SEQ ID NO: 431239 - protein, 15 aa, Homo sapiens
  CDR3 for alpha chain variable domain of TCR clone 215620 (TRAV38-1, TRAJ54)
CAFNYLIQGAQKLVF

SEQ ID NO: 431240 - protein, 14 aa, Homo sapiens
  CDR3 for beta chain variable domain of TCR clone 215620 (TRBV7-8, TRBJ2-1)
CASSVLGGRNEQFF

SEQ ID NO: 431241 - protein, 13 aa, Homo sapiens
  CDR3 for alpha chain variable domain of TCR clone 215621 (TRAV8-6, TRAJ8)
CAFMNTGFQKLVF

SEQ ID NO: 431242 - protein, 17 aa, Homo sapiens
  CDR3 for beta chain variable domain of TCR clone 215621 (TRBV13, TRBJ2-3)
CAGSLSRVAGGRNAQYF

SEQ ID NO: 431243 - protein, 11 aa, Homo sapiens
  CDR3 for alpha chain variable domain of TCR clone 215622 (TRAV1-1, TRAJ23)
CAVRQVGKLIF

SEQ ID NO: 431244 - protein, 20 aa, Homo sapiens
  CDR3 for beta chain variable domain of TCR clone 215622 (TRBV7-8, TRBJ2-2)
CASSHLFPGPTIHITGGLFF

SEQ ID NO: 431245 - protein, 14 aa, Homo sapiens
  CDR3 for alpha chain variable domain of TCR clone 215623 (TRAV1-2, TRAJ16)
CAVNRVSDGQKLLF

SEQ ID NO: 431246 - protein, 14 aa, Homo sapiens
  CDR3 for beta chain variable domain of TCR clone 215623 (TRBV25-1, TRBJ1-1)
CASTHLGGNTEAFF

SEQ ID NO: 431247 - protein, 12 aa, Homo sapiens
  CDR3 for alpha chain variable domain of TCR clone 215624 (TRAV13-1, TRAJ21)
CATTINFNKYYF

SEQ ID NO: 431248 - protein, 14 aa, Homo sapiens
  CDR3 for beta chain variable domain of TCR clone 215624 (TRBV7-2, TRBJ2-7)
CASSPKTSFYEQYF

SEQ ID NO: 431249 - protein, 14 aa, Homo sapiens
  CDR3 for alpha chain variable domain of TCR clone 215625 (TRAV16, TRAJ39)
CALSKNNAGNMLTF

SEQ ID NO: 431250 - protein, 17 aa, Homo sapiens
  CDR3 for beta chain variable domain of TCR clone 215625 (TRBV6-6, TRBJ2-1)
CASSYEQFFGPGARLTV

SEQ ID NO: 431251 - protein, 15 aa, Homo sapiens
  CDR3 for alpha chain variable domain of TCR clone 215626 (TRAV21, TRAJ4)
CCEAPFSGGYNKLIF

SEQ ID NO: 431252 - protein, 16 aa, Homo sapiens
  CDR3 for beta chain variable domain of TCR clone 215626 (TRBV29-1, TRBJ2-6)
CSVEDITDSGANVLTF

SEQ ID NO: 431253 - protein, 14 aa, Homo sapiens
  CDR3 for alpha chain variable domain of TCR clone 215627 (TRAV12-1, TRAJ3)
CGAARYSSASKIIF

SEQ ID NO: 431254 - protein, 15 aa, Homo sapiens
  CDR3 for beta chain variable domain of TCR clone 215627 (TRBV7-2, TRBJ2-6)
CASSREGSGADVLTF

SEQ ID NO: 431255 - protein, 16 aa, Homo sapiens
  CDR3 for alpha chain variable domain of TCR clone 215628 (TRAV3, TRAJ10)
CAVRDMRAGGGNKLTF

SEQ ID NO: 431256 - protein, 15 aa, Homo sapiens
  CDR3 for beta chain variable domain of TCR clone 215628 (TRBV7-6, TRBJ2-7)
CASSGRRDTFGEQYF

SEQ ID NO: 431257 - protein, 12 aa, Homo sapiens
  CDR3 for alpha chain variable domain of TCR clone 215629 (TRAV13-1, TRAJ53)
CAAGGSDYKLTF

SEQ ID NO: 431258 - protein, 11 aa, Homo sapiens
  CDR3 for beta chain variable domain of TCR clone 215629 (TRBV2, TRBJ1-1)
CASREGTEDFF

SEQ ID NO: 431259 - protein, 13 aa, Homo sapiens
  CDR3 for alpha chain variable domain of TCR clone 215630 (TRAV12-1, TRAJ40)
CVVPTSGTYKYIF

SEQ ID NO: 431260 - protein, 16 aa, Homo sapiens
  CDR3 for beta chain variable domain of TCR clone 215630 (TRBV7-9, TRBJ1-2)
CASSLGFSSWEDGYTF

SEQ ID NO: 431261 - protein, 15 aa, Homo sapiens
  CDR3 for alpha chain variable domain of TCR clone 215631 (TRAV3, TRAJ5)
CAVRDRKTGRRALTF

SEQ ID NO: 431262 - protein, 15 aa, Homo sapiens
  CDR3 for beta chain variable domain of TCR clone 215631 (TRBV7-8, TRBJ2-1)
RASSLADSLYNEQFI

SEQ ID NO: 431263 - protein, 13 aa, Homo sapiens
  CDR3 for alpha chain variable domain of TCR clone 215632 (TRAV1-2, TRAJ33)
CAVSEDSNYQLIW

SEQ ID NO: 431264 - protein, 17 aa, Homo sapiens
  CDR3 for beta chain variable domain of TCR clone 215632 (TRBV13, TRBJ2-3)
CASSLSRVAGGRNTQYF

SEQ ID NO: 431265 - protein, 17 aa, Homo sapiens
  CDR3 for alpha chain variable domain of TCR clone 215633 (TRAV26-1, TRAJ54)
CIVHRPILIQGAQKLVF

SEQ ID NO: 431266 - protein, 16 aa, Homo sapiens
  CDR3 for beta chain variable domain of TCR clone 215633 (TRBV7-3, TRBJ2-1)
CASSLEGYRSYNEQFF

SEQ ID NO: 431267 - protein, 14 aa, Homo sapiens
  CDR3 for alpha chain variable domain of TCR clone 215634 (TRAV12-3, TRAJ9)
CAMSPNTGGFKTIF

SEQ ID NO: 431268 - protein, 11 aa, Homo sapiens
  CDR3 for beta chain variable domain of TCR clone 215634 (TRBV11-2, TRBJ1-1)
CASSINTGAFF

SEQ ID NO: 431269 - protein, 14 aa, Homo sapiens
  CDR3 for alpha chain variable domain of TCR clone 215635 (TRAV1-2, TRAJ16)
CAVNRFSDGQKLLF

SEQ ID NO: 431270 - protein, 16 aa, Homo sapiens
  CDR3 for beta chain variable domain of TCR clone 215635 (TRBV7-2, TRBJ2-7)
CPSSLDLSGGAYEQYF

SEQ ID NO: 431271 - protein, 12 aa, Homo sapiens
  CDR3 for alpha chain variable domain of TCR clone 215636 (TRAV23/DV6, TRAJ33)
CAPMDSNYQLIW

SEQ ID NO: 431272 - protein, 15 aa, Homo sapiens
  CDR3 for beta chain variable domain of TCR clone 215636 (TRBV9, TRBJ1-6)
CASSVAGTGDSPLHF

SEQ ID NO: 431273 - protein, 13 aa, Homo sapiens
  CDR3 for alpha chain variable domain of TCR clone 215637 (TRAV35, TRAJ40)
CAGQLSGTYKYIF

SEQ ID NO: 431274 - protein, 14 aa, Homo sapiens
  CDR3 for beta chain variable domain of TCR clone 215637 (TRBV3-1, TRBJ2-5)
CASILQLAGETQYF

SEQ ID NO: 431275 - protein, 12 aa, Homo sapiens
  CDR3 for alpha chain variable domain of TCR clone 215638 (TRAV8-3, TRAJ20)
CAVGANDYKLSF

SEQ ID NO: 431276 - protein, 16 aa, Homo sapiens
  CDR3 for beta chain variable domain of TCR clone 215638 (TRBV19, TRBJ2-2)
CASRSPVTGATGELFV

SEQ ID NO: 431277 - protein, 16 aa, Homo sapiens
  CDR3 for alpha chain variable domain of TCR clone 215639 (TRAV30, TRAJ24)
CGTEIVDADSWGKFQF

SEQ ID NO: 431278 - protein, 17 aa, Homo sapiens
  CDR3 for beta chain variable domain of TCR clone 215639 (TRBV20-1, TRBJ2-7)
CSARETKTGYLSYEQYF

SEQ ID NO: 431279 - protein, 14 aa, Homo sapiens
  CDR3 for alpha chain variable domain of TCR clone 215640 (TRAV13-1, TRAJ35)
CSASKGGFGNVLNC

SEQ ID NO: 431280 - protein, 13 aa, Homo sapiens
  CDR3 for beta chain variable domain of TCR clone 215640 (TRBV7-3, TRBJ1-1)
CASSQDWGAEAFF

SEQ ID NO: 431281 - protein, 15 aa, Homo sapiens
  CDR3 for alpha chain variable domain of TCR clone 215641 (TRAV8-3, TRAJ45)
CASSYSGGGADGFTF

SEQ ID NO: 431282 - protein, 13 aa, Homo sapiens
  CDR3 for beta chain variable domain of TCR clone 215641 (TRBV10-3, TRBJ2-7)
CASKLAVDYEQYF

SEQ ID NO: 431283 - protein, 12 aa, Homo sapiens
  CDR3 for alpha chain variable domain of TCR clone 215642 (TRAV13-1, TRAJ20)
CAAASNDYKRSI

SEQ ID NO: 431284 - protein, 16 aa, Homo sapiens
  CDR3 for beta chain variable domain of TCR clone 215642 (TRBV12-4, TRBJ1-5)
CASSRPVGGSNQPQHF

SEQ ID NO: 431285 - protein, 13 aa, Homo sapiens
  CDR3 for alpha chain variable domain of TCR clone 215643 (TRAV29/DV5, TRAJ29)
CAASAAGNTPLVF

SEQ ID NO: 431286 - protein, 15 aa, Homo sapiens
  CDR3 for beta chain variable domain of TCR clone 215643 (TRBV7-6, TRBJ2-7)
CASSLDFGQGVEQYF

SEQ ID NO: 431287 - protein, 12 aa, Homo sapiens
  CDR3 for alpha chain variable domain of TCR clone 215644 (TRAV25, TRAJ35)
CAGIGFGNVLHC

SEQ ID NO: 431288 - protein, 12 aa, Homo sapiens
  CDR3 for beta chain variable domain of TCR clone 215644 (TRBV6-3, TRBJ2-7)
CASSLTPYEQYF

SEQ ID NO: 431289 - protein, 14 aa, Homo sapiens
  CDR3 for alpha chain variable domain of TCR clone 215645 (TRAV13-1, TRAJ48)
CAASRSFGNEKLTF

SEQ ID NO: 431290 - protein, 13 aa, Homo sapiens
  CDR3 for beta chain variable domain of TCR clone 215645 (TRBV3-1, TRBJ1-1)
CASSPGVITEAFF

SEQ ID NO: 431291 - protein, 14 aa, Homo sapiens
  CDR3 for alpha chain variable domain of TCR clone 215646 (TRAV9-2, TRAJ39)
CALYIYNAGNMLTF

SEQ ID NO: 431292 - protein, 14 aa, Homo sapiens
  CDR3 for beta chain variable domain of TCR clone 215646 (TRBV6-1, TRBJ1-3)
CASVQGGGGNAIYF

SEQ ID NO: 431293 - protein, 15 aa, Homo sapiens
  CDR3 for alpha chain variable domain of TCR clone 215647 (TRAV12-1, TRAJ10)
CVVNELTGGGNKLTF

SEQ ID NO: 431294 - protein, 16 aa, Homo sapiens
  CDR3 for beta chain variable domain of TCR clone 215647 (TRBV12-5, TRBJ2-5)
CASGPRTSGNQETQYF

SEQ ID NO: 431295 - protein, 14 aa, Homo sapiens
  CDR3 for alpha chain variable domain of TCR clone 215648 (TRAV8-4, TRAJ15)
CAVTIREAGTALIF

SEQ ID NO: 431296 - protein, 16 aa, Homo sapiens
  CDR3 for beta chain variable domain of TCR clone 215648 (TRBV29-1, TRBJ2-6)
CSVDDITYSGANVLTF

SEQ ID NO: 431297 - protein, 14 aa, Homo sapiens
  CDR3 for alpha chain variable domain of TCR clone 215649 (TRAV21, TRAJ52)
CGRAGGTSYGKLTF

SEQ ID NO: 431298 - protein, 14 aa, Homo sapiens
  CDR3 for beta chain variable domain of TCR clone 215649 (TRBV19, TRBJ1-2)
CASSVLGYNYGCTF

SEQ ID NO: 431299 - protein, 14 aa, Homo sapiens
  CDR3 for alpha chain variable domain of TCR clone 215650 (TRAV29/DV5, TRAJ48)
CAAMALLGNEKLTF

SEQ ID NO: 431300 - protein, 15 aa, Homo sapiens
  CDR3 for beta chain variable domain of TCR clone 215650 (TRBV7-2, TRBJ2-1)
CASTHGTGIYNEQFF

SEQ ID NO: 431301 - protein, 16 aa, Homo sapiens
  CDR3 for alpha chain variable domain of TCR clone 215651 (TRAV30, TRAJ24)
CGTEIVDAHSWGKFQF

SEQ ID NO: 431302 - protein, 14 aa, Homo sapiens
  CDR3 for beta chain variable domain of TCR clone 215651 (TRBV12-5, TRBJ2-5)
CASGSRTYQETQYF

SEQ ID NO: 431303 - protein, 12 aa, Homo sapiens
  CDR3 for alpha chain variable domain of TCR clone 215652 (TRAV12-3, TRAJ17)
CAMTLTGNKLTF

SEQ ID NO: 431304 - protein, 14 aa, Homo sapiens
  CDR3 for beta chain variable domain of TCR clone 215652 (TRBV7-3, TRBJ2-1)
CASSLAGGTNKQFF

SEQ ID NO: 431305 - protein, 14 aa, Homo sapiens
  CDR3 for alpha chain variable domain of TCR clone 215653 (TRAV1-2, TRAJ8)
CAVREDTGFQKLVF

SEQ ID NO: 431306 - protein, 13 aa, Homo sapiens
  CDR3 for beta chain variable domain of TCR clone 215653 (TRBV13, TRBJ2-1)
CASILGGRGEQFF

SEQ ID NO: 431307 - protein, 12 aa, Homo sapiens
  CDR3 for alpha chain variable domain of TCR clone 215654 (TRAV12-1, TRAJ40)
CVVYLGTYKYIF

SEQ ID NO: 431308 - protein, 15 aa, Homo sapiens
  CDR3 for beta chain variable domain of TCR clone 215654 (TRBV27, TRBJ1-6)
CASSFDRGLGSPLHF

SEQ ID NO: 431309 - protein, 22 aa, Homo sapiens
  CDR3 for alpha chain variable domain of TCR clone 215655 (TRAV27, TRAJ38)
CAARRNAGNNHIQNPDPAVYQL

SEQ ID NO: 431310 - protein, 13 aa, Homo sapiens
  CDR3 for beta chain variable domain of TCR clone 215655 (TRBV12-5, TRBJ2-3)
CASGDLQSDTQYF

SEQ ID NO: 431311 - protein, 14 aa, Homo sapiens
  CDR3 for alpha chain variable domain of TCR clone 215656 (TRAV1-2, TRAJ8)
CAVREDTGFQKLLF

SEQ ID NO: 431312 - protein, 14 aa, Homo sapiens
  CDR3 for beta chain variable domain of TCR clone 215656 (TRBV29-1, TRBJ1-4)
CSVTGTGGNEKLFF

SEQ ID NO: 431313 - protein, 11 aa, Homo sapiens
  CDR3 for alpha chain variable domain of TCR clone 215657 (TRAV2, TRAJ33)
CAVDSNYQLIW

SEQ ID NO: 431314 - protein, 14 aa, Homo sapiens
  CDR3 for beta chain variable domain of TCR clone 215657 (TRBV4-1, TRBJ1-6)
CASSPGSDSSPLHF

SEQ ID NO: 431315 - protein, 13 aa, Homo sapiens
  CDR3 for alpha chain variable domain of TCR clone 215658 (TRAV12-3, TRAJ35)
CAMAIGFGNVLHC

SEQ ID NO: 431316 - protein, 14 aa, Homo sapiens
  CDR3 for beta chain variable domain of TCR clone 215658 (TRBV4-1, TRBJ2-2)
CASSQYPDTGELFF

SEQ ID NO: 431317 - protein, 13 aa, Homo sapiens
  CDR3 for alpha chain variable domain of TCR clone 215659 (TRAV12-2, TRAJ7)
CAALVYGNNRLAF

SEQ ID NO: 431318 - protein, 13 aa, Homo sapiens
  CDR3 for beta chain variable domain of TCR clone 215659 (TRBV11-2, TRBJ2-5)
CASSSTGEETQYF

SEQ ID NO: 431319 - protein, 14 aa, Homo sapiens
  CDR3 for alpha chain variable domain of TCR clone 215660 (TRAV40, TRAJ58)
CTTVFSTSGSRLTF

SEQ ID NO: 431320 - protein, 16 aa, Homo sapiens
  CDR3 for beta chain variable domain of TCR clone 215660 (TRBV15, TRBJ2-3)
CATSRDLGIVTDTQYF

SEQ ID NO: 431321 - protein, 16 aa, Homo sapiens
  CDR3 for alpha chain variable domain of TCR clone 215661 (TRAV1-2, TRAJ35)
CAVRGLTIGVGNVLHC

SEQ ID NO: 431322 - protein, 13 aa, Homo sapiens
  CDR3 for beta chain variable domain of TCR clone 215661 (TRBV6-6, TRBJ2-1)
CASSVHQGDEQFF

SEQ ID NO: 431323 - protein, 16 aa, Homo sapiens
  CDR3 for alpha chain variable domain of TCR clone 215662 (TRAV8-3, TRAJ42)
CAVCEGNGGSQGNLIF

SEQ ID NO: 431324 - protein, 14 aa, Homo sapiens
  CDR3 for beta chain variable domain of TCR clone 215662 (TRBV7-8, TRBJ2-1)
CASSRGGARNEQFF

SEQ ID NO: 431325 - protein, 14 aa, Homo sapiens
  CDR3 for alpha chain variable domain of TCR clone 215663 (TRAV17, TRAJ34)
CATDSLEGTDKLIF

SEQ ID NO: 431326 - protein, 15 aa, Homo sapiens
  CDR3 for beta chain variable domain of TCR clone 215663 (TRBV12-4, TRBJ1-2)
RASSPITGGGYGYTF

SEQ ID NO: 431327 - protein, 12 aa, Homo sapiens
  CDR3 for alpha chain variable domain of TCR clone 215664 (TRAV12-1, TRAJ32)
CVVKGTTNKLIF

SEQ ID NO: 431328 - protein, 15 aa, Homo sapiens
  CDR3 for beta chain variable domain of TCR clone 215664 (TRBV20-1, TRBJ2-3)
CSASGTSGYTDTQYF

SEQ ID NO: 431329 - protein, 11 aa, Homo sapiens
  CDR3 for alpha chain variable domain of TCR clone 215665 (TRAV1-2, TRAJ20)
CALANDYKLSF

SEQ ID NO: 431330 - protein, 18 aa, Homo sapiens
  CDR3 for beta chain variable domain of TCR clone 215665 (TRBV20-1, TRBJ2-6)
CGAETTPTHGSGANVLPF

SEQ ID NO: 431331 - protein, 19 aa, Homo sapiens
  CDR3 for alpha chain variable domain of TCR clone 215666 (TRAV39, TRAJ43)
PCMTSLPPTSVPWANDMRF

SEQ ID NO: 431332 - protein, 12 aa, Homo sapiens
  CDR3 for beta chain variable domain of TCR clone 215666 (TRBV14, TRBJ2-7)
CASSSLKGEQYF

SEQ ID NO: 431333 - protein, 12 aa, Homo sapiens
  CDR3 for alpha chain variable domain of TCR clone 215667 (TRAV3, TRAJ39)
CAVIEWSTMLTF

SEQ ID NO: 431334 - protein, 14 aa, Homo sapiens
  CDR3 for beta chain variable domain of TCR clone 215667 (TRBV7-8, TRBJ2-3)
CASSFPDGQDTQYF

SEQ ID NO: 431335 - protein, 16 aa, Homo sapiens
  CDR3 for alpha chain variable domain of TCR clone 215668 (TRAV3, TRAJ10)
CAVRDMRAGGGNKLTF

SEQ ID NO: 431336 - protein, 14 aa, Homo sapiens
  CDR3 for beta chain variable domain of TCR clone 215668 (TRBV18, TRBJ2-3)
CASSGLADTDTQYF

SEQ ID NO: 431337 - protein, 15 aa, Homo sapiens
  CDR3 for alpha chain variable domain of TCR clone 215669 (TRAV8-3, TRAJ45)
CALSYSGGGADGLTF

SEQ ID NO: 431338 - protein, 15 aa, Homo sapiens
  CDR3 for beta chain variable domain of TCR clone 215669 (TRBV11-2, TRBJ2-1)
CASSKNRGLIYEQFF

SEQ ID NO: 431339 - protein, 14 aa, Homo sapiens
  CDR3 for alpha chain variable domain of TCR clone 215670 (TRAV12-2, TRAJ13)
CAMKNSGGYQKVTF

SEQ ID NO: 431340 - protein, 13 aa, Homo sapiens
  CDR3 for beta chain variable domain of TCR clone 215670 (TRBV29-1, TRBJ2-5)
CSARDRVEETQYF

SEQ ID NO: 431341 - protein, 15 aa, Homo sapiens
  CDR3 for alpha chain variable domain of TCR clone 215671 (TRAV35, TRAJ40)
CAGQPGQAGTYKYIF

SEQ ID NO: 431342 - protein, 14 aa, Homo sapiens
  CDR3 for beta chain variable domain of TCR clone 215671 (TRBV7-3, TRBJ2-1)
CASSLTGGANEQFF

SEQ ID NO: 431343 - protein, 18 aa, Homo sapiens
  CDR3 for alpha chain variable domain of TCR clone 215672 (TRAV12-2, )
CAVEDIQNPDPAVYQLRD

SEQ ID NO: 431344 - protein, 15 aa, Homo sapiens
  CDR3 for beta chain variable domain of TCR clone 215672 (TRBV6-5, TRBJ2-1)
CASSYDAGAGNEQFF

SEQ ID NO: 431345 - protein, 14 aa, Homo sapiens
  CDR3 for alpha chain variable domain of TCR clone 215673 (TRAV23/DV6, TRAJ37)
CAASTSSNTGKLIF

SEQ ID NO: 431346 - protein, 15 aa, Homo sapiens
  CDR3 for beta chain variable domain of TCR clone 215673 (TRBV7-9, TRBJ2-7)
CASSPGGGLTYEQYV

SEQ ID NO: 431347 - protein, 13 aa, Homo sapiens
  CDR3 for alpha chain variable domain of TCR clone 215674 (TRAV3, TRAJ8)
CAVRFTGFQKLVF

SEQ ID NO: 431348 - protein, 13 aa, Homo sapiens
  CDR3 for beta chain variable domain of TCR clone 215674 (TRBV12-4, TRBJ2-7)
CASSLSGVYEQYF

SEQ ID NO: 431349 - protein, 12 aa, Homo sapiens
  CDR3 for alpha chain variable domain of TCR clone 215675 (TRAV35, TRAJ39)
LAPNNAGNMLTF

SEQ ID NO: 431350 - protein, 15 aa, Homo sapiens
  CDR3 for beta chain variable domain of TCR clone 215675 (TRBV5-1, TRBJ2-1)
CASSPPRAPYNEQFF

SEQ ID NO: 431351 - protein, 11 aa, Homo sapiens
  CDR3 for alpha chain variable domain of TCR clone 215676 (TRAV1-2, TRAJ20)
CAVANDYKLSF

SEQ ID NO: 431352 - protein, 15 aa, Homo sapiens
  CDR3 for beta chain variable domain of TCR clone 215676 (TRBV7-9, TRBJ1-4)
CASSRTGGFNEKLFF

SEQ ID NO: 431353 - protein, 14 aa, Homo sapiens
  CDR3 for alpha chain variable domain of TCR clone 215677 (TRAV13-2, TRAJ17)
CAENSNAAGNKLTF

SEQ ID NO: 431354 - protein, 14 aa, Homo sapiens
  CDR3 for beta chain variable domain of TCR clone 215677 (TRBV19, TRBJ2-1)
CASPTVVLSGEQFF

SEQ ID NO: 431355 - protein, 13 aa, Homo sapiens
  CDR3 for alpha chain variable domain of TCR clone 215678 (TRAV8-1, TRAJ30)
CAVIMNRDDKIIF

SEQ ID NO: 431356 - protein, 16 aa, Homo sapiens
  CDR3 for beta chain variable domain of TCR clone 215678 (TRBV19, TRBJ1-1)
CASSPTRFWPGTEAFF

SEQ ID NO: 431357 - protein, 15 aa, Homo sapiens
  CDR3 for alpha chain variable domain of TCR clone 215679 (TRAV21, TRAJ40)
CAVRPQTSGTYKYIF

SEQ ID NO: 431358 - protein, 16 aa, Homo sapiens
  CDR3 for beta chain variable domain of TCR clone 215679 (TRBV7-2, TRBJ1-2)
CASSSNQDRRGHGYTF

SEQ ID NO: 431359 - protein, 14 aa, Homo sapiens
  CDR3 for alpha chain variable domain of TCR clone 215680 (TRAV12-2, TRAJ13)
CAVKKTGGYQKVTF

SEQ ID NO: 431360 - protein, 19 aa, Homo sapiens
  CDR3 for beta chain variable domain of TCR clone 215680 (TRBV27, TRBJ2-7)
CTSVPAVPFVGAGKGGQYF

SEQ ID NO: 431361 - protein, 15 aa, Homo sapiens
  CDR3 for alpha chain variable domain of TCR clone 215681 (TRAV26-1, TRAJ23)
CIVRVLNNQGGKLIF

SEQ ID NO: 431362 - protein, 14 aa, Homo sapiens
  CDR3 for beta chain variable domain of TCR clone 215681 (TRBV18, TRBJ2-7)
CASSPRGGAYEQYF

SEQ ID NO: 431363 - protein, 13 aa, Homo sapiens
  CDR3 for alpha chain variable domain of TCR clone 215682 (TRAV29/DV5, TRAJ44)
CAASTGTASKLTF

SEQ ID NO: 431364 - protein, 16 aa, Homo sapiens
  CDR3 for beta chain variable domain of TCR clone 215682 (TRBV19, TRBJ2-2)
CASRSPGTGATGELFF

SEQ ID NO: 431365 - protein, 14 aa, Homo sapiens
  CDR3 for alpha chain variable domain of TCR clone 215683 (TRAV1-1, TRAJ28)
CAAPSGAGSYQLTF

SEQ ID NO: 431366 - protein, 15 aa, Homo sapiens
  CDR3 for beta chain variable domain of TCR clone 215683 (TRBV7-2, TRBJ1-2)
CASSLVSGCDYGYTF

SEQ ID NO: 431367 - protein, 14 aa, Homo sapiens
  CDR3 for alpha chain variable domain of TCR clone 215684 (TRAV1-1, TRAJ27)
CAVIYNTNAGKSTF

SEQ ID NO: 431368 - protein, 14 aa, Homo sapiens
  CDR3 for beta chain variable domain of TCR clone 215684 (TRBV7-8, TRBJ2-3)
CASSLEAGTDTQYF

SEQ ID NO: 431369 - protein, 15 aa, Homo sapiens
  CDR3 for alpha chain variable domain of TCR clone 215685 (TRAV8-3, TRAJ6)
CAVVPLGGGSYIPTF

SEQ ID NO: 431370 - protein, 14 aa, Homo sapiens
  CDR3 for beta chain variable domain of TCR clone 215685 (TRBV19, TRBJ2-2)
CASSTGQGAGELFF

SEQ ID NO: 431371 - protein, 13 aa, Homo sapiens
  CDR3 for alpha chain variable domain of TCR clone 215686 (TRAV35, TRAJ53)
CAGQESSNCKLTF

SEQ ID NO: 431372 - protein, 11 aa, Homo sapiens
  CDR3 for beta chain variable domain of TCR clone 215686 (TRBV29-1, TRBJ2-5)
CSEDRTGTQYF

SEQ ID NO: 431373 - protein, 14 aa, Homo sapiens
  CDR3 for alpha chain variable domain of TCR clone 215687 (TRAV1-2, TRAJ8)
CAVREATGFKKLVF

SEQ ID NO: 431374 - protein, 13 aa, Homo sapiens
  CDR3 for beta chain variable domain of TCR clone 215687 (TRBV20-1, TRBJ1-1)
CSARGGGNTDAFF

SEQ ID NO: 431375 - protein, 17 aa, Homo sapiens
  CDR3 for alpha chain variable domain of TCR clone 215688 (TRAV4, TRAJ18)
CLVGERSVGSTRGRLYF

SEQ ID NO: 431376 - protein, 16 aa, Homo sapiens
  CDR3 for beta chain variable domain of TCR clone 215688 (TRBV15, TRBJ1-4)
CATSRDSPPGREKLFF

SEQ ID NO: 431377 - protein, 13 aa, Homo sapiens
  CDR3 for alpha chain variable domain of TCR clone 215689 (TRAV2, TRAJ15)
CAVASQAGTAPIF

SEQ ID NO: 431378 - protein, 16 aa, Homo sapiens
  CDR3 for beta chain variable domain of TCR clone 215689 (TRBV11-3, TRBJ2-3)
CASSSGSGGGTDTQYF

SEQ ID NO: 431379 - protein, 14 aa, Homo sapiens
  CDR3 for alpha chain variable domain of TCR clone 215690 (TRAV12-2, TRAJ40)
CAVKVPSGTYKYIF

SEQ ID NO: 431380 - protein, 14 aa, Homo sapiens
  CDR3 for beta chain variable domain of TCR clone 215690 (TRBV20-1, TRBJ1-1)
CSAQTRIGVTEAFF

SEQ ID NO: 431381 - protein, 11 aa, Homo sapiens
  CDR3 for alpha chain variable domain of TCR clone 215691 (TRAV2, TRAJ33)
CVVESNYQLIW

SEQ ID NO: 431382 - protein, 15 aa, Homo sapiens
  CDR3 for beta chain variable domain of TCR clone 215691 (TRBV19, TRBJ1-1)
CASTSGQIQNTEAVF

SEQ ID NO: 431383 - protein, 22 aa, Homo sapiens
  CDR3 for alpha chain variable domain of TCR clone 215692 (TRAV23/DV6, TRAJ43)
CISWIPSLETQPPLRCSRRCSF

SEQ ID NO: 431384 - protein, 13 aa, Homo sapiens
  CDR3 for beta chain variable domain of TCR clone 215692 (TRBV12-4, TRBJ1-2)
CASSLRQGKGYTF

SEQ ID NO: 431385 - protein, 13 aa, Homo sapiens
  CDR3 for alpha chain variable domain of TCR clone 215693 (TRAV3, TRAJ21)
CAVREPDFNNFYF

SEQ ID NO: 431386 - protein, 14 aa, Homo sapiens
  CDR3 for beta chain variable domain of TCR clone 215693 (TRBV20-1, TRBJ2-3)
CSARGGTSTDTQYF

SEQ ID NO: 431387 - protein, 20 aa, Homo sapiens
  CDR3 for alpha chain variable domain of TCR clone 215694 (TRAV12-1, TRAJ42)
SSVIQPPTSVKGGSQGNLIF

SEQ ID NO: 431388 - protein, 11 aa, Homo sapiens
  CDR3 for beta chain variable domain of TCR clone 215694 (TRBV11-2, TRBJ1-1)
CASSINTEAFF

SEQ ID NO: 431389 - protein, 16 aa, Homo sapiens
  CDR3 for alpha chain variable domain of TCR clone 215695 (TRAV12-1, TRAJ22)
CVVNTISSGSARQLTF

SEQ ID NO: 431390 - protein, 13 aa, Homo sapiens
  CDR3 for beta chain variable domain of TCR clone 215695 (TRBV19, TRBJ2-1)
CASNWGVFSEQFF

SEQ ID NO: 431391 - protein, 19 aa, Homo sapiens
  CDR3 for alpha chain variable domain of TCR clone 215696 (TRAV26-1, TRAJ52)
CIVRVANSAGGTSYGKLTF

SEQ ID NO: 431392 - protein, 14 aa, Homo sapiens
  CDR3 for beta chain variable domain of TCR clone 215696 (TRBV19, TRBJ1-2)
CASSIGAGSYGYTF

SEQ ID NO: 431393 - protein, 12 aa, Homo sapiens
  CDR3 for alpha chain variable domain of TCR clone 215697 (TRAV38-2/DV8, TRAJ40)
CASGTYKYILEQ

SEQ ID NO: 431394 - protein, 14 aa, Homo sapiens
  CDR3 for beta chain variable domain of TCR clone 215697 (TRBV7-9, TRBJ2-1)
CASSPRDSLYEQFF

SEQ ID NO: 431395 - protein, 13 aa, Homo sapiens
  CDR3 for alpha chain variable domain of TCR clone 215698 (TRAV8-3, TRAJ28)
CAVGAVWSYQLTF

SEQ ID NO: 431396 - protein, 14 aa, Homo sapiens
  CDR3 for beta chain variable domain of TCR clone 215698 (TRBV7-2, TRBJ2-7)
CASSPKTSFYEQYF

SEQ ID NO: 431397 - protein, 14 aa, Homo sapiens
  CDR3 for alpha chain variable domain of TCR clone 215699 (TRAV12-1, TRAJ17)
CVVNYKADGNKLTF

SEQ ID NO: 431398 - protein, 17 aa, Homo sapiens
  CDR3 for beta chain variable domain of TCR clone 215699 (TRBV20-1, TRBJ2-1)
CSASSSGLAGSYNEQFF

SEQ ID NO: 431399 - protein, 17 aa, Homo sapiens
  CDR3 for alpha chain variable domain of TCR clone 215700 (TRAV13-1, TRAJ52)
CAAGRNAGVTSYGKLTF

SEQ ID NO: 431400 - protein, 15 aa, Homo sapiens
  CDR3 for beta chain variable domain of TCR clone 215700 (TRBV6-3, TRBJ2-7)
CASSSPGTVFYEQYF

SEQ ID NO: 431401 - protein, 14 aa, Homo sapiens
  CDR3 for alpha chain variable domain of TCR clone 215701 (TRAV13-1, TRAJ35)
CAASKGGFGNVLHC

SEQ ID NO: 431402 - protein, 14 aa, Homo sapiens
  CDR3 for beta chain variable domain of TCR clone 215701 (TRBV4-1, TRBJ2-2)
CASSQAVNTGELFI

SEQ ID NO: 431403 - protein, 12 aa, Homo sapiens
  CDR3 for alpha chain variable domain of TCR clone 215702 (TRAV1-2, TRAJ29)
CAVPSGNTPLVF

SEQ ID NO: 431404 - protein, 15 aa, Homo sapiens
  CDR3 for beta chain variable domain of TCR clone 215702 (TRBV27, TRBJ2-1)
CASSNGGGSSNEQFF

SEQ ID NO: 431405 - protein, 13 aa, Homo sapiens
  CDR3 for alpha chain variable domain of TCR clone 215703 (TRAV1-1, TRAJ16)
CAVMFSDGQKLLF

SEQ ID NO: 431406 - protein, 14 aa, Homo sapiens
  CDR3 for beta chain variable domain of TCR clone 215703 (TRBV7-2, TRBJ2-1)
CASSPGLAGNEQFF

SEQ ID NO: 431407 - protein, 14 aa, Homo sapiens
  CDR3 for alpha chain variable domain of TCR clone 215704 (TRAV26-1, TRAJ39)
CIVRGSRAGNMLTF

SEQ ID NO: 431408 - protein, 14 aa, Homo sapiens
  CDR3 for beta chain variable domain of TCR clone 215704 (TRBV6-1, TRBJ1-3)
CASVRGGGGNTIYF

SEQ ID NO: 431409 - protein, 13 aa, Homo sapiens
  CDR3 for alpha chain variable domain of TCR clone 215705 (TRAV8-6, TRAJ49)
CVVITNTGNQFYF

SEQ ID NO: 431410 - protein, 14 aa, Homo sapiens
  CDR3 for beta chain variable domain of TCR clone 215705 (TRBV27, TRBJ2-2)
CASRPGVNTGELFF

SEQ ID NO: 431411 - protein, 16 aa, Homo sapiens
  CDR3 for alpha chain variable domain of TCR clone 215706 (TRAV12-2, TRAJ43)
CAGADMRFGAWTRLTV

SEQ ID NO: 431412 - protein, 16 aa, Homo sapiens
  CDR3 for beta chain variable domain of TCR clone 215706 (TRBV2, TRBJ2-4)
CASSEAPGGEQNIQYF

SEQ ID NO: 431413 - protein, 14 aa, Homo sapiens
  CDR3 for alpha chain variable domain of TCR clone 215707 (TRAV8-4, TRAJ4)
CAVSPSGGYPKLIF

SEQ ID NO: 431414 - protein, 15 aa, Homo sapiens
  CDR3 for beta chain variable domain of TCR clone 215707 (TRBV7-8, TRBJ2-3)
CASSLSADSGGAQYF

SEQ ID NO: 431415 - protein, 14 aa, Homo sapiens
  CDR3 for alpha chain variable domain of TCR clone 215708 (TRAV8-4, TRAJ16)
CAVSPVGRWPAAAL

SEQ ID NO: 431416 - protein, 15 aa, Homo sapiens
  CDR3 for beta chain variable domain of TCR clone 215708 (TRBV7-3, TRBJ1-6)
CASSLGRGAGSPLHF

SEQ ID NO: 431417 - protein, 16 aa, Homo sapiens
  CDR3 for alpha chain variable domain of TCR clone 215709 (TRAV3, TRAJ21)
CAVRDIERGNFNKFYF

SEQ ID NO: 431418 - protein, 12 aa, Homo sapiens
  CDR3 for beta chain variable domain of TCR clone 215709 (TRBV5-1, TRBJ2-5)
CASSLGLETQYF

SEQ ID NO: 431419 - protein, 13 aa, Homo sapiens
  CDR3 for alpha chain variable domain of TCR clone 215710 (TRAV12-1, TRAJ21)
CVVTLYNFNKFYF

SEQ ID NO: 431420 - protein, 20 aa, Homo sapiens
  CDR3 for beta chain variable domain of TCR clone 215710 (TRBV7-8, TRBJ2-1)
CASSLAHRLAGVRYYNEQFF

SEQ ID NO: 431421 - protein, 14 aa, Homo sapiens
  CDR3 for alpha chain variable domain of TCR clone 215711 (TRAV1-1, TRAJ28)
CAAPSGAGSYQLTF

SEQ ID NO: 431422 - protein, 16 aa, Homo sapiens
  CDR3 for beta chain variable domain of TCR clone 215711 (TRBV4-3, TRBJ2-2)
CASSHLQGSGTGELFF

SEQ ID NO: 431423 - protein, 15 aa, Homo sapiens
  CDR3 for alpha chain variable domain of TCR clone 215712 (TRAV12-1, TRAJ45)
CVVLSGGGGADGLTF

SEQ ID NO: 431424 - protein, 12 aa, Homo sapiens
  CDR3 for beta chain variable domain of TCR clone 215712 (TRBV7-8, TRBJ2-7)
CASSLGDREQYF

SEQ ID NO: 431425 - protein, 10 aa, Homo sapiens
  CDR3 for alpha chain variable domain of TCR clone 215713 (TRAV21, TRAJ31)
CAVDNARLMF

SEQ ID NO: 431426 - protein, 16 aa, Homo sapiens
  CDR3 for beta chain variable domain of TCR clone 215713 (TRBV5-1, TRBJ2-2)
CASSLWDTTNTGELFF

SEQ ID NO: 431427 - protein, 15 aa, Homo sapiens
  CDR3 for alpha chain variable domain of TCR clone 215714 (TRAV12-1, TRAJ44)
CVADLPTGTASKLTF

SEQ ID NO: 431428 - protein, 12 aa, Homo sapiens
  CDR3 for beta chain variable domain of TCR clone 215714 (TRBV20-1, TRBJ2-5)
CSAREGHETQYF

SEQ ID NO: 431429 - protein, 12 aa, Homo sapiens
  CDR3 for alpha chain variable domain of TCR clone 215715 (TRAV17, TRAJ20)
CATQSNDYKLSF

SEQ ID NO: 431430 - protein, 16 aa, Homo sapiens
  CDR3 for beta chain variable domain of TCR clone 215715 (TRBV24-1, TRBJ2-3)
CATSDPGTGATDTQYF

SEQ ID NO: 431431 - protein, 16 aa, Homo sapiens
  CDR3 for alpha chain variable domain of TCR clone 215716 (TRAV30, TRAJ24)
CGTEIVDADSWGKFQF

SEQ ID NO: 431432 - protein, 15 aa, Homo sapiens
  CDR3 for beta chain variable domain of TCR clone 215716 (TRBV20-1, TRBJ2-7)
SAVLDRVSGMDEQYF

SEQ ID NO: 431433 - protein, 10 aa, Homo sapiens
  CDR3 for alpha chain variable domain of TCR clone 215717 (TRAV1-2, TRAJ23)
CAGQGGRLIF

SEQ ID NO: 431434 - protein, 14 aa, Homo sapiens
  CDR3 for beta chain variable domain of TCR clone 215717 (TRBV11-2, TRBJ1-1)
CASSLRQGGGTLES

SEQ ID NO: 431435 - protein, 11 aa, Homo sapiens
  CDR3 for alpha chain variable domain of TCR clone 215718 (TRAV3, TRAJ13)
CAVTCYQKVTF

SEQ ID NO: 431436 - protein, 14 aa, Homo sapiens
  CDR3 for beta chain variable domain of TCR clone 215718 (TRBV25-1, TRBJ1-1)
CASTHLGGNTEAFF

SEQ ID NO: 431437 - protein, 13 aa, Homo sapiens
  CDR3 for alpha chain variable domain of TCR clone 215719 (TRAV20, TRAJ21)
CAVEGYNFNKFYF

SEQ ID NO: 431438 - protein, 17 aa, Homo sapiens
  CDR3 for beta chain variable domain of TCR clone 215719 (TRBV13, TRBJ2-3)
CASSLSRVAGGRNTQYF

SEQ ID NO: 431439 - protein, 14 aa, Homo sapiens
  CDR3 for alpha chain variable domain of TCR clone 215720 (TRAV26-1, TRAJ45)
CIEVTGGGADGLTF

SEQ ID NO: 431440 - protein, 15 aa, Homo sapiens
  CDR3 for beta chain variable domain of TCR clone 215720 (TRBV2, TRBJ2-1)
CASSELAGGHNEQFF

SEQ ID NO: 431441 - protein, 16 aa, Homo sapiens
  CDR3 for alpha chain variable domain of TCR clone 215721 (TRAV12-1, TRAJ43)
CVVNPHRFGAGNRLTV

SEQ ID NO: 431442 - protein, 13 aa, Homo sapiens
  CDR3 for beta chain variable domain of TCR clone 215721 (TRBV12-4, TRBJ1-2)
CASSSGPNYGYTF

SEQ ID NO: 431443 - protein, 13 aa, Homo sapiens
  CDR3 for alpha chain variable domain of TCR clone 215722 (TRAV12-3, TRAJ9)
CAMRNTGGFKTIF

SEQ ID NO: 431444 - protein, 14 aa, Homo sapiens
  CDR3 for beta chain variable domain of TCR clone 215722 (TRBV7-2, TRBJ2-7)
CASRSQGAAYEQYF

SEQ ID NO: 431445 - protein, 12 aa, Homo sapiens
  CDR3 for alpha chain variable domain of TCR clone 215723 (TRAV3, TRAJ43)
CAVRDPNNDMRF

SEQ ID NO: 431446 - protein, 15 aa, Homo sapiens
  CDR3 for beta chain variable domain of TCR clone 215723 (TRBV27, TRBJ1-5)
SASSLGTGFDQPQHF

SEQ ID NO: 431447 - protein, 17 aa, Homo sapiens
  CDR3 for alpha chain variable domain of TCR clone 215724 (TRAV24, TRAJ42)
CAFRVKNYGGSQGNLIF

SEQ ID NO: 431448 - protein, 14 aa, Homo sapiens
  CDR3 for beta chain variable domain of TCR clone 215724 (TRBV2, TRBJ2-3)
CASSEGQNTNTQYF

SEQ ID NO: 431449 - protein, 12 aa, Homo sapiens
  CDR3 for alpha chain variable domain of TCR clone 215725 (TRAV12-1, TRAJ40)
CVVYSGTYKYIF

SEQ ID NO: 431450 - protein, 12 aa, Homo sapiens
  CDR3 for beta chain variable domain of TCR clone 215725 (TRBV28, TRBJ2-1)
CASSRLVGEQFF

SEQ ID NO: 431451 - protein, 20 aa, Homo sapiens
  CDR3 for alpha chain variable domain of TCR clone 215726 (TRAV25, TRAJ21)
TATQTTDVGTYPLSFNKFYF

SEQ ID NO: 431452 - protein, 14 aa, Homo sapiens
  CDR3 for beta chain variable domain of TCR clone 215726 (TRBV6-1, TRBJ2-1)
CASAKDGLYNEQLF

SEQ ID NO: 431453 - protein, 18 aa, Homo sapiens
  CDR3 for alpha chain variable domain of TCR clone 215727 (TRAV21, TRAJ52)
CAVRPSPAGGTSYGKLTF

SEQ ID NO: 431454 - protein, 16 aa, Homo sapiens
  CDR3 for beta chain variable domain of TCR clone 215727 (TRBV13, TRBJ2-3)
CQRPRQGSGGRNTQYF

SEQ ID NO: 431455 - protein, 15 aa, Homo sapiens
  CDR3 for alpha chain variable domain of TCR clone 215728 (TRAV17, TRAJ10)
CATVLLTGGGNKLTF

SEQ ID NO: 431456 - protein, 12 aa, Homo sapiens
  CDR3 for beta chain variable domain of TCR clone 215728 (TRBV19, TRBJ1-5)
CASSIAQQPQHF

SEQ ID NO: 431457 - protein, 13 aa, Homo sapiens
  CDR3 for alpha chain variable domain of TCR clone 215729 (TRAV12-2, TRAJ20)
CAVYPSNDYKLSF

SEQ ID NO: 431458 - protein, 15 aa, Homo sapiens
  CDR3 for beta chain variable domain of TCR clone 215729 (TRBV5-1, TRBJ2-1)
CASSLVANSYNEQFF

SEQ ID NO: 431459 - protein, 16 aa, Homo sapiens
  CDR3 for alpha chain variable domain of TCR clone 215730 (TRAV12-3, TRAJ10)
CAMKKGITGGGNKITF

SEQ ID NO: 431460 - protein, 12 aa, Homo sapiens
  CDR3 for beta chain variable domain of TCR clone 215730 (TRBV20-1, TRBJ2-7)
CSAITPTKEQFF

SEQ ID NO: 431461 - protein, 17 aa, Homo sapiens
  CDR3 for alpha chain variable domain of TCR clone 215731 (TRAV3, TRAJ6)
CAVRDGPRAGVSYIPTF

SEQ ID NO: 431462 - protein, 14 aa, Homo sapiens
  CDR3 for beta chain variable domain of TCR clone 215731 (TRBV7-2, TRBJ2-7)
CASSPKTSFYERYF

SEQ ID NO: 431463 - protein, 14 aa, Homo sapiens
  CDR3 for alpha chain variable domain of TCR clone 215732 (TRAV21, TRAJ35)
CAVMPIGFGKVLHC

SEQ ID NO: 431464 - protein, 12 aa, Homo sapiens
  CDR3 for beta chain variable domain of TCR clone 215732 (TRBV7-9, TRBJ2-7)
CASSIKREEQYV

SEQ ID NO: 431465 - protein, 15 aa, Homo sapiens
  CDR3 for alpha chain variable domain of TCR clone 215733 (TRAV2, TRAJ36)
CAVEDRGNWGKQPLL

SEQ ID NO: 431466 - protein, 14 aa, Homo sapiens
  CDR3 for beta chain variable domain of TCR clone 215733 (TRBV7-9, TRBJ2-5)
CASSLDTAQETQYF

SEQ ID NO: 431467 - protein, 16 aa, Homo sapiens
  CDR3 for alpha chain variable domain of TCR clone 215734 (TRAV30, TRAJ24)
CGTEIVDADRLGKFQF

SEQ ID NO: 431468 - protein, 17 aa, Homo sapiens
  CDR3 for beta chain variable domain of TCR clone 215734 (TRBV20-1, TRBJ2-1)
CSARDRRRASSYNEQFF

SEQ ID NO: 431469 - protein, 16 aa, Homo sapiens
  CDR3 for alpha chain variable domain of TCR clone 215735 (TRAV30, TRAJ24)
CDTEIVDADSWGKFQF

SEQ ID NO: 431470 - protein, 14 aa, Homo sapiens
  CDR3 for beta chain variable domain of TCR clone 215735 (TRBV7-2, TRBJ2-7)
CASSPKTSFYEQYF

SEQ ID NO: 431471 - protein, 14 aa, Homo sapiens
  CDR3 for alpha chain variable domain of TCR clone 215736 (TRAV12-2, TRAJ17)
CAVLFKAAGNKLTF

SEQ ID NO: 431472 - protein, 14 aa, Homo sapiens
  CDR3 for beta chain variable domain of TCR clone 215736 (TRBV15, TRBJ1-2)
CATSRDFDRVGYTV

SEQ ID NO: 431473 - protein, 11 aa, Homo sapiens
  CDR3 for alpha chain variable domain of TCR clone 215737 (TRAV21, TRAJ9)
CAVPGGFKTIF

SEQ ID NO: 431474 - protein, 12 aa, Homo sapiens
  CDR3 for beta chain variable domain of TCR clone 215737 (TRBV20-1, TRBJ2-3)
CSARVGTDTQNF

SEQ ID NO: 431475 - protein, 14 aa, Homo sapiens
  CDR3 for alpha chain variable domain of TCR clone 215738 (TRAV12-1, TRAJ27)
CGEHIRTNAGKSTF

SEQ ID NO: 431476 - protein, 15 aa, Homo sapiens
  CDR3 for beta chain variable domain of TCR clone 215738 (TRBV19, TRBJ1-1)
CASTSGQSQNTEAFF

SEQ ID NO: 431477 - protein, 12 aa, Homo sapiens
  CDR3 for alpha chain variable domain of TCR clone 215739 (TRAV3, TRAJ20)
CAVRDPDYKLSF

SEQ ID NO: 431478 - protein, 15 aa, Homo sapiens
  CDR3 for beta chain variable domain of TCR clone 215739 (TRBV2, TRBJ2-2)
CDSSRETVGTGELFF

SEQ ID NO: 431479 - protein, 18 aa, Homo sapiens
  CDR3 for alpha chain variable domain of TCR clone 215740 (TRAV21, TRAJ52)
CAVRPSPAGGTRYGKLTF

SEQ ID NO: 431480 - protein, 13 aa, Homo sapiens
  CDR3 for beta chain variable domain of TCR clone 215740 (TRBV29-1, TRBJ2-1)
CSVEGGRVNEQFF

SEQ ID NO: 431481 - protein, 15 aa, Homo sapiens
  CDR3 for alpha chain variable domain of TCR clone 215741 (TRAV25, TRAJ53)
CPTSNSGGSNYKLTF

SEQ ID NO: 431482 - protein, 14 aa, Homo sapiens
  CDR3 for beta chain variable domain of TCR clone 215741 (TRBV19, TRBJ2-1)
CASSKDRGQDEQFF

SEQ ID NO: 431483 - protein, 14 aa, Homo sapiens
  CDR3 for alpha chain variable domain of TCR clone 215742 (TRAV23/DV6, TRAJ39)
CAASSGNAGNMLTF

SEQ ID NO: 431484 - protein, 12 aa, Homo sapiens
  CDR3 for beta chain variable domain of TCR clone 215742 (TRBV20-1, TRBJ2-5)
CSVGTGSETQYF

SEQ ID NO: 431485 - protein, 15 aa, Homo sapiens
  CDR3 for alpha chain variable domain of TCR clone 215743 (TRAV13-1, TRAJ5)
CAASKADTGRRALIF

SEQ ID NO: 431486 - protein, 15 aa, Homo sapiens
  CDR3 for beta chain variable domain of TCR clone 215743 (TRBV19, TRBJ2-1)
CASSMGWNSNNEQFF

SEQ ID NO: 431487 - protein, 14 aa, Homo sapiens
  CDR3 for alpha chain variable domain of TCR clone 215744 (TRAV1-2, TRAJ16)
CAVNRFSDGQKLLF

SEQ ID NO: 431488 - protein, 14 aa, Homo sapiens
  CDR3 for beta chain variable domain of TCR clone 215744 (TRBV2, TRBJ2-3)
CASNRGTSTDTQYF

SEQ ID NO: 431489 - protein, 17 aa, Homo sapiens
  CDR3 for alpha chain variable domain of TCR clone 215745 (TRAV23/DV6, TRAJ57)
CAASSTLSQGGSERLVF

SEQ ID NO: 431490 - protein, 14 aa, Homo sapiens
  CDR3 for beta chain variable domain of TCR clone 215745 (TRBV13, TRBJ2-5)
CASSLGQGKETQYF

SEQ ID NO: 431491 - protein, 14 aa, Homo sapiens
  CDR3 for alpha chain variable domain of TCR clone 215746 (TRAV17, TRAJ22)
CATSPSGSARQLTF

SEQ ID NO: 431492 - protein, 19 aa, Homo sapiens
  CDR3 for beta chain variable domain of TCR clone 215746 (TRBV7-9, TRBJ2-1)
CASSHNRGALLRSYNEQFF

SEQ ID NO: 431493 - protein, 13 aa, Homo sapiens
  CDR3 for alpha chain variable domain of TCR clone 215747 (TRAV2, TRAJ21)
CAVEDNNFNKFYF

SEQ ID NO: 431494 - protein, 14 aa, Homo sapiens
  CDR3 for beta chain variable domain of TCR clone 215747 (TRBV6-1, TRBJ1-3)
CASVPGGGGNTIYF

SEQ ID NO: 431495 - protein, 15 aa, Homo sapiens
  CDR3 for alpha chain variable domain of TCR clone 215748 (TRAV2, TRAJ32)
CCLLEDGGATNKLIF

SEQ ID NO: 431496 - protein, 15 aa, Homo sapiens
  CDR3 for beta chain variable domain of TCR clone 215748 (TRBV7-3, TRBJ2-1)
CASSPTGGSRNEQFF

SEQ ID NO: 431497 - protein, 14 aa, Homo sapiens
  CDR3 for alpha chain variable domain of TCR clone 215749 (TRAV12-1, TRAJ30)
CVVNIGGRDDKIIY

SEQ ID NO: 431498 - protein, 13 aa, Homo sapiens
  CDR3 for beta chain variable domain of TCR clone 215749 (TRBV12-5, TRBJ2-1)
CASGLGRGNEQFF

SEQ ID NO: 431499 - protein, 11 aa, Homo sapiens
  CDR3 for alpha chain variable domain of TCR clone 215750 (TRAV2, TRAJ13)
CAPGGYQKVTF

SEQ ID NO: 431500 - protein, 14 aa, Homo sapiens
  CDR3 for beta chain variable domain of TCR clone 215750 (TRBV6-1, TRBJ1-3)
CASVQGGGGNTIYF

SEQ ID NO: 431501 - protein, 11 aa, Homo sapiens
  CDR3 for alpha chain variable domain of TCR clone 215751 (TRAV12-1, TRAJ40)
CGLLRTYKYIF

SEQ ID NO: 431502 - protein, 16 aa, Homo sapiens
  CDR3 for beta chain variable domain of TCR clone 215751 (TRBV20-1, TRBJ2-1)
CSARDLKQGMNNEQFF

SEQ ID NO: 431503 - protein, 14 aa, Homo sapiens
  CDR3 for alpha chain variable domain of TCR clone 215752 (TRAV12-2, TRAJ15)
CAPHTGQAGTALIF

SEQ ID NO: 431504 - protein, 15 aa, Homo sapiens
  CDR3 for beta chain variable domain of TCR clone 215752 (TRBV11-2, TRBJ2-7)
CASSLMVGGSYEQYF

SEQ ID NO: 431505 - protein, 14 aa, Homo sapiens
  CDR3 for alpha chain variable domain of TCR clone 215753 (TRAV8-3, TRAJ35)
CAVVPQCFGNVLHC

SEQ ID NO: 431506 - protein, 12 aa, Homo sapiens
  CDR3 for beta chain variable domain of TCR clone 215753 (TRBV11-2, TRBJ2-2)
CASSLGGGELFF

SEQ ID NO: 431507 - protein, 15 aa, Homo sapiens
  CDR3 for alpha chain variable domain of TCR clone 215754 (TRAV4, TRAJ17)
CLVGDIGAAGNKLTF

SEQ ID NO: 431508 - protein, 12 aa, Homo sapiens
  CDR3 for beta chain variable domain of TCR clone 215754 (TRBV12-4, TRBJ2-7)
CASSLGGYEQYF

SEQ ID NO: 431509 - protein, 14 aa, Homo sapiens
  CDR3 for alpha chain variable domain of TCR clone 215755 (TRAV12-1, TRAJ12)
CVVNPMDSSFKLIF

SEQ ID NO: 431510 - protein, 16 aa, Homo sapiens
  CDR3 for beta chain variable domain of TCR clone 215755 (TRBV28, TRBJ2-2)
CTSVPAFGRAPGSCFF

SEQ ID NO: 431511 - protein, 12 aa, Homo sapiens
  CDR3 for alpha chain variable domain of TCR clone 215756 (TRAV12-3, TRAJ17)
CAMTLTGNKITF

SEQ ID NO: 431512 - protein, 15 aa, Homo sapiens
  CDR3 for beta chain variable domain of TCR clone 215756 (TRBV6-3, TRBJ2-7)
CASSSPGTVFYEQYF

SEQ ID NO: 431513 - protein, 15 aa, Homo sapiens
  CDR3 for alpha chain variable domain of TCR clone 215757 (TRAV8-4, TRAJ10)
CAVSDGPGGGNKLTF

SEQ ID NO: 431514 - protein, 13 aa, Homo sapiens
  CDR3 for beta chain variable domain of TCR clone 215757 (TRBV28, TRBJ1-3)
CASSFPGSGTIYF

SEQ ID NO: 431515 - protein, 14 aa, Homo sapiens
  CDR3 for alpha chain variable domain of TCR clone 215758 (TRAV23/DV6, TRAJ40)
GAARKNSGTYKYIF

SEQ ID NO: 431516 - protein, 14 aa, Homo sapiens
  CDR3 for beta chain variable domain of TCR clone 215758 (TRBV10-3, TRBJ2-5)
CAISERDYQETQYF

SEQ ID NO: 431517 - protein, 17 aa, Homo sapiens
  CDR3 for alpha chain variable domain of TCR clone 215759 (TRAV38-2/DV8, TRAJ23)
CALSRKLIFGQGTELSV

SEQ ID NO: 431518 - protein, 17 aa, Homo sapiens
  CDR3 for beta chain variable domain of TCR clone 215759 (TRBV5-4, TRBJ2-1)
CAGSSAGGRGPYNEQFF

SEQ ID NO: 431519 - protein, 16 aa, Homo sapiens
  CDR3 for alpha chain variable domain of TCR clone 215760 (TRAV20, TRAJ10)
CAVLRGLTGGGNKLTF

SEQ ID NO: 431520 - protein, 14 aa, Homo sapiens
  CDR3 for beta chain variable domain of TCR clone 215760 (TRBV19, TRBJ1-5)
CASRVPDSFLSQHF

SEQ ID NO: 431521 - protein, 11 aa, Homo sapiens
  CDR3 for alpha chain variable domain of TCR clone 215761 (TRAV2, TRAJ13)
CASEGYQKVTF

SEQ ID NO: 431522 - protein, 17 aa, Homo sapiens
  CDR3 for beta chain variable domain of TCR clone 215761 (TRBV7-3, TRBJ2-3)
CASSLMKRMRGADTQYF

SEQ ID NO: 431523 - protein, 14 aa, Homo sapiens
  CDR3 for alpha chain variable domain of TCR clone 215762 (TRAV1-2, TRAJ8)
CAVREDTGFQKLVF

SEQ ID NO: 431524 - protein, 17 aa, Homo sapiens
  CDR3 for beta chain variable domain of TCR clone 215762 (TRBV2, TRBJ1-5)
CASSVGTGMRGYQPQHF

SEQ ID NO: 431525 - protein, 11 aa, Homo sapiens
  CDR3 for alpha chain variable domain of TCR clone 215763 (TRAV12-2, TRAJ33)
CAVGSNYQLIW

SEQ ID NO: 431526 - protein, 16 aa, Homo sapiens
  CDR3 for beta chain variable domain of TCR clone 215763 (TRBV27, TRBJ2-7)
CASSSEREDSAYEQYF

SEQ ID NO: 431527 - protein, 13 aa, Homo sapiens
  CDR3 for alpha chain variable domain of TCR clone 215764 (TRAV35, TRAJ42)
CAGFPGSQGNLIF

SEQ ID NO: 431528 - protein, 14 aa, Homo sapiens
  CDR3 for beta chain variable domain of TCR clone 215764 (TRBV29-1, TRBJ2-2)
CSVLAETNAGELFF

SEQ ID NO: 431529 - protein, 12 aa, Homo sapiens
  CDR3 for alpha chain variable domain of TCR clone 215765 (TRAV36/DV7, TRAJ54)
CAVVRGAQKLVF

SEQ ID NO: 431530 - protein, 16 aa, Homo sapiens
  CDR3 for beta chain variable domain of TCR clone 215765 (TRBV20-1, TRBJ1-4)
CSAPGQGLLTNEKLFF

SEQ ID NO: 431531 - protein, 14 aa, Homo sapiens
  CDR3 for alpha chain variable domain of TCR clone 215766 (TRAV12-2, TRAJ13)
CAVKKTGGYQKVAF

SEQ ID NO: 431532 - protein, 14 aa, Homo sapiens
  CDR3 for beta chain variable domain of TCR clone 215766 (TRBV20-1, TRBJ1-1)
CSAQTRIGGTEAFF

SEQ ID NO: 431533 - protein, 14 aa, Homo sapiens
  CDR3 for alpha chain variable domain of TCR clone 215767 (TRAV8-3, TRAJ4)
CAVGAAGGYNKLIF

SEQ ID NO: 431534 - protein, 14 aa, Homo sapiens
  CDR3 for beta chain variable domain of TCR clone 215767 (TRBV7-2, TRBJ1-1)
CASSFLTGTTEAFF

SEQ ID NO: 431535 - protein, 13 aa, Homo sapiens
  CDR3 for alpha chain variable domain of TCR clone 215768 (TRAV17, TRAJ5)
CAPLDTGRRALTF

SEQ ID NO: 431536 - protein, 14 aa, Homo sapiens
  CDR3 for beta chain variable domain of TCR clone 215768 (TRBV29-1, TRBJ2-7)
CSVDQRQASYEQYF

SEQ ID NO: 431537 - protein, 13 aa, Homo sapiens
  CDR3 for alpha chain variable domain of TCR clone 215769 (TRAV27, TRAJ41)
CAGEGDSGYALNF

SEQ ID NO: 431538 - protein, 14 aa, Homo sapiens
  CDR3 for beta chain variable domain of TCR clone 215769 (TRBV11-2, TRBJ2-7)
CASSLGAGAYEQYF

SEQ ID NO: 431539 - protein, 16 aa, Homo sapiens
  CDR3 for alpha chain variable domain of TCR clone 215770 (TRAV12-2, TRAJ43)
CAGDDMRFGAGTRLTV

SEQ ID NO: 431540 - protein, 14 aa, Homo sapiens
  CDR3 for beta chain variable domain of TCR clone 215770 (TRBV7-8, TRBJ2-7)
CASTFRGGPNEQYF

SEQ ID NO: 431541 - protein, 10 aa, Homo sapiens
  CDR3 for alpha chain variable domain of TCR clone 215771 (TRAV1-2, TRAJ31)
CVSEDARLMF

SEQ ID NO: 431542 - protein, 17 aa, Homo sapiens
  CDR3 for beta chain variable domain of TCR clone 215771 (TRBV13, TRBJ2-3)
CASSLSRVAGGRNTQYF

SEQ ID NO: 431543 - protein, 17 aa, Homo sapiens
  CDR3 for alpha chain variable domain of TCR clone 215772 (TRAV8-3, TRAJ42)
CAVASRSYGGSQGNLIF

SEQ ID NO: 431544 - protein, 17 aa, Homo sapiens
  CDR3 for beta chain variable domain of TCR clone 215772 (TRBV13, TRBJ2-3)
CASSSLGTSGLTDTQYF

SEQ ID NO: 431545 - protein, 14 aa, Homo sapiens
  CDR3 for alpha chain variable domain of TCR clone 215773 (TRAV12-1, TRAJ30)
CVVNIGGRDDKIIF

SEQ ID NO: 431546 - protein, 14 aa, Homo sapiens
  CDR3 for beta chain variable domain of TCR clone 215773 (TRBV20-1, TRBJ2-1)
GSAQIGGSANEQFF

SEQ ID NO: 431547 - protein, 15 aa, Homo sapiens
  CDR3 for alpha chain variable domain of TCR clone 215774 (TRAV21, TRAJ53)
CATLNSGGSNYKLTF

SEQ ID NO: 431548 - protein, 12 aa, Homo sapiens
  CDR3 for beta chain variable domain of TCR clone 215774 (TRBV6-3, TRBJ2-7)
CASSEPGFEQYF

SEQ ID NO: 431549 - protein, 12 aa, Homo sapiens
  CDR3 for alpha chain variable domain of TCR clone 215775 (TRAV17, TRAJ40)
CATASGTYKYIF

SEQ ID NO: 431550 - protein, 15 aa, Homo sapiens
  CDR3 for beta chain variable domain of TCR clone 215775 (TRBV6-5, TRBJ1-2)
CASSYSPGQGNGYTF

SEQ ID NO: 431551 - protein, 11 aa, Homo sapiens
  CDR3 for alpha chain variable domain of TCR clone 215776 (TRAV12-3, TRAJ43)
CAMNVSNDMRF

SEQ ID NO: 431552 - protein, 16 aa, Homo sapiens
  CDR3 for beta chain variable domain of TCR clone 215776 (TRBV7-3, TRBJ2-2)
CASSLKRGTVSGELFF

SEQ ID NO: 431553 - protein, 12 aa, Homo sapiens
  CDR3 for alpha chain variable domain of TCR clone 215777 (TRAV12-3, TRAJ40)
CAMSSGHYTYIF

SEQ ID NO: 431554 - protein, 20 aa, Homo sapiens
  CDR3 for beta chain variable domain of TCR clone 215777 (TRBV7-8, TRBJ2-2)
CASSHLFPGPTIHIIGELVF

SEQ ID NO: 431555 - protein, 13 aa, Homo sapiens
  CDR3 for alpha chain variable domain of TCR clone 215778 (TRAV13-1, TRAJ15)
CAALPGAGTALIF

SEQ ID NO: 431556 - protein, 13 aa, Homo sapiens
  CDR3 for beta chain variable domain of TCR clone 215778 (TRBV7-9, TRBJ2-3)
CASSPGSTDTQYF

SEQ ID NO: 431557 - protein, 15 aa, Homo sapiens
  CDR3 for alpha chain variable domain of TCR clone 215779 (TRAV13-1, TRAJ5)
CAASKADTGRRDLTF

SEQ ID NO: 431558 - protein, 16 aa, Homo sapiens
  CDR3 for beta chain variable domain of TCR clone 215779 (TRBV7-2, TRBJ2-1)
CASSLGRTSGDNEQFF

SEQ ID NO: 431559 - protein, 15 aa, Homo sapiens
  CDR3 for alpha chain variable domain of TCR clone 215780 (TRAV12-2, TRAJ42)
CAVNSHGRSQGNLIF

SEQ ID NO: 431560 - protein, 13 aa, Homo sapiens
  CDR3 for beta chain variable domain of TCR clone 215780 (TRBV27, TRBJ1-1)
CASSVSANTEAFF

SEQ ID NO: 431561 - protein, 12 aa, Homo sapiens
  CDR3 for alpha chain variable domain of TCR clone 215781 (TRAV8-1, TRAJ23)
CAVVNQGGKLIF

SEQ ID NO: 431562 - protein, 15 aa, Homo sapiens
  CDR3 for beta chain variable domain of TCR clone 215781 (TRBV7-3, TRBJ2-2)
CQQLKAGDLVRGAVF

SEQ ID NO: 431563 - protein, 13 aa, Homo sapiens
  CDR3 for alpha chain variable domain of TCR clone 215782 (TRAV8-6, TRAJ49)
CAVITNTGNQFFF

SEQ ID NO: 431564 - protein, 13 aa, Homo sapiens
  CDR3 for beta chain variable domain of TCR clone 215782 (TRBV7-9, TRBJ1-2)
CASSLKQNYGYTF

SEQ ID NO: 431565 - protein, 10 aa, Homo sapiens
  CDR3 for alpha chain variable domain of TCR clone 215783 (TRAV23/DV6, TRAJ57)
CSASSTLSQG

SEQ ID NO: 431566 - protein, 14 aa, Homo sapiens
  CDR3 for beta chain variable domain of TCR clone 215783 (TRBV25-1, TRBJ1-1)
CASTHLVGNTEAFF

SEQ ID NO: 431567 - protein, 16 aa, Homo sapiens
  CDR3 for alpha chain variable domain of TCR clone 215784 (TRAV12-3, TRAJ53)
CAMSPGSGVSNYKLTF

SEQ ID NO: 431568 - protein, 19 aa, Homo sapiens
  CDR3 for beta chain variable domain of TCR clone 215784 (TRBV25-1, TRBJ2-2)
CAILVYRVDRGRKTGELFF

SEQ ID NO: 431569 - protein, 17 aa, Homo sapiens
  CDR3 for alpha chain variable domain of TCR clone 215785 (TRAV8-6, TRAJ22)
CAVSLYPSSGSARQLTF

SEQ ID NO: 431570 - protein, 16 aa, Homo sapiens
  CDR3 for beta chain variable domain of TCR clone 215785 (TRBV19, TRBJ2-7)
GASSPAGSGSLNEQYF

SEQ ID NO: 431571 - protein, 15 aa, Homo sapiens
  CDR3 for alpha chain variable domain of TCR clone 215786 (TRAV12-3, TRAJ27)
CAMRAYNTNAGKSTF

SEQ ID NO: 431572 - protein, 14 aa, Homo sapiens
  CDR3 for beta chain variable domain of TCR clone 215786 (TRBV7-3, TRBJ2-2)
CASSSGGYTGELFF

SEQ ID NO: 431573 - protein, 13 aa, Homo sapiens
  CDR3 for alpha chain variable domain of TCR clone 215787 (TRAV3, TRAJ41)
CAVSSNSGYALNF

SEQ ID NO: 431574 - protein, 16 aa, Homo sapiens
  CDR3 for beta chain variable domain of TCR clone 215787 (TRBV28, TRBJ2-7)
CASSLFFETGGPEQYF

SEQ ID NO: 431575 - protein, 13 aa, Homo sapiens
  CDR3 for alpha chain variable domain of TCR clone 215788 (TRAV24, TRAJ43)
CAFTRHNNNDMRS

SEQ ID NO: 431576 - protein, 13 aa, Homo sapiens
  CDR3 for beta chain variable domain of TCR clone 215788 (TRBV2, TRBJ1-1)
CASSVLMNTEAFF

SEQ ID NO: 431577 - protein, 12 aa, Homo sapiens
  CDR3 for alpha chain variable domain of TCR clone 215789 (TRAV3, TRAJ31)
CAVRDGNARLMF

SEQ ID NO: 431578 - protein, 18 aa, Homo sapiens
  CDR3 for beta chain variable domain of TCR clone 215789 (TRBV7-2, TRBJ2-3)
CASSLKREGSGITDTHYF

SEQ ID NO: 431579 - protein, 16 aa, Homo sapiens
  CDR3 for alpha chain variable domain of TCR clone 215790 (TRAV1-2, TRAJ35)
CAVRGLTIGFGNVLHC

SEQ ID NO: 431580 - protein, 13 aa, Homo sapiens
  CDR3 for beta chain variable domain of TCR clone 215790 (TRBV6-6, TRBJ2-1)
CASSLHQDDEQFF

SEQ ID NO: 431581 - protein, 15 aa, Homo sapiens
  CDR3 for alpha chain variable domain of TCR clone 215791 (TRAV12-2, TRAJ53)
CAVNGGGGSNYKLTF

SEQ ID NO: 431582 - protein, 13 aa, Homo sapiens
  CDR3 for beta chain variable domain of TCR clone 215791 (TRBV29-1, TRBJ2-1)
CSVEGGRVNEQFF

SEQ ID NO: 431583 - protein, 17 aa, Homo sapiens
  CDR3 for alpha chain variable domain of TCR clone 215792 (TRAV12-2, TRAJ39)
CAVNNMLTFGGGTRLMV

SEQ ID NO: 431584 - protein, 16 aa, Homo sapiens
  CDR3 for beta chain variable domain of TCR clone 215792 (TRBV5-3, TRBJ2-2)
CARSFGTGTNAGELFF

SEQ ID NO: 431585 - protein, 16 aa, Homo sapiens
  CDR3 for alpha chain variable domain of TCR clone 215793 (TRAV1-2, TRAJ6)
CAVIDQGTGGSYIPTF

SEQ ID NO: 431586 - protein, 13 aa, Homo sapiens
  CDR3 for beta chain variable domain of TCR clone 215793 (TRBV28, TRBJ2-7)
CASTPGLAGEQYF

SEQ ID NO: 431587 - protein, 14 aa, Homo sapiens
  CDR3 for alpha chain variable domain of TCR clone 215794 (TRAV1-2, TRAJ8)
CAVREDTGFQKLVF

SEQ ID NO: 431588 - protein, 17 aa, Homo sapiens
  CDR3 for beta chain variable domain of TCR clone 215794 (TRBV13, TRBJ2-3)
CASSLARVAGGRNTQYF

SEQ ID NO: 431589 - protein, 14 aa, Homo sapiens
  CDR3 for alpha chain variable domain of TCR clone 215795 (TRAV1-2, TRAJ8)
CAVRKDTGFQKLVF

SEQ ID NO: 431590 - protein, 17 aa, Homo sapiens
  CDR3 for beta chain variable domain of TCR clone 215795 (TRBV28, TRBJ2-5)
CASSRQGGLAGAETQYF

SEQ ID NO: 431591 - protein, 15 aa, Homo sapiens
  CDR3 for alpha chain variable domain of TCR clone 215796 (TRAV13-2, TRAJ16)
CAERGVFSDGQKLLF

SEQ ID NO: 431592 - protein, 12 aa, Homo sapiens
  CDR3 for beta chain variable domain of TCR clone 215796 (TRBV29-1, TRBJ2-3)
CSVTGGADTQYF

SEQ ID NO: 431593 - protein, 14 aa, Homo sapiens
  CDR3 for alpha chain variable domain of TCR clone 215797 (TRAV12-1, TRAJ17)
CVVNDKAAGNKLTF

SEQ ID NO: 431594 - protein, 13 aa, Homo sapiens
  CDR3 for beta chain variable domain of TCR clone 215797 (TRBV20-1, TRBJ1-1)
CSARGGGNTEAFF

SEQ ID NO: 431595 - protein, 11 aa, Homo sapiens
  CDR3 for alpha chain variable domain of TCR clone 215798 (TRAV1-1, TRAJ23)
CAVRQGGKLIF

SEQ ID NO: 431596 - protein, 12 aa, Homo sapiens
  CDR3 for beta chain variable domain of TCR clone 215798 (TRBV7-9, TRBJ2-7)
CASSLEGYEQYF

SEQ ID NO: 431597 - protein, 14 aa, Homo sapiens
  CDR3 for alpha chain variable domain of TCR clone 215799 (TRAV1-2, TRAJ16)
CAVNRFSDGQKLLF

SEQ ID NO: 431598 - protein, 15 aa, Homo sapiens
  CDR3 for beta chain variable domain of TCR clone 215799 (TRBV19, TRBJ2-4)
CASRGPRRGENIQYL

SEQ ID NO: 431599 - protein, 12 aa, Homo sapiens
  CDR3 for alpha chain variable domain of TCR clone 215800 (TRAV1-1, TRAJ39)
CAVPVVGNMRTF

SEQ ID NO: 431600 - protein, 13 aa, Homo sapiens
  CDR3 for beta chain variable domain of TCR clone 215800 (TRBV4-1, TRBJ1-1)
CASSRKMNTEAFF

SEQ ID NO: 431601 - protein, 14 aa, Homo sapiens
  CDR3 for alpha chain variable domain of TCR clone 215801 (TRAV12-1, TRAJ39)
CVLNFNNAGNMLTF

SEQ ID NO: 431602 - protein, 14 aa, Homo sapiens
  CDR3 for beta chain variable domain of TCR clone 215801 (TRBV12-4, TRBJ1-1)
CASSLGTGGTEAFF

SEQ ID NO: 431603 - protein, 15 aa, Homo sapiens
  CDR3 for alpha chain variable domain of TCR clone 215802 (TRAV38-2/DV8, TRAJ45)
CAYWDSGGGADGLTF

SEQ ID NO: 431604 - protein, 15 aa, Homo sapiens
  CDR3 for beta chain variable domain of TCR clone 215802 (TRBV12-4, TRBJ2-5)
CASSLGGQGRETQYF

SEQ ID NO: 431605 - protein, 15 aa, Homo sapiens
  CDR3 for alpha chain variable domain of TCR clone 215803 (TRAV26-1, TRAJ48)
CIARWSWSGNEKLTF

SEQ ID NO: 431606 - protein, 12 aa, Homo sapiens
  CDR3 for beta chain variable domain of TCR clone 215803 (TRBV19, TRBJ2-5)
CASSISEETQYF

SEQ ID NO: 431607 - protein, 15 aa, Homo sapiens
  CDR3 for alpha chain variable domain of TCR clone 215804 (TRAV38-2/DV8, TRAJ48)
CAYRSPEGGNEKLTF

SEQ ID NO: 431608 - protein, 13 aa, Homo sapiens
  CDR3 for beta chain variable domain of TCR clone 215804 (TRBV4-2, TRBJ1-2)
CASSLSASGGYTF

SEQ ID NO: 431609 - protein, 17 aa, Homo sapiens
  CDR3 for alpha chain variable domain of TCR clone 215805 (TRAV26-1, TRAJ58)
CIVRVGAEETSGSRLTF

SEQ ID NO: 431610 - protein, 14 aa, Homo sapiens
  CDR3 for beta chain variable domain of TCR clone 215805 (TRBV7-2, TRBJ2-7)
CASRSQGAAYEQYF

SEQ ID NO: 431611 - protein, 13 aa, Homo sapiens
  CDR3 for alpha chain variable domain of TCR clone 215806 (TRAV8-3, TRAJ20)
CAVGRPNDYKLSF

SEQ ID NO: 431612 - protein, 14 aa, Homo sapiens
  CDR3 for beta chain variable domain of TCR clone 215806 (TRBV12-5, TRBJ2-5)
CASGSRTHKETQYF

SEQ ID NO: 431613 - protein, 13 aa, Homo sapiens
  CDR3 for alpha chain variable domain of TCR clone 215807 (TRAV30, TRAJ39)
CGTEKNAGNMLTF

SEQ ID NO: 431614 - protein, 12 aa, Homo sapiens
  CDR3 for beta chain variable domain of TCR clone 215807 (TRBV12-4, TRBJ2-5)
CASCSAQETQYF

SEQ ID NO: 431615 - protein, 15 aa, Homo sapiens
  CDR3 for alpha chain variable domain of TCR clone 215808 (TRAV21, TRAJ53)
CATLSSGGSNYKLTF

SEQ ID NO: 431616 - protein, 14 aa, Homo sapiens
  CDR3 for beta chain variable domain of TCR clone 215808 (TRBV12-5, TRBJ2-5)
CASGSRTHQETQYF

SEQ ID NO: 431617 - protein, 13 aa, Homo sapiens
  CDR3 for alpha chain variable domain of TCR clone 215809 (TRAV20, TRAJ21)
CAVEGYNFNKIYF

SEQ ID NO: 431618 - protein, 14 aa, Homo sapiens
  CDR3 for beta chain variable domain of TCR clone 215809 (TRBV3-1, TRBJ2-5)
CASSQGPDQETQYF

SEQ ID NO: 431619 - protein, 14 aa, Homo sapiens
  CDR3 for alpha chain variable domain of TCR clone 215810 (TRAV12-2, TRAJ40)
CAVKIPSGTYKYIF

SEQ ID NO: 431620 - protein, 15 aa, Homo sapiens
  CDR3 for beta chain variable domain of TCR clone 215810 (TRBV28, TRBJ1-5)
CASSRTGGYVQPQHF

SEQ ID NO: 431621 - protein, 12 aa, Homo sapiens
  CDR3 for alpha chain variable domain of TCR clone 215811 (TRAV34, TRAJ27)
CGADTNAGKSTF

SEQ ID NO: 431622 - protein, 13 aa, Homo sapiens
  CDR3 for beta chain variable domain of TCR clone 215811 (TRBV19, TRBJ2-7)
CASSPRQSYEQYF

SEQ ID NO: 431623 - protein, 16 aa, Homo sapiens
  CDR3 for alpha chain variable domain of TCR clone 215812 (TRAV36/DV7, TRAJ38)
CAVTTSNAGNNRKMIW

SEQ ID NO: 431624 - protein, 12 aa, Homo sapiens
  CDR3 for beta chain variable domain of TCR clone 215812 (TRBV20-1, TRBJ1-1)
CSASGYTLRAFF

SEQ ID NO: 431625 - protein, 15 aa, Homo sapiens
  CDR3 for alpha chain variable domain of TCR clone 215813 (TRAV8-4, TRAJ47)
CAVSDPEEYGNKLVF

SEQ ID NO: 431626 - protein, 14 aa, Homo sapiens
  CDR3 for beta chain variable domain of TCR clone 215813 (TRBV7-3, TRBJ1-1)
CASSLKGGNTEAFF

SEQ ID NO: 431627 - protein, 14 aa, Homo sapiens
  CDR3 for alpha chain variable domain of TCR clone 215814 (TRAV1-2, TRAJ16)
CAVNRFSDGEKLLF

SEQ ID NO: 431628 - protein, 15 aa, Homo sapiens
  CDR3 for beta chain variable domain of TCR clone 215814 (TRBV5-5, TRBJ1-4)
CASSLVVRSNEKLFF

SEQ ID NO: 431629 - protein, 11 aa, Homo sapiens
  CDR3 for alpha chain variable domain of TCR clone 215815 (TRAV39, TRAJ49)
CAVDISTRFYF

SEQ ID NO: 431630 - protein, 11 aa, Homo sapiens
  CDR3 for beta chain variable domain of TCR clone 215815 (TRBV7-8, TRBJ2-7)
CASSLSLEQYF

SEQ ID NO: 431631 - protein, 16 aa, Homo sapiens
  CDR3 for alpha chain variable domain of TCR clone 215816 (TRAV12-3, TRAJ53)
CAMSPGSGGSNYKLTF

SEQ ID NO: 431632 - protein, 11 aa, Homo sapiens
  CDR3 for beta chain variable domain of TCR clone 215816 (TRBV29-1, TRBJ2-5)
CSEDRTGTQCV

SEQ ID NO: 431633 - protein, 11 aa, Homo sapiens
  CDR3 for alpha chain variable domain of TCR clone 215817 (TRAV12-2, TRAJ33)
CAETSNYQLIW

SEQ ID NO: 431634 - protein, 14 aa, Homo sapiens
  CDR3 for beta chain variable domain of TCR clone 215817 (TRBV12-4, TRBJ2-2)
CASNQGANTGELFF

SEQ ID NO: 431635 - protein, 13 aa, Homo sapiens
  CDR3 for alpha chain variable domain of TCR clone 215818 (TRAV1-2, TRAJ9)
CAALNTGGFKTIF

SEQ ID NO: 431636 - protein, 15 aa, Homo sapiens
  CDR3 for beta chain variable domain of TCR clone 215818 (TRBV7-9, TRBJ2-7)
CASSPGGGLTYEQYF

SEQ ID NO: 431637 - protein, 18 aa, Homo sapiens
  CDR3 for alpha chain variable domain of TCR clone 215819 (TRAV26-1, TRAJ23)
CIVRVGLEVGNQGGKLNF

SEQ ID NO: 431638 - protein, 16 aa, Homo sapiens
  CDR3 for beta chain variable domain of TCR clone 215819 (TRBV12-4, TRBJ2-5)
CASSFFVRGRQETQYF

SEQ ID NO: 431639 - protein, 12 aa, Homo sapiens
  CDR3 for alpha chain variable domain of TCR clone 215820 (TRAV3, TRAJ43)
CAVRDPNNDMRF

SEQ ID NO: 431640 - protein, 14 aa, Homo sapiens
  CDR3 for beta chain variable domain of TCR clone 215820 (TRBV11-3, TRBJ2-7)
CASSPAVPPYEQYF

SEQ ID NO: 431641 - protein, 12 aa, Homo sapiens
  CDR3 for alpha chain variable domain of TCR clone 215821 (TRAV23/DV6, TRAJ16)
CSARGRGQKLPF

SEQ ID NO: 431642 - protein, 15 aa, Homo sapiens
  CDR3 for beta chain variable domain of TCR clone 215821 (TRBV15, TRBJ2-1)
CATSRPGQGLHEQFF

SEQ ID NO: 431643 - protein, 19 aa, Homo sapiens
  CDR3 for alpha chain variable domain of TCR clone 215822 (TRAV27, TRAJ53)
ASTSVQSRHSGGSNYKLTF

SEQ ID NO: 431644 - protein, 14 aa, Homo sapiens
  CDR3 for beta chain variable domain of TCR clone 215822 (TRBV11-1, TRBJ2-7)
CASTFAVPSYEQYF

SEQ ID NO: 431645 - protein, 12 aa, Homo sapiens
  CDR3 for alpha chain variable domain of TCR clone 215823 (TRAV8-1, TRAJ26)
CAVNNYGQNFVF

SEQ ID NO: 431646 - protein, 14 aa, Homo sapiens
  CDR3 for beta chain variable domain of TCR clone 215823 (TRBV10-2, TRBJ1-5)
CASSSTGRNQPQHF

SEQ ID NO: 431647 - protein, 14 aa, Homo sapiens
  CDR3 for alpha chain variable domain of TCR clone 215824 (TRAV16, TRAJ42)
CALLAGGSQGNLIF

SEQ ID NO: 431648 - protein, 13 aa, Homo sapiens
  CDR3 for beta chain variable domain of TCR clone 215824 (TRBV7-9, TRBJ1-2)
CASSLKQNYGYSF

SEQ ID NO: 431649 - protein, 15 aa, Homo sapiens
  CDR3 for alpha chain variable domain of TCR clone 215825 (TRAV17, TRAJ58)
CATVRGETSGSRLTF

SEQ ID NO: 431650 - protein, 14 aa, Homo sapiens
  CDR3 for beta chain variable domain of TCR clone 215825 (TRBV19, TRBJ2-1)
CASPTFVLSGEQFF

SEQ ID NO: 431651 - protein, 14 aa, Homo sapiens
  CDR3 for alpha chain variable domain of TCR clone 215826 (TRAV1-1, TRAJ33)
CAVRPEVSNYQLIW

SEQ ID NO: 431652 - protein, 15 aa, Homo sapiens
  CDR3 for beta chain variable domain of TCR clone 215826 (TRBV20-1, TRBJ2-1)
CSARSPGGPGNEQFF

SEQ ID NO: 431653 - protein, 14 aa, Homo sapiens
  CDR3 for alpha chain variable domain of TCR clone 215827 (TRAV3, TRAJ24)
CAVILTDSWGQLQF

SEQ ID NO: 431654 - protein, 12 aa, Homo sapiens
  CDR3 for beta chain variable domain of TCR clone 215827 (TRBV7-3, TRBJ1-1)
CASSHGGTEAFF

SEQ ID NO: 431655 - protein, 13 aa, Homo sapiens
  CDR3 for alpha chain variable domain of TCR clone 215828 (TRAV8-1, TRAJ30)
CAVNGRRDDKVIF

SEQ ID NO: 431656 - protein, 15 aa, Homo sapiens
  CDR3 for beta chain variable domain of TCR clone 215828 (TRBV5-7, TRBJ1-5)
CASSYGKLWDQPQHF

SEQ ID NO: 431657 - protein, 14 aa, Homo sapiens
  CDR3 for alpha chain variable domain of TCR clone 215829 (TRAV12-1, TRAJ42)
CVVIYGGSQGNLIF

SEQ ID NO: 431658 - protein, 14 aa, Homo sapiens
  CDR3 for beta chain variable domain of TCR clone 215829 (TRBV19, TRBJ2-7)
CASSRFAGTYEQYF

SEQ ID NO: 431659 - protein, 15 aa, Homo sapiens
  CDR3 for alpha chain variable domain of TCR clone 215830 (TRAV21, TRAJ40)
CAVRPQTSGTYKYIF

SEQ ID NO: 431660 - protein, 15 aa, Homo sapiens
  CDR3 for beta chain variable domain of TCR clone 215830 (TRBV5-1, TRBJ2-1)
CASRPPRAPYNEQFF

SEQ ID NO: 431661 - protein, 15 aa, Homo sapiens
  CDR3 for alpha chain variable domain of TCR clone 215831 (TRAV35, TRAJ40)
CAGQRGTSGTYKNIF

SEQ ID NO: 431662 - protein, 14 aa, Homo sapiens
  CDR3 for beta chain variable domain of TCR clone 215831 (TRBV7-3, TRBJ2-1)
CASSLAGGTNEQFF

SEQ ID NO: 431663 - protein, 13 aa, Homo sapiens
  CDR3 for alpha chain variable domain of TCR clone 215832 (TRAV27, TRAJ39)
CAGVNNAGKMLTF

SEQ ID NO: 431664 - protein, 19 aa, Homo sapiens
  CDR3 for beta chain variable domain of TCR clone 215832 (TRBV5-1, TRBJ2-3)
CASSFWLAGGITTTDTQYF

SEQ ID NO: 431665 - protein, 14 aa, Homo sapiens
  CDR3 for alpha chain variable domain of TCR clone 215833 (TRAV12-2, TRAJ44)
CAVNIAGTASKLPF

SEQ ID NO: 431666 - protein, 17 aa, Homo sapiens
  CDR3 for beta chain variable domain of TCR clone 215833 (TRBV10-3, TRBJ1-2)
CAISESTTALANYGYTF

SEQ ID NO: 431667 - protein, 17 aa, Homo sapiens
  CDR3 for alpha chain variable domain of TCR clone 215834 (TRAV3, TRAJ6)
CSVRDGPRAGGSYIPTF

SEQ ID NO: 431668 - protein, 15 aa, Homo sapiens
  CDR3 for beta chain variable domain of TCR clone 215834 (TRBV11-2, TRBJ2-2)
CASSSDRVNAGELFF

SEQ ID NO: 431669 - protein, 13 aa, Homo sapiens
  CDR3 for alpha chain variable domain of TCR clone 215835 (TRAV3, TRAJ21)
CAVREPDFNKCYF

SEQ ID NO: 431670 - protein, 13 aa, Homo sapiens
  CDR3 for beta chain variable domain of TCR clone 215835 (TRBV20-1, TRBJ1-1)
CSARGGGNTEAFF

SEQ ID NO: 431671 - protein, 14 aa, Homo sapiens
  CDR3 for alpha chain variable domain of TCR clone 215836 (TRAV21, TRAJ21)
CAVRPRDNFNKFYF

SEQ ID NO: 431672 - protein, 14 aa, Homo sapiens
  CDR3 for beta chain variable domain of TCR clone 215836 (TRBV7-2, TRBJ2-7)
CASSPKTSFYEQYF

SEQ ID NO: 431673 - protein, 14 aa, Homo sapiens
  CDR3 for alpha chain variable domain of TCR clone 215837 (TRAV1-2, TRAJ16)
CPVNRFSDGQKLLF

SEQ ID NO: 431674 - protein, 13 aa, Homo sapiens
  CDR3 for beta chain variable domain of TCR clone 215837 (TRBV10-3, TRBJ2-7)
CASKLAVNYEQYF

SEQ ID NO: 431675 - protein, 12 aa, Homo sapiens
  CDR3 for alpha chain variable domain of TCR clone 215838 (TRAV1-2, TRAJ29)
CAVPSGNTPLVF

SEQ ID NO: 431676 - protein, 11 aa, Homo sapiens
  CDR3 for beta chain variable domain of TCR clone 215838 (TRBV5-5, TRBJ2-5)
CQQLLRETQYF

SEQ ID NO: 431677 - protein, 17 aa, Homo sapiens
  CDR3 for alpha chain variable domain of TCR clone 215839 (TRAV4, TRAJ28)
CLVGDRALGLGVTNSLS

SEQ ID NO: 431678 - protein, 14 aa, Homo sapiens
  CDR3 for beta chain variable domain of TCR clone 215839 (TRBV4-1, TRBJ2-7)
CASSRVAGGDEQYF

SEQ ID NO: 431679 - protein, 15 aa, Homo sapiens
  CDR3 for alpha chain variable domain of TCR clone 215840 (TRAV4, TRAJ39)
CLVGPNNNAGNMLTF

SEQ ID NO: 431680 - protein, 13 aa, Homo sapiens
  CDR3 for beta chain variable domain of TCR clone 215840 (TRBV11-2, TRBJ2-5)
CASSSPGEETQYF

SEQ ID NO: 431681 - protein, 15 aa, Homo sapiens
  CDR3 for alpha chain variable domain of TCR clone 215841 (TRAV8-3, TRAJ15)
CAVGAPNQAGTALIF

SEQ ID NO: 431682 - protein, 14 aa, Homo sapiens
  CDR3 for beta chain variable domain of TCR clone 215841 (TRBV20-1, TRBJ2-1)
RSPNGEASYNEQFF

SEQ ID NO: 431683 - protein, 13 aa, Homo sapiens
  CDR3 for alpha chain variable domain of TCR clone 215842 (TRAV16, TRAJ58)
CALSIPSGSRLTF

SEQ ID NO: 431684 - protein, 12 aa, Homo sapiens
  CDR3 for beta chain variable domain of TCR clone 215842 (TRBV5-7, TRBJ1-2)
CASSLVQNGYTF

SEQ ID NO: 431685 - protein, 14 aa, Homo sapiens
  CDR3 for alpha chain variable domain of TCR clone 215843 (TRAV35, TRAJ38)
CAGSNAGNNRKLIW

SEQ ID NO: 431686 - protein, 12 aa, Homo sapiens
  CDR3 for beta chain variable domain of TCR clone 215843 (TRBV19, TRBJ2-7)
CASTDRGYEQYS

SEQ ID NO: 431687 - protein, 13 aa, Homo sapiens
  CDR3 for alpha chain variable domain of TCR clone 215844 (TRAV20, TRAJ31)
CAVQAWNNARLMF

SEQ ID NO: 431688 - protein, 16 aa, Homo sapiens
  CDR3 for beta chain variable domain of TCR clone 215844 (TRBV6-6, TRBJ2-1)
CASSWGGQGPYNQQFF

SEQ ID NO: 431689 - protein, 18 aa, Homo sapiens
  CDR3 for alpha chain variable domain of TCR clone 215845 (TRAV13-1, TRAJ52)
CAAKNPDAGGTSYGKLTF

SEQ ID NO: 431690 - protein, 14 aa, Homo sapiens
  CDR3 for beta chain variable domain of TCR clone 215845 (TRBV7-3, TRBJ2-1)
CASSLAGGTNEQFF

SEQ ID NO: 431691 - protein, 13 aa, Homo sapiens
  CDR3 for alpha chain variable domain of TCR clone 215846 (TRAV2, TRAJ13)
CAVEYGGYQKVTF

SEQ ID NO: 431692 - protein, 12 aa, Homo sapiens
  CDR3 for beta chain variable domain of TCR clone 215846 (TRBV29-1, TRBJ2-3)
CSVTGGADTQYF

SEQ ID NO: 431693 - protein, 14 aa, Homo sapiens
  CDR3 for alpha chain variable domain of TCR clone 215847 (TRAV26-1, TRAJ38)
CIADNAGKNRKLIW

SEQ ID NO: 431694 - protein, 13 aa, Homo sapiens
  CDR3 for beta chain variable domain of TCR clone 215847 (TRBV20-1, TRBJ1-1)
CSARGGGNTEAFF

SEQ ID NO: 431695 - protein, 15 aa, Homo sapiens
  CDR3 for alpha chain variable domain of TCR clone 215848 (TRAV16, TRAJ20)
CALKGGLRADYKLSV

SEQ ID NO: 431696 - protein, 16 aa, Homo sapiens
  CDR3 for beta chain variable domain of TCR clone 215848 (TRBV11-3, TRBJ2-2)
CASSSRTSPGTGELFF

SEQ ID NO: 431697 - protein, 14 aa, Homo sapiens
  CDR3 for alpha chain variable domain of TCR clone 215849 (TRAV14/DV4, TRAJ38)
CAMRGAGNNRKLIW

SEQ ID NO: 431698 - protein, 17 aa, Homo sapiens
  CDR3 for beta chain variable domain of TCR clone 215849 (TRBV11-2, TRBJ2-1)
CASSLYPPGVEYNEQFF

SEQ ID NO: 431699 - protein, 17 aa, Homo sapiens
  CDR3 for alpha chain variable domain of TCR clone 215850 (TRAV3, TRAJ6)
CAGRDGPRAGGSYIPTF

SEQ ID NO: 431700 - protein, 17 aa, Homo sapiens
  CDR3 for beta chain variable domain of TCR clone 215850 (TRBV28, TRBJ2-5)
CASSTPEGDALQETQYF

SEQ ID NO: 431701 - protein, 14 aa, Homo sapiens
  CDR3 for alpha chain variable domain of TCR clone 215851 (TRAV12-2, TRAJ13)
CAVKKTGGYQKVTF

SEQ ID NO: 431702 - protein, 17 aa, Homo sapiens
  CDR3 for beta chain variable domain of TCR clone 215851 (TRBV11-3, TRBJ1-5)
CASSPLTGLRGNQPQHF

SEQ ID NO: 431703 - protein, 13 aa, Homo sapiens
  CDR3 for alpha chain variable domain of TCR clone 215852 (TRAV2, TRAJ10)
CAVETGGGNKLTF

SEQ ID NO: 431704 - protein, 12 aa, Homo sapiens
  CDR3 for beta chain variable domain of TCR clone 215852 (TRBV11-2, TRBJ2-2)
CASSLPTGELFF

SEQ ID NO: 431705 - protein, 14 aa, Homo sapiens
  CDR3 for alpha chain variable domain of TCR clone 215853 (TRAV1-2, TRAJ16)
CAVNRFSDGQKLLF

SEQ ID NO: 431706 - protein, 15 aa, Homo sapiens
  CDR3 for beta chain variable domain of TCR clone 215853 (TRBV18, TRBJ2-2)
CASSTSGLHTGELFF

SEQ ID NO: 431707 - protein, 15 aa, Homo sapiens
  CDR3 for alpha chain variable domain of TCR clone 215854 (TRAV8-3, TRAJ41)
CAVGSNSNSGYALNF

SEQ ID NO: 431708 - protein, 17 aa, Homo sapiens
  CDR3 for beta chain variable domain of TCR clone 215854 (TRBV7-3, TRBJ2-3)
CASSLMKRMRGADTQYF

SEQ ID NO: 431709 - protein, 20 aa, Homo sapiens
  CDR3 for alpha chain variable domain of TCR clone 215855 (TRAV27, TRAJ10)
ASTSVPSRGILTGGGNKLTF

SEQ ID NO: 431710 - protein, 17 aa, Homo sapiens
  CDR3 for beta chain variable domain of TCR clone 215855 (TRBV11-2, TRBJ2-1)
CASSLYPPGVEYNEQFF

SEQ ID NO: 431711 - protein, 17 aa, Homo sapiens
  CDR3 for alpha chain variable domain of TCR clone 215856 (TRAV3, TRAJ42)
CAVRDRDYGGSQGNRIF

SEQ ID NO: 431712 - protein, 14 aa, Homo sapiens
  CDR3 for beta chain variable domain of TCR clone 215856 (TRBV19, TRBJ2-2)
CTSSGQGIAGELFF

SEQ ID NO: 431713 - protein, 17 aa, Homo sapiens
  CDR3 for alpha chain variable domain of TCR clone 215857 (TRAV3, TRAJ6)
CAVRDGPRAGGSDIPTF

SEQ ID NO: 431714 - protein, 14 aa, Homo sapiens
  CDR3 for beta chain variable domain of TCR clone 215857 (TRBV7-2, TRBJ2-7)
CASSPKPSFYEQYF

SEQ ID NO: 431715 - protein, 15 aa, Homo sapiens
  CDR3 for alpha chain variable domain of TCR clone 215858 (TRAV13-1, TRAJ57)
CAASNTQGGSEKLVI

SEQ ID NO: 431716 - protein, 16 aa, Homo sapiens
  CDR3 for beta chain variable domain of TCR clone 215858 (TRBV19, TRBJ2-1)
CASSKAGPSSYNEQFF

SEQ ID NO: 431717 - protein, 11 aa, Homo sapiens
  CDR3 for alpha chain variable domain of TCR clone 215859 (TRAV25, TRAJ21)
CAGTIFNKFYF

SEQ ID NO: 431718 - protein, 12 aa, Homo sapiens
  CDR3 for beta chain variable domain of TCR clone 215859 (TRBV19, TRBJ2-1)
CASSRQGAEQFF

SEQ ID NO: 431719 - protein, 15 aa, Homo sapiens
  CDR3 for alpha chain variable domain of TCR clone 215860 (TRAV3, TRAJ11)
CAVRDRGSGYSTLTF

SEQ ID NO: 431720 - protein, 13 aa, Homo sapiens
  CDR3 for beta chain variable domain of TCR clone 215860 (TRBV28, TRBJ2-2)
CASIRESTGELFF

SEQ ID NO: 431721 - protein, 13 aa, Homo sapiens
  CDR3 for alpha chain variable domain of TCR clone 215861 (TRAV2, TRAJ12)
CAVGAGSSYKLIF

SEQ ID NO: 431722 - protein, 14 aa, Homo sapiens
  CDR3 for beta chain variable domain of TCR clone 215861 (TRBV7-2, TRBJ2-7)
CASSPKTSFYEQYF

SEQ ID NO: 431723 - protein, 14 aa, Homo sapiens
  CDR3 for alpha chain variable domain of TCR clone 215862 (TRAV16, TRAJ26)
CALTRWSESCLWSR

SEQ ID NO: 431724 - protein, 13 aa, Homo sapiens
  CDR3 for beta chain variable domain of TCR clone 215862 (TRBV4-2, TRBJ1-1)
CASSQAGNTEAFF

SEQ ID NO: 431725 - protein, 12 aa, Homo sapiens
  CDR3 for alpha chain variable domain of TCR clone 215863 (TRAV12-3, TRAJ17)
CAMTLTGNKLTF

SEQ ID NO: 431726 - protein, 17 aa, Homo sapiens
  CDR3 for beta chain variable domain of TCR clone 215863 (TRBV11-2, TRBJ2-1)
CASSLYPPGVEYSEQFF

SEQ ID NO: 431727 - protein, 13 aa, Homo sapiens
  CDR3 for alpha chain variable domain of TCR clone 215864 (TRAV12-1, TRAJ26)
CVERRNYGQNFVF

SEQ ID NO: 431728 - protein, 14 aa, Homo sapiens
  CDR3 for beta chain variable domain of TCR clone 215864 (TRBV6-3, TRBJ1-1)
CASRYTGESTEAFF

SEQ ID NO: 431729 - protein, 16 aa, Homo sapiens
  CDR3 for alpha chain variable domain of TCR clone 215865 (TRAV3, TRAJ10)
CAVRDMRAGGGNKHTF

SEQ ID NO: 431730 - protein, 14 aa, Homo sapiens
  CDR3 for beta chain variable domain of TCR clone 215865 (TRBV7-2, TRBJ1-4)
CASSVVEGGEKLVF

SEQ ID NO: 431731 - protein, 15 aa, Homo sapiens
  CDR3 for alpha chain variable domain of TCR clone 215866 (TRAV13-1, TRAJ52)
CALRTGGTSYGKLTF

SEQ ID NO: 431732 - protein, 11 aa, Homo sapiens
  CDR3 for beta chain variable domain of TCR clone 215866 (TRBV20-1, TRBJ2-1)
CSLSSGSEQFF

SEQ ID NO: 431733 - protein, 13 aa, Homo sapiens
  CDR3 for alpha chain variable domain of TCR clone 215867 (TRAV12-1, TRAJ6)
CVVFPGGSYIPTF

SEQ ID NO: 431734 - protein, 14 aa, Homo sapiens
  CDR3 for beta chain variable domain of TCR clone 215867 (TRBV18, TRBJ2-7)
CASSPRGGAYEQYF

SEQ ID NO: 431735 - protein, 14 aa, Homo sapiens
  CDR3 for alpha chain variable domain of TCR clone 215868 (TRAV12-2, TRAJ9)
CAVNALEGGFKTIF

SEQ ID NO: 431736 - protein, 14 aa, Homo sapiens
  CDR3 for beta chain variable domain of TCR clone 215868 (TRBV5-4, TRBJ2-5)
CASSLVRGQETQYF

SEQ ID NO: 431737 - protein, 14 aa, Homo sapiens
  CDR3 for alpha chain variable domain of TCR clone 215869 (TRAV8-3, TRAJ36)
CAVGPITGANNLFF

SEQ ID NO: 431738 - protein, 16 aa, Homo sapiens
  CDR3 for beta chain variable domain of TCR clone 215869 (TRBV7-2, TRBJ2-5)
CASSPFPTGGEETQYF

SEQ ID NO: 431739 - protein, 10 aa, Homo sapiens
  CDR3 for alpha chain variable domain of TCR clone 215870 (TRAV36/DV7, TRAJ49)
CALTGNQFYF

SEQ ID NO: 431740 - protein, 16 aa, Homo sapiens
  CDR3 for beta chain variable domain of TCR clone 215870 (TRBV24-1, TRBJ2-3)
CATSDRRQDLTDTQYF

SEQ ID NO: 431741 - protein, 15 aa, Homo sapiens
  CDR3 for alpha chain variable domain of TCR clone 215871 (TRAV3, TRAJ5)
CAVRDLDTGRRALTF

SEQ ID NO: 431742 - protein, 17 aa, Homo sapiens
  CDR3 for beta chain variable domain of TCR clone 215871 (TRBV11-2, TRBJ2-1)
CASSLCPPGVEYNEQFF

SEQ ID NO: 431743 - protein, 16 aa, Homo sapiens
  CDR3 for alpha chain variable domain of TCR clone 215872 (TRAV14/DV4, TRAJ53)
CAMREGGGGSNYKLTF

SEQ ID NO: 431744 - protein, 16 aa, Homo sapiens
  CDR3 for beta chain variable domain of TCR clone 215872 (TRBV7-3, TRBJ2-1)
CASSLEGYRSYNEQFF

SEQ ID NO: 431745 - protein, 13 aa, Homo sapiens
  CDR3 for alpha chain variable domain of TCR clone 215873 (TRAV17, TRAJ40)
CATRSPGTYKYIF

SEQ ID NO: 431746 - protein, 14 aa, Homo sapiens
  CDR3 for beta chain variable domain of TCR clone 215873 (TRBV2, TRBJ2-1)
CASRTGSSYNEQFF

SEQ ID NO: 431747 - protein, 17 aa, Homo sapiens
  CDR3 for alpha chain variable domain of TCR clone 215874 (TRAV8-2, )
CVVNIQNTDPAVYQLRD

SEQ ID NO: 431748 - protein, 14 aa, Homo sapiens
  CDR3 for beta chain variable domain of TCR clone 215874 (TRBV7-9, TRBJ2-5)
CASSLVGGEETQYF

SEQ ID NO: 431749 - protein, 11 aa, Homo sapiens
  CDR3 for alpha chain variable domain of TCR clone 215875 (TRAV23/DV6, TRAJ58)
CAARLLRGETS

SEQ ID NO: 431750 - protein, 13 aa, Homo sapiens
  CDR3 for beta chain variable domain of TCR clone 215875 (TRBV29-1, TRBJ2-1)
CSVEGGRVNEQFF

SEQ ID NO: 431751 - protein, 16 aa, Homo sapiens
  CDR3 for alpha chain variable domain of TCR clone 215876 (TRAV8-3, TRAJ10)
CAVGPGVTGGGNKLTF

SEQ ID NO: 431752 - protein, 17 aa, Homo sapiens
  CDR3 for beta chain variable domain of TCR clone 215876 (TRBV11-2, TRBJ2-1)
CASSLYPPGVEYNEQFF

SEQ ID NO: 431753 - protein, 12 aa, Homo sapiens
  CDR3 for alpha chain variable domain of TCR clone 215877 (TRAV3, TRAJ31)
CAVRDGNARLMF

SEQ ID NO: 431754 - protein, 18 aa, Homo sapiens
  CDR3 for beta chain variable domain of TCR clone 215877 (TRBV7-2, TRBJ2-3)
CASSLKREGSGITDTHYF

SEQ ID NO: 431755 - protein, 13 aa, Homo sapiens
  CDR3 for alpha chain variable domain of TCR clone 215878 (TRAV1-2, TRAJ9)
CAALNTGGFKTIF

SEQ ID NO: 431756 - protein, 14 aa, Homo sapiens
  CDR3 for beta chain variable domain of TCR clone 215878 (TRBV13, TRBJ2-3)
CASSSGSPADTQYF

SEQ ID NO: 431757 - protein, 14 aa, Homo sapiens
  CDR3 for alpha chain variable domain of TCR clone 215879 (TRAV12-1, TRAJ9)
CVVTGDTGGFQNIF

SEQ ID NO: 431758 - protein, 16 aa, Homo sapiens
  CDR3 for beta chain variable domain of TCR clone 215879 (TRBV29-1, TRBJ1-2)
CSVEANRDIANYGYTF

SEQ ID NO: 431759 - protein, 14 aa, Homo sapiens
  CDR3 for alpha chain variable domain of TCR clone 215880 (TRAV9-2, TRAJ39)
CALYIYNAGNMLTF

SEQ ID NO: 431760 - protein, 14 aa, Homo sapiens
  CDR3 for beta chain variable domain of TCR clone 215880 (TRBV5-7, TRBJ2-7)
CASSGGLSSYEQYF

SEQ ID NO: 431761 - protein, 16 aa, Homo sapiens
  CDR3 for alpha chain variable domain of TCR clone 215881 (TRAV12-3, TRAJ53)
CAMGPGGGGSNYKLTF

SEQ ID NO: 431762 - protein, 14 aa, Homo sapiens
  CDR3 for beta chain variable domain of TCR clone 215881 (TRBV4-2, TRBJ2-1)
CASGLDRAYNEQFF

SEQ ID NO: 431763 - protein, 21 aa, Homo sapiens
  CDR3 for alpha chain variable domain of TCR clone 215882 (TRAV8-3, TRAJ10)
CAVGHTHGRRKQTHPWDRHSA

SEQ ID NO: 431764 - protein, 10 aa, Homo sapiens
  CDR3 for beta chain variable domain of TCR clone 215882 (TRBV20-1, TRBJ2-5)
CSARFETQYF

SEQ ID NO: 431765 - protein, 13 aa, Homo sapiens
  CDR3 for alpha chain variable domain of TCR clone 215883 (TRAV21, TRAJ57)
CAVIEGGSEKLVF

SEQ ID NO: 431766 - protein, 15 aa, Homo sapiens
  CDR3 for beta chain variable domain of TCR clone 215883 (TRBV10-3, TRBJ2-5)
CDISEFGRGQETQYF

SEQ ID NO: 431767 - protein, 17 aa, Homo sapiens
  CDR3 for alpha chain variable domain of TCR clone 215884 (TRAV3, TRAJ6)
CAVIDGPRAGGNYIPTF

SEQ ID NO: 431768 - protein, 14 aa, Homo sapiens
  CDR3 for beta chain variable domain of TCR clone 215884 (TRBV7-2, TRBJ2-7)
CASSPKTSFYEQYF

SEQ ID NO: 431769 - protein, 16 aa, Homo sapiens
  CDR3 for alpha chain variable domain of TCR clone 215885 (TRAV3, TRAJ10)
CAVRDLRAGGGNKLTF

SEQ ID NO: 431770 - protein, 11 aa, Homo sapiens
  CDR3 for beta chain variable domain of TCR clone 215885 (TRBV11-2, TRBJ2-2)
CASSLPGELFF

SEQ ID NO: 431771 - protein, 16 aa, Homo sapiens
  CDR3 for alpha chain variable domain of TCR clone 215886 (TRAV30, TRAJ24)
CGTEIVDADSWGKFQF

SEQ ID NO: 431772 - protein, 16 aa, Homo sapiens
  CDR3 for beta chain variable domain of TCR clone 215886 (TRBV11-2, TRBJ2-1)
CASSLERDGVDNEQFF

SEQ ID NO: 431773 - protein, 15 aa, Homo sapiens
  CDR3 for alpha chain variable domain of TCR clone 215887 (TRAV23/DV6, TRAJ42)
CAANYYGGSQGNLIF

SEQ ID NO: 431774 - protein, 14 aa, Homo sapiens
  CDR3 for beta chain variable domain of TCR clone 215887 (TRBV29-1, TRBJ2-5)
CSVETSGSGETQYF

SEQ ID NO: 431775 - protein, 14 aa, Homo sapiens
  CDR3 for alpha chain variable domain of TCR clone 215888 (TRAV17, TRAJ39)
CATDSVRAGNTLTF

SEQ ID NO: 431776 - protein, 15 aa, Homo sapiens
  CDR3 for beta chain variable domain of TCR clone 215888 (TRBV13, TRBJ1-5)
CASSFGQGGVQPQHF

SEQ ID NO: 431777 - protein, 14 aa, Homo sapiens
  CDR3 for alpha chain variable domain of TCR clone 215889 (TRAV17, TRAJ12)
CATDEKDSSYKLIF

SEQ ID NO: 431778 - protein, 13 aa, Homo sapiens
  CDR3 for beta chain variable domain of TCR clone 215889 (TRBV7-9, TRBJ1-2)
CASSLKQNYGYTF

SEQ ID NO: 431779 - protein, 16 aa, Homo sapiens
  CDR3 for alpha chain variable domain of TCR clone 215890 (TRAV3, TRAJ21)
CAVRDIERGNFNKFYF

SEQ ID NO: 431780 - protein, 13 aa, Homo sapiens
  CDR3 for beta chain variable domain of TCR clone 215890 (TRBV3-1, TRBJ1-1)
CASSPGVITEAFF

SEQ ID NO: 431781 - protein, 13 aa, Homo sapiens
  CDR3 for alpha chain variable domain of TCR clone 215891 (TRAV12-2, TRAJ9)
CARGNTGGFKTIF

SEQ ID NO: 431782 - protein, 17 aa, Homo sapiens
  CDR3 for beta chain variable domain of TCR clone 215891 (TRBV4-1, TRBJ2-1)
CASSQGRGGGLYNEQFF

SEQ ID NO: 431783 - protein, 13 aa, Homo sapiens
  CDR3 for alpha chain variable domain of TCR clone 215892 (TRAV29/DV5, TRAJ40)
FAASEAGTYKYIF

SEQ ID NO: 431784 - protein, 18 aa, Homo sapiens
  CDR3 for beta chain variable domain of TCR clone 215892 (TRBV14, TRBJ2-1)
CASSQEYGGAYLRGEQFF

SEQ ID NO: 431785 - protein, 14 aa, Homo sapiens
  CDR3 for alpha chain variable domain of TCR clone 215893 (TRAV1-2, TRAJ16)
CAVNRFSDGQKLLF

SEQ ID NO: 431786 - protein, 13 aa, Homo sapiens
  CDR3 for beta chain variable domain of TCR clone 215893 (TRBV6-6, TRBJ2-7)
CASSPTHLAEQYF

SEQ ID NO: 431787 - protein, 14 aa, Homo sapiens
  CDR3 for alpha chain variable domain of TCR clone 215894 (TRAV12-1, TRAJ17)
WVGNYKAAGNKLTF

SEQ ID NO: 431788 - protein, 14 aa, Homo sapiens
  CDR3 for beta chain variable domain of TCR clone 215894 (TRBV7-8, TRBJ2-3)
CASSLEAGTDTQYF

SEQ ID NO: 431789 - protein, 14 aa, Homo sapiens
  CDR3 for alpha chain variable domain of TCR clone 215895 (TRAV13-1, TRAJ35)
CAASKEALGMCCIA

SEQ ID NO: 431790 - protein, 13 aa, Homo sapiens
  CDR3 for beta chain variable domain of TCR clone 215895 (TRBV7-3, TRBJ1-1)
CASIQDWGAEAFF

SEQ ID NO: 431791 - protein, 10 aa, Homo sapiens
  CDR3 for alpha chain variable domain of TCR clone 215896 (TRAV12-3, TRAJ34)
CAMSADKLIF

SEQ ID NO: 431792 - protein, 18 aa, Homo sapiens
  CDR3 for beta chain variable domain of TCR clone 215896 (TRBV11-2, TRBJ2-3)
CASSLGGASRGAPNTQYF

SEQ ID NO: 431793 - protein, 12 aa, Homo sapiens
  CDR3 for alpha chain variable domain of TCR clone 215897 (TRAV2, TRAJ9)
CAVGAGGFKTIF

SEQ ID NO: 431794 - protein, 13 aa, Homo sapiens
  CDR3 for beta chain variable domain of TCR clone 215897 (TRBV2, TRBJ2-7)
CASSVGGSGEQYF

SEQ ID NO: 431795 - protein, 14 aa, Homo sapiens
  CDR3 for alpha chain variable domain of TCR clone 215898 (TRAV2, TRAJ37)
CAVDFTSNTGKLIF

SEQ ID NO: 431796 - protein, 16 aa, Homo sapiens
  CDR3 for beta chain variable domain of TCR clone 215898 (TRBV11-2, TRBJ2-5)
CASSGQGYSPQETQYF

SEQ ID NO: 431797 - protein, 15 aa, Homo sapiens
  CDR3 for alpha chain variable domain of TCR clone 215899 (TRAV12-1, TRAJ39)
CGEQGGRNAGNMLTF

SEQ ID NO: 431798 - protein, 12 aa, Homo sapiens
  CDR3 for beta chain variable domain of TCR clone 215899 (TRBV5-1, TRBJ1-2)
CASSQDTYGYTF

SEQ ID NO: 431799 - protein, 13 aa, Homo sapiens
  CDR3 for alpha chain variable domain of TCR clone 215900 (TRAV13-1, TRAJ33)
CAASRAGNYQLIW

SEQ ID NO: 431800 - protein, 12 aa, Homo sapiens
  CDR3 for beta chain variable domain of TCR clone 215900 (TRBV11-2, TRBJ1-2)
CAGSREGDGYTF

SEQ ID NO: 431801 - protein, 16 aa, Homo sapiens
  CDR3 for alpha chain variable domain of TCR clone 215901 (TRAV1-1, TRAJ28)
CAVRDDSGLGVTNSLS

SEQ ID NO: 431802 - protein, 12 aa, Homo sapiens
  CDR3 for beta chain variable domain of TCR clone 215901 (TRBV11-2, TRBJ2-5)
CASSLDTQTQYF

SEQ ID NO: 431803 - protein, 12 aa, Homo sapiens
  CDR3 for alpha chain variable domain of TCR clone 215902 (TRAV13-2, TRAJ23)
CAERHRGEKLIF

SEQ ID NO: 431804 - protein, 12 aa, Homo sapiens
  CDR3 for beta chain variable domain of TCR clone 215902 (TRBV5-5, TRBJ2-5)
CASSYFGETQYF

SEQ ID NO: 431805 - protein, 14 aa, Homo sapiens
  CDR3 for alpha chain variable domain of TCR clone 215903 (TRAV12-3, TRAJ10)
SHLPLTGGANKLTF

SEQ ID NO: 431806 - protein, 14 aa, Homo sapiens
  CDR3 for beta chain variable domain of TCR clone 215903 (TRBV6-1, TRBJ1-3)
CASVQGGGGNTIYF

SEQ ID NO: 431807 - protein, 13 aa, Homo sapiens
  CDR3 for alpha chain variable domain of TCR clone 215904 (TRAV21, TRAJ27)
CAVRPGNAGKSTF

SEQ ID NO: 431808 - protein, 17 aa, Homo sapiens
  CDR3 for beta chain variable domain of TCR clone 215904 (TRBV4-1, TRBJ1-4)
CASSQEGPRGVEEKLFF

SEQ ID NO: 431809 - protein, 16 aa, Homo sapiens
  CDR3 for alpha chain variable domain of TCR clone 215905 (TRAV26-1, TRAJ45)
CIVEKYSGGGADGLTF

SEQ ID NO: 431810 - protein, 17 aa, Homo sapiens
  CDR3 for beta chain variable domain of TCR clone 215905 (TRBV28, TRBJ2-1)
CASSSARQALTYNEQFF

SEQ ID NO: 431811 - protein, 12 aa, Homo sapiens
  CDR3 for alpha chain variable domain of TCR clone 215906 (TRAV35, TRAJ49)
CAGWNTGNQFYF

SEQ ID NO: 431812 - protein, 16 aa, Homo sapiens
  CDR3 for beta chain variable domain of TCR clone 215906 (TRBV7-2, TRBJ1-2)
CASSSNQDRRGHGYTF

SEQ ID NO: 431813 - protein, 15 aa, Homo sapiens
  CDR3 for alpha chain variable domain of TCR clone 215907 (TRAV20, TRAJ53)
CAVQASGGSTYKLTF

SEQ ID NO: 431814 - protein, 15 aa, Homo sapiens
  CDR3 for beta chain variable domain of TCR clone 215907 (TRBV9, TRBJ2-1)
CASSLAGSSYNEQFF

SEQ ID NO: 431815 - protein, 12 aa, Homo sapiens
  CDR3 for alpha chain variable domain of TCR clone 215908 (TRAV17, TRAJ21)
CALRYNFNNFYF

SEQ ID NO: 431816 - protein, 13 aa, Homo sapiens
  CDR3 for beta chain variable domain of TCR clone 215908 (TRBV24-1, TRBJ2-5)
CATSKGGTETQYF

SEQ ID NO: 431817 - protein, 11 aa, Homo sapiens
  CDR3 for alpha chain variable domain of TCR clone 215909 (TRAV3, TRAJ21)
CAVGNFNKFYF

SEQ ID NO: 431818 - protein, 15 aa, Homo sapiens
  CDR3 for beta chain variable domain of TCR clone 215909 (TRBV12-4, TRBJ2-5)
CASSPPTGIQETQYF

SEQ ID NO: 431819 - protein, 16 aa, Homo sapiens
  CDR3 for alpha chain variable domain of TCR clone 215910 (TRAV3, TRAJ4)
CAVRPSPSGGYNMLIF

SEQ ID NO: 431820 - protein, 12 aa, Homo sapiens
  CDR3 for beta chain variable domain of TCR clone 215910 (TRBV7-9, TRBJ2-7)
CASSKGVYEQYF

SEQ ID NO: 431821 - protein, 14 aa, Homo sapiens
  CDR3 for alpha chain variable domain of TCR clone 215911 (TRAV12-2, TRAJ5)
CAVNRPTGRRALPF

SEQ ID NO: 431822 - protein, 12 aa, Homo sapiens
  CDR3 for beta chain variable domain of TCR clone 215911 (TRBV19, TRBJ1-5)
CASSIAQQPQHF

SEQ ID NO: 431823 - protein, 14 aa, Homo sapiens
  CDR3 for alpha chain variable domain of TCR clone 215912 (TRAV1-2, TRAJ8)
CAVREYTGFQKLVF

SEQ ID NO: 431824 - protein, 14 aa, Homo sapiens
  CDR3 for beta chain variable domain of TCR clone 215912 (TRBV20-1, TRBJ1-1)
CSAQTRIGGTEAFF

SEQ ID NO: 431825 - protein, 16 aa, Homo sapiens
  CDR3 for alpha chain variable domain of TCR clone 215913 (TRAV8-3, TRAJ10)
CAVGPILTGGGNKLTF

SEQ ID NO: 431826 - protein, 13 aa, Homo sapiens
  CDR3 for beta chain variable domain of TCR clone 215913 (TRBV7-2, TRBJ2-2)
CASSLAVTGELFF

SEQ ID NO: 431827 - protein, 16 aa, Homo sapiens
  CDR3 for alpha chain variable domain of TCR clone 215914 (TRAV3, TRAJ28)
CAVLPRSGAGSYQLTF

SEQ ID NO: 431828 - protein, 13 aa, Homo sapiens
  CDR3 for beta chain variable domain of TCR clone 215914 (TRBV12-4, TRBJ2-5)
CASRLAVQGTQYF

SEQ ID NO: 431829 - protein, 14 aa, Homo sapiens
  CDR3 for alpha chain variable domain of TCR clone 215915 (TRAV8-4, TRAJ13)
CAVTLSGGYQKVTF

SEQ ID NO: 431830 - protein, 14 aa, Homo sapiens
  CDR3 for beta chain variable domain of TCR clone 215915 (TRBV7-2, TRBJ1-2)
CASSQTGSTCGYTF

SEQ ID NO: 431831 - protein, 12 aa, Homo sapiens
  CDR3 for alpha chain variable domain of TCR clone 215916 (TRAV16, TRAJ10)
CSRTGGGNKLTF

SEQ ID NO: 431832 - protein, 15 aa, Homo sapiens
  CDR3 for beta chain variable domain of TCR clone 215916 (TRBV19, TRBJ2-4)
CASRGPRRGENIQYF

SEQ ID NO: 431833 - protein, 12 aa, Homo sapiens
  CDR3 for alpha chain variable domain of TCR clone 215917 (TRAV12-3, TRAJ17)
CAMTLTGNKLTF

SEQ ID NO: 431834 - protein, 15 aa, Homo sapiens
  CDR3 for beta chain variable domain of TCR clone 215917 (TRBV11-3, TRBJ2-3)
CASLKDGREGDMQYC

SEQ ID NO: 431835 - protein, 15 aa, Homo sapiens
  CDR3 for alpha chain variable domain of TCR clone 215918 (TRAV40, TRAJ45)
CLLGDLGGGADGLTF

SEQ ID NO: 431836 - protein, 16 aa, Homo sapiens
  CDR3 for beta chain variable domain of TCR clone 215918 (TRBV4-1, TRBJ1-3)
CASSQDELLAGNTIYF

SEQ ID NO: 431837 - protein, 10 aa, Homo sapiens
  CDR3 for alpha chain variable domain of TCR clone 215919 (TRAV16, TRAJ22)
SAMYLRQLTF

SEQ ID NO: 431838 - protein, 16 aa, Homo sapiens
  CDR3 for beta chain variable domain of TCR clone 215919 (TRBV11-3, TRBJ2-5)
CASSSVVAGSTETQYF

SEQ ID NO: 431839 - protein, 14 aa, Homo sapiens
  CDR3 for alpha chain variable domain of TCR clone 215920 (TRAV25, TRAJ12)
CAGCDMDSSYKFIF

SEQ ID NO: 431840 - protein, 13 aa, Homo sapiens
  CDR3 for beta chain variable domain of TCR clone 215920 (TRBV12-4, TRBJ2-2)
CARSITGSGELFF

SEQ ID NO: 431841 - protein, 12 aa, Homo sapiens
  CDR3 for alpha chain variable domain of TCR clone 215921 (TRAV3, TRAJ34)
CAVLGDTDKLIF

SEQ ID NO: 431842 - protein, 13 aa, Homo sapiens
  CDR3 for beta chain variable domain of TCR clone 215921 (TRBV19, TRBJ2-1)
CASSIGTGNEQFF

SEQ ID NO: 431843 - protein, 18 aa, Homo sapiens
  CDR3 for alpha chain variable domain of TCR clone 215922 (TRAV21, TRAJ52)
CAVRPSPAAGTSYGKLTF

SEQ ID NO: 431844 - protein, 16 aa, Homo sapiens
  CDR3 for beta chain variable domain of TCR clone 215922 (TRBV15, TRBJ2-7)
CATSRDGGIPSYEQYF

SEQ ID NO: 431845 - protein, 17 aa, Homo sapiens
  CDR3 for alpha chain variable domain of TCR clone 215923 (TRAV26-2, TRAJ37)
CILRDRGGSSNTGKLIF

SEQ ID NO: 431846 - protein, 14 aa, Homo sapiens
  CDR3 for beta chain variable domain of TCR clone 215923 (TRBV6-1, TRBJ1-3)
CASVQGGGGNTIYF

SEQ ID NO: 431847 - protein, 15 aa, Homo sapiens
  CDR3 for alpha chain variable domain of TCR clone 215924 (TRAV2, TRAJ13)
CATPSYSGGYQKVTF

SEQ ID NO: 431848 - protein, 11 aa, Homo sapiens
  CDR3 for beta chain variable domain of TCR clone 215924 (TRBV20-1, TRBJ1-2)
CSIWASYGYTF

SEQ ID NO: 431849 - protein, 13 aa, Homo sapiens
  CDR3 for alpha chain variable domain of TCR clone 215925 (TRAV8-3, TRAJ43)
CAVGPDNNNDMRF

SEQ ID NO: 431850 - protein, 16 aa, Homo sapiens
  CDR3 for beta chain variable domain of TCR clone 215925 (TRBV27, TRBJ2-2)
CASSFRGLVRTGELFF

SEQ ID NO: 431851 - protein, 13 aa, Homo sapiens
  CDR3 for alpha chain variable domain of TCR clone 215926 (TRAV16, TRAJ9)
CALSNTGGFKTIF

SEQ ID NO: 431852 - protein, 14 aa, Homo sapiens
  CDR3 for beta chain variable domain of TCR clone 215926 (TRBV6-1, TRBJ1-3)
CASVQGGGGNTIYF

SEQ ID NO: 431853 - protein, 12 aa, Homo sapiens
  CDR3 for alpha chain variable domain of TCR clone 215927 (TRAV20, TRAJ56)
CAVTGANSKLTF

SEQ ID NO: 431854 - protein, 14 aa, Homo sapiens
  CDR3 for beta chain variable domain of TCR clone 215927 (TRBV7-2, TRBJ2-7)
CASSPKTSFYEQYF

SEQ ID NO: 431855 - protein, 12 aa, Homo sapiens
  CDR3 for alpha chain variable domain of TCR clone 215928 (TRAV12-3, TRAJ17)
CAMTLTGNKLTF

SEQ ID NO: 431856 - protein, 12 aa, Homo sapiens
  CDR3 for beta chain variable domain of TCR clone 215928 (TRBV2, TRBJ2-7)
CASTYRTDEQYF

SEQ ID NO: 431857 - protein, 15 aa, Homo sapiens
  CDR3 for alpha chain variable domain of TCR clone 215929 (TRAV8-3, TRAJ45)
CASSYSGGGDDGLNF

SEQ ID NO: 431858 - protein, 13 aa, Homo sapiens
  CDR3 for beta chain variable domain of TCR clone 215929 (TRBV10-3, TRBJ2-7)
CASKLAVNYEQYF

SEQ ID NO: 431859 - protein, 13 aa, Homo sapiens
  CDR3 for alpha chain variable domain of TCR clone 215930 (TRAV36/DV7, TRAJ49)
CAVGRTPVTSSIL

SEQ ID NO: 431860 - protein, 13 aa, Homo sapiens
  CDR3 for beta chain variable domain of TCR clone 215930 (TRBV10-3, TRBJ2-7)
CASKLAVNYEQYF

SEQ ID NO: 431861 - protein, 14 aa, Homo sapiens
  CDR3 for alpha chain variable domain of TCR clone 215931 (TRAV3, TRAJ34)
CAVRAPGNTDKLIF

SEQ ID NO: 431862 - protein, 19 aa, Homo sapiens
  CDR3 for beta chain variable domain of TCR clone 215931 (TRBV25-1, TRBJ2-2)
CAILVYRVDRGRKTGELFF

SEQ ID NO: 431863 - protein, 11 aa, Homo sapiens
  CDR3 for alpha chain variable domain of TCR clone 215932 (TRAV12-3, TRAJ43)
CAMSVSNDMRF

SEQ ID NO: 431864 - protein, 14 aa, Homo sapiens
  CDR3 for beta chain variable domain of TCR clone 215932 (TRBV19, TRBJ2-3)
CASSAPRGTDTQYF

SEQ ID NO: 431865 - protein, 15 aa, Homo sapiens
  CDR3 for alpha chain variable domain of TCR clone 215933 (TRAV21, TRAJ24)
CAARSSTDSWGKLQF

SEQ ID NO: 431866 - protein, 13 aa, Homo sapiens
  CDR3 for beta chain variable domain of TCR clone 215933 (TRBV11-2, TRBJ2-5)
CASSRGPSETQYF

SEQ ID NO: 431867 - protein, 16 aa, Homo sapiens
  CDR3 for alpha chain variable domain of TCR clone 215934 (TRAV30, TRAJ24)
CGTAIVDADSWGKFQF

SEQ ID NO: 431868 - protein, 14 aa, Homo sapiens
  CDR3 for beta chain variable domain of TCR clone 215934 (TRBV12-5, TRBJ2-5)
CASGSRTRQETQYF

SEQ ID NO: 431869 - protein, 13 aa, Homo sapiens
  CDR3 for alpha chain variable domain of TCR clone 215935 (TRAV3, TRAJ36)
CAVRDTGANNLFF

SEQ ID NO: 431870 - protein, 15 aa, Homo sapiens
  CDR3 for beta chain variable domain of TCR clone 215935 (TRBV24-1, TRBJ2-1)
RATSGSGGFYNEQFF

SEQ ID NO: 431871 - protein, 14 aa, Homo sapiens
  CDR3 for alpha chain variable domain of TCR clone 215936 (TRAV12-3, TRAJ9)
CAMSPNTGGFKTIF

SEQ ID NO: 431872 - protein, 19 aa, Homo sapiens
  CDR3 for beta chain variable domain of TCR clone 215936 (TRBV7-2, TRBJ2-3)
CASSFLSRNWGGGTDTQYF

SEQ ID NO: 431873 - protein, 12 aa, Homo sapiens
  CDR3 for alpha chain variable domain of TCR clone 215937 (TRAV13-1, TRAJ27)
CVAHTNAGKSTF

SEQ ID NO: 431874 - protein, 14 aa, Homo sapiens
  CDR3 for beta chain variable domain of TCR clone 215937 (TRBV12-5, TRBJ2-5)
CASGSRTHQETQYF

SEQ ID NO: 431875 - protein, 15 aa, Homo sapiens
  CDR3 for alpha chain variable domain of TCR clone 215938 (TRAV29/DV5, TRAJ53)
CAARYSGGSNYKLTS

SEQ ID NO: 431876 - protein, 15 aa, Homo sapiens
  CDR3 for beta chain variable domain of TCR clone 215938 (TRBV28, TRBJ2-1)
CASSLGTRLYNEQFF

SEQ ID NO: 431877 - protein, 14 aa, Homo sapiens
  CDR3 for alpha chain variable domain of TCR clone 215939 (TRAV2, TRAJ37)
CAVDFTRNTGKLIF

SEQ ID NO: 431878 - protein, 14 aa, Homo sapiens
  CDR3 for beta chain variable domain of TCR clone 215939 (TRBV7-7, TRBJ2-7)
CASSLGRGVGEQYF

SEQ ID NO: 431879 - protein, 17 aa, Homo sapiens
  CDR3 for alpha chain variable domain of TCR clone 215940 (TRAV23/DV6, TRAJ58)
CAARLLRGETSGSRLTF

SEQ ID NO: 431880 - protein, 15 aa, Homo sapiens
  CDR3 for beta chain variable domain of TCR clone 215940 (TRBV11-2, TRBJ2-2)
CASSSDRVNAGELFF

SEQ ID NO: 431881 - protein, 14 aa, Homo sapiens
  CDR3 for alpha chain variable domain of TCR clone 215941 (TRAV13-1, TRAJ40)
CAARSPSGTYKYIF

SEQ ID NO: 431882 - protein, 15 aa, Homo sapiens
  CDR3 for beta chain variable domain of TCR clone 215941 (TRBV18, TRBJ1-5)
CASSETGGNNQPQHF

SEQ ID NO: 431883 - protein, 13 aa, Homo sapiens
  CDR3 for alpha chain variable domain of TCR clone 215942 (TRAV2, TRAJ40)
CAVVTSGTYKYIF

SEQ ID NO: 431884 - protein, 17 aa, Homo sapiens
  CDR3 for beta chain variable domain of TCR clone 215942 (TRBV7-3, TRBJ2-3)
CASSLMKRIRGADTQYF

SEQ ID NO: 431885 - protein, 11 aa, Homo sapiens
  CDR3 for alpha chain variable domain of TCR clone 215943 (TRAV2, TRAJ13)
CASGGYQKVTL

SEQ ID NO: 431886 - protein, 15 aa, Homo sapiens
  CDR3 for beta chain variable domain of TCR clone 215943 (TRBV2, TRBJ2-3)
CASSDFEKATDTQYF

SEQ ID NO: 431887 - protein, 11 aa, Homo sapiens
  CDR3 for alpha chain variable domain of TCR clone 215944 (TRAV13-2, TRAJ31)
CAENMDARLMF

SEQ ID NO: 431888 - protein, 16 aa, Homo sapiens
  CDR3 for beta chain variable domain of TCR clone 215944 (TRBV12-4, TRBJ1-5)
CASSRPVGGSNQPQHF

SEQ ID NO: 431889 - protein, 13 aa, Homo sapiens
  CDR3 for alpha chain variable domain of TCR clone 215945 (TRAV8-3, TRAJ6)
CAVGSGGSYIPTF

SEQ ID NO: 431890 - protein, 16 aa, Homo sapiens
  CDR3 for beta chain variable domain of TCR clone 215945 (TRBV10-3, TRBJ2-1)
CAISGVGDGGGGEQFF

SEQ ID NO: 431891 - protein, 13 aa, Homo sapiens
  CDR3 for alpha chain variable domain of TCR clone 215946 (TRAV30, TRAJ34)
FGTVGYNTDKLIF

SEQ ID NO: 431892 - protein, 16 aa, Homo sapiens
  CDR3 for beta chain variable domain of TCR clone 215946 (TRBV7-9, TRBJ1-2)
CASSLGFSSGEDGYTF

SEQ ID NO: 431893 - protein, 14 aa, Homo sapiens
  CDR3 for alpha chain variable domain of TCR clone 215947 (TRAV2, TRAJ37)
CAVDFTSNTGQLIF

SEQ ID NO: 431894 - protein, 15 aa, Homo sapiens
  CDR3 for beta chain variable domain of TCR clone 215947 (TRBV28, TRBJ2-1)
CASSIIAGGRSEQFF

SEQ ID NO: 431895 - protein, 14 aa, Homo sapiens
  CDR3 for alpha chain variable domain of TCR clone 215948 (TRAV13-1, TRAJ40)
CAASMTSGTYKYIF

SEQ ID NO: 431896 - protein, 19 aa, Homo sapiens
  CDR3 for beta chain variable domain of TCR clone 215948 (TRBV7-2, TRBJ2-3)
CASSFLSRNWGGGTDTQYF

SEQ ID NO: 431897 - protein, 16 aa, Homo sapiens
  CDR3 for alpha chain variable domain of TCR clone 215949 (TRAV3, TRAJ10)
CAVRDMRAGGGNKLTF

SEQ ID NO: 431898 - protein, 19 aa, Homo sapiens
  CDR3 for beta chain variable domain of TCR clone 215949 (TRBV6-3, TRBJ1-2)
CASGYSKGRTGPPNYGYTF

SEQ ID NO: 431899 - protein, 14 aa, Homo sapiens
  CDR3 for alpha chain variable domain of TCR clone 215950 (TRAV29/DV5, TRAJ36)
CAARRKTGANNLFS

SEQ ID NO: 431900 - protein, 14 aa, Homo sapiens
  CDR3 for beta chain variable domain of TCR clone 215950 (TRBV7-3, TRBJ2-2)
CASSSGGYTGELFF

SEQ ID NO: 431901 - protein, 14 aa, Homo sapiens
  CDR3 for alpha chain variable domain of TCR clone 215951 (TRAV13-1, TRAJ23)
CAASRIGRGGKLIF

SEQ ID NO: 431902 - protein, 15 aa, Homo sapiens
  CDR3 for beta chain variable domain of TCR clone 215951 (TRBV7-2, TRBJ2-1)
CASSLVAGRYNEQFF

SEQ ID NO: 431903 - protein, 14 aa, Homo sapiens
  CDR3 for alpha chain variable domain of TCR clone 215952 (TRAV27, TRAJ15)
CAGFDNQAGTALIF

SEQ ID NO: 431904 - protein, 11 aa, Homo sapiens
  CDR3 for beta chain variable domain of TCR clone 215952 (TRBV29-1, TRBJ1-1)
CSVEVGTWTFF

SEQ ID NO: 431905 - protein, 15 aa, Homo sapiens
  CDR3 for alpha chain variable domain of TCR clone 215953 (TRAV13-1, TRAJ17)
CAASIERAAGNKLTF

SEQ ID NO: 431906 - protein, 16 aa, Homo sapiens
  CDR3 for beta chain variable domain of TCR clone 215953 (TRBV7-3, TRBJ2-1)
CASSLEGYRSYNEQFF

SEQ ID NO: 431907 - protein, 12 aa, Homo sapiens
  CDR3 for alpha chain variable domain of TCR clone 215954 (TRAV2, TRAJ9)
CAVGAGGFKTIF

SEQ ID NO: 431908 - protein, 16 aa, Homo sapiens
  CDR3 for beta chain variable domain of TCR clone 215954 (TRBV13, TRBJ2-2)
CASSHGTGEHTGELFF

SEQ ID NO: 431909 - protein, 13 aa, Homo sapiens
  CDR3 for alpha chain variable domain of TCR clone 215955 (TRAV17, TRAJ40)
CAGALGGTYNYIF

SEQ ID NO: 431910 - protein, 16 aa, Homo sapiens
  CDR3 for beta chain variable domain of TCR clone 215955 (TRBV7-2, TRBJ1-4)
CASSLAPGRRDEKLFF

SEQ ID NO: 431911 - protein, 12 aa, Homo sapiens
  CDR3 for alpha chain variable domain of TCR clone 215956 (TRAV20, TRAJ39)
CAVGNAGSMLTF

SEQ ID NO: 431912 - protein, 16 aa, Homo sapiens
  CDR3 for beta chain variable domain of TCR clone 215956 (TRBV7-3, TRBJ2-2)
CASSLKRGTLSGELFF

SEQ ID NO: 431913 - protein, 13 aa, Homo sapiens
  CDR3 for alpha chain variable domain of TCR clone 215957 (TRAV1-1, TRAJ30)
CAVRSDRDDKIIF

SEQ ID NO: 431914 - protein, 17 aa, Homo sapiens
  CDR3 for beta chain variable domain of TCR clone 215957 (TRBV4-1, TRBJ2-5)
CASSQDQTGGPQETQYF

SEQ ID NO: 431915 - protein, 16 aa, Homo sapiens
  CDR3 for alpha chain variable domain of TCR clone 215958 (TRAV20, TRAJ10)
CAVLRGLTGGGNKLTF

SEQ ID NO: 431916 - protein, 16 aa, Homo sapiens
  CDR3 for beta chain variable domain of TCR clone 215958 (TRBV2, TRBJ2-1)
CASSVGGSLSYNEQFF

SEQ ID NO: 431917 - protein, 18 aa, Homo sapiens
  CDR3 for alpha chain variable domain of TCR clone 215959 (TRAV13-1, TRAJ52)
CAASKRSPGGTSYGKLTF

SEQ ID NO: 431918 - protein, 15 aa, Homo sapiens
  CDR3 for beta chain variable domain of TCR clone 215959 (TRBV20-1, TRBJ1-1)
CSASRGVTGNTEAFF

SEQ ID NO: 431919 - protein, 13 aa, Homo sapiens
  CDR3 for alpha chain variable domain of TCR clone 215960 (TRAV35, TRAJ44)
CAGLSGTASKLTF

SEQ ID NO: 431920 - protein, 15 aa, Homo sapiens
  CDR3 for beta chain variable domain of TCR clone 215960 (TRBV7-9, TRBJ1-6)
CASSSPGRGNSPLHF

SEQ ID NO: 431921 - protein, 12 aa, Homo sapiens
  CDR3 for alpha chain variable domain of TCR clone 215961 (TRAV1-1, TRAJ8)
CAGGTGFHKLVF

SEQ ID NO: 431922 - protein, 13 aa, Homo sapiens
  CDR3 for beta chain variable domain of TCR clone 215961 (TRBV7-9, TRBJ1-2)
CASSLKQNYGYTF

SEQ ID NO: 431923 - protein, 13 aa, Homo sapiens
  CDR3 for alpha chain variable domain of TCR clone 215962 (TRAV39, TRAJ58)
CAGEETRGSRLTF

SEQ ID NO: 431924 - protein, 13 aa, Homo sapiens
  CDR3 for beta chain variable domain of TCR clone 215962 (TRBV15, TRBJ2-7)
CASSTTGHYEQYF

SEQ ID NO: 431925 - protein, 15 aa, Homo sapiens
  CDR3 for alpha chain variable domain of TCR clone 215963 (TRAV26-1, TRAJ44)
CIVRIGTGTASKLTF

SEQ ID NO: 431926 - protein, 14 aa, Homo sapiens
  CDR3 for beta chain variable domain of TCR clone 215963 (TRBV7-2, TRBJ2-5)
CASSLFGREETQYF

SEQ ID NO: 431927 - protein, 16 aa, Homo sapiens
  CDR3 for alpha chain variable domain of TCR clone 215964 (TRAV12-2, TRAJ40)
CAVIRGGTSGTYKYIL

SEQ ID NO: 431928 - protein, 13 aa, Homo sapiens
  CDR3 for beta chain variable domain of TCR clone 215964 (TRBV10-3, TRBJ2-7)
CAIRPTEAYEQYF

SEQ ID NO: 431929 - protein, 14 aa, Homo sapiens
  CDR3 for alpha chain variable domain of TCR clone 215965 (TRAV1-2, TRAJ24)
CAGLTTDSWGKFQF

SEQ ID NO: 431930 - protein, 15 aa, Homo sapiens
  CDR3 for beta chain variable domain of TCR clone 215965 (TRBV6-6, TRBJ2-7)
CASSYSYGGSYEQYF

SEQ ID NO: 431931 - protein, 14 aa, Homo sapiens
  CDR3 for alpha chain variable domain of TCR clone 215966 (TRAV38-1, TRAJ43)
CAFMKHNNNNDMRL

SEQ ID NO: 431932 - protein, 17 aa, Homo sapiens
  CDR3 for beta chain variable domain of TCR clone 215966 (TRBV7-7, TRBJ1-4)
CASSLVGQGASNEKLFF

SEQ ID NO: 431933 - protein, 15 aa, Homo sapiens
  CDR3 for alpha chain variable domain of TCR clone 215967 (TRAV27, TRAJ38)
CAARRNAGNNRKLIW

SEQ ID NO: 431934 - protein, 13 aa, Homo sapiens
  CDR3 for beta chain variable domain of TCR clone 215967 (TRBV12-5, TRBJ2-3)
GASGDRQSDTQYL

SEQ ID NO: 431935 - protein, 15 aa, Homo sapiens
  CDR3 for alpha chain variable domain of TCR clone 215968 (TRAV12-3, TRAJ6)
CAMSATTGGSYIPTF

SEQ ID NO: 431936 - protein, 15 aa, Homo sapiens
  CDR3 for beta chain variable domain of TCR clone 215968 (TRBV7-9, TRBJ1-5)
CASSQGHQPNQPQHF

SEQ ID NO: 431937 - protein, 16 aa, Homo sapiens
  CDR3 for alpha chain variable domain of TCR clone 215969 (TRAV3, TRAJ23)
CAVKIGIYNQGGKLIF

SEQ ID NO: 431938 - protein, 16 aa, Homo sapiens
  CDR3 for beta chain variable domain of TCR clone 215969 (TRBV7-3, TRBJ2-2)
CASSLKRGTLSGELFF

SEQ ID NO: 431939 - protein, 13 aa, Homo sapiens
  CDR3 for alpha chain variable domain of TCR clone 215970 (TRAV8-6, TRAJ49)
CAVITNTGNQFYF

SEQ ID NO: 431940 - protein, 14 aa, Homo sapiens
  CDR3 for beta chain variable domain of TCR clone 215970 (TRBV7-2, TRBJ2-5)
CASSTGGELKTQYF

SEQ ID NO: 431941 - protein, 17 aa, Homo sapiens
  CDR3 for alpha chain variable domain of TCR clone 215971 (TRAV3, TRAJ6)
CAVRDGPRAGGSYIHTF

SEQ ID NO: 431942 - protein, 20 aa, Homo sapiens
  CDR3 for beta chain variable domain of TCR clone 215971 (TRBV28, TRBJ2-1)
WASTPIGRSPGLAGGNEQFF

SEQ ID NO: 431943 - protein, 14 aa, Homo sapiens
  CDR3 for alpha chain variable domain of TCR clone 215972 (TRAV12-3, TRAJ10)
SHLPLTGGGNKLTF

SEQ ID NO: 431944 - protein, 11 aa, Homo sapiens
  CDR3 for beta chain variable domain of TCR clone 215972 (TRBV11-2, TRBJ2-1)
CASSLEREQFF

SEQ ID NO: 431945 - protein, 14 aa, Homo sapiens
  CDR3 for alpha chain variable domain of TCR clone 215973 (TRAV16, TRAJ15)
CALSGPQAGTALIY

SEQ ID NO: 431946 - protein, 12 aa, Homo sapiens
  CDR3 for beta chain variable domain of TCR clone 215973 (TRBV18, TRBJ2-5)
CASSPSKETQYF

SEQ ID NO: 431947 - protein, 12 aa, Homo sapiens
  CDR3 for alpha chain variable domain of TCR clone 215974 (TRAV38-1, TRAJ20)
CAFIWNDYKLSF

SEQ ID NO: 431948 - protein, 15 aa, Homo sapiens
  CDR3 for beta chain variable domain of TCR clone 215974 (TRBV5-1, TRBJ2-1)
CASSPPRAPYNEQFF

SEQ ID NO: 431949 - protein, 13 aa, Homo sapiens
  CDR3 for alpha chain variable domain of TCR clone 215975 (TRAV8-3, TRAJ5)
CAVRPRGRRALTF

SEQ ID NO: 431950 - protein, 16 aa, Homo sapiens
  CDR3 for beta chain variable domain of TCR clone 215975 (TRBV11-3, TRBJ2-3)
CASSPGGLLGTDTQYF

SEQ ID NO: 431951 - protein, 17 aa, Homo sapiens
  CDR3 for alpha chain variable domain of TCR clone 215976 (TRAV3, TRAJ6)
CAVRDGPRAGGSYIPTF

SEQ ID NO: 431952 - protein, 16 aa, Homo sapiens
  CDR3 for beta chain variable domain of TCR clone 215976 (TRBV7-2, TRBJ1-2)
CASSPTSGTSLVGYTF

SEQ ID NO: 431953 - protein, 17 aa, Homo sapiens
  CDR3 for alpha chain variable domain of TCR clone 215977 (TRAV23/DV6, TRAJ57)
CAASSTLSQGGSERLVV

SEQ ID NO: 431954 - protein, 14 aa, Homo sapiens
  CDR3 for beta chain variable domain of TCR clone 215977 (TRBV25-1, TRBJ1-1)
CASTHLGGNTEAFF

SEQ ID NO: 431955 - protein, 15 aa, Homo sapiens
  CDR3 for alpha chain variable domain of TCR clone 215978 (TRAV20, TRAJ42)
CAVQATRGSQGNLIF

SEQ ID NO: 431956 - protein, 14 aa, Homo sapiens
  CDR3 for beta chain variable domain of TCR clone 215978 (TRBV4-1, TRBJ2-2)
CASSQAVNTGELFF

SEQ ID NO: 431957 - protein, 12 aa, Homo sapiens
  CDR3 for alpha chain variable domain of TCR clone 215979 (TRAV22, TRAJ22)
CAPGGSARQLTF

SEQ ID NO: 431958 - protein, 15 aa, Homo sapiens
  CDR3 for beta chain variable domain of TCR clone 215979 (TRBV28, TRBJ2-1)
CASSIIAGGRSEQFF

SEQ ID NO: 431959 - protein, 13 aa, Homo sapiens
  CDR3 for alpha chain variable domain of TCR clone 215980 (TRAV35, TRAJ22)
CAGLSGSARQLTF

SEQ ID NO: 431960 - protein, 16 aa, Homo sapiens
  CDR3 for beta chain variable domain of TCR clone 215980 (TRBV7-9, TRBJ2-1)
CASTLVLTGQGNEQFF

SEQ ID NO: 431961 - protein, 15 aa, Homo sapiens
  CDR3 for alpha chain variable domain of TCR clone 215981 (TRAV29/DV5, TRAJ8)
CAASGRNTGCQKLVF

SEQ ID NO: 431962 - protein, 15 aa, Homo sapiens
  CDR3 for beta chain variable domain of TCR clone 215981 (TRBV5-1, TRBJ2-1)
CASTGSGRTYNEQFF

SEQ ID NO: 431963 - protein, 14 aa, Homo sapiens
  CDR3 for alpha chain variable domain of TCR clone 215982 (TRAV13-1, TRAJ40)
CAASMTSGTYKYIF

SEQ ID NO: 431964 - protein, 13 aa, Homo sapiens
  CDR3 for beta chain variable domain of TCR clone 215982 (TRBV4-2, TRBJ1-1)
CASSQAGNTEAFF

SEQ ID NO: 431965 - protein, 12 aa, Homo sapiens
  CDR3 for alpha chain variable domain of TCR clone 215983 (TRAV13-1, TRAJ27)
CSAHTNAGKSTF

SEQ ID NO: 431966 - protein, 13 aa, Homo sapiens
  CDR3 for beta chain variable domain of TCR clone 215983 (TRBV7-9, TRBJ1-2)
CASSLKQNYGYTF

SEQ ID NO: 431967 - protein, 15 aa, Homo sapiens
  CDR3 for alpha chain variable domain of TCR clone 215984 (TRAV8-2, TRAJ40)
CVVSDRGSGTYKYTF

SEQ ID NO: 431968 - protein, 17 aa, Homo sapiens
  CDR3 for beta chain variable domain of TCR clone 215984 (TRBV9, TRBJ2-1)
WASSVRSLSGGNNEQFF

SEQ ID NO: 431969 - protein, 13 aa, Homo sapiens
  CDR3 for alpha chain variable domain of TCR clone 215985 (TRAV12-1, TRAJ34)
CVVTGYNTDKLIF

SEQ ID NO: 431970 - protein, 15 aa, Homo sapiens
  CDR3 for beta chain variable domain of TCR clone 215985 (TRBV5-1, TRBJ2-3)
CASSVTSGSTDTQYF

SEQ ID NO: 431971 - protein, 14 aa, Homo sapiens
  CDR3 for alpha chain variable domain of TCR clone 215986 (TRAV17, TRAJ54)
CATDANQGAQKLVS

SEQ ID NO: 431972 - protein, 12 aa, Homo sapiens
  CDR3 for beta chain variable domain of TCR clone 215986 (TRBV7-9, TRBJ2-7)
CASSIKREEQYF

SEQ ID NO: 431973 - protein, 12 aa, Homo sapiens
  CDR3 for alpha chain variable domain of TCR clone 215987 (TRAV13-2, TRAJ23)
CAECHRGGKLIF

SEQ ID NO: 431974 - protein, 16 aa, Homo sapiens
  CDR3 for beta chain variable domain of TCR clone 215987 (TRBV20-1, TRBJ1-4)
CSAPGQGLLTNEELFF

SEQ ID NO: 431975 - protein, 14 aa, Homo sapiens
  CDR3 for alpha chain variable domain of TCR clone 215988 (TRAV12-2, TRAJ17)
CAVLFKAAGNKLTF

SEQ ID NO: 431976 - protein, 14 aa, Homo sapiens
  CDR3 for beta chain variable domain of TCR clone 215988 (TRBV5-1, TRBJ1-2)
CASSLEPVNYGYTF

SEQ ID NO: 431977 - protein, 12 aa, Homo sapiens
  CDR3 for alpha chain variable domain of TCR clone 215989 (TRAV1-1, TRAJ20)
FAVREDDYKLSF

SEQ ID NO: 431978 - protein, 18 aa, Homo sapiens
  CDR3 for beta chain variable domain of TCR clone 215989 (TRBV20-1, TRBJ2-3)
CSASGLAGGPGTTDTQYF

SEQ ID NO: 431979 - protein, 13 aa, Homo sapiens
  CDR3 for alpha chain variable domain of TCR clone 215990 (TRAV17, TRAJ54)
CATVIQEAQKLVF

SEQ ID NO: 431980 - protein, 15 aa, Homo sapiens
  CDR3 for beta chain variable domain of TCR clone 215990 (TRBV13, TRBJ2-1)
CASSLLSGLNNEQFF

SEQ ID NO: 431981 - protein, 22 aa, Homo sapiens
  CDR3 for alpha chain variable domain of TCR clone 215991 (TRAV8-2, TRAJ45)
HLTKPSAHMSGAAEYSADGLTF

SEQ ID NO: 431982 - protein, 13 aa, Homo sapiens
  CDR3 for beta chain variable domain of TCR clone 215991 (TRBV7-3, TRBJ2-1)
CASSTVAYNEQFF

SEQ ID NO: 431983 - protein, 15 aa, Homo sapiens
  CDR3 for alpha chain variable domain of TCR clone 215992 (TRAV17, TRAJ54)
CATEKLGQGAQKLVF

SEQ ID NO: 431984 - protein, 16 aa, Homo sapiens
  CDR3 for beta chain variable domain of TCR clone 215992 (TRBV9, TRBJ1-2)
CASSVEEKVSPYGYTV

SEQ ID NO: 431985 - protein, 14 aa, Homo sapiens
  CDR3 for alpha chain variable domain of TCR clone 215993 (TRAV12-3, TRAJ10)
SHLPLTGGGNKLTF

SEQ ID NO: 431986 - protein, 15 aa, Homo sapiens
  CDR3 for beta chain variable domain of TCR clone 215993 (TRBV28, TRBJ2-1)
CASSLGTRLYNEQFF

SEQ ID NO: 431987 - protein, 14 aa, Homo sapiens
  CDR3 for alpha chain variable domain of TCR clone 215994 (TRAV8-4, TRAJ9)
CAVRINTGGFKTIF

SEQ ID NO: 431988 - protein, 17 aa, Homo sapiens
  CDR3 for beta chain variable domain of TCR clone 215994 (TRBV10-3, TRBJ2-6)
CAISELAESSGANDLTF

SEQ ID NO: 431989 - protein, 12 aa, Homo sapiens
  CDR3 for alpha chain variable domain of TCR clone 215995 (TRAV26-1, TRAJ26)
GIVYNYGQNFVF

SEQ ID NO: 431990 - protein, 15 aa, Homo sapiens
  CDR3 for beta chain variable domain of TCR clone 215995 (TRBV7-2, TRBJ2-3)
CASSLRGGSTDTQYF

SEQ ID NO: 431991 - protein, 15 aa, Homo sapiens
  CDR3 for alpha chain variable domain of TCR clone 215996 (TRAV12-1, TRAJ45)
CVVLRGGGGADGLTF

SEQ ID NO: 431992 - protein, 15 aa, Homo sapiens
  CDR3 for beta chain variable domain of TCR clone 215996 (TRBV12-5, TRBJ2-5)
CASGSGLAGRETQYF

SEQ ID NO: 431993 - protein, 14 aa, Homo sapiens
  CDR3 for alpha chain variable domain of TCR clone 215997 (TRAV1-2, TRAJ27)
CAPAEYTNAGKSTF

SEQ ID NO: 431994 - protein, 18 aa, Homo sapiens
  CDR3 for beta chain variable domain of TCR clone 215997 (TRBV28, TRBJ1-2)
CASRQKQGKRGSNYGYTF

SEQ ID NO: 431995 - protein, 13 aa, Homo sapiens
  CDR3 for alpha chain variable domain of TCR clone 215998 (TRAV13-1, TRAJ36)
CAARATGANNLFF

SEQ ID NO: 431996 - protein, 14 aa, Homo sapiens
  CDR3 for beta chain variable domain of TCR clone 215998 (TRBV2, TRBJ2-3)
CASARDFPADTQYF

SEQ ID NO: 431997 - protein, 17 aa, Homo sapiens
  CDR3 for alpha chain variable domain of TCR clone 215999 (TRAV3, TRAJ42)
CAVRDRDYGGSQGNLIF

SEQ ID NO: 431998 - protein, 14 aa, Homo sapiens
  CDR3 for beta chain variable domain of TCR clone 215999 (TRBV7-2, TRBJ2-7)
CVSSPKTSFYEQYF

SEQ ID NO: 431999 - protein, 11 aa, Homo sapiens
  CDR3 for alpha chain variable domain of TCR clone 216000 (TRAV1-1, TRAJ23)
CAVRQGGKRIF

SEQ ID NO: 432000 - protein, 20 aa, Homo sapiens
  CDR3 for beta chain variable domain of TCR clone 216000 (TRBV7-8, TRBJ2-2)
RASSHLFPGPTIHITGELFF

SEQ ID NO: 432001 - protein, 14 aa, Homo sapiens
  CDR3 for alpha chain variable domain of TCR clone 216001 (TRAV3, TRAJ34)
CAVRDINNTDKLIF

SEQ ID NO: 432002 - protein, 13 aa, Homo sapiens
  CDR3 for beta chain variable domain of TCR clone 216001 (TRBV4-1, TRBJ1-1)
CASSRKMNTEAFF

SEQ ID NO: 432003 - protein, 16 aa, Homo sapiens
  CDR3 for alpha chain variable domain of TCR clone 216002 (TRAV12-3, TRAJ53)
CAMSPGSGCSNYKLTF

SEQ ID NO: 432004 - protein, 15 aa, Homo sapiens
  CDR3 for beta chain variable domain of TCR clone 216002 (TRBV25-1, TRBJ1-4)
CASSKRIATNEKLFF

SEQ ID NO: 432005 - protein, 15 aa, Homo sapiens
  CDR3 for alpha chain variable domain of TCR clone 216003 (TRAV3, TRAJ13)
CAVRDIAGGYQKVTF

SEQ ID NO: 432006 - protein, 13 aa, Homo sapiens
  CDR3 for beta chain variable domain of TCR clone 216003 (TRBV12-4, TRBJ1-3)
CASSLASGNTIYF

SEQ ID NO: 432007 - protein, 12 aa, Homo sapiens
  CDR3 for alpha chain variable domain of TCR clone 216004 (TRAV1-1, TRAJ8)
CAGGTGFQKLVF

SEQ ID NO: 432008 - protein, 16 aa, Homo sapiens
  CDR3 for beta chain variable domain of TCR clone 216004 (TRBV5-1, TRBJ1-1)
CASSSGGNSLNTEAFF

SEQ ID NO: 432009 - protein, 14 aa, Homo sapiens
  CDR3 for alpha chain variable domain of TCR clone 216005 (TRAV20, TRAJ56)
CAVQFGGANSKVTF

SEQ ID NO: 432010 - protein, 14 aa, Homo sapiens
  CDR3 for beta chain variable domain of TCR clone 216005 (TRBV20-1, TRBJ2-7)
CSAKRGRSSYEQYF

SEQ ID NO: 432011 - protein, 16 aa, Homo sapiens
  CDR3 for alpha chain variable domain of TCR clone 216006 (TRAV12-2, TRAJ40)
CAVIRGGTSGTYKYIF

SEQ ID NO: 432012 - protein, 14 aa, Homo sapiens
  CDR3 for beta chain variable domain of TCR clone 216006 (TRBV7-2, TRBJ1-6)
CASSSTASNSPLHF

SEQ ID NO: 432013 - protein, 11 aa, Homo sapiens
  CDR3 for alpha chain variable domain of TCR clone 216007 (TRAV8-4, TRAJ34)
CAVSWTDKLIL

SEQ ID NO: 432014 - protein, 14 aa, Homo sapiens
  CDR3 for beta chain variable domain of TCR clone 216007 (TRBV7-9, TRBJ2-3)
CASSLEDGTDTQYF

SEQ ID NO: 432015 - protein, 14 aa, Homo sapiens
  CDR3 for alpha chain variable domain of TCR clone 216008 (TRAV12-1, TRAJ23)
CVVIVYNQGGKLIF

SEQ ID NO: 432016 - protein, 13 aa, Homo sapiens
  CDR3 for beta chain variable domain of TCR clone 216008 (TRBV11-2, TRBJ2-5)
CAISFSSQETQYF

SEQ ID NO: 432017 - protein, 16 aa, Homo sapiens
  CDR3 for alpha chain variable domain of TCR clone 216009 (TRAV3, TRAJ18)
CAVRDGRGSTLGRLYF

SEQ ID NO: 432018 - protein, 15 aa, Homo sapiens
  CDR3 for beta chain variable domain of TCR clone 216009 (TRBV10-3, TRBJ1-2)
CAISESRESNYGYTF

SEQ ID NO: 432019 - protein, 12 aa, Homo sapiens
  CDR3 for alpha chain variable domain of TCR clone 216010 (TRAV3, TRAJ43)
CAVRDPNNDMRF

SEQ ID NO: 432020 - protein, 15 aa, Homo sapiens
  CDR3 for beta chain variable domain of TCR clone 216010 (TRBV4-3, TRBJ2-7)
CASSHGDWGDYEQYF

SEQ ID NO: 432021 - protein, 12 aa, Homo sapiens
  CDR3 for alpha chain variable domain of TCR clone 216011 (TRAV12-1, TRAJ40)
CVVYSGTYKYIF

SEQ ID NO: 432022 - protein, 12 aa, Homo sapiens
  CDR3 for beta chain variable domain of TCR clone 216011 (TRBV7-9, TRBJ1-4)
CASSTDREKLFF

SEQ ID NO: 432023 - protein, 18 aa, Homo sapiens
  CDR3 for alpha chain variable domain of TCR clone 216012 (TRAV12-2, )
CAVEDIQHPDPAVYQLRD

SEQ ID NO: 432024 - protein, 18 aa, Homo sapiens
  CDR3 for beta chain variable domain of TCR clone 216012 (TRBV11-2, TRBJ2-3)
CASSLGGASRGAPNTQYF

SEQ ID NO: 432025 - protein, 14 aa, Homo sapiens
  CDR3 for alpha chain variable domain of TCR clone 216013 (TRAV12-2, TRAJ13)
RAVKKTGGYKKVTF

SEQ ID NO: 432026 - protein, 15 aa, Homo sapiens
  CDR3 for beta chain variable domain of TCR clone 216013 (TRBV27, TRBJ2-1)
CASSNGGGSSNEQFF

SEQ ID NO: 432027 - protein, 15 aa, Homo sapiens
  CDR3 for alpha chain variable domain of TCR clone 216014 (TRAV36/DV7, TRAJ53)
CAVEGSGGSNYKLTF

SEQ ID NO: 432028 - protein, 16 aa, Homo sapiens
  CDR3 for beta chain variable domain of TCR clone 216014 (TRBV27, TRBJ2-2)
CASSVSGFWVTGELFF

SEQ ID NO: 432029 - protein, 17 aa, Homo sapiens
  CDR3 for alpha chain variable domain of TCR clone 216015 (TRAV14/DV4, TRAJ4)
CAMREASGRGGYNKLIF

SEQ ID NO: 432030 - protein, 14 aa, Homo sapiens
  CDR3 for beta chain variable domain of TCR clone 216015 (TRBV19, TRBJ2-7)
CASSMGQGASEQYF

SEQ ID NO: 432031 - protein, 11 aa, Homo sapiens
  CDR3 for alpha chain variable domain of TCR clone 216016 (TRAV8-3, TRAJ49)
CAVNTGNKFYF

SEQ ID NO: 432032 - protein, 12 aa, Homo sapiens
  CDR3 for beta chain variable domain of TCR clone 216016 (TRBV11-2, TRBJ2-7)
CASSPPADEQYF

SEQ ID NO: 432033 - protein, 16 aa, Homo sapiens
  CDR3 for alpha chain variable domain of TCR clone 216017 (TRAV8-2, TRAJ45)
CVASEGTGGGADGLTF

SEQ ID NO: 432034 - protein, 13 aa, Homo sapiens
  CDR3 for beta chain variable domain of TCR clone 216017 (TRBV19, TRBJ2-5)
CASRDSRRETQYF

SEQ ID NO: 432035 - protein, 17 aa, Homo sapiens
  CDR3 for alpha chain variable domain of TCR clone 216018 (TRAV26-1, TRAJ53)
CIVRVDDSGGRNYKLTF

SEQ ID NO: 432036 - protein, 15 aa, Homo sapiens
  CDR3 for beta chain variable domain of TCR clone 216018 (TRBV20-1, TRBJ2-7)
CSARVPAAYFYEQSF

SEQ ID NO: 432037 - protein, 13 aa, Homo sapiens
  CDR3 for alpha chain variable domain of TCR clone 216019 (TRAV1-2, TRAJ9)
CAVLNTGGFKTIF

SEQ ID NO: 432038 - protein, 15 aa, Homo sapiens
  CDR3 for beta chain variable domain of TCR clone 216019 (TRBV4-1, TRBJ1-4)
CASSDTGGTNEKLFF

SEQ ID NO: 432039 - protein, 17 aa, Homo sapiens
  CDR3 for alpha chain variable domain of TCR clone 216020 (TRAV14/DV4, TRAJ4)
CAMREASGRGGYNKLIF

SEQ ID NO: 432040 - protein, 16 aa, Homo sapiens
  CDR3 for beta chain variable domain of TCR clone 216020 (TRBV7-9, TRBJ2-1)
CASSDVAGGSYNEQFF

SEQ ID NO: 432041 - protein, 15 aa, Homo sapiens
  CDR3 for alpha chain variable domain of TCR clone 216021 (TRAV21, TRAJ24)
CAGRSSTDSWGKLQF

SEQ ID NO: 432042 - protein, 13 aa, Homo sapiens
  CDR3 for beta chain variable domain of TCR clone 216021 (TRBV11-2, TRBJ2-5)
CASSSTGEETQYF

SEQ ID NO: 432043 - protein, 14 aa, Homo sapiens
  CDR3 for alpha chain variable domain of TCR clone 216022 (TRAV8-3, TRAJ4)
GAVGAAGGYNKLMF

SEQ ID NO: 432044 - protein, 15 aa, Homo sapiens
  CDR3 for beta chain variable domain of TCR clone 216022 (TRBV6-5, TRBJ2-1)
CASSYDAGAGNEQFF

SEQ ID NO: 432045 - protein, 16 aa, Homo sapiens
  CDR3 for alpha chain variable domain of TCR clone 216023 (TRAV30, TRAJ24)
CGTEIVDADSWGKFQF

SEQ ID NO: 432046 - protein, 13 aa, Homo sapiens
  CDR3 for beta chain variable domain of TCR clone 216023 (TRBV15, TRBJ1-6)
CATSGGLNSTLHF

SEQ ID NO: 432047 - protein, 13 aa, Homo sapiens
  CDR3 for alpha chain variable domain of TCR clone 216024 (TRAV8-6, TRAJ49)
RAVITNTGNQFYF

SEQ ID NO: 432048 - protein, 12 aa, Homo sapiens
  CDR3 for beta chain variable domain of TCR clone 216024 (TRBV28, TRBJ2-3)
CASSLYRDTQYF

SEQ ID NO: 432049 - protein, 13 aa, Homo sapiens
  CDR3 for alpha chain variable domain of TCR clone 216025 (TRAV8-3, TRAJ20)
CAVGRPNDYKLSF

SEQ ID NO: 432050 - protein, 15 aa, Homo sapiens
  CDR3 for beta chain variable domain of TCR clone 216025 (TRBV3-1, TRBJ2-7)
CASSQVRQGAYEQYF

SEQ ID NO: 432051 - protein, 14 aa, Homo sapiens
  CDR3 for alpha chain variable domain of TCR clone 216026 (TRAV13-1, TRAJ35)
CAASKGGFGSVLHC

SEQ ID NO: 432052 - protein, 14 aa, Homo sapiens
  CDR3 for beta chain variable domain of TCR clone 216026 (TRBV7-9, TRBJ2-1)
CASSIRQGWDEQFF

SEQ ID NO: 432053 - protein, 14 aa, Homo sapiens
  CDR3 for alpha chain variable domain of TCR clone 216027 (TRAV35, TRAJ42)
CAGRYGGSQGNLIF

SEQ ID NO: 432054 - protein, 15 aa, Homo sapiens
  CDR3 for beta chain variable domain of TCR clone 216027 (TRBV7-9, TRBJ2-1)
CACSLGWGRANEQFF

SEQ ID NO: 432055 - protein, 15 aa, Homo sapiens
  CDR3 for alpha chain variable domain of TCR clone 216028 (TRAV35, TRAJ41)
CAGQLFSNSGYALNF

SEQ ID NO: 432056 - protein, 16 aa, Homo sapiens
  CDR3 for beta chain variable domain of TCR clone 216028 (TRBV9, TRBJ2-1)
CASSVGGGGNYNEQFF

SEQ ID NO: 432057 - protein, 13 aa, Homo sapiens
  CDR3 for alpha chain variable domain of TCR clone 216029 (TRAV27, TRAJ41)
CAVEGNSGYALNF

SEQ ID NO: 432058 - protein, 13 aa, Homo sapiens
  CDR3 for beta chain variable domain of TCR clone 216029 (TRBV27, TRBJ2-7)
CASSFVSSYEQYF

SEQ ID NO: 432059 - protein, 14 aa, Homo sapiens
  CDR3 for alpha chain variable domain of TCR clone 216030 (TRAV1-2, TRAJ16)
CAVNRFSDGQKLLF

SEQ ID NO: 432060 - protein, 14 aa, Homo sapiens
  CDR3 for beta chain variable domain of TCR clone 216030 (TRBV19, TRBJ2-2)
FASRTLHGSGELFF

SEQ ID NO: 432061 - protein, 12 aa, Homo sapiens
  CDR3 for alpha chain variable domain of TCR clone 216031 (TRAV8-4, TRAJ37)
CAVRRNPGKQIF

SEQ ID NO: 432062 - protein, 16 aa, Homo sapiens
  CDR3 for beta chain variable domain of TCR clone 216031 (TRBV7-2, TRBJ2-3)
CASSLVGDASTDTQYF

SEQ ID NO: 432063 - protein, 18 aa, Homo sapiens
  CDR3 for alpha chain variable domain of TCR clone 216032 (TRAV29/DV5, TRAJ52)
CAAGFMGAGGTSYGQLTF

SEQ ID NO: 432064 - protein, 16 aa, Homo sapiens
  CDR3 for beta chain variable domain of TCR clone 216032 (TRBV7-3, TRBJ2-2)
CASSLKRGTLSGELFF

SEQ ID NO: 432065 - protein, 11 aa, Homo sapiens
  CDR3 for alpha chain variable domain of TCR clone 216033 (TRAV20, TRAJ34)
CTRDNTDKPIF

SEQ ID NO: 432066 - protein, 15 aa, Homo sapiens
  CDR3 for beta chain variable domain of TCR clone 216033 (TRBV2, TRBJ2-1)
CASSVTGEGTDEQFF

SEQ ID NO: 432067 - protein, 14 aa, Homo sapiens
  CDR3 for alpha chain variable domain of TCR clone 216034 (TRAV1-2, TRAJ16)
CAVNRFSDGQKPLF

SEQ ID NO: 432068 - protein, 15 aa, Homo sapiens
  CDR3 for beta chain variable domain of TCR clone 216034 (TRBV7-9, TRBJ1-6)
CASSSPGRGNSPPHF

SEQ ID NO: 432069 - protein, 13 aa, Homo sapiens
  CDR3 for alpha chain variable domain of TCR clone 216035 (TRAV26-2, TRAJ43)
CILRAVNNNDMRF

SEQ ID NO: 432070 - protein, 18 aa, Homo sapiens
  CDR3 for beta chain variable domain of TCR clone 216035 (TRBV7-3, TRBJ2-1)
CASSLALASGRAMVSSSS

SEQ ID NO: 432071 - protein, 13 aa, Homo sapiens
  CDR3 for alpha chain variable domain of TCR clone 216036 (TRAV2, TRAJ40)
CAVVTSGTYNYVF

SEQ ID NO: 432072 - protein, 15 aa, Homo sapiens
  CDR3 for beta chain variable domain of TCR clone 216036 (TRBV11-3, TRBJ2-3)
CASLKDGREGDTQYF

SEQ ID NO: 432073 - protein, 14 aa, Homo sapiens
  CDR3 for alpha chain variable domain of TCR clone 216037 (TRAV13-1, TRAJ52)
SVVPGGTSYGKLTF

SEQ ID NO: 432074 - protein, 16 aa, Homo sapiens
  CDR3 for beta chain variable domain of TCR clone 216037 (TRBV28, TRBJ2-7)
CASSPWVATGDLSQYF

SEQ ID NO: 432075 - protein, 16 aa, Homo sapiens
  CDR3 for alpha chain variable domain of TCR clone 216038 (TRAV26-1, TRAJ23)
CIVRVYPYNQGGKLIF

SEQ ID NO: 432076 - protein, 15 aa, Homo sapiens
  CDR3 for beta chain variable domain of TCR clone 216038 (TRBV5-6, TRBJ2-7)
CASSPYFEGSYEQYF

SEQ ID NO: 432077 - protein, 12 aa, Homo sapiens
  CDR3 for alpha chain variable domain of TCR clone 216039 (TRAV13-1, TRAJ53)
AASGGSNYTLTF

SEQ ID NO: 432078 - protein, 17 aa, Homo sapiens
  CDR3 for beta chain variable domain of TCR clone 216039 (TRBV19, TRBJ2-6)
CASSTGQVFSGANVLTF

SEQ ID NO: 432079 - protein, 14 aa, Homo sapiens
  CDR3 for alpha chain variable domain of TCR clone 216040 (TRAV9-2, TRAJ39)
CALYIYNAGNMLTF

SEQ ID NO: 432080 - protein, 14 aa, Homo sapiens
  CDR3 for beta chain variable domain of TCR clone 216040 (TRBV7-9, TRBJ2-5)
CASSLDTAQETQYF

SEQ ID NO: 432081 - protein, 13 aa, Homo sapiens
  CDR3 for alpha chain variable domain of TCR clone 216041 (TRAV12-3, TRAJ13)
CAMSSGGYKKVTF

SEQ ID NO: 432082 - protein, 16 aa, Homo sapiens
  CDR3 for beta chain variable domain of TCR clone 216041 (TRBV20-1, TRBJ1-4)
CSAPGQGLLTNEKLLF

SEQ ID NO: 432083 - protein, 14 aa, Homo sapiens
  CDR3 for alpha chain variable domain of TCR clone 216042 (TRAV12-2, TRAJ40)
CAVKIPPGTSKYIF

SEQ ID NO: 432084 - protein, 14 aa, Homo sapiens
  CDR3 for beta chain variable domain of TCR clone 216042 (TRBV20-1, TRBJ1-1)
CSAQTRIGGTEAFF

SEQ ID NO: 432085 - protein, 16 aa, Homo sapiens
  CDR3 for alpha chain variable domain of TCR clone 216043 (TRAV12-2, TRAJ18)
YAVTTDRGSTLGRLYF

SEQ ID NO: 432086 - protein, 15 aa, Homo sapiens
  CDR3 for beta chain variable domain of TCR clone 216043 (TRBV2, TRBJ2-1)
CASSELAGSYNEQFF

SEQ ID NO: 432087 - protein, 15 aa, Homo sapiens
  CDR3 for alpha chain variable domain of TCR clone 216044 (TRAV26-2, TRAJ13)
CILRDLSGGYQKVTS

SEQ ID NO: 432088 - protein, 11 aa, Homo sapiens
  CDR3 for beta chain variable domain of TCR clone 216044 (TRBV7-9, TRBJ2-3)
CASSYTDTQYF

SEQ ID NO: 432089 - protein, 12 aa, Homo sapiens
  CDR3 for alpha chain variable domain of TCR clone 216045 (TRAV25, TRAJ20)
CAGRPNDYKPSF

SEQ ID NO: 432090 - protein, 15 aa, Homo sapiens
  CDR3 for beta chain variable domain of TCR clone 216045 (TRBV7-6, TRBJ2-7)
CASSGRRDTFGEQYF

SEQ ID NO: 432091 - protein, 16 aa, Homo sapiens
  CDR3 for alpha chain variable domain of TCR clone 216046 (TRAV17, TRAJ54)
CATDSDIIQGAQKLVF

SEQ ID NO: 432092 - protein, 17 aa, Homo sapiens
  CDR3 for beta chain variable domain of TCR clone 216046 (TRBV20-1, TRBJ2-2)
CSASGSGQGGLTGELFF

SEQ ID NO: 432093 - protein, 18 aa, Homo sapiens
  CDR3 for alpha chain variable domain of TCR clone 216047 (TRAV13-1, TRAJ52)
CAASKRSAGGTSYGKLTF

SEQ ID NO: 432094 - protein, 16 aa, Homo sapiens
  CDR3 for beta chain variable domain of TCR clone 216047 (TRBV7-3, TRBJ2-1)
CASSLEGYRSYNEQFF

SEQ ID NO: 432095 - protein, 15 aa, Homo sapiens
  CDR3 for alpha chain variable domain of TCR clone 216048 (TRAV3, TRAJ20)
CAVRDIKLSDYKLSF

SEQ ID NO: 432096 - protein, 17 aa, Homo sapiens
  CDR3 for beta chain variable domain of TCR clone 216048 (TRBV28, TRBJ2-5)
CASSRQGGLAGAETQYF

SEQ ID NO: 432097 - protein, 14 aa, Homo sapiens
  CDR3 for alpha chain variable domain of TCR clone 216049 (TRAV8-4, TRAJ8)
CAVIGNTGLQKLVF

SEQ ID NO: 432098 - protein, 16 aa, Homo sapiens
  CDR3 for beta chain variable domain of TCR clone 216049 (TRBV9, TRBJ2-1)
CASSVEGDGSYNEQFF

SEQ ID NO: 432099 - protein, 14 aa, Homo sapiens
  CDR3 for alpha chain variable domain of TCR clone 216050 (TRAV12-1, TRAJ30)
CVPTGTNRDDKIIF

SEQ ID NO: 432100 - protein, 11 aa, Homo sapiens
  CDR3 for beta chain variable domain of TCR clone 216050 (TRBV4-1, TRBJ2-2)
CASEHTGELFL

SEQ ID NO: 432101 - protein, 18 aa, Homo sapiens
  CDR3 for alpha chain variable domain of TCR clone 216051 (TRAV21, TRAJ52)
CAVRPSPAGGTSYGKLTF

SEQ ID NO: 432102 - protein, 14 aa, Homo sapiens
  CDR3 for beta chain variable domain of TCR clone 216051 (TRBV4-1, TRBJ1-4)
CASSSTRAREELFF

SEQ ID NO: 432103 - protein, 13 aa, Homo sapiens
  CDR3 for alpha chain variable domain of TCR clone 216052 (TRAV30, TRAJ22)
CGTLSGSARQLTF

SEQ ID NO: 432104 - protein, 14 aa, Homo sapiens
  CDR3 for beta chain variable domain of TCR clone 216052 (TRBV6-1, TRBJ2-1)
CASSEATRVNEQFL

SEQ ID NO: 432105 - protein, 14 aa, Homo sapiens
  CDR3 for alpha chain variable domain of TCR clone 216053 (TRAV3, TRAJ6)
CAVRDPWGSYIPTF

SEQ ID NO: 432106 - protein, 17 aa, Homo sapiens
  CDR3 for beta chain variable domain of TCR clone 216053 (TRBV11-2, TRBJ2-1)
CASSLYPPGVEYNEQFF

SEQ ID NO: 432107 - protein, 15 aa, Homo sapiens
  CDR3 for alpha chain variable domain of TCR clone 216054 (TRAV21, TRAJ52)
CAVRGGGTSYGKLTF

SEQ ID NO: 432108 - protein, 12 aa, Homo sapiens
  CDR3 for beta chain variable domain of TCR clone 216054 (TRBV29-1, TRBJ1-3)
CSTRDSGNTIYF

SEQ ID NO: 432109 - protein, 12 aa, Homo sapiens
  CDR3 for alpha chain variable domain of TCR clone 216055 (TRAV26-1, TRAJ48)
CIAVFGNQKLTF

SEQ ID NO: 432110 - protein, 17 aa, Homo sapiens
  CDR3 for beta chain variable domain of TCR clone 216055 (TRBV7-6, TRBJ2-1)
CASSFGLAGGTYNEQFF

SEQ ID NO: 432111 - protein, 16 aa, Homo sapiens
  CDR3 for alpha chain variable domain of TCR clone 216056 (TRAV38-2/DV8, TRAJ45)
CAYTTTSGGGADVLTF

SEQ ID NO: 432112 - protein, 14 aa, Homo sapiens
  CDR3 for beta chain variable domain of TCR clone 216056 (TRBV7-9, TRBJ2-2)
CASSLGHRTGELFF

SEQ ID NO: 432113 - protein, 15 aa, Homo sapiens
  CDR3 for alpha chain variable domain of TCR clone 216057 (TRAV3, TRAJ17)
CAVSPKEAAVNKLTF

SEQ ID NO: 432114 - protein, 12 aa, Homo sapiens
  CDR3 for beta chain variable domain of TCR clone 216057 (TRBV7-9, TRBJ1-6)
CASSLMTSPLHF

SEQ ID NO: 432115 - protein, 16 aa, Homo sapiens
  CDR3 for alpha chain variable domain of TCR clone 216058 (TRAV26-2, TRAJ57)
CILRDVGSGGSEKLVF

SEQ ID NO: 432116 - protein, 16 aa, Homo sapiens
  CDR3 for beta chain variable domain of TCR clone 216058 (TRBV29-1, TRBJ2-6)
CSVEDITYSGANVLTF

SEQ ID NO: 432117 - protein, 15 aa, Homo sapiens
  CDR3 for alpha chain variable domain of TCR clone 216059 (TRAV12-3, TRAJ6)
CAMSATTGGSYIHTF

SEQ ID NO: 432118 - protein, 17 aa, Homo sapiens
  CDR3 for beta chain variable domain of TCR clone 216059 (TRBV13, TRBJ2-3)
CASSLSRVAGGRNTQYF

SEQ ID NO: 432119 - protein, 15 aa, Homo sapiens
  CDR3 for alpha chain variable domain of TCR clone 216060 (TRAV17, TRAJ23)
CATDAEDNQGGKLIF

SEQ ID NO: 432120 - protein, 14 aa, Homo sapiens
  CDR3 for beta chain variable domain of TCR clone 216060 (TRBV18, TRBJ2-5)
CASSPGVSQETQYF

SEQ ID NO: 432121 - protein, 16 aa, Homo sapiens
  CDR3 for alpha chain variable domain of TCR clone 216061 (TRAV17, TRAJ22)
CATGPISSGSARQLPF

SEQ ID NO: 432122 - protein, 13 aa, Homo sapiens
  CDR3 for beta chain variable domain of TCR clone 216061 (TRBV11-2, TRBJ2-1)
CASSLGLAGGRFF

SEQ ID NO: 432123 - protein, 15 aa, Homo sapiens
  CDR3 for alpha chain variable domain of TCR clone 216062 (TRAV34, TRAJ38)
CGADFTPGNNRKLIR

SEQ ID NO: 432124 - protein, 16 aa, Homo sapiens
  CDR3 for beta chain variable domain of TCR clone 216062 (TRBV12-5, TRBJ2-5)
CASGPRTSGKQETQYF

SEQ ID NO: 432125 - protein, 12 aa, Homo sapiens
  CDR3 for alpha chain variable domain of TCR clone 216063 (TRAV8-3, TRAJ6)
CAVAGGSYIPTF

SEQ ID NO: 432126 - protein, 16 aa, Homo sapiens
  CDR3 for beta chain variable domain of TCR clone 216063 (TRBV4-2, TRBJ1-1)
CASSQAGFGMNTEAFF

SEQ ID NO: 432127 - protein, 19 aa, Homo sapiens
  CDR3 for alpha chain variable domain of TCR clone 216064 (TRAV13-1, TRAJ52)
CAANPYQNAGGTSYGKLTF

SEQ ID NO: 432128 - protein, 14 aa, Homo sapiens
  CDR3 for beta chain variable domain of TCR clone 216064 (TRBV19, TRBJ2-7)
CASTVQGRPYEQYF

SEQ ID NO: 432129 - protein, 15 aa, Homo sapiens
  CDR3 for alpha chain variable domain of TCR clone 216065 (TRAV12-1, TRAJ44)
CVVFVNTGTASKLTF

SEQ ID NO: 432130 - protein, 17 aa, Homo sapiens
  CDR3 for beta chain variable domain of TCR clone 216065 (TRBV7-8, TRBJ2-6)
CASSGGTGGAGANVLTF

SEQ ID NO: 432131 - protein, 12 aa, Homo sapiens
  CDR3 for alpha chain variable domain of TCR clone 216066 (TRAV17, TRAJ12)
CATLRSSYKLIF

SEQ ID NO: 432132 - protein, 16 aa, Homo sapiens
  CDR3 for beta chain variable domain of TCR clone 216066 (TRBV11-2, TRBJ1-2)
CASSLDTGGADYGYTF

SEQ ID NO: 432133 - protein, 13 aa, Homo sapiens
  CDR3 for alpha chain variable domain of TCR clone 216067 (TRAV21, TRAJ27)
CAARPGNAGKSTF

SEQ ID NO: 432134 - protein, 15 aa, Homo sapiens
  CDR3 for beta chain variable domain of TCR clone 216067 (TRBV5-7, TRBJ2-7)
CASSLPGQVFYEQYF

SEQ ID NO: 432135 - protein, 13 aa, Homo sapiens
  CDR3 for alpha chain variable domain of TCR clone 216068 (TRAV38-1, TRAJ42)
CARWGGSQGNLIF

SEQ ID NO: 432136 - protein, 17 aa, Homo sapiens
  CDR3 for beta chain variable domain of TCR clone 216068 (TRBV7-9, TRBJ2-1)
CASSLVASYPSYNEQFF

SEQ ID NO: 432137 - protein, 15 aa, Homo sapiens
  CDR3 for alpha chain variable domain of TCR clone 216069 (TRAV16, TRAJ45)
CAPPYSGGGADGLTF

SEQ ID NO: 432138 - protein, 14 aa, Homo sapiens
  CDR3 for beta chain variable domain of TCR clone 216069 (TRBV5-1, TRBJ2-7)
CASSRGESLYEQYF

SEQ ID NO: 432139 - protein, 12 aa, Homo sapiens
  CDR3 for alpha chain variable domain of TCR clone 216070 (TRAV12-2, TRAJ16)
CAVNLDGQKLLF

SEQ ID NO: 432140 - protein, 14 aa, Homo sapiens
  CDR3 for beta chain variable domain of TCR clone 216070 (TRBV10-2, TRBJ2-1)
CASSEGTSEDEQFF

SEQ ID NO: 432141 - protein, 14 aa, Homo sapiens
  CDR3 for alpha chain variable domain of TCR clone 216071 (TRAV4, TRAJ9)
FLVGSGTGGFKTIF

SEQ ID NO: 432142 - protein, 15 aa, Homo sapiens
  CDR3 for beta chain variable domain of TCR clone 216071 (TRBV7-8, TRBJ2-1)
CASSLASGRVNEQFF

SEQ ID NO: 432143 - protein, 15 aa, Homo sapiens
  CDR3 for alpha chain variable domain of TCR clone 216072 (TRAV17, TRAJ57)
CATGPSQGGSEKLVF

SEQ ID NO: 432144 - protein, 13 aa, Homo sapiens
  CDR3 for beta chain variable domain of TCR clone 216072 (TRBV9, TRBJ2-1)
CASSPSGGSEQFF

SEQ ID NO: 432145 - protein, 15 aa, Homo sapiens
  CDR3 for alpha chain variable domain of TCR clone 216073 (TRAV8-1, TRAJ13)
CAVNPRSGGYQKVTF

SEQ ID NO: 432146 - protein, 15 aa, Homo sapiens
  CDR3 for beta chain variable domain of TCR clone 216073 (TRBV11-2, TRBJ1-1)
CQELTAGGEHSKAFF

SEQ ID NO: 432147 - protein, 15 aa, Homo sapiens
  CDR3 for alpha chain variable domain of TCR clone 216074 (TRAV2, TRAJ15)
CAVEDRGQAGTALIF

SEQ ID NO: 432148 - protein, 13 aa, Homo sapiens
  CDR3 for beta chain variable domain of TCR clone 216074 (TRBV10-2, TRBJ2-7)
RASGARGGYEQYF

SEQ ID NO: 432149 - protein, 12 aa, Homo sapiens
  CDR3 for alpha chain variable domain of TCR clone 216075 (TRAV20, TRAJ34)
FAVKDNTDKLIF

SEQ ID NO: 432150 - protein, 14 aa, Homo sapiens
  CDR3 for beta chain variable domain of TCR clone 216075 (TRBV7-9, TRBJ2-7)
CASSRPGGPYEQYF

SEQ ID NO: 432151 - protein, 14 aa, Homo sapiens
  CDR3 for alpha chain variable domain of TCR clone 216076 (TRAV12-2, TRAJ5)
CAVNRSTGRRALTF

SEQ ID NO: 432152 - protein, 18 aa, Homo sapiens
  CDR3 for beta chain variable domain of TCR clone 216076 (TRBV14, TRBJ2-1)
CASSQEYGGAYLRGEQFF

SEQ ID NO: 432153 - protein, 15 aa, Homo sapiens
  CDR3 for alpha chain variable domain of TCR clone 216077 (TRAV3, TRAJ22)
CAVRDRGGSARQLTF

SEQ ID NO: 432154 - protein, 15 aa, Homo sapiens
  CDR3 for beta chain variable domain of TCR clone 216077 (TRBV28, TRBJ2-1)
CASSLDTSSYNEQFF

SEQ ID NO: 432155 - protein, 15 aa, Homo sapiens
  CDR3 for alpha chain variable domain of TCR clone 216078 (TRAV26-1, TRAJ39)
CIVRDGSNAGNMLTF

SEQ ID NO: 432156 - protein, 12 aa, Homo sapiens
  CDR3 for beta chain variable domain of TCR clone 216078 (TRBV6-3, TRBJ2-7)
CASSRQGYEQYF

SEQ ID NO: 432157 - protein, 12 aa, Homo sapiens
  CDR3 for alpha chain variable domain of TCR clone 216079 (TRAV8-3, TRAJ26)
FSGDNYGQNFFF

SEQ ID NO: 432158 - protein, 15 aa, Homo sapiens
  CDR3 for beta chain variable domain of TCR clone 216079 (TRBV7-2, TRBJ2-1)
CASSSGLAGGNEQFF

SEQ ID NO: 432159 - protein, 21 aa, Homo sapiens
  CDR3 for alpha chain variable domain of TCR clone 216080 (TRAV1-2, TRAJ37)
CLLPLCCERFHGSDNTGKLIF

SEQ ID NO: 432160 - protein, 14 aa, Homo sapiens
  CDR3 for beta chain variable domain of TCR clone 216080 (TRBV2, TRBJ2-5)
CASSEVLAQETQYF

SEQ ID NO: 432161 - protein, 17 aa, Homo sapiens
  CDR3 for alpha chain variable domain of TCR clone 216081 (TRAV26-1, TRAJ53)
CIVRVDDSGGSNYKLTF

SEQ ID NO: 432162 - protein, 15 aa, Homo sapiens
  CDR3 for beta chain variable domain of TCR clone 216081 (TRBV20-1, TRBJ2-7)
CSAIVTAAYFYEQYF

SEQ ID NO: 432163 - protein, 12 aa, Homo sapiens
  CDR3 for alpha chain variable domain of TCR clone 216082 (TRAV12-1, TRAJ40)
CVVYSGTYKYVF

SEQ ID NO: 432164 - protein, 16 aa, Homo sapiens
  CDR3 for beta chain variable domain of TCR clone 216082 (TRBV4-2, TRBJ1-1)
CASSQAGFGMNTEAVF

SEQ ID NO: 432165 - protein, 12 aa, Homo sapiens
  CDR3 for alpha chain variable domain of TCR clone 216083 (TRAV12-3, TRAJ17)
CAMTLTGNKLTF

SEQ ID NO: 432166 - protein, 16 aa, Homo sapiens
  CDR3 for beta chain variable domain of TCR clone 216083 (TRBV11-2, TRBJ1-2)
CASSLDTGGADYGYTF

SEQ ID NO: 432167 - protein, 12 aa, Homo sapiens
  CDR3 for alpha chain variable domain of TCR clone 216084 (TRAV35, TRAJ49)
CAGWNTGNQCYF

SEQ ID NO: 432168 - protein, 16 aa, Homo sapiens
  CDR3 for beta chain variable domain of TCR clone 216084 (TRBV5-1, TRBJ2-2)
CASSLWDTTNTGELFF

SEQ ID NO: 432169 - protein, 15 aa, Homo sapiens
  CDR3 for alpha chain variable domain of TCR clone 216085 (TRAV1-2, TRAJ12)
CAVIPEGDSSYKLIF

SEQ ID NO: 432170 - protein, 12 aa, Homo sapiens
  CDR3 for beta chain variable domain of TCR clone 216085 (TRBV11-2, TRBJ2-2)
CASSLPTGELFF

SEQ ID NO: 432171 - protein, 14 aa, Homo sapiens
  CDR3 for alpha chain variable domain of TCR clone 216086 (TRAV29/DV5, TRAJ49)
CAASLSNTGNHFYF

SEQ ID NO: 432172 - protein, 15 aa, Homo sapiens
  CDR3 for beta chain variable domain of TCR clone 216086 (TRBV20-1, TRBJ2-1)
CSARGIGGTYNEQFF

SEQ ID NO: 432173 - protein, 14 aa, Homo sapiens
  CDR3 for alpha chain variable domain of TCR clone 216087 (TRAV6, TRAJ37)
CALGSQGNTGKLIF

SEQ ID NO: 432174 - protein, 12 aa, Homo sapiens
  CDR3 for beta chain variable domain of TCR clone 216087 (TRBV7-6, TRBJ2-7)
CASSLADSEQYF

SEQ ID NO: 432175 - protein, 12 aa, Homo sapiens
  CDR3 for alpha chain variable domain of TCR clone 216088 (TRAV1-1, TRAJ8)
CAGGTGFLKLLL

SEQ ID NO: 432176 - protein, 15 aa, Homo sapiens
  CDR3 for beta chain variable domain of TCR clone 216088 (TRBV7-9, TRBJ1-4)
CASSRTGGFNEKLFF

SEQ ID NO: 432177 - protein, 19 aa, Homo sapiens
  CDR3 for alpha chain variable domain of TCR clone 216089 (TRAV1-1, TRAJ27)
CAGSEMTRSSLEKGHDFIF

SEQ ID NO: 432178 - protein, 14 aa, Homo sapiens
  CDR3 for beta chain variable domain of TCR clone 216089 (TRBV11-3, TRBJ1-6)
CASSFSGGDSPLYF

SEQ ID NO: 432179 - protein, 14 aa, Homo sapiens
  CDR3 for alpha chain variable domain of TCR clone 216090 (TRAV26-1, TRAJ38)
CIADNAGNNRKLIW

SEQ ID NO: 432180 - protein, 13 aa, Homo sapiens
  CDR3 for beta chain variable domain of TCR clone 216090 (TRBV7-9, TRBJ1-2)
CASSLKQNYAYTF

SEQ ID NO: 432181 - protein, 14 aa, Homo sapiens
  CDR3 for alpha chain variable domain of TCR clone 216091 (TRAV35, TRAJ10)
CAGILTGGGNKLTF

SEQ ID NO: 432182 - protein, 13 aa, Homo sapiens
  CDR3 for beta chain variable domain of TCR clone 216091 (TRBV11-2, TRBJ1-6)
CASSLAGTSPLHF

SEQ ID NO: 432183 - protein, 13 aa, Homo sapiens
  CDR3 for alpha chain variable domain of TCR clone 216092 (TRAV36/DV7, TRAJ53)
CALSGGSNYKLTF

SEQ ID NO: 432184 - protein, 13 aa, Homo sapiens
  CDR3 for beta chain variable domain of TCR clone 216092 (TRBV28, TRBJ2-4)
CASSQSSKNIQYV

SEQ ID NO: 432185 - protein, 12 aa, Homo sapiens
  CDR3 for alpha chain variable domain of TCR clone 216093 (TRAV2, TRAJ33)
CAVLGSNYQLIW

SEQ ID NO: 432186 - protein, 16 aa, Homo sapiens
  CDR3 for beta chain variable domain of TCR clone 216093 (TRBV20-1, TRBJ1-4)
CSAPGQGLLTNEKLFF

SEQ ID NO: 432187 - protein, 14 aa, Homo sapiens
  CDR3 for alpha chain variable domain of TCR clone 216094 (TRAV29/DV5, TRAJ36)
CAARRKTGANNLFF

SEQ ID NO: 432188 - protein, 14 aa, Homo sapiens
  CDR3 for beta chain variable domain of TCR clone 216094 (TRBV7-2, TRBJ2-7)
CASSLRWEVNEQYF

SEQ ID NO: 432189 - protein, 11 aa, Homo sapiens
  CDR3 for alpha chain variable domain of TCR clone 216095 (TRAV12-1, TRAJ21)
CVVNNFNKFYF

SEQ ID NO: 432190 - protein, 11 aa, Homo sapiens
  CDR3 for beta chain variable domain of TCR clone 216095 (TRBV10-3, TRBJ2-7)
CAISEGLEQYF

SEQ ID NO: 432191 - protein, 13 aa, Homo sapiens
  CDR3 for alpha chain variable domain of TCR clone 216096 (TRAV26-1, TRAJ34)
CIVRPWITVKLIF

SEQ ID NO: 432192 - protein, 14 aa, Homo sapiens
  CDR3 for beta chain variable domain of TCR clone 216096 (TRBV12-4, TRBJ1-4)
CASSRQGANEKLFF

SEQ ID NO: 432193 - protein, 17 aa, Homo sapiens
  CDR3 for alpha chain variable domain of TCR clone 216097 (TRAV3, TRAJ6)
CAVRDGPRAGGSYIPTI

SEQ ID NO: 432194 - protein, 14 aa, Homo sapiens
  CDR3 for beta chain variable domain of TCR clone 216097 (TRBV12-5, TRBJ2-5)
CASGSRTHQETQYF

SEQ ID NO: 432195 - protein, 13 aa, Homo sapiens
  CDR3 for alpha chain variable domain of TCR clone 216098 (TRAV36/DV7, TRAJ49)
CAVEANTGNQFYF

SEQ ID NO: 432196 - protein, 16 aa, Homo sapiens
  CDR3 for beta chain variable domain of TCR clone 216098 (TRBV7-2, TRBJ2-3)
CASSLVGDASTDTQYF

SEQ ID NO: 432197 - protein, 19 aa, Homo sapiens
  CDR3 for alpha chain variable domain of TCR clone 216099 (TRAV1-2, TRAJ18)
CLLPQCCERRGSTLGRLYF

SEQ ID NO: 432198 - protein, 19 aa, Homo sapiens
  CDR3 for beta chain variable domain of TCR clone 216099 (TRBV6-3, TRBJ1-2)
CASSYSKGRTGPPNYGYTF

SEQ ID NO: 432199 - protein, 14 aa, Homo sapiens
  CDR3 for alpha chain variable domain of TCR clone 216100 (TRAV13-1, TRAJ44)
CAAKATGTASKLTF

SEQ ID NO: 432200 - protein, 15 aa, Homo sapiens
  CDR3 for beta chain variable domain of TCR clone 216100 (TRBV4-3, TRBJ1-1)
CASSQELGRGTEAFC

SEQ ID NO: 432201 - protein, 14 aa, Homo sapiens
  CDR3 for alpha chain variable domain of TCR clone 216101 (TRAV17, TRAJ16)
CATADFSDGKKLLF

SEQ ID NO: 432202 - protein, 12 aa, Homo sapiens
  CDR3 for beta chain variable domain of TCR clone 216101 (TRBV24-1, TRBJ1-1)
CATLYPDTEAFF

SEQ ID NO: 432203 - protein, 11 aa, Homo sapiens
  CDR3 for alpha chain variable domain of TCR clone 216102 (TRAV4, TRAJ28)
CLVGDNRAETL

SEQ ID NO: 432204 - protein, 15 aa, Homo sapiens
  CDR3 for beta chain variable domain of TCR clone 216102 (TRBV7-3, TRBJ2-1)
CASSPTGGGEVEQFF

SEQ ID NO: 432205 - protein, 13 aa, Homo sapiens
  CDR3 for alpha chain variable domain of TCR clone 216103 (TRAV3, TRAJ20)
CAVRDWAAGKLSF

SEQ ID NO: 432206 - protein, 13 aa, Homo sapiens
  CDR3 for beta chain variable domain of TCR clone 216103 (TRBV7-9, TRBJ1-2)
CASSLKQNYGYTF

SEQ ID NO: 432207 - protein, 13 aa, Homo sapiens
  CDR3 for alpha chain variable domain of TCR clone 216104 (TRAV21, TRAJ27)
CAARPGTAGKSTF

SEQ ID NO: 432208 - protein, 15 aa, Homo sapiens
  CDR3 for beta chain variable domain of TCR clone 216104 (TRBV11-3, TRBJ2-7)
CASIPGPASSYEQYF

SEQ ID NO: 432209 - protein, 12 aa, Homo sapiens
  CDR3 for alpha chain variable domain of TCR clone 216105 (TRAV13-2, TRAJ31)
CAESYNNARLMF

SEQ ID NO: 432210 - protein, 13 aa, Homo sapiens
  CDR3 for beta chain variable domain of TCR clone 216105 (TRBV24-1, TRBJ1-3)
RATMADSGNTIYF

SEQ ID NO: 432211 - protein, 12 aa, Homo sapiens
  CDR3 for alpha chain variable domain of TCR clone 216106 (TRAV8-6, TRAJ43)
CAVSNNNNDMRF

SEQ ID NO: 432212 - protein, 15 aa, Homo sapiens
  CDR3 for beta chain variable domain of TCR clone 216106 (TRBV7-3, TRBJ2-6)
CASSLGGSGANILTF

SEQ ID NO: 432213 - protein, 14 aa, Homo sapiens
  CDR3 for alpha chain variable domain of TCR clone 216107 (TRAV12-3, TRAJ42)
CAMNYGGSQGNLIF

SEQ ID NO: 432214 - protein, 15 aa, Homo sapiens
  CDR3 for beta chain variable domain of TCR clone 216107 (TRBV5-6, TRBJ1-5)
CASSYGKLWYQPQHF

SEQ ID NO: 432215 - protein, 15 aa, Homo sapiens
  CDR3 for alpha chain variable domain of TCR clone 216108 (TRAV8-3, TRAJ40)
CASPSLGSGTYKYIF

SEQ ID NO: 432216 - protein, 16 aa, Homo sapiens
  CDR3 for beta chain variable domain of TCR clone 216108 (TRBV7-3, TRBJ2-3)
CASSLSGYRPEDTQYF

SEQ ID NO: 432217 - protein, 15 aa, Homo sapiens
  CDR3 for alpha chain variable domain of TCR clone 216109 (TRAV38-1, TRAJ57)
CAFMDSQGGSEKLVF

SEQ ID NO: 432218 - protein, 15 aa, Homo sapiens
  CDR3 for beta chain variable domain of TCR clone 216109 (TRBV4-1, TRBJ2-7)
CASSQQGQGFDEQYF

SEQ ID NO: 432219 - protein, 11 aa, Homo sapiens
  CDR3 for alpha chain variable domain of TCR clone 216110 (TRAV1-1, TRAJ23)
CAVRQGGKLLF

SEQ ID NO: 432220 - protein, 12 aa, Homo sapiens
  CDR3 for beta chain variable domain of TCR clone 216110 (TRBV19, TRBJ1-5)
CASSIAQQPQHF

SEQ ID NO: 432221 - protein, 13 aa, Homo sapiens
  CDR3 for alpha chain variable domain of TCR clone 216111 (TRAV12-2, TRAJ20)
CAVNRFDDYKLSF

SEQ ID NO: 432222 - protein, 14 aa, Homo sapiens
  CDR3 for beta chain variable domain of TCR clone 216111 (TRBV7-9, TRBJ2-1)
CASSPRDSLYEQFF

SEQ ID NO: 432223 - protein, 20 aa, Homo sapiens
  CDR3 for alpha chain variable domain of TCR clone 216112 (TRAV8-3, TRAJ28)
CWVLLCCGCNSGAGSYQLTF

SEQ ID NO: 432224 - protein, 14 aa, Homo sapiens
  CDR3 for beta chain variable domain of TCR clone 216112 (TRBV7-2, TRBJ2-1)
CASSLGVGYNEQFF

SEQ ID NO: 432225 - protein, 12 aa, Homo sapiens
  CDR3 for alpha chain variable domain of TCR clone 216113 (TRAV38-1, TRAJ28)
CGSGAGSYQLTF

SEQ ID NO: 432226 - protein, 15 aa, Homo sapiens
  CDR3 for beta chain variable domain of TCR clone 216113 (TRBV7-9, TRBJ1-5)
CASSQGHQPNQPQHF

SEQ ID NO: 432227 - protein, 18 aa, Homo sapiens
  CDR3 for alpha chain variable domain of TCR clone 216114 (TRAV21, TRAJ52)
CAVRPSPACGTSYGKLTF

SEQ ID NO: 432228 - protein, 14 aa, Homo sapiens
  CDR3 for beta chain variable domain of TCR clone 216114 (TRBV4-1, TRBJ2-2)
CASSQAVNTGELFF

SEQ ID NO: 432229 - protein, 14 aa, Homo sapiens
  CDR3 for alpha chain variable domain of TCR clone 216115 (TRAV2, TRAJ37)
CAVDFTSNTGKLIF

SEQ ID NO: 432230 - protein, 15 aa, Homo sapiens
  CDR3 for beta chain variable domain of TCR clone 216115 (TRBV20-1, TRBJ1-1)
GSASRGVTGNTESFF

SEQ ID NO: 432231 - protein, 17 aa, Homo sapiens
  CDR3 for alpha chain variable domain of TCR clone 216116 (TRAV3, TRAJ6)
CAVRDGPRAGGSYIPTF

SEQ ID NO: 432232 - protein, 15 aa, Homo sapiens
  CDR3 for beta chain variable domain of TCR clone 216116 (TRBV28, TRBJ2-7)
CASSPTGTGSYEQYF

SEQ ID NO: 432233 - protein, 14 aa, Homo sapiens
  CDR3 for alpha chain variable domain of TCR clone 216117 (TRAV1-2, TRAJ16)
CAVNRFSDGRKLLS

SEQ ID NO: 432234 - protein, 18 aa, Homo sapiens
  CDR3 for beta chain variable domain of TCR clone 216117 (TRBV20-1, TRBJ2-6)
CSAETTPTHGSGANVLTF

SEQ ID NO: 432235 - protein, 13 aa, Homo sapiens
  CDR3 for alpha chain variable domain of TCR clone 216118 (TRAV3, TRAJ20)
CCEAFCNDYKLSF

SEQ ID NO: 432236 - protein, 15 aa, Homo sapiens
  CDR3 for beta chain variable domain of TCR clone 216118 (TRBV6-5, TRBJ2-1)
CASSYDPGAGNEQFF

SEQ ID NO: 432237 - protein, 11 aa, Homo sapiens
  CDR3 for alpha chain variable domain of TCR clone 216119 (TRAV26-1, TRAJ37)
CIVRVGRKLIF

SEQ ID NO: 432238 - protein, 16 aa, Homo sapiens
  CDR3 for beta chain variable domain of TCR clone 216119 (TRBV5-1, TRBJ2-1)
CASSLTLAGGRNEQFF

SEQ ID NO: 432239 - protein, 16 aa, Homo sapiens
  CDR3 for alpha chain variable domain of TCR clone 216120 (TRAV30, TRAJ24)
CGTEIVDAESWGKFQF

SEQ ID NO: 432240 - protein, 15 aa, Homo sapiens
  CDR3 for beta chain variable domain of TCR clone 216120 (TRBV20-1, TRBJ2-4)
CSARDLTGGPNIQYF

SEQ ID NO: 432241 - protein, 16 aa, Homo sapiens
  CDR3 for alpha chain variable domain of TCR clone 216121 (TRAV12-2, TRAJ45)
CAVIFLSGGGADGLTF

SEQ ID NO: 432242 - protein, 19 aa, Homo sapiens
  CDR3 for beta chain variable domain of TCR clone 216121 (TRBV28, TRBJ2-4)
CASSFQPGGPAHSKNIQYV

SEQ ID NO: 432243 - protein, 13 aa, Homo sapiens
  CDR3 for alpha chain variable domain of TCR clone 216122 (TRAV21, TRAJ27)
CAARPGNAGKSTF

SEQ ID NO: 432244 - protein, 11 aa, Homo sapiens
  CDR3 for beta chain variable domain of TCR clone 216122 (TRBV11-2, TRBJ2-2)
CASRLPGELFF

SEQ ID NO: 432245 - protein, 11 aa, Homo sapiens
  CDR3 for alpha chain variable domain of TCR clone 216123 (TRAV12-2, TRAJ36)
CAVDGANNLFF

SEQ ID NO: 432246 - protein, 13 aa, Homo sapiens
  CDR3 for beta chain variable domain of TCR clone 216123 (TRBV7-2, TRBJ2-7)
CASSSPGGSEQYF

SEQ ID NO: 432247 - protein, 14 aa, Homo sapiens
  CDR3 for alpha chain variable domain of TCR clone 216124 (TRAV1-2, TRAJ16)
CAVNRLSDGQKLLF

SEQ ID NO: 432248 - protein, 16 aa, Homo sapiens
  CDR3 for beta chain variable domain of TCR clone 216124 (TRBV19, TRBJ2-1)
CASSKAGPSSYNEQFF

SEQ ID NO: 432249 - protein, 13 aa, Homo sapiens
  CDR3 for alpha chain variable domain of TCR clone 216125 (TRAV8-3, TRAJ44)
CAVVPGTASKLTF

SEQ ID NO: 432250 - protein, 16 aa, Homo sapiens
  CDR3 for beta chain variable domain of TCR clone 216125 (TRBV7-2, TRBJ2-5)
CASSPFPTGGEETQYF

SEQ ID NO: 432251 - protein, 14 aa, Homo sapiens
  CDR3 for alpha chain variable domain of TCR clone 216126 (TRAV26-1, TRAJ38)
CIADNAANNRKLIW

SEQ ID NO: 432252 - protein, 15 aa, Homo sapiens
  CDR3 for beta chain variable domain of TCR clone 216126 (TRBV20-1, TRBJ1-1)
CSARGGGTLKLSLDK

SEQ ID NO: 432253 - protein, 14 aa, Homo sapiens
  CDR3 for alpha chain variable domain of TCR clone 216127 (TRAV1-2, TRAJ16)
CAVNRCSDGQKLLF

SEQ ID NO: 432254 - protein, 15 aa, Homo sapiens
  CDR3 for beta chain variable domain of TCR clone 216127 (TRBV7-9, TRBJ1-6)
CASSSPGRGKSPLHF

SEQ ID NO: 432255 - protein, 15 aa, Homo sapiens
  CDR3 for alpha chain variable domain of TCR clone 216128 (TRAV23/DV6, TRAJ18)
CAARYRGSTLGRLYF

SEQ ID NO: 432256 - protein, 12 aa, Homo sapiens
  CDR3 for beta chain variable domain of TCR clone 216128 (TRBV7-2, TRBJ2-7)
CATRTDAYEQYF

SEQ ID NO: 432257 - protein, 19 aa, Homo sapiens
  CDR3 for alpha chain variable domain of TCR clone 216129 (TRAV29/DV5, TRAJ49)
CSVLLCSKLTVDTGNQFYF

SEQ ID NO: 432258 - protein, 14 aa, Homo sapiens
  CDR3 for beta chain variable domain of TCR clone 216129 (TRBV2, TRBJ2-5)
CASKRDGTTETQYF

SEQ ID NO: 432259 - protein, 14 aa, Homo sapiens
  CDR3 for alpha chain variable domain of TCR clone 216130 (TRAV13-2, TRAJ9)
CAENLETGGFKTIL

SEQ ID NO: 432260 - protein, 16 aa, Homo sapiens
  CDR3 for beta chain variable domain of TCR clone 216130 (TRBV28, TRBJ2-5)
CASSFSPAGGWETQYF

SEQ ID NO: 432261 - protein, 14 aa, Homo sapiens
  CDR3 for alpha chain variable domain of TCR clone 216131 (TRAV16, TRAJ39)
CALSKNNAGNMRTL

SEQ ID NO: 432262 - protein, 16 aa, Homo sapiens
  CDR3 for beta chain variable domain of TCR clone 216131 (TRBV6-6, TRBJ2-1)
CASSYSFSGSYNEQFF

SEQ ID NO: 432263 - protein, 13 aa, Homo sapiens
  CDR3 for alpha chain variable domain of TCR clone 216132 (TRAV21, TRAJ15)
CAVRNQAGTALSF

SEQ ID NO: 432264 - protein, 16 aa, Homo sapiens
  CDR3 for beta chain variable domain of TCR clone 216132 (TRBV20-1, TRBJ2-5)
CSPGGTSGGYMETQYF

SEQ ID NO: 432265 - protein, 13 aa, Homo sapiens
  CDR3 for alpha chain variable domain of TCR clone 216133 (TRAV21, TRAJ57)
CAVTQGGSEKLVF

SEQ ID NO: 432266 - protein, 12 aa, Homo sapiens
  CDR3 for beta chain variable domain of TCR clone 216133 (TRBV7-9, TRBJ2-7)
CASSLEGYEQYL

SEQ ID NO: 432267 - protein, 14 aa, Homo sapiens
  CDR3 for alpha chain variable domain of TCR clone 216134 (TRAV1-2, TRAJ16)
CTVNRFSDGQKLLF

SEQ ID NO: 432268 - protein, 14 aa, Homo sapiens
  CDR3 for beta chain variable domain of TCR clone 216134 (TRBV5-1, TRBJ1-1)
CASSLTGGETEAFF

SEQ ID NO: 432269 - protein, 16 aa, Homo sapiens
  CDR3 for alpha chain variable domain of TCR clone 216135 (TRAV12-1, TRAJ22)
CVANTISSGSARQLTF

SEQ ID NO: 432270 - protein, 13 aa, Homo sapiens
  CDR3 for beta chain variable domain of TCR clone 216135 (TRBV19, TRBJ2-1)
CASNGGVFSEQFF

SEQ ID NO: 432271 - protein, 13 aa, Homo sapiens
  CDR3 for alpha chain variable domain of TCR clone 216136 (TRAV12-2, TRAJ37)
CAVSSGNTGKLLF

SEQ ID NO: 432272 - protein, 17 aa, Homo sapiens
  CDR3 for beta chain variable domain of TCR clone 216136 (TRBV5-1, TRBJ2-5)
CASSLLGLAANQETQYF

SEQ ID NO: 432273 - protein, 13 aa, Homo sapiens
  CDR3 for alpha chain variable domain of TCR clone 216137 (TRAV35, TRAJ37)
CAGSSGNTGKLIF

SEQ ID NO: 432274 - protein, 16 aa, Homo sapiens
  CDR3 for beta chain variable domain of TCR clone 216137 (TRBV10-3, TRBJ2-1)
CAISVTSGNSYNEQFF

SEQ ID NO: 432275 - protein, 15 aa, Homo sapiens
  CDR3 for alpha chain variable domain of TCR clone 216138 (TRAV26-1, TRAJ28)
CIVRVAGAGSYQLTF

SEQ ID NO: 432276 - protein, 19 aa, Homo sapiens
  CDR3 for beta chain variable domain of TCR clone 216138 (TRBV7-3, TRBJ2-7)
CTSSLTGVAGGWPSYEQYF

SEQ ID NO: 432277 - protein, 13 aa, Homo sapiens
  CDR3 for alpha chain variable domain of TCR clone 216139 (TRAV29/DV5, TRAJ31)
CAASRNNNARLMF

SEQ ID NO: 432278 - protein, 13 aa, Homo sapiens
  CDR3 for beta chain variable domain of TCR clone 216139 (TRBV15, TRBJ1-6)
CATSGGLNSPLHF

SEQ ID NO: 432279 - protein, 17 aa, Homo sapiens
  CDR3 for alpha chain variable domain of TCR clone 216140 (TRAV8-3, TRAJ34)
CAIPGKLIFGTGTRLQV

SEQ ID NO: 432280 - protein, 15 aa, Homo sapiens
  CDR3 for beta chain variable domain of TCR clone 216140 (TRBV5-7, TRBJ2-1)
CASSSRLAGDNEQFF

SEQ ID NO: 432281 - protein, 15 aa, Homo sapiens
  CDR3 for alpha chain variable domain of TCR clone 216141 (TRAV12-1, TRAJ44)
CVVSVNTGTASKLTF

SEQ ID NO: 432282 - protein, 17 aa, Homo sapiens
  CDR3 for beta chain variable domain of TCR clone 216141 (TRBV7-8, TRBJ2-6)
CASSAGTGGAGANVLTF

SEQ ID NO: 432283 - protein, 14 aa, Homo sapiens
  CDR3 for alpha chain variable domain of TCR clone 216142 (TRAV27, TRAJ12)
CAGARMDSSYKLIF

SEQ ID NO: 432284 - protein, 18 aa, Homo sapiens
  CDR3 for beta chain variable domain of TCR clone 216142 (TRBV10-3, TRBJ2-7)
CAISESGRPSGGRVEQYL

SEQ ID NO: 432285 - protein, 13 aa, Homo sapiens
  CDR3 for alpha chain variable domain of TCR clone 216143 (TRAV12-3, TRAJ13)
CAMGTGGYQKVTF

SEQ ID NO: 432286 - protein, 14 aa, Homo sapiens
  CDR3 for beta chain variable domain of TCR clone 216143 (TRBV2, TRBJ2-5)
CASSEVLAQETQYF

SEQ ID NO: 432287 - protein, 11 aa, Homo sapiens
  CDR3 for alpha chain variable domain of TCR clone 216144 (TRAV2, TRAJ13)
FASGGYQKVTF

SEQ ID NO: 432288 - protein, 14 aa, Homo sapiens
  CDR3 for beta chain variable domain of TCR clone 216144 (TRBV7-2, TRBJ2-7)
CASSPKTSFYEQYF

SEQ ID NO: 432289 - protein, 15 aa, Homo sapiens
  CDR3 for alpha chain variable domain of TCR clone 216145 (TRAV21, TRAJ24)
CAARSSTDSWGKLQF

SEQ ID NO: 432290 - protein, 13 aa, Homo sapiens
  CDR3 for beta chain variable domain of TCR clone 216145 (TRBV11-2, TRBJ2-5)
CASSSRGEETQYF

SEQ ID NO: 432291 - protein, 14 aa, Homo sapiens
  CDR3 for alpha chain variable domain of TCR clone 216146 (TRAV13-1, TRAJ36)
CAAIYQTGANILFF

SEQ ID NO: 432292 - protein, 15 aa, Homo sapiens
  CDR3 for beta chain variable domain of TCR clone 216146 (TRBV5-1, TRBJ1-1)
CASSPLGGSNTEAVF

SEQ ID NO: 432293 - protein, 11 aa, Homo sapiens
  CDR3 for alpha chain variable domain of TCR clone 216147 (TRAV12-1, TRAJ6)
HASGGSYIPTF

SEQ ID NO: 432294 - protein, 14 aa, Homo sapiens
  CDR3 for beta chain variable domain of TCR clone 216147 (TRBV6-1, TRBJ1-3)
CASVQGGGGNTIYF

SEQ ID NO: 432295 - protein, 18 aa, Homo sapiens
  CDR3 for alpha chain variable domain of TCR clone 216148 (TRAV29/DV5, TRAJ52)
CAAGFRGAGGTTYGKLPF

SEQ ID NO: 432296 - protein, 15 aa, Homo sapiens
  CDR3 for beta chain variable domain of TCR clone 216148 (TRBV20-1, TRBJ1-5)
CSATSDRGLGQPQHF

SEQ ID NO: 432297 - protein, 16 aa, Homo sapiens
  CDR3 for alpha chain variable domain of TCR clone 216149 (TRAV13-2, TRAJ32)
CAENMNYGGATTKLIF

SEQ ID NO: 432298 - protein, 14 aa, Homo sapiens
  CDR3 for beta chain variable domain of TCR clone 216149 (TRBV15, TRBJ2-5)
CATSSTGYQETQYF

SEQ ID NO: 432299 - protein, 17 aa, Homo sapiens
  CDR3 for alpha chain variable domain of TCR clone 216150 (TRAV9-2, TRAJ45)
CALSGYYSGGGADGLTF

SEQ ID NO: 432300 - protein, 12 aa, Homo sapiens
  CDR3 for beta chain variable domain of TCR clone 216150 (TRBV19, TRBJ2-1)
CASSMQDTEQFF

SEQ ID NO: 432301 - protein, 14 aa, Homo sapiens
  CDR3 for alpha chain variable domain of TCR clone 216151 (TRAV9-2, TRAJ9)
CALSLIGGGFKTIF

SEQ ID NO: 432302 - protein, 18 aa, Homo sapiens
  CDR3 for beta chain variable domain of TCR clone 216151 (TRBV28, TRBJ2-6)
CASSLAGRAVAGANVLTF

SEQ ID NO: 432303 - protein, 17 aa, Homo sapiens
  CDR3 for alpha chain variable domain of TCR clone 216152 (TRAV8-1, TRAJ43)
CAVTNDMRFGAGTRLTV

SEQ ID NO: 432304 - protein, 14 aa, Homo sapiens
  CDR3 for beta chain variable domain of TCR clone 216152 (TRBV7-6, TRBJ2-7)
CASSLFQDSYEQYF

SEQ ID NO: 432305 - protein, 16 aa, Homo sapiens
  CDR3 for alpha chain variable domain of TCR clone 216153 (TRAV8-3, TRAJ13)
CAVGAYPSGGYQKVTF

SEQ ID NO: 432306 - protein, 14 aa, Homo sapiens
  CDR3 for beta chain variable domain of TCR clone 216153 (TRBV11-1, TRBJ2-7)
CASSFRQGSYEQYF

SEQ ID NO: 432307 - protein, 11 aa, Homo sapiens
  CDR3 for alpha chain variable domain of TCR clone 216154 (TRAV21, TRAJ39)
LLVNAGNMPTF

SEQ ID NO: 432308 - protein, 18 aa, Homo sapiens
  CDR3 for beta chain variable domain of TCR clone 216154 (TRBV7-2, TRBJ2-7)
CASSLSGRGLAGGYEQYF

SEQ ID NO: 432309 - protein, 15 aa, Homo sapiens
  CDR3 for alpha chain variable domain of TCR clone 216155 (TRAV12-3, TRAJ52)
CNGGAGGTSYGKLTF

SEQ ID NO: 432310 - protein, 13 aa, Homo sapiens
  CDR3 for beta chain variable domain of TCR clone 216155 (TRBV20-1, TRBJ2-5)
CSARGDYQEAQYF

SEQ ID NO: 432311 - protein, 13 aa, Homo sapiens
  CDR3 for alpha chain variable domain of TCR clone 216156 (TRAV30, TRAJ6)
CGTEAGGSYIPTF

SEQ ID NO: 432312 - protein, 20 aa, Homo sapiens
  CDR3 for beta chain variable domain of TCR clone 216156 (TRBV4-3, TRBJ2-3)
GPVSLRQQPWTRGEGDTQYF

SEQ ID NO: 432313 - protein, 13 aa, Homo sapiens
  CDR3 for alpha chain variable domain of TCR clone 216157 (TRAV1-2, TRAJ36)
CAVDQTGANNLFF

SEQ ID NO: 432314 - protein, 14 aa, Homo sapiens
  CDR3 for beta chain variable domain of TCR clone 216157 (TRBV20-1, TRBJ2-5)
CSSREMTKQETQYF

SEQ ID NO: 432315 - protein, 14 aa, Homo sapiens
  CDR3 for alpha chain variable domain of TCR clone 216158 (TRAV9-2, TRAJ39)
CALYIYNAGNMLTF

SEQ ID NO: 432316 - protein, 17 aa, Homo sapiens
  CDR3 for beta chain variable domain of TCR clone 216158 (TRBV20-1, TRBJ2-2)
CSASGSGQGGLTGELFY

SEQ ID NO: 432317 - protein, 13 aa, Homo sapiens
  CDR3 for alpha chain variable domain of TCR clone 216159 (TRAV26-1, TRAJ29)
CIVRRSGNTPLVF

SEQ ID NO: 432318 - protein, 15 aa, Homo sapiens
  CDR3 for beta chain variable domain of TCR clone 216159 (TRBV20-1, TRBJ2-7)
CSARVPAAYFYEQYF

SEQ ID NO: 432319 - protein, 17 aa, Homo sapiens
  CDR3 for alpha chain variable domain of TCR clone 216160 (TRAV12-3, TRAJ6)
CAMSARGGAGGSYIPTF

SEQ ID NO: 432320 - protein, 12 aa, Homo sapiens
  CDR3 for beta chain variable domain of TCR clone 216160 (TRBV12-4, TRBJ2-3)
CASSTLPVTQYF

SEQ ID NO: 432321 - protein, 15 aa, Homo sapiens
  CDR3 for alpha chain variable domain of TCR clone 216161 (TRAV12-2, TRAJ43)
CAFDMRFGAGTRLTV

SEQ ID NO: 432322 - protein, 18 aa, Homo sapiens
  CDR3 for beta chain variable domain of TCR clone 216161 (TRBV20-1, TRBJ2-3)
CSASGLAGGPGTTDTQYY

SEQ ID NO: 432323 - protein, 12 aa, Homo sapiens
  CDR3 for alpha chain variable domain of TCR clone 216162 (TRAV13-1, TRAJ53)
AASGGINYKLTF

SEQ ID NO: 432324 - protein, 15 aa, Homo sapiens
  CDR3 for beta chain variable domain of TCR clone 216162 (TRBV5-1, TRBJ2-1)
CASSPPRAPYNEQFF

SEQ ID NO: 432325 - protein, 11 aa, Homo sapiens
  CDR3 for alpha chain variable domain of TCR clone 216163 (TRAV12-1, TRAJ15)
CVVNAGTALIF

SEQ ID NO: 432326 - protein, 16 aa, Homo sapiens
  CDR3 for beta chain variable domain of TCR clone 216163 (TRBV28, TRBJ2-1)
CASSSRVRDSYNEQFF

SEQ ID NO: 432327 - protein, 13 aa, Homo sapiens
  CDR3 for alpha chain variable domain of TCR clone 216164 (TRAV12-3, TRAJ13)
CAMSSGGYQKVTF

SEQ ID NO: 432328 - protein, 16 aa, Homo sapiens
  CDR3 for beta chain variable domain of TCR clone 216164 (TRBV4-1, TRBJ2-7)
CASSRGDTLNSYEQYF

SEQ ID NO: 432329 - protein, 14 aa, Homo sapiens
  CDR3 for alpha chain variable domain of TCR clone 216165 (TRAV26-1, TRAJ31)
CIALPPNNNARLMF

SEQ ID NO: 432330 - protein, 16 aa, Homo sapiens
  CDR3 for beta chain variable domain of TCR clone 216165 (TRBV10-2, TRBJ2-7)
CASSGSPGSSGSEQYF

SEQ ID NO: 432331 - protein, 12 aa, Homo sapiens
  CDR3 for alpha chain variable domain of TCR clone 216166 (TRAV8-1, TRAJ31)
CAVINNNARLMF

SEQ ID NO: 432332 - protein, 13 aa, Homo sapiens
  CDR3 for beta chain variable domain of TCR clone 216166 (TRBV2, TRBJ1-1)
CASWWTVNTEAFF

SEQ ID NO: 432333 - protein, 14 aa, Homo sapiens
  CDR3 for alpha chain variable domain of TCR clone 216167 (TRAV26-1, TRAJ38)
CIADNAGNNRKLIW

SEQ ID NO: 432334 - protein, 13 aa, Homo sapiens
  CDR3 for beta chain variable domain of TCR clone 216167 (TRBV7-9, TRBJ1-2)
CASSLKRNYGYTF

SEQ ID NO: 432335 - protein, 12 aa, Homo sapiens
  CDR3 for alpha chain variable domain of TCR clone 216168 (TRAV20, TRAJ39)
CAVGNAGNMLTF

SEQ ID NO: 432336 - protein, 17 aa, Homo sapiens
  CDR3 for beta chain variable domain of TCR clone 216168 (TRBV7-9, TRBJ1-5)
CASSASQGGYSNQPQHF

SEQ ID NO: 432337 - protein, 14 aa, Homo sapiens
  CDR3 for alpha chain variable domain of TCR clone 216169 (TRAV8-4, TRAJ9)
CAVRINTGGFKTIF

SEQ ID NO: 432338 - protein, 14 aa, Homo sapiens
  CDR3 for beta chain variable domain of TCR clone 216169 (TRBV7-2, TRBJ2-5)
CASSPRGSSETQYF

SEQ ID NO: 432339 - protein, 15 aa, Homo sapiens
  CDR3 for alpha chain variable domain of TCR clone 216170 (TRAV17, TRAJ57)
CATGPSQGGSEKLVF

SEQ ID NO: 432340 - protein, 15 aa, Homo sapiens
  CDR3 for beta chain variable domain of TCR clone 216170 (TRBV6-3, TRBJ2-7)
CASSSPGSVVYEQYF

SEQ ID NO: 432341 - protein, 16 aa, Homo sapiens
  CDR3 for alpha chain variable domain of TCR clone 216171 (TRAV3, TRAJ37)
CTVRPHGSGNTGKLIF

SEQ ID NO: 432342 - protein, 16 aa, Homo sapiens
  CDR3 for beta chain variable domain of TCR clone 216171 (TRBV9, TRBJ1-2)
CASSVEEKVSPYGYTF

SEQ ID NO: 432343 - protein, 14 aa, Homo sapiens
  CDR3 for alpha chain variable domain of TCR clone 216172 (TRAV2, TRAJ37)
CAVEDQGNKGKLIF

SEQ ID NO: 432344 - protein, 14 aa, Homo sapiens
  CDR3 for beta chain variable domain of TCR clone 216172 (TRBV18, TRBJ2-1)
CASSPQGRFNEQFF

SEQ ID NO: 432345 - protein, 15 aa, Homo sapiens
  CDR3 for alpha chain variable domain of TCR clone 216173 (TRAV17, TRAJ54)
CATNRSEQGAQKLVF

SEQ ID NO: 432346 - protein, 16 aa, Homo sapiens
  CDR3 for beta chain variable domain of TCR clone 216173 (TRBV12-4, TRBJ2-3)
CASSLRLAETTDTQYF

SEQ ID NO: 432347 - protein, 15 aa, Homo sapiens
  CDR3 for alpha chain variable domain of TCR clone 216174 (TRAV8-4, TRAJ40)
CAVSDDTSGTYKYIF

SEQ ID NO: 432348 - protein, 13 aa, Homo sapiens
  CDR3 for beta chain variable domain of TCR clone 216174 (TRBV7-9, TRBJ2-5)
CASLPSGRETQYF

SEQ ID NO: 432349 - protein, 14 aa, Homo sapiens
  CDR3 for alpha chain variable domain of TCR clone 216175 (TRAV3, TRAJ9)
CAVRLNTGGFKTIF

SEQ ID NO: 432350 - protein, 15 aa, Homo sapiens
  CDR3 for beta chain variable domain of TCR clone 216175 (TRBV7-2, TRBJ2-1)
CASILARGRVNEQFF

SEQ ID NO: 432351 - protein, 15 aa, Homo sapiens
  CDR3 for alpha chain variable domain of TCR clone 216176 (TRAV27, TRAJ50)
CAGVGRGTSYDKVIR

SEQ ID NO: 432352 - protein, 14 aa, Homo sapiens
  CDR3 for beta chain variable domain of TCR clone 216176 (TRBV7-2, TRBJ1-1)
CASSFYDLNTEAFF

SEQ ID NO: 432353 - protein, 11 aa, Homo sapiens
  CDR3 for alpha chain variable domain of TCR clone 216177 (TRAV39, TRAJ49)
CAVDISTQFYF

SEQ ID NO: 432354 - protein, 17 aa, Homo sapiens
  CDR3 for beta chain variable domain of TCR clone 216177 (TRBV7-8, TRBJ2-6)
CASSAGTGGAGANVLSF

SEQ ID NO: 432355 - protein, 14 aa, Homo sapiens
  CDR3 for alpha chain variable domain of TCR clone 216178 (TRAV21, TRAJ58)
CAVGEEISGSRLTF

SEQ ID NO: 432356 - protein, 14 aa, Homo sapiens
  CDR3 for beta chain variable domain of TCR clone 216178 (TRBV7-2, TRBJ1-1)
CASSFLTGTTEAFF

SEQ ID NO: 432357 - protein, 14 aa, Homo sapiens
  CDR3 for alpha chain variable domain of TCR clone 216179 (TRAV13-1, TRAJ20)
CAARPGSNDYKLSF

SEQ ID NO: 432358 - protein, 13 aa, Homo sapiens
  CDR3 for beta chain variable domain of TCR clone 216179 (TRBV4-1, TRBJ2-2)
CASSQENTGELFF

SEQ ID NO: 432359 - protein, 13 aa, Homo sapiens
  CDR3 for alpha chain variable domain of TCR clone 216180 (TRAV21, TRAJ27)
CAARPGNACKSTF

SEQ ID NO: 432360 - protein, 12 aa, Homo sapiens
  CDR3 for beta chain variable domain of TCR clone 216180 (TRBV6-3, TRBJ2-7)
CASSLTPYEQYF

SEQ ID NO: 432361 - protein, 13 aa, Homo sapiens
  CDR3 for alpha chain variable domain of TCR clone 216181 (TRAV3, TRAJ27)
CAVRPLGPGKSTF

SEQ ID NO: 432362 - protein, 13 aa, Homo sapiens
  CDR3 for beta chain variable domain of TCR clone 216181 (TRBV7-9, TRBJ2-3)
CASSPGSTDTRYF

SEQ ID NO: 432363 - protein, 16 aa, Homo sapiens
  CDR3 for alpha chain variable domain of TCR clone 216182 (TRAV30, TRAJ24)
CGTEIVDADSWGKFQF

SEQ ID NO: 432364 - protein, 22 aa, Homo sapiens
  CDR3 for beta chain variable domain of TCR clone 216182 (TRBV7-3, TRBJ2-5)
CASARDRVILRPRDPVLRARHA

SEQ ID NO: 432365 - protein, 13 aa, Homo sapiens
  CDR3 for alpha chain variable domain of TCR clone 216183 (TRAV27, TRAJ6)
CAGGTRGSYIPTF

SEQ ID NO: 432366 - protein, 15 aa, Homo sapiens
  CDR3 for beta chain variable domain of TCR clone 216183 (TRBV11-2, TRBJ1-3)
CASSLSPLVLDTIYF

SEQ ID NO: 432367 - protein, 13 aa, Homo sapiens
  CDR3 for alpha chain variable domain of TCR clone 216184 (TRAV17, TRAJ40)
CATRSPGTYKYIF

SEQ ID NO: 432368 - protein, 19 aa, Homo sapiens
  CDR3 for beta chain variable domain of TCR clone 216184 (TRBV11-2, TRBJ1-4)
CASSGTGTGGRKTVFWQWN

SEQ ID NO: 432369 - protein, 15 aa, Homo sapiens
  CDR3 for alpha chain variable domain of TCR clone 216185 (TRAV26-1, TRAJ40)
CIARVTTSGTYKYIF

SEQ ID NO: 432370 - protein, 12 aa, Homo sapiens
  CDR3 for beta chain variable domain of TCR clone 216185 (TRBV7-9, TRBJ1-4)
CASSTDRENLFF

SEQ ID NO: 432371 - protein, 14 aa, Homo sapiens
  CDR3 for alpha chain variable domain of TCR clone 216186 (TRAV21, TRAJ58)
CAVRRGSSGSRLTF

SEQ ID NO: 432372 - protein, 13 aa, Homo sapiens
  CDR3 for beta chain variable domain of TCR clone 216186 (TRBV7-2, TRBJ1-6)
CASSLKFDSPLHF

SEQ ID NO: 432373 - protein, 14 aa, Homo sapiens
  CDR3 for alpha chain variable domain of TCR clone 216187 (TRAV16, TRAJ54)
CALSLIQGAKKLVF

SEQ ID NO: 432374 - protein, 17 aa, Homo sapiens
  CDR3 for beta chain variable domain of TCR clone 216187 (TRBV11-2, TRBJ2-4)
CASSSGGPGGHRNIQYF

SEQ ID NO: 432375 - protein, 15 aa, Homo sapiens
  CDR3 for alpha chain variable domain of TCR clone 216188 (TRAV3, TRAJ36)
CAVRASQTGANNLFL

SEQ ID NO: 432376 - protein, 13 aa, Homo sapiens
  CDR3 for beta chain variable domain of TCR clone 216188 (TRBV10-3, TRBJ1-2)
CAISERDSYGYTF

SEQ ID NO: 432377 - protein, 14 aa, Homo sapiens
  CDR3 for alpha chain variable domain of TCR clone 216189 (TRAV27, TRAJ22)
CAGLPSGSARQLTF

SEQ ID NO: 432378 - protein, 12 aa, Homo sapiens
  CDR3 for beta chain variable domain of TCR clone 216189 (TRBV19, TRBJ1-5)
CASSIAQQHQHF

SEQ ID NO: 432379 - protein, 13 aa, Homo sapiens
  CDR3 for alpha chain variable domain of TCR clone 216190 (TRAV27, TRAJ41)
CAGEGNSGNALNF

SEQ ID NO: 432380 - protein, 14 aa, Homo sapiens
  CDR3 for beta chain variable domain of TCR clone 216190 (TRBV7-2, TRBJ1-1)
CASSFLTGTTEEFF

SEQ ID NO: 432381 - protein, 11 aa, Homo sapiens
  CDR3 for alpha chain variable domain of TCR clone 216191 (TRAV25, TRAJ5)
CRGGGRRALTF

SEQ ID NO: 432382 - protein, 15 aa, Homo sapiens
  CDR3 for beta chain variable domain of TCR clone 216191 (TRBV19, TRBJ2-4)
CASRGPRRGENMQYF

SEQ ID NO: 432383 - protein, 14 aa, Homo sapiens
  CDR3 for alpha chain variable domain of TCR clone 216192 (TRAV1-2, TRAJ16)
CAVRSASDGQKLLF

SEQ ID NO: 432384 - protein, 14 aa, Homo sapiens
  CDR3 for beta chain variable domain of TCR clone 216192 (TRBV28, TRBJ2-7)
CASSLLRISYEQYF

SEQ ID NO: 432385 - protein, 13 aa, Homo sapiens
  CDR3 for alpha chain variable domain of TCR clone 216193 (TRAV3, TRAJ21)
CGVREPAFNKFYF

SEQ ID NO: 432386 - protein, 13 aa, Homo sapiens
  CDR3 for beta chain variable domain of TCR clone 216193 (TRBV9, TRBJ2-1)
CVSSPSGGNEQFF

SEQ ID NO: 432387 - protein, 10 aa, Homo sapiens
  CDR3 for alpha chain variable domain of TCR clone 216194 (TRAV30, TRAJ32)
CGTEKDIVVL

SEQ ID NO: 432388 - protein, 13 aa, Homo sapiens
  CDR3 for beta chain variable domain of TCR clone 216194 (TRBV10-3, TRBJ2-7)
CASKLAVNYEQYF

SEQ ID NO: 432389 - protein, 13 aa, Homo sapiens
  CDR3 for alpha chain variable domain of TCR clone 216195 (TRAV17, TRAJ5)
CAPMDTGRRALTF

SEQ ID NO: 432390 - protein, 11 aa, Homo sapiens
  CDR3 for beta chain variable domain of TCR clone 216195 (TRBV19, TRBJ1-1)
CASSIGSEAFY

SEQ ID NO: 432391 - protein, 14 aa, Homo sapiens
  CDR3 for alpha chain variable domain of TCR clone 216196 (TRAV38-1, TRAJ31)
CAFMKHDNNARLMF

SEQ ID NO: 432392 - protein, 16 aa, Homo sapiens
  CDR3 for beta chain variable domain of TCR clone 216196 (TRBV23-1, TRBJ2-1)
CNSAPATGPTYNEQFF

SEQ ID NO: 432393 - protein, 12 aa, Homo sapiens
  CDR3 for alpha chain variable domain of TCR clone 216197 (TRAV2, TRAJ33)
CAFMDSNYQLIW

SEQ ID NO: 432394 - protein, 16 aa, Homo sapiens
  CDR3 for beta chain variable domain of TCR clone 216197 (TRBV2, TRBJ2-7)
CASSELWTGPSYEQYF

SEQ ID NO: 432395 - protein, 13 aa, Homo sapiens
  CDR3 for alpha chain variable domain of TCR clone 216198 (TRAV3, TRAJ21)
CAVREPDFNKFYF

SEQ ID NO: 432396 - protein, 16 aa, Homo sapiens
  CDR3 for beta chain variable domain of TCR clone 216198 (TRBV27, TRBJ2-2)
CASSFRGLVRTGELFF

SEQ ID NO: 432397 - protein, 14 aa, Homo sapiens
  CDR3 for alpha chain variable domain of TCR clone 216199 (TRAV6, TRAJ6)
CALPTSGGSYIPTF

SEQ ID NO: 432398 - protein, 12 aa, Homo sapiens
  CDR3 for beta chain variable domain of TCR clone 216199 (TRBV5-1, TRBJ2-5)
CASIPVPWDRTK

SEQ ID NO: 432399 - protein, 11 aa, Homo sapiens
  CDR3 for alpha chain variable domain of TCR clone 216200 (TRAV2, TRAJ13)
CASGGYQKVTF

SEQ ID NO: 432400 - protein, 15 aa, Homo sapiens
  CDR3 for beta chain variable domain of TCR clone 216200 (TRBV20-1, TRBJ2-7)
CSARDRVSGMYEQYF

SEQ ID NO: 432401 - protein, 12 aa, Homo sapiens
  CDR3 for alpha chain variable domain of TCR clone 216201 (TRAV13-1, TRAJ49)
CAASPMGNQFYF

SEQ ID NO: 432402 - protein, 17 aa, Homo sapiens
  CDR3 for beta chain variable domain of TCR clone 216201 (TRBV11-2, TRBJ2-1)
CASSLYPTGVEYNEQFF

SEQ ID NO: 432403 - protein, 14 aa, Homo sapiens
  CDR3 for alpha chain variable domain of TCR clone 216202 (TRAV12-2, TRAJ17)
CAVLFKSAGNKLNF

SEQ ID NO: 432404 - protein, 15 aa, Homo sapiens
  CDR3 for beta chain variable domain of TCR clone 216202 (TRBV20-1, TRBJ2-7)
CSARDRVSGMDEQYF

SEQ ID NO: 432405 - protein, 14 aa, Homo sapiens
  CDR3 for alpha chain variable domain of TCR clone 216203 (TRAV2, TRAJ37)
CAVDFTSNTGKLIF

SEQ ID NO: 432406 - protein, 14 aa, Homo sapiens
  CDR3 for beta chain variable domain of TCR clone 216203 (TRBV7-7, TRBJ2-7)
CASSLGRGVGEKYF

SEQ ID NO: 432407 - protein, 13 aa, Homo sapiens
  CDR3 for alpha chain variable domain of TCR clone 216204 (TRAV12-3, TRAJ13)
CAMSSGGYQKVTF

SEQ ID NO: 432408 - protein, 15 aa, Homo sapiens
  CDR3 for beta chain variable domain of TCR clone 216204 (TRBV19, TRBJ1-2)
CASSVGQVLNYGYTF

SEQ ID NO: 432409 - protein, 12 aa, Homo sapiens
  CDR3 for alpha chain variable domain of TCR clone 216205 (TRAV2, TRAJ31)
CAVEEGNARLMF

SEQ ID NO: 432410 - protein, 18 aa, Homo sapiens
  CDR3 for beta chain variable domain of TCR clone 216205 (TRBV7-9, TRBJ2-3)
CASSLDLEGLATPDTQYF

SEQ ID NO: 432411 - protein, 12 aa, Homo sapiens
  CDR3 for alpha chain variable domain of TCR clone 216206 (TRAV20, TRAJ4)
CSASGGYNKLIL

SEQ ID NO: 432412 - protein, 13 aa, Homo sapiens
  CDR3 for beta chain variable domain of TCR clone 216206 (TRBV9, TRBJ2-1)
CASSPSGGNEQFF

SEQ ID NO: 432413 - protein, 12 aa, Homo sapiens
  CDR3 for alpha chain variable domain of TCR clone 216207 (TRAV2, TRAJ31)
CAVEDNNARLMF

SEQ ID NO: 432414 - protein, 18 aa, Homo sapiens
  CDR3 for beta chain variable domain of TCR clone 216207 (TRBV11-2, TRBJ2-6)
CASSLNSFLGTGANVLTF

SEQ ID NO: 432415 - protein, 11 aa, Homo sapiens
  CDR3 for alpha chain variable domain of TCR clone 216208 (TRAV3, TRAJ21)
CAVGNFNKFYF

SEQ ID NO: 432416 - protein, 15 aa, Homo sapiens
  CDR3 for beta chain variable domain of TCR clone 216208 (TRBV7-9, TRBJ1-4)
CASSTRTGGNEKLFF

SEQ ID NO: 432417 - protein, 12 aa, Homo sapiens
  CDR3 for alpha chain variable domain of TCR clone 216209 (TRAV13-2, TRAJ23)
CAKRHRGGKLIF

SEQ ID NO: 432418 - protein, 13 aa, Homo sapiens
  CDR3 for beta chain variable domain of TCR clone 216209 (TRBV11-3, TRBJ2-1)
CASSSRRVDEQFF

SEQ ID NO: 432419 - protein, 12 aa, Homo sapiens
  CDR3 for alpha chain variable domain of TCR clone 216210 (TRAV21, TRAJ58)
CALSASGSRLTF

SEQ ID NO: 432420 - protein, 14 aa, Homo sapiens
  CDR3 for beta chain variable domain of TCR clone 216210 (TRBV6-5, TRBJ1-2)
CASSYDGTGGGYTF

SEQ ID NO: 432421 - protein, 12 aa, Homo sapiens
  CDR3 for alpha chain variable domain of TCR clone 216211 (TRAV4, TRAJ6)
CLALGGSYIPTF

SEQ ID NO: 432422 - protein, 18 aa, Homo sapiens
  CDR3 for beta chain variable domain of TCR clone 216211 (TRBV20-1, TRBJ2-3)
CSASGLAGGPGTTDTQYF

SEQ ID NO: 432423 - protein, 11 aa, Homo sapiens
  CDR3 for alpha chain variable domain of TCR clone 216212 (TRAV17, TRAJ9)
CGFTGGFKTIF

SEQ ID NO: 432424 - protein, 13 aa, Homo sapiens
  CDR3 for beta chain variable domain of TCR clone 216212 (TRBV9, TRBJ2-7)
CASSASDSYEQYF

SEQ ID NO: 432425 - protein, 13 aa, Homo sapiens
  CDR3 for alpha chain variable domain of TCR clone 216213 (TRAV23/DV6, TRAJ27)
CAASNTNAGKSTF

SEQ ID NO: 432426 - protein, 14 aa, Homo sapiens
  CDR3 for beta chain variable domain of TCR clone 216213 (TRBV19, TRBJ2-1)
CASPTFVLSGEQFF

SEQ ID NO: 432427 - protein, 15 aa, Homo sapiens
  CDR3 for alpha chain variable domain of TCR clone 216214 (TRAV17, TRAJ13)
FATDAGSGGYQKGTF

SEQ ID NO: 432428 - protein, 17 aa, Homo sapiens
  CDR3 for beta chain variable domain of TCR clone 216214 (TRBV11-2, TRBJ2-1)
CASSLYPPGVEYNEQFF

SEQ ID NO: 432429 - protein, 17 aa, Homo sapiens
  CDR3 for alpha chain variable domain of TCR clone 216215 (TRAV3, TRAJ6)
CAVRDGPGAGGSYIPTF

SEQ ID NO: 432430 - protein, 13 aa, Homo sapiens
  CDR3 for beta chain variable domain of TCR clone 216215 (TRBV19, TRBJ1-2)
CASSVPGQDGYTF

SEQ ID NO: 432431 - protein, 12 aa, Homo sapiens
  CDR3 for alpha chain variable domain of TCR clone 216216 (TRAV27, TRAJ29)
CAAHSGNTPLVF

SEQ ID NO: 432432 - protein, 14 aa, Homo sapiens
  CDR3 for beta chain variable domain of TCR clone 216216 (TRBV7-9, TRBJ2-7)
CASSIGQGAGEQYF

SEQ ID NO: 432433 - protein, 14 aa, Homo sapiens
  CDR3 for alpha chain variable domain of TCR clone 216217 (TRAV12-2, TRAJ17)
CAVLFKAAGNKLTF

SEQ ID NO: 432434 - protein, 16 aa, Homo sapiens
  CDR3 for beta chain variable domain of TCR clone 216217 (TRBV12-4, TRBJ1-5)
CASSRTRTLSNQPQHF

SEQ ID NO: 432435 - protein, 13 aa, Homo sapiens
  CDR3 for alpha chain variable domain of TCR clone 216218 (TRAV13-2, TRAJ15)
CAEKNQEGTALIF

SEQ ID NO: 432436 - protein, 15 aa, Homo sapiens
  CDR3 for beta chain variable domain of TCR clone 216218 (TRBV29-1, TRBJ2-5)
CSVAPGQGARETQYF

SEQ ID NO: 432437 - protein, 14 aa, Homo sapiens
  CDR3 for alpha chain variable domain of TCR clone 216219 (TRAV2, TRAJ9)
CAVEDRSGGFKTII

SEQ ID NO: 432438 - protein, 15 aa, Homo sapiens
  CDR3 for beta chain variable domain of TCR clone 216219 (TRBV28, TRBJ1-3)
CASSMGWASGNTIYF

SEQ ID NO: 432439 - protein, 16 aa, Homo sapiens
  CDR3 for alpha chain variable domain of TCR clone 216220 (TRAV2, TRAJ4)
CAVEDRFSGGYNKLIF

SEQ ID NO: 432440 - protein, 12 aa, Homo sapiens
  CDR3 for beta chain variable domain of TCR clone 216220 (TRBV25-1, TRBJ2-5)
CASSQAWETQYF

SEQ ID NO: 432441 - protein, 15 aa, Homo sapiens
  CDR3 for alpha chain variable domain of TCR clone 216221 (TRAV3, TRAJ22)
CAVRDRGGSARTLTF

SEQ ID NO: 432442 - protein, 14 aa, Homo sapiens
  CDR3 for beta chain variable domain of TCR clone 216221 (TRBV19, TRBJ1-5)
CAGSLGLIGQPQHF

SEQ ID NO: 432443 - protein, 14 aa, Homo sapiens
  CDR3 for alpha chain variable domain of TCR clone 216222 (TRAV3, TRAJ16)
CCERLKSDGQKLLF

SEQ ID NO: 432444 - protein, 15 aa, Homo sapiens
  CDR3 for beta chain variable domain of TCR clone 216222 (TRBV28, TRBJ2-7)
CSSSPGGRGFYEQYF

SEQ ID NO: 432445 - protein, 14 aa, Homo sapiens
  CDR3 for alpha chain variable domain of TCR clone 216223 (TRAV12-2, TRAJ13)
CAVKKTGGYKKVTF

SEQ ID NO: 432446 - protein, 14 aa, Homo sapiens
  CDR3 for beta chain variable domain of TCR clone 216223 (TRBV18, TRBJ2-5)
CASSPGVSQETQYF

SEQ ID NO: 432447 - protein, 14 aa, Homo sapiens
  CDR3 for alpha chain variable domain of TCR clone 216224 (TRAV1-2, TRAJ8)
CAVREDTGFQKLVF

SEQ ID NO: 432448 - protein, 13 aa, Homo sapiens
  CDR3 for beta chain variable domain of TCR clone 216224 (TRBV7-6, TRBJ2-1)
CQQLWGGADEQFF

SEQ ID NO: 432449 - protein, 13 aa, Homo sapiens
  CDR3 for alpha chain variable domain of TCR clone 216225 (TRAV12-1, TRAJ13)
CVVTSGGYQKVNF

SEQ ID NO: 432450 - protein, 14 aa, Homo sapiens
  CDR3 for beta chain variable domain of TCR clone 216225 (TRBV27, TRBJ2-7)
CASSLAGLSYEQYF

SEQ ID NO: 432451 - protein, 12 aa, Homo sapiens
  CDR3 for alpha chain variable domain of TCR clone 216226 (TRAV12-1, TRAJ40)
CVVYSGTYKYIF

SEQ ID NO: 432452 - protein, 17 aa, Homo sapiens
  CDR3 for beta chain variable domain of TCR clone 216226 (TRBV11-3, TRBJ1-5)
CARSPLTGLRGNQPQHF

SEQ ID NO: 432453 - protein, 17 aa, Homo sapiens
  CDR3 for alpha chain variable domain of TCR clone 216227 (TRAV8-6, TRAJ58)
CAVSSWVGETSGSRLTF

SEQ ID NO: 432454 - protein, 17 aa, Homo sapiens
  CDR3 for beta chain variable domain of TCR clone 216227 (TRBV4-1, TRBJ2-5)
CASSQDLTGGPIETQYF

SEQ ID NO: 432455 - protein, 11 aa, Homo sapiens
  CDR3 for alpha chain variable domain of TCR clone 216228 (TRAV35, TRAJ34)
CWARNTDKLIF

SEQ ID NO: 432456 - protein, 13 aa, Homo sapiens
  CDR3 for beta chain variable domain of TCR clone 216228 (TRBV19, TRBJ2-7)
CASSIDRTYDQYF

SEQ ID NO: 432457 - protein, 12 aa, Homo sapiens
  CDR3 for alpha chain variable domain of TCR clone 216229 (TRAV12-3, TRAJ17)
CAMTLTGNKLTF

SEQ ID NO: 432458 - protein, 15 aa, Homo sapiens
  CDR3 for beta chain variable domain of TCR clone 216229 (TRBV11-2, TRBJ2-2)
CARSSDRVNAGELFF

SEQ ID NO: 432459 - protein, 14 aa, Homo sapiens
  CDR3 for alpha chain variable domain of TCR clone 216230 (TRAV13-2, TRAJ54)
CAENMIQGAQKLVF

SEQ ID NO: 432460 - protein, 15 aa, Homo sapiens
  CDR3 for beta chain variable domain of TCR clone 216230 (TRBV4-1, TRBJ2-7)
CASSQNTGRLYEQYF

SEQ ID NO: 432461 - protein, 13 aa, Homo sapiens
  CDR3 for alpha chain variable domain of TCR clone 216231 (TRAV13-1, TRAJ37)
CAAVSGNTGKLIF

SEQ ID NO: 432462 - protein, 17 aa, Homo sapiens
  CDR3 for beta chain variable domain of TCR clone 216231 (TRBV10-2, TRBJ1-6)
CASSESRGSSYNSPLHF

SEQ ID NO: 432463 - protein, 16 aa, Homo sapiens
  CDR3 for alpha chain variable domain of TCR clone 216232 (TRAV30, TRAJ24)
CGTEIVDADSWGKFQF

SEQ ID NO: 432464 - protein, 17 aa, Homo sapiens
  CDR3 for beta chain variable domain of TCR clone 216232 (TRBV20-1, TRBJ2-1)
CSARDRRRASCYNEQFF

SEQ ID NO: 432465 - protein, 13 aa, Homo sapiens
  CDR3 for alpha chain variable domain of TCR clone 216233 (TRAV2, TRAJ40)
CAVVYSGTYKYIF

SEQ ID NO: 432466 - protein, 18 aa, Homo sapiens
  CDR3 for beta chain variable domain of TCR clone 216233 (TRBV11-2, TRBJ2-3)
CARSLGGASRGAPNTQYF

SEQ ID NO: 432467 - protein, 10 aa, Homo sapiens
  CDR3 for alpha chain variable domain of TCR clone 216234 (TRAV30, TRAJ48)
CGIGNEKLTF

SEQ ID NO: 432468 - protein, 12 aa, Homo sapiens
  CDR3 for beta chain variable domain of TCR clone 216234 (TRBV27, TRBJ2-1)
EPVTSGDNEQFF

SEQ ID NO: 432469 - protein, 15 aa, Homo sapiens
  CDR3 for alpha chain variable domain of TCR clone 216235 (TRAV21, TRAJ53)
CAVRQSGGSNYKLPF

SEQ ID NO: 432470 - protein, 14 aa, Homo sapiens
  CDR3 for beta chain variable domain of TCR clone 216235 (TRBV18, TRBJ2-5)
CASSPGVSQETQYF

SEQ ID NO: 432471 - protein, 15 aa, Homo sapiens
  CDR3 for alpha chain variable domain of TCR clone 216236 (TRAV38-1, TRAJ37)
CAFIFGSGNTGKLIF

SEQ ID NO: 432472 - protein, 16 aa, Homo sapiens
  CDR3 for beta chain variable domain of TCR clone 216236 (TRBV12-4, TRBJ1-5)
CASSRPVGGSNQPQHF

SEQ ID NO: 432473 - protein, 17 aa, Homo sapiens
  CDR3 for alpha chain variable domain of TCR clone 216237 (TRAV3, TRAJ13)
CAVRDMRRTGGYQKVTF

SEQ ID NO: 432474 - protein, 13 aa, Homo sapiens
  CDR3 for beta chain variable domain of TCR clone 216237 (TRBV20-1, TRBJ2-7)
CSATHTSGYEQYF

SEQ ID NO: 432475 - protein, 15 aa, Homo sapiens
  CDR3 for alpha chain variable domain of TCR clone 216238 (TRAV1-2, TRAJ39)
CAVEGVDNAGNMLTL

SEQ ID NO: 432476 - protein, 13 aa, Homo sapiens
  CDR3 for beta chain variable domain of TCR clone 216238 (TRBV27, TRBJ1-6)
CASRWTGYSPLHF

SEQ ID NO: 432477 - protein, 18 aa, Homo sapiens
  CDR3 for alpha chain variable domain of TCR clone 216239 (TRAV12-3, TRAJ52)
CAMSVGGAGGTSYGKLTF

SEQ ID NO: 432478 - protein, 14 aa, Homo sapiens
  CDR3 for beta chain variable domain of TCR clone 216239 (TRBV27, TRBJ1-1)
CASSLLSGLSEAFF

SEQ ID NO: 432479 - protein, 16 aa, Homo sapiens
  CDR3 for alpha chain variable domain of TCR clone 216240 (TRAV4, TRAJ9)
CLVGDPNRPGGFKTIF

SEQ ID NO: 432480 - protein, 16 aa, Homo sapiens
  CDR3 for beta chain variable domain of TCR clone 216240 (TRBV28, TRBJ1-4)
CASSPPSRGRSEKLFF

SEQ ID NO: 432481 - protein, 16 aa, Homo sapiens
  CDR3 for alpha chain variable domain of TCR clone 216241 (TRAV26-1, )
CIDIQNPDPAVYQLRD

SEQ ID NO: 432482 - protein, 19 aa, Homo sapiens
  CDR3 for beta chain variable domain of TCR clone 216241 (TRBV19, TRBJ2-5)
CASSIGQVTDFFLGETPYF

SEQ ID NO: 432483 - protein, 23 aa, Homo sapiens
  CDR3 for alpha chain variable domain of TCR clone 216242 (TRAV8-4, )
CAVSYAGNNHIQNPDPAVYQLRD

SEQ ID NO: 432484 - protein, 15 aa, Homo sapiens
  CDR3 for beta chain variable domain of TCR clone 216242 (TRBV12-4, TRBJ2-1)
CASSLLATGNNDQFF

SEQ ID NO: 432485 - protein, 15 aa, Homo sapiens
  CDR3 for alpha chain variable domain of TCR clone 216243 (TRAV8-2, TRAJ40)
CVVLGTTSGTYKYIF

SEQ ID NO: 432486 - protein, 16 aa, Homo sapiens
  CDR3 for beta chain variable domain of TCR clone 216243 (TRBV5-1, TRBJ2-3)
CASSSSGGPSTDTQYF

SEQ ID NO: 432487 - protein, 16 aa, Homo sapiens
  CDR3 for alpha chain variable domain of TCR clone 216244 (TRAV26-1, TRAJ52)
CIVSNAGGTSYGKLTF

SEQ ID NO: 432488 - protein, 16 aa, Homo sapiens
  CDR3 for beta chain variable domain of TCR clone 216244 (TRBV19, TRBJ2-1)
CASSIETGSPYNEQFF

SEQ ID NO: 432489 - protein, 14 aa, Homo sapiens
  CDR3 for alpha chain variable domain of TCR clone 216245 (TRAV1-2, TRAJ16)
CSVNRFSDGQKLLF

SEQ ID NO: 432490 - protein, 16 aa, Homo sapiens
  CDR3 for beta chain variable domain of TCR clone 216245 (TRBV12-5, TRBJ2-5)
CASGPRTSGNQETQYF

SEQ ID NO: 432491 - protein, 15 aa, Homo sapiens
  CDR3 for alpha chain variable domain of TCR clone 216246 (TRAV8-3, TRAJ23)
CAVGDMYNQGGKLIF

SEQ ID NO: 432492 - protein, 22 aa, Homo sapiens
  CDR3 for beta chain variable domain of TCR clone 216246 (TRBV29-1, TRBJ2-5)
TVSNMSPEDSSIYLCSAGTQYF

SEQ ID NO: 432493 - protein, 14 aa, Homo sapiens
  CDR3 for alpha chain variable domain of TCR clone 216247 (TRAV29/DV5, TRAJ36)
CAARRKTGATNLFF

SEQ ID NO: 432494 - protein, 17 aa, Homo sapiens
  CDR3 for beta chain variable domain of TCR clone 216247 (TRBV5-1, TRBJ2-2)
CASSLAGLSGGTGELFF

SEQ ID NO: 432495 - protein, 14 aa, Homo sapiens
  CDR3 for alpha chain variable domain of TCR clone 216248 (TRAV12-1, TRAJ9)
CVVNRRTGGFKTIF

SEQ ID NO: 432496 - protein, 14 aa, Homo sapiens
  CDR3 for beta chain variable domain of TCR clone 216248 (TRBV11-2, TRBJ2-7)
CASSLGDSFYEQYF

SEQ ID NO: 432497 - protein, 13 aa, Homo sapiens
  CDR3 for alpha chain variable domain of TCR clone 216249 (TRAV8-6, TRAJ54)
CAVSDQGAQKLVF

SEQ ID NO: 432498 - protein, 15 aa, Homo sapiens
  CDR3 for beta chain variable domain of TCR clone 216249 (TRBV12-4, TRBJ2-1)
CASRETSGMSNEQFF

SEQ ID NO: 432499 - protein, 15 aa, Homo sapiens
  CDR3 for alpha chain variable domain of TCR clone 216250 (TRAV8-4, TRAJ47)
CAVSDLLGYGNKLFF

SEQ ID NO: 432500 - protein, 16 aa, Homo sapiens
  CDR3 for beta chain variable domain of TCR clone 216250 (TRBV19, TRBJ2-2)
CASSPSGGLNTGELFF

SEQ ID NO: 432501 - protein, 12 aa, Homo sapiens
  CDR3 for alpha chain variable domain of TCR clone 216251 (TRAV13-1, TRAJ17)
CAARTAGNKLTF

SEQ ID NO: 432502 - protein, 15 aa, Homo sapiens
  CDR3 for beta chain variable domain of TCR clone 216251 (TRBV7-6, TRBJ1-1)
CQQPPGGGANTEAFF

SEQ ID NO: 432503 - protein, 14 aa, Homo sapiens
  CDR3 for alpha chain variable domain of TCR clone 216252 (TRAV8-6, TRAJ53)
CAALVLGSNYKLTF

SEQ ID NO: 432504 - protein, 15 aa, Homo sapiens
  CDR3 for beta chain variable domain of TCR clone 216252 (TRBV5-1, TRBJ2-7)
CASSLDLTRSYEQYF

SEQ ID NO: 432505 - protein, 13 aa, Homo sapiens
  CDR3 for alpha chain variable domain of TCR clone 216253 (TRAV35, TRAJ21)
CAGQLSNFNKFYF

SEQ ID NO: 432506 - protein, 11 aa, Homo sapiens
  CDR3 for beta chain variable domain of TCR clone 216253 (TRBV7-6, TRBJ2-5)
CASSCQETQYF

SEQ ID NO: 432507 - protein, 14 aa, Homo sapiens
  CDR3 for alpha chain variable domain of TCR clone 216254 (TRAV12-2, TRAJ29)
CAVRRNSGNTPLAF

SEQ ID NO: 432508 - protein, 13 aa, Homo sapiens
  CDR3 for beta chain variable domain of TCR clone 216254 (TRBV12-4, TRBJ2-1)
CASSHYTDNEQFF

SEQ ID NO: 432509 - protein, 14 aa, Homo sapiens
  CDR3 for alpha chain variable domain of TCR clone 216255 (TRAV13-1, TRAJ44)
CAAKATGTASKLTF

SEQ ID NO: 432510 - protein, 15 aa, Homo sapiens
  CDR3 for beta chain variable domain of TCR clone 216255 (TRBV12-4, TRBJ2-1)
CASSPLSGRNSEQFF

SEQ ID NO: 432511 - protein, 13 aa, Homo sapiens
  CDR3 for alpha chain variable domain of TCR clone 216256 (TRAV23/DV6, TRAJ58)
CAARLILGSRLTF

SEQ ID NO: 432512 - protein, 13 aa, Homo sapiens
  CDR3 for beta chain variable domain of TCR clone 216256 (TRBV2, TRBJ1-6)
CADSGSYNSPLHF

SEQ ID NO: 432513 - protein, 15 aa, Homo sapiens
  CDR3 for alpha chain variable domain of TCR clone 216257 (TRAV8-2, TRAJ16)
CVVSDGFSDGQKLLF

SEQ ID NO: 432514 - protein, 14 aa, Homo sapiens
  CDR3 for beta chain variable domain of TCR clone 216257 (TRBV7-3, TRBJ1-1)
CVSSLGTGYTEAFF

SEQ ID NO: 432515 - protein, 12 aa, Homo sapiens
  CDR3 for alpha chain variable domain of TCR clone 216258 (TRAV21, TRAJ11)
CAATSGYSTLTF

SEQ ID NO: 432516 - protein, 14 aa, Homo sapiens
  CDR3 for beta chain variable domain of TCR clone 216258 (TRBV4-2, TRBJ2-1)
CASGLDRAYNEKFF

SEQ ID NO: 432517 - protein, 18 aa, Homo sapiens
  CDR3 for alpha chain variable domain of TCR clone 216259 (TRAV26-1, TRAJ52)
CIGRVEGAGGTSYGKLTF

SEQ ID NO: 432518 - protein, 13 aa, Homo sapiens
  CDR3 for beta chain variable domain of TCR clone 216259 (TRBV7-3, TRBJ1-2)
CASSLKRGYGYTF

SEQ ID NO: 432519 - protein, 12 aa, Homo sapiens
  CDR3 for alpha chain variable domain of TCR clone 216260 (TRAV8-6, TRAJ8)
CAVTPGFQKLVF

SEQ ID NO: 432520 - protein, 16 aa, Homo sapiens
  CDR3 for beta chain variable domain of TCR clone 216260 (TRBV7-3, TRBJ2-2)
CASSLKRGTLSGELFF

SEQ ID NO: 432521 - protein, 14 aa, Homo sapiens
  CDR3 for alpha chain variable domain of TCR clone 216261 (TRAV12-2, TRAJ17)
CAGLCKAAGNKLTF

SEQ ID NO: 432522 - protein, 17 aa, Homo sapiens
  CDR3 for beta chain variable domain of TCR clone 216261 (TRBV20-1, TRBJ2-2)
CSASGSGQGGLTGELFF

SEQ ID NO: 432523 - protein, 13 aa, Homo sapiens
  CDR3 for alpha chain variable domain of TCR clone 216262 (TRAV8-3, TRAJ36)
CAVGATGANNLFF

SEQ ID NO: 432524 - protein, 15 aa, Homo sapiens
  CDR3 for beta chain variable domain of TCR clone 216262 (TRBV7-2, TRBJ1-2)
CACSPRAGWNYGYTF

SEQ ID NO: 432525 - protein, 14 aa, Homo sapiens
  CDR3 for alpha chain variable domain of TCR clone 216263 (TRAV23/DV6, TRAJ24)
CSASLSDSWGKLQF

SEQ ID NO: 432526 - protein, 15 aa, Homo sapiens
  CDR3 for beta chain variable domain of TCR clone 216263 (TRBV9, TRBJ1-6)
CASSVAGTGDSPLHF

SEQ ID NO: 432527 - protein, 16 aa, Homo sapiens
  CDR3 for alpha chain variable domain of TCR clone 216264 (TRAV8-2, TRAJ45)
CVVSEGTGGGADGLTF

SEQ ID NO: 432528 - protein, 13 aa, Homo sapiens
  CDR3 for beta chain variable domain of TCR clone 216264 (TRBV10-3, TRBJ2-7)
CASKLAVNYEQYF

SEQ ID NO: 432529 - protein, 16 aa, Homo sapiens
  CDR3 for alpha chain variable domain of TCR clone 216265 (TRAV23/DV6, TRAJ9)
CAASIGGNTGGFTTIF

SEQ ID NO: 432530 - protein, 13 aa, Homo sapiens
  CDR3 for beta chain variable domain of TCR clone 216265 (TRBV7-9, TRBJ1-2)
CASSLKQNYGDTF

SEQ ID NO: 432531 - protein, 15 aa, Homo sapiens
  CDR3 for alpha chain variable domain of TCR clone 216266 (TRAV8-3, TRAJ40)
CAVGPYTSGTYKYIF

SEQ ID NO: 432532 - protein, 16 aa, Homo sapiens
  CDR3 for beta chain variable domain of TCR clone 216266 (TRBV7-2, TRBJ2-7)
CASSLGPGGGSGGQYF

SEQ ID NO: 432533 - protein, 12 aa, Homo sapiens
  CDR3 for alpha chain variable domain of TCR clone 216267 (TRAV2, TRAJ9)
CAVGAGGFKTIF

SEQ ID NO: 432534 - protein, 16 aa, Homo sapiens
  CDR3 for beta chain variable domain of TCR clone 216267 (TRBV13, TRBJ2-2)
CASSTRTGAHTGELFF

SEQ ID NO: 432535 - protein, 16 aa, Homo sapiens
  CDR3 for alpha chain variable domain of TCR clone 216268 (TRAV26-1, TRAJ40)
CIVRVGTTSGTYKYIF

SEQ ID NO: 432536 - protein, 14 aa, Homo sapiens
  CDR3 for beta chain variable domain of TCR clone 216268 (TRBV6-1, TRBJ1-3)
CASVQGGGGNTIYF

SEQ ID NO: 432537 - protein, 18 aa, Homo sapiens
  CDR3 for alpha chain variable domain of TCR clone 216269 (TRAV21, TRAJ52)
CAVRPAPAGGTSYGKLKF

SEQ ID NO: 432538 - protein, 17 aa, Homo sapiens
  CDR3 for beta chain variable domain of TCR clone 216269 (TRBV13, TRBJ2-3)
CASSLSRVAGGRNTQYF

SEQ ID NO: 432539 - protein, 10 aa, Homo sapiens
  CDR3 for alpha chain variable domain of TCR clone 216270 (TRAV8-4, TRAJ39)
CAVSGNMLTF

SEQ ID NO: 432540 - protein, 12 aa, Homo sapiens
  CDR3 for beta chain variable domain of TCR clone 216270 (TRBV24-1, TRBJ1-4)
CATSDPNEKLFF

SEQ ID NO: 432541 - protein, 15 aa, Homo sapiens
  CDR3 for alpha chain variable domain of TCR clone 216271 (TRAV8-1, TRAJ37)
CAVKKGSGNTGKLIF

SEQ ID NO: 432542 - protein, 13 aa, Homo sapiens
  CDR3 for beta chain variable domain of TCR clone 216271 (TRBV12-4, TRBJ1-5)
CASSPDRAQPQHF

SEQ ID NO: 432543 - protein, 12 aa, Homo sapiens
  CDR3 for alpha chain variable domain of TCR clone 216272 (TRAV1-2, TRAJ33)
CAALDSNYQLIW

SEQ ID NO: 432544 - protein, 13 aa, Homo sapiens
  CDR3 for beta chain variable domain of TCR clone 216272 (TRBV19, TRBJ2-7)
CASRKSGGSEQYF

SEQ ID NO: 432545 - protein, 13 aa, Homo sapiens
  CDR3 for alpha chain variable domain of TCR clone 216273 (TRAV36/DV7, TRAJ38)
CVANAGNNRKLIW

SEQ ID NO: 432546 - protein, 14 aa, Homo sapiens
  CDR3 for beta chain variable domain of TCR clone 216273 (TRBV20-1, TRBJ2-7)
CSAKRGRSSYEQYF

SEQ ID NO: 432547 - protein, 14 aa, Homo sapiens
  CDR3 for alpha chain variable domain of TCR clone 216274 (TRAV12-2, TRAJ40)
CAVKIPSGTYKYIF

SEQ ID NO: 432548 - protein, 12 aa, Homo sapiens
  CDR3 for beta chain variable domain of TCR clone 216274 (TRBV11-2, TRBJ2-1)
CASSTGNNEQFF

SEQ ID NO: 432549 - protein, 17 aa, Homo sapiens
  CDR3 for alpha chain variable domain of TCR clone 216275 (TRAV12-3, TRAJ29)
CAMSAGIQETHLLPLER

SEQ ID NO: 432550 - protein, 11 aa, Homo sapiens
  CDR3 for beta chain variable domain of TCR clone 216275 (TRBV7-3, TRBJ2-1)
CASSLNNEQFF

SEQ ID NO: 432551 - protein, 14 aa, Homo sapiens
  CDR3 for alpha chain variable domain of TCR clone 216276 (TRAV13-1, TRAJ40)
CAASMTSGTYKYIF

SEQ ID NO: 432552 - protein, 14 aa, Homo sapiens
  CDR3 for beta chain variable domain of TCR clone 216276 (TRBV19, TRBJ2-1)
CASSPGLAPNEQFF

SEQ ID NO: 432553 - protein, 14 aa, Homo sapiens
  CDR3 for alpha chain variable domain of TCR clone 216277 (TRAV13-1, TRAJ40)
CAAHPTSGTYKYIF

SEQ ID NO: 432554 - protein, 12 aa, Homo sapiens
  CDR3 for beta chain variable domain of TCR clone 216277 (TRBV11-2, TRBJ2-2)
CASSLGGGELFF

SEQ ID NO: 432555 - protein, 16 aa, Homo sapiens
  CDR3 for alpha chain variable domain of TCR clone 216278 (TRAV12-3, TRAJ53)
CAMSPGSGGSNYKRKF

SEQ ID NO: 432556 - protein, 11 aa, Homo sapiens
  CDR3 for beta chain variable domain of TCR clone 216278 (TRBV29-1, TRBJ2-5)
CSEDRTGTQYF

SEQ ID NO: 432557 - protein, 14 aa, Homo sapiens
  CDR3 for alpha chain variable domain of TCR clone 216279 (TRAV12-2, TRAJ13)
CAVKKTGGYQKVTF

SEQ ID NO: 432558 - protein, 16 aa, Homo sapiens
  CDR3 for beta chain variable domain of TCR clone 216279 (TRBV12-5, TRBJ2-7)
CASGSQGAPTSTTSGR

SEQ ID NO: 432559 - protein, 15 aa, Homo sapiens
  CDR3 for alpha chain variable domain of TCR clone 216280 (TRAV27, TRAJ22)
CAGAPLKGSARQLTF

SEQ ID NO: 432560 - protein, 16 aa, Homo sapiens
  CDR3 for beta chain variable domain of TCR clone 216280 (TRBV19, TRBJ2-2)
CASTRGASGAPGELFF

SEQ ID NO: 432561 - protein, 14 aa, Homo sapiens
  CDR3 for alpha chain variable domain of TCR clone 216281 (TRAV1-1, TRAJ27)
CAVIYNTNAGKSTF

SEQ ID NO: 432562 - protein, 14 aa, Homo sapiens
  CDR3 for beta chain variable domain of TCR clone 216281 (TRBV19, TRBJ1-2)
CASSIGAGSYGYTF

SEQ ID NO: 432563 - protein, 13 aa, Homo sapiens
  CDR3 for alpha chain variable domain of TCR clone 216282 (TRAV2, TRAJ40)
CAVVTSGTYKYIF

SEQ ID NO: 432564 - protein, 14 aa, Homo sapiens
  CDR3 for beta chain variable domain of TCR clone 216282 (TRBV19, TRBJ2-3)
CASSAPRGTDKQYF

SEQ ID NO: 432565 - protein, 15 aa, Homo sapiens
  CDR3 for alpha chain variable domain of TCR clone 216283 (TRAV23/DV6, TRAJ44)
CAARLLTGTASKTTF

SEQ ID NO: 432566 - protein, 15 aa, Homo sapiens
  CDR3 for beta chain variable domain of TCR clone 216283 (TRBV12-4, TRBJ1-5)
CASTLNRVSNQPQHF

SEQ ID NO: 432567 - protein, 11 aa, Homo sapiens
  CDR3 for alpha chain variable domain of TCR clone 216284 (TRAV16, TRAJ31)
CALFNNARLMF

SEQ ID NO: 432568 - protein, 14 aa, Homo sapiens
  CDR3 for beta chain variable domain of TCR clone 216284 (TRBV4-1, TRBJ2-2)
CASSQAVNTGELFF

SEQ ID NO: 432569 - protein, 12 aa, Homo sapiens
  CDR3 for alpha chain variable domain of TCR clone 216285 (TRAV12-3, TRAJ17)
CAITLTGNKLTF

SEQ ID NO: 432570 - protein, 14 aa, Homo sapiens
  CDR3 for beta chain variable domain of TCR clone 216285 (TRBV5-1, TRBJ2-7)
CASSRGESLYEQYF

SEQ ID NO: 432571 - protein, 14 aa, Homo sapiens
  CDR3 for alpha chain variable domain of TCR clone 216286 (TRAV12-3, TRAJ22)
CAMSLFGSARQLTF

SEQ ID NO: 432572 - protein, 11 aa, Homo sapiens
  CDR3 for beta chain variable domain of TCR clone 216286 (TRBV12-4, TRBJ2-2)
CAGSSAGELFF

SEQ ID NO: 432573 - protein, 15 aa, Homo sapiens
  CDR3 for alpha chain variable domain of TCR clone 216287 (TRAV26-1, TRAJ29)
CIVIVEGSGNTPLVF

SEQ ID NO: 432574 - protein, 15 aa, Homo sapiens
  CDR3 for beta chain variable domain of TCR clone 216287 (TRBV7-9, TRBJ1-5)
CASSQGHQPNQPQHV

SEQ ID NO: 432575 - protein, 13 aa, Homo sapiens
  CDR3 for alpha chain variable domain of TCR clone 216288 (TRAV12-1, TRAJ4)
CVAFSGGYNKLIF

SEQ ID NO: 432576 - protein, 14 aa, Homo sapiens
  CDR3 for beta chain variable domain of TCR clone 216288 (TRBV4-2, TRBJ2-1)
CASGLDRAYNEQFF

SEQ ID NO: 432577 - protein, 13 aa, Homo sapiens
  CDR3 for alpha chain variable domain of TCR clone 216289 (TRAV13-1, TRAJ21)
CAASIYNFNKFYF

SEQ ID NO: 432578 - protein, 17 aa, Homo sapiens
  CDR3 for beta chain variable domain of TCR clone 216289 (TRBV7-6, TRBJ2-1)
CASSLEIAGGSYNEQFF

SEQ ID NO: 432579 - protein, 16 aa, Homo sapiens
  CDR3 for alpha chain variable domain of TCR clone 216290 (TRAV30, TRAJ24)
CGTEIVDADSWGKFQF

SEQ ID NO: 432580 - protein, 12 aa, Homo sapiens
  CDR3 for beta chain variable domain of TCR clone 216290 (TRBV5-7, TRBJ2-7)
CASSVQGGEQYF

SEQ ID NO: 432581 - protein, 11 aa, Homo sapiens
  CDR3 for alpha chain variable domain of TCR clone 216291 (TRAV17, TRAJ9)
CATTGGFKTIF

SEQ ID NO: 432582 - protein, 13 aa, Homo sapiens
  CDR3 for beta chain variable domain of TCR clone 216291 (TRBV20-1, TRBJ1-6)
CSAPLGVGSPLHF

SEQ ID NO: 432583 - protein, 16 aa, Homo sapiens
  CDR3 for alpha chain variable domain of TCR clone 216292 (TRAV23/DV6, TRAJ9)
CAASIGGNTGGFKTIF

SEQ ID NO: 432584 - protein, 14 aa, Homo sapiens
  CDR3 for beta chain variable domain of TCR clone 216292 (TRBV9, TRBJ2-7)
CASSVGMGSYEHYF

SEQ ID NO: 432585 - protein, 14 aa, Homo sapiens
  CDR3 for alpha chain variable domain of TCR clone 216293 (TRAV12-2, TRAJ18)
CAVKRGSTLGRLYF

SEQ ID NO: 432586 - protein, 16 aa, Homo sapiens
  CDR3 for beta chain variable domain of TCR clone 216293 (TRBV27, TRBJ2-3)
CASSVRGQLLRDTQYF

SEQ ID NO: 432587 - protein, 14 aa, Homo sapiens
  CDR3 for alpha chain variable domain of TCR clone 216294 (TRAV17, TRAJ16)
CATADFSDGQKLLF

SEQ ID NO: 432588 - protein, 11 aa, Homo sapiens
  CDR3 for beta chain variable domain of TCR clone 216294 (TRBV13, TRBJ2-3)
CASGNADTQYF

SEQ ID NO: 432589 - protein, 14 aa, Homo sapiens
  CDR3 for alpha chain variable domain of TCR clone 216295 (TRAV26-1, TRAJ48)
CIVRVGFGNEKLTF

SEQ ID NO: 432590 - protein, 13 aa, Homo sapiens
  CDR3 for beta chain variable domain of TCR clone 216295 (TRBV11-3, TRBJ2-3)
CASSHDTKDNQYF

SEQ ID NO: 432591 - protein, 17 aa, Homo sapiens
  CDR3 for alpha chain variable domain of TCR clone 216296 (TRAV16, TRAJ58)
CITVLSNGETSGARLTF

SEQ ID NO: 432592 - protein, 17 aa, Homo sapiens
  CDR3 for beta chain variable domain of TCR clone 216296 (TRBV18, TRBJ2-1)
CASSEGLSGGADNEQFF

SEQ ID NO: 432593 - protein, 11 aa, Homo sapiens
  CDR3 for alpha chain variable domain of TCR clone 216297 (TRAV35, TRAJ30)
CAPGGDDKIIF

SEQ ID NO: 432594 - protein, 15 aa, Homo sapiens
  CDR3 for beta chain variable domain of TCR clone 216297 (TRBV19, TRBJ2-5)
CASKVTGGTGETQYF

SEQ ID NO: 432595 - protein, 11 aa, Homo sapiens
  CDR3 for alpha chain variable domain of TCR clone 216298 (TRAV1-1, TRAJ30)
CAPNRDDKIIF

SEQ ID NO: 432596 - protein, 14 aa, Homo sapiens
  CDR3 for beta chain variable domain of TCR clone 216298 (TRBV7-8, TRBJ2-7)
CASSPGLADYEQYF

SEQ ID NO: 432597 - protein, 12 aa, Homo sapiens
  CDR3 for alpha chain variable domain of TCR clone 216299 (TRAV8-2, TRAJ30)
CVVSDRDDKIIF

SEQ ID NO: 432598 - protein, 16 aa, Homo sapiens
  CDR3 for beta chain variable domain of TCR clone 216299 (TRBV10-3, TRBJ2-6)
CAISTSGDLGANLLTF

SEQ ID NO: 432599 - protein, 16 aa, Homo sapiens
  CDR3 for alpha chain variable domain of TCR clone 216300 (TRAV26-1, TRAJ23)
CIVRVHPYNQGGKLIF

SEQ ID NO: 432600 - protein, 13 aa, Homo sapiens
  CDR3 for beta chain variable domain of TCR clone 216300 (TRBV20-1, TRBJ2-5)
CSARGDYQETQYF

SEQ ID NO: 432601 - protein, 14 aa, Homo sapiens
  CDR3 for alpha chain variable domain of TCR clone 216301 (TRAV26-1, TRAJ40)
CIVRLLSGTYKYIF

SEQ ID NO: 432602 - protein, 18 aa, Homo sapiens
  CDR3 for beta chain variable domain of TCR clone 216301 (TRBV15, TRBJ2-7)
CATSRDRGIRAVLLAGHQ

SEQ ID NO: 432603 - protein, 14 aa, Homo sapiens
  CDR3 for alpha chain variable domain of TCR clone 216302 (TRAV14/DV4, TRAJ49)
CAFNRYLTGNQFYF

SEQ ID NO: 432604 - protein, 14 aa, Homo sapiens
  CDR3 for beta chain variable domain of TCR clone 216302 (TRBV3-1, TRBJ2-5)
CASSQGPEQETQYF

SEQ ID NO: 432605 - protein, 13 aa, Homo sapiens
  CDR3 for alpha chain variable domain of TCR clone 216303 (TRAV12-3, TRAJ42)
CAVKRGSQGNLIF

SEQ ID NO: 432606 - protein, 12 aa, Homo sapiens
  CDR3 for beta chain variable domain of TCR clone 216303 (TRBV5-7, TRBJ1-2)
CASSLVQNGYTF

SEQ ID NO: 432607 - protein, 15 aa, Homo sapiens
  CDR3 for alpha chain variable domain of TCR clone 216304 (TRAV12-1, TRAJ47)
CVVTNRLKGGNKLVF

SEQ ID NO: 432608 - protein, 19 aa, Homo sapiens
  CDR3 for beta chain variable domain of TCR clone 216304 (TRBV20-1, TRBJ2-5)
CSARRQGLAGTSKSGTQYF

SEQ ID NO: 432609 - protein, 18 aa, Homo sapiens
  CDR3 for alpha chain variable domain of TCR clone 216305 (TRAV21, TRAJ52)
CAVRPSPAGGTSYGKLTL

SEQ ID NO: 432610 - protein, 17 aa, Homo sapiens
  CDR3 for beta chain variable domain of TCR clone 216305 (TRBV13, TRBJ2-3)
CASSLSRVAGGKNTQYF

SEQ ID NO: 432611 - protein, 12 aa, Homo sapiens
  CDR3 for alpha chain variable domain of TCR clone 216306 (TRAV12-3, TRAJ17)
CAMTLTGNKLTF

SEQ ID NO: 432612 - protein, 15 aa, Homo sapiens
  CDR3 for beta chain variable domain of TCR clone 216306 (TRBV20-1, TRBJ2-7)
CSAIYRVSGMDEQYF

SEQ ID NO: 432613 - protein, 12 aa, Homo sapiens
  CDR3 for alpha chain variable domain of TCR clone 216307 (TRAV13-1, TRAJ21)
CAAKEGFNKFYF

SEQ ID NO: 432614 - protein, 12 aa, Homo sapiens
  CDR3 for beta chain variable domain of TCR clone 216307 (TRBV29-1, TRBJ1-1)
CSESDGNTEAFF

SEQ ID NO: 432615 - protein, 14 aa, Homo sapiens
  CDR3 for alpha chain variable domain of TCR clone 216308 (TRAV26-1, TRAJ34)
CIVRESYNTDKLTF

SEQ ID NO: 432616 - protein, 13 aa, Homo sapiens
  CDR3 for beta chain variable domain of TCR clone 216308 (TRBV19, TRBJ2-1)
CATSRGVYNEQFF

SEQ ID NO: 432617 - protein, 14 aa, Homo sapiens
  CDR3 for alpha chain variable domain of TCR clone 216309 (TRAV21, TRAJ35)
CAVMLIGFGNVLHF

SEQ ID NO: 432618 - protein, 12 aa, Homo sapiens
  CDR3 for beta chain variable domain of TCR clone 216309 (TRBV7-9, TRBJ2-7)
CASSIKREEQYF

SEQ ID NO: 432619 - protein, 11 aa, Homo sapiens
  CDR3 for alpha chain variable domain of TCR clone 216310 (TRAV8-3, TRAJ49)
CAVNIGNQFYF

SEQ ID NO: 432620 - protein, 12 aa, Homo sapiens
  CDR3 for beta chain variable domain of TCR clone 216310 (TRBV11-2, TRBJ2-7)
CASSPPADEQYF

SEQ ID NO: 432621 - protein, 18 aa, Homo sapiens
  CDR3 for alpha chain variable domain of TCR clone 216311 (TRAV9-2, TRAJ52)
CALSRHNAGGTSYGKLTF

SEQ ID NO: 432622 - protein, 15 aa, Homo sapiens
  CDR3 for beta chain variable domain of TCR clone 216311 (TRBV15, TRBJ1-5)
CATSRDPVSNQPQHF

SEQ ID NO: 432623 - protein, 19 aa, Homo sapiens
  CDR3 for alpha chain variable domain of TCR clone 216312 (TRAV26-1, TRAJ52)
CSVRAHRNAGGTSYGKLTF

SEQ ID NO: 432624 - protein, 15 aa, Homo sapiens
  CDR3 for beta chain variable domain of TCR clone 216312 (TRBV29-1, TRBJ2-1)
CSGRDRKSSYNEQFF

SEQ ID NO: 432625 - protein, 13 aa, Homo sapiens
  CDR3 for alpha chain variable domain of TCR clone 216313 (TRAV27, TRAJ6)
CAGGTRGSYIPTF

SEQ ID NO: 432626 - protein, 16 aa, Homo sapiens
  CDR3 for beta chain variable domain of TCR clone 216313 (TRBV13, TRBJ2-2)
CASSPRTGEHTGELFF

SEQ ID NO: 432627 - protein, 14 aa, Homo sapiens
  CDR3 for alpha chain variable domain of TCR clone 216314 (TRAV38-2/DV8, TRAJ56)
CAYRRGGANSKLTF

SEQ ID NO: 432628 - protein, 15 aa, Homo sapiens
  CDR3 for beta chain variable domain of TCR clone 216314 (TRBV6-3, TRBJ2-7)
CASSSPGTVFYEQYF

SEQ ID NO: 432629 - protein, 15 aa, Homo sapiens
  CDR3 for alpha chain variable domain of TCR clone 216315 (TRAV12-3, TRAJ6)
CAMSATTGGSYIPTF

SEQ ID NO: 432630 - protein, 15 aa, Homo sapiens
  CDR3 for beta chain variable domain of TCR clone 216315 (TRBV28, TRBJ2-1)
CASSIIAGGGSEQFF

SEQ ID NO: 432631 - protein, 12 aa, Homo sapiens
  CDR3 for alpha chain variable domain of TCR clone 216316 (TRAV27, TRAJ42)
CAGGGSQGNLIF

SEQ ID NO: 432632 - protein, 16 aa, Homo sapiens
  CDR3 for beta chain variable domain of TCR clone 216316 (TRBV19, TRBJ2-2)
CASRSPGTGATGELFF

SEQ ID NO: 432633 - protein, 13 aa, Homo sapiens
  CDR3 for alpha chain variable domain of TCR clone 216317 (TRAV13-2, TRAJ13)
GAERPGGYQKVTF

SEQ ID NO: 432634 - protein, 17 aa, Homo sapiens
  CDR3 for beta chain variable domain of TCR clone 216317 (TRBV11-2, TRBJ2-1)
CASSLYPPGVEYNEQFF

SEQ ID NO: 432635 - protein, 12 aa, Homo sapiens
  CDR3 for alpha chain variable domain of TCR clone 216318 (TRAV1-2, TRAJ33)
CSALDSDYQLIW

SEQ ID NO: 432636 - protein, 14 aa, Homo sapiens
  CDR3 for beta chain variable domain of TCR clone 216318 (TRBV20-1, TRBJ2-1)
CSAQIGGSANEQFF

SEQ ID NO: 432637 - protein, 14 aa, Homo sapiens
  CDR3 for alpha chain variable domain of TCR clone 216319 (TRAV17, TRAJ40)
CATALTSGTYKYIF

SEQ ID NO: 432638 - protein, 13 aa, Homo sapiens
  CDR3 for beta chain variable domain of TCR clone 216319 (TRBV10-3, TRBJ2-7)
CASKLAVNYEQYF

SEQ ID NO: 432639 - protein, 11 aa, Homo sapiens
  CDR3 for alpha chain variable domain of TCR clone 216320 (TRAV27, TRAJ20)
CAGLNDYKLSF

SEQ ID NO: 432640 - protein, 13 aa, Homo sapiens
  CDR3 for beta chain variable domain of TCR clone 216320 (TRBV19, TRBJ2-1)
CASKVGAGGEQFF

SEQ ID NO: 432641 - protein, 18 aa, Homo sapiens
  CDR3 for alpha chain variable domain of TCR clone 216321 (TRAV29/DV5, TRAJ26)
CSVLLCSKRKPEGQNFVF

SEQ ID NO: 432642 - protein, 17 aa, Homo sapiens
  CDR3 for beta chain variable domain of TCR clone 216321 (TRBV20-1, TRBJ2-2)
CSASGSGQGGLTGELSF

SEQ ID NO: 432643 - protein, 13 aa, Homo sapiens
  CDR3 for alpha chain variable domain of TCR clone 216322 (TRAV20, TRAJ45)
CAVKKRRCRRTHL

SEQ ID NO: 432644 - protein, 14 aa, Homo sapiens
  CDR3 for beta chain variable domain of TCR clone 216322 (TRBV15, TRBJ2-5)
CATSIGGLVETQYF

SEQ ID NO: 432645 - protein, 15 aa, Homo sapiens
  CDR3 for alpha chain variable domain of TCR clone 216323 (TRAV26-1, TRAJ29)
CIVRVEGSGNTTLVL

SEQ ID NO: 432646 - protein, 15 aa, Homo sapiens
  CDR3 for beta chain variable domain of TCR clone 216323 (TRBV7-9, TRBJ1-5)
CASSQGHQPNQPQHF

SEQ ID NO: 432647 - protein, 18 aa, Homo sapiens
  CDR3 for alpha chain variable domain of TCR clone 216324 (TRAV17, TRAJ28)
CATDPPRGPGAGRYQLTF

SEQ ID NO: 432648 - protein, 14 aa, Homo sapiens
  CDR3 for beta chain variable domain of TCR clone 216324 (TRBV13, TRBJ2-5)
CASSLDYPQETQYF

SEQ ID NO: 432649 - protein, 14 aa, Homo sapiens
  CDR3 for alpha chain variable domain of TCR clone 216325 (TRAV26-1, TRAJ38)
CIADNAGNNRKLLW

SEQ ID NO: 432650 - protein, 13 aa, Homo sapiens
  CDR3 for beta chain variable domain of TCR clone 216325 (TRBV7-9, TRBJ2-3)
CASSPGSTDTQYF

SEQ ID NO: 432651 - protein, 14 aa, Homo sapiens
  CDR3 for alpha chain variable domain of TCR clone 216326 (TRAV1-2, TRAJ6)
CTVRSSGGGYIPTF

SEQ ID NO: 432652 - protein, 18 aa, Homo sapiens
  CDR3 for beta chain variable domain of TCR clone 216326 (TRBV20-1, TRBJ2-3)
CSASGLAGGPGTTDTRYF

SEQ ID NO: 432653 - protein, 11 aa, Homo sapiens
  CDR3 for alpha chain variable domain of TCR clone 216327 (TRAV2, TRAJ13)
CASGGYQKVTF

SEQ ID NO: 432654 - protein, 15 aa, Homo sapiens
  CDR3 for beta chain variable domain of TCR clone 216327 (TRBV6-1, TRBJ2-2)
CAISRLRGDTGELFF

SEQ ID NO: 432655 - protein, 11 aa, Homo sapiens
  CDR3 for alpha chain variable domain of TCR clone 216328 (TRAV21, TRAJ34)
CAVTNTDKLIF

SEQ ID NO: 432656 - protein, 14 aa, Homo sapiens
  CDR3 for beta chain variable domain of TCR clone 216328 (TRBV7-3, TRBJ2-1)
CASSLSGSYNEQFF

SEQ ID NO: 432657 - protein, 13 aa, Homo sapiens
  CDR3 for alpha chain variable domain of TCR clone 216329 (TRAV2, TRAJ40)
CAVDTSGTYKYIF

SEQ ID NO: 432658 - protein, 14 aa, Homo sapiens
  CDR3 for beta chain variable domain of TCR clone 216329 (TRBV19, TRBJ2-1)
CASPTFDLSGEQFF

SEQ ID NO: 432659 - protein, 14 aa, Homo sapiens
  CDR3 for alpha chain variable domain of TCR clone 216330 (TRAV12-2, TRAJ22)
CAVRFSGSARQLTF

SEQ ID NO: 432660 - protein, 15 aa, Homo sapiens
  CDR3 for beta chain variable domain of TCR clone 216330 (TRBV5-1, TRBJ2-1)
CASSPPRAPYNEQFF

SEQ ID NO: 432661 - protein, 15 aa, Homo sapiens
  CDR3 for alpha chain variable domain of TCR clone 216331 (TRAV13-1, TRAJ5)
CAVYIRDTGRRALTF

SEQ ID NO: 432662 - protein, 16 aa, Homo sapiens
  CDR3 for beta chain variable domain of TCR clone 216331 (TRBV12-4, TRBJ2-1)
CASTEQGMDRSNVQFF

SEQ ID NO: 432663 - protein, 13 aa, Homo sapiens
  CDR3 for alpha chain variable domain of TCR clone 216332 (TRAV27, TRAJ3)
ASLRGSSASKIIF

SEQ ID NO: 432664 - protein, 15 aa, Homo sapiens
  CDR3 for beta chain variable domain of TCR clone 216332 (TRBV28, TRBJ1-3)
CAISMGWASGNTIYF

SEQ ID NO: 432665 - protein, 12 aa, Homo sapiens
  CDR3 for alpha chain variable domain of TCR clone 216333 (TRAV12-3, TRAJ17)
CAMTLTGNKLTF

SEQ ID NO: 432666 - protein, 12 aa, Homo sapiens
  CDR3 for beta chain variable domain of TCR clone 216333 (TRBV11-2, TRBJ2-7)
CASSLPTYAQYF

SEQ ID NO: 432667 - protein, 11 aa, Homo sapiens
  CDR3 for alpha chain variable domain of TCR clone 216334 (TRAV3, TRAJ39)
CAVRDLPIDSR

SEQ ID NO: 432668 - protein, 14 aa, Homo sapiens
  CDR3 for beta chain variable domain of TCR clone 216334 (TRBV25-1, TRBJ2-3)
CASRGTPSTDTQYF

SEQ ID NO: 432669 - protein, 21 aa, Homo sapiens
  CDR3 for alpha chain variable domain of TCR clone 216335 (TRAV25, TRAJ3)
TATQTTDVGTFAYSSASKIIF

SEQ ID NO: 432670 - protein, 13 aa, Homo sapiens
  CDR3 for beta chain variable domain of TCR clone 216335 (TRBV7-9, TRBJ1-2)
CASSLKQNYGYTF

SEQ ID NO: 432671 - protein, 16 aa, Homo sapiens
  CDR3 for alpha chain variable domain of TCR clone 216336 (TRAV21, TRAJ37)
FAVRTAGSSNTGTLIF

SEQ ID NO: 432672 - protein, 13 aa, Homo sapiens
  CDR3 for beta chain variable domain of TCR clone 216336 (TRBV7-9, TRBJ2-5)
CASLPSGRETQYF

SEQ ID NO: 432673 - protein, 18 aa, Homo sapiens
  CDR3 for alpha chain variable domain of TCR clone 216337 (TRAV13-1, TRAJ52)
CAASERSAGGTSYGKLTF

SEQ ID NO: 432674 - protein, 13 aa, Homo sapiens
  CDR3 for beta chain variable domain of TCR clone 216337 (TRBV12-4, TRBJ1-2)
CASSLRQEKGYTF

SEQ ID NO: 432675 - protein, 14 aa, Homo sapiens
  CDR3 for alpha chain variable domain of TCR clone 216338 (TRAV21, TRAJ35)
CAVMPIGFGNVLHF

SEQ ID NO: 432676 - protein, 19 aa, Homo sapiens
  CDR3 for beta chain variable domain of TCR clone 216338 (TRBV19, TRBJ2-5)
CASSIGQVTDFFLGETQYF

SEQ ID NO: 432677 - protein, 13 aa, Homo sapiens
  CDR3 for alpha chain variable domain of TCR clone 216339 (TRAV12-2, TRAJ13)
CAVTAGGYQKVTF

SEQ ID NO: 432678 - protein, 15 aa, Homo sapiens
  CDR3 for beta chain variable domain of TCR clone 216339 (TRBV6-3, TRBJ2-7)
CASSSPGTVFYEQYF

SEQ ID NO: 432679 - protein, 14 aa, Homo sapiens
  CDR3 for alpha chain variable domain of TCR clone 216340 (TRAV9-2, TRAJ39)
CALYIYNAGNMLTF

SEQ ID NO: 432680 - protein, 13 aa, Homo sapiens
  CDR3 for beta chain variable domain of TCR clone 216340 (TRBV10-3, TRBJ2-3)
CAIRDTGADTQYF

SEQ ID NO: 432681 - protein, 13 aa, Homo sapiens
  CDR3 for alpha chain variable domain of TCR clone 216341 (TRAV12-1, TRAJ26)
CVVRRNYGQNFVF

SEQ ID NO: 432682 - protein, 14 aa, Homo sapiens
  CDR3 for beta chain variable domain of TCR clone 216341 (TRBV7-2, TRBJ1-2)
CASSQTGSTYGYTF

SEQ ID NO: 432683 - protein, 19 aa, Homo sapiens
  CDR3 for alpha chain variable domain of TCR clone 216342 (TRAV1-2, TRAJ26)
CLLPLCCERPDNYGQNFVF

SEQ ID NO: 432684 - protein, 16 aa, Homo sapiens
  CDR3 for beta chain variable domain of TCR clone 216342 (TRBV7-3, TRBJ2-1)
CASSLEGYRSYNEQFF

SEQ ID NO: 432685 - protein, 12 aa, Homo sapiens
  CDR3 for alpha chain variable domain of TCR clone 216343 (TRAV29/DV5, TRAJ49)
CAATDTGNQFYF

SEQ ID NO: 432686 - protein, 19 aa, Homo sapiens
  CDR3 for beta chain variable domain of TCR clone 216343 (TRBV25-1, TRBJ2-2)
CAILVYGVDRGRKTGELFF

SEQ ID NO: 432687 - protein, 14 aa, Homo sapiens
  CDR3 for alpha chain variable domain of TCR clone 216344 (TRAV12-2, TRAJ17)
CAVLFKAAGNKLTF

SEQ ID NO: 432688 - protein, 15 aa, Homo sapiens
  CDR3 for beta chain variable domain of TCR clone 216344 (TRBV5-1, TRBJ2-7)
CASSLNGGPAREQYF

SEQ ID NO: 432689 - protein, 13 aa, Homo sapiens
  CDR3 for alpha chain variable domain of TCR clone 216345 (TRAV36/DV7, TRAJ37)
CAVFSSNTGKLIF

SEQ ID NO: 432690 - protein, 14 aa, Homo sapiens
  CDR3 for beta chain variable domain of TCR clone 216345 (TRBV12-4, TRBJ1-1)
CASSLGTGGTEAFF

SEQ ID NO: 432691 - protein, 16 aa, Homo sapiens
  CDR3 for alpha chain variable domain of TCR clone 216346 (TRAV13-2, TRAJ32)
CAENMNYGGATNKLIF

SEQ ID NO: 432692 - protein, 14 aa, Homo sapiens
  CDR3 for beta chain variable domain of TCR clone 216346 (TRBV15, TRBJ2-5)
CATSSTGYRETQYF

SEQ ID NO: 432693 - protein, 10 aa, Homo sapiens
  CDR3 for alpha chain variable domain of TCR clone 216347 (TRAV23/DV6, TRAJ43)
CAAAVAALEQ

SEQ ID NO: 432694 - protein, 15 aa, Homo sapiens
  CDR3 for beta chain variable domain of TCR clone 216347 (TRBV10-2, TRBJ2-6)
CASSEQGTGANDLTF

SEQ ID NO: 432695 - protein, 14 aa, Homo sapiens
  CDR3 for alpha chain variable domain of TCR clone 216348 (TRAV12-2, TRAJ4)
CAEDLSVGYNKLIF

SEQ ID NO: 432696 - protein, 13 aa, Homo sapiens
  CDR3 for beta chain variable domain of TCR clone 216348 (TRBV7-9, TRBJ1-2)
CASSLKQNYGYTF

SEQ ID NO: 432697 - protein, 13 aa, Homo sapiens
  CDR3 for alpha chain variable domain of TCR clone 216349 (TRAV8-3, TRAJ20)
CAVGRPNDYKLSF

SEQ ID NO: 432698 - protein, 14 aa, Homo sapiens
  CDR3 for beta chain variable domain of TCR clone 216349 (TRBV12-5, TRBJ2-5)
CASGSRTYQETEYF

SEQ ID NO: 432699 - protein, 14 aa, Homo sapiens
  CDR3 for alpha chain variable domain of TCR clone 216350 (TRAV12-3, TRAJ9)
CAMSPNTGGFKTIF

SEQ ID NO: 432700 - protein, 17 aa, Homo sapiens
  CDR3 for beta chain variable domain of TCR clone 216350 (TRBV7-9, TRBJ2-1)
CASSLVASYPSYNEQFF

SEQ ID NO: 432701 - protein, 13 aa, Homo sapiens
  CDR3 for alpha chain variable domain of TCR clone 216351 (TRAV12-3, TRAJ5)
CAMRPTGRRALTF

SEQ ID NO: 432702 - protein, 13 aa, Homo sapiens
  CDR3 for beta chain variable domain of TCR clone 216351 (TRBV2, TRBJ2-7)
CASSVVEAYEQSF

SEQ ID NO: 432703 - protein, 17 aa, Homo sapiens
  CDR3 for alpha chain variable domain of TCR clone 216352 (TRAV3, TRAJ42)
CAVRDRDYGGSQGNRIF

SEQ ID NO: 432704 - protein, 15 aa, Homo sapiens
  CDR3 for beta chain variable domain of TCR clone 216352 (TRBV6-6, TRBJ2-7)
CASSYSYGGPYEQYF

SEQ ID NO: 432705 - protein, 16 aa, Homo sapiens
  CDR3 for alpha chain variable domain of TCR clone 216353 (TRAV12-1, TRAJ48)
CVVNMVSNFGNEKLTF

SEQ ID NO: 432706 - protein, 13 aa, Homo sapiens
  CDR3 for beta chain variable domain of TCR clone 216353 (TRBV2, TRBJ1-5)
CASLGDSNQPQHF

SEQ ID NO: 432707 - protein, 13 aa, Homo sapiens
  CDR3 for alpha chain variable domain of TCR clone 216354 (TRAV1-2, TRAJ9)
CAALNTGGFKTIF

SEQ ID NO: 432708 - protein, 14 aa, Homo sapiens
  CDR3 for beta chain variable domain of TCR clone 216354 (TRBV12-4, TRBJ2-7)
CASSLTGRAYEQYF

SEQ ID NO: 432709 - protein, 13 aa, Homo sapiens
  CDR3 for alpha chain variable domain of TCR clone 216355 (TRAV26-1, TRAJ12)
CIVRPDSSYKLIF

SEQ ID NO: 432710 - protein, 13 aa, Homo sapiens
  CDR3 for beta chain variable domain of TCR clone 216355 (TRBV20-1, TRBJ2-7)
CSATHTSGYEQYF

SEQ ID NO: 432711 - protein, 15 aa, Homo sapiens
  CDR3 for alpha chain variable domain of TCR clone 216356 (TRAV10, TRAJ44)
CVVSGATDTASKLTF

SEQ ID NO: 432712 - protein, 14 aa, Homo sapiens
  CDR3 for beta chain variable domain of TCR clone 216356 (TRBV12-4, TRBJ1-5)
CQHSTGIWQSAQHF

SEQ ID NO: 432713 - protein, 11 aa, Homo sapiens
  CDR3 for alpha chain variable domain of TCR clone 216357 (TRAV26-1, TRAJ47)
CIFFHGIWKQT

SEQ ID NO: 432714 - protein, 16 aa, Homo sapiens
  CDR3 for beta chain variable domain of TCR clone 216357 (TRBV28, TRBJ2-6)
CASSNRRGSGANVLTF

SEQ ID NO: 432715 - protein, 14 aa, Homo sapiens
  CDR3 for alpha chain variable domain of TCR clone 216358 (TRAV13-1, TRAJ35)
CAASKGGFGNVLHR

SEQ ID NO: 432716 - protein, 15 aa, Homo sapiens
  CDR3 for beta chain variable domain of TCR clone 216358 (TRBV7-9, TRBJ2-2)
CASGPLDTFPGELFF

SEQ ID NO: 432717 - protein, 12 aa, Homo sapiens
  CDR3 for alpha chain variable domain of TCR clone 216359 (TRAV12-1, TRAJ34)
CVVAGATDKVIF

SEQ ID NO: 432718 - protein, 12 aa, Homo sapiens
  CDR3 for beta chain variable domain of TCR clone 216359 (TRBV7-9, TRBJ1-1)
CASSLVRGEAFF

SEQ ID NO: 432719 - protein, 15 aa, Homo sapiens
  CDR3 for alpha chain variable domain of TCR clone 216360 (TRAV26-2, TRAJ21)
CILSNTTSTNFTLDL

SEQ ID NO: 432720 - protein, 16 aa, Homo sapiens
  CDR3 for beta chain variable domain of TCR clone 216360 (TRBV4-2, TRBJ2-6)
CASSQARSAGANVLTF

SEQ ID NO: 432721 - protein, 16 aa, Homo sapiens
  CDR3 for alpha chain variable domain of TCR clone 216361 (TRAV12-1, TRAJ48)
CVLNMVSNFGNEKLTF

SEQ ID NO: 432722 - protein, 18 aa, Homo sapiens
  CDR3 for beta chain variable domain of TCR clone 216361 (TRBV11-2, TRBJ2-6)
CASSLNPFLGTGANVLTF

SEQ ID NO: 432723 - protein, 16 aa, Homo sapiens
  CDR3 for alpha chain variable domain of TCR clone 216362 (TRAV3, TRAJ5)
CAVRNLMDTGRRALTF

SEQ ID NO: 432724 - protein, 16 aa, Homo sapiens
  CDR3 for beta chain variable domain of TCR clone 216362 (TRBV4-2, TRBJ2-7)
CGSSQEGLANSYEQYF

SEQ ID NO: 432725 - protein, 14 aa, Homo sapiens
  CDR3 for alpha chain variable domain of TCR clone 216363 (TRAV12-3, TRAJ42)
CAMNHGGSQGNLIF

SEQ ID NO: 432726 - protein, 15 aa, Homo sapiens
  CDR3 for beta chain variable domain of TCR clone 216363 (TRBV20-1, TRBJ2-7)
CSARDRVSGMDEQYF

SEQ ID NO: 432727 - protein, 14 aa, Homo sapiens
  CDR3 for alpha chain variable domain of TCR clone 216364 (TRAV12-1, TRAJ12)
CVVTRMDSSYKLIF

SEQ ID NO: 432728 - protein, 13 aa, Homo sapiens
  CDR3 for beta chain variable domain of TCR clone 216364 (TRBV20-1, TRBJ1-1)
CSARGGGNTETVF

SEQ ID NO: 432729 - protein, 16 aa, Homo sapiens
  CDR3 for alpha chain variable domain of TCR clone 216365 (TRAV4, TRAJ9)
CLVGDPNRPGGFKTIF

SEQ ID NO: 432730 - protein, 16 aa, Homo sapiens
  CDR3 for beta chain variable domain of TCR clone 216365 (TRBV28, TRBJ1-4)
CASSPPCRWRSEKLFF

SEQ ID NO: 432731 - protein, 14 aa, Homo sapiens
  CDR3 for alpha chain variable domain of TCR clone 216366 (TRAV29/DV5, TRAJ36)
CAARRKTGANKLIF

SEQ ID NO: 432732 - protein, 14 aa, Homo sapiens
  CDR3 for beta chain variable domain of TCR clone 216366 (TRBV12-5, TRBJ2-5)
CASGSRRHQETQYF

SEQ ID NO: 432733 - protein, 17 aa, Homo sapiens
  CDR3 for alpha chain variable domain of TCR clone 216367 (TRAV12-2, TRAJ52)
CAVNKGAGGTSYGKLTF

SEQ ID NO: 432734 - protein, 18 aa, Homo sapiens
  CDR3 for beta chain variable domain of TCR clone 216367 (TRBV12-4, TRBJ2-2)
CASSLVAGTRGRAGELFF

SEQ ID NO: 432735 - protein, 14 aa, Homo sapiens
  CDR3 for alpha chain variable domain of TCR clone 216368 (TRAV26-1, TRAJ48)
CIVSSNFGNEKLTF

SEQ ID NO: 432736 - protein, 15 aa, Homo sapiens
  CDR3 for beta chain variable domain of TCR clone 216368 (TRBV9, TRBJ1-6)
CASSVAGTGDSPHHF

SEQ ID NO: 432737 - protein, 18 aa, Homo sapiens
  CDR3 for alpha chain variable domain of TCR clone 216369 (TRAV12-3, TRAJ52)
CAMSRTNAGGTSYGRLTV

SEQ ID NO: 432738 - protein, 17 aa, Homo sapiens
  CDR3 for beta chain variable domain of TCR clone 216369 (TRBV7-3, TRBJ2-3)
CASSLMKRMRGADTQYF

SEQ ID NO: 432739 - protein, 11 aa, Homo sapiens
  CDR3 for alpha chain variable domain of TCR clone 216370 (TRAV2, TRAJ13)
CASGGYQKVTF

SEQ ID NO: 432740 - protein, 11 aa, Homo sapiens
  CDR3 for beta chain variable domain of TCR clone 216370 (TRBV25-1, TRBJ2-7)
CASSTSYEQYF

SEQ ID NO: 432741 - protein, 13 aa, Homo sapiens
  CDR3 for alpha chain variable domain of TCR clone 216371 (TRAV3, TRAJ29)
CAVSDILDTPLVF

SEQ ID NO: 432742 - protein, 14 aa, Homo sapiens
  CDR3 for beta chain variable domain of TCR clone 216371 (TRBV27, TRBJ2-1)
CASSATGGYNEQFF

SEQ ID NO: 432743 - protein, 12 aa, Homo sapiens
  CDR3 for alpha chain variable domain of TCR clone 216372 (TRAV12-3, TRAJ17)
CAMTLTGNKLPF

SEQ ID NO: 432744 - protein, 15 aa, Homo sapiens
  CDR3 for beta chain variable domain of TCR clone 216372 (TRBV20-1, TRBJ2-7)
CSARDRVAGMDEQYF

SEQ ID NO: 432745 - protein, 16 aa, Homo sapiens
  CDR3 for alpha chain variable domain of TCR clone 216373 (TRAV8-2, TRAJ7)
CVVSEGPYYGNNRLAF

SEQ ID NO: 432746 - protein, 15 aa, Homo sapiens
  CDR3 for beta chain variable domain of TCR clone 216373 (TRBV27, TRBJ2-3)
CASSLGLSATDTQYF

SEQ ID NO: 432747 - protein, 21 aa, Homo sapiens
  CDR3 for alpha chain variable domain of TCR clone 216374 (TRAV2, TRAJ20)
AAHPQVREADAAVYRDCKLSF

SEQ ID NO: 432748 - protein, 12 aa, Homo sapiens
  CDR3 for beta chain variable domain of TCR clone 216374 (TRBV11-2, TRBJ2-2)
CASSLGGGELLF

SEQ ID NO: 432749 - protein, 11 aa, Homo sapiens
  CDR3 for alpha chain variable domain of TCR clone 216375 (TRAV4, TRAJ31)
CLVGDNARPIF

SEQ ID NO: 432750 - protein, 16 aa, Homo sapiens
  CDR3 for beta chain variable domain of TCR clone 216375 (TRBV7-2, TRBJ2-5)
CASSSKWLSGQETQYF

SEQ ID NO: 432751 - protein, 12 aa, Homo sapiens
  CDR3 for alpha chain variable domain of TCR clone 216376 (TRAV21, TRAJ3)
CCFYSSASKIIF

SEQ ID NO: 432752 - protein, 13 aa, Homo sapiens
  CDR3 for beta chain variable domain of TCR clone 216376 (TRBV12-4, TRBJ2-7)
CASSFVPTAEQYF

SEQ ID NO: 432753 - protein, 14 aa, Homo sapiens
  CDR3 for alpha chain variable domain of TCR clone 216377 (TRAV17, TRAJ11)
CATDTSRGYSTLTF

SEQ ID NO: 432754 - protein, 13 aa, Homo sapiens
  CDR3 for beta chain variable domain of TCR clone 216377 (TRBV19, TRBJ2-5)
CASRDSRRETQYV

SEQ ID NO: 432755 - protein, 14 aa, Homo sapiens
  CDR3 for alpha chain variable domain of TCR clone 216378 (TRAV1-1, TRAJ27)
CAVIYNTNAGKSTF

SEQ ID NO: 432756 - protein, 14 aa, Homo sapiens
  CDR3 for beta chain variable domain of TCR clone 216378 (TRBV19, TRBJ2-3)
CASSIDLGGDTQYF

SEQ ID NO: 432757 - protein, 11 aa, Homo sapiens
  CDR3 for alpha chain variable domain of TCR clone 216379 (TRAV9-2, TRAJ50)
CALSGVDKVIF

SEQ ID NO: 432758 - protein, 14 aa, Homo sapiens
  CDR3 for beta chain variable domain of TCR clone 216379 (TRBV19, TRBJ2-1)
CASPTFVLSGEQFF

SEQ ID NO: 432759 - protein, 12 aa, Homo sapiens
  CDR3 for alpha chain variable domain of TCR clone 216380 (TRAV16, TRAJ26)
CASKVGGQNFVF

SEQ ID NO: 432760 - protein, 13 aa, Homo sapiens
  CDR3 for beta chain variable domain of TCR clone 216380 (TRBV25-1, TRBJ1-1)
CASSDRGRAEAFF

SEQ ID NO: 432761 - protein, 19 aa, Homo sapiens
  CDR3 for alpha chain variable domain of TCR clone 216381 (TRAV2, TRAJ20)
ILQVREADAAVYRDCKLSF

SEQ ID NO: 432762 - protein, 17 aa, Homo sapiens
  CDR3 for beta chain variable domain of TCR clone 216381 (TRBV11-2, TRBJ2-1)
CASSLYPPGAEYNEQFF

SEQ ID NO: 432763 - protein, 13 aa, Homo sapiens
  CDR3 for alpha chain variable domain of TCR clone 216382 (TRAV1-1, TRAJ9)
CAAKNAGGFKTIL

SEQ ID NO: 432764 - protein, 14 aa, Homo sapiens
  CDR3 for beta chain variable domain of TCR clone 216382 (TRBV20-1, TRBJ2-1)
CSAQIGGSANEQFF

SEQ ID NO: 432765 - protein, 17 aa, Homo sapiens
  CDR3 for alpha chain variable domain of TCR clone 216383 (TRAV4, )
CLVDIQNPDPAVYQLRD

SEQ ID NO: 432766 - protein, 15 aa, Homo sapiens
  CDR3 for beta chain variable domain of TCR clone 216383 (TRBV20-1, TRBJ1-5)
CSARVGRVVSQPQHL

SEQ ID NO: 432767 - protein, 14 aa, Homo sapiens
  CDR3 for alpha chain variable domain of TCR clone 216384 (TRAV17, TRAJ57)
CATDASGGSEKLVF

SEQ ID NO: 432768 - protein, 14 aa, Homo sapiens
  CDR3 for beta chain variable domain of TCR clone 216384 (TRBV4-2, TRBJ2-1)
CTSGLDRAYNEQFF

SEQ ID NO: 432769 - protein, 11 aa, Homo sapiens
  CDR3 for alpha chain variable domain of TCR clone 216385 (TRAV21, TRAJ34)
CAHYNTDKLIF

SEQ ID NO: 432770 - protein, 15 aa, Homo sapiens
  CDR3 for beta chain variable domain of TCR clone 216385 (TRBV20-1, TRBJ2-2)
CSAIPGHSNTGELFF

SEQ ID NO: 432771 - protein, 16 aa, Homo sapiens
  CDR3 for alpha chain variable domain of TCR clone 216386 (TRAV12-1, TRAJ43)
CVVNPHRFGAGTRLTV

SEQ ID NO: 432772 - protein, 15 aa, Homo sapiens
  CDR3 for beta chain variable domain of TCR clone 216386 (TRBV20-1, TRBJ1-1)
CSAREGGTLKLSLDK

SEQ ID NO: 432773 - protein, 11 aa, Homo sapiens
  CDR3 for alpha chain variable domain of TCR clone 216387 (TRAV39, TRAJ49)
CDVDISTPFYF

SEQ ID NO: 432774 - protein, 11 aa, Homo sapiens
  CDR3 for beta chain variable domain of TCR clone 216387 (TRBV7-8, TRBJ2-7)
CASSLSLEQYF

SEQ ID NO: 432775 - protein, 13 aa, Homo sapiens
  CDR3 for alpha chain variable domain of TCR clone 216388 (TRAV26-1, TRAJ34)
CIVRPWITDKLIF

SEQ ID NO: 432776 - protein, 13 aa, Homo sapiens
  CDR3 for beta chain variable domain of TCR clone 216388 (TRBV5-1, TRBJ2-1)
CPSSLGSYNEQFF

SEQ ID NO: 432777 - protein, 13 aa, Homo sapiens
  CDR3 for alpha chain variable domain of TCR clone 216389 (TRAV21, TRAJ15)
CAVRNQAGTALIF

SEQ ID NO: 432778 - protein, 16 aa, Homo sapiens
  CDR3 for beta chain variable domain of TCR clone 216389 (TRBV11-2, TRBJ2-7)
CASSPTTGGVSYEQYF

SEQ ID NO: 432779 - protein, 18 aa, Homo sapiens
  CDR3 for alpha chain variable domain of TCR clone 216390 (TRAV13-1, TRAJ52)
CAAKNPNAGGTSYGKLTF

SEQ ID NO: 432780 - protein, 18 aa, Homo sapiens
  CDR3 for beta chain variable domain of TCR clone 216390 (TRBV12-4, TRBJ2-4)
CASSRTGAVDVAKNNQYF

SEQ ID NO: 432781 - protein, 15 aa, Homo sapiens
  CDR3 for alpha chain variable domain of TCR clone 216391 (TRAV26-1, TRAJ27)
CVVRVLTPMQANQPL

SEQ ID NO: 432782 - protein, 13 aa, Homo sapiens
  CDR3 for beta chain variable domain of TCR clone 216391 (TRBV20-1, TRBJ2-7)
CSATHTSGYEQYF

SEQ ID NO: 432783 - protein, 15 aa, Homo sapiens
  CDR3 for alpha chain variable domain of TCR clone 216392 (TRAV8-3, TRAJ45)
CASSYSGGGADGLTF

SEQ ID NO: 432784 - protein, 17 aa, Homo sapiens
  CDR3 for beta chain variable domain of TCR clone 216392 (TRBV7-8, TRBJ1-2)
CDSSLRPLQGHLYGYTF

SEQ ID NO: 432785 - protein, 13 aa, Homo sapiens
  CDR3 for alpha chain variable domain of TCR clone 216393 (TRAV2, TRAJ40)
CAVVTSGTYKYIF

SEQ ID NO: 432786 - protein, 14 aa, Homo sapiens
  CDR3 for beta chain variable domain of TCR clone 216393 (TRBV7-2, TRBJ2-7)
CASSVGARTYEQYF

SEQ ID NO: 432787 - protein, 14 aa, Homo sapiens
  CDR3 for alpha chain variable domain of TCR clone 216394 (TRAV3, TRAJ6)
CAVRDWGGSDIPTF

SEQ ID NO: 432788 - protein, 17 aa, Homo sapiens
  CDR3 for beta chain variable domain of TCR clone 216394 (TRBV6-5, TRBJ2-1)
CASRLSGRFESYNEQFF

SEQ ID NO: 432789 - protein, 13 aa, Homo sapiens
  CDR3 for alpha chain variable domain of TCR clone 216395 (TRAV1-2, TRAJ20)
CAVRDGNDYKLSF

SEQ ID NO: 432790 - protein, 15 aa, Homo sapiens
  CDR3 for beta chain variable domain of TCR clone 216395 (TRBV6-3, TRBJ2-7)
CASSSPGTVFYEQYF

SEQ ID NO: 432791 - protein, 14 aa, Homo sapiens
  CDR3 for alpha chain variable domain of TCR clone 216396 (TRAV1-2, TRAJ16)
CAVNRFSDGQKLLF

SEQ ID NO: 432792 - protein, 14 aa, Homo sapiens
  CDR3 for beta chain variable domain of TCR clone 216396 (TRBV25-1, TRBJ1-1)
CASTHLGGNTGAFF

SEQ ID NO: 432793 - protein, 13 aa, Homo sapiens
  CDR3 for alpha chain variable domain of TCR clone 216397 (TRAV16, TRAJ22)
SAMSAGSARQLTF

SEQ ID NO: 432794 - protein, 13 aa, Homo sapiens
  CDR3 for beta chain variable domain of TCR clone 216397 (TRBV7-9, TRBJ1-2)
CASSLKQNYGYTF

SEQ ID NO: 432795 - protein, 14 aa, Homo sapiens
  CDR3 for alpha chain variable domain of TCR clone 216398 (TRAV13-2, TRAJ53)
CRDHGGGSNYKLTF

SEQ ID NO: 432796 - protein, 14 aa, Homo sapiens
  CDR3 for beta chain variable domain of TCR clone 216398 (TRBV2, TRBJ2-7)
CASSLTSGGYEQYF

SEQ ID NO: 432797 - protein, 14 aa, Homo sapiens
  CDR3 for alpha chain variable domain of TCR clone 216399 (TRAV12-3, TRAJ10)
SHLPLTGGGNKLTF

SEQ ID NO: 432798 - protein, 13 aa, Homo sapiens
  CDR3 for beta chain variable domain of TCR clone 216399 (TRBV11-2, TRBJ2-7)
CASSGTRPYEQYF

SEQ ID NO: 432799 - protein, 15 aa, Homo sapiens
  CDR3 for alpha chain variable domain of TCR clone 216400 (TRAV26-2, TRAJ22)
CILRDLSGSARQLTF

SEQ ID NO: 432800 - protein, 14 aa, Homo sapiens
  CDR3 for beta chain variable domain of TCR clone 216400 (TRBV7-2, TRBJ2-3)
CASSGHGGLDTQYF

SEQ ID NO: 432801 - protein, 10 aa, Homo sapiens
  CDR3 for alpha chain variable domain of TCR clone 216401 (TRAV13-1, TRAJ8)
CAAPFQKLVF

SEQ ID NO: 432802 - protein, 17 aa, Homo sapiens
  CDR3 for beta chain variable domain of TCR clone 216401 (TRBV10-3, TRBJ2-3)
CAITHPLADLEHRYAVF

SEQ ID NO: 432803 - protein, 21 aa, Homo sapiens
  CDR3 for alpha chain variable domain of TCR clone 216402 (TRAV6, TRAJ36)
CARQTTPSLGLERDSPLFPIS

SEQ ID NO: 432804 - protein, 14 aa, Homo sapiens
  CDR3 for beta chain variable domain of TCR clone 216402 (TRBV10-2, TRBJ1-5)
CASSSTGRNQPQHF

SEQ ID NO: 432805 - protein, 11 aa, Homo sapiens
  CDR3 for alpha chain variable domain of TCR clone 216403 (TRAV2, TRAJ31)
CAVYNNARLMF

SEQ ID NO: 432806 - protein, 16 aa, Homo sapiens
  CDR3 for beta chain variable domain of TCR clone 216403 (TRBV28, TRBJ1-6)
CASSSLLEGDNSTLHF

SEQ ID NO: 432807 - protein, 13 aa, Homo sapiens
  CDR3 for alpha chain variable domain of TCR clone 216404 (TRAV3, TRAJ21)
CAVREPDFNKFYF

SEQ ID NO: 432808 - protein, 16 aa, Homo sapiens
  CDR3 for beta chain variable domain of TCR clone 216404 (TRBV7-7, TRBJ2-3)
CASSPGTSGSTDTQYF

SEQ ID NO: 432809 - protein, 14 aa, Homo sapiens
  CDR3 for alpha chain variable domain of TCR clone 216405 (TRAV22, TRAJ57)
CAVELQGGSEKLVF

SEQ ID NO: 432810 - protein, 15 aa, Homo sapiens
  CDR3 for beta chain variable domain of TCR clone 216405 (TRBV20-1, TRBJ2-5)
CSAPPRTGFGDTQYF

SEQ ID NO: 432811 - protein, 15 aa, Homo sapiens
  CDR3 for alpha chain variable domain of TCR clone 216406 (TRAV3, TRAJ22)
CAVRDPGGSARQLTF

SEQ ID NO: 432812 - protein, 14 aa, Homo sapiens
  CDR3 for beta chain variable domain of TCR clone 216406 (TRBV20-1, TRBJ2-5)
CSALVPGYQETQYF

SEQ ID NO: 432813 - protein, 14 aa, Homo sapiens
  CDR3 for alpha chain variable domain of TCR clone 216407 (TRAV17, TRAJ32)
CATDPGGATNKLIF

SEQ ID NO: 432814 - protein, 15 aa, Homo sapiens
  CDR3 for beta chain variable domain of TCR clone 216407 (TRBV24-1, TRBJ2-4)
CATSDPRDRANIQYF

SEQ ID NO: 432815 - protein, 10 aa, Homo sapiens
  CDR3 for alpha chain variable domain of TCR clone 216408 (TRAV1-2, TRAJ23)
CAGPGGKLIF

SEQ ID NO: 432816 - protein, 13 aa, Homo sapiens
  CDR3 for beta chain variable domain of TCR clone 216408 (TRBV7-7, TRBJ2-3)
CASSLSRADTQYF

SEQ ID NO: 432817 - protein, 16 aa, Homo sapiens
  CDR3 for alpha chain variable domain of TCR clone 216409 (TRAV3, TRAJ5)
CAVRNLMDTGRRALTF

SEQ ID NO: 432818 - protein, 13 aa, Homo sapiens
  CDR3 for beta chain variable domain of TCR clone 216409 (TRBV4-2, TRBJ1-1)
CASSQAGNTEAFF

SEQ ID NO: 432819 - protein, 18 aa, Homo sapiens
  CDR3 for alpha chain variable domain of TCR clone 216410 (TRAV13-1, TRAJ45)
CAASIGVYSGGGADGLTF

SEQ ID NO: 432820 - protein, 16 aa, Homo sapiens
  CDR3 for beta chain variable domain of TCR clone 216410 (TRBV7-9, TRBJ2-1)
CASSDVAGGSYNEQFF

SEQ ID NO: 432821 - protein, 16 aa, Homo sapiens
  CDR3 for alpha chain variable domain of TCR clone 216411 (TRAV30, TRAJ24)
CGTEIVEADSWGKFQF

SEQ ID NO: 432822 - protein, 15 aa, Homo sapiens
  CDR3 for beta chain variable domain of TCR clone 216411 (TRBV27, TRBJ2-1)
CASSNGGGSSNEQFF

SEQ ID NO: 432823 - protein, 15 aa, Homo sapiens
  CDR3 for alpha chain variable domain of TCR clone 216412 (TRAV29/DV5, TRAJ42)
CAAIGYGGSQGNLIF

SEQ ID NO: 432824 - protein, 12 aa, Homo sapiens
  CDR3 for beta chain variable domain of TCR clone 216412 (TRBV7-8, TRBJ2-1)
CDSSLGHNEQFF

SEQ ID NO: 432825 - protein, 14 aa, Homo sapiens
  CDR3 for alpha chain variable domain of TCR clone 216413 (TRAV29/DV5, TRAJ36)
CAARRKTGANNLFF

SEQ ID NO: 432826 - protein, 15 aa, Homo sapiens
  CDR3 for beta chain variable domain of TCR clone 216413 (TRBV25-1, TRBJ1-4)
CASSPGDSTNEKLFF

SEQ ID NO: 432827 - protein, 18 aa, Homo sapiens
  CDR3 for alpha chain variable domain of TCR clone 216414 (TRAV8-3, TRAJ6)
CAVGAEHQEEATYLHLEE

SEQ ID NO: 432828 - protein, 16 aa, Homo sapiens
  CDR3 for beta chain variable domain of TCR clone 216414 (TRBV12-5, TRBJ2-5)
CASGPQTSGNQETQYF

SEQ ID NO: 432829 - protein, 14 aa, Homo sapiens
  CDR3 for alpha chain variable domain of TCR clone 216415 (TRAV1-2, TRAJ37)
CAVRIKSNTGKLIF

SEQ ID NO: 432830 - protein, 14 aa, Homo sapiens
  CDR3 for beta chain variable domain of TCR clone 216415 (TRBV6-3, TRBJ1-2)
CASSEGGGSYGYTF

SEQ ID NO: 432831 - protein, 12 aa, Homo sapiens
  CDR3 for alpha chain variable domain of TCR clone 216416 (TRAV13-1, TRAJ48)
CAANFGNEKLTF

SEQ ID NO: 432832 - protein, 14 aa, Homo sapiens
  CDR3 for beta chain variable domain of TCR clone 216416 (TRBV12-4, TRBJ1-1)
CASSLGTGGTEAFF

SEQ ID NO: 432833 - protein, 13 aa, Homo sapiens
  CDR3 for alpha chain variable domain of TCR clone 216417 (TRAV29/DV5, TRAJ47)
CAASAEYGNKLDF

SEQ ID NO: 432834 - protein, 15 aa, Homo sapiens
  CDR3 for beta chain variable domain of TCR clone 216417 (TRBV7-9, TRBJ1-4)
CASSARTGGNERLFF

SEQ ID NO: 432835 - protein, 12 aa, Homo sapiens
  CDR3 for alpha chain variable domain of TCR clone 216418 (TRAV12-1, TRAJ40)
CVVYSGTYKYVF

SEQ ID NO: 432836 - protein, 12 aa, Homo sapiens
  CDR3 for beta chain variable domain of TCR clone 216418 (TRBV4-1, TRBJ2-1)
CASSAGGIEQFF

SEQ ID NO: 432837 - protein, 14 aa, Homo sapiens
  CDR3 for alpha chain variable domain of TCR clone 216419 (TRAV12-3, TRAJ33)
CAMSAGDSNYQLIW

SEQ ID NO: 432838 - protein, 11 aa, Homo sapiens
  CDR3 for beta chain variable domain of TCR clone 216419 (TRBV6-1, TRBJ2-7)
CASSDFREQYF

SEQ ID NO: 432839 - protein, 13 aa, Homo sapiens
  CDR3 for alpha chain variable domain of TCR clone 216420 (TRAV21, TRAJ27)
CAARPGHAGKSTF

SEQ ID NO: 432840 - protein, 16 aa, Homo sapiens
  CDR3 for beta chain variable domain of TCR clone 216420 (TRBV12-5, TRBJ2-5)
CASGPRTSGNQETQYF

SEQ ID NO: 432841 - protein, 12 aa, Homo sapiens
  CDR3 for alpha chain variable domain of TCR clone 216421 (TRAV12-1, TRAJ34)
CVVAGATDKLIF

SEQ ID NO: 432842 - protein, 14 aa, Homo sapiens
  CDR3 for beta chain variable domain of TCR clone 216421 (TRBV11-2, TRBJ2-5)
CASSRTGGIETQYF

SEQ ID NO: 432843 - protein, 12 aa, Homo sapiens
  CDR3 for alpha chain variable domain of TCR clone 216422 (TRAV9-2, TRAJ57)
CALRSGSVKLVF

SEQ ID NO: 432844 - protein, 15 aa, Homo sapiens
  CDR3 for beta chain variable domain of TCR clone 216422 (TRBV15, TRBJ1-1)
CATSLQWGRNTEAFF

SEQ ID NO: 432845 - protein, 15 aa, Homo sapiens
  CDR3 for alpha chain variable domain of TCR clone 216423 (TRAV2, TRAJ9)
CAVEDRGTGGFKTIF

SEQ ID NO: 432846 - protein, 16 aa, Homo sapiens
  CDR3 for beta chain variable domain of TCR clone 216423 (TRBV5-7, TRBJ2-5)
CASTLAPAGGRETQYF

SEQ ID NO: 432847 - protein, 11 aa, Homo sapiens
  CDR3 for alpha chain variable domain of TCR clone 216424 (TRAV36/DV7, TRAJ49)
CAVEANTGNQF

SEQ ID NO: 432848 - protein, 13 aa, Homo sapiens
  CDR3 for beta chain variable domain of TCR clone 216424 (TRBV10-3, TRBJ2-7)
CASKLAVNYEQYF

SEQ ID NO: 432849 - protein, 17 aa, Homo sapiens
  CDR3 for alpha chain variable domain of TCR clone 216425 (TRAV27, TRAJ42)
CAERVIYHGGSQGNLIF

SEQ ID NO: 432850 - protein, 14 aa, Homo sapiens
  CDR3 for beta chain variable domain of TCR clone 216425 (TRBV6-6, TRBJ2-3)
CASRLQREADTQYF

SEQ ID NO: 432851 - protein, 15 aa, Homo sapiens
  CDR3 for alpha chain variable domain of TCR clone 216426 (TRAV12-3, TRAJ11)
CAMSEENSGYSTLTF

SEQ ID NO: 432852 - protein, 17 aa, Homo sapiens
  CDR3 for beta chain variable domain of TCR clone 216426 (TRBV27, TRBJ2-7)
CASSTKRPGTGPYEQYF

SEQ ID NO: 432853 - protein, 13 aa, Homo sapiens
  CDR3 for alpha chain variable domain of TCR clone 216427 (TRAV8-6, TRAJ49)
CAVITNTGNKFYF

SEQ ID NO: 432854 - protein, 13 aa, Homo sapiens
  CDR3 for beta chain variable domain of TCR clone 216427 (TRBV10-3, TRBJ2-7)
CASKLAVNYEQYF

SEQ ID NO: 432855 - protein, 11 aa, Homo sapiens
  CDR3 for alpha chain variable domain of TCR clone 216428 (TRAV21, TRAJ48)
CAVDGDEKLTF

SEQ ID NO: 432856 - protein, 16 aa, Homo sapiens
  CDR3 for beta chain variable domain of TCR clone 216428 (TRBV19, TRBJ2-1)
CASSSKGTRSYNEQFF

SEQ ID NO: 432857 - protein, 14 aa, Homo sapiens
  CDR3 for alpha chain variable domain of TCR clone 216429 (TRAV26-2, TRAJ11)
CIPRLNSGYSTLTF

SEQ ID NO: 432858 - protein, 12 aa, Homo sapiens
  CDR3 for beta chain variable domain of TCR clone 216429 (TRBV24-1, TRBJ1-1)
CATLYPDTEAFF

SEQ ID NO: 432859 - protein, 14 aa, Homo sapiens
  CDR3 for alpha chain variable domain of TCR clone 216430 (TRAV12-2, TRAJ3)
CAVKGYSSASKIIF

SEQ ID NO: 432860 - protein, 15 aa, Homo sapiens
  CDR3 for beta chain variable domain of TCR clone 216430 (TRBV4-1, TRBJ1-4)
CASSDTGGTNEKLFF

SEQ ID NO: 432861 - protein, 13 aa, Homo sapiens
  CDR3 for alpha chain variable domain of TCR clone 216431 (TRAV8-4, TRAJ13)
CCDPLGGYQKVTF

SEQ ID NO: 432862 - protein, 14 aa, Homo sapiens
  CDR3 for beta chain variable domain of TCR clone 216431 (TRBV7-2, TRBJ1-2)
CASSQTGSTYGYTF

SEQ ID NO: 432863 - protein, 14 aa, Homo sapiens
  CDR3 for alpha chain variable domain of TCR clone 216432 (TRAV8-3, TRAJ4)
CAVGAAGGYNKLIF

SEQ ID NO: 432864 - protein, 14 aa, Homo sapiens
  CDR3 for beta chain variable domain of TCR clone 216432 (TRBV15, TRBJ2-5)
CATSIGGLGETQYF

SEQ ID NO: 432865 - protein, 11 aa, Homo sapiens
  CDR3 for alpha chain variable domain of TCR clone 216433 (TRAV12-2, TRAJ43)
CAAYNNNDMRF

SEQ ID NO: 432866 - protein, 13 aa, Homo sapiens
  CDR3 for beta chain variable domain of TCR clone 216433 (TRBV12-4, TRBJ2-7)
CASSLSGVYEQYF

SEQ ID NO: 432867 - protein, 13 aa, Homo sapiens
  CDR3 for alpha chain variable domain of TCR clone 216434 (TRAV13-2, TRAJ22)
CRDPSGSARQMTL

SEQ ID NO: 432868 - protein, 15 aa, Homo sapiens
  CDR3 for beta chain variable domain of TCR clone 216434 (TRBV11-3, TRBJ2-1)
CASSLAGQTYNEQFF

SEQ ID NO: 432869 - protein, 14 aa, Homo sapiens
  CDR3 for alpha chain variable domain of TCR clone 216435 (TRAV13-2, TRAJ4)
CAEKGQKGYNKLIF

SEQ ID NO: 432870 - protein, 13 aa, Homo sapiens
  CDR3 for beta chain variable domain of TCR clone 216435 (TRBV18, TRBJ2-5)
CASSPPGKETQYF

SEQ ID NO: 432871 - protein, 14 aa, Homo sapiens
  CDR3 for alpha chain variable domain of TCR clone 216436 (TRAV12-2, TRAJ11)
CAVRKNSGYSTLTF

SEQ ID NO: 432872 - protein, 16 aa, Homo sapiens
  CDR3 for beta chain variable domain of TCR clone 216436 (TRBV15, TRBJ1-2)
CATSRGPRTGGGGYTF

SEQ ID NO: 432873 - protein, 15 aa, Homo sapiens
  CDR3 for alpha chain variable domain of TCR clone 216437 (TRAV29/DV5, TRAJ24)
CAASEATDSWGKFKF

SEQ ID NO: 432874 - protein, 12 aa, Homo sapiens
  CDR3 for beta chain variable domain of TCR clone 216437 (TRBV11-2, TRBJ2-2)
CASSLPTGELFF

SEQ ID NO: 432875 - protein, 14 aa, Homo sapiens
  CDR3 for alpha chain variable domain of TCR clone 216438 (TRAV13-2, TRAJ10)
CAETLPGGGNKLTF

SEQ ID NO: 432876 - protein, 13 aa, Homo sapiens
  CDR3 for beta chain variable domain of TCR clone 216438 (TRBV25-1, TRBJ2-7)
CASSEDGDYEQYF

SEQ ID NO: 432877 - protein, 12 aa, Homo sapiens
  CDR3 for alpha chain variable domain of TCR clone 216439 (TRAV12-2, TRAJ30)
CAVRNRDDKIIF

SEQ ID NO: 432878 - protein, 13 aa, Homo sapiens
  CDR3 for beta chain variable domain of TCR clone 216439 (TRBV10-2, TRBJ2-7)
CASGASGGYEQYF

SEQ ID NO: 432879 - protein, 13 aa, Homo sapiens
  CDR3 for alpha chain variable domain of TCR clone 216440 (TRAV1-2, TRAJ9)
CAALNTGGFKTIF

SEQ ID NO: 432880 - protein, 13 aa, Homo sapiens
  CDR3 for beta chain variable domain of TCR clone 216440 (TRBV19, TRBJ1-2)
CASSIPGQDGDTF

SEQ ID NO: 432881 - protein, 12 aa, Homo sapiens
  CDR3 for alpha chain variable domain of TCR clone 216441 (TRAV23/DV6, TRAJ32)
CSMPGATNKLLF

SEQ ID NO: 432882 - protein, 17 aa, Homo sapiens
  CDR3 for beta chain variable domain of TCR clone 216441 (TRBV13, TRBJ2-3)
CASSSLGTSRLTDTQYF

SEQ ID NO: 432883 - protein, 17 aa, Homo sapiens
  CDR3 for alpha chain variable domain of TCR clone 216442 (TRAV9-2, TRAJ45)
CALSGYYSGGGADGLTF

SEQ ID NO: 432884 - protein, 13 aa, Homo sapiens
  CDR3 for beta chain variable domain of TCR clone 216442 (TRBV7-9, TRBJ1-2)
CASSLKQNYGYTF

SEQ ID NO: 432885 - protein, 11 aa, Homo sapiens
  CDR3 for alpha chain variable domain of TCR clone 216443 (TRAV1-1, TRAJ23)
CAVRQGGKLIF

SEQ ID NO: 432886 - protein, 16 aa, Homo sapiens
  CDR3 for beta chain variable domain of TCR clone 216443 (TRBV7-9, TRBJ2-1)
CASSDVAGGSYNEQFF

SEQ ID NO: 432887 - protein, 12 aa, Homo sapiens
  CDR3 for alpha chain variable domain of TCR clone 216444 (TRAV20, TRAJ39)
CAVGNAGNMLTF

SEQ ID NO: 432888 - protein, 12 aa, Homo sapiens
  CDR3 for beta chain variable domain of TCR clone 216444 (TRBV11-2, TRBJ2-1)
CASSPGNNEQFF

SEQ ID NO: 432889 - protein, 11 aa, Homo sapiens
  CDR3 for alpha chain variable domain of TCR clone 216445 (TRAV17, TRAJ9)
CATTGGFKTIF

SEQ ID NO: 432890 - protein, 13 aa, Homo sapiens
  CDR3 for beta chain variable domain of TCR clone 216445 (TRBV27, TRBJ1-6)
CASSLVLVSPLHF

SEQ ID NO: 432891 - protein, 10 aa, Homo sapiens
  CDR3 for alpha chain variable domain of TCR clone 216446 (TRAV2, TRAJ34)
CAVVNDKLIF

SEQ ID NO: 432892 - protein, 17 aa, Homo sapiens
  CDR3 for beta chain variable domain of TCR clone 216446 (TRBV7-2, TRBJ2-3)
CASSLEARGTSTDTQYF

SEQ ID NO: 432893 - protein, 14 aa, Homo sapiens
  CDR3 for alpha chain variable domain of TCR clone 216447 (TRAV12-3, TRAJ7)
CAMSEIGGNNSLAF

SEQ ID NO: 432894 - protein, 12 aa, Homo sapiens
  CDR3 for beta chain variable domain of TCR clone 216447 (TRBV5-4, TRBJ1-1)
CASSLDRREAFF

SEQ ID NO: 432895 - protein, 13 aa, Homo sapiens
  CDR3 for alpha chain variable domain of TCR clone 216448 (TRAV25, TRAJ30)
CAGRVDRDDKIIF

SEQ ID NO: 432896 - protein, 15 aa, Homo sapiens
  CDR3 for beta chain variable domain of TCR clone 216448 (TRBV7-8, TRBJ2-1)
CASSLADSLYNEQFF

SEQ ID NO: 432897 - protein, 12 aa, Homo sapiens
  CDR3 for alpha chain variable domain of TCR clone 216449 (TRAV13-2, TRAJ23)
CAERHRGGKLIF

SEQ ID NO: 432898 - protein, 16 aa, Homo sapiens
  CDR3 for beta chain variable domain of TCR clone 216449 (TRBV19, TRBJ2-1)
CASSIQAGGSYNEQFF

SEQ ID NO: 432899 - protein, 11 aa, Homo sapiens
  CDR3 for alpha chain variable domain of TCR clone 216450 (TRAV2, TRAJ23)
CAVETRGKLIF

SEQ ID NO: 432900 - protein, 14 aa, Homo sapiens
  CDR3 for beta chain variable domain of TCR clone 216450 (TRBV2, TRBJ2-3)
CASTEGQNTDTQYF

SEQ ID NO: 432901 - protein, 15 aa, Homo sapiens
  CDR3 for alpha chain variable domain of TCR clone 216451 (TRAV12-1, TRAJ44)
CVVDTPRGTASKLTF

SEQ ID NO: 432902 - protein, 14 aa, Homo sapiens
  CDR3 for beta chain variable domain of TCR clone 216451 (TRBV7-9, TRBJ2-1)
CASSPRDALYEQFF

SEQ ID NO: 432903 - protein, 13 aa, Homo sapiens
  CDR3 for alpha chain variable domain of TCR clone 216452 (TRAV8-6, TRAJ42)
CAGRGRKPRNLIF

SEQ ID NO: 432904 - protein, 13 aa, Homo sapiens
  CDR3 for beta chain variable domain of TCR clone 216452 (TRBV7-3, TRBJ1-1)
CASSQDWGAEAFF

SEQ ID NO: 432905 - protein, 14 aa, Homo sapiens
  CDR3 for alpha chain variable domain of TCR clone 216453 (TRAV1-2, TRAJ16)
CAVNRFSDGQQLLF

SEQ ID NO: 432906 - protein, 17 aa, Homo sapiens
  CDR3 for beta chain variable domain of TCR clone 216453 (TRBV28, TRBJ2-5)
CASSRQGGLSGAETQYF

SEQ ID NO: 432907 - protein, 13 aa, Homo sapiens
  CDR3 for alpha chain variable domain of TCR clone 216454 (TRAV13-2, TRAJ13)
CADLSGGYQKVTF

SEQ ID NO: 432908 - protein, 15 aa, Homo sapiens
  CDR3 for beta chain variable domain of TCR clone 216454 (TRBV19, TRBJ1-1)
CASGIGGGRNTEAFF

SEQ ID NO: 432909 - protein, 17 aa, Homo sapiens
  CDR3 for alpha chain variable domain of TCR clone 216455 (TRAV4, TRAJ13)
CLVGVQGSSGGYQKVTF

SEQ ID NO: 432910 - protein, 16 aa, Homo sapiens
  CDR3 for beta chain variable domain of TCR clone 216455 (TRBV28, TRBJ2-7)
CASSLFFATGGPEQYF

SEQ ID NO: 432911 - protein, 13 aa, Homo sapiens
  CDR3 for alpha chain variable domain of TCR clone 216456 (TRAV2, TRAJ20)
CAVEGPSEYKPSF

SEQ ID NO: 432912 - protein, 16 aa, Homo sapiens
  CDR3 for beta chain variable domain of TCR clone 216456 (TRBV25-1, TRBJ2-7)
CASSELAGGGIYEQYF

SEQ ID NO: 432913 - protein, 18 aa, Homo sapiens
  CDR3 for alpha chain variable domain of TCR clone 216457 (TRAV26-1, TRAJ50)
CILLHRQNPKTSYDKLIF

SEQ ID NO: 432914 - protein, 17 aa, Homo sapiens
  CDR3 for beta chain variable domain of TCR clone 216457 (TRBV4-1, TRBJ1-4)
CASSQEGPRGVEEKLFF

SEQ ID NO: 432915 - protein, 16 aa, Homo sapiens
  CDR3 for alpha chain variable domain of TCR clone 216458 (TRAV1-1, TRAJ29)
CAVRSTRNSGNTPLVF

SEQ ID NO: 432916 - protein, 15 aa, Homo sapiens
  CDR3 for beta chain variable domain of TCR clone 216458 (TRBV6-5, TRBJ2-1)
CASSYDAGAGNEQFF

SEQ ID NO: 432917 - protein, 17 aa, Homo sapiens
  CDR3 for alpha chain variable domain of TCR clone 216459 (TRAV3, TRAJ12)
CAVRDGGRMDSSYKLIF

SEQ ID NO: 432918 - protein, 15 aa, Homo sapiens
  CDR3 for beta chain variable domain of TCR clone 216459 (TRBV20-1, TRBJ2-5)
CSAAGTGGLQETQYF

SEQ ID NO: 432919 - protein, 14 aa, Homo sapiens
  CDR3 for alpha chain variable domain of TCR clone 216460 (TRAV12-1, TRAJ9)
CVVTGYSGGFKTIF

SEQ ID NO: 432920 - protein, 13 aa, Homo sapiens
  CDR3 for beta chain variable domain of TCR clone 216460 (TRBV20-1, TRBJ1-1)
CSARAGGNTEAFF

SEQ ID NO: 432921 - protein, 18 aa, Homo sapiens
  CDR3 for alpha chain variable domain of TCR clone 216461 (TRAV35, TRAJ28)
CAGHNYPLSGAGSYQLTF

SEQ ID NO: 432922 - protein, 13 aa, Homo sapiens
  CDR3 for beta chain variable domain of TCR clone 216461 (TRBV19, TRBJ2-7)
CASSIDRTYEQYF

SEQ ID NO: 432923 - protein, 13 aa, Homo sapiens
  CDR3 for alpha chain variable domain of TCR clone 216462 (TRAV20, TRAJ37)
CAGCFSNTGKLIF

SEQ ID NO: 432924 - protein, 15 aa, Homo sapiens
  CDR3 for beta chain variable domain of TCR clone 216462 (TRBV7-2, TRBJ2-1)
CASSFQADEYNEQFF

SEQ ID NO: 432925 - protein, 16 aa, Homo sapiens
  CDR3 for alpha chain variable domain of TCR clone 216463 (TRAV8-3, TRAJ4)
CAVGARGSGCYNKLIF

SEQ ID NO: 432926 - protein, 16 aa, Homo sapiens
  CDR3 for beta chain variable domain of TCR clone 216463 (TRBV4-3, TRBJ2-5)
CASSQDSIQLQETQYF

SEQ ID NO: 432927 - protein, 13 aa, Homo sapiens
  CDR3 for alpha chain variable domain of TCR clone 216464 (TRAV21, TRAJ20)
CAVGLRVDYKLSF

SEQ ID NO: 432928 - protein, 17 aa, Homo sapiens
  CDR3 for beta chain variable domain of TCR clone 216464 (TRBV6-5, TRBJ2-3)
CASSYGTSLYKSDTQYF

SEQ ID NO: 432929 - protein, 15 aa, Homo sapiens
  CDR3 for alpha chain variable domain of TCR clone 216465 (TRAV21, TRAJ53)
CATLNSGGSNYKLTF

SEQ ID NO: 432930 - protein, 12 aa, Homo sapiens
  CDR3 for beta chain variable domain of TCR clone 216465 (TRBV12-4, TRBJ1-2)
CASRLQGSGYTF

SEQ ID NO: 432931 - protein, 12 aa, Homo sapiens
  CDR3 for alpha chain variable domain of TCR clone 216466 (TRAV25, TRAJ35)
CAGIGFGNVLHC

SEQ ID NO: 432932 - protein, 15 aa, Homo sapiens
  CDR3 for beta chain variable domain of TCR clone 216466 (TRBV5-7, TRBJ1-5)
CASSYGKLWDQPQHF

SEQ ID NO: 432933 - protein, 15 aa, Homo sapiens
  CDR3 for alpha chain variable domain of TCR clone 216467 (TRAV12-2, TRAJ53)
CAVNGGGGSNYKLTF

SEQ ID NO: 432934 - protein, 16 aa, Homo sapiens
  CDR3 for beta chain variable domain of TCR clone 216467 (TRBV19, TRBJ1-1)
CASSPTRFWPGTEAFF

SEQ ID NO: 432935 - protein, 13 aa, Homo sapiens
  CDR3 for alpha chain variable domain of TCR clone 216468 (TRAV30, TRAJ34)
CGTVGYNTDKLIF

SEQ ID NO: 432936 - protein, 16 aa, Homo sapiens
  CDR3 for beta chain variable domain of TCR clone 216468 (TRBV7-9, TRBJ1-2)
CASSLGFSTGEDGYTF

SEQ ID NO: 432937 - protein, 13 aa, Homo sapiens
  CDR3 for alpha chain variable domain of TCR clone 216469 (TRAV3, TRAJ29)
CAVRDWGNTPLVF

SEQ ID NO: 432938 - protein, 15 aa, Homo sapiens
  CDR3 for beta chain variable domain of TCR clone 216469 (TRBV11-2, TRBJ1-2)
CASSLEGVQRNGYTF

SEQ ID NO: 432939 - protein, 15 aa, Homo sapiens
  CDR3 for alpha chain variable domain of TCR clone 216470 (TRAV27, TRAJ38)
CAARRNAGNNRKLIW

SEQ ID NO: 432940 - protein, 13 aa, Homo sapiens
  CDR3 for beta chain variable domain of TCR clone 216470 (TRBV7-7, TRBJ2-5)
CASSRSGQETQYF

SEQ ID NO: 432941 - protein, 14 aa, Homo sapiens
  CDR3 for alpha chain variable domain of TCR clone 216471 (TRAV12-2, TRAJ40)
CAVKIPSGTYKYIF

SEQ ID NO: 432942 - protein, 15 aa, Homo sapiens
  CDR3 for beta chain variable domain of TCR clone 216471 (TRBV5-1, TRBJ2-7)
CASSLGDFTTYEQYF

SEQ ID NO: 432943 - protein, 15 aa, Homo sapiens
  CDR3 for alpha chain variable domain of TCR clone 216472 (TRAV16, TRAJ12)
CSKWPLRDSSYKLIF

SEQ ID NO: 432944 - protein, 16 aa, Homo sapiens
  CDR3 for beta chain variable domain of TCR clone 216472 (TRBV19, TRBJ2-1)
CASSKAGPSSYNEQFF

SEQ ID NO: 432945 - protein, 14 aa, Homo sapiens
  CDR3 for alpha chain variable domain of TCR clone 216473 (TRAV21, TRAJ35)
CAVMPIGSGNVLHC

SEQ ID NO: 432946 - protein, 12 aa, Homo sapiens
  CDR3 for beta chain variable domain of TCR clone 216473 (TRBV7-9, TRBJ2-7)
CASSSKREEQYF

SEQ ID NO: 432947 - protein, 14 aa, Homo sapiens
  CDR3 for alpha chain variable domain of TCR clone 216474 (TRAV8-6, TRAJ52)
CAVIGGTSYGKLTF

SEQ ID NO: 432948 - protein, 13 aa, Homo sapiens
  CDR3 for beta chain variable domain of TCR clone 216474 (TRBV18, TRBJ1-1)
CASSGGRNTEAFF

SEQ ID NO: 432949 - protein, 15 aa, Homo sapiens
  CDR3 for alpha chain variable domain of TCR clone 216475 (TRAV27, TRAJ38)
WAARRNAGNNRKRIW

SEQ ID NO: 432950 - protein, 13 aa, Homo sapiens
  CDR3 for beta chain variable domain of TCR clone 216475 (TRBV12-5, TRBJ2-3)
CASGDRQSDTQYF

SEQ ID NO: 432951 - protein, 13 aa, Homo sapiens
  CDR3 for alpha chain variable domain of TCR clone 216476 (TRAV25, TRAJ17)
CAGLRAAGNKLTF

SEQ ID NO: 432952 - protein, 16 aa, Homo sapiens
  CDR3 for beta chain variable domain of TCR clone 216476 (TRBV19, TRBJ2-2)
CASRSPGTGATGELFF

SEQ ID NO: 432953 - protein, 13 aa, Homo sapiens
  CDR3 for alpha chain variable domain of TCR clone 216477 (TRAV21, TRAJ27)
CAARPGNAGQSTF

SEQ ID NO: 432954 - protein, 14 aa, Homo sapiens
  CDR3 for beta chain variable domain of TCR clone 216477 (TRBV7-6, TRBJ2-3)
CASSLGAVTDTQYF

SEQ ID NO: 432955 - protein, 13 aa, Homo sapiens
  CDR3 for alpha chain variable domain of TCR clone 216478 (TRAV17, TRAJ5)
CALRGTGRRALTF

SEQ ID NO: 432956 - protein, 16 aa, Homo sapiens
  CDR3 for beta chain variable domain of TCR clone 216478 (TRBV10-3, TRBJ2-7)
CAISADFADRPYEQYL

SEQ ID NO: 432957 - protein, 15 aa, Homo sapiens
  CDR3 for alpha chain variable domain of TCR clone 216479 (TRAV8-4, TRAJ37)
CAVSTRSGNTGKLIF

SEQ ID NO: 432958 - protein, 20 aa, Homo sapiens
  CDR3 for beta chain variable domain of TCR clone 216479 (TRBV7-8, TRBJ2-2)
CASSHLFPGATIHLTGELFF

SEQ ID NO: 432959 - protein, 14 aa, Homo sapiens
  CDR3 for alpha chain variable domain of TCR clone 216480 (TRAV1-2, TRAJ16)
CAVNRFSDGLKLLF

SEQ ID NO: 432960 - protein, 15 aa, Homo sapiens
  CDR3 for beta chain variable domain of TCR clone 216480 (TRBV5-1, TRBJ2-1)
CASSPPRAPYNEQFF

SEQ ID NO: 432961 - protein, 13 aa, Homo sapiens
  CDR3 for alpha chain variable domain of TCR clone 216481 (TRAV16, TRAJ11)
CALTQSGYSTLTF

SEQ ID NO: 432962 - protein, 14 aa, Homo sapiens
  CDR3 for beta chain variable domain of TCR clone 216481 (TRBV19, TRBJ2-1)
CASPTFVLSGEQFF

SEQ ID NO: 432963 - protein, 13 aa, Homo sapiens
  CDR3 for alpha chain variable domain of TCR clone 216482 (TRAV13-1, TRAJ5)
CAARVTGRRAHTF

SEQ ID NO: 432964 - protein, 15 aa, Homo sapiens
  CDR3 for beta chain variable domain of TCR clone 216482 (TRBV7-9, TRBJ2-7)
CASSPGGGLTYEQYF

SEQ ID NO: 432965 - protein, 15 aa, Homo sapiens
  CDR3 for alpha chain variable domain of TCR clone 216483 (TRAV35, TRAJ40)
CAGQLGTSGTYKYIF

SEQ ID NO: 432966 - protein, 13 aa, Homo sapiens
  CDR3 for beta chain variable domain of TCR clone 216483 (TRBV19, TRBJ1-2)
CASSVPGQDGYTF

SEQ ID NO: 432967 - protein, 13 aa, Homo sapiens
  CDR3 for alpha chain variable domain of TCR clone 216484 (TRAV21, TRAJ57)
CAVTQGGSEKLVF

SEQ ID NO: 432968 - protein, 15 aa, Homo sapiens
  CDR3 for beta chain variable domain of TCR clone 216484 (TRBV19, TRBJ2-1)
CASSMGSGTGRQQFF

SEQ ID NO: 432969 - protein, 14 aa, Homo sapiens
  CDR3 for alpha chain variable domain of TCR clone 216485 (TRAV26-1, TRAJ38)
YIADNAGNNRKLIW

SEQ ID NO: 432970 - protein, 17 aa, Homo sapiens
  CDR3 for beta chain variable domain of TCR clone 216485 (TRBV7-9, TRBJ2-3)
CASSPTVAGDLTDTQYF

SEQ ID NO: 432971 - protein, 12 aa, Homo sapiens
  CDR3 for alpha chain variable domain of TCR clone 216486 (TRAV12-3, TRAJ17)
CAMTLTGNKLTF

SEQ ID NO: 432972 - protein, 13 aa, Homo sapiens
  CDR3 for beta chain variable domain of TCR clone 216486 (TRBV7-3, TRBJ1-1)
CQQLKGGNTEAFF

SEQ ID NO: 432973 - protein, 14 aa, Homo sapiens
  CDR3 for alpha chain variable domain of TCR clone 216487 (TRAV12-2, TRAJ13)
CAVKKTGGYQKVTF

SEQ ID NO: 432974 - protein, 15 aa, Homo sapiens
  CDR3 for beta chain variable domain of TCR clone 216487 (TRBV20-1, TRBJ2-7)
CSARDLVSGMDEQYF

SEQ ID NO: 432975 - protein, 11 aa, Homo sapiens
  CDR3 for alpha chain variable domain of TCR clone 216488 (TRAV35, TRAJ22)
CAGPGVGQLTF

SEQ ID NO: 432976 - protein, 20 aa, Homo sapiens
  CDR3 for beta chain variable domain of TCR clone 216488 (TRBV7-3, TRBJ2-3)
CISVPAAPPGLIPVAHTQYF

SEQ ID NO: 432977 - protein, 18 aa, Homo sapiens
  CDR3 for alpha chain variable domain of TCR clone 216489 (TRAV21, TRAJ52)
CAVRPSPAGGPSYGKLTF

SEQ ID NO: 432978 - protein, 13 aa, Homo sapiens
  CDR3 for beta chain variable domain of TCR clone 216489 (TRBV20-1, TRBJ2-5)
CSAREAFQETQYF

SEQ ID NO: 432979 - protein, 14 aa, Homo sapiens
  CDR3 for alpha chain variable domain of TCR clone 216490 (TRAV8-3, TRAJ4)
CAVGAAGGYNKLIF

SEQ ID NO: 432980 - protein, 11 aa, Homo sapiens
  CDR3 for beta chain variable domain of TCR clone 216490 (TRBV19, TRBJ1-1)
CASSIGSEAFF

SEQ ID NO: 432981 - protein, 15 aa, Homo sapiens
  CDR3 for alpha chain variable domain of TCR clone 216491 (TRAV26-1, TRAJ48)
CIVRVGDFGNEKLTF

SEQ ID NO: 432982 - protein, 16 aa, Homo sapiens
  CDR3 for beta chain variable domain of TCR clone 216491 (TRBV4-1, TRBJ2-3)
CARSQRAGGLTDTQYF

SEQ ID NO: 432983 - protein, 12 aa, Homo sapiens
  CDR3 for alpha chain variable domain of TCR clone 216492 (TRAV17, TRAJ49)
CATVTTGNHFYF

SEQ ID NO: 432984 - protein, 18 aa, Homo sapiens
  CDR3 for beta chain variable domain of TCR clone 216492 (TRBV11-2, TRBJ2-6)
CASSLNPFLGTGANVLTF

SEQ ID NO: 432985 - protein, 14 aa, Homo sapiens
  CDR3 for alpha chain variable domain of TCR clone 216493 (TRAV1-2, TRAJ16)
CSVNRFSDGQKLLF

SEQ ID NO: 432986 - protein, 15 aa, Homo sapiens
  CDR3 for beta chain variable domain of TCR clone 216493 (TRBV18, TRBJ2-1)
CASSPPSASYNEQFF

SEQ ID NO: 432987 - protein, 12 aa, Homo sapiens
  CDR3 for alpha chain variable domain of TCR clone 216494 (TRAV21, TRAJ11)
CAATSGYSTLTF

SEQ ID NO: 432988 - protein, 13 aa, Homo sapiens
  CDR3 for beta chain variable domain of TCR clone 216494 (TRBV19, TRBJ1-2)
CASSVPGQDGYTF

SEQ ID NO: 432989 - protein, 10 aa, Homo sapiens
  CDR3 for alpha chain variable domain of TCR clone 216495 (TRAV1-2, TRAJ20)
CACNDYKLSS

SEQ ID NO: 432990 - protein, 16 aa, Homo sapiens
  CDR3 for beta chain variable domain of TCR clone 216495 (TRBV20-1, TRBJ2-1)
CSARDLKQGMNNEQFF

SEQ ID NO: 432991 - protein, 13 aa, Homo sapiens
  CDR3 for alpha chain variable domain of TCR clone 216496 (TRAV8-4, TRAJ3)
WAVSDSGASKIIF

SEQ ID NO: 432992 - protein, 16 aa, Homo sapiens
  CDR3 for beta chain variable domain of TCR clone 216496 (TRBV7-9, TRBJ2-7)
CASSNHGGQEKYEQYF

SEQ ID NO: 432993 - protein, 12 aa, Homo sapiens
  CDR3 for alpha chain variable domain of TCR clone 216497 (TRAV12-1, TRAJ40)
CVVYSGTYKYIF

SEQ ID NO: 432994 - protein, 13 aa, Homo sapiens
  CDR3 for beta chain variable domain of TCR clone 216497 (TRBV7-2, TRBJ2-2)
CASSLAVTGELFF

SEQ ID NO: 432995 - protein, 14 aa, Homo sapiens
  CDR3 for alpha chain variable domain of TCR clone 216498 (TRAV2, TRAJ37)
CAVDFTSNTGKLIF

SEQ ID NO: 432996 - protein, 15 aa, Homo sapiens
  CDR3 for beta chain variable domain of TCR clone 216498 (TRBV19, TRBJ2-1)
CASSGGGTLYNEQFF

SEQ ID NO: 432997 - protein, 22 aa, Homo sapiens
  CDR3 for alpha chain variable domain of TCR clone 216499 (TRAV12-2, )
CAVNAGNNHIQNPDPAVYQLRH

SEQ ID NO: 432998 - protein, 13 aa, Homo sapiens
  CDR3 for beta chain variable domain of TCR clone 216499 (TRBV12-5, TRBJ2-3)
CASGDRQSDTQYF

SEQ ID NO: 432999 - protein, 17 aa, Homo sapiens
  CDR3 for alpha chain variable domain of TCR clone 216500 (TRAV13-1, TRAJ5)
CSNPSLSRDTGRRALTF

SEQ ID NO: 433000 - protein, 13 aa, Homo sapiens
  CDR3 for beta chain variable domain of TCR clone 216500 (TRBV12-5, TRBJ2-3)
CASGDRQSDTQYF

SEQ ID NO: 433001 - protein, 12 aa, Homo sapiens
  CDR3 for alpha chain variable domain of TCR clone 216501 (TRAV2, TRAJ31)
CAVEDNNARLMF

SEQ ID NO: 433002 - protein, 13 aa, Homo sapiens
  CDR3 for beta chain variable domain of TCR clone 216501 (TRBV2, TRBJ2-7)
CASSVGGSGEQYF

SEQ ID NO: 433003 - protein, 15 aa, Homo sapiens
  CDR3 for alpha chain variable domain of TCR clone 216502 (TRAV12-3, TRAJ6)
CAMSATTGGSYIPTF

SEQ ID NO: 433004 - protein, 15 aa, Homo sapiens
  CDR3 for beta chain variable domain of TCR clone 216502 (TRBV20-1, TRBJ1-5)
CSASAWDRVNQPQHF

SEQ ID NO: 433005 - protein, 14 aa, Homo sapiens
  CDR3 for alpha chain variable domain of TCR clone 216503 (TRAV12-2, TRAJ53)
CAVKGGGSNYKLTF

SEQ ID NO: 433006 - protein, 11 aa, Homo sapiens
  CDR3 for beta chain variable domain of TCR clone 216503 (TRBV7-8, TRBJ2-7)
CASSLSLEQYF

SEQ ID NO: 433007 - protein, 12 aa, Homo sapiens
  CDR3 for alpha chain variable domain of TCR clone 216504 (TRAV10, TRAJ34)
CVVTGKHRQAHL

SEQ ID NO: 433008 - protein, 14 aa, Homo sapiens
  CDR3 for beta chain variable domain of TCR clone 216504 (TRBV19, TRBJ2-1)
CASPTFVLSGEQFF

SEQ ID NO: 433009 - protein, 16 aa, Homo sapiens
  CDR3 for alpha chain variable domain of TCR clone 216505 (TRAV13-1, TRAJ18)
CAASRMRGPTLGRLYF

SEQ ID NO: 433010 - protein, 16 aa, Homo sapiens
  CDR3 for beta chain variable domain of TCR clone 216505 (TRBV27, TRBJ1-1)
CASSSRGRTGYTEAFF

SEQ ID NO: 433011 - protein, 13 aa, Homo sapiens
  CDR3 for alpha chain variable domain of TCR clone 216506 (TRAV5, TRAJ40)
CAEKETGTYKYIF

SEQ ID NO: 433012 - protein, 17 aa, Homo sapiens
  CDR3 for beta chain variable domain of TCR clone 216506 (TRBV20-1, TRBJ2-1)
CSASSSGLAGSYNEQFF

SEQ ID NO: 433013 - protein, 14 aa, Homo sapiens
  CDR3 for alpha chain variable domain of TCR clone 216507 (TRAV12-3, TRAJ23)
CAMKMSNQGGKLIF

SEQ ID NO: 433014 - protein, 16 aa, Homo sapiens
  CDR3 for beta chain variable domain of TCR clone 216507 (TRBV7-3, TRBJ2-3)
CASSLSGYRPEDTQYF

SEQ ID NO: 433015 - protein, 14 aa, Homo sapiens
  CDR3 for alpha chain variable domain of TCR clone 216508 (TRAV12-1, TRAJ26)
CVVKGSNYGQNFVF

SEQ ID NO: 433016 - protein, 17 aa, Homo sapiens
  CDR3 for beta chain variable domain of TCR clone 216508 (TRBV11-2, TRBJ2-6)
CASSQRDIFSGANVLTC

SEQ ID NO: 433017 - protein, 12 aa, Homo sapiens
  CDR3 for alpha chain variable domain of TCR clone 216509 (TRAV3, TRAJ27)
CAVRDGAGKSTF

SEQ ID NO: 433018 - protein, 13 aa, Homo sapiens
  CDR3 for beta chain variable domain of TCR clone 216509 (TRBV10-3, TRBJ1-2)
CAINADLNHGYTF

SEQ ID NO: 433019 - protein, 13 aa, Homo sapiens
  CDR3 for alpha chain variable domain of TCR clone 216510 (TRAV13-1, TRAJ6)
CAARRGGSYIPTF

SEQ ID NO: 433020 - protein, 14 aa, Homo sapiens
  CDR3 for beta chain variable domain of TCR clone 216510 (TRBV7-2, TRBJ2-5)
CSSSFGGAQETQYF

SEQ ID NO: 433021 - protein, 12 aa, Homo sapiens
  CDR3 for alpha chain variable domain of TCR clone 216511 (TRAV13-2, TRAJ39)
CAENNAGNMLTS

SEQ ID NO: 433022 - protein, 13 aa, Homo sapiens
  CDR3 for beta chain variable domain of TCR clone 216511 (TRBV7-6, TRBJ1-1)
CASSLKLGTEAFF

SEQ ID NO: 433023 - protein, 15 aa, Homo sapiens
  CDR3 for alpha chain variable domain of TCR clone 216512 (TRAV8-4, TRAJ36)
CAVRKSWTGANNLFF

SEQ ID NO: 433024 - protein, 15 aa, Homo sapiens
  CDR3 for beta chain variable domain of TCR clone 216512 (TRBV7-2, TRBJ2-1)
CASSSRTSREDEQFF

SEQ ID NO: 433025 - protein, 15 aa, Homo sapiens
  CDR3 for alpha chain variable domain of TCR clone 216513 (TRAV9-2, TRAJ10)
CALSDLGGGGNKLTF

SEQ ID NO: 433026 - protein, 12 aa, Homo sapiens
  CDR3 for beta chain variable domain of TCR clone 216513 (TRBV28, TRBJ2-6)
CAIQAGANVLTF

SEQ ID NO: 433027 - protein, 21 aa, Homo sapiens
  CDR3 for alpha chain variable domain of TCR clone 216514 (TRAV26-1, TRAJ17)
CCVLLHRQSSGSKAAGNKLTF

SEQ ID NO: 433028 - protein, 15 aa, Homo sapiens
  CDR3 for beta chain variable domain of TCR clone 216514 (TRBV19, TRBJ1-5)
CASSIVWADNQPQHF

SEQ ID NO: 433029 - protein, 12 aa, Homo sapiens
  CDR3 for alpha chain variable domain of TCR clone 216515 (TRAV21, TRAJ11)
CAATSGYSTLTF

SEQ ID NO: 433030 - protein, 15 aa, Homo sapiens
  CDR3 for beta chain variable domain of TCR clone 216515 (TRBV6-4, TRBJ1-5)
CASSASSRINQPQHF

SEQ ID NO: 433031 - protein, 16 aa, Homo sapiens
  CDR3 for alpha chain variable domain of TCR clone 216516 (TRAV30, TRAJ24)
CGTEIVDADSWGKFQF

SEQ ID NO: 433032 - protein, 13 aa, Homo sapiens
  CDR3 for beta chain variable domain of TCR clone 216516 (TRBV10-3, TRBJ1-2)
GAISERDSYGYTL

SEQ ID NO: 433033 - protein, 14 aa, Homo sapiens
  CDR3 for alpha chain variable domain of TCR clone 216517 (TRAV38-1, TRAJ40)
CALRPTSGTYRYIF

SEQ ID NO: 433034 - protein, 14 aa, Homo sapiens
  CDR3 for beta chain variable domain of TCR clone 216517 (TRBV7-9, TRBJ2-2)
CASSLIQDTGELFF

SEQ ID NO: 433035 - protein, 12 aa, Homo sapiens
  CDR3 for alpha chain variable domain of TCR clone 216518 (TRAV21, TRAJ13)
PGPSGGYQKVTF

SEQ ID NO: 433036 - protein, 15 aa, Homo sapiens
  CDR3 for beta chain variable domain of TCR clone 216518 (TRBV6-6, TRBJ2-5)
CASSPGGGLEETQYF

SEQ ID NO: 433037 - protein, 13 aa, Homo sapiens
  CDR3 for alpha chain variable domain of TCR clone 216519 (TRAV17, TRAJ9)
CATDGTGGFKTIF

SEQ ID NO: 433038 - protein, 16 aa, Homo sapiens
  CDR3 for beta chain variable domain of TCR clone 216519 (TRBV28, TRBJ2-2)
CASSLEGGSNTGELFF

SEQ ID NO: 433039 - protein, 12 aa, Homo sapiens
  CDR3 for alpha chain variable domain of TCR clone 216520 (TRAV12-2, TRAJ10)
WGVTGGGNKLTF

SEQ ID NO: 433040 - protein, 12 aa, Homo sapiens
  CDR3 for beta chain variable domain of TCR clone 216520 (TRBV7-8, TRBJ2-7)
CASSLAGYEQYF

SEQ ID NO: 433041 - protein, 15 aa, Homo sapiens
  CDR3 for alpha chain variable domain of TCR clone 216521 (TRAV39, TRAJ32)
CAVDMEGGATNKLIF

SEQ ID NO: 433042 - protein, 17 aa, Homo sapiens
  CDR3 for beta chain variable domain of TCR clone 216521 (TRBV7-2, TRBJ1-4)
CASSFEAGPTTNERLFF

SEQ ID NO: 433043 - protein, 13 aa, Homo sapiens
  CDR3 for alpha chain variable domain of TCR clone 216522 (TRAV21, TRAJ27)
CAARPGNAGKSTF

SEQ ID NO: 433044 - protein, 12 aa, Homo sapiens
  CDR3 for beta chain variable domain of TCR clone 216522 (TRBV7-3, TRBJ1-1)
CQSQDWGAEAFF

SEQ ID NO: 433045 - protein, 13 aa, Homo sapiens
  CDR3 for alpha chain variable domain of TCR clone 216523 (TRAV8-3, TRAJ48)
CAVVPFGNEKLTF

SEQ ID NO: 433046 - protein, 14 aa, Homo sapiens
  CDR3 for beta chain variable domain of TCR clone 216523 (TRBV18, TRBJ2-7)
CASSPRGGAYEQYF

SEQ ID NO: 433047 - protein, 15 aa, Homo sapiens
  CDR3 for alpha chain variable domain of TCR clone 216524 (TRAV12-3, TRAJ47)
CAMSALVEYGNKLVF

SEQ ID NO: 433048 - protein, 14 aa, Homo sapiens
  CDR3 for beta chain variable domain of TCR clone 216524 (TRBV19, TRBJ2-1)
CASGKSTQYNEQFF

SEQ ID NO: 433049 - protein, 14 aa, Homo sapiens
  CDR3 for alpha chain variable domain of TCR clone 216525 (TRAV1-2, TRAJ16)
CAVRSASDGQQLLF

SEQ ID NO: 433050 - protein, 17 aa, Homo sapiens
  CDR3 for beta chain variable domain of TCR clone 216525 (TRBV7-3, TRBJ2-3)
CASSLMKRMRGADTQYF

SEQ ID NO: 433051 - protein, 16 aa, Homo sapiens
  CDR3 for alpha chain variable domain of TCR clone 216526 (TRAV3, TRAJ37)
CAVRGKGSGNTGKLIF

SEQ ID NO: 433052 - protein, 16 aa, Homo sapiens
  CDR3 for beta chain variable domain of TCR clone 216526 (TRBV6-1, TRBJ2-5)
CASSLRTGGVGETQYF

SEQ ID NO: 433053 - protein, 14 aa, Homo sapiens
  CDR3 for alpha chain variable domain of TCR clone 216527 (TRAV23/DV6, TRAJ6)
CAASRSVGSYIHTF

SEQ ID NO: 433054 - protein, 17 aa, Homo sapiens
  CDR3 for beta chain variable domain of TCR clone 216527 (TRBV20-1, TRBJ2-1)
CSASASGLAGSYNEQFF

SEQ ID NO: 433055 - protein, 16 aa, Homo sapiens
  CDR3 for alpha chain variable domain of TCR clone 216528 (TRAV12-1, TRAJ4)
CLVNPGISGGYNKLIF

SEQ ID NO: 433056 - protein, 14 aa, Homo sapiens
  CDR3 for beta chain variable domain of TCR clone 216528 (TRBV5-7, TRBJ2-3)
CASRTRGGTETQYF

SEQ ID NO: 433057 - protein, 13 aa, Homo sapiens
  CDR3 for alpha chain variable domain of TCR clone 216529 (TRAV1-2, TRAJ9)
CAALNTGGFKTIF

SEQ ID NO: 433058 - protein, 17 aa, Homo sapiens
  CDR3 for beta chain variable domain of TCR clone 216529 (TRBV28, TRBJ1-1)
CASSLSGTGYENTEAFF

SEQ ID NO: 433059 - protein, 14 aa, Homo sapiens
  CDR3 for alpha chain variable domain of TCR clone 216530 (TRAV12-1, TRAJ13)
CVVIDSGGYQKVTF

SEQ ID NO: 433060 - protein, 16 aa, Homo sapiens
  CDR3 for beta chain variable domain of TCR clone 216530 (TRBV20-1, TRBJ2-7)
CSARDLQRTGRYEQYF

SEQ ID NO: 433061 - protein, 15 aa, Homo sapiens
  CDR3 for alpha chain variable domain of TCR clone 216531 (TRAV26-2, TRAJ33)
CILRDGRGSSYQLIW

SEQ ID NO: 433062 - protein, 14 aa, Homo sapiens
  CDR3 for beta chain variable domain of TCR clone 216531 (TRBV7-2, TRBJ1-2)
CASSQTGSTYGYTF

SEQ ID NO: 433063 - protein, 13 aa, Homo sapiens
  CDR3 for alpha chain variable domain of TCR clone 216532 (TRAV3, TRAJ27)
CAVRPLGAGKSTF

SEQ ID NO: 433064 - protein, 15 aa, Homo sapiens
  CDR3 for beta chain variable domain of TCR clone 216532 (TRBV28, TRBJ1-4)
CASSVSGSGLEKLFF

SEQ ID NO: 433065 - protein, 15 aa, Homo sapiens
  CDR3 for alpha chain variable domain of TCR clone 216533 (TRAV8-4, TRAJ3)
CAVTGENLVQQCFQD

SEQ ID NO: 433066 - protein, 15 aa, Homo sapiens
  CDR3 for beta chain variable domain of TCR clone 216533 (TRBV11-3, TRBJ2-3)
CASLKDGREGDTQYF

SEQ ID NO: 433067 - protein, 13 aa, Homo sapiens
  CDR3 for alpha chain variable domain of TCR clone 216534 (TRAV8-3, TRAJ28)
CAVGAVGSYHPTF

SEQ ID NO: 433068 - protein, 14 aa, Homo sapiens
  CDR3 for beta chain variable domain of TCR clone 216534 (TRBV7-2, TRBJ2-7)
CASRSQGAAYEQYF

SEQ ID NO: 433069 - protein, 11 aa, Homo sapiens
  CDR3 for alpha chain variable domain of TCR clone 216535 (TRAV27, TRAJ37)
CAGTQEGKLIF

SEQ ID NO: 433070 - protein, 15 aa, Homo sapiens
  CDR3 for beta chain variable domain of TCR clone 216535 (TRBV6-5, TRBJ2-7)
CASSASGRWSYEQYF

SEQ ID NO: 433071 - protein, 14 aa, Homo sapiens
  CDR3 for alpha chain variable domain of TCR clone 216536 (TRAV9-2, TRAJ39)
CALYIYNAGNMLTF

SEQ ID NO: 433072 - protein, 14 aa, Homo sapiens
  CDR3 for beta chain variable domain of TCR clone 216536 (TRBV15, TRBJ2-5)
CATSIGGLGETQYF

SEQ ID NO: 433073 - protein, 14 aa, Homo sapiens
  CDR3 for alpha chain variable domain of TCR clone 216537 (TRAV9-2, TRAJ39)
CALYIYNAGKMLTF

SEQ ID NO: 433074 - protein, 16 aa, Homo sapiens
  CDR3 for beta chain variable domain of TCR clone 216537 (TRBV5-1, TRBJ2-2)
CASSSRTGGRTGELFF

SEQ ID NO: 433075 - protein, 11 aa, Homo sapiens
  CDR3 for alpha chain variable domain of TCR clone 216538 (TRAV35, TRAJ34)
CWARNTDKLIF

SEQ ID NO: 433076 - protein, 16 aa, Homo sapiens
  CDR3 for beta chain variable domain of TCR clone 216538 (TRBV12-5, TRBJ2-5)
CSSGPRTSGNQETQYF

SEQ ID NO: 433077 - protein, 14 aa, Homo sapiens
  CDR3 for alpha chain variable domain of TCR clone 216539 (TRAV20, TRAJ22)
CAVALGGSARQLTF

SEQ ID NO: 433078 - protein, 15 aa, Homo sapiens
  CDR3 for beta chain variable domain of TCR clone 216539 (TRBV7-9, TRBJ1-6)
CASSSPGRGNSTLHF

SEQ ID NO: 433079 - protein, 14 aa, Homo sapiens
  CDR3 for alpha chain variable domain of TCR clone 216540 (TRAV29/DV5, TRAJ36)
CAARRKTGANNLFF

SEQ ID NO: 433080 - protein, 16 aa, Homo sapiens
  CDR3 for beta chain variable domain of TCR clone 216540 (TRBV5-1, TRBJ2-1)
CASSLAALIPANEQFF

SEQ ID NO: 433081 - protein, 12 aa, Homo sapiens
  CDR3 for alpha chain variable domain of TCR clone 216541 (TRAV12-3, TRAJ17)
RAMTLTGNKLTF

SEQ ID NO: 433082 - protein, 15 aa, Homo sapiens
  CDR3 for beta chain variable domain of TCR clone 216541 (TRBV20-1, TRBJ2-7)
CSSRDRVSGMDEQYF

SEQ ID NO: 433083 - protein, 14 aa, Homo sapiens
  CDR3 for alpha chain variable domain of TCR clone 216542 (TRAV8-3, TRAJ4)
CSVGAAGGYNKLIF

SEQ ID NO: 433084 - protein, 15 aa, Homo sapiens
  CDR3 for beta chain variable domain of TCR clone 216542 (TRBV9, TRBJ1-6)
CASSVAGTGDSPLHF

SEQ ID NO: 433085 - protein, 15 aa, Homo sapiens
  CDR3 for alpha chain variable domain of TCR clone 216543 (TRAV13-1, TRAJ36)
CAASIRQTGANNLFF

SEQ ID NO: 433086 - protein, 15 aa, Homo sapiens
  CDR3 for beta chain variable domain of TCR clone 216543 (TRBV11-1, TRBJ2-7)
CASSLNYGASYEQYF

SEQ ID NO: 433087 - protein, 15 aa, Homo sapiens
  CDR3 for alpha chain variable domain of TCR clone 216544 (TRAV12-2, TRAJ57)
CAVSRGQGGSEKLVF

SEQ ID NO: 433088 - protein, 15 aa, Homo sapiens
  CDR3 for beta chain variable domain of TCR clone 216544 (TRBV27, TRBJ2-5)
CASSLYPRGGETQYF

SEQ ID NO: 433089 - protein, 14 aa, Homo sapiens
  CDR3 for alpha chain variable domain of TCR clone 216545 (TRAV26-1, TRAJ26)
CIVRATFLGQNFVF

SEQ ID NO: 433090 - protein, 15 aa, Homo sapiens
  CDR3 for beta chain variable domain of TCR clone 216545 (TRBV3-1, TRBJ1-2)
CASSPTRLPEGGYTF

SEQ ID NO: 433091 - protein, 16 aa, Homo sapiens
  CDR3 for alpha chain variable domain of TCR clone 216546 (TRAV30, TRAJ24)
CGTEIGDADSWGKFQF

SEQ ID NO: 433092 - protein, 12 aa, Homo sapiens
  CDR3 for beta chain variable domain of TCR clone 216546 (TRBV11-2, TRBJ2-2)
CASSLGGGELFF

SEQ ID NO: 433093 - protein, 17 aa, Homo sapiens
  CDR3 for alpha chain variable domain of TCR clone 216547 (TRAV35, TRAJ52)
CAGQLAAGGTSYGKLTF

SEQ ID NO: 433094 - protein, 15 aa, Homo sapiens
  CDR3 for beta chain variable domain of TCR clone 216547 (TRBV28, TRBJ1-4)
CASSSGVSTNEKLFF

SEQ ID NO: 433095 - protein, 16 aa, Homo sapiens
  CDR3 for alpha chain variable domain of TCR clone 216548 (TRAV1-2, TRAJ10)
CAVRGVLTGGGNKLTF

SEQ ID NO: 433096 - protein, 14 aa, Homo sapiens
  CDR3 for beta chain variable domain of TCR clone 216548 (TRBV19, TRBJ1-5)
CASSFTGSNQPQHF

SEQ ID NO: 433097 - protein, 13 aa, Homo sapiens
  CDR3 for alpha chain variable domain of TCR clone 216549 (TRAV23/DV6, TRAJ47)
CAASSQCGNKLVF

SEQ ID NO: 433098 - protein, 17 aa, Homo sapiens
  CDR3 for beta chain variable domain of TCR clone 216549 (TRBV13, TRBJ2-3)
CASSLSRVAGGRNTQYF

SEQ ID NO: 433099 - protein, 13 aa, Homo sapiens
  CDR3 for alpha chain variable domain of TCR clone 216550 (TRAV8-4, TRAJ54)
CAVTGGGAQTRVL

SEQ ID NO: 433100 - protein, 16 aa, Homo sapiens
  CDR3 for beta chain variable domain of TCR clone 216550 (TRBV2, TRBJ2-6)
CASSEVGGAGANVLTF

SEQ ID NO: 433101 - protein, 14 aa, Homo sapiens
  CDR3 for alpha chain variable domain of TCR clone 216551 (TRAV25, TRAJ35)
CARRMEGFGNALHC

SEQ ID NO: 433102 - protein, 13 aa, Homo sapiens
  CDR3 for beta chain variable domain of TCR clone 216551 (TRBV7-2, TRBJ1-4)
CASSLAGLEKLFF

SEQ ID NO: 433103 - protein, 23 aa, Homo sapiens
  CDR3 for alpha chain variable domain of TCR clone 216552 (TRAV26-1, TRAJ38)
CIADNAGNNHIQNPDPPVYQLRD

SEQ ID NO: 433104 - protein, 15 aa, Homo sapiens
  CDR3 for beta chain variable domain of TCR clone 216552 (TRBV7-9, TRBJ1-1)
CASSLLEQGGTEAFF

SEQ ID NO: 433105 - protein, 15 aa, Homo sapiens
  CDR3 for alpha chain variable domain of TCR clone 216553 (TRAV2, TRAJ13)
CATPSYSGGYQKVTF

SEQ ID NO: 433106 - protein, 14 aa, Homo sapiens
  CDR3 for beta chain variable domain of TCR clone 216553 (TRBV12-5, TRBJ2-5)
CASGSRTHQETQYF

SEQ ID NO: 433107 - protein, 17 aa, Homo sapiens
  CDR3 for alpha chain variable domain of TCR clone 216554 (TRAV3, TRAJ12)
CAVRDGGRMDSSYKLIF

SEQ ID NO: 433108 - protein, 15 aa, Homo sapiens
  CDR3 for beta chain variable domain of TCR clone 216554 (TRBV5-1, TRBJ2-3)
YASSVTSGSTDTQYF

SEQ ID NO: 433109 - protein, 14 aa, Homo sapiens
  CDR3 for alpha chain variable domain of TCR clone 216555 (TRAV1-1, TRAJ27)
CAVIYNTNAGESTF

SEQ ID NO: 433110 - protein, 15 aa, Homo sapiens
  CDR3 for beta chain variable domain of TCR clone 216555 (TRBV29-1, TRBJ2-1)
CSVGRHALFYNEQFF

SEQ ID NO: 433111 - protein, 15 aa, Homo sapiens
  CDR3 for alpha chain variable domain of TCR clone 216556 (TRAV21, TRAJ53)
CATLNSGGSNYILTF

SEQ ID NO: 433112 - protein, 15 aa, Homo sapiens
  CDR3 for beta chain variable domain of TCR clone 216556 (TRBV11-3, TRBJ2-3)
CASSAGTVVTNTQYF

SEQ ID NO: 433113 - protein, 18 aa, Homo sapiens
  CDR3 for alpha chain variable domain of TCR clone 216557 (TRAV26-2, TRAJ45)
CILRVDKYSGGGGDGLTF

SEQ ID NO: 433114 - protein, 12 aa, Homo sapiens
  CDR3 for beta chain variable domain of TCR clone 216557 (TRBV29-1, TRBJ2-3)
CSVTGGADTQYF

SEQ ID NO: 433115 - protein, 15 aa, Homo sapiens
  CDR3 for alpha chain variable domain of TCR clone 216558 (TRAV38-2/DV8, TRAJ57)
CAYRGLQGGSEKLVF

SEQ ID NO: 433116 - protein, 15 aa, Homo sapiens
  CDR3 for beta chain variable domain of TCR clone 216558 (TRBV7-9, TRBJ1-6)
CASSSPGRGNSPLHF

SEQ ID NO: 433117 - protein, 16 aa, Homo sapiens
  CDR3 for alpha chain variable domain of TCR clone 216559 (TRAV8-3, TRAJ10)
CAVGPGVTGGGNKLTC

SEQ ID NO: 433118 - protein, 13 aa, Homo sapiens
  CDR3 for beta chain variable domain of TCR clone 216559 (TRBV18, TRBJ1-1)
CASSPGPSGEAFF

SEQ ID NO: 433119 - protein, 18 aa, Homo sapiens
  CDR3 for alpha chain variable domain of TCR clone 216560 (TRAV13-2, TRAJ52)
CAETPLNAGGTSYGKLPF

SEQ ID NO: 433120 - protein, 15 aa, Homo sapiens
  CDR3 for beta chain variable domain of TCR clone 216560 (TRBV7-2, TRBJ2-7)
CASSLKGALTYEQYF

SEQ ID NO: 433121 - protein, 21 aa, Homo sapiens
  CDR3 for alpha chain variable domain of TCR clone 216561 (TRAV34, TRAJ44)
PAMQASTSVEQTTGTASKLTF

SEQ ID NO: 433122 - protein, 16 aa, Homo sapiens
  CDR3 for beta chain variable domain of TCR clone 216561 (TRBV19, TRBJ2-2)
CASRSPGTGATGELFF

SEQ ID NO: 433123 - protein, 13 aa, Homo sapiens
  CDR3 for alpha chain variable domain of TCR clone 216562 (TRAV12-2, TRAJ7)
CAVNLYGNNRLAF

SEQ ID NO: 433124 - protein, 17 aa, Homo sapiens
  CDR3 for beta chain variable domain of TCR clone 216562 (TRBV4-1, TRBJ1-5)
CASSQQPPTVANQPQHF

SEQ ID NO: 433125 - protein, 16 aa, Homo sapiens
  CDR3 for alpha chain variable domain of TCR clone 216563 (TRAV1-2, TRAJ35)
CAVRGLTIGLGNVLHC

SEQ ID NO: 433126 - protein, 13 aa, Homo sapiens
  CDR3 for beta chain variable domain of TCR clone 216563 (TRBV6-6, TRBJ2-1)
CASSLHQGDEQFF

SEQ ID NO: 433127 - protein, 14 aa, Homo sapiens
  CDR3 for alpha chain variable domain of TCR clone 216564 (TRAV8-3, TRAJ4)
CAVGAAGGYNKLIF

SEQ ID NO: 433128 - protein, 19 aa, Homo sapiens
  CDR3 for beta chain variable domain of TCR clone 216564 (TRBV12-4, TRBJ2-7)
CASSPRSLRTSGRGHEQYF

SEQ ID NO: 433129 - protein, 17 aa, Homo sapiens
  CDR3 for alpha chain variable domain of TCR clone 216565 (TRAV3, TRAJ42)
CAVRDRAYGGSQGNPIF

SEQ ID NO: 433130 - protein, 15 aa, Homo sapiens
  CDR3 for beta chain variable domain of TCR clone 216565 (TRBV27, TRBJ1-6)
CASSFDRGLGSPLHF

SEQ ID NO: 433131 - protein, 15 aa, Homo sapiens
  CDR3 for alpha chain variable domain of TCR clone 216566 (TRAV8-3, TRAJ21)
CAVGAYNFNKFYLDL

SEQ ID NO: 433132 - protein, 16 aa, Homo sapiens
  CDR3 for beta chain variable domain of TCR clone 216566 (TRBV19, TRBJ2-1)
CASSMGGGSSYNEQFF

SEQ ID NO: 433133 - protein, 15 aa, Homo sapiens
  CDR3 for alpha chain variable domain of TCR clone 216567 (TRAV38-2/DV8, TRAJ47)
CACLTPLRYGNKLVF

SEQ ID NO: 433134 - protein, 20 aa, Homo sapiens
  CDR3 for beta chain variable domain of TCR clone 216567 (TRBV7-8, TRBJ2-2)
CASSHLFPGPTIHITGELFF

SEQ ID NO: 433135 - protein, 14 aa, Homo sapiens
  CDR3 for alpha chain variable domain of TCR clone 216568 (TRAV1-2, TRAJ8)
CAVREDTGFQTLVF

SEQ ID NO: 433136 - protein, 14 aa, Homo sapiens
  CDR3 for beta chain variable domain of TCR clone 216568 (TRBV7-9, TRBJ1-1)
CASSLGGANTEAFF

SEQ ID NO: 433137 - protein, 13 aa, Homo sapiens
  CDR3 for alpha chain variable domain of TCR clone 216569 (TRAV12-2, TRAJ52)
CNAGGTSYGKLTF

SEQ ID NO: 433138 - protein, 15 aa, Homo sapiens
  CDR3 for beta chain variable domain of TCR clone 216569 (TRBV28, TRBJ2-1)
CASSIIAGGRSEQFF

SEQ ID NO: 433139 - protein, 15 aa, Homo sapiens
  CDR3 for alpha chain variable domain of TCR clone 216570 (TRAV17, TRAJ22)
FATVAPSGSARQLTF

SEQ ID NO: 433140 - protein, 16 aa, Homo sapiens
  CDR3 for beta chain variable domain of TCR clone 216570 (TRBV10-3, TRBJ2-7)
CAISADFADRPYEQYF

SEQ ID NO: 433141 - protein, 16 aa, Homo sapiens
  CDR3 for alpha chain variable domain of TCR clone 216571 (TRAV12-3, TRAJ53)
CAMSPGSGGSNYKLTF

SEQ ID NO: 433142 - protein, 14 aa, Homo sapiens
  CDR3 for beta chain variable domain of TCR clone 216571 (TRBV11-1, TRBJ2-7)
CASSFRQGSYEQYF

SEQ ID NO: 433143 - protein, 14 aa, Homo sapiens
  CDR3 for alpha chain variable domain of TCR clone 216572 (TRAV13-1, TRAJ44)
CAAKATGTASKLTF

SEQ ID NO: 433144 - protein, 15 aa, Homo sapiens
  CDR3 for beta chain variable domain of TCR clone 216572 (TRBV7-3, TRBJ2-2)
CASKANGANTGELFF

SEQ ID NO: 433145 - protein, 11 aa, Homo sapiens
  CDR3 for alpha chain variable domain of TCR clone 216573 (TRAV12-3, TRAJ43)
CAMSVSNDMSF

SEQ ID NO: 433146 - protein, 13 aa, Homo sapiens
  CDR3 for beta chain variable domain of TCR clone 216573 (TRBV20-1, TRBJ1-1)
GSAPLGGGTEAFF

SEQ ID NO: 433147 - protein, 13 aa, Homo sapiens
  CDR3 for alpha chain variable domain of TCR clone 216574 (TRAV12-2, TRAJ10)
CAVPTGGGNKLTF

SEQ ID NO: 433148 - protein, 15 aa, Homo sapiens
  CDR3 for beta chain variable domain of TCR clone 216574 (TRBV16, TRBJ1-5)
CASSQSGTADQPQHF

SEQ ID NO: 433149 - protein, 16 aa, Homo sapiens
  CDR3 for alpha chain variable domain of TCR clone 216575 (TRAV30, TRAJ24)
CGTEIVDADSWGTFQF

SEQ ID NO: 433150 - protein, 13 aa, Homo sapiens
  CDR3 for beta chain variable domain of TCR clone 216575 (TRBV20-1, TRBJ1-1)
CSAPPGGHTEAFF

SEQ ID NO: 433151 - protein, 12 aa, Homo sapiens
  CDR3 for alpha chain variable domain of TCR clone 216576 (TRAV3, TRAJ7)
CADLLWEQQTRF

SEQ ID NO: 433152 - protein, 18 aa, Homo sapiens
  CDR3 for beta chain variable domain of TCR clone 216576 (TRBV7-3, TRBJ2-5)
CASSCRGGGDPVLRARHA

SEQ ID NO: 433153 - protein, 12 aa, Homo sapiens
  CDR3 for alpha chain variable domain of TCR clone 216577 (TRAV26-2, TRAJ47)
CILVEYGNKLVF

SEQ ID NO: 433154 - protein, 14 aa, Homo sapiens
  CDR3 for beta chain variable domain of TCR clone 216577 (TRBV19, TRBJ1-4)
CASRYSASNEKLFF

SEQ ID NO: 433155 - protein, 15 aa, Homo sapiens
  CDR3 for alpha chain variable domain of TCR clone 216578 (TRAV3, TRAJ22)
CSVRDRGGSARQLTF

SEQ ID NO: 433156 - protein, 15 aa, Homo sapiens
  CDR3 for beta chain variable domain of TCR clone 216578 (TRBV7-3, TRBJ2-2)
CASSETGQGTGELFF

SEQ ID NO: 433157 - protein, 12 aa, Homo sapiens
  CDR3 for alpha chain variable domain of TCR clone 216579 (TRAV16, TRAJ10)
CSRTGGGNKLTF

SEQ ID NO: 433158 - protein, 14 aa, Homo sapiens
  CDR3 for beta chain variable domain of TCR clone 216579 (TRBV28, TRBJ2-7)
CASRVAGVGYEQYF

SEQ ID NO: 433159 - protein, 13 aa, Homo sapiens
  CDR3 for alpha chain variable domain of TCR clone 216580 (TRAV27, TRAJ6)
CAGGTRGSYIPTF

SEQ ID NO: 433160 - protein, 12 aa, Homo sapiens
  CDR3 for beta chain variable domain of TCR clone 216580 (TRBV6-3, TRBJ2-7)
CASSLTPYEQYF

SEQ ID NO: 433161 - protein, 13 aa, Homo sapiens
  CDR3 for alpha chain variable domain of TCR clone 216581 (TRAV20, TRAJ34)
CAVRSYNTDKLIF

SEQ ID NO: 433162 - protein, 13 aa, Homo sapiens
  CDR3 for beta chain variable domain of TCR clone 216581 (TRBV10-3, TRBJ2-7)
CASKLAVNYEQYF

SEQ ID NO: 433163 - protein, 15 aa, Homo sapiens
  CDR3 for alpha chain variable domain of TCR clone 216582 (TRAV13-1, TRAJ6)
CAAIHPSGGSYIPPF

SEQ ID NO: 433164 - protein, 14 aa, Homo sapiens
  CDR3 for beta chain variable domain of TCR clone 216582 (TRBV7-9, TRBJ2-2)
CASGPAINTGELFF

SEQ ID NO: 433165 - protein, 14 aa, Homo sapiens
  CDR3 for alpha chain variable domain of TCR clone 216583 (TRAV1-2, TRAJ16)
CAVNRFSDGQKLPF

SEQ ID NO: 433166 - protein, 18 aa, Homo sapiens
  CDR3 for beta chain variable domain of TCR clone 216583 (TRBV11-2, TRBJ2-3)
CASSLGGASRGAPNTQYF

SEQ ID NO: 433167 - protein, 15 aa, Homo sapiens
  CDR3 for alpha chain variable domain of TCR clone 216584 (TRAV21, TRAJ24)
CAARSSTDSWGKLQF

SEQ ID NO: 433168 - protein, 13 aa, Homo sapiens
  CDR3 for beta chain variable domain of TCR clone 216584 (TRBV7-2, TRBJ1-1)
CASSLVQGAEAFF

SEQ ID NO: 433169 - protein, 14 aa, Homo sapiens
  CDR3 for alpha chain variable domain of TCR clone 216585 (TRAV12-2, TRAJ13)
CAVKKTGGYQKVTF

SEQ ID NO: 433170 - protein, 16 aa, Homo sapiens
  CDR3 for beta chain variable domain of TCR clone 216585 (TRBV4-1, TRBJ2-7)
CASSRGDILNSYEQYF

SEQ ID NO: 433171 - protein, 14 aa, Homo sapiens
  CDR3 for alpha chain variable domain of TCR clone 216586 (TRAV38-1, TRAJ45)
CAYYSGGGADGLTF

SEQ ID NO: 433172 - protein, 20 aa, Homo sapiens
  CDR3 for beta chain variable domain of TCR clone 216586 (TRBV28, TRBJ2-1)
CASTPIGRSPGLAGGNEQVF

SEQ ID NO: 433173 - protein, 20 aa, Homo sapiens
  CDR3 for alpha chain variable domain of TCR clone 216587 (TRAV12-2, TRAJ52)
SPVIQPPARAGGTSYGKLTF

SEQ ID NO: 433174 - protein, 16 aa, Homo sapiens
  CDR3 for beta chain variable domain of TCR clone 216587 (TRBV15, TRBJ1-2)
CATSRGPRTGGGSYTF

SEQ ID NO: 433175 - protein, 14 aa, Homo sapiens
  CDR3 for alpha chain variable domain of TCR clone 216588 (TRAV12-2, TRAJ13)
CAVKKTGGYQKVTF

SEQ ID NO: 433176 - protein, 15 aa, Homo sapiens
  CDR3 for beta chain variable domain of TCR clone 216588 (TRBV19, TRBJ1-6)
CASSTQGAVGSTLLF

SEQ ID NO: 433177 - protein, 11 aa, Homo sapiens
  CDR3 for alpha chain variable domain of TCR clone 216589 (TRAV21, TRAJ20)
CAARDDYKPSS

SEQ ID NO: 433178 - protein, 14 aa, Homo sapiens
  CDR3 for beta chain variable domain of TCR clone 216589 (TRBV12-4, TRBJ1-1)
CASSFSQMNTEALF

SEQ ID NO: 433179 - protein, 14 aa, Homo sapiens
  CDR3 for alpha chain variable domain of TCR clone 216590 (TRAV12-2, TRAJ40)
CAVKIPSGTYKYIF

SEQ ID NO: 433180 - protein, 12 aa, Homo sapiens
  CDR3 for beta chain variable domain of TCR clone 216590 (TRBV18, TRBJ2-7)
CASSLDSYEQYF

SEQ ID NO: 433181 - protein, 14 aa, Homo sapiens
  CDR3 for alpha chain variable domain of TCR clone 216591 (TRAV9-2, TRAJ39)
CALYIYNAGNMLTF

SEQ ID NO: 433182 - protein, 13 aa, Homo sapiens
  CDR3 for beta chain variable domain of TCR clone 216591 (TRBV6-1, TRBJ1-1)
CASSWTVDTEAFF

SEQ ID NO: 433183 - protein, 15 aa, Homo sapiens
  CDR3 for alpha chain variable domain of TCR clone 216592 (TRAV29/DV5, TRAJ42)
CAAKTDGGSQGNLIF

SEQ ID NO: 433184 - protein, 12 aa, Homo sapiens
  CDR3 for beta chain variable domain of TCR clone 216592 (TRBV11-2, TRBJ2-1)
CASSPGNNEKFF

SEQ ID NO: 433185 - protein, 15 aa, Homo sapiens
  CDR3 for alpha chain variable domain of TCR clone 216593 (TRAV12-3, TRAJ6)
CAMSATTGGSYIPTF

SEQ ID NO: 433186 - protein, 13 aa, Homo sapiens
  CDR3 for beta chain variable domain of TCR clone 216593 (TRBV7-9, TRBJ1-2)
CASRLRQNYGYTF

SEQ ID NO: 433187 - protein, 13 aa, Homo sapiens
  CDR3 for alpha chain variable domain of TCR clone 216594 (TRAV13-1, TRAJ53)
QAGSGGSNYKLTF

SEQ ID NO: 433188 - protein, 15 aa, Homo sapiens
  CDR3 for beta chain variable domain of TCR clone 216594 (TRBV5-1, TRBJ2-1)
SASSPPRAPYNEQFF

SEQ ID NO: 433189 - protein, 13 aa, Homo sapiens
  CDR3 for alpha chain variable domain of TCR clone 216595 (TRAV3, TRAJ20)
CCEAFCHDYKLSF

SEQ ID NO: 433190 - protein, 15 aa, Homo sapiens
  CDR3 for beta chain variable domain of TCR clone 216595 (TRBV19, TRBJ2-6)
CASVRRDSGANVLTF

SEQ ID NO: 433191 - protein, 14 aa, Homo sapiens
  CDR3 for alpha chain variable domain of TCR clone 216596 (TRAV29/DV5, TRAJ20)
CAATIRSNDYKLSF

SEQ ID NO: 433192 - protein, 18 aa, Homo sapiens
  CDR3 for beta chain variable domain of TCR clone 216596 (TRBV11-2, TRBJ2-3)
CASSLGGASRGAPNTQYF

SEQ ID NO: 433193 - protein, 14 aa, Homo sapiens
  CDR3 for alpha chain variable domain of TCR clone 216597 (TRAV1-2, TRAJ8)
CAVIEDTGFQKLVF

SEQ ID NO: 433194 - protein, 13 aa, Homo sapiens
  CDR3 for beta chain variable domain of TCR clone 216597 (TRBV7-3, TRBJ2-1)
CASSLDSYNEQFF

SEQ ID NO: 433195 - protein, 12 aa, Homo sapiens
  CDR3 for alpha chain variable domain of TCR clone 216598 (TRAV13-2, TRAJ8)
CAPWLGFQKLVF

SEQ ID NO: 433196 - protein, 12 aa, Homo sapiens
  CDR3 for beta chain variable domain of TCR clone 216598 (TRBV12-5, TRBJ2-5)
CASGQGVETQYF

SEQ ID NO: 433197 - protein, 13 aa, Homo sapiens
  CDR3 for alpha chain variable domain of TCR clone 216599 (TRAV21, TRAJ27)
CASRPGNAGKSTF

SEQ ID NO: 433198 - protein, 13 aa, Homo sapiens
  CDR3 for beta chain variable domain of TCR clone 216599 (TRBV7-3, TRBJ1-1)
CASSQDWGAEAFF

SEQ ID NO: 433199 - protein, 15 aa, Homo sapiens
  CDR3 for alpha chain variable domain of TCR clone 216600 (TRAV4, TRAJ39)
CLVGPNNNAGNMLTF

SEQ ID NO: 433200 - protein, 14 aa, Homo sapiens
  CDR3 for beta chain variable domain of TCR clone 216600 (TRBV11-2, TRBJ2-5)
CASSRTGGIEAQYF

SEQ ID NO: 433201 - protein, 17 aa, Homo sapiens
  CDR3 for alpha chain variable domain of TCR clone 216601 (TRAV4, TRAJ13)
CLVGVQGSSGGYQKVTF

SEQ ID NO: 433202 - protein, 18 aa, Homo sapiens
  CDR3 for beta chain variable domain of TCR clone 216601 (TRBV15, TRBJ2-3)
CATSRDGARSGDTDTQHF

SEQ ID NO: 433203 - protein, 12 aa, Homo sapiens
  CDR3 for alpha chain variable domain of TCR clone 216602 (TRAV29/DV5, TRAJ34)
CAARHNPDKLIF

SEQ ID NO: 433204 - protein, 15 aa, Homo sapiens
  CDR3 for beta chain variable domain of TCR clone 216602 (TRBV19, TRBJ2-7)
CASSPAGSGEALRYF

SEQ ID NO: 433205 - protein, 16 aa, Homo sapiens
  CDR3 for alpha chain variable domain of TCR clone 216603 (TRAV8-3, TRAJ13)
CAVGAYPSGGYQIVTF

SEQ ID NO: 433206 - protein, 13 aa, Homo sapiens
  CDR3 for beta chain variable domain of TCR clone 216603 (TRBV7-9, TRBJ1-2)
CASSLKQNYGYTF

SEQ ID NO: 433207 - protein, 15 aa, Homo sapiens
  CDR3 for alpha chain variable domain of TCR clone 216604 (TRAV2, TRAJ11)
CAVGGRNSGYSTLSF

SEQ ID NO: 433208 - protein, 15 aa, Homo sapiens
  CDR3 for beta chain variable domain of TCR clone 216604 (TRBV6-5, TRBJ2-1)
CASSYDAGAGNEQFF

SEQ ID NO: 433209 - protein, 14 aa, Homo sapiens
  CDR3 for alpha chain variable domain of TCR clone 216605 (TRAV27, TRAJ13)
CRSSNSGGYQKVTF

SEQ ID NO: 433210 - protein, 13 aa, Homo sapiens
  CDR3 for beta chain variable domain of TCR clone 216605 (TRBV7-2, TRBJ2-5)
CASSQTSVETQYF

SEQ ID NO: 433211 - protein, 12 aa, Homo sapiens
  CDR3 for alpha chain variable domain of TCR clone 216606 (TRAV2, TRAJ33)
CAVPDSNYQIIW

SEQ ID NO: 433212 - protein, 15 aa, Homo sapiens
  CDR3 for beta chain variable domain of TCR clone 216606 (TRBV29-1, TRBJ2-7)
CSVEFFDRGSYEQYF

SEQ ID NO: 433213 - protein, 12 aa, Homo sapiens
  CDR3 for alpha chain variable domain of TCR clone 216607 (TRAV12-1, TRAJ40)
CVFYSGTYKYIF

SEQ ID NO: 433214 - protein, 18 aa, Homo sapiens
  CDR3 for beta chain variable domain of TCR clone 216607 (TRBV12-4, TRBJ2-2)
WASSSVAGSRGRTGELFF

SEQ ID NO: 433215 - protein, 13 aa, Homo sapiens
  CDR3 for alpha chain variable domain of TCR clone 216608 (TRAV21, TRAJ27)
CAARPGNAGKSTF

SEQ ID NO: 433216 - protein, 16 aa, Homo sapiens
  CDR3 for beta chain variable domain of TCR clone 216608 (TRBV3-1, TRBJ2-7)
CASSQGATGVAYEQYF

SEQ ID NO: 433217 - protein, 12 aa, Homo sapiens
  CDR3 for alpha chain variable domain of TCR clone 216609 (TRAV8-3, TRAJ26)
CAGDNYGQNFVF

SEQ ID NO: 433218 - protein, 12 aa, Homo sapiens
  CDR3 for beta chain variable domain of TCR clone 216609 (TRBV7-8, TRBJ2-1)
CASSLGHNEQFF

SEQ ID NO: 433219 - protein, 15 aa, Homo sapiens
  CDR3 for alpha chain variable domain of TCR clone 216610 (TRAV21, TRAJ24)
CAARSSTDSWGNCSL

SEQ ID NO: 433220 - protein, 13 aa, Homo sapiens
  CDR3 for beta chain variable domain of TCR clone 216610 (TRBV11-2, TRBJ2-5)
CASSSTGEETQNF

SEQ ID NO: 433221 - protein, 14 aa, Homo sapiens
  CDR3 for alpha chain variable domain of TCR clone 216611 (TRAV2, TRAJ42)
CAVVGGGSQGNLIF

SEQ ID NO: 433222 - protein, 14 aa, Homo sapiens
  CDR3 for beta chain variable domain of TCR clone 216611 (TRBV5-4, TRBJ1-1)
CASSLDSRRDEAFF

SEQ ID NO: 433223 - protein, 14 aa, Homo sapiens
  CDR3 for alpha chain variable domain of TCR clone 216612 (TRAV1-1, TRAJ27)
CAVIYNTNAGKSTF

SEQ ID NO: 433224 - protein, 14 aa, Homo sapiens
  CDR3 for beta chain variable domain of TCR clone 216612 (TRBV27, TRBJ2-2)
CASSLGAATGELFF

SEQ ID NO: 433225 - protein, 13 aa, Homo sapiens
  CDR3 for alpha chain variable domain of TCR clone 216613 (TRAV8-3, TRAJ43)
CAVVPYNNNDMRF

SEQ ID NO: 433226 - protein, 13 aa, Homo sapiens
  CDR3 for beta chain variable domain of TCR clone 216613 (TRBV15, TRBJ1-6)
CATSGGLNSPLHF

SEQ ID NO: 433227 - protein, 11 aa, Homo sapiens
  CDR3 for alpha chain variable domain of TCR clone 216614 (TRAV13-1, TRAJ30)
CAASRADKIIF

SEQ ID NO: 433228 - protein, 15 aa, Homo sapiens
  CDR3 for beta chain variable domain of TCR clone 216614 (TRBV18, TRBJ1-1)
CASSPSSWVNTEAFF

SEQ ID NO: 433229 - protein, 13 aa, Homo sapiens
  CDR3 for alpha chain variable domain of TCR clone 216615 (TRAV8-3, TRAJ36)
CAVGATGANNLFF

SEQ ID NO: 433230 - protein, 16 aa, Homo sapiens
  CDR3 for beta chain variable domain of TCR clone 216615 (TRBV20-1, TRBJ1-4)
CSAPGQGLLTNENLFF

SEQ ID NO: 433231 - protein, 14 aa, Homo sapiens
  CDR3 for alpha chain variable domain of TCR clone 216616 (TRAV2, TRAJ37)
CAVDFTSNTGKQIF

SEQ ID NO: 433232 - protein, 13 aa, Homo sapiens
  CDR3 for beta chain variable domain of TCR clone 216616 (TRBV20-1, TRBJ1-1)
CSAPLGGGTEAFF

SEQ ID NO: 433233 - protein, 13 aa, Homo sapiens
  CDR3 for alpha chain variable domain of TCR clone 216617 (TRAV3, TRAJ27)
CAVRPLGAGQSTV

SEQ ID NO: 433234 - protein, 13 aa, Homo sapiens
  CDR3 for beta chain variable domain of TCR clone 216617 (TRBV7-9, TRBJ2-3)
CASSPGSTDTQYF

SEQ ID NO: 433235 - protein, 13 aa, Homo sapiens
  CDR3 for alpha chain variable domain of TCR clone 216618 (TRAV8-6, TRAJ21)
CAVSPSSLNKFYF

SEQ ID NO: 433236 - protein, 15 aa, Homo sapiens
  CDR3 for beta chain variable domain of TCR clone 216618 (TRBV19, TRBJ1-2)
CASSVGQVLNYGYTF

SEQ ID NO: 433237 - protein, 15 aa, Homo sapiens
  CDR3 for alpha chain variable domain of TCR clone 216619 (TRAV36/DV7, TRAJ53)
WEGENSGGSSYKLTF

SEQ ID NO: 433238 - protein, 15 aa, Homo sapiens
  CDR3 for beta chain variable domain of TCR clone 216619 (TRBV19, TRBJ1-6)
CASSTQGAVGSPLHF

SEQ ID NO: 433239 - protein, 13 aa, Homo sapiens
  CDR3 for alpha chain variable domain of TCR clone 216620 (TRAV21, TRAJ27)
CAARPGNAGKSTF

SEQ ID NO: 433240 - protein, 13 aa, Homo sapiens
  CDR3 for beta chain variable domain of TCR clone 216620 (TRBV13, TRBJ2-1)
CASILGGRGEQYF

SEQ ID NO: 433241 - protein, 14 aa, Homo sapiens
  CDR3 for alpha chain variable domain of TCR clone 216621 (TRAV35, TRAJ53)
GRVNSGGSTYKLTF

SEQ ID NO: 433242 - protein, 14 aa, Homo sapiens
  CDR3 for beta chain variable domain of TCR clone 216621 (TRBV7-3, TRBJ2-2)
CASSLLGSTGELFF

SEQ ID NO: 433243 - protein, 17 aa, Homo sapiens
  CDR3 for alpha chain variable domain of TCR clone 216622 (TRAV3, TRAJ28)
CAVREAYAGAGSYQLTF

SEQ ID NO: 433244 - protein, 17 aa, Homo sapiens
  CDR3 for beta chain variable domain of TCR clone 216622 (TRBV20-1, TRBJ2-1)
CSASSSGLAGSYNEQFF

SEQ ID NO: 433245 - protein, 12 aa, Homo sapiens
  CDR3 for alpha chain variable domain of TCR clone 216623 (TRAV12-3, TRAJ17)
CAITLTCNKLTF

SEQ ID NO: 433246 - protein, 15 aa, Homo sapiens
  CDR3 for beta chain variable domain of TCR clone 216623 (TRBV20-1, TRBJ2-7)
CSARDRVSGMDEQYF

SEQ ID NO: 433247 - protein, 16 aa, Homo sapiens
  CDR3 for alpha chain variable domain of TCR clone 216624 (TRAV3, TRAJ37)
CAVSGKGSGNTGKLIF

SEQ ID NO: 433248 - protein, 15 aa, Homo sapiens
  CDR3 for beta chain variable domain of TCR clone 216624 (TRBV7-9, TRBJ2-2)
CASGPLDTFPGELFF

SEQ ID NO: 433249 - protein, 13 aa, Homo sapiens
  CDR3 for alpha chain variable domain of TCR clone 216625 (TRAV12-1, TRAJ21)
CVVTLYNFNKFYV

SEQ ID NO: 433250 - protein, 20 aa, Homo sapiens
  CDR3 for beta chain variable domain of TCR clone 216625 (TRBV7-8, TRBJ2-1)
CASSLAHRLAGVRSYNEQFF

SEQ ID NO: 433251 - protein, 11 aa, Homo sapiens
  CDR3 for alpha chain variable domain of TCR clone 216626 (TRAV1-2, TRAJ40)
CAVPGTYKYIF

SEQ ID NO: 433252 - protein, 16 aa, Homo sapiens
  CDR3 for beta chain variable domain of TCR clone 216626 (TRBV29-1, TRBJ2-7)
CSVEVVGTSGSYEQHF

SEQ ID NO: 433253 - protein, 14 aa, Homo sapiens
  CDR3 for alpha chain variable domain of TCR clone 216627 (TRAV1-2, TRAJ6)
CAVSLSGGSYIPTF

SEQ ID NO: 433254 - protein, 14 aa, Homo sapiens
  CDR3 for beta chain variable domain of TCR clone 216627 (TRBV7-2, TRBJ2-7)
CASRSQGAAYEQYF

SEQ ID NO: 433255 - protein, 16 aa, Homo sapiens
  CDR3 for alpha chain variable domain of TCR clone 216628 (TRAV3, TRAJ10)
CAVRDMRAGGGNKLTF

SEQ ID NO: 433256 - protein, 15 aa, Homo sapiens
  CDR3 for beta chain variable domain of TCR clone 216628 (TRBV5-4, TRBJ2-6)
CASSSGRTGANVLTF

SEQ ID NO: 433257 - protein, 15 aa, Homo sapiens
  CDR3 for alpha chain variable domain of TCR clone 216629 (TRAV35, TRAJ52)
CAGPRGGTSYGKLTF

SEQ ID NO: 433258 - protein, 12 aa, Homo sapiens
  CDR3 for beta chain variable domain of TCR clone 216629 (TRBV5-4, TRBJ2-5)
CASSSTRETQYF

SEQ ID NO: 433259 - protein, 13 aa, Homo sapiens
  CDR3 for alpha chain variable domain of TCR clone 216630 (TRAV35, TRAJ32)
CAGVGGATNKLIF

SEQ ID NO: 433260 - protein, 14 aa, Homo sapiens
  CDR3 for beta chain variable domain of TCR clone 216630 (TRBV19, TRBJ2-1)
CASPTFVLSGEQFF

SEQ ID NO: 433261 - protein, 14 aa, Homo sapiens
  CDR3 for alpha chain variable domain of TCR clone 216631 (TRAV1-2, TRAJ16)
CAVNRFSDGQKLLF

SEQ ID NO: 433262 - protein, 16 aa, Homo sapiens
  CDR3 for beta chain variable domain of TCR clone 216631 (TRBV12-4, TRBJ2-5)
CASSFFVRGRQETQFF

SEQ ID NO: 433263 - protein, 15 aa, Homo sapiens
  CDR3 for alpha chain variable domain of TCR clone 216632 (TRAV26-2, TRAJ26)
CILRDFDNYGQNSVF

SEQ ID NO: 433264 - protein, 14 aa, Homo sapiens
  CDR3 for beta chain variable domain of TCR clone 216632 (TRBV29-1, TRBJ2-5)
CRFWTPYAGETQYF

SEQ ID NO: 433265 - protein, 13 aa, Homo sapiens
  CDR3 for alpha chain variable domain of TCR clone 216633 (TRAV20, TRAJ34)
CAVRSYNTDKLIF

SEQ ID NO: 433266 - protein, 13 aa, Homo sapiens
  CDR3 for beta chain variable domain of TCR clone 216633 (TRBV11-2, TRBJ1-1)
CASSQAGNTEAFI

SEQ ID NO: 433267 - protein, 14 aa, Homo sapiens
  CDR3 for alpha chain variable domain of TCR clone 216634 (TRAV9-2, TRAJ39)
CALYIYNAGNMLTF

SEQ ID NO: 433268 - protein, 13 aa, Homo sapiens
  CDR3 for beta chain variable domain of TCR clone 216634 (TRBV2, TRBJ1-4)
CASSERAGEKLFF

SEQ ID NO: 433269 - protein, 15 aa, Homo sapiens
  CDR3 for alpha chain variable domain of TCR clone 216635 (TRAV26-1, TRAJ44)
CIVRIGTGTASKLTF

SEQ ID NO: 433270 - protein, 15 aa, Homo sapiens
  CDR3 for beta chain variable domain of TCR clone 216635 (TRBV7-6, TRBJ2-1)
CASNSLAGEGNEQFF

SEQ ID NO: 433271 - protein, 15 aa, Homo sapiens
  CDR3 for alpha chain variable domain of TCR clone 216636 (TRAV20, TRAJ43)
CAVQAGKSSNNDMRF

SEQ ID NO: 433272 - protein, 13 aa, Homo sapiens
  CDR3 for beta chain variable domain of TCR clone 216636 (TRBV27, TRBJ1-1)
CASSLSVGAEAFF

SEQ ID NO: 433273 - protein, 12 aa, Homo sapiens
  CDR3 for alpha chain variable domain of TCR clone 216637 (TRAV13-2, TRAJ23)
CAERPRGGKLIF

SEQ ID NO: 433274 - protein, 12 aa, Homo sapiens
  CDR3 for beta chain variable domain of TCR clone 216637 (TRBV29-1, TRBJ2-3)
CSVTGGADTQYF

SEQ ID NO: 433275 - protein, 16 aa, Homo sapiens
  CDR3 for alpha chain variable domain of TCR clone 216638 (TRAV14/DV4, TRAJ54)
CAMREGRIQGAQKLVF

SEQ ID NO: 433276 - protein, 15 aa, Homo sapiens
  CDR3 for beta chain variable domain of TCR clone 216638 (TRBV7-8, TRBJ2-1)
CARSLAGGLYSEQFF

SEQ ID NO: 433277 - protein, 14 aa, Homo sapiens
  CDR3 for alpha chain variable domain of TCR clone 216639 (TRAV1-2, TRAJ8)
CAVREDTGFQKLVF

SEQ ID NO: 433278 - protein, 16 aa, Homo sapiens
  CDR3 for beta chain variable domain of TCR clone 216639 (TRBV20-1, TRBJ2-4)
GSARAILAGQGDIQYF

SEQ ID NO: 433279 - protein, 11 aa, Homo sapiens
  CDR3 for alpha chain variable domain of TCR clone 216640 (TRAV4, TRAJ31)
CLVGDNARPMV

SEQ ID NO: 433280 - protein, 16 aa, Homo sapiens
  CDR3 for beta chain variable domain of TCR clone 216640 (TRBV7-2, TRBJ2-5)
CASSSKWLSGQETQYF

SEQ ID NO: 433281 - protein, 14 aa, Homo sapiens
  CDR3 for alpha chain variable domain of TCR clone 216641 (TRAV8-3, TRAJ9)
CAVVYNTGGFKTIF

SEQ ID NO: 433282 - protein, 16 aa, Homo sapiens
  CDR3 for beta chain variable domain of TCR clone 216641 (TRBV4-2, TRBJ1-2)
CASSQERRIHYIGYTF

SEQ ID NO: 433283 - protein, 15 aa, Homo sapiens
  CDR3 for alpha chain variable domain of TCR clone 216642 (TRAV17, TRAJ4)
CATGTWSGGYHKLIF

SEQ ID NO: 433284 - protein, 15 aa, Homo sapiens
  CDR3 for beta chain variable domain of TCR clone 216642 (TRBV7-9, TRBJ1-4)
CASSARTGGNEKLFF

SEQ ID NO: 433285 - protein, 15 aa, Homo sapiens
  CDR3 for alpha chain variable domain of TCR clone 216643 (TRAV3, TRAJ20)
CAVRDIKLSDYKLSF

SEQ ID NO: 433286 - protein, 15 aa, Homo sapiens
  CDR3 for beta chain variable domain of TCR clone 216643 (TRBV7-9, TRBJ1-6)
CASSSPGRGNATLHF

SEQ ID NO: 433287 - protein, 11 aa, Homo sapiens
  CDR3 for alpha chain variable domain of TCR clone 216644 (TRAV21, TRAJ20)
CAVRDDYKLSF

SEQ ID NO: 433288 - protein, 14 aa, Homo sapiens
  CDR3 for beta chain variable domain of TCR clone 216644 (TRBV12-4, TRBJ1-1)
CASSVSQMNTEAFF

SEQ ID NO: 433289 - protein, 12 aa, Homo sapiens
  CDR3 for alpha chain variable domain of TCR clone 216645 (TRAV27, TRAJ13)
CAGAGGYQKDTF

SEQ ID NO: 433290 - protein, 15 aa, Homo sapiens
  CDR3 for beta chain variable domain of TCR clone 216645 (TRBV20-1, TRBJ2-6)
CSARDRGPGANDLTF

SEQ ID NO: 433291 - protein, 14 aa, Homo sapiens
  CDR3 for alpha chain variable domain of TCR clone 216646 (TRAV13-1, TRAJ35)
CAASKGGFGNVLHS

SEQ ID NO: 433292 - protein, 15 aa, Homo sapiens
  CDR3 for beta chain variable domain of TCR clone 216646 (TRBV7-3, TRBJ2-1)
CASSLGQGPFGEQFF

SEQ ID NO: 433293 - protein, 15 aa, Homo sapiens
  CDR3 for alpha chain variable domain of TCR clone 216647 (TRAV17, TRAJ16)
CATALRFSDGQKLLF

SEQ ID NO: 433294 - protein, 13 aa, Homo sapiens
  CDR3 for beta chain variable domain of TCR clone 216647 (TRBV6-1, TRBJ1-2)
CASSAREGYGYTF

SEQ ID NO: 433295 - protein, 11 aa, Homo sapiens
  CDR3 for alpha chain variable domain of TCR clone 216648 (TRAV12-3, TRAJ49)
CAANTGNQFYF

SEQ ID NO: 433296 - protein, 15 aa, Homo sapiens
  CDR3 for beta chain variable domain of TCR clone 216648 (TRBV28, TRBJ2-1)
CASSIIAGGRSEQFF

SEQ ID NO: 433297 - protein, 13 aa, Homo sapiens
  CDR3 for alpha chain variable domain of TCR clone 216649 (TRAV3, TRAJ21)
CAVREPDFNKFYF

SEQ ID NO: 433298 - protein, 17 aa, Homo sapiens
  CDR3 for beta chain variable domain of TCR clone 216649 (TRBV6-3, TRBJ2-2)
CASSYAGQGINTGELFF

SEQ ID NO: 433299 - protein, 12 aa, Homo sapiens
  CDR3 for alpha chain variable domain of TCR clone 216650 (TRAV13-2, TRAJ23)
CAERHRGGQLIF

SEQ ID NO: 433300 - protein, 13 aa, Homo sapiens
  CDR3 for beta chain variable domain of TCR clone 216650 (TRBV13, TRBJ2-5)
CASSPEVGETQYF

SEQ ID NO: 433301 - protein, 14 aa, Homo sapiens
  CDR3 for alpha chain variable domain of TCR clone 216651 (TRAV20, TRAJ21)
CSAGGIYNFNKFYF

SEQ ID NO: 433302 - protein, 12 aa, Homo sapiens
  CDR3 for beta chain variable domain of TCR clone 216651 (TRBV12-4, TRBJ2-1)
CASSLVRVEQFF

SEQ ID NO: 433303 - protein, 16 aa, Homo sapiens
  CDR3 for alpha chain variable domain of TCR clone 216652 (TRAV16, TRAJ4)
CALSRMFSGGYNKLIF

SEQ ID NO: 433304 - protein, 16 aa, Homo sapiens
  CDR3 for beta chain variable domain of TCR clone 216652 (TRBV24-1, TRBJ2-3)
CATSYPGTGATDTQYF

SEQ ID NO: 433305 - protein, 14 aa, Homo sapiens
  CDR3 for alpha chain variable domain of TCR clone 216653 (TRAV2, TRAJ22)
CAVGRGGSARQLTF

SEQ ID NO: 433306 - protein, 13 aa, Homo sapiens
  CDR3 for beta chain variable domain of TCR clone 216653 (TRBV27, TRBJ2-3)
CASSWGRTDTQYF

SEQ ID NO: 433307 - protein, 16 aa, Homo sapiens
  CDR3 for alpha chain variable domain of TCR clone 216654 (TRAV30, TRAJ24)
CGTEIVDADSWGKFQF

SEQ ID NO: 433308 - protein, 18 aa, Homo sapiens
  CDR3 for beta chain variable domain of TCR clone 216654 (TRBV25-1, TRBJ2-2)
CHPSLPGGQGAQNRGAVF

SEQ ID NO: 433309 - protein, 14 aa, Homo sapiens
  CDR3 for alpha chain variable domain of TCR clone 216655 (TRAV12-1, TRAJ30)
CVVNIGGRDDKIIC

SEQ ID NO: 433310 - protein, 15 aa, Homo sapiens
  CDR3 for beta chain variable domain of TCR clone 216655 (TRBV18, TRBJ1-2)
CASSPSNTPNYGYTF

SEQ ID NO: 433311 - protein, 14 aa, Homo sapiens
  CDR3 for alpha chain variable domain of TCR clone 216656 (TRAV12-2, TRAJ13)
CAVKNTGGYQKVTF

SEQ ID NO: 433312 - protein, 13 aa, Homo sapiens
  CDR3 for beta chain variable domain of TCR clone 216656 (TRBV19, TRBJ1-2)
CASSVPGQDGYTF

SEQ ID NO: 433313 - protein, 16 aa, Homo sapiens
  CDR3 for alpha chain variable domain of TCR clone 216657 (TRAV1-2, TRAJ10)
CAVRGVLTGGGNKLTF

SEQ ID NO: 433314 - protein, 17 aa, Homo sapiens
  CDR3 for beta chain variable domain of TCR clone 216657 (TRBV24-1, TRBJ2-4)
CATSDAEARGVRNIQYF

SEQ ID NO: 433315 - protein, 12 aa, Homo sapiens
  CDR3 for alpha chain variable domain of TCR clone 216658 (TRAV13-1, TRAJ9)
CASHTGGFKTIF

SEQ ID NO: 433316 - protein, 18 aa, Homo sapiens
  CDR3 for beta chain variable domain of TCR clone 216658 (TRBV11-2, TRBJ2-3)
WASSLGGASRGAPNTQYF

SEQ ID NO: 433317 - protein, 12 aa, Homo sapiens
  CDR3 for alpha chain variable domain of TCR clone 216659 (TRAV2, TRAJ31)
CAVEDNNGRLMF

SEQ ID NO: 433318 - protein, 16 aa, Homo sapiens
  CDR3 for beta chain variable domain of TCR clone 216659 (TRBV10-3, TRBJ2-1)
CAISGVGDGGGGEQFF

SEQ ID NO: 433319 - protein, 13 aa, Homo sapiens
  CDR3 for alpha chain variable domain of TCR clone 216660 (TRAV8-6, TRAJ8)
CAWSNTGFQKLVF

SEQ ID NO: 433320 - protein, 15 aa, Homo sapiens
  CDR3 for beta chain variable domain of TCR clone 216660 (TRBV28, TRBJ2-5)
CASSSGRTIQETQYF

SEQ ID NO: 433321 - protein, 18 aa, Homo sapiens
  CDR3 for alpha chain variable domain of TCR clone 216661 (TRAV1-2, TRAJ18)
CAVRDMGDRGSTLGRLYF

SEQ ID NO: 433322 - protein, 14 aa, Homo sapiens
  CDR3 for beta chain variable domain of TCR clone 216661 (TRBV4-1, TRBJ1-1)
CASSRSGQSFEAFF

SEQ ID NO: 433323 - protein, 14 aa, Homo sapiens
  CDR3 for alpha chain variable domain of TCR clone 216662 (TRAV8-4, TRAJ9)
CAARINTGGFKTIF

SEQ ID NO: 433324 - protein, 20 aa, Homo sapiens
  CDR3 for beta chain variable domain of TCR clone 216662 (TRBV7-8, TRBJ2-2)
CASSHLFPGPTIHITGELFF

SEQ ID NO: 433325 - protein, 13 aa, Homo sapiens
  CDR3 for alpha chain variable domain of TCR clone 216663 (TRAV29/DV5, TRAJ31)
CAASRNNNARLML

SEQ ID NO: 433326 - protein, 12 aa, Homo sapiens
  CDR3 for beta chain variable domain of TCR clone 216663 (TRBV11-2, TRBJ2-2)
CASSLGGGELFF

SEQ ID NO: 433327 - protein, 16 aa, Homo sapiens
  CDR3 for alpha chain variable domain of TCR clone 216664 (TRAV30, TRAJ24)
CGTEIVDAGSWGKFKF

SEQ ID NO: 433328 - protein, 14 aa, Homo sapiens
  CDR3 for beta chain variable domain of TCR clone 216664 (TRBV12-5, TRBJ2-5)
CASGSRTHQETQYF

SEQ ID NO: 433329 - protein, 14 aa, Homo sapiens
  CDR3 for alpha chain variable domain of TCR clone 216665 (TRAV30, TRAJ26)
CGTEIVSYGQNFVF

SEQ ID NO: 433330 - protein, 15 aa, Homo sapiens
  CDR3 for beta chain variable domain of TCR clone 216665 (TRBV6-5, TRBJ2-7)
CASSRTSGFSYEQYF

SEQ ID NO: 433331 - protein, 12 aa, Homo sapiens
  CDR3 for alpha chain variable domain of TCR clone 216666 (TRAV20, TRAJ20)
CAVRFNDYKLSF

SEQ ID NO: 433332 - protein, 11 aa, Homo sapiens
  CDR3 for beta chain variable domain of TCR clone 216666 (TRBV11-2, TRBJ2-2)
CASSLPGELFF

SEQ ID NO: 433333 - protein, 12 aa, Homo sapiens
  CDR3 for alpha chain variable domain of TCR clone 216667 (TRAV21, TRAJ31)
CAVSPARGRLMF

SEQ ID NO: 433334 - protein, 14 aa, Homo sapiens
  CDR3 for beta chain variable domain of TCR clone 216667 (TRBV28, TRBJ2-7)
CASSLLRISYEQYF

SEQ ID NO: 433335 - protein, 14 aa, Homo sapiens
  CDR3 for alpha chain variable domain of TCR clone 216668 (TRAV17, TRAJ34)
CATDSLEGTDKLIF

SEQ ID NO: 433336 - protein, 16 aa, Homo sapiens
  CDR3 for beta chain variable domain of TCR clone 216668 (TRBV4-1, TRBJ1-2)
CASSQDAGQVLYGYTF

SEQ ID NO: 433337 - protein, 13 aa, Homo sapiens
  CDR3 for alpha chain variable domain of TCR clone 216669 (TRAV17, TRAJ9)
CATDYTGGFKTIF

SEQ ID NO: 433338 - protein, 11 aa, Homo sapiens
  CDR3 for beta chain variable domain of TCR clone 216669 (TRBV4-1, TRBJ1-1)
CASSRRQEAFF

SEQ ID NO: 433339 - protein, 14 aa, Homo sapiens
  CDR3 for alpha chain variable domain of TCR clone 216670 (TRAV2, TRAJ9)
CAVEDRSGGFKTIF

SEQ ID NO: 433340 - protein, 12 aa, Homo sapiens
  CDR3 for beta chain variable domain of TCR clone 216670 (TRBV12-4, TRBJ2-4)
CASSSSGNIQYL

SEQ ID NO: 433341 - protein, 14 aa, Homo sapiens
  CDR3 for alpha chain variable domain of TCR clone 216671 (TRAV12-2, TRAJ13)
CAVKKTGGYQKVTF

SEQ ID NO: 433342 - protein, 16 aa, Homo sapiens
  CDR3 for beta chain variable domain of TCR clone 216671 (TRBV2, TRBJ2-1)
CASSAGGSLSYNEQFF

SEQ ID NO: 433343 - protein, 16 aa, Homo sapiens
  CDR3 for alpha chain variable domain of TCR clone 216672 (TRAV13-1, TRAJ17)
FAASKGVKAAGNKLTF

SEQ ID NO: 433344 - protein, 15 aa, Homo sapiens
  CDR3 for beta chain variable domain of TCR clone 216672 (TRBV20-1, TRBJ1-5)
CSAREGGYSNQPQHF

SEQ ID NO: 433345 - protein, 12 aa, Homo sapiens
  CDR3 for alpha chain variable domain of TCR clone 216673 (TRAV29/DV5, TRAJ43)
CAAPYNNNDMRF

SEQ ID NO: 433346 - protein, 17 aa, Homo sapiens
  CDR3 for beta chain variable domain of TCR clone 216673 (TRBV19, TRBJ2-6)
CASSTGQVLSGANVLTF

SEQ ID NO: 433347 - protein, 13 aa, Homo sapiens
  CDR3 for alpha chain variable domain of TCR clone 216674 (TRAV21, TRAJ57)
CAVTQGGSEKLVF

SEQ ID NO: 433348 - protein, 11 aa, Homo sapiens
  CDR3 for beta chain variable domain of TCR clone 216674 (TRBV11-2, TRBJ2-2)
CASSLPGELFF

SEQ ID NO: 433349 - protein, 16 aa, Homo sapiens
  CDR3 for alpha chain variable domain of TCR clone 216675 (TRAV4, TRAJ22)
CLVGDLYSGFARQLTF

SEQ ID NO: 433350 - protein, 14 aa, Homo sapiens
  CDR3 for beta chain variable domain of TCR clone 216675 (TRBV28, TRBJ2-3)
CASSWRGRADTQYF

SEQ ID NO: 433351 - protein, 11 aa, Homo sapiens
  CDR3 for alpha chain variable domain of TCR clone 216676 (TRAV2, TRAJ33)
CAVDSNYQLIW

SEQ ID NO: 433352 - protein, 15 aa, Homo sapiens
  CDR3 for beta chain variable domain of TCR clone 216676 (TRBV20-1, TRBJ2-7)
CSARDPTEVGHEQYF

SEQ ID NO: 433353 - protein, 14 aa, Homo sapiens
  CDR3 for alpha chain variable domain of TCR clone 216677 (TRAV20, TRAJ29)
CAVQAWVGNTPLVF

SEQ ID NO: 433354 - protein, 17 aa, Homo sapiens
  CDR3 for beta chain variable domain of TCR clone 216677 (TRBV5-4, TRBJ2-3)
CISVPAVLTASTDTQYF

SEQ ID NO: 433355 - protein, 11 aa, Homo sapiens
  CDR3 for alpha chain variable domain of TCR clone 216678 (TRAV1-2, TRAJ31)
CAVNNNARPMF

SEQ ID NO: 433356 - protein, 13 aa, Homo sapiens
  CDR3 for beta chain variable domain of TCR clone 216678 (TRBV4-2, TRBJ1-1)
CASSQAGNTEAFF

SEQ ID NO: 433357 - protein, 14 aa, Homo sapiens
  CDR3 for alpha chain variable domain of TCR clone 216679 (TRAV12-2, TRAJ13)
CAVKKTGGYQTVTF

SEQ ID NO: 433358 - protein, 16 aa, Homo sapiens
  CDR3 for beta chain variable domain of TCR clone 216679 (TRBV12-5, TRBJ2-5)
CASGPRTSGNQETQYF

SEQ ID NO: 433359 - protein, 14 aa, Homo sapiens
  CDR3 for alpha chain variable domain of TCR clone 216680 (TRAV16, TRAJ54)
FALSGVQGARKLVF

SEQ ID NO: 433360 - protein, 15 aa, Homo sapiens
  CDR3 for beta chain variable domain of TCR clone 216680 (TRBV18, TRBJ2-2)
CASSTSGLHTGELFF

SEQ ID NO: 433361 - protein, 10 aa, Homo sapiens
  CDR3 for alpha chain variable domain of TCR clone 216681 (TRAV23/DV6, TRAJ4)
CAARDFLSSD

SEQ ID NO: 433362 - protein, 13 aa, Homo sapiens
  CDR3 for beta chain variable domain of TCR clone 216681 (TRBV7-2, TRBJ1-1)
CASSRNTNTEAFF

SEQ ID NO: 433363 - protein, 13 aa, Homo sapiens
  CDR3 for alpha chain variable domain of TCR clone 216682 (TRAV2, TRAJ15)
CAVASQAGTALIF

SEQ ID NO: 433364 - protein, 14 aa, Homo sapiens
  CDR3 for beta chain variable domain of TCR clone 216682 (TRBV20-1, TRBJ1-1)
CSAQTRSGGTEAFF

SEQ ID NO: 433365 - protein, 14 aa, Homo sapiens
  CDR3 for alpha chain variable domain of TCR clone 216683 (TRAV1-1, TRAJ27)
CAVIYNTNAGKSTF

SEQ ID NO: 433366 - protein, 14 aa, Homo sapiens
  CDR3 for beta chain variable domain of TCR clone 216683 (TRBV7-8, TRBJ2-3)
CASSFPDGQDTQYF

SEQ ID NO: 433367 - protein, 12 aa, Homo sapiens
  CDR3 for alpha chain variable domain of TCR clone 216684 (TRAV29/DV5, TRAJ49)
CAATDPGNPFYF

SEQ ID NO: 433368 - protein, 19 aa, Homo sapiens
  CDR3 for beta chain variable domain of TCR clone 216684 (TRBV25-1, TRBJ2-2)
CAILVYRVDRGRKTGELFF

SEQ ID NO: 433369 - protein, 13 aa, Homo sapiens
  CDR3 for alpha chain variable domain of TCR clone 216685 (TRAV35, TRAJ22)
CAGLSGSAMQLTF

SEQ ID NO: 433370 - protein, 16 aa, Homo sapiens
  CDR3 for beta chain variable domain of TCR clone 216685 (TRBV7-9, TRBJ2-1)
CASSLVLTGQGNEQLF

SEQ ID NO: 433371 - protein, 16 aa, Homo sapiens
  CDR3 for alpha chain variable domain of TCR clone 216686 (TRAV30, TRAJ57)
CGTGWAPQGRSEKLVF

SEQ ID NO: 433372 - protein, 14 aa, Homo sapiens
  CDR3 for beta chain variable domain of TCR clone 216686 (TRBV18, TRBJ1-1)
CASSPGFQGVEAFF

SEQ ID NO: 433373 - protein, 16 aa, Homo sapiens
  CDR3 for alpha chain variable domain of TCR clone 216687 (TRAV26-1, TRAJ45)
CIVEKYSGGGADGLTF

SEQ ID NO: 433374 - protein, 15 aa, Homo sapiens
  CDR3 for beta chain variable domain of TCR clone 216687 (TRBV15, TRBJ2-7)
CHQQRPIQQADEQYF

SEQ ID NO: 433375 - protein, 15 aa, Homo sapiens
  CDR3 for alpha chain variable domain of TCR clone 216688 (TRAV3, TRAJ13)
CAVRVYSGGYQKVTF

SEQ ID NO: 433376 - protein, 12 aa, Homo sapiens
  CDR3 for beta chain variable domain of TCR clone 216688 (TRBV11-2, TRBJ2-7)
CASSPPADGQYF

SEQ ID NO: 433377 - protein, 12 aa, Homo sapiens
  CDR3 for alpha chain variable domain of TCR clone 216689 (TRAV8-4, TRAJ49)
CAVSEAGNQFYF

SEQ ID NO: 433378 - protein, 13 aa, Homo sapiens
  CDR3 for beta chain variable domain of TCR clone 216689 (TRBV12-4, TRBJ2-7)
CASSPTETYEQYF

SEQ ID NO: 433379 - protein, 14 aa, Homo sapiens
  CDR3 for alpha chain variable domain of TCR clone 216690 (TRAV26-1, TRAJ45)
CIVRVVVGADGLTF

SEQ ID NO: 433380 - protein, 14 aa, Homo sapiens
  CDR3 for beta chain variable domain of TCR clone 216690 (TRBV13, TRBJ2-1)
CASSAGQGAYEQFF

SEQ ID NO: 433381 - protein, 14 aa, Homo sapiens
  CDR3 for alpha chain variable domain of TCR clone 216691 (TRAV23/DV6, TRAJ8)
CAASKNTGFQKLVF

SEQ ID NO: 433382 - protein, 17 aa, Homo sapiens
  CDR3 for beta chain variable domain of TCR clone 216691 (TRBV5-1, TRBJ2-1)
CASSMGLAGEGYNEQFF

SEQ ID NO: 433383 - protein, 12 aa, Homo sapiens
  CDR3 for alpha chain variable domain of TCR clone 216692 (TRAV6, TRAJ20)
CALDRGDYKLSF

SEQ ID NO: 433384 - protein, 13 aa, Homo sapiens
  CDR3 for beta chain variable domain of TCR clone 216692 (TRBV5-1, TRBJ1-2)
CASSFQDEYGYTF

SEQ ID NO: 433385 - protein, 14 aa, Homo sapiens
  CDR3 for alpha chain variable domain of TCR clone 216693 (TRAV8-2, TRAJ4)
CVVSSSGGYNKLIF

SEQ ID NO: 433386 - protein, 15 aa, Homo sapiens
  CDR3 for beta chain variable domain of TCR clone 216693 (TRBV2, TRBJ2-1)
CASSELAGSYNEQFF

SEQ ID NO: 433387 - protein, 12 aa, Homo sapiens
  CDR3 for alpha chain variable domain of TCR clone 216694 (TRAV9-2, TRAJ4)
CAPSGGYNKLIF

SEQ ID NO: 433388 - protein, 15 aa, Homo sapiens
  CDR3 for beta chain variable domain of TCR clone 216694 (TRBV5-7, TRBJ2-1)
CASSRRLAGDNEQFF

SEQ ID NO: 433389 - protein, 14 aa, Homo sapiens
  CDR3 for alpha chain variable domain of TCR clone 216695 (TRAV1-2, TRAJ8)
CAVREDTGFQKLVL

SEQ ID NO: 433390 - protein, 13 aa, Homo sapiens
  CDR3 for beta chain variable domain of TCR clone 216695 (TRBV23-1, TRBJ1-4)
CASRGKFNEKLFF

SEQ ID NO: 433391 - protein, 12 aa, Homo sapiens
  CDR3 for alpha chain variable domain of TCR clone 216696 (TRAV13-2, TRAJ23)
CAERHSGGKLIF

SEQ ID NO: 433392 - protein, 15 aa, Homo sapiens
  CDR3 for beta chain variable domain of TCR clone 216696 (TRBV12-4, TRBJ1-6)
CASSLGGQGTSPLHF

SEQ ID NO: 433393 - protein, 13 aa, Homo sapiens
  CDR3 for alpha chain variable domain of TCR clone 216697 (TRAV12-2, TRAJ6)
CAVNVSRKLHTYI

SEQ ID NO: 433394 - protein, 13 aa, Homo sapiens
  CDR3 for beta chain variable domain of TCR clone 216697 (TRBV7-3, TRBJ1-1)
CASSQDWGAEAFF

SEQ ID NO: 433395 - protein, 14 aa, Homo sapiens
  CDR3 for alpha chain variable domain of TCR clone 216698 (TRAV8-3, TRAJ27)
FAGGRDTNAGKSTF

SEQ ID NO: 433396 - protein, 15 aa, Homo sapiens
  CDR3 for beta chain variable domain of TCR clone 216698 (TRBV11-3, TRBJ2-5)
CASGLRGRVQETQYF

SEQ ID NO: 433397 - protein, 13 aa, Homo sapiens
  CDR3 for alpha chain variable domain of TCR clone 216699 (TRAV20, TRAJ20)
CAVQAGSGYNLSF

SEQ ID NO: 433398 - protein, 12 aa, Homo sapiens
  CDR3 for beta chain variable domain of TCR clone 216699 (TRBV3-1, TRBJ2-3)
CQQPRGGDTQYF

SEQ ID NO: 433399 - protein, 15 aa, Homo sapiens
  CDR3 for alpha chain variable domain of TCR clone 216700 (TRAV3, TRAJ4)
CAQNMFSGGYNKLIF

SEQ ID NO: 433400 - protein, 16 aa, Homo sapiens
  CDR3 for beta chain variable domain of TCR clone 216700 (TRBV19, TRBJ1-1)
CASSPTRFWPGTEAFF

SEQ ID NO: 433401 - protein, 15 aa, Homo sapiens
  CDR3 for alpha chain variable domain of TCR clone 216701 (TRAV12-2, TRAJ53)
CAVNGGGGSNYKLTF

SEQ ID NO: 433402 - protein, 17 aa, Homo sapiens
  CDR3 for beta chain variable domain of TCR clone 216701 (TRBV7-3, TRBJ2-3)
CASSLMKRMRGAEKQYF

SEQ ID NO: 433403 - protein, 13 aa, Homo sapiens
  CDR3 for alpha chain variable domain of TCR clone 216702 (TRAV13-1, TRAJ37)
CAARSGNTGTLIF

SEQ ID NO: 433404 - protein, 14 aa, Homo sapiens
  CDR3 for beta chain variable domain of TCR clone 216702 (TRBV12-4, TRBJ2-3)
CASSLGQGTDTQYF

SEQ ID NO: 433405 - protein, 11 aa, Homo sapiens
  CDR3 for alpha chain variable domain of TCR clone 216703 (TRAV2, TRAJ31)
CAVYNNARLMF

SEQ ID NO: 433406 - protein, 16 aa, Homo sapiens
  CDR3 for beta chain variable domain of TCR clone 216703 (TRBV28, TRBJ1-6)
CASSSLLEGDNSPLRF

SEQ ID NO: 433407 - protein, 22 aa, Homo sapiens
  CDR3 for alpha chain variable domain of TCR clone 216704 (TRAV25, TRAJ13)
TATQTTDVGTFLDSGGYQKVTF

SEQ ID NO: 433408 - protein, 13 aa, Homo sapiens
  CDR3 for beta chain variable domain of TCR clone 216704 (TRBV4-1, TRBJ2-2)
CASSQENTGELFF

SEQ ID NO: 433409 - protein, 15 aa, Homo sapiens
  CDR3 for alpha chain variable domain of TCR clone 216705 (TRAV8-3, TRAJ10)
CAVGLLTGGGNKLTF

SEQ ID NO: 433410 - protein, 14 aa, Homo sapiens
  CDR3 for beta chain variable domain of TCR clone 216705 (TRBV7-9, TRBJ1-1)
CASTPLQSYTEAFF

SEQ ID NO: 433411 - protein, 13 aa, Homo sapiens
  CDR3 for alpha chain variable domain of TCR clone 216706 (TRAV2, TRAJ24)
CAVTTDSWWKLQF

SEQ ID NO: 433412 - protein, 14 aa, Homo sapiens
  CDR3 for beta chain variable domain of TCR clone 216706 (TRBV13, TRBJ2-5)
CASSLGRGQETQYF

SEQ ID NO: 433413 - protein, 15 aa, Homo sapiens
  CDR3 for alpha chain variable domain of TCR clone 216707 (TRAV26-1, TRAJ23)
CIVRVAGYKGGKLIF

SEQ ID NO: 433414 - protein, 18 aa, Homo sapiens
  CDR3 for beta chain variable domain of TCR clone 216707 (TRBV28, TRBJ2-1)
CASSSTSGRANAYNEQFF

SEQ ID NO: 433415 - protein, 14 aa, Homo sapiens
  CDR3 for alpha chain variable domain of TCR clone 216708 (TRAV12-2, TRAJ5)
CAVNRSTGRRALTF

SEQ ID NO: 433416 - protein, 12 aa, Homo sapiens
  CDR3 for beta chain variable domain of TCR clone 216708 (TRBV19, TRBJ1-5)
SASSIAQQPQHF

SEQ ID NO: 433417 - protein, 13 aa, Homo sapiens
  CDR3 for alpha chain variable domain of TCR clone 216709 (TRAV21, TRAJ20)
CAVGLRVDYKLSF

SEQ ID NO: 433418 - protein, 11 aa, Homo sapiens
  CDR3 for beta chain variable domain of TCR clone 216709 (TRBV25-1, TRBJ2-1)
CATTRLSEQFF

SEQ ID NO: 433419 - protein, 14 aa, Homo sapiens
  CDR3 for alpha chain variable domain of TCR clone 216710 (TRAV17, TRAJ12)
CATDGVDSSYKLIF

SEQ ID NO: 433420 - protein, 15 aa, Homo sapiens
  CDR3 for beta chain variable domain of TCR clone 216710 (TRBV28, TRBJ1-3)
CASSMGWASGNTIYF

SEQ ID NO: 433421 - protein, 17 aa, Homo sapiens
  CDR3 for alpha chain variable domain of TCR clone 216711 (TRAV3, TRAJ6)
CAVRDGPRAGGSYLPTF

SEQ ID NO: 433422 - protein, 13 aa, Homo sapiens
  CDR3 for beta chain variable domain of TCR clone 216711 (TRBV20-1, TRBJ1-6)
CSAPLGVGSPLHF

SEQ ID NO: 433423 - protein, 16 aa, Homo sapiens
  CDR3 for alpha chain variable domain of TCR clone 216712 (TRAV23/DV6, TRAJ9)
CAASIGGNTGGFKTIF

SEQ ID NO: 433424 - protein, 16 aa, Homo sapiens
  CDR3 for beta chain variable domain of TCR clone 216712 (TRBV12-4, TRBJ1-5)
CASSRPVGGSNQPQHF

SEQ ID NO: 433425 - protein, 15 aa, Homo sapiens
  CDR3 for alpha chain variable domain of TCR clone 216713 (TRAV21, TRAJ53)
CATLNSGGSNYKLTF

SEQ ID NO: 433426 - protein, 13 aa, Homo sapiens
  CDR3 for beta chain variable domain of TCR clone 216713 (TRBV5-1, TRBJ2-3)
CASSSEITDTQYF

SEQ ID NO: 433427 - protein, 15 aa, Homo sapiens
  CDR3 for alpha chain variable domain of TCR clone 216714 (TRAV12-2, TRAJ9)
CAVNNERTGGFKNIF

SEQ ID NO: 433428 - protein, 14 aa, Homo sapiens
  CDR3 for beta chain variable domain of TCR clone 216714 (TRBV4-1, TRBJ1-4)
CASSQERKNEKLLF

SEQ ID NO: 433429 - protein, 16 aa, Homo sapiens
  CDR3 for alpha chain variable domain of TCR clone 216715 (TRAV27, TRAJ48)
TAAQPGDTGLYLPLTF

SEQ ID NO: 433430 - protein, 14 aa, Homo sapiens
  CDR3 for beta chain variable domain of TCR clone 216715 (TRBV19, TRBJ2-7)
CASSMGQGAIEQYF

SEQ ID NO: 433431 - protein, 14 aa, Homo sapiens
  CDR3 for alpha chain variable domain of TCR clone 216716 (TRAV8-3, TRAJ39)
CAVGANNSGNMLTF

SEQ ID NO: 433432 - protein, 13 aa, Homo sapiens
  CDR3 for beta chain variable domain of TCR clone 216716 (TRBV3-1, TRBJ2-5)
CASSPVLSKTQYF

SEQ ID NO: 433433 - protein, 15 aa, Homo sapiens
  CDR3 for alpha chain variable domain of TCR clone 216717 (TRAV21, TRAJ53)
CATLNSGGSNYKLTF

SEQ ID NO: 433434 - protein, 15 aa, Homo sapiens
  CDR3 for beta chain variable domain of TCR clone 216717 (TRBV27, TRBJ2-1)
CASSNGGGSANEQFF

SEQ ID NO: 433435 - protein, 20 aa, Homo sapiens
  CDR3 for alpha chain variable domain of TCR clone 216718 (TRAV12-1, TRAJ42)
SSVIQPPTSVKGGSQGNLTF

SEQ ID NO: 433436 - protein, 18 aa, Homo sapiens
  CDR3 for beta chain variable domain of TCR clone 216718 (TRBV11-2, TRBJ2-3)
CASSLGGASRGAPNTQDF

SEQ ID NO: 433437 - protein, 14 aa, Homo sapiens
  CDR3 for alpha chain variable domain of TCR clone 216719 (TRAV23/DV6, TRAJ11)
CAASLESGYSTLTF

SEQ ID NO: 433438 - protein, 14 aa, Homo sapiens
  CDR3 for beta chain variable domain of TCR clone 216719 (TRBV5-1, TRBJ2-7)
CASSRGESLYEQYF

SEQ ID NO: 433439 - protein, 14 aa, Homo sapiens
  CDR3 for alpha chain variable domain of TCR clone 216720 (TRAV1-2, TRAJ16)
CAVNRFSDGQKLLF

SEQ ID NO: 433440 - protein, 16 aa, Homo sapiens
  CDR3 for beta chain variable domain of TCR clone 216720 (TRBV12-5, TRBJ2-5)
CASGPRTSGNQETQFF

SEQ ID NO: 433441 - protein, 16 aa, Homo sapiens
  CDR3 for alpha chain variable domain of TCR clone 216721 (TRAV26-1, TRAJ44)
IASSESRTGTASKLTF

SEQ ID NO: 433442 - protein, 15 aa, Homo sapiens
  CDR3 for beta chain variable domain of TCR clone 216721 (TRBV20-1, TRBJ2-3)
CSATPVMLGTDTQYF

SEQ ID NO: 433443 - protein, 12 aa, Homo sapiens
  CDR3 for alpha chain variable domain of TCR clone 216722 (TRAV2, TRAJ9)
CSVVAGGFKTIF

SEQ ID NO: 433444 - protein, 16 aa, Homo sapiens
  CDR3 for beta chain variable domain of TCR clone 216722 (TRBV13, TRBJ2-2)
CASSPRTGEHTGELFF

SEQ ID NO: 433445 - protein, 14 aa, Homo sapiens
  CDR3 for alpha chain variable domain of TCR clone 216723 (TRAV29/DV5, TRAJ49)
CAASAQNTGNQFYL

SEQ ID NO: 433446 - protein, 16 aa, Homo sapiens
  CDR3 for beta chain variable domain of TCR clone 216723 (TRBV12-4, TRBJ1-5)
CASRQPVEGSNQPQHF

SEQ ID NO: 433447 - protein, 12 aa, Homo sapiens
  CDR3 for alpha chain variable domain of TCR clone 216724 (TRAV12-3, TRAJ17)
CAMTLTGNKLTF

SEQ ID NO: 433448 - protein, 15 aa, Homo sapiens
  CDR3 for beta chain variable domain of TCR clone 216724 (TRBV28, TRBJ2-3)
CASSQELGGTDTQYF

SEQ ID NO: 433449 - protein, 13 aa, Homo sapiens
  CDR3 for alpha chain variable domain of TCR clone 216725 (TRAV20, TRAJ21)
CAVEGYNFNKFYF

SEQ ID NO: 433450 - protein, 20 aa, Homo sapiens
  CDR3 for beta chain variable domain of TCR clone 216725 (TRBV7-8, TRBJ2-2)
CASSHLFPGPTVHITGELFF

SEQ ID NO: 433451 - protein, 13 aa, Homo sapiens
  CDR3 for alpha chain variable domain of TCR clone 216726 (TRAV36/DV7, TRAJ33)
CAVDMDSNYQLIW

SEQ ID NO: 433452 - protein, 16 aa, Homo sapiens
  CDR3 for beta chain variable domain of TCR clone 216726 (TRBV15, TRBJ2-3)
CATRLSGGRAADTQYF

SEQ ID NO: 433453 - protein, 12 aa, Homo sapiens
  CDR3 for alpha chain variable domain of TCR clone 216727 (TRAV8-3, TRAJ26)
CAGDNYGQNFAF

SEQ ID NO: 433454 - protein, 17 aa, Homo sapiens
  CDR3 for beta chain variable domain of TCR clone 216727 (TRBV20-1, TRBJ2-1)
CSASSSGLAGSYNEQFF

SEQ ID NO: 433455 - protein, 12 aa, Homo sapiens
  CDR3 for alpha chain variable domain of TCR clone 216728 (TRAV3, TRAJ20)
CAVRDPDYKLSF

SEQ ID NO: 433456 - protein, 13 aa, Homo sapiens
  CDR3 for beta chain variable domain of TCR clone 216728 (TRBV11-2, TRBJ2-1)
CASSLGLAGGRFF

SEQ ID NO: 433457 - protein, 13 aa, Homo sapiens
  CDR3 for alpha chain variable domain of TCR clone 216729 (TRAV20, TRAJ20)
CAVRWVRDYKLSF

SEQ ID NO: 433458 - protein, 14 aa, Homo sapiens
  CDR3 for beta chain variable domain of TCR clone 216729 (TRBV19, TRBJ2-2)
CTSTVTANTGELFF

SEQ ID NO: 433459 - protein, 13 aa, Homo sapiens
  CDR3 for alpha chain variable domain of TCR clone 216730 (TRAV20, TRAJ37)
CAGCSSHTGKLIF

SEQ ID NO: 433460 - protein, 14 aa, Homo sapiens
  CDR3 for beta chain variable domain of TCR clone 216730 (TRBV12-5, TRBJ2-5)
CVSGSRTHQETQYF

SEQ ID NO: 433461 - protein, 15 aa, Homo sapiens
  CDR3 for alpha chain variable domain of TCR clone 216731 (TRAV8-3, TRAJ11)
CAVGLLNSGYSTLTF

SEQ ID NO: 433462 - protein, 12 aa, Homo sapiens
  CDR3 for beta chain variable domain of TCR clone 216731 (TRBV7-9, TRBJ2-7)
CASSFGSYEQYF

SEQ ID NO: 433463 - protein, 22 aa, Homo sapiens
  CDR3 for alpha chain variable domain of TCR clone 216732 (TRAV1-1, TRAJ17)
CLLLLRCESPRGIKAAGHKLTF

SEQ ID NO: 433464 - protein, 17 aa, Homo sapiens
  CDR3 for beta chain variable domain of TCR clone 216732 (TRBV6-1, TRBJ1-1)
CASLARGGGGFNTEAFF

SEQ ID NO: 433465 - protein, 15 aa, Homo sapiens
  CDR3 for alpha chain variable domain of TCR clone 216733 (TRAV26-1, TRAJ28)
CIVRVAGAGSYQLTF

SEQ ID NO: 433466 - protein, 19 aa, Homo sapiens
  CDR3 for beta chain variable domain of TCR clone 216733 (TRBV7-3, TRBJ2-7)
CASSLTGVAGGWHSYEQYF

SEQ ID NO: 433467 - protein, 12 aa, Homo sapiens
  CDR3 for alpha chain variable domain of TCR clone 216734 (TRAV12-3, TRAJ17)
FAMTLTGNKLTF

SEQ ID NO: 433468 - protein, 16 aa, Homo sapiens
  CDR3 for beta chain variable domain of TCR clone 216734 (TRBV29-1, TRBJ2-7)
CSVEDAEDGTAYEQYF

SEQ ID NO: 433469 - protein, 16 aa, Homo sapiens
  CDR3 for alpha chain variable domain of TCR clone 216735 (TRAV1-2, TRAJ10)
CAVRGVLTGGGNKRTV

SEQ ID NO: 433470 - protein, 12 aa, Homo sapiens
  CDR3 for beta chain variable domain of TCR clone 216735 (TRBV7-8, TRBJ2-7)
CASSLGDREQYF

SEQ ID NO: 433471 - protein, 12 aa, Homo sapiens
  CDR3 for alpha chain variable domain of TCR clone 216736 (TRAV13-1, TRAJ21)
CAAKEGFNKFYF

SEQ ID NO: 433472 - protein, 18 aa, Homo sapiens
  CDR3 for beta chain variable domain of TCR clone 216736 (TRBV12-4, TRBJ2-4)
CASSRTGAVDVAKNIQYF

SEQ ID NO: 433473 - protein, 14 aa, Homo sapiens
  CDR3 for alpha chain variable domain of TCR clone 216737 (TRAV1-2, TRAJ16)
CAVSRFSDGQKLLF

SEQ ID NO: 433474 - protein, 14 aa, Homo sapiens
  CDR3 for beta chain variable domain of TCR clone 216737 (TRBV7-2, TRBJ1-1)
CASSFLTGTTEALF

SEQ ID NO: 433475 - protein, 13 aa, Homo sapiens
  CDR3 for alpha chain variable domain of TCR clone 216738 (TRAV12-2, TRAJ24)
CAVSTDSWGKLQV

SEQ ID NO: 433476 - protein, 12 aa, Homo sapiens
  CDR3 for beta chain variable domain of TCR clone 216738 (TRBV7-6, TRBJ2-7)
CASSLADSEQYF

SEQ ID NO: 433477 - protein, 16 aa, Homo sapiens
  CDR3 for alpha chain variable domain of TCR clone 216739 (TRAV21, TRAJ17)
FAVRPGEEAAGTKLTF

SEQ ID NO: 433478 - protein, 16 aa, Homo sapiens
  CDR3 for beta chain variable domain of TCR clone 216739 (TRBV2, TRBJ2-7)
CASSEPWTGPSYEQYF

SEQ ID NO: 433479 - protein, 14 aa, Homo sapiens
  CDR3 for alpha chain variable domain of TCR clone 216740 (TRAV38-1, TRAJ29)
CAFITPSGNTPPAF

SEQ ID NO: 433480 - protein, 14 aa, Homo sapiens
  CDR3 for beta chain variable domain of TCR clone 216740 (TRBV18, TRBJ2-7)
CASSPRGGAYEQYF

SEQ ID NO: 433481 - protein, 12 aa, Homo sapiens
  CDR3 for alpha chain variable domain of TCR clone 216741 (TRAV13-1, TRAJ9)
CASHTGGFKTIF

SEQ ID NO: 433482 - protein, 15 aa, Homo sapiens
  CDR3 for beta chain variable domain of TCR clone 216741 (TRBV7-9, TRBJ2-2)
CASGPLDTFPGELLF

SEQ ID NO: 433483 - protein, 16 aa, Homo sapiens
  CDR3 for alpha chain variable domain of TCR clone 216742 (TRAV12-3, TRAJ53)
CAMSVGSGGSNYKLTF

SEQ ID NO: 433484 - protein, 13 aa, Homo sapiens
  CDR3 for beta chain variable domain of TCR clone 216742 (TRBV7-6, TRBJ1-2)
CASSVVADYGYTL

SEQ ID NO: 433485 - protein, 23 aa, Homo sapiens
  CDR3 for alpha chain variable domain of TCR clone 216743 (TRAV26-1, TRAJ38)
CIADNAGNNHIQNTDPAVYQLRD

SEQ ID NO: 433486 - protein, 13 aa, Homo sapiens
  CDR3 for beta chain variable domain of TCR clone 216743 (TRBV5-4, TRBJ1-1)
CASSVDLGTEAFF

SEQ ID NO: 433487 - protein, 15 aa, Homo sapiens
  CDR3 for alpha chain variable domain of TCR clone 216744 (TRAV27, TRAJ38)
RAARRNAGNNRRLIW

SEQ ID NO: 433488 - protein, 13 aa, Homo sapiens
  CDR3 for beta chain variable domain of TCR clone 216744 (TRBV12-5, TRBJ2-3)
CASGDRQSDTQYF

SEQ ID NO: 433489 - protein, 14 aa, Homo sapiens
  CDR3 for alpha chain variable domain of TCR clone 216745 (TRAV8-1, TRAJ5)
CAVRTETGRRALTF

SEQ ID NO: 433490 - protein, 12 aa, Homo sapiens
  CDR3 for beta chain variable domain of TCR clone 216745 (TRBV11-2, TRBJ2-1)
CASSSGNNEQFF

SEQ ID NO: 433491 - protein, 14 aa, Homo sapiens
  CDR3 for alpha chain variable domain of TCR clone 216746 (TRAV9-2, TRAJ39)
CALYIYNAGNMLTF

SEQ ID NO: 433492 - protein, 11 aa, Homo sapiens
  CDR3 for beta chain variable domain of TCR clone 216746 (TRBV6-1, TRBJ1-3)
CKGGGGNTIYF

SEQ ID NO: 433493 - protein, 11 aa, Homo sapiens
  CDR3 for alpha chain variable domain of TCR clone 216747 (TRAV12-2, TRAJ31)
CAILNNARLMF

SEQ ID NO: 433494 - protein, 14 aa, Homo sapiens
  CDR3 for beta chain variable domain of TCR clone 216747 (TRBV19, TRBJ2-1)
CASPTFVLSGEQFF

SEQ ID NO: 433495 - protein, 14 aa, Homo sapiens
  CDR3 for alpha chain variable domain of TCR clone 216748 (TRAV16, TRAJ33)
CALSAMDSNYQLSW

SEQ ID NO: 433496 - protein, 12 aa, Homo sapiens
  CDR3 for beta chain variable domain of TCR clone 216748 (TRBV5-1, TRBJ1-2)
CASSQDTYGYTF

SEQ ID NO: 433497 - protein, 11 aa, Homo sapiens
  CDR3 for alpha chain variable domain of TCR clone 216749 (TRAV12-2, TRAJ49)
CAVHTGNQFYF

SEQ ID NO: 433498 - protein, 15 aa, Homo sapiens
  CDR3 for beta chain variable domain of TCR clone 216749 (TRBV27, TRBJ2-1)
CASSNGGGSANEQFF

SEQ ID NO: 433499 - protein, 13 aa, Homo sapiens
  CDR3 for alpha chain variable domain of TCR clone 216750 (TRAV27, TRAJ45)
CMSSGGGADGLTF

SEQ ID NO: 433500 - protein, 14 aa, Homo sapiens
  CDR3 for beta chain variable domain of TCR clone 216750 (TRBV11-2, TRBJ2-7)
CASSSTGEGYEQYF

SEQ ID NO: 433501 - protein, 13 aa, Homo sapiens
  CDR3 for alpha chain variable domain of TCR clone 216751 (TRAV12-2, TRAJ42)
CAVKRGSQGNLIF

SEQ ID NO: 433502 - protein, 12 aa, Homo sapiens
  CDR3 for beta chain variable domain of TCR clone 216751 (TRBV5-7, TRBJ1-2)
CASSLGQNGYTF

SEQ ID NO: 433503 - protein, 14 aa, Homo sapiens
  CDR3 for alpha chain variable domain of TCR clone 216752 (TRAV38-1, TRAJ43)
CAFMKNNNNNDMRF

SEQ ID NO: 433504 - protein, 17 aa, Homo sapiens
  CDR3 for beta chain variable domain of TCR clone 216752 (TRBV7-7, TRBJ1-4)
CASSLVGQGASNEKLFF

SEQ ID NO: 433505 - protein, 14 aa, Homo sapiens
  CDR3 for alpha chain variable domain of TCR clone 216753 (TRAV21, TRAJ15)
CATGPNHAGTALIF

SEQ ID NO: 433506 - protein, 13 aa, Homo sapiens
  CDR3 for beta chain variable domain of TCR clone 216753 (TRBV25-1, TRBJ2-5)
CASSESGRETQYF

SEQ ID NO: 433507 - protein, 22 aa, Homo sapiens
  CDR3 for alpha chain variable domain of TCR clone 216754 (TRAV2, TRAJ26)
CAGSPGRLWPEFCLWSRNQLVR

SEQ ID NO: 433508 - protein, 17 aa, Homo sapiens
  CDR3 for beta chain variable domain of TCR clone 216754 (TRBV11-2, TRBJ2-1)
CASSLYPPGVEYNEQFF

SEQ ID NO: 433509 - protein, 16 aa, Homo sapiens
  CDR3 for alpha chain variable domain of TCR clone 216755 (TRAV3, TRAJ37)
CAVRGKGSGNTGKLIF

SEQ ID NO: 433510 - protein, 15 aa, Homo sapiens
  CDR3 for beta chain variable domain of TCR clone 216755 (TRBV27, TRBJ2-1)
CASSLARGAYNEQFF

SEQ ID NO: 433511 - protein, 12 aa, Homo sapiens
  CDR3 for alpha chain variable domain of TCR clone 216756 (TRAV13-2, TRAJ8)
CAPWLGFQKLVF

SEQ ID NO: 433512 - protein, 16 aa, Homo sapiens
  CDR3 for beta chain variable domain of TCR clone 216756 (TRBV7-9, TRBJ2-6)
CASSLKGPLRANVLTF

SEQ ID NO: 433513 - protein, 14 aa, Homo sapiens
  CDR3 for alpha chain variable domain of TCR clone 216757 (TRAV12-1, TRAJ38)
CVVNDAGNNRKRIW

SEQ ID NO: 433514 - protein, 14 aa, Homo sapiens
  CDR3 for beta chain variable domain of TCR clone 216757 (TRBV19, TRBJ1-5)
CASSIVQGIQPQHF

SEQ ID NO: 433515 - protein, 13 aa, Homo sapiens
  CDR3 for alpha chain variable domain of TCR clone 216758 (TRAV35, TRAJ48)
CAGHEFGNEKLTF

SEQ ID NO: 433516 - protein, 16 aa, Homo sapiens
  CDR3 for beta chain variable domain of TCR clone 216758 (TRBV7-3, TRBJ2-2)
RASSLKRGTLSGELFF

SEQ ID NO: 433517 - protein, 13 aa, Homo sapiens
  CDR3 for alpha chain variable domain of TCR clone 216759 (TRAV21, TRAJ20)
CAVGLRVDYKLSF

SEQ ID NO: 433518 - protein, 17 aa, Homo sapiens
  CDR3 for beta chain variable domain of TCR clone 216759 (TRBV28, TRBJ2-7)
CASSPLHRASGVYEQYF

SEQ ID NO: 433519 - protein, 12 aa, Homo sapiens
  CDR3 for alpha chain variable domain of TCR clone 216760 (TRAV3, TRAJ20)
CAVRDPDYKVSF

SEQ ID NO: 433520 - protein, 13 aa, Homo sapiens
  CDR3 for beta chain variable domain of TCR clone 216760 (TRBV9, TRBJ2-1)
CASSVGQGGEQFF

SEQ ID NO: 433521 - protein, 19 aa, Homo sapiens
  CDR3 for alpha chain variable domain of TCR clone 216761 (TRAV3, TRAJ6)
CAVSDRNPSRSGGSYIPTF

SEQ ID NO: 433522 - protein, 15 aa, Homo sapiens
  CDR3 for beta chain variable domain of TCR clone 216761 (TRBV18, TRBJ2-7)
CANSPTFMDSYEQYF

SEQ ID NO: 433523 - protein, 16 aa, Homo sapiens
  CDR3 for alpha chain variable domain of TCR clone 216762 (TRAV23/DV6, TRAJ9)
CAASIGGNTGGFKTIL

SEQ ID NO: 433524 - protein, 13 aa, Homo sapiens
  CDR3 for beta chain variable domain of TCR clone 216762 (TRBV12-4, TRBJ1-1)
CASSPGTGFEAFF

SEQ ID NO: 433525 - protein, 12 aa, Homo sapiens
  CDR3 for alpha chain variable domain of TCR clone 216763 (TRAV26-1, TRAJ26)
CIVYNYGQNFVF

SEQ ID NO: 433526 - protein, 15 aa, Homo sapiens
  CDR3 for beta chain variable domain of TCR clone 216763 (TRBV7-9, TRBJ1-5)
CASSQGHQPNQPQHF

SEQ ID NO: 433527 - protein, 11 aa, Homo sapiens
  CDR3 for alpha chain variable domain of TCR clone 216764 (TRAV3, TRAJ17)
CAEAAGNKRTF

SEQ ID NO: 433528 - protein, 14 aa, Homo sapiens
  CDR3 for beta chain variable domain of TCR clone 216764 (TRBV20-1, TRBJ2-2)
SAVLALRRTGELFF

SEQ ID NO: 433529 - protein, 12 aa, Homo sapiens
  CDR3 for alpha chain variable domain of TCR clone 216765 (TRAV12-3, TRAJ21)
CAMFNNFNKFSF

SEQ ID NO: 433530 - protein, 14 aa, Homo sapiens
  CDR3 for beta chain variable domain of TCR clone 216765 (TRBV28, TRBJ2-1)
CASSIQGTVGEQFF

SEQ ID NO: 433531 - protein, 13 aa, Homo sapiens
  CDR3 for alpha chain variable domain of TCR clone 216766 (TRAV1-1, TRAJ31)
CASYLNNNARLMF

SEQ ID NO: 433532 - protein, 14 aa, Homo sapiens
  CDR3 for beta chain variable domain of TCR clone 216766 (TRBV4-1, TRBJ2-5)
CASSRSGRGETQYF

SEQ ID NO: 433533 - protein, 17 aa, Homo sapiens
  CDR3 for alpha chain variable domain of TCR clone 216767 (TRAV3, TRAJ42)
CAVRDRDYGGSQGNLIF

SEQ ID NO: 433534 - protein, 15 aa, Homo sapiens
  CDR3 for beta chain variable domain of TCR clone 216767 (TRBV7-8, TRBJ2-1)
CASSLAGGLYNEQFF

SEQ ID NO: 433535 - protein, 13 aa, Homo sapiens
  CDR3 for alpha chain variable domain of TCR clone 216768 (TRAV38-2/DV8, TRAJ57)
CAYTQGGSEKLVF

SEQ ID NO: 433536 - protein, 16 aa, Homo sapiens
  CDR3 for beta chain variable domain of TCR clone 216768 (TRBV12-4, TRBJ1-5)
CASSRPVGGSNQPQHF

SEQ ID NO: 433537 - protein, 14 aa, Homo sapiens
  CDR3 for alpha chain variable domain of TCR clone 216769 (TRAV3, TRAJ9)
CAVRLNTGGFKTIF

SEQ ID NO: 433538 - protein, 12 aa, Homo sapiens
  CDR3 for beta chain variable domain of TCR clone 216769 (TRBV19, TRBJ1-1)
CASSIGTEEAFF

SEQ ID NO: 433539 - protein, 12 aa, Homo sapiens
  CDR3 for alpha chain variable domain of TCR clone 216770 (TRAV12-1, TRAJ40)
CVVYSGTYKYIF

SEQ ID NO: 433540 - protein, 16 aa, Homo sapiens
  CDR3 for beta chain variable domain of TCR clone 216770 (TRBV27, TRBJ2-2)
CASSFRGLVRTGELFF

SEQ ID NO: 433541 - protein, 16 aa, Homo sapiens
  CDR3 for alpha chain variable domain of TCR clone 216771 (TRAV30, TRAJ24)
CGTEIVDADSWGKFQF

SEQ ID NO: 433542 - protein, 14 aa, Homo sapiens
  CDR3 for beta chain variable domain of TCR clone 216771 (TRBV7-9, TRBJ1-6)
CASRPGTVNSPLHF

SEQ ID NO: 433543 - protein, 13 aa, Homo sapiens
  CDR3 for alpha chain variable domain of TCR clone 216772 (TRAV16, TRAJ27)
CALRRTNAGKSTF

SEQ ID NO: 433544 - protein, 15 aa, Homo sapiens
  CDR3 for beta chain variable domain of TCR clone 216772 (TRBV18, TRBJ2-1)
CASSPPSAAYNEQFF

SEQ ID NO: 433545 - protein, 16 aa, Homo sapiens
  CDR3 for alpha chain variable domain of TCR clone 216773 (TRAV12-3, TRAJ53)
CAMSPGSGGSNYKLTF

SEQ ID NO: 433546 - protein, 14 aa, Homo sapiens
  CDR3 for beta chain variable domain of TCR clone 216773 (TRBV5-1, TRBJ1-2)
CASSLEPVNYGYTF

SEQ ID NO: 433547 - protein, 14 aa, Homo sapiens
  CDR3 for alpha chain variable domain of TCR clone 216774 (TRAV2, TRAJ9)
CAVEDRSGGVKTIF

SEQ ID NO: 433548 - protein, 18 aa, Homo sapiens
  CDR3 for beta chain variable domain of TCR clone 216774 (TRBV20-1, TRBJ2-5)
CSQTGDSGRLGGKETQYF

SEQ ID NO: 433549 - protein, 15 aa, Homo sapiens
  CDR3 for alpha chain variable domain of TCR clone 216775 (TRAV3, TRAJ20)
CAVRDIKLSDYKLSF

SEQ ID NO: 433550 - protein, 13 aa, Homo sapiens
  CDR3 for beta chain variable domain of TCR clone 216775 (TRBV7-3, TRBJ1-1)
CASSQDWGAEAFF

SEQ ID NO: 433551 - protein, 13 aa, Homo sapiens
  CDR3 for alpha chain variable domain of TCR clone 216776 (TRAV12-2, TRAJ34)
CAVRGYNTDKLIF

SEQ ID NO: 433552 - protein, 15 aa, Homo sapiens
  CDR3 for beta chain variable domain of TCR clone 216776 (TRBV28, TRBJ2-1)
CASRTGSGVIARQFF

SEQ ID NO: 433553 - protein, 12 aa, Homo sapiens
  CDR3 for alpha chain variable domain of TCR clone 216777 (TRAV2, TRAJ15)
CAVAQAGTALIF

SEQ ID NO: 433554 - protein, 13 aa, Homo sapiens
  CDR3 for beta chain variable domain of TCR clone 216777 (TRBV19, TRBJ1-2)
RASSVPGQDGYTF

SEQ ID NO: 433555 - protein, 11 aa, Homo sapiens
  CDR3 for alpha chain variable domain of TCR clone 216778 (TRAV17, TRAJ31)
CATDRTARLMF

SEQ ID NO: 433556 - protein, 12 aa, Homo sapiens
  CDR3 for beta chain variable domain of TCR clone 216778 (TRBV29-1, TRBJ2-3)
CSVTGGADAQYF

SEQ ID NO: 433557 - protein, 23 aa, Homo sapiens
  CDR3 for alpha chain variable domain of TCR clone 216779 (TRAV12-2, TRAJ36)
SLLIRDSQPSDSATLERANNLFF

SEQ ID NO: 433558 - protein, 14 aa, Homo sapiens
  CDR3 for beta chain variable domain of TCR clone 216779 (TRBV27, TRBJ1-2)
CASSLKTGTHGYTF

SEQ ID NO: 433559 - protein, 12 aa, Homo sapiens
  CDR3 for alpha chain variable domain of TCR clone 216780 (TRAV12-1, TRAJ5)
CVADTGRRALTF

SEQ ID NO: 433560 - protein, 14 aa, Homo sapiens
  CDR3 for beta chain variable domain of TCR clone 216780 (TRBV2, TRBJ1-1)
CDSSEQWGDTEAFF

SEQ ID NO: 433561 - protein, 11 aa, Homo sapiens
  CDR3 for alpha chain variable domain of TCR clone 216781 (TRAV1-1, TRAJ23)
CAVRQGGKLIF

SEQ ID NO: 433562 - protein, 14 aa, Homo sapiens
  CDR3 for beta chain variable domain of TCR clone 216781 (TRBV19, TRBJ2-1)
CASPTFVLSGGQFF

SEQ ID NO: 433563 - protein, 13 aa, Homo sapiens
  CDR3 for alpha chain variable domain of TCR clone 216782 (TRAV3, TRAJ16)
RAVRDRNGQKLLF

SEQ ID NO: 433564 - protein, 15 aa, Homo sapiens
  CDR3 for beta chain variable domain of TCR clone 216782 (TRBV5-1, TRBJ2-1)
CASSPPRAPYNKQFF

SEQ ID NO: 433565 - protein, 11 aa, Homo sapiens
  CDR3 for alpha chain variable domain of TCR clone 216783 (TRAV4, TRAJ31)
CLVGLNARLMF

SEQ ID NO: 433566 - protein, 12 aa, Homo sapiens
  CDR3 for beta chain variable domain of TCR clone 216783 (TRBV11-2, TRBJ2-2)
CASSLPTGELFF

SEQ ID NO: 433567 - protein, 11 aa, Homo sapiens
  CDR3 for alpha chain variable domain of TCR clone 216784 (TRAV21, TRAJ39)
LLVNAGNILTF

SEQ ID NO: 433568 - protein, 16 aa, Homo sapiens
  CDR3 for beta chain variable domain of TCR clone 216784 (TRBV9, TRBJ2-7)
CASSVGLGGGTYEQYF

SEQ ID NO: 433569 - protein, 15 aa, Homo sapiens
  CDR3 for alpha chain variable domain of TCR clone 216785 (TRAV3, TRAJ3)
CAVRDRDSSASKIIF

SEQ ID NO: 433570 - protein, 18 aa, Homo sapiens
  CDR3 for beta chain variable domain of TCR clone 216785 (TRBV25-1, TRBJ1-2)
CASSGLQNGQGLIFGLRF

SEQ ID NO: 433571 - protein, 18 aa, Homo sapiens
  CDR3 for alpha chain variable domain of TCR clone 216786 (TRAV13-1, TRAJ52)
CAAKNPNAGGTSYGKLTF

SEQ ID NO: 433572 - protein, 17 aa, Homo sapiens
  CDR3 for beta chain variable domain of TCR clone 216786 (TRBV13, TRBJ2-3)
CASSLSRVAGGEEYAVF

SEQ ID NO: 433573 - protein, 14 aa, Homo sapiens
  CDR3 for alpha chain variable domain of TCR clone 216787 (TRAV26-2, TRAJ32)
CILFRGGATNKLIF

SEQ ID NO: 433574 - protein, 15 aa, Homo sapiens
  CDR3 for beta chain variable domain of TCR clone 216787 (TRBV5-1, TRBJ2-1)
CASSPPRAPYNEQFF

SEQ ID NO: 433575 - protein, 14 aa, Homo sapiens
  CDR3 for alpha chain variable domain of TCR clone 216788 (TRAV17, TRAJ4)
CATAPLGGYNKLIF

SEQ ID NO: 433576 - protein, 15 aa, Homo sapiens
  CDR3 for beta chain variable domain of TCR clone 216788 (TRBV11-2, TRBJ2-2)
CASSSDRVNAGELFF

SEQ ID NO: 433577 - protein, 12 aa, Homo sapiens
  CDR3 for alpha chain variable domain of TCR clone 216789 (TRAV12-3, TRAJ34)
CAMGYNTDKLIF

SEQ ID NO: 433578 - protein, 16 aa, Homo sapiens
  CDR3 for beta chain variable domain of TCR clone 216789 (TRBV29-1, TRBJ2-7)
CSVEVVGTSGSYEQYF

SEQ ID NO: 433579 - protein, 14 aa, Homo sapiens
  CDR3 for alpha chain variable domain of TCR clone 216790 (TRAV13-1, TRAJ26)
CAASSAHYGQNFVF

SEQ ID NO: 433580 - protein, 17 aa, Homo sapiens
  CDR3 for beta chain variable domain of TCR clone 216790 (TRBV25-1, TRBJ2-5)
SASSRRGGRGGQETQYF

SEQ ID NO: 433581 - protein, 16 aa, Homo sapiens
  CDR3 for alpha chain variable domain of TCR clone 216791 (TRAV3, TRAJ37)
CAVRPHGSGNTGKLIF

SEQ ID NO: 433582 - protein, 13 aa, Homo sapiens
  CDR3 for beta chain variable domain of TCR clone 216791 (TRBV14, TRBJ1-2)
CASSEDRRYGYTF

SEQ ID NO: 433583 - protein, 14 aa, Homo sapiens
  CDR3 for alpha chain variable domain of TCR clone 216792 (TRAV2, TRAJ37)
CAVDFTSNTGKLIF

SEQ ID NO: 433584 - protein, 15 aa, Homo sapiens
  CDR3 for beta chain variable domain of TCR clone 216792 (TRBV20-1, TRBJ1-1)
CSASRGVTGTTAAFF

SEQ ID NO: 433585 - protein, 15 aa, Homo sapiens
  CDR3 for alpha chain variable domain of TCR clone 216793 (TRAV3, TRAJ4)
CAQNMFSGGYNKLIF

SEQ ID NO: 433586 - protein, 16 aa, Homo sapiens
  CDR3 for beta chain variable domain of TCR clone 216793 (TRBV3-1, TRBJ1-6)
CASSQEFQGSDSPLHF

SEQ ID NO: 433587 - protein, 12 aa, Homo sapiens
  CDR3 for alpha chain variable domain of TCR clone 216794 (TRAV13-1, TRAJ49)
CAAMSTGNQFYF

SEQ ID NO: 433588 - protein, 16 aa, Homo sapiens
  CDR3 for beta chain variable domain of TCR clone 216794 (TRBV19, TRBJ2-1)
CASSKAGPSSYNEQFF

SEQ ID NO: 433589 - protein, 17 aa, Homo sapiens
  CDR3 for alpha chain variable domain of TCR clone 216795 (TRAV3, TRAJ42)
CAVRDRDYGGSQGNLIF

SEQ ID NO: 433590 - protein, 17 aa, Homo sapiens
  CDR3 for beta chain variable domain of TCR clone 216795 (TRBV24-1, TRBJ2-4)
CATSDAEARGVRNIQYF

SEQ ID NO: 433591 - protein, 12 aa, Homo sapiens
  CDR3 for alpha chain variable domain of TCR clone 216796 (TRAV5, TRAJ27)
CAEITNAGKSTF

SEQ ID NO: 433592 - protein, 13 aa, Homo sapiens
  CDR3 for beta chain variable domain of TCR clone 216796 (TRBV7-3, TRBJ1-1)
CASSQDWGAEAFF

SEQ ID NO: 433593 - protein, 12 aa, Homo sapiens
  CDR3 for alpha chain variable domain of TCR clone 216797 (TRAV12-2, TRAJ20)
CALRPSDYKLSF

SEQ ID NO: 433594 - protein, 17 aa, Homo sapiens
  CDR3 for beta chain variable domain of TCR clone 216797 (TRBV11-2, TRBJ2-1)
CASSLYPPGVEYNEQFF

SEQ ID NO: 433595 - protein, 14 aa, Homo sapiens
  CDR3 for alpha chain variable domain of TCR clone 216798 (TRAV17, TRAJ56)
CATDYTGANSKLTF

SEQ ID NO: 433596 - protein, 13 aa, Homo sapiens
  CDR3 for beta chain variable domain of TCR clone 216798 (TRBV5-5, TRBJ1-2)
CASSFWRGEDYTF

SEQ ID NO: 433597 - protein, 14 aa, Homo sapiens
  CDR3 for alpha chain variable domain of TCR clone 216799 (TRAV1-2, TRAJ8)
CAVREDTGFQKLVF

SEQ ID NO: 433598 - protein, 15 aa, Homo sapiens
  CDR3 for beta chain variable domain of TCR clone 216799 (TRBV7-9, TRBJ1-5)
CASSQGHQPSQPQHF

SEQ ID NO: 433599 - protein, 11 aa, Homo sapiens
  CDR3 for alpha chain variable domain of TCR clone 216800 (TRAV12-1, TRAJ37)
CVVNTPGKLIF

SEQ ID NO: 433600 - protein, 13 aa, Homo sapiens
  CDR3 for beta chain variable domain of TCR clone 216800 (TRBV12-4, TRBJ1-5)
CASSPDRAQPQQF

SEQ ID NO: 433601 - protein, 13 aa, Homo sapiens
  CDR3 for alpha chain variable domain of TCR clone 216801 (TRAV13-2, TRAJ13)
CADRPGGYQKVTF

SEQ ID NO: 433602 - protein, 14 aa, Homo sapiens
  CDR3 for beta chain variable domain of TCR clone 216801 (TRBV23-1, TRBJ2-5)
CASSFLRSQETQYF

SEQ ID NO: 433603 - protein, 16 aa, Homo sapiens
  CDR3 for alpha chain variable domain of TCR clone 216802 (TRAV1-2, TRAJ10)
CAVRGVLTGGGNKLTF

SEQ ID NO: 433604 - protein, 15 aa, Homo sapiens
  CDR3 for beta chain variable domain of TCR clone 216802 (TRBV7-2, TRBJ2-2)
CASRRPGQNTGELFF

SEQ ID NO: 433605 - protein, 14 aa, Homo sapiens
  CDR3 for alpha chain variable domain of TCR clone 216803 (TRAV23/DV6, TRAJ37)
CAASTSSNTGKLIF

SEQ ID NO: 433606 - protein, 16 aa, Homo sapiens
  CDR3 for beta chain variable domain of TCR clone 216803 (TRBV7-3, TRBJ2-1)
CASSLEGYRSYNEQFF

SEQ ID NO: 433607 - protein, 17 aa, Homo sapiens
  CDR3 for alpha chain variable domain of TCR clone 216804 (TRAV13-1, TRAJ52)
CAASSGTGGTSYGKLTF

SEQ ID NO: 433608 - protein, 15 aa, Homo sapiens
  CDR3 for beta chain variable domain of TCR clone 216804 (TRBV2, TRBJ2-1)
CASSELAGSYNEQFF

SEQ ID NO: 433609 - protein, 16 aa, Homo sapiens
  CDR3 for alpha chain variable domain of TCR clone 216805 (TRAV12-3, TRAJ53)
CAMSPGRGGSNYKLTF

SEQ ID NO: 433610 - protein, 15 aa, Homo sapiens
  CDR3 for beta chain variable domain of TCR clone 216805 (TRBV11-3, TRBJ2-7)
CASSPGPASSYEQYF

SEQ ID NO: 433611 - protein, 13 aa, Homo sapiens
  CDR3 for alpha chain variable domain of TCR clone 216806 (TRAV1-2, TRAJ26)
CAVRPNYGQNFVF

SEQ ID NO: 433612 - protein, 14 aa, Homo sapiens
  CDR3 for beta chain variable domain of TCR clone 216806 (TRBV4-1, TRBJ2-5)
CASSQDLALETQYS

SEQ ID NO: 433613 - protein, 11 aa, Homo sapiens
  CDR3 for alpha chain variable domain of TCR clone 216807 (TRAV16, TRAJ31)
CALFNNARLMF

SEQ ID NO: 433614 - protein, 14 aa, Homo sapiens
  CDR3 for beta chain variable domain of TCR clone 216807 (TRBV15, TRBJ1-1)
CATSREWGNTEDFF

SEQ ID NO: 433615 - protein, 13 aa, Homo sapiens
  CDR3 for alpha chain variable domain of TCR clone 216808 (TRAV8-4, TRAJ47)
CAVTALYGNKLVF

SEQ ID NO: 433616 - protein, 13 aa, Homo sapiens
  CDR3 for beta chain variable domain of TCR clone 216808 (TRBV10-3, TRBJ2-7)
CASKLAVNYEQYF

SEQ ID NO: 433617 - protein, 15 aa, Homo sapiens
  CDR3 for alpha chain variable domain of TCR clone 216809 (TRAV8-3, TRAJ45)
CASSYSGGGADGLTV

SEQ ID NO: 433618 - protein, 17 aa, Homo sapiens
  CDR3 for beta chain variable domain of TCR clone 216809 (TRBV7-8, TRBJ1-2)
CASSLRPLQGHLYGYTF

SEQ ID NO: 433619 - protein, 16 aa, Homo sapiens
  CDR3 for alpha chain variable domain of TCR clone 216810 (TRAV12-2, TRAJ52)
CRLANAGGTSYGKLTF

SEQ ID NO: 433620 - protein, 13 aa, Homo sapiens
  CDR3 for beta chain variable domain of TCR clone 216810 (TRBV10-3, TRBJ2-7)
CASKLAVNYEKYF

SEQ ID NO: 433621 - protein, 14 aa, Homo sapiens
  CDR3 for alpha chain variable domain of TCR clone 216811 (TRAV17, TRAJ9)
CATVTLGGGFKTIF

SEQ ID NO: 433622 - protein, 16 aa, Homo sapiens
  CDR3 for beta chain variable domain of TCR clone 216811 (TRBV12-5, TRBJ2-5)
CASGPRTSGNQETQYF

SEQ ID NO: 433623 - protein, 20 aa, Homo sapiens
  CDR3 for alpha chain variable domain of TCR clone 216812 (TRAV12-1, TRAJ42)
SSVIQPPTSVKGGSQGNLIF

SEQ ID NO: 433624 - protein, 15 aa, Homo sapiens
  CDR3 for beta chain variable domain of TCR clone 216812 (TRBV5-4, TRBJ2-6)
CASSPGRTGANVLTF

SEQ ID NO: 433625 - protein, 23 aa, Homo sapiens
  CDR3 for alpha chain variable domain of TCR clone 216813 (TRAV26-1, )
CIADNSGNNHIQNPDPAVYQLRD

SEQ ID NO: 433626 - protein, 12 aa, Homo sapiens
  CDR3 for beta chain variable domain of TCR clone 216813 (TRBV11-2, TRBJ2-2)
CASSLGGGELFF

SEQ ID NO: 433627 - protein, 15 aa, Homo sapiens
  CDR3 for alpha chain variable domain of TCR clone 216814 (TRAV21, TRAJ24)
CAAWSSTDSWGKLQF

SEQ ID NO: 433628 - protein, 19 aa, Homo sapiens
  CDR3 for beta chain variable domain of TCR clone 216814 (TRBV14, TRBJ2-1)
CASSQDQRWEAPEYNEQFF

SEQ ID NO: 433629 - protein, 14 aa, Homo sapiens
  CDR3 for alpha chain variable domain of TCR clone 216815 (TRAV4, TRAJ26)
CLVDPHNYGQNFVF

SEQ ID NO: 433630 - protein, 17 aa, Homo sapiens
  CDR3 for beta chain variable domain of TCR clone 216815 (TRBV24-1, TRBJ2-1)
CATSDVSTSGTQNEQFF

SEQ ID NO: 433631 - protein, 14 aa, Homo sapiens
  CDR3 for alpha chain variable domain of TCR clone 216816 (TRAV1-1, TRAJ30)
CAVRSLNRDDKIIF

SEQ ID NO: 433632 - protein, 13 aa, Homo sapiens
  CDR3 for beta chain variable domain of TCR clone 216816 (TRBV7-2, TRBJ1-6)
CASSLKFDSPLHF

SEQ ID NO: 433633 - protein, 22 aa, Homo sapiens
  CDR3 for alpha chain variable domain of TCR clone 216817 (TRAV3, )
CAVRDHTGNNHIQNPDPPVYQL

SEQ ID NO: 433634 - protein, 14 aa, Homo sapiens
  CDR3 for beta chain variable domain of TCR clone 216817 (TRBV7-2, TRBJ2-7)
CASSSTVGGYEQYF

SEQ ID NO: 433635 - protein, 13 aa, Homo sapiens
  CDR3 for alpha chain variable domain of TCR clone 216818 (TRAV8-3, TRAJ28)
CSVGAVWSYQLTF

SEQ ID NO: 433636 - protein, 14 aa, Homo sapiens
  CDR3 for beta chain variable domain of TCR clone 216818 (TRBV7-2, TRBJ2-7)
CASRSQGAAYEQYF

SEQ ID NO: 433637 - protein, 12 aa, Homo sapiens
  CDR3 for alpha chain variable domain of TCR clone 216819 (TRAV3, TRAJ39)
CAVIECSNMLTF

SEQ ID NO: 433638 - protein, 14 aa, Homo sapiens
  CDR3 for beta chain variable domain of TCR clone 216819 (TRBV7-8, TRBJ2-3)
CASGFPDGQDTQYF

SEQ ID NO: 433639 - protein, 14 aa, Homo sapiens
  CDR3 for alpha chain variable domain of TCR clone 216820 (TRAV35, TRAJ50)
CAGHRKTSYDKVIF

SEQ ID NO: 433640 - protein, 13 aa, Homo sapiens
  CDR3 for beta chain variable domain of TCR clone 216820 (TRBV19, TRBJ1-5)
CASSIGGNQPQHF

SEQ ID NO: 433641 - protein, 12 aa, Homo sapiens
  CDR3 for alpha chain variable domain of TCR clone 216821 (TRAV12-3, TRAJ17)
CAMTLTGNKPTF

SEQ ID NO: 433642 - protein, 13 aa, Homo sapiens
  CDR3 for beta chain variable domain of TCR clone 216821 (TRBV4-1, TRBJ1-1)
CASSRKMNTEAFF

SEQ ID NO: 433643 - protein, 11 aa, Homo sapiens
  CDR3 for alpha chain variable domain of TCR clone 216822 (TRAV12-3, TRAJ26)
CAMSYGQNFVF

SEQ ID NO: 433644 - protein, 15 aa, Homo sapiens
  CDR3 for beta chain variable domain of TCR clone 216822 (TRBV6-3, TRBJ1-2)
CASSYRGQGRVGYTF

SEQ ID NO: 433645 - protein, 16 aa, Homo sapiens
  CDR3 for alpha chain variable domain of TCR clone 216823 (TRAV30, TRAJ24)
CGTEIVDADSWGKFQF

SEQ ID NO: 433646 - protein, 16 aa, Homo sapiens
  CDR3 for beta chain variable domain of TCR clone 216823 (TRBV12-5, TRBJ2-5)
CASSPRTSGNQETQYF

SEQ ID NO: 433647 - protein, 18 aa, Homo sapiens
  CDR3 for alpha chain variable domain of TCR clone 216824 (TRAV9-2, TRAJ52)
CALSQHNAGSTSYGKLTF

SEQ ID NO: 433648 - protein, 13 aa, Homo sapiens
  CDR3 for beta chain variable domain of TCR clone 216824 (TRBV7-9, TRBJ1-2)
CASSLKQNYGYTF

SEQ ID NO: 433649 - protein, 14 aa, Homo sapiens
  CDR3 for alpha chain variable domain of TCR clone 216825 (TRAV12-2, TRAJ31)
CAVSRGPDNARLMF

SEQ ID NO: 433650 - protein, 14 aa, Homo sapiens
  CDR3 for beta chain variable domain of TCR clone 216825 (TRBV4-2, TRBJ2-1)
CASGLDRAYNEQFF

SEQ ID NO: 433651 - protein, 12 aa, Homo sapiens
  CDR3 for alpha chain variable domain of TCR clone 216826 (TRAV16, TRAJ10)
CSRTGGGNKPTF

SEQ ID NO: 433652 - protein, 14 aa, Homo sapiens
  CDR3 for beta chain variable domain of TCR clone 216826 (TRBV4-2, TRBJ2-1)
CASGLDRAYNEQFF

SEQ ID NO: 433653 - protein, 17 aa, Homo sapiens
  CDR3 for alpha chain variable domain of TCR clone 216827 (TRAV8-6, TRAJ58)
CAVSSWVGETSGSRLTF

SEQ ID NO: 433654 - protein, 16 aa, Homo sapiens
  CDR3 for beta chain variable domain of TCR clone 216827 (TRBV4-1, TRBJ2-3)
CASSQSTSGAEDTQYF

SEQ ID NO: 433655 - protein, 15 aa, Homo sapiens
  CDR3 for alpha chain variable domain of TCR clone 216828 (TRAV8-3, TRAJ23)
CAVGDRYNQGGKLIF

SEQ ID NO: 433656 - protein, 14 aa, Homo sapiens
  CDR3 for beta chain variable domain of TCR clone 216828 (TRBV20-1, TRBJ2-7)
CSAPELAGVGEQYF

SEQ ID NO: 433657 - protein, 16 aa, Homo sapiens
  CDR3 for alpha chain variable domain of TCR clone 216829 (TRAV12-1, TRAJ15)
CVVSPAGQQAGTALIF

SEQ ID NO: 433658 - protein, 14 aa, Homo sapiens
  CDR3 for beta chain variable domain of TCR clone 216829 (TRBV7-3, TRBJ1-1)
CASSLKGGNTEAFF

SEQ ID NO: 433659 - protein, 17 aa, Homo sapiens
  CDR3 for alpha chain variable domain of TCR clone 216830 (TRAV3, TRAJ6)
CAVRAGPRAGGSYIPTF

SEQ ID NO: 433660 - protein, 15 aa, Homo sapiens
  CDR3 for beta chain variable domain of TCR clone 216830 (TRBV29-1, TRBJ2-5)
CSVEGLAVNQETQYF

SEQ ID NO: 433661 - protein, 12 aa, Homo sapiens
  CDR3 for alpha chain variable domain of TCR clone 216831 (TRAV23/DV6, TRAJ32)
CSMPGAPTKLIF

SEQ ID NO: 433662 - protein, 17 aa, Homo sapiens
  CDR3 for beta chain variable domain of TCR clone 216831 (TRBV13, TRBJ2-3)
CASSSLGTSGLTDTQYF

SEQ ID NO: 433663 - protein, 11 aa, Homo sapiens
  CDR3 for alpha chain variable domain of TCR clone 216832 (TRAV3, TRAJ17)
PRGAAGNKLTF

SEQ ID NO: 433664 - protein, 13 aa, Homo sapiens
  CDR3 for beta chain variable domain of TCR clone 216832 (TRBV19, TRBJ2-7)
CASRKAGGSEQYF

SEQ ID NO: 433665 - protein, 14 aa, Homo sapiens
  CDR3 for alpha chain variable domain of TCR clone 216833 (TRAV13-1, TRAJ5)
CAAHPDTGRRALTF

SEQ ID NO: 433666 - protein, 14 aa, Homo sapiens
  CDR3 for beta chain variable domain of TCR clone 216833 (TRBV18, TRBJ2-5)
CASSPGVSQETQYF

SEQ ID NO: 433667 - protein, 10 aa, Homo sapiens
  CDR3 for alpha chain variable domain of TCR clone 216834 (TRAV13-2, TRAJ49)
CEGTGNQFYF

SEQ ID NO: 433668 - protein, 12 aa, Homo sapiens
  CDR3 for beta chain variable domain of TCR clone 216834 (TRBV11-2, TRBJ2-3)
CASSPPEDTQYF

SEQ ID NO: 433669 - protein, 14 aa, Homo sapiens
  CDR3 for alpha chain variable domain of TCR clone 216835 (TRAV21, TRAJ35)
CAVMPIGFGNVLHC

SEQ ID NO: 433670 - protein, 12 aa, Homo sapiens
  CDR3 for beta chain variable domain of TCR clone 216835 (TRBV12-4, TRBJ2-3)
CASSTLPDTQYF

SEQ ID NO: 433671 - protein, 12 aa, Homo sapiens
  CDR3 for alpha chain variable domain of TCR clone 216836 (TRAV16, TRAJ10)
CCRTGGGNKLTF

SEQ ID NO: 433672 - protein, 11 aa, Homo sapiens
  CDR3 for beta chain variable domain of TCR clone 216836 (TRBV11-2, TRBJ1-1)
CASSINTEAFF

SEQ ID NO: 433673 - protein, 15 aa, Homo sapiens
  CDR3 for alpha chain variable domain of TCR clone 216837 (TRAV13-1, TRAJ16)
CAARYQMARSCSLQG

SEQ ID NO: 433674 - protein, 13 aa, Homo sapiens
  CDR3 for beta chain variable domain of TCR clone 216837 (TRBV4-1, TRBJ2-1)
CASSQAGGEEQFF

SEQ ID NO: 433675 - protein, 14 aa, Homo sapiens
  CDR3 for alpha chain variable domain of TCR clone 216838 (TRAV29/DV5, TRAJ44)
FAAFLVGTASKLTF

SEQ ID NO: 433676 - protein, 15 aa, Homo sapiens
  CDR3 for beta chain variable domain of TCR clone 216838 (TRBV7-3, TRBJ2-2)
CASSETGQGTGELFF

SEQ ID NO: 433677 - protein, 13 aa, Homo sapiens
  CDR3 for alpha chain variable domain of TCR clone 216839 (TRAV20, TRAJ29)
CAVQAVGNTPLVF

SEQ ID NO: 433678 - protein, 15 aa, Homo sapiens
  CDR3 for beta chain variable domain of TCR clone 216839 (TRBV10-2, TRBJ2-5)
CASRGSGGPQETQYI

SEQ ID NO: 433679 - protein, 14 aa, Homo sapiens
  CDR3 for alpha chain variable domain of TCR clone 216840 (TRAV26-1, TRAJ21)
CIVRPPYNFNKFYF

SEQ ID NO: 433680 - protein, 13 aa, Homo sapiens
  CDR3 for beta chain variable domain of TCR clone 216840 (TRBV10-3, TRBJ2-7)
CASKLAVNYEQYF

SEQ ID NO: 433681 - protein, 15 aa, Homo sapiens
  CDR3 for alpha chain variable domain of TCR clone 216841 (TRAV2, TRAJ37)
CAVGDGSSNTGKLIF

SEQ ID NO: 433682 - protein, 14 aa, Homo sapiens
  CDR3 for beta chain variable domain of TCR clone 216841 (TRBV11-1, TRBJ2-7)
CASSFRQGSYEQYF

SEQ ID NO: 433683 - protein, 14 aa, Homo sapiens
  CDR3 for alpha chain variable domain of TCR clone 216842 (TRAV12-2, TRAJ40)
CAVKIPSGTHKYIF

SEQ ID NO: 433684 - protein, 17 aa, Homo sapiens
  CDR3 for beta chain variable domain of TCR clone 216842 (TRBV13, TRBJ2-3)
CASSLSRVAGGRNTQYS

SEQ ID NO: 433685 - protein, 12 aa, Homo sapiens
  CDR3 for alpha chain variable domain of TCR clone 216843 (TRAV13-1, TRAJ3)
CAPRGDASKIIF

SEQ ID NO: 433686 - protein, 17 aa, Homo sapiens
  CDR3 for beta chain variable domain of TCR clone 216843 (TRBV4-2, TRBJ1-1)
CASTQFGGGSGNTEAFF

SEQ ID NO: 433687 - protein, 16 aa, Homo sapiens
  CDR3 for alpha chain variable domain of TCR clone 216844 (TRAV8-3, TRAJ13)
CAVGAYHSGGYQKVTF

SEQ ID NO: 433688 - protein, 14 aa, Homo sapiens
  CDR3 for beta chain variable domain of TCR clone 216844 (TRBV18, TRBJ2-5)
CASSPRASSETQYF

SEQ ID NO: 433689 - protein, 11 aa, Homo sapiens
  CDR3 for alpha chain variable domain of TCR clone 216845 (TRAV2, TRAJ13)
CASGGYQKVTL

SEQ ID NO: 433690 - protein, 14 aa, Homo sapiens
  CDR3 for beta chain variable domain of TCR clone 216845 (TRBV25-1, TRBJ1-1)
CASTHLGGNTEAFF

SEQ ID NO: 433691 - protein, 14 aa, Homo sapiens
  CDR3 for alpha chain variable domain of TCR clone 216846 (TRAV40, TRAJ41)
CLLVPPNSGYALNF

SEQ ID NO: 433692 - protein, 11 aa, Homo sapiens
  CDR3 for beta chain variable domain of TCR clone 216846 (TRBV19, TRBJ2-7)
CASSILGEQYF

SEQ ID NO: 433693 - protein, 16 aa, Homo sapiens
  CDR3 for alpha chain variable domain of TCR clone 216847 (TRAV36/DV7, TRAJ33)
WRPGNKVQDSNYQLIW

SEQ ID NO: 433694 - protein, 13 aa, Homo sapiens
  CDR3 for beta chain variable domain of TCR clone 216847 (TRBV20-1, TRBJ2-1)
HGAPVLSSLNRFF

SEQ ID NO: 433695 - protein, 14 aa, Homo sapiens
  CDR3 for alpha chain variable domain of TCR clone 216848 (TRAV8-2, TRAJ33)
CVVSDRNSNYQLIW

SEQ ID NO: 433696 - protein, 12 aa, Homo sapiens
  CDR3 for beta chain variable domain of TCR clone 216848 (TRBV6-3, TRBJ2-7)
CASSLTPYEQYF

SEQ ID NO: 433697 - protein, 12 aa, Homo sapiens
  CDR3 for alpha chain variable domain of TCR clone 216849 (TRAV12-3, TRAJ17)
CAMTLAGNKLTF

SEQ ID NO: 433698 - protein, 16 aa, Homo sapiens
  CDR3 for beta chain variable domain of TCR clone 216849 (TRBV19, TRBJ2-1)
CASSKAGPSSYNEQFF

SEQ ID NO: 433699 - protein, 14 aa, Homo sapiens
  CDR3 for alpha chain variable domain of TCR clone 216850 (TRAV12-2, TRAJ32)
CAHPESGATNKLTF

SEQ ID NO: 433700 - protein, 14 aa, Homo sapiens
  CDR3 for beta chain variable domain of TCR clone 216850 (TRBV4-2, TRBJ2-3)
CASRETRAPGMQYF

SEQ ID NO: 433701 - protein, 13 aa, Homo sapiens
  CDR3 for alpha chain variable domain of TCR clone 216851 (TRAV16, TRAJ30)
CALAQNRDDKIIF

SEQ ID NO: 433702 - protein, 20 aa, Homo sapiens
  CDR3 for beta chain variable domain of TCR clone 216851 (TRBV19, TRBJ1-6)
CGSSVRPSTGVVIHPSTLGM

SEQ ID NO: 433703 - protein, 14 aa, Homo sapiens
  CDR3 for alpha chain variable domain of TCR clone 216852 (TRAV21, TRAJ35)
CAVMPLGFGNVLLC

SEQ ID NO: 433704 - protein, 12 aa, Homo sapiens
  CDR3 for beta chain variable domain of TCR clone 216852 (TRBV7-9, TRBJ2-7)
CASSIKREEQYF

SEQ ID NO: 433705 - protein, 15 aa, Homo sapiens
  CDR3 for alpha chain variable domain of TCR clone 216853 (TRAV12-2, TRAJ43)
CSFDMRFGAGTRLTV

SEQ ID NO: 433706 - protein, 18 aa, Homo sapiens
  CDR3 for beta chain variable domain of TCR clone 216853 (TRBV20-1, TRBJ2-3)
CSASGLAGGPGTTDTQYL

SEQ ID NO: 433707 - protein, 12 aa, Homo sapiens
  CDR3 for alpha chain variable domain of TCR clone 216854 (TRAV3, TRAJ31)
CAAQRANARRMF

SEQ ID NO: 433708 - protein, 16 aa, Homo sapiens
  CDR3 for beta chain variable domain of TCR clone 216854 (TRBV4-2, TRBJ1-1)
CASSPSPGRAAPEAFF

SEQ ID NO: 433709 - protein, 14 aa, Homo sapiens
  CDR3 for alpha chain variable domain of TCR clone 216855 (TRAV1-2, TRAJ8)
CAVREDTGFQKLVF

SEQ ID NO: 433710 - protein, 16 aa, Homo sapiens
  CDR3 for beta chain variable domain of TCR clone 216855 (TRBV23-1, TRBJ2-1)
CASSPGGVRVSSSSGR

SEQ ID NO: 433711 - protein, 14 aa, Homo sapiens
  CDR3 for alpha chain variable domain of TCR clone 216856 (TRAV3, TRAJ21)
CAVRDPYNCNKFYF

SEQ ID NO: 433712 - protein, 15 aa, Homo sapiens
  CDR3 for beta chain variable domain of TCR clone 216856 (TRBV29-1, TRBJ2-5)
CSVEGLAVNQETQYF

SEQ ID NO: 433713 - protein, 15 aa, Homo sapiens
  CDR3 for alpha chain variable domain of TCR clone 216857 (TRAV2, TRAJ15)
CAVEDREQAGTALIF

SEQ ID NO: 433714 - protein, 13 aa, Homo sapiens
  CDR3 for beta chain variable domain of TCR clone 216857 (TRBV19, TRBJ1-2)
CASSVPGQDGYTF

SEQ ID NO: 433715 - protein, 12 aa, Homo sapiens
  CDR3 for alpha chain variable domain of TCR clone 216858 (TRAV13-1, TRAJ21)
CAAKEGFNKFYF

SEQ ID NO: 433716 - protein, 15 aa, Homo sapiens
  CDR3 for beta chain variable domain of TCR clone 216858 (TRBV24-1, TRBJ2-1)
CATRASGGQYNEQFF

SEQ ID NO: 433717 - protein, 18 aa, Homo sapiens
  CDR3 for alpha chain variable domain of TCR clone 216859 (TRAV21, TRAJ52)
CAVRPSPAGGTSYGKLTL

SEQ ID NO: 433718 - protein, 16 aa, Homo sapiens
  CDR3 for beta chain variable domain of TCR clone 216859 (TRBV12-5, TRBJ2-5)
CASGPRTSGNQETQYF

SEQ ID NO: 433719 - protein, 13 aa, Homo sapiens
  CDR3 for alpha chain variable domain of TCR clone 216860 (TRAV3, TRAJ21)
CAVREPDFNKFYF

SEQ ID NO: 433720 - protein, 18 aa, Homo sapiens
  CDR3 for beta chain variable domain of TCR clone 216860 (TRBV7-2, TRBJ2-3)
CASSLKREGSGITDTQYF

SEQ ID NO: 433721 - protein, 16 aa, Homo sapiens
  CDR3 for alpha chain variable domain of TCR clone 216861 (TRAV27, TRAJ13)
CAGAKSDSGGYQKVTF

SEQ ID NO: 433722 - protein, 11 aa, Homo sapiens
  CDR3 for beta chain variable domain of TCR clone 216861 (TRBV12-4, TRBJ2-7)
CATPEKGEQYF

SEQ ID NO: 433723 - protein, 11 aa, Homo sapiens
  CDR3 for alpha chain variable domain of TCR clone 216862 (TRAV2, TRAJ13)
CASGGYQKLTF

SEQ ID NO: 433724 - protein, 13 aa, Homo sapiens
  CDR3 for beta chain variable domain of TCR clone 216862 (TRBV20-1, TRBJ2-2)
CSASAAGTGELFF

SEQ ID NO: 433725 - protein, 15 aa, Homo sapiens
  CDR3 for alpha chain variable domain of TCR clone 216863 (TRAV12-1, TRAJ44)
CVVDTPQGTASKLTF

SEQ ID NO: 433726 - protein, 12 aa, Homo sapiens
  CDR3 for beta chain variable domain of TCR clone 216863 (TRBV7-9, TRBJ2-7)
CASSIKREEQYF

SEQ ID NO: 433727 - protein, 13 aa, Homo sapiens
  CDR3 for alpha chain variable domain of TCR clone 216864 (TRAV2, TRAJ40)
CAVVISGTYKYIF

SEQ ID NO: 433728 - protein, 14 aa, Homo sapiens
  CDR3 for beta chain variable domain of TCR clone 216864 (TRBV19, TRBJ2-1)
CASQTFVLSGEQFF

SEQ ID NO: 433729 - protein, 15 aa, Homo sapiens
  CDR3 for alpha chain variable domain of TCR clone 216865 (TRAV17, TRAJ57)
CATGPPQGGSEKLVF

SEQ ID NO: 433730 - protein, 11 aa, Homo sapiens
  CDR3 for beta chain variable domain of TCR clone 216865 (TRBV29-1, TRBJ2-5)
CSEDRTGTQYF

SEQ ID NO: 433731 - protein, 13 aa, Homo sapiens
  CDR3 for alpha chain variable domain of TCR clone 216866 (TRAV13-1, TRAJ39)
CSKYSNAGNMLTF

SEQ ID NO: 433732 - protein, 13 aa, Homo sapiens
  CDR3 for beta chain variable domain of TCR clone 216866 (TRBV4-2, TRBJ1-1)
CASSQAGNTEDFF

SEQ ID NO: 433733 - protein, 18 aa, Homo sapiens
  CDR3 for alpha chain variable domain of TCR clone 216867 (TRAV29/DV5, TRAJ52)
CAAGFRGAGGTSYGKLTF

SEQ ID NO: 433734 - protein, 15 aa, Homo sapiens
  CDR3 for beta chain variable domain of TCR clone 216867 (TRBV5-1, TRBJ2-1)
CASSPPRAPYNEQFF

SEQ ID NO: 433735 - protein, 13 aa, Homo sapiens
  CDR3 for alpha chain variable domain of TCR clone 216868 (TRAV8-6, TRAJ21)
CAMSPSSLNKFYF

SEQ ID NO: 433736 - protein, 14 aa, Homo sapiens
  CDR3 for beta chain variable domain of TCR clone 216868 (TRBV7-9, TRBJ2-5)
CASSLDTAQETQYF

SEQ ID NO: 433737 - protein, 11 aa, Homo sapiens
  CDR3 for alpha chain variable domain of TCR clone 216869 (TRAV13-2, TRAJ15)
CSHQAGTALIF

SEQ ID NO: 433738 - protein, 15 aa, Homo sapiens
  CDR3 for beta chain variable domain of TCR clone 216869 (TRBV2, TRBJ2-1)
CASSEARSAYNEQFF

SEQ ID NO: 433739 - protein, 15 aa, Homo sapiens
  CDR3 for alpha chain variable domain of TCR clone 216870 (TRAV27, TRAJ37)
CAGIHGSSNTGKLSL

SEQ ID NO: 433740 - protein, 13 aa, Homo sapiens
  CDR3 for beta chain variable domain of TCR clone 216870 (TRBV19, TRBJ2-1)
CASSIRSSWEQFF

SEQ ID NO: 433741 - protein, 13 aa, Homo sapiens
  CDR3 for alpha chain variable domain of TCR clone 216871 (TRAV20, TRAJ17)
CAVLRDAGNKLTF

SEQ ID NO: 433742 - protein, 12 aa, Homo sapiens
  CDR3 for beta chain variable domain of TCR clone 216871 (TRBV5-7, TRBJ2-7)
CASSLGLYEQYF

SEQ ID NO: 433743 - protein, 14 aa, Homo sapiens
  CDR3 for alpha chain variable domain of TCR clone 216872 (TRAV20, TRAJ37)
CAVQSSSNTGKLIF

SEQ ID NO: 433744 - protein, 14 aa, Homo sapiens
  CDR3 for beta chain variable domain of TCR clone 216872 (TRBV7-3, TRBJ2-2)
CASSLNANTGELFF

SEQ ID NO: 433745 - protein, 16 aa, Homo sapiens
  CDR3 for alpha chain variable domain of TCR clone 216873 (TRAV40, TRAJ52)
CLLGNAGGTSYGKLTF

SEQ ID NO: 433746 - protein, 14 aa, Homo sapiens
  CDR3 for beta chain variable domain of TCR clone 216873 (TRBV12-4, TRBJ1-6)
CASSARHLNSPLHF

SEQ ID NO: 433747 - protein, 16 aa, Homo sapiens
  CDR3 for alpha chain variable domain of TCR clone 216874 (TRAV3, TRAJ37)
CAVRGKGSGNTGKPIF

SEQ ID NO: 433748 - protein, 14 aa, Homo sapiens
  CDR3 for beta chain variable domain of TCR clone 216874 (TRBV20-1, TRBJ2-3)
CSARGGTSTDTQYF

SEQ ID NO: 433749 - protein, 17 aa, Homo sapiens
  CDR3 for alpha chain variable domain of TCR clone 216875 (TRAV27, TRAJ26)
CAGARAPLDNYGQNFVF

SEQ ID NO: 433750 - protein, 15 aa, Homo sapiens
  CDR3 for beta chain variable domain of TCR clone 216875 (TRBV11-2, TRBJ2-5)
CASSPRSGGLETHYF

SEQ ID NO: 433751 - protein, 13 aa, Homo sapiens
  CDR3 for alpha chain variable domain of TCR clone 216876 (TRAV8-3, TRAJ40)
CAVGAQYLRNLQI

SEQ ID NO: 433752 - protein, 15 aa, Homo sapiens
  CDR3 for beta chain variable domain of TCR clone 216876 (TRBV28, TRBJ2-5)
CASSSGRTIQETQYF

SEQ ID NO: 433753 - protein, 13 aa, Homo sapiens
  CDR3 for alpha chain variable domain of TCR clone 216877 (TRAV13-1, TRAJ5)
CAAEHTGRRALTF

SEQ ID NO: 433754 - protein, 12 aa, Homo sapiens
  CDR3 for beta chain variable domain of TCR clone 216877 (TRBV7-9, TRBJ2-7)
CASSLEGYEQYF

SEQ ID NO: 433755 - protein, 11 aa, Homo sapiens
  CDR3 for alpha chain variable domain of TCR clone 216878 (TRAV2, TRAJ33)
CAVDSNYQLVW

SEQ ID NO: 433756 - protein, 15 aa, Homo sapiens
  CDR3 for beta chain variable domain of TCR clone 216878 (TRBV19, TRBJ1-2)
CAGSVGQVLNYGYTF

SEQ ID NO: 433757 - protein, 17 aa, Homo sapiens
  CDR3 for alpha chain variable domain of TCR clone 216879 (TRAV23/DV6, TRAJ57)
CAASSTLSQGGSEKLFS

SEQ ID NO: 433758 - protein, 14 aa, Homo sapiens
  CDR3 for beta chain variable domain of TCR clone 216879 (TRBV25-1, TRBJ1-1)
CASTHLGGNTEAFF

SEQ ID NO: 433759 - protein, 11 aa, Homo sapiens
  CDR3 for alpha chain variable domain of TCR clone 216880 (TRAV3, TRAJ17)
PRGAAGNKLTF

SEQ ID NO: 433760 - protein, 12 aa, Homo sapiens
  CDR3 for beta chain variable domain of TCR clone 216880 (TRBV11-2, TRBJ2-2)
CDSSLGGGELFF

SEQ ID NO: 433761 - protein, 16 aa, Homo sapiens
  CDR3 for alpha chain variable domain of TCR clone 216881 (TRAV8-3, TRAJ13)
CAVGAYPSGGYQKATF

SEQ ID NO: 433762 - protein, 15 aa, Homo sapiens
  CDR3 for beta chain variable domain of TCR clone 216881 (TRBV19, TRBJ1-5)
CASSIVWADNQPQHF

SEQ ID NO: 433763 - protein, 15 aa, Homo sapiens
  CDR3 for alpha chain variable domain of TCR clone 216882 (TRAV13-1, TRAJ5)
CAVYIRDTGRSALTF

SEQ ID NO: 433764 - protein, 13 aa, Homo sapiens
  CDR3 for beta chain variable domain of TCR clone 216882 (TRBV12-4, TRBJ2-2)
CASSITGSGELFF

SEQ ID NO: 433765 - protein, 14 aa, Homo sapiens
  CDR3 for alpha chain variable domain of TCR clone 216883 (TRAV2, TRAJ9)
CAVEYRSGGFKTIF

SEQ ID NO: 433766 - protein, 17 aa, Homo sapiens
  CDR3 for beta chain variable domain of TCR clone 216883 (TRBV4-1, TRBJ2-7)
CASSRDPLGVRGGEQYF

SEQ ID NO: 433767 - protein, 16 aa, Homo sapiens
  CDR3 for alpha chain variable domain of TCR clone 216884 (TRAV12-1, TRAJ53)
CVVTSVAGGSNYKLTF

SEQ ID NO: 433768 - protein, 13 aa, Homo sapiens
  CDR3 for beta chain variable domain of TCR clone 216884 (TRBV19, TRBJ2-7)
CASSPRQSYEQYF

SEQ ID NO: 433769 - protein, 15 aa, Homo sapiens
  CDR3 for alpha chain variable domain of TCR clone 216885 (TRAV3, TRAJ22)
CAVRDRGGSARQLTF

SEQ ID NO: 433770 - protein, 16 aa, Homo sapiens
  CDR3 for beta chain variable domain of TCR clone 216885 (TRBV5-4, TRBJ2-3)
CASRRPGAGGADTQYF

SEQ ID NO: 433771 - protein, 16 aa, Homo sapiens
  CDR3 for alpha chain variable domain of TCR clone 216886 (TRAV14/DV4, TRAJ15)
CAMREGPAQAGTALIF

SEQ ID NO: 433772 - protein, 12 aa, Homo sapiens
  CDR3 for beta chain variable domain of TCR clone 216886 (TRBV28, TRBJ2-6)
CAIQAGDNVLTF

SEQ ID NO: 433773 - protein, 11 aa, Homo sapiens
  CDR3 for alpha chain variable domain of TCR clone 216887 (TRAV21, TRAJ11)
CAVSGYSTLTF

SEQ ID NO: 433774 - protein, 16 aa, Homo sapiens
  CDR3 for beta chain variable domain of TCR clone 216887 (TRBV19, TRBJ2-1)
CASSKAGPSSYNEQLF

SEQ ID NO: 433775 - protein, 13 aa, Homo sapiens
  CDR3 for alpha chain variable domain of TCR clone 216888 (TRAV12-3, TRAJ53)
CAMRGGSNYKLTF

SEQ ID NO: 433776 - protein, 15 aa, Homo sapiens
  CDR3 for beta chain variable domain of TCR clone 216888 (TRBV2, TRBJ2-1)
CATQARLIMIGEQFF

SEQ ID NO: 433777 - protein, 16 aa, Homo sapiens
  CDR3 for alpha chain variable domain of TCR clone 216889 (TRAV12-1, TRAJ43)
CVVNPHRFGAGTRLTV

SEQ ID NO: 433778 - protein, 16 aa, Homo sapiens
  CDR3 for beta chain variable domain of TCR clone 216889 (TRBV27, TRBJ2-2)
CASSSTGGGDTGELSF

SEQ ID NO: 433779 - protein, 15 aa, Homo sapiens
  CDR3 for alpha chain variable domain of TCR clone 216890 (TRAV29/DV5, TRAJ42)
CAAKTDGGSQGNLIF

SEQ ID NO: 433780 - protein, 15 aa, Homo sapiens
  CDR3 for beta chain variable domain of TCR clone 216890 (TRBV5-1, TRBJ2-2)
CASSSQVGNTGELFF

SEQ ID NO: 433781 - protein, 14 aa, Homo sapiens
  CDR3 for alpha chain variable domain of TCR clone 216891 (TRAV21, TRAJ45)
CAVVSGGGSDGLTF

SEQ ID NO: 433782 - protein, 14 aa, Homo sapiens
  CDR3 for beta chain variable domain of TCR clone 216891 (TRBV20-1, TRBJ2-3)
CSALGLEGADTQYF

SEQ ID NO: 433783 - protein, 14 aa, Homo sapiens
  CDR3 for alpha chain variable domain of TCR clone 216892 (TRAV38-1, TRAJ40)
CALRPTSGTYKYIF

SEQ ID NO: 433784 - protein, 15 aa, Homo sapiens
  CDR3 for beta chain variable domain of TCR clone 216892 (TRBV29-1, TRBJ2-7)
CSVEFFDRGSYEQYF

SEQ ID NO: 433785 - protein, 12 aa, Homo sapiens
  CDR3 for alpha chain variable domain of TCR clone 216893 (TRAV26-1, TRAJ36)
CIVRGRADNLFF

SEQ ID NO: 433786 - protein, 13 aa, Homo sapiens
  CDR3 for beta chain variable domain of TCR clone 216893 (TRBV11-2, TRBJ2-5)
CASSRGPSETQYF

SEQ ID NO: 433787 - protein, 13 aa, Homo sapiens
  CDR3 for alpha chain variable domain of TCR clone 216894 (TRAV12-1, TRAJ7)
CVVNMRGNNRLAF

SEQ ID NO: 433788 - protein, 14 aa, Homo sapiens
  CDR3 for beta chain variable domain of TCR clone 216894 (TRBV18, TRBJ2-3)
CASSRDRGTDTQYF

SEQ ID NO: 433789 - protein, 12 aa, Homo sapiens
  CDR3 for alpha chain variable domain of TCR clone 216895 (TRAV21, TRAJ33)
SAKMDSNYQLIW

SEQ ID NO: 433790 - protein, 14 aa, Homo sapiens
  CDR3 for beta chain variable domain of TCR clone 216895 (TRBV2, TRBJ2-7)
CASSLTSGGYERYF

SEQ ID NO: 433791 - protein, 14 aa, Homo sapiens
  CDR3 for alpha chain variable domain of TCR clone 216896 (TRAV13-1, TRAJ35)
CAASKGGFGNVLNC

SEQ ID NO: 433792 - protein, 16 aa, Homo sapiens
  CDR3 for beta chain variable domain of TCR clone 216896 (TRBV7-2, TRBJ2-7)
CASSLRLVSTSSTSGR

SEQ ID NO: 433793 - protein, 14 aa, Homo sapiens
  CDR3 for alpha chain variable domain of TCR clone 216897 (TRAV1-2, TRAJ16)
CAVNLFSDCQKLLF

SEQ ID NO: 433794 - protein, 15 aa, Homo sapiens
  CDR3 for beta chain variable domain of TCR clone 216897 (TRBV6-5, TRBJ2-1)
CASSYDAGAGNEQFF

SEQ ID NO: 433795 - protein, 16 aa, Homo sapiens
  CDR3 for alpha chain variable domain of TCR clone 216898 (TRAV8-3, TRAJ13)
CAVGAEVSGGYQKVTF

SEQ ID NO: 433796 - protein, 13 aa, Homo sapiens
  CDR3 for beta chain variable domain of TCR clone 216898 (TRBV27, TRBJ1-1)
CASSLSIGAEAFF

SEQ ID NO: 433797 - protein, 17 aa, Homo sapiens
  CDR3 for alpha chain variable domain of TCR clone 216899 (TRAV3, TRAJ6)
CAVRDGPRAGGSYIPTF

SEQ ID NO: 433798 - protein, 15 aa, Homo sapiens
  CDR3 for beta chain variable domain of TCR clone 216899 (TRBV5-1, TRBJ2-5)
CASSLGLAEQETQYF

SEQ ID NO: 433799 - protein, 17 aa, Homo sapiens
  CDR3 for alpha chain variable domain of TCR clone 216900 (TRAV13-1, TRAJ41)
CAASTRRAQIPGMHSTS

SEQ ID NO: 433800 - protein, 15 aa, Homo sapiens
  CDR3 for beta chain variable domain of TCR clone 216900 (TRBV19, TRBJ1-1)
CASSKTGSTNTEAFF

SEQ ID NO: 433801 - protein, 11 aa, Homo sapiens
  CDR3 for alpha chain variable domain of TCR clone 216901 (TRAV13-1, TRAJ23)
CAASSRGKLIF

SEQ ID NO: 433802 - protein, 21 aa, Homo sapiens
  CDR3 for beta chain variable domain of TCR clone 216901 (TRBV7-3, TRBJ2-5)
GGTQPCISGPAGSGGGETQYF

SEQ ID NO: 433803 - protein, 12 aa, Homo sapiens
  CDR3 for alpha chain variable domain of TCR clone 216902 (TRAV2, TRAJ31)
CAVEDNNARLMF

SEQ ID NO: 433804 - protein, 13 aa, Homo sapiens
  CDR3 for beta chain variable domain of TCR clone 216902 (TRBV28, TRBJ2-7)
CASSPSGTYEQYF

SEQ ID NO: 433805 - protein, 12 aa, Homo sapiens
  CDR3 for alpha chain variable domain of TCR clone 216903 (TRAV21, TRAJ31)
CAVWGNNARLML

SEQ ID NO: 433806 - protein, 16 aa, Homo sapiens
  CDR3 for beta chain variable domain of TCR clone 216903 (TRBV27, TRBJ2-5)
CASSYGPGGQKETQYF

SEQ ID NO: 433807 - protein, 18 aa, Homo sapiens
  CDR3 for alpha chain variable domain of TCR clone 216904 (TRAV21, TRAJ52)
CALRPSPAGGTSYGKLTF

SEQ ID NO: 433808 - protein, 15 aa, Homo sapiens
  CDR3 for beta chain variable domain of TCR clone 216904 (TRBV7-9, TRBJ2-7)
CASSSSGLAVYEQYF

SEQ ID NO: 433809 - protein, 12 aa, Homo sapiens
  CDR3 for alpha chain variable domain of TCR clone 216905 (TRAV13-1, TRAJ42)
VNYGGSQGNLIF

SEQ ID NO: 433810 - protein, 12 aa, Homo sapiens
  CDR3 for beta chain variable domain of TCR clone 216905 (TRBV7-9, TRBJ1-5)
CASSSDHAPQHF

SEQ ID NO: 433811 - protein, 11 aa, Homo sapiens
  CDR3 for alpha chain variable domain of TCR clone 216906 (TRAV3, TRAJ21)
CAVGNFNKIYF

SEQ ID NO: 433812 - protein, 16 aa, Homo sapiens
  CDR3 for beta chain variable domain of TCR clone 216906 (TRBV19, TRBJ2-1)
CASSRAGPSSYNEQFF

SEQ ID NO: 433813 - protein, 14 aa, Homo sapiens
  CDR3 for alpha chain variable domain of TCR clone 216907 (TRAV23/DV6, TRAJ15)
CAASKYQAGTALIF

SEQ ID NO: 433814 - protein, 16 aa, Homo sapiens
  CDR3 for beta chain variable domain of TCR clone 216907 (TRBV12-5, TRBJ2-5)
CASGPRTSGNQETQYF

SEQ ID NO: 433815 - protein, 13 aa, Homo sapiens
  CDR3 for alpha chain variable domain of TCR clone 216908 (TRAV3, TRAJ27)
CAVRPIGAGKSTF

SEQ ID NO: 433816 - protein, 15 aa, Homo sapiens
  CDR3 for beta chain variable domain of TCR clone 216908 (TRBV20-1, TRBJ2-7)
CSARDRVSGMDEQYF

SEQ ID NO: 433817 - protein, 14 aa, Homo sapiens
  CDR3 for alpha chain variable domain of TCR clone 216909 (TRAV26-1, TRAJ39)
CIVWGSRAGNMLTF

SEQ ID NO: 433818 - protein, 15 aa, Homo sapiens
  CDR3 for beta chain variable domain of TCR clone 216909 (TRBV7-9, TRBJ1-5)
CASSQGHQPNQPQHF

SEQ ID NO: 433819 - protein, 13 aa, Homo sapiens
  CDR3 for alpha chain variable domain of TCR clone 216910 (TRAV20, TRAJ3)
CASRYSSASKIIF

SEQ ID NO: 433820 - protein, 18 aa, Homo sapiens
  CDR3 for beta chain variable domain of TCR clone 216910 (TRBV4-1, TRBJ1-5)
CASSQDPRGQGLNQPQHF

SEQ ID NO: 433821 - protein, 16 aa, Homo sapiens
  CDR3 for alpha chain variable domain of TCR clone 216911 (TRAV3, TRAJ13)
CTVRDFESGGYQKVTF

SEQ ID NO: 433822 - protein, 16 aa, Homo sapiens
  CDR3 for beta chain variable domain of TCR clone 216911 (TRBV27, TRBJ2-5)
CASSYGPGGQKETQYF

SEQ ID NO: 433823 - protein, 15 aa, Homo sapiens
  CDR3 for alpha chain variable domain of TCR clone 216912 (TRAV26-1, TRAJ38)
CIVRAEGGNNRKLSW

SEQ ID NO: 433824 - protein, 14 aa, Homo sapiens
  CDR3 for beta chain variable domain of TCR clone 216912 (TRBV7-6, TRBJ2-5)
CASSSPSGSETQYF

SEQ ID NO: 433825 - protein, 14 aa, Homo sapiens
  CDR3 for alpha chain variable domain of TCR clone 216913 (TRAV12-2, TRAJ13)
CAVKKTGGYQKDTF

SEQ ID NO: 433826 - protein, 13 aa, Homo sapiens
  CDR3 for beta chain variable domain of TCR clone 216913 (TRBV10-3, TRBJ2-7)
CASKLAVNYEQYF

SEQ ID NO: 433827 - protein, 14 aa, Homo sapiens
  CDR3 for alpha chain variable domain of TCR clone 216914 (TRAV12-2, TRAJ45)
CAVYSGGGADGLTF

SEQ ID NO: 433828 - protein, 14 aa, Homo sapiens
  CDR3 for beta chain variable domain of TCR clone 216914 (TRBV19, TRBJ2-1)
CASSMGSGATEQFF

SEQ ID NO: 433829 - protein, 15 aa, Homo sapiens
  CDR3 for alpha chain variable domain of TCR clone 216915 (TRAV4, TRAJ39)
CLVGPHNNAGNMLTF

SEQ ID NO: 433830 - protein, 14 aa, Homo sapiens
  CDR3 for beta chain variable domain of TCR clone 216915 (TRBV19, TRBJ2-1)
CASPTVVLSGEQFF

SEQ ID NO: 433831 - protein, 19 aa, Homo sapiens
  CDR3 for alpha chain variable domain of TCR clone 216916 (TRAV2, TRAJ20)
ILQVREADAAVYRDCKLIF

SEQ ID NO: 433832 - protein, 13 aa, Homo sapiens
  CDR3 for beta chain variable domain of TCR clone 216916 (TRBV15, TRBJ1-6)
CATSGGLNSPLHF

SEQ ID NO: 433833 - protein, 14 aa, Homo sapiens
  CDR3 for alpha chain variable domain of TCR clone 216917 (TRAV8-1, TRAJ5)
CAVRTDTGRKALTF

SEQ ID NO: 433834 - protein, 14 aa, Homo sapiens
  CDR3 for beta chain variable domain of TCR clone 216917 (TRBV7-8, TRBJ2-3)
CASSFPDGQDTQYF

SEQ ID NO: 433835 - protein, 12 aa, Homo sapiens
  CDR3 for alpha chain variable domain of TCR clone 216918 (TRAV1-2, TRAJ24)
CAVGGSWGKFQF

SEQ ID NO: 433836 - protein, 15 aa, Homo sapiens
  CDR3 for beta chain variable domain of TCR clone 216918 (TRBV20-1, TRBJ2-7)
CSAGDRVSGMDEQYF

SEQ ID NO: 433837 - protein, 14 aa, Homo sapiens
  CDR3 for alpha chain variable domain of TCR clone 216919 (TRAV13-1, TRAJ35)
YAASKGGFGNVLHC

SEQ ID NO: 433838 - protein, 14 aa, Homo sapiens
  CDR3 for beta chain variable domain of TCR clone 216919 (TRBV4-1, TRBJ2-2)
CASSQAVNTGELFF

SEQ ID NO: 433839 - protein, 11 aa, Homo sapiens
  CDR3 for alpha chain variable domain of TCR clone 216920 (TRAV26-1, TRAJ37)
CIVRVGRKLIF

SEQ ID NO: 433840 - protein, 15 aa, Homo sapiens
  CDR3 for beta chain variable domain of TCR clone 216920 (TRBV5-1, TRBJ2-3)
CASSVTSGSTDTQYF

SEQ ID NO: 433841 - protein, 13 aa, Homo sapiens
  CDR3 for alpha chain variable domain of TCR clone 216921 (TRAV12-3, TRAJ10)
HLPLTGGGNKLTF

SEQ ID NO: 433842 - protein, 15 aa, Homo sapiens
  CDR3 for beta chain variable domain of TCR clone 216921 (TRBV25-1, TRBJ2-4)
CASSETESAKNIQYF

SEQ ID NO: 433843 - protein, 13 aa, Homo sapiens
  CDR3 for alpha chain variable domain of TCR clone 216922 (TRAV2, TRAJ40)
CAVVTSGTYKYIF

SEQ ID NO: 433844 - protein, 14 aa, Homo sapiens
  CDR3 for beta chain variable domain of TCR clone 216922 (TRBV19, TRBJ2-1)
CASQTVVLSGEQFF

SEQ ID NO: 433845 - protein, 16 aa, Homo sapiens
  CDR3 for alpha chain variable domain of TCR clone 216923 (TRAV3, TRAJ10)
CAVRDMRAGGGNKLTF

SEQ ID NO: 433846 - protein, 14 aa, Homo sapiens
  CDR3 for beta chain variable domain of TCR clone 216923 (TRBV7-2, TRBJ1-5)
CASSTQGAGQPQHF

SEQ ID NO: 433847 - protein, 14 aa, Homo sapiens
  CDR3 for alpha chain variable domain of TCR clone 216924 (TRAV1-1, TRAJ34)
CAVSPSYNTDKLIF

SEQ ID NO: 433848 - protein, 16 aa, Homo sapiens
  CDR3 for beta chain variable domain of TCR clone 216924 (TRBV19, TRBJ2-2)
CASSTARASNTGELFF

SEQ ID NO: 433849 - protein, 15 aa, Homo sapiens
  CDR3 for alpha chain variable domain of TCR clone 216925 (TRAV8-3, TRAJ45)
CASSYSGGGADGLTF

SEQ ID NO: 433850 - protein, 16 aa, Homo sapiens
  CDR3 for beta chain variable domain of TCR clone 216925 (TRBV2, TRBJ2-2)
CASSAFGDANTGELFF

SEQ ID NO: 433851 - protein, 16 aa, Homo sapiens
  CDR3 for alpha chain variable domain of TCR clone 216926 (TRAV2, TRAJ4)
CAVEDRFSGGYNKLIF

SEQ ID NO: 433852 - protein, 15 aa, Homo sapiens
  CDR3 for beta chain variable domain of TCR clone 216926 (TRBV10-1, TRBJ2-3)
CASSATSGGFDTQYF

SEQ ID NO: 433853 - protein, 14 aa, Homo sapiens
  CDR3 for alpha chain variable domain of TCR clone 216927 (TRAV1-2, TRAJ8)
CAVREDTGFRKLVF

SEQ ID NO: 433854 - protein, 14 aa, Homo sapiens
  CDR3 for beta chain variable domain of TCR clone 216927 (TRBV20-1, TRBJ1-1)
CSAQTRIGGTEAVF

SEQ ID NO: 433855 - protein, 16 aa, Homo sapiens
  CDR3 for alpha chain variable domain of TCR clone 216928 (TRAV16, TRAJ4)
CALSRMFSGGYNKRIF

SEQ ID NO: 433856 - protein, 14 aa, Homo sapiens
  CDR3 for beta chain variable domain of TCR clone 216928 (TRBV4-1, TRBJ2-2)
CASSQAVNTGELFF

SEQ ID NO: 433857 - protein, 13 aa, Homo sapiens
  CDR3 for alpha chain variable domain of TCR clone 216929 (TRAV21, TRAJ57)
CAVIEGGSEKLVV

SEQ ID NO: 433858 - protein, 15 aa, Homo sapiens
  CDR3 for beta chain variable domain of TCR clone 216929 (TRBV10-3, TRBJ2-5)
CAISEFGRGQETQYF

SEQ ID NO: 433859 - protein, 13 aa, Homo sapiens
  CDR3 for alpha chain variable domain of TCR clone 216930 (TRAV3, TRAJ21)
CAVSEPDFNKFYF

SEQ ID NO: 433860 - protein, 15 aa, Homo sapiens
  CDR3 for beta chain variable domain of TCR clone 216930 (TRBV2, TRBJ2-1)
CASSELAGGYNEQFF

SEQ ID NO: 433861 - protein, 15 aa, Homo sapiens
  CDR3 for alpha chain variable domain of TCR clone 216931 (TRAV3, TRAJ16)
CAVRDGFSDGQKLPF

SEQ ID NO: 433862 - protein, 17 aa, Homo sapiens
  CDR3 for beta chain variable domain of TCR clone 216931 (TRBV6-1, TRBJ2-3)
CASRTRGLAQSTDTQYF

SEQ ID NO: 433863 - protein, 12 aa, Homo sapiens
  CDR3 for alpha chain variable domain of TCR clone 216932 (TRAV38-2/DV8, TRAJ48)
CAQLSGNEKLTF

SEQ ID NO: 433864 - protein, 14 aa, Homo sapiens
  CDR3 for beta chain variable domain of TCR clone 216932 (TRBV7-3, TRBJ2-1)
CASSLAGGTNEQFF

SEQ ID NO: 433865 - protein, 13 aa, Homo sapiens
  CDR3 for alpha chain variable domain of TCR clone 216933 (TRAV13-1, TRAJ39)
CSKYSNAGNMLTF

SEQ ID NO: 433866 - protein, 14 aa, Homo sapiens
  CDR3 for beta chain variable domain of TCR clone 216933 (TRBV29-1, TRBJ1-3)
CSVADRVVGNTLYF

SEQ ID NO: 433867 - protein, 14 aa, Homo sapiens
  CDR3 for alpha chain variable domain of TCR clone 216934 (TRAV3, TRAJ36)
CAVRDGTGANNLFF

SEQ ID NO: 433868 - protein, 13 aa, Homo sapiens
  CDR3 for beta chain variable domain of TCR clone 216934 (TRBV2, TRBJ2-7)
CASSVGGSGEQYF

SEQ ID NO: 433869 - protein, 15 aa, Homo sapiens
  CDR3 for alpha chain variable domain of TCR clone 216935 (TRAV14/DV4, TRAJ10)
CAMRELTGGGNKLTF

SEQ ID NO: 433870 - protein, 18 aa, Homo sapiens
  CDR3 for beta chain variable domain of TCR clone 216935 (TRBV7-9, TRBJ2-7)
CASILTTSGSRTWYEQYF

SEQ ID NO: 433871 - protein, 16 aa, Homo sapiens
  CDR3 for alpha chain variable domain of TCR clone 216936 (TRAV23/DV6, TRAJ9)
CAASIGGNTGGFKTIF

SEQ ID NO: 433872 - protein, 16 aa, Homo sapiens
  CDR3 for beta chain variable domain of TCR clone 216936 (TRBV2, TRBJ2-3)
CASSTSVEGVTDTQYF

SEQ ID NO: 433873 - protein, 14 aa, Homo sapiens
  CDR3 for alpha chain variable domain of TCR clone 216937 (TRAV16, TRAJ37)
CALDISGNTGKLIF

SEQ ID NO: 433874 - protein, 11 aa, Homo sapiens
  CDR3 for beta chain variable domain of TCR clone 216937 (TRBV6-1, TRBJ2-1)
CASISSNEQFV

SEQ ID NO: 433875 - protein, 12 aa, Homo sapiens
  CDR3 for alpha chain variable domain of TCR clone 216938 (TRAV1-1, TRAJ43)
CAPRVSSNDMRF

SEQ ID NO: 433876 - protein, 15 aa, Homo sapiens
  CDR3 for beta chain variable domain of TCR clone 216938 (TRBV5-1, TRBJ2-7)
CASSLGDFATYEQYF

SEQ ID NO: 433877 - protein, 14 aa, Homo sapiens
  CDR3 for alpha chain variable domain of TCR clone 216939 (TRAV6, TRAJ6)
CALPTSGGSYIPTF

SEQ ID NO: 433878 - protein, 17 aa, Homo sapiens
  CDR3 for beta chain variable domain of TCR clone 216939 (TRBV5-1, TRBJ2-5)
CASSPVALGQNQETQYY

SEQ ID NO: 433879 - protein, 11 aa, Homo sapiens
  CDR3 for alpha chain variable domain of TCR clone 216940 (TRAV6, TRAJ41)
CALNSGYALNF

SEQ ID NO: 433880 - protein, 17 aa, Homo sapiens
  CDR3 for beta chain variable domain of TCR clone 216940 (TRBV11-2, TRBJ2-1)
CASSLYPPGVEYNEQFF

SEQ ID NO: 433881 - protein, 14 aa, Homo sapiens
  CDR3 for alpha chain variable domain of TCR clone 216941 (TRAV1-2, TRAJ8)
CAVRDDTGFQKLVF

SEQ ID NO: 433882 - protein, 16 aa, Homo sapiens
  CDR3 for beta chain variable domain of TCR clone 216941 (TRBV20-1, TRBJ2-4)
CSARAILAGQGDSQYF

SEQ ID NO: 433883 - protein, 13 aa, Homo sapiens
  CDR3 for alpha chain variable domain of TCR clone 216942 (TRAV13-1, TRAJ11)
CAAVLAGYSTLTF

SEQ ID NO: 433884 - protein, 17 aa, Homo sapiens
  CDR3 for beta chain variable domain of TCR clone 216942 (TRBV25-1, TRBJ2-7)
CASSDTRVVFSSYEQYF

SEQ ID NO: 433885 - protein, 14 aa, Homo sapiens
  CDR3 for alpha chain variable domain of TCR clone 216943 (TRAV12-2, TRAJ13)
CSVKKTGGYQKVTF

SEQ ID NO: 433886 - protein, 14 aa, Homo sapiens
  CDR3 for beta chain variable domain of TCR clone 216943 (TRBV10-3, TRBJ2-1)
CAISSDLAYNEQFF

SEQ ID NO: 433887 - protein, 11 aa, Homo sapiens
  CDR3 for alpha chain variable domain of TCR clone 216944 (TRAV12-2, TRAJ43)
CAAYNNNDMRF

SEQ ID NO: 433888 - protein, 15 aa, Homo sapiens
  CDR3 for beta chain variable domain of TCR clone 216944 (TRBV10-3, TRBJ2-3)
CAISLTSGGTDTQYF

SEQ ID NO: 433889 - protein, 14 aa, Homo sapiens
  CDR3 for alpha chain variable domain of TCR clone 216945 (TRAV12-3, TRAJ10)
SHLRLTGGGNKLTF

SEQ ID NO: 433890 - protein, 14 aa, Homo sapiens
  CDR3 for beta chain variable domain of TCR clone 216945 (TRBV7-6, TRBJ2-3)
CASSLGTVTDTHYF

SEQ ID NO: 433891 - protein, 15 aa, Homo sapiens
  CDR3 for alpha chain variable domain of TCR clone 216946 (TRAV13-1, TRAJ52)
CALRTGGTSYGKLTF

SEQ ID NO: 433892 - protein, 14 aa, Homo sapiens
  CDR3 for beta chain variable domain of TCR clone 216946 (TRBV20-1, TRBJ2-5)
CSASDPGSGETQYF

SEQ ID NO: 433893 - protein, 13 aa, Homo sapiens
  CDR3 for alpha chain variable domain of TCR clone 216947 (TRAV16, TRAJ5)
CALTNTGRRALTF

SEQ ID NO: 433894 - protein, 15 aa, Homo sapiens
  CDR3 for beta chain variable domain of TCR clone 216947 (TRBV11-2, TRBJ2-4)
CAGSRPGTGINMQYF

SEQ ID NO: 433895 - protein, 14 aa, Homo sapiens
  CDR3 for alpha chain variable domain of TCR clone 216948 (TRAV1-2, TRAJ8)
CAVREDTGFQKLVF

SEQ ID NO: 433896 - protein, 14 aa, Homo sapiens
  CDR3 for beta chain variable domain of TCR clone 216948 (TRBV18, TRBJ1-1)
CASSPGFQGVEAFF

SEQ ID NO: 433897 - protein, 13 aa, Homo sapiens
  CDR3 for alpha chain variable domain of TCR clone 216949 (TRAV17, TRAJ34)
CATDLYNTDKLIF

SEQ ID NO: 433898 - protein, 12 aa, Homo sapiens
  CDR3 for beta chain variable domain of TCR clone 216949 (TRBV5-5, TRBJ2-5)
CASSYFGETQYF

SEQ ID NO: 433899 - protein, 16 aa, Homo sapiens
  CDR3 for alpha chain variable domain of TCR clone 216950 (TRAV14/DV4, TRAJ53)
CAMREGGGGSNYKLTF

SEQ ID NO: 433900 - protein, 15 aa, Homo sapiens
  CDR3 for beta chain variable domain of TCR clone 216950 (TRBV27, TRBJ2-5)
CASSLYPRGGETQYF

SEQ ID NO: 433901 - protein, 13 aa, Homo sapiens
  CDR3 for alpha chain variable domain of TCR clone 216951 (TRAV13-1, TRAJ28)
SAANEAGSYQLTF

SEQ ID NO: 433902 - protein, 15 aa, Homo sapiens
  CDR3 for beta chain variable domain of TCR clone 216951 (TRBV7-9, TRBJ1-6)
CASSSPGRGNSPLHF

SEQ ID NO: 433903 - protein, 18 aa, Homo sapiens
  CDR3 for alpha chain variable domain of TCR clone 216952 (TRAV21, TRAJ52)
CAVSPSPAGGTSYGKLTF

SEQ ID NO: 433904 - protein, 14 aa, Homo sapiens
  CDR3 for beta chain variable domain of TCR clone 216952 (TRBV20-1, TRBJ1-1)
CSAQTRIGGTEAFF

SEQ ID NO: 433905 - protein, 14 aa, Homo sapiens
  CDR3 for alpha chain variable domain of TCR clone 216953 (TRAV8-4, TRAJ13)
CAVTLSGGYQKVTF

SEQ ID NO: 433906 - protein, 14 aa, Homo sapiens
  CDR3 for beta chain variable domain of TCR clone 216953 (TRBV7-8, TRBJ2-2)
CASSSLKGTGELFF

SEQ ID NO: 433907 - protein, 12 aa, Homo sapiens
  CDR3 for alpha chain variable domain of TCR clone 216954 (TRAV3, TRAJ26)
CAVRDYGQNFVF

SEQ ID NO: 433908 - protein, 12 aa, Homo sapiens
  CDR3 for beta chain variable domain of TCR clone 216954 (TRBV28, TRBJ2-3)
CASSLYRDTQYF

SEQ ID NO: 433909 - protein, 16 aa, Homo sapiens
  CDR3 for alpha chain variable domain of TCR clone 216955 (TRAV8-3, TRAJ18)
CAVGARRGSTLGRLYF

SEQ ID NO: 433910 - protein, 13 aa, Homo sapiens
  CDR3 for beta chain variable domain of TCR clone 216955 (TRBV6-1, TRBJ1-1)
CASSRQGNTEAFF

SEQ ID NO: 433911 - protein, 13 aa, Homo sapiens
  CDR3 for alpha chain variable domain of TCR clone 216956 (TRAV20, TRAJ37)
CAGCSSNTGKLVF

SEQ ID NO: 433912 - protein, 11 aa, Homo sapiens
  CDR3 for beta chain variable domain of TCR clone 216956 (TRBV12-4, TRBJ2-3)
CASTASDTQYF

SEQ ID NO: 433913 - protein, 17 aa, Homo sapiens
  CDR3 for alpha chain variable domain of TCR clone 216957 (TRAV3, TRAJ6)
CAVRDGPRAGGSDIPTF

SEQ ID NO: 433914 - protein, 14 aa, Homo sapiens
  CDR3 for beta chain variable domain of TCR clone 216957 (TRBV6-1, TRBJ1-3)
CASVQGGGGNTIYF

SEQ ID NO: 433915 - protein, 16 aa, Homo sapiens
  CDR3 for alpha chain variable domain of TCR clone 216958 (TRAV12-2, TRAJ39)
CAVNRGPNNAGNMHTF

SEQ ID NO: 433916 - protein, 10 aa, Homo sapiens
  CDR3 for beta chain variable domain of TCR clone 216958 (TRBV2, TRBJ2-4)
CASRGSIQYF

SEQ ID NO: 433917 - protein, 12 aa, Homo sapiens
  CDR3 for alpha chain variable domain of TCR clone 216959 (TRAV35, TRAJ28)
GVEGAGSYQLTF

SEQ ID NO: 433918 - protein, 13 aa, Homo sapiens
  CDR3 for beta chain variable domain of TCR clone 216959 (TRBV24-1, TRBJ2-1)
CATSAGPYNEQFF

SEQ ID NO: 433919 - protein, 15 aa, Homo sapiens
  CDR3 for alpha chain variable domain of TCR clone 216960 (TRAV17, TRAJ45)
CATAYSGGGADGLTF

SEQ ID NO: 433920 - protein, 14 aa, Homo sapiens
  CDR3 for beta chain variable domain of TCR clone 216960 (TRBV20-1, TRBJ2-4)
CSASGRVGENIQYF

SEQ ID NO: 433921 - protein, 15 aa, Homo sapiens
  CDR3 for alpha chain variable domain of TCR clone 216961 (TRAV8-2, TRAJ15)
CVVTRGNQAGTALIF

SEQ ID NO: 433922 - protein, 16 aa, Homo sapiens
  CDR3 for beta chain variable domain of TCR clone 216961 (TRBV12-4, TRBJ1-5)
CASSRPVGGSNQPQHF

SEQ ID NO: 433923 - protein, 15 aa, Homo sapiens
  CDR3 for alpha chain variable domain of TCR clone 216962 (TRAV3, TRAJ5)
CAVRDRKKGRRELTF

SEQ ID NO: 433924 - protein, 15 aa, Homo sapiens
  CDR3 for beta chain variable domain of TCR clone 216962 (TRBV7-8, TRBJ2-1)
CASSLADSLYNEQFF

SEQ ID NO: 433925 - protein, 12 aa, Homo sapiens
  CDR3 for alpha chain variable domain of TCR clone 216963 (TRAV23/DV6, TRAJ20)
CAADSRDYKLSF

SEQ ID NO: 433926 - protein, 18 aa, Homo sapiens
  CDR3 for beta chain variable domain of TCR clone 216963 (TRBV11-2, TRBJ2-3)
CASSLGGASRGAPNTQYF

SEQ ID NO: 433927 - protein, 13 aa, Homo sapiens
  CDR3 for alpha chain variable domain of TCR clone 216964 (TRAV13-1, TRAJ21)
CAASIYNFNKFYF

SEQ ID NO: 433928 - protein, 16 aa, Homo sapiens
  CDR3 for beta chain variable domain of TCR clone 216964 (TRBV2, TRBJ2-2)
CASSAFGDANTGELFF

SEQ ID NO: 433929 - protein, 14 aa, Homo sapiens
  CDR3 for alpha chain variable domain of TCR clone 216965 (TRAV2, TRAJ9)
CAVEDRSGGFKTIF

SEQ ID NO: 433930 - protein, 11 aa, Homo sapiens
  CDR3 for beta chain variable domain of TCR clone 216965 (TRBV11-2, TRBJ1-1)
CASSINTEAFF

SEQ ID NO: 433931 - protein, 14 aa, Homo sapiens
  CDR3 for alpha chain variable domain of TCR clone 216966 (TRAV1-2, TRAJ16)
CAVNRFSDGQKLIF

SEQ ID NO: 433932 - protein, 13 aa, Homo sapiens
  CDR3 for beta chain variable domain of TCR clone 216966 (TRBV6-1, TRBJ2-5)
CASGYQSVETQYF

SEQ ID NO: 433933 - protein, 17 aa, Homo sapiens
  CDR3 for alpha chain variable domain of TCR clone 216967 (TRAV3, TRAJ6)
CAVRDGPRAGGSYIPTF

SEQ ID NO: 433934 - protein, 13 aa, Homo sapiens
  CDR3 for beta chain variable domain of TCR clone 216967 (TRBV11-2, TRBJ2-7)
CASSTSRSLEQYF

SEQ ID NO: 433935 - protein, 12 aa, Homo sapiens
  CDR3 for alpha chain variable domain of TCR clone 216968 (TRAV26-2, TRAJ47)
CILLEYGNKLVF

SEQ ID NO: 433936 - protein, 15 aa, Homo sapiens
  CDR3 for beta chain variable domain of TCR clone 216968 (TRBV28, TRBJ2-5)
CASSSGRTIQETQYF

SEQ ID NO: 433937 - protein, 15 aa, Homo sapiens
  CDR3 for alpha chain variable domain of TCR clone 216969 (TRAV3, TRAJ17)
CAVSPKEAAGNKLTF

SEQ ID NO: 433938 - protein, 14 aa, Homo sapiens
  CDR3 for beta chain variable domain of TCR clone 216969 (TRBV5-1, TRBJ2-3)
CAGSLFGPTDTQYF

SEQ ID NO: 433939 - protein, 14 aa, Homo sapiens
  CDR3 for alpha chain variable domain of TCR clone 216970 (TRAV8-4, TRAJ39)
CAVSLNNAGNMLTF

SEQ ID NO: 433940 - protein, 13 aa, Homo sapiens
  CDR3 for beta chain variable domain of TCR clone 216970 (TRBV7-8, TRBJ2-7)
CASSLTGGREQYF

SEQ ID NO: 433941 - protein, 17 aa, Homo sapiens
  CDR3 for alpha chain variable domain of TCR clone 216971 (TRAV13-1, TRAJ31)
CAPRDRLMFGDGTQLVV

SEQ ID NO: 433942 - protein, 12 aa, Homo sapiens
  CDR3 for beta chain variable domain of TCR clone 216971 (TRBV7-9, TRBJ2-7)
CASSLEGYEQCV

SEQ ID NO: 433943 - protein, 10 aa, Homo sapiens
  CDR3 for alpha chain variable domain of TCR clone 216972 (TRAV12-2, TRAJ41)
CAVTGYALNF

SEQ ID NO: 433944 - protein, 15 aa, Homo sapiens
  CDR3 for beta chain variable domain of TCR clone 216972 (TRBV27, TRBJ2-1)
CASSNGGGSSNEQFF

SEQ ID NO: 433945 - protein, 13 aa, Homo sapiens
  CDR3 for alpha chain variable domain of TCR clone 216973 (TRAV21, TRAJ20)
CAVGLRVNYKLSF

SEQ ID NO: 433946 - protein, 12 aa, Homo sapiens
  CDR3 for beta chain variable domain of TCR clone 216973 (TRBV7-8, TRBJ2-7)
CASSLGDREQYF

SEQ ID NO: 433947 - protein, 13 aa, Homo sapiens
  CDR3 for alpha chain variable domain of TCR clone 216974 (TRAV20, TRAJ37)
CAGCSSNTGKLIF

SEQ ID NO: 433948 - protein, 14 aa, Homo sapiens
  CDR3 for beta chain variable domain of TCR clone 216974 (TRBV25-1, TRBJ1-1)
CASTPLGGNTEAFF

SEQ ID NO: 433949 - protein, 18 aa, Homo sapiens
  CDR3 for alpha chain variable domain of TCR clone 216975 (TRAV26-1, TRAJ30)
CCVLLHRQSTNRDDKIIF

SEQ ID NO: 433950 - protein, 18 aa, Homo sapiens
  CDR3 for beta chain variable domain of TCR clone 216975 (TRBV4-1, TRBJ1-5)
CASSQAPRGQGLNQPQHF

SEQ ID NO: 433951 - protein, 12 aa, Homo sapiens
  CDR3 for alpha chain variable domain of TCR clone 216976 (TRAV12-1, TRAJ40)
CVVYSGTYKYIF

SEQ ID NO: 433952 - protein, 17 aa, Homo sapiens
  CDR3 for beta chain variable domain of TCR clone 216976 (TRBV27, TRBJ1-6)
CASSFDRGLGSPLHLGT

SEQ ID NO: 433953 - protein, 12 aa, Homo sapiens
  CDR3 for alpha chain variable domain of TCR clone 216977 (TRAV23/DV6, TRAJ3)
CAARAPQQCFQD

SEQ ID NO: 433954 - protein, 17 aa, Homo sapiens
  CDR3 for beta chain variable domain of TCR clone 216977 (TRBV7-9, TRBJ2-3)
CASSPTGAGDLTDTQYF

SEQ ID NO: 433955 - protein, 14 aa, Homo sapiens
  CDR3 for alpha chain variable domain of TCR clone 216978 (TRAV8-4, TRAJ27)
CAVSKGTNAGKSTF

SEQ ID NO: 433956 - protein, 14 aa, Homo sapiens
  CDR3 for beta chain variable domain of TCR clone 216978 (TRBV2, TRBJ2-5)
CASSEGSYQETQYF

SEQ ID NO: 433957 - protein, 12 aa, Homo sapiens
  CDR3 for alpha chain variable domain of TCR clone 216979 (TRAV13-2, TRAJ31)
CAESYNNARLMF

SEQ ID NO: 433958 - protein, 18 aa, Homo sapiens
  CDR3 for beta chain variable domain of TCR clone 216979 (TRBV7-3, TRBJ2-3)
CASSSTGTYPGSTDTQYF

SEQ ID NO: 433959 - protein, 12 aa, Homo sapiens
  CDR3 for alpha chain variable domain of TCR clone 216980 (TRAV19, TRAJ26)
CSDVNYGQNFVF

SEQ ID NO: 433960 - protein, 17 aa, Homo sapiens
  CDR3 for beta chain variable domain of TCR clone 216980 (TRBV11-2, TRBJ2-1)
CASSLYPPGVEYNEQFF

SEQ ID NO: 433961 - protein, 15 aa, Homo sapiens
  CDR3 for alpha chain variable domain of TCR clone 216981 (TRAV2, TRAJ13)
CATPSYSGGYQKVTF

SEQ ID NO: 433962 - protein, 18 aa, Homo sapiens
  CDR3 for beta chain variable domain of TCR clone 216981 (TRBV11-2, TRBJ2-3)
CASSLGGASRGAPNTQYF

SEQ ID NO: 433963 - protein, 12 aa, Homo sapiens
  CDR3 for alpha chain variable domain of TCR clone 216982 (TRAV17, TRAJ20)
CATQSNDYKLSF

SEQ ID NO: 433964 - protein, 14 aa, Homo sapiens
  CDR3 for beta chain variable domain of TCR clone 216982 (TRBV9, TRBJ1-6)
CASRMDGLGSPLHF

SEQ ID NO: 433965 - protein, 16 aa, Homo sapiens
  CDR3 for alpha chain variable domain of TCR clone 216983 (TRAV3, TRAJ3)
CAVRDRAKSSASEIIF

SEQ ID NO: 433966 - protein, 16 aa, Homo sapiens
  CDR3 for beta chain variable domain of TCR clone 216983 (TRBV20-1, TRBJ2-4)
CSATSLAELAKNSQYF

SEQ ID NO: 433967 - protein, 15 aa, Homo sapiens
  CDR3 for alpha chain variable domain of TCR clone 216984 (TRAV26-1, TRAJ15)
CIVRMANQAGTALIF

SEQ ID NO: 433968 - protein, 15 aa, Homo sapiens
  CDR3 for beta chain variable domain of TCR clone 216984 (TRBV20-1, TRBJ1-1)
CSARKAETSSTEAFF

SEQ ID NO: 433969 - protein, 14 aa, Homo sapiens
  CDR3 for alpha chain variable domain of TCR clone 216985 (TRAV1-2, TRAJ8)
CAVREDTGFRKLVF

SEQ ID NO: 433970 - protein, 15 aa, Homo sapiens
  CDR3 for beta chain variable domain of TCR clone 216985 (TRBV6-3, TRBJ2-7)
CDSSSPGTVFYEQYF

SEQ ID NO: 433971 - protein, 14 aa, Homo sapiens
  CDR3 for alpha chain variable domain of TCR clone 216986 (TRAV12-2, TRAJ13)
CAVKKTGGYQKVTF

SEQ ID NO: 433972 - protein, 15 aa, Homo sapiens
  CDR3 for beta chain variable domain of TCR clone 216986 (TRBV20-1, TRBJ2-1)
CSAGGIGGTYNEQFF

SEQ ID NO: 433973 - protein, 15 aa, Homo sapiens
  CDR3 for alpha chain variable domain of TCR clone 216987 (TRAV12-2, TRAJ53)
CAVNGGGGSNYKLTF

SEQ ID NO: 433974 - protein, 15 aa, Homo sapiens
  CDR3 for beta chain variable domain of TCR clone 216987 (TRBV7-9, TRBJ2-1)
CASSLGLAGGTEQFF

SEQ ID NO: 433975 - protein, 15 aa, Homo sapiens
  CDR3 for alpha chain variable domain of TCR clone 216988 (TRAV29/DV5, TRAJ29)
CAASERSSGNTPLVF

SEQ ID NO: 433976 - protein, 12 aa, Homo sapiens
  CDR3 for beta chain variable domain of TCR clone 216988 (TRBV28, TRBJ2-3)
CASSLYRDTQYF

SEQ ID NO: 433977 - protein, 14 aa, Homo sapiens
  CDR3 for alpha chain variable domain of TCR clone 216989 (TRAV12-1, TRAJ34)
CVVNLDYNTDKLIF

SEQ ID NO: 433978 - protein, 16 aa, Homo sapiens
  CDR3 for beta chain variable domain of TCR clone 216989 (TRBV9, TRBJ2-1)
CASSVGGGGNYNEQFF

SEQ ID NO: 433979 - protein, 11 aa, Homo sapiens
  CDR3 for alpha chain variable domain of TCR clone 216990 (TRAV8-2, TRAJ26)
CVVTLLLGSAF

SEQ ID NO: 433980 - protein, 15 aa, Homo sapiens
  CDR3 for beta chain variable domain of TCR clone 216990 (TRBV11-2, TRBJ2-2)
CASSSDRVNAGELFF

SEQ ID NO: 433981 - protein, 14 aa, Homo sapiens
  CDR3 for alpha chain variable domain of TCR clone 216991 (TRAV1-2, TRAJ16)
CAVKEGSDGQKLLF

SEQ ID NO: 433982 - protein, 13 aa, Homo sapiens
  CDR3 for beta chain variable domain of TCR clone 216991 (TRBV7-2, TRBJ2-1)
CASSLSPDNEQSF

SEQ ID NO: 433983 - protein, 14 aa, Homo sapiens
  CDR3 for alpha chain variable domain of TCR clone 216992 (TRAV3, TRAJ21)
CAVESQANFNTFYF

SEQ ID NO: 433984 - protein, 12 aa, Homo sapiens
  CDR3 for beta chain variable domain of TCR clone 216992 (TRBV7-8, TRBJ2-7)
CASSLGDREQYF

SEQ ID NO: 433985 - protein, 12 aa, Homo sapiens
  CDR3 for alpha chain variable domain of TCR clone 216993 (TRAV12-3, TRAJ20)
CAMVRGDYKLSF

SEQ ID NO: 433986 - protein, 14 aa, Homo sapiens
  CDR3 for beta chain variable domain of TCR clone 216993 (TRBV5-5, TRBJ1-5)
CASSGQGVDQPHHF

SEQ ID NO: 433987 - protein, 15 aa, Homo sapiens
  CDR3 for alpha chain variable domain of TCR clone 216994 (TRAV26-2, TRAJ54)
CILRYVGQGAQKLVF

SEQ ID NO: 433988 - protein, 13 aa, Homo sapiens
  CDR3 for beta chain variable domain of TCR clone 216994 (TRBV7-9, TRBJ1-1)
CASSLAGVTEAFF

SEQ ID NO: 433989 - protein, 12 aa, Homo sapiens
  CDR3 for alpha chain variable domain of TCR clone 216995 (TRAV35, TRAJ49)
YAGWNTGNQFYF

SEQ ID NO: 433990 - protein, 16 aa, Homo sapiens
  CDR3 for beta chain variable domain of TCR clone 216995 (TRBV5-1, TRBJ2-2)
CASSLWDTTNTGELFF

SEQ ID NO: 433991 - protein, 14 aa, Homo sapiens
  CDR3 for alpha chain variable domain of TCR clone 216996 (TRAV35, TRAJ22)
CAGLRPGSARQLTF

SEQ ID NO: 433992 - protein, 15 aa, Homo sapiens
  CDR3 for beta chain variable domain of TCR clone 216996 (TRBV12-4, TRBJ2-5)
SASSPPTGLQETQYF

SEQ ID NO: 433993 - protein, 17 aa, Homo sapiens
  CDR3 for alpha chain variable domain of TCR clone 216997 (TRAV3, TRAJ6)
CAVRDGPRAGGSYIPTF

SEQ ID NO: 433994 - protein, 14 aa, Homo sapiens
  CDR3 for beta chain variable domain of TCR clone 216997 (TRBV19, TRBJ2-1)
CASPTCVLSGEQFF

SEQ ID NO: 433995 - protein, 23 aa, Homo sapiens
  CDR3 for alpha chain variable domain of TCR clone 216998 (TRAV26-1, TRAJ38)
CIADNAGNNHIQNPDPAVYQLRD

SEQ ID NO: 433996 - protein, 14 aa, Homo sapiens
  CDR3 for beta chain variable domain of TCR clone 216998 (TRBV4-1, TRBJ2-2)
CASSQAVNTGELFF

SEQ ID NO: 433997 - protein, 14 aa, Homo sapiens
  CDR3 for alpha chain variable domain of TCR clone 216999 (TRAV12-3, TRAJ30)
CAMSLLNSDDKIIF

SEQ ID NO: 433998 - protein, 12 aa, Homo sapiens
  CDR3 for beta chain variable domain of TCR clone 216999 (TRBV11-2, TRBJ2-2)
CASSLGGGELFF

SEQ ID NO: 433999 - protein, 13 aa, Homo sapiens
  CDR3 for alpha chain variable domain of TCR clone 217000 (TRAV13-2, TRAJ10)
CAENTGGGNKLTF

SEQ ID NO: 434000 - protein, 15 aa, Homo sapiens
  CDR3 for beta chain variable domain of TCR clone 217000 (TRBV12-4, TRBJ2-2)
CTSSRQGANTGELFF

SEQ ID NO: 434001 - protein, 14 aa, Homo sapiens
  CDR3 for alpha chain variable domain of TCR clone 217001 (TRAV35, TRAJ33)
CAGSSQDSNYQLIW

SEQ ID NO: 434002 - protein, 15 aa, Homo sapiens
  CDR3 for beta chain variable domain of TCR clone 217001 (TRBV29-1, TRBJ2-7)
CSVGFFDRGSYEQYF

SEQ ID NO: 434003 - protein, 15 aa, Homo sapiens
  CDR3 for alpha chain variable domain of TCR clone 217002 (TRAV25, TRAJ52)
CAGRPGGTSYGELTF

SEQ ID NO: 434004 - protein, 17 aa, Homo sapiens
  CDR3 for beta chain variable domain of TCR clone 217002 (TRBV7-8, TRBJ2-6)
CASSAGTGGAGANVLTC

SEQ ID NO: 434005 - protein, 15 aa, Homo sapiens
  CDR3 for alpha chain variable domain of TCR clone 217003 (TRAV3, TRAJ11)
CAVRDRGSGYSTLTF

SEQ ID NO: 434006 - protein, 13 aa, Homo sapiens
  CDR3 for beta chain variable domain of TCR clone 217003 (TRBV12-5, TRBJ2-3)
CASQNRGTDTQYF

SEQ ID NO: 434007 - protein, 14 aa, Homo sapiens
  CDR3 for alpha chain variable domain of TCR clone 217004 (TRAV3, TRAJ21)
CAVESQANFNKFYF

SEQ ID NO: 434008 - protein, 18 aa, Homo sapiens
  CDR3 for beta chain variable domain of TCR clone 217004 (TRBV7-9, TRBJ2-1)
CASSLAVSGTSGRNKQFF

SEQ ID NO: 434009 - protein, 12 aa, Homo sapiens
  CDR3 for alpha chain variable domain of TCR clone 217005 (TRAV8-4, TRAJ33)
CAVSDSNYQLIW

SEQ ID NO: 434010 - protein, 14 aa, Homo sapiens
  CDR3 for beta chain variable domain of TCR clone 217005 (TRBV28, TRBJ2-7)
CASKPGPDLYEQYF

SEQ ID NO: 434011 - protein, 14 aa, Homo sapiens
  CDR3 for alpha chain variable domain of TCR clone 217006 (TRAV12-2, TRAJ33)
CAVKRARSNYQLIW

SEQ ID NO: 434012 - protein, 15 aa, Homo sapiens
  CDR3 for beta chain variable domain of TCR clone 217006 (TRBV7-3, TRBJ2-1)
CASSLDGNSYNEQFF

SEQ ID NO: 434013 - protein, 12 aa, Homo sapiens
  CDR3 for alpha chain variable domain of TCR clone 217007 (TRAV13-2, TRAJ23)
CAERHRGGKLIF

SEQ ID NO: 434014 - protein, 14 aa, Homo sapiens
  CDR3 for beta chain variable domain of TCR clone 217007 (TRBV4-2, TRBJ1-5)
CASSRDRGNQPQHF

SEQ ID NO: 434015 - protein, 15 aa, Homo sapiens
  CDR3 for alpha chain variable domain of TCR clone 217008 (TRAV12-1, TRAJ8)
CVVNVENTGFQKLVF

SEQ ID NO: 434016 - protein, 16 aa, Homo sapiens
  CDR3 for beta chain variable domain of TCR clone 217008 (TRBV7-9, TRBJ2-1)
CASSDVAGGSYNEQFF

SEQ ID NO: 434017 - protein, 13 aa, Homo sapiens
  CDR3 for alpha chain variable domain of TCR clone 217009 (TRAV21, TRAJ27)
CAARPGNAGKSTF

SEQ ID NO: 434018 - protein, 14 aa, Homo sapiens
  CDR3 for beta chain variable domain of TCR clone 217009 (TRBV7-7, TRBJ2-7)
CASSLGRGVGEQYF

SEQ ID NO: 434019 - protein, 14 aa, Homo sapiens
  CDR3 for alpha chain variable domain of TCR clone 217010 (TRAV1-2, TRAJ6)
CAVSLSGGSDIPTF

SEQ ID NO: 434020 - protein, 11 aa, Homo sapiens
  CDR3 for beta chain variable domain of TCR clone 217010 (TRBV6-3, TRBJ2-3)
CATGQADTQYF

SEQ ID NO: 434021 - protein, 11 aa, Homo sapiens
  CDR3 for alpha chain variable domain of TCR clone 217011 (TRAV2, TRAJ33)
CAVESNYQLIW

SEQ ID NO: 434022 - protein, 15 aa, Homo sapiens
  CDR3 for beta chain variable domain of TCR clone 217011 (TRBV7-2, TRBJ2-3)
CASSLVSGDTDTQYF

SEQ ID NO: 434023 - protein, 14 aa, Homo sapiens
  CDR3 for alpha chain variable domain of TCR clone 217012 (TRAV12-2, TRAJ53)
CAVKGGGSNYKLTF

SEQ ID NO: 434024 - protein, 14 aa, Homo sapiens
  CDR3 for beta chain variable domain of TCR clone 217012 (TRBV7-7, TRBJ2-2)
CATRQDSDTGEVFF

SEQ ID NO: 434025 - protein, 18 aa, Homo sapiens
  CDR3 for alpha chain variable domain of TCR clone 217013 (TRAV12-2, )
CAVEDIQNPDPAGYQLRD

SEQ ID NO: 434026 - protein, 16 aa, Homo sapiens
  CDR3 for beta chain variable domain of TCR clone 217013 (TRBV6-1, TRBJ1-2)
CASSGAWQGRSHGYTF

SEQ ID NO: 434027 - protein, 11 aa, Homo sapiens
  CDR3 for alpha chain variable domain of TCR clone 217014 (TRAV1-2, TRAJ40)
CAVPGTYKYIF

SEQ ID NO: 434028 - protein, 11 aa, Homo sapiens
  CDR3 for beta chain variable domain of TCR clone 217014 (TRBV29-1, TRBJ2-7)
VGTSGSYERYF

SEQ ID NO: 434029 - protein, 14 aa, Homo sapiens
  CDR3 for alpha chain variable domain of TCR clone 217015 (TRAV12-3, TRAJ3)
CNERGNSTASKIIF

SEQ ID NO: 434030 - protein, 16 aa, Homo sapiens
  CDR3 for beta chain variable domain of TCR clone 217015 (TRBV7-9, TRBJ2-1)
CASSLGTGWDYNEQFF

SEQ ID NO: 434031 - protein, 15 aa, Homo sapiens
  CDR3 for alpha chain variable domain of TCR clone 217016 (TRAV21, TRAJ24)
CAARSSTDSWGKLQF

SEQ ID NO: 434032 - protein, 16 aa, Homo sapiens
  CDR3 for beta chain variable domain of TCR clone 217016 (TRBV12-4, TRBJ1-5)
CASRQPVEGSNQPQHF

SEQ ID NO: 434033 - protein, 17 aa, Homo sapiens
  CDR3 for alpha chain variable domain of TCR clone 217017 (TRAV4, TRAJ13)
CLVGVQGSSGGYQKVTF

SEQ ID NO: 434034 - protein, 13 aa, Homo sapiens
  CDR3 for beta chain variable domain of TCR clone 217017 (TRBV10-3, TRBJ2-7)
CASKLAVNYEQYF

SEQ ID NO: 434035 - protein, 20 aa, Homo sapiens
  CDR3 for alpha chain variable domain of TCR clone 217018 (TRAV26-1, TRAJ42)
CCVLLHRQTYYGGSQGNLTF

SEQ ID NO: 434036 - protein, 13 aa, Homo sapiens
  CDR3 for beta chain variable domain of TCR clone 217018 (TRBV7-3, TRBJ1-1)
CASSQDWGAEAFF

SEQ ID NO: 434037 - protein, 13 aa, Homo sapiens
  CDR3 for alpha chain variable domain of TCR clone 217019 (TRAV26-1, TRAJ40)
CIVRVEGTYKYIF

SEQ ID NO: 434038 - protein, 15 aa, Homo sapiens
  CDR3 for beta chain variable domain of TCR clone 217019 (TRBV12-4, TRBJ1-2)
CASSLAHRDCQAYTF

SEQ ID NO: 434039 - protein, 15 aa, Homo sapiens
  CDR3 for alpha chain variable domain of TCR clone 217020 (TRAV1-1, TRAJ4)
CAVRAFSGGYNKLIF

SEQ ID NO: 434040 - protein, 16 aa, Homo sapiens
  CDR3 for beta chain variable domain of TCR clone 217020 (TRBV11-2, TRBJ1-1)
CASSLRQGGEHSKAFF

SEQ ID NO: 434041 - protein, 12 aa, Homo sapiens
  CDR3 for alpha chain variable domain of TCR clone 217021 (TRAV12-3, TRAJ17)
CAMTLTGNKLTF

SEQ ID NO: 434042 - protein, 15 aa, Homo sapiens
  CDR3 for beta chain variable domain of TCR clone 217021 (TRBV19, TRBJ2-1)
FASSILGEGRNEQFF

SEQ ID NO: 434043 - protein, 13 aa, Homo sapiens
  CDR3 for alpha chain variable domain of TCR clone 217022 (TRAV21, TRAJ27)
CAARPVNAGKSTF

SEQ ID NO: 434044 - protein, 13 aa, Homo sapiens
  CDR3 for beta chain variable domain of TCR clone 217022 (TRBV13, TRBJ2-1)
CASILGGRGEQFF

SEQ ID NO: 434045 - protein, 14 aa, Homo sapiens
  CDR3 for alpha chain variable domain of TCR clone 217023 (TRAV16, TRAJ15)
CALSFNQAGTALIF

SEQ ID NO: 434046 - protein, 15 aa, Homo sapiens
  CDR3 for beta chain variable domain of TCR clone 217023 (TRBV2, TRBJ2-5)
CASTRDGGPQETQYF

SEQ ID NO: 434047 - protein, 14 aa, Homo sapiens
  CDR3 for alpha chain variable domain of TCR clone 217024 (TRAV12-2, TRAJ13)
CAVKRTGGYQKVTF

SEQ ID NO: 434048 - protein, 15 aa, Homo sapiens
  CDR3 for beta chain variable domain of TCR clone 217024 (TRBV20-1, TRBJ2-1)
CSARGIGGTYNEQFF

SEQ ID NO: 434049 - protein, 16 aa, Homo sapiens
  CDR3 for alpha chain variable domain of TCR clone 217025 (TRAV12-2, TRAJ32)
CAVNMNYGGATNKLIF

SEQ ID NO: 434050 - protein, 16 aa, Homo sapiens
  CDR3 for beta chain variable domain of TCR clone 217025 (TRBV7-8, TRBJ2-3)
CASSTDGQRETDTQYF

SEQ ID NO: 434051 - protein, 15 aa, Homo sapiens
  CDR3 for alpha chain variable domain of TCR clone 217026 (TRAV23/DV6, TRAJ12)
CAAIDLGAMASSYKL

SEQ ID NO: 434052 - protein, 15 aa, Homo sapiens
  CDR3 for beta chain variable domain of TCR clone 217026 (TRBV12-4, TRBJ2-5)
CASTLNSGRGETQYF

SEQ ID NO: 434053 - protein, 14 aa, Homo sapiens
  CDR3 for alpha chain variable domain of TCR clone 217027 (TRAV8-4, TRAJ39)
CAVSEGNAGNMLTF

SEQ ID NO: 434054 - protein, 17 aa, Homo sapiens
  CDR3 for beta chain variable domain of TCR clone 217027 (TRBV7-6, TRBJ2-5)
CASSPGLADPWGETQYF

SEQ ID NO: 434055 - protein, 13 aa, Homo sapiens
  CDR3 for alpha chain variable domain of TCR clone 217028 (TRAV21, TRAJ27)
CAARPGNAGNSTF

SEQ ID NO: 434056 - protein, 13 aa, Homo sapiens
  CDR3 for beta chain variable domain of TCR clone 217028 (TRBV27, TRBJ1-1)
CASSVSIGAEAFF

SEQ ID NO: 434057 - protein, 13 aa, Homo sapiens
  CDR3 for alpha chain variable domain of TCR clone 217029 (TRAV20, TRAJ49)
CAVQARTGNRFYF

SEQ ID NO: 434058 - protein, 11 aa, Homo sapiens
  CDR3 for beta chain variable domain of TCR clone 217029 (TRBV11-2, TRBJ1-1)
CASSINTEAFF

SEQ ID NO: 434059 - protein, 15 aa, Homo sapiens
  CDR3 for alpha chain variable domain of TCR clone 217030 (TRAV8-3, TRAJ45)
CASSYSGGGADGLPF

SEQ ID NO: 434060 - protein, 13 aa, Homo sapiens
  CDR3 for beta chain variable domain of TCR clone 217030 (TRBV10-3, TRBJ2-7)
CVSKLAVNYEQYF

SEQ ID NO: 434061 - protein, 11 aa, Homo sapiens
  CDR3 for alpha chain variable domain of TCR clone 217031 (TRAV4, TRAJ20)
CLVGDKLTTTS

SEQ ID NO: 434062 - protein, 15 aa, Homo sapiens
  CDR3 for beta chain variable domain of TCR clone 217031 (TRBV18, TRBJ2-7)
CASSPSSTGNYEQYF

SEQ ID NO: 434063 - protein, 15 aa, Homo sapiens
  CDR3 for alpha chain variable domain of TCR clone 217032 (TRAV2, TRAJ24)
CAVVRLKNSWGKLQF

SEQ ID NO: 434064 - protein, 16 aa, Homo sapiens
  CDR3 for beta chain variable domain of TCR clone 217032 (TRBV7-7, TRBJ2-3)
CASSPGTSGSTDTQYL

SEQ ID NO: 434065 - protein, 11 aa, Homo sapiens
  CDR3 for alpha chain variable domain of TCR clone 217033 (TRAV21, TRAJ4)
HVSGGYNKLFF

SEQ ID NO: 434066 - protein, 13 aa, Homo sapiens
  CDR3 for beta chain variable domain of TCR clone 217033 (TRBV7-3, TRBJ2-5)
CASSLTAGETQYF

SEQ ID NO: 434067 - protein, 16 aa, Homo sapiens
  CDR3 for alpha chain variable domain of TCR clone 217034 (TRAV30, TRAJ26)
CGTESVGDNYGQNFAF

SEQ ID NO: 434068 - protein, 13 aa, Homo sapiens
  CDR3 for beta chain variable domain of TCR clone 217034 (TRBV19, TRBJ1-2)
CASSISEVYGYTF

SEQ ID NO: 434069 - protein, 16 aa, Homo sapiens
  CDR3 for alpha chain variable domain of TCR clone 217035 (TRAV3, TRAJ10)
CAVRDMRAGGGNKLTF

SEQ ID NO: 434070 - protein, 14 aa, Homo sapiens
  CDR3 for beta chain variable domain of TCR clone 217035 (TRBV2, TRBJ1-6)
CASSESRNNSPLHF

SEQ ID NO: 434071 - protein, 14 aa, Homo sapiens
  CDR3 for alpha chain variable domain of TCR clone 217036 (TRAV12-3, TRAJ13)
CAMKNSVGYQKVTF

SEQ ID NO: 434072 - protein, 13 aa, Homo sapiens
  CDR3 for beta chain variable domain of TCR clone 217036 (TRBV29-1, TRBJ2-5)
CSARDRVEETQYF

SEQ ID NO: 434073 - protein, 15 aa, Homo sapiens
  CDR3 for alpha chain variable domain of TCR clone 217037 (TRAV14/DV4, TRAJ12)
CAMSEERDSSYKLTV

SEQ ID NO: 434074 - protein, 16 aa, Homo sapiens
  CDR3 for beta chain variable domain of TCR clone 217037 (TRBV11-2, TRBJ1-2)
CASSLDTGGADYGYTF

SEQ ID NO: 434075 - protein, 11 aa, Homo sapiens
  CDR3 for alpha chain variable domain of TCR clone 217038 (TRAV12-1, TRAJ31)
CVGRVQCQTHV

SEQ ID NO: 434076 - protein, 12 aa, Homo sapiens
  CDR3 for beta chain variable domain of TCR clone 217038 (TRBV11-3, TRBJ1-1)
CASSHRQGEAFF

SEQ ID NO: 434077 - protein, 15 aa, Homo sapiens
  CDR3 for alpha chain variable domain of TCR clone 217039 (TRAV38-2/DV8, TRAJ26)
CAYRSRDNYGQNFVF

SEQ ID NO: 434078 - protein, 15 aa, Homo sapiens
  CDR3 for beta chain variable domain of TCR clone 217039 (TRBV5-1, TRBJ2-7)
CASSLGDFTTYEQYF

SEQ ID NO: 434079 - protein, 14 aa, Homo sapiens
  CDR3 for alpha chain variable domain of TCR clone 217040 (TRAV13-2, TRAJ4)
CVEKGPKGYNKLIF

SEQ ID NO: 434080 - protein, 13 aa, Homo sapiens
  CDR3 for beta chain variable domain of TCR clone 217040 (TRBV18, TRBJ2-5)
CASSPPGKETQYF

SEQ ID NO: 434081 - protein, 13 aa, Homo sapiens
  CDR3 for alpha chain variable domain of TCR clone 217041 (TRAV17, TRAJ9)
CATFLTGGFKTIF

SEQ ID NO: 434082 - protein, 13 aa, Homo sapiens
  CDR3 for beta chain variable domain of TCR clone 217041 (TRBV4-1, TRBJ2-1)
CASSQAGGDEQFF

SEQ ID NO: 434083 - protein, 13 aa, Homo sapiens
  CDR3 for alpha chain variable domain of TCR clone 217042 (TRAV12-2, TRAJ42)
CAVKRGSQGNLIF

SEQ ID NO: 434084 - protein, 15 aa, Homo sapiens
  CDR3 for beta chain variable domain of TCR clone 217042 (TRBV7-6, TRBJ2-5)
CASSLAGGTGETQYF

SEQ ID NO: 434085 - protein, 13 aa, Homo sapiens
  CDR3 for alpha chain variable domain of TCR clone 217043 (TRAV13-1, TRAJ11)
CSAVLAGYSTLTF

SEQ ID NO: 434086 - protein, 17 aa, Homo sapiens
  CDR3 for beta chain variable domain of TCR clone 217043 (TRBV25-1, TRBJ2-7)
CASSDARVVFSSYEQYF

SEQ ID NO: 434087 - protein, 15 aa, Homo sapiens
  CDR3 for alpha chain variable domain of TCR clone 217044 (TRAV4, TRAJ12)
CLVVDLMDSSYKLIF

SEQ ID NO: 434088 - protein, 14 aa, Homo sapiens
  CDR3 for beta chain variable domain of TCR clone 217044 (TRBV7-2, TRBJ1-1)
CASSHRQGRTEAFF

SEQ ID NO: 434089 - protein, 14 aa, Homo sapiens
  CDR3 for alpha chain variable domain of TCR clone 217045 (TRAV12-3, TRAJ33)
CAMSAGDSNYQLIW

SEQ ID NO: 434090 - protein, 15 aa, Homo sapiens
  CDR3 for beta chain variable domain of TCR clone 217045 (TRBV7-2, TRBJ1-1)
CASSFAGDRDTEAFF

SEQ ID NO: 434091 - protein, 13 aa, Homo sapiens
  CDR3 for alpha chain variable domain of TCR clone 217046 (TRAV21, TRAJ3)
CCEPYSSASKIIF

SEQ ID NO: 434092 - protein, 15 aa, Homo sapiens
  CDR3 for beta chain variable domain of TCR clone 217046 (TRBV19, TRBJ2-7)
CASSPAGSGEALRYF

SEQ ID NO: 434093 - protein, 12 aa, Homo sapiens
  CDR3 for alpha chain variable domain of TCR clone 217047 (TRAV13-1, TRAJ53)
CAETGVNYKLTF

SEQ ID NO: 434094 - protein, 15 aa, Homo sapiens
  CDR3 for beta chain variable domain of TCR clone 217047 (TRBV7-2, TRBJ2-7)
CASSSVAGQTYEQYF

SEQ ID NO: 434095 - protein, 10 aa, Homo sapiens
  CDR3 for alpha chain variable domain of TCR clone 217048 (TRAV21, TRAJ49)
CAVNGGPVLF

SEQ ID NO: 434096 - protein, 14 aa, Homo sapiens
  CDR3 for beta chain variable domain of TCR clone 217048 (TRBV19, TRBJ2-1)
CASPTFVLSGEQFF

SEQ ID NO: 434097 - protein, 14 aa, Homo sapiens
  CDR3 for alpha chain variable domain of TCR clone 217049 (TRAV26-1, TRAJ15)
CIEAGNQAGTALIF

SEQ ID NO: 434098 - protein, 13 aa, Homo sapiens
  CDR3 for beta chain variable domain of TCR clone 217049 (TRBV12-4, TRBJ2-7)
CASSPTETYEQSF

SEQ ID NO: 434099 - protein, 15 aa, Homo sapiens
  CDR3 for alpha chain variable domain of TCR clone 217050 (TRAV17, TRAJ35)
CATAFVIGFGNVLHC

SEQ ID NO: 434100 - protein, 16 aa, Homo sapiens
  CDR3 for beta chain variable domain of TCR clone 217050 (TRBV11-2, TRBJ2-7)
CASSPIAGGPRYEQYF

SEQ ID NO: 434101 - protein, 15 aa, Homo sapiens
  CDR3 for alpha chain variable domain of TCR clone 217051 (TRAV8-3, TRAJ27)
CAVGPSKTNAGKSTF

SEQ ID NO: 434102 - protein, 15 aa, Homo sapiens
  CDR3 for beta chain variable domain of TCR clone 217051 (TRBV7-8, TRBJ2-7)
CASSLRHFEAYEQYF

SEQ ID NO: 434103 - protein, 14 aa, Homo sapiens
  CDR3 for alpha chain variable domain of TCR clone 217052 (TRAV3, TRAJ9)
CAVRLNTGVFKTIF

SEQ ID NO: 434104 - protein, 16 aa, Homo sapiens
  CDR3 for beta chain variable domain of TCR clone 217052 (TRBV12-5, TRBJ2-5)
CASGPRTSGNQETQYF

SEQ ID NO: 434105 - protein, 20 aa, Homo sapiens
  CDR3 for alpha chain variable domain of TCR clone 217053 (TRAV4, TRAJ29)
CCVLLPRGCVPFSENTPLVF

SEQ ID NO: 434106 - protein, 17 aa, Homo sapiens
  CDR3 for beta chain variable domain of TCR clone 217053 (TRBV25-1, TRBJ2-7)
CASSDARVVFSSYEQYF

SEQ ID NO: 434107 - protein, 12 aa, Homo sapiens
  CDR3 for alpha chain variable domain of TCR clone 217054 (TRAV12-2, TRAJ4)
GWPEGGYNKLIV

SEQ ID NO: 434108 - protein, 16 aa, Homo sapiens
  CDR3 for beta chain variable domain of TCR clone 217054 (TRBV6-1, TRBJ2-5)
CASSETLDRGAETQYF

SEQ ID NO: 434109 - protein, 15 aa, Homo sapiens
  CDR3 for alpha chain variable domain of TCR clone 217055 (TRAV29/DV5, TRAJ24)
CAASGATDSWGKFQF

SEQ ID NO: 434110 - protein, 12 aa, Homo sapiens
  CDR3 for beta chain variable domain of TCR clone 217055 (TRBV14, TRBJ2-7)
CASSRLKGEQYF

SEQ ID NO: 434111 - protein, 16 aa, Homo sapiens
  CDR3 for alpha chain variable domain of TCR clone 217056 (TRAV27, TRAJ53)
CAAPEGSGGSNYKLTF

SEQ ID NO: 434112 - protein, 13 aa, Homo sapiens
  CDR3 for beta chain variable domain of TCR clone 217056 (TRBV11-3, TRBJ1-1)
CASSSNRDTEAFF

SEQ ID NO: 434113 - protein, 12 aa, Homo sapiens
  CDR3 for alpha chain variable domain of TCR clone 217057 (TRAV36/DV7, TRAJ54)
CAVVRGAQKLVF

SEQ ID NO: 434114 - protein, 14 aa, Homo sapiens
  CDR3 for beta chain variable domain of TCR clone 217057 (TRBV6-1, TRBJ2-2)
CASVEHIESGELFF

SEQ ID NO: 434115 - protein, 11 aa, Homo sapiens
  CDR3 for alpha chain variable domain of TCR clone 217058 (TRAV1-1, TRAJ45)
YSGGGADGLTF

SEQ ID NO: 434116 - protein, 15 aa, Homo sapiens
  CDR3 for beta chain variable domain of TCR clone 217058 (TRBV19, TRBJ1-5)
CASSIVWADNQPQHS

SEQ ID NO: 434117 - protein, 15 aa, Homo sapiens
  CDR3 for alpha chain variable domain of TCR clone 217059 (TRAV8-6, TRAJ57)
CAVSLTQGGSEKLVF

SEQ ID NO: 434118 - protein, 15 aa, Homo sapiens
  CDR3 for beta chain variable domain of TCR clone 217059 (TRBV28, TRBJ2-5)
CASSPPWSYQETQYF

SEQ ID NO: 434119 - protein, 11 aa, Homo sapiens
  CDR3 for alpha chain variable domain of TCR clone 217060 (TRAV1-1, TRAJ23)
CAVRQGGKLIF

SEQ ID NO: 434120 - protein, 13 aa, Homo sapiens
  CDR3 for beta chain variable domain of TCR clone 217060 (TRBV4-3, TRBJ2-1)
CASSFWDYNEQFF

SEQ ID NO: 434121 - protein, 14 aa, Homo sapiens
  CDR3 for alpha chain variable domain of TCR clone 217061 (TRAV8-4, TRAJ9)
CAVRINTGGFKTIF

SEQ ID NO: 434122 - protein, 14 aa, Homo sapiens
  CDR3 for beta chain variable domain of TCR clone 217061 (TRBV5-1, TRBJ1-1)
CAGSLQGASTEAFF

SEQ ID NO: 434123 - protein, 14 aa, Homo sapiens
  CDR3 for alpha chain variable domain of TCR clone 217062 (TRAV1-2, TRAJ8)
FAVREDTGFQKLVF

SEQ ID NO: 434124 - protein, 16 aa, Homo sapiens
  CDR3 for beta chain variable domain of TCR clone 217062 (TRBV20-1, TRBJ2-4)
CSARAILAGQGDIQYF

SEQ ID NO: 434125 - protein, 13 aa, Homo sapiens
  CDR3 for alpha chain variable domain of TCR clone 217063 (TRAV21, TRAJ57)
CAVTQGGSEKLVF

SEQ ID NO: 434126 - protein, 13 aa, Homo sapiens
  CDR3 for beta chain variable domain of TCR clone 217063 (TRBV19, TRBJ2-7)
CASSTSGSYEQYF

SEQ ID NO: 434127 - protein, 19 aa, Homo sapiens
  CDR3 for alpha chain variable domain of TCR clone 217064 (TRAV26-1, TRAJ52)
CIVRAHRNAGGTSYVKLTF

SEQ ID NO: 434128 - protein, 15 aa, Homo sapiens
  CDR3 for beta chain variable domain of TCR clone 217064 (TRBV12-4, TRBJ2-5)
CASSPPTGLQETQYF

SEQ ID NO: 434129 - protein, 13 aa, Homo sapiens
  CDR3 for alpha chain variable domain of TCR clone 217065 (TRAV13-2, TRAJ48)
CAEMDFGNERLTF

SEQ ID NO: 434130 - protein, 12 aa, Homo sapiens
  CDR3 for beta chain variable domain of TCR clone 217065 (TRBV11-2, TRBJ2-2)
CASSLGGGELFF

SEQ ID NO: 434131 - protein, 13 aa, Homo sapiens
  CDR3 for alpha chain variable domain of TCR clone 217066 (TRAV3, TRAJ33)
CAVRDRSNYQLIW

SEQ ID NO: 434132 - protein, 16 aa, Homo sapiens
  CDR3 for beta chain variable domain of TCR clone 217066 (TRBV4-2, TRBJ2-7)
CASSQDRGASSYEQYF

SEQ ID NO: 434133 - protein, 17 aa, Homo sapiens
  CDR3 for alpha chain variable domain of TCR clone 217067 (TRAV3, TRAJ42)
CAVRDRDYGGSQGNLIF

SEQ ID NO: 434134 - protein, 17 aa, Homo sapiens
  CDR3 for beta chain variable domain of TCR clone 217067 (TRBV19, TRBJ1-5)
CASSRDRILSRFQPQHF

SEQ ID NO: 434135 - protein, 17 aa, Homo sapiens
  CDR3 for alpha chain variable domain of TCR clone 217068 (TRAV23/DV6, TRAJ3)
CSNHFCFGWSSASKIIF

SEQ ID NO: 434136 - protein, 14 aa, Homo sapiens
  CDR3 for beta chain variable domain of TCR clone 217068 (TRBV19, TRBJ1-6)
CSSTQGAVGSPLHF

SEQ ID NO: 434137 - protein, 15 aa, Homo sapiens
  CDR3 for alpha chain variable domain of TCR clone 217069 (TRAV27, TRAJ38)
CAARRNAGNNRKLIW

SEQ ID NO: 434138 - protein, 13 aa, Homo sapiens
  CDR3 for beta chain variable domain of TCR clone 217069 (TRBV19, TRBJ1-5)
CASSIGGNQPQHF

SEQ ID NO: 434139 - protein, 14 aa, Homo sapiens
  CDR3 for alpha chain variable domain of TCR clone 217070 (TRAV38-1, TRAJ29)
CASITPSGNTPLVF

SEQ ID NO: 434140 - protein, 14 aa, Homo sapiens
  CDR3 for beta chain variable domain of TCR clone 217070 (TRBV24-1, TRBJ1-1)
CATSIPRGDTEAFF

SEQ ID NO: 434141 - protein, 15 aa, Homo sapiens
  CDR3 for alpha chain variable domain of TCR clone 217071 (TRAV23/DV6, TRAJ4)
CAASPLRGGYNKLIV

SEQ ID NO: 434142 - protein, 15 aa, Homo sapiens
  CDR3 for beta chain variable domain of TCR clone 217071 (TRBV7-9, TRBJ1-6)
CASSSPGRGNSPLHF

SEQ ID NO: 434143 - protein, 15 aa, Homo sapiens
  CDR3 for alpha chain variable domain of TCR clone 217072 (TRAV12-2, TRAJ53)
CAVNGGGGSNYKLTF

SEQ ID NO: 434144 - protein, 12 aa, Homo sapiens
  CDR3 for beta chain variable domain of TCR clone 217072 (TRBV7-6, TRBJ2-5)
CASSLTQETQYF

SEQ ID NO: 434145 - protein, 12 aa, Homo sapiens
  CDR3 for alpha chain variable domain of TCR clone 217073 (TRAV12-3, TRAJ17)
CAMTLTGNKLTF

SEQ ID NO: 434146 - protein, 15 aa, Homo sapiens
  CDR3 for beta chain variable domain of TCR clone 217073 (TRBV19, TRBJ2-1)
CASSILGGGRNEQFF

SEQ ID NO: 434147 - protein, 14 aa, Homo sapiens
  CDR3 for alpha chain variable domain of TCR clone 217074 (TRAV1-2, TRAJ8)
CAVREDAGFQKLVF

SEQ ID NO: 434148 - protein, 14 aa, Homo sapiens
  CDR3 for beta chain variable domain of TCR clone 217074 (TRBV11-1, TRBJ2-7)
CASSLEREWGEQYF

SEQ ID NO: 434149 - protein, 15 aa, Homo sapiens
  CDR3 for alpha chain variable domain of TCR clone 217075 (TRAV3, TRAJ7)
CAVRDKDNGNNRLAF

SEQ ID NO: 434150 - protein, 19 aa, Homo sapiens
  CDR3 for beta chain variable domain of TCR clone 217075 (TRBV5-4, TRBJ2-3)
CASSFLGTSGSHRTDTQYF

SEQ ID NO: 434151 - protein, 14 aa, Homo sapiens
  CDR3 for alpha chain variable domain of TCR clone 217076 (TRAV21, TRAJ45)
CAVSSGGGADGLTF

SEQ ID NO: 434152 - protein, 19 aa, Homo sapiens
  CDR3 for beta chain variable domain of TCR clone 217076 (TRBV7-2, TRBJ2-3)
CASSPGLAGGGLTTDTQYF

SEQ ID NO: 434153 - protein, 10 aa, Homo sapiens
  CDR3 for alpha chain variable domain of TCR clone 217077 (TRAV23/DV6, TRAJ4)
CAARDFWSRD

SEQ ID NO: 434154 - protein, 13 aa, Homo sapiens
  CDR3 for beta chain variable domain of TCR clone 217077 (TRBV7-2, TRBJ1-1)
CASSRNTNTEAFV

SEQ ID NO: 434155 - protein, 14 aa, Homo sapiens
  CDR3 for alpha chain variable domain of TCR clone 217078 (TRAV13-1, TRAJ44)
CAAKATGTASKLTF

SEQ ID NO: 434156 - protein, 15 aa, Homo sapiens
  CDR3 for beta chain variable domain of TCR clone 217078 (TRBV5-1, TRBJ2-7)
CASSLDLTSSYEQYF

SEQ ID NO: 434157 - protein, 12 aa, Homo sapiens
  CDR3 for alpha chain variable domain of TCR clone 217079 (TRAV16, TRAJ10)
CSRTGGGNKLNF

SEQ ID NO: 434158 - protein, 14 aa, Homo sapiens
  CDR3 for beta chain variable domain of TCR clone 217079 (TRBV7-2, TRBJ2-7)
CASRSQGAAYEQYF

SEQ ID NO: 434159 - protein, 12 aa, Homo sapiens
  CDR3 for alpha chain variable domain of TCR clone 217080 (TRAV13-1, TRAJ21)
CATTINFNKFYF

SEQ ID NO: 434160 - protein, 14 aa, Homo sapiens
  CDR3 for beta chain variable domain of TCR clone 217080 (TRBV7-2, TRBJ2-7)
CASSPKTSCYEQYF

SEQ ID NO: 434161 - protein, 14 aa, Homo sapiens
  CDR3 for alpha chain variable domain of TCR clone 217081 (TRAV29/DV5, TRAJ36)
CAARRKTGANNLFF

SEQ ID NO: 434162 - protein, 14 aa, Homo sapiens
  CDR3 for beta chain variable domain of TCR clone 217081 (TRBV11-2, TRBJ2-7)
CASGPGQGLYEQYF

SEQ ID NO: 434163 - protein, 12 aa, Homo sapiens
  CDR3 for alpha chain variable domain of TCR clone 217082 (TRAV20, TRAJ24)
CAVYNSWGKLQF

SEQ ID NO: 434164 - protein, 15 aa, Homo sapiens
  CDR3 for beta chain variable domain of TCR clone 217082 (TRBV20-1, TRBJ2-5)
CSARVPPSGRETQFF

SEQ ID NO: 434165 - protein, 12 aa, Homo sapiens
  CDR3 for alpha chain variable domain of TCR clone 217083 (TRAV12-1, TRAJ40)
CVVPSGTYKYIF

SEQ ID NO: 434166 - protein, 15 aa, Homo sapiens
  CDR3 for beta chain variable domain of TCR clone 217083 (TRBV12-4, TRBJ2-1)
CASSPLSGRSNEQFF

SEQ ID NO: 434167 - protein, 14 aa, Homo sapiens
  CDR3 for alpha chain variable domain of TCR clone 217084 (TRAV23/DV6, TRAJ6)
CAASRSGGSYIPTF

SEQ ID NO: 434168 - protein, 17 aa, Homo sapiens
  CDR3 for beta chain variable domain of TCR clone 217084 (TRBV20-1, TRBJ2-1)
CSASASGLAGYYNEQFF

SEQ ID NO: 434169 - protein, 12 aa, Homo sapiens
  CDR3 for alpha chain variable domain of TCR clone 217085 (TRAV1-1, TRAJ30)
CAVRGRDDKIIF

SEQ ID NO: 434170 - protein, 14 aa, Homo sapiens
  CDR3 for beta chain variable domain of TCR clone 217085 (TRBV5-4, TRBJ1-1)
CASSLDSRRDEAFF

SEQ ID NO: 434171 - protein, 11 aa, Homo sapiens
  CDR3 for alpha chain variable domain of TCR clone 217086 (TRAV2, TRAJ13)
CASGGYQKVTF

SEQ ID NO: 434172 - protein, 13 aa, Homo sapiens
  CDR3 for beta chain variable domain of TCR clone 217086 (TRBV7-2, TRBJ2-4)
CASSREHANIQYF

SEQ ID NO: 434173 - protein, 14 aa, Homo sapiens
  CDR3 for alpha chain variable domain of TCR clone 217087 (TRAV8-3, TRAJ4)
CAVGAAGGYNKLIF

SEQ ID NO: 434174 - protein, 11 aa, Homo sapiens
  CDR3 for beta chain variable domain of TCR clone 217087 (TRBV7-8, TRBJ2-7)
CASSLSLEQYF

SEQ ID NO: 434175 - protein, 14 aa, Homo sapiens
  CDR3 for alpha chain variable domain of TCR clone 217088 (TRAV1-2, TRAJ16)
CAVNRFSDGQKLRF

SEQ ID NO: 434176 - protein, 16 aa, Homo sapiens
  CDR3 for beta chain variable domain of TCR clone 217088 (TRBV12-5, TRBJ2-5)
CASGPRTSGTQETQYF

SEQ ID NO: 434177 - protein, 14 aa, Homo sapiens
  CDR3 for alpha chain variable domain of TCR clone 217089 (TRAV12-3, TRAJ10)
SHLPLTGGGNKLTF

SEQ ID NO: 434178 - protein, 13 aa, Homo sapiens
  CDR3 for beta chain variable domain of TCR clone 217089 (TRBV3-1, TRBJ1-2)
CASSQRAPGGYTF

SEQ ID NO: 434179 - protein, 13 aa, Homo sapiens
  CDR3 for alpha chain variable domain of TCR clone 217090 (TRAV3, TRAJ20)
CCEAFCNDYKLRF

SEQ ID NO: 434180 - protein, 13 aa, Homo sapiens
  CDR3 for beta chain variable domain of TCR clone 217090 (TRBV20-1, TRBJ1-1)
CSARGGGNTEAFF

SEQ ID NO: 434181 - protein, 19 aa, Homo sapiens
  CDR3 for alpha chain variable domain of TCR clone 217091 (TRAV8-3, TRAJ8)
LSTSVLWDPMNTGFQKLVF

SEQ ID NO: 434182 - protein, 14 aa, Homo sapiens
  CDR3 for beta chain variable domain of TCR clone 217091 (TRBV25-1, TRBJ1-1)
CASTHLGGNTEAFF

SEQ ID NO: 434183 - protein, 15 aa, Homo sapiens
  CDR3 for alpha chain variable domain of TCR clone 217092 (TRAV3, TRAJ5)
CAVRDLDTGRRALTF

SEQ ID NO: 434184 - protein, 16 aa, Homo sapiens
  CDR3 for beta chain variable domain of TCR clone 217092 (TRBV12-4, TRBJ2-2)
CASSSQVGGPGGELFF

SEQ ID NO: 434185 - protein, 14 aa, Homo sapiens
  CDR3 for alpha chain variable domain of TCR clone 217093 (TRAV3, TRAJ33)
CAVRDMGRNYQLIW

SEQ ID NO: 434186 - protein, 17 aa, Homo sapiens
  CDR3 for beta chain variable domain of TCR clone 217093 (TRBV19, TRBJ2-1)
CASSIWSAQPTHNGQFF

SEQ ID NO: 434187 - protein, 16 aa, Homo sapiens
  CDR3 for alpha chain variable domain of TCR clone 217094 (TRAV12-1, TRAJ43)
CVVNPHRFGAGTRLTV

SEQ ID NO: 434188 - protein, 13 aa, Homo sapiens
  CDR3 for beta chain variable domain of TCR clone 217094 (TRBV7-9, TRBJ2-3)
CASSPGSTDTQYF

SEQ ID NO: 434189 - protein, 13 aa, Homo sapiens
  CDR3 for alpha chain variable domain of TCR clone 217095 (TRAV20, TRAJ34)
CAVRSYNTDMLIF

SEQ ID NO: 434190 - protein, 12 aa, Homo sapiens
  CDR3 for beta chain variable domain of TCR clone 217095 (TRBV11-2, TRBJ2-1)
CASSPGNNEQFF

SEQ ID NO: 434191 - protein, 14 aa, Homo sapiens
  CDR3 for alpha chain variable domain of TCR clone 217096 (TRAV12-3, TRAJ10)
SHLPLTGGGNKLTF

SEQ ID NO: 434192 - protein, 15 aa, Homo sapiens
  CDR3 for beta chain variable domain of TCR clone 217096 (TRBV28, TRBJ2-5)
CASSPPWSYQETQYF

SEQ ID NO: 434193 - protein, 11 aa, Homo sapiens
  CDR3 for alpha chain variable domain of TCR clone 217097 (TRAV2, TRAJ33)
CAVESNYQLIW

SEQ ID NO: 434194 - protein, 17 aa, Homo sapiens
  CDR3 for beta chain variable domain of TCR clone 217097 (TRBV7-9, TRBJ2-3)
CASSLEEAGAYPDTQYF

SEQ ID NO: 434195 - protein, 12 aa, Homo sapiens
  CDR3 for alpha chain variable domain of TCR clone 217098 (TRAV16, TRAJ10)
CSRTGGGSKLTF

SEQ ID NO: 434196 - protein, 15 aa, Homo sapiens
  CDR3 for beta chain variable domain of TCR clone 217098 (TRBV6-3, TRBJ2-7)
CASSSPGTFFYEQYF

SEQ ID NO: 434197 - protein, 14 aa, Homo sapiens
  CDR3 for alpha chain variable domain of TCR clone 217099 (TRAV17, TRAJ22)
CATSPSGSARQLTF

SEQ ID NO: 434198 - protein, 15 aa, Homo sapiens
  CDR3 for beta chain variable domain of TCR clone 217099 (TRBV4-1, TRBJ2-5)
CSSSQWDLYQETQYF

SEQ ID NO: 434199 - protein, 14 aa, Homo sapiens
  CDR3 for alpha chain variable domain of TCR clone 217100 (TRAV26-2, TRAJ11)
CIPRLNSGYSTLTF

SEQ ID NO: 434200 - protein, 13 aa, Homo sapiens
  CDR3 for beta chain variable domain of TCR clone 217100 (TRBV7-3, TRBJ1-1)
CASSQDWGAEAFF

SEQ ID NO: 434201 - protein, 14 aa, Homo sapiens
  CDR3 for alpha chain variable domain of TCR clone 217101 (TRAV12-3, TRAJ10)
SHLPLTGGGNKLTF

SEQ ID NO: 434202 - protein, 14 aa, Homo sapiens
  CDR3 for beta chain variable domain of TCR clone 217101 (TRBV11-2, TRBJ2-1)
CASSPSRQGGGQFF

SEQ ID NO: 434203 - protein, 12 aa, Homo sapiens
  CDR3 for alpha chain variable domain of TCR clone 217102 (TRAV12-1, TRAJ9)
CVVHTGGFKTIF

SEQ ID NO: 434204 - protein, 15 aa, Homo sapiens
  CDR3 for beta chain variable domain of TCR clone 217102 (TRBV9, TRBJ1-6)
CASSVAGTGDSPLHF

SEQ ID NO: 434205 - protein, 14 aa, Homo sapiens
  CDR3 for alpha chain variable domain of TCR clone 217103 (TRAV12-3, TRAJ10)
SHLPLTGGGNKLTF

SEQ ID NO: 434206 - protein, 11 aa, Homo sapiens
  CDR3 for beta chain variable domain of TCR clone 217103 (TRBV7-9, TRBJ2-3)
CASSGPDTQYF

SEQ ID NO: 434207 - protein, 13 aa, Homo sapiens
  CDR3 for alpha chain variable domain of TCR clone 217104 (TRAV12-2, TRAJ10)
CAVPTGGGNKLTF

SEQ ID NO: 434208 - protein, 11 aa, Homo sapiens
  CDR3 for beta chain variable domain of TCR clone 217104 (TRBV12-4, TRBJ2-2)
CACSSAGELFF

SEQ ID NO: 434209 - protein, 15 aa, Homo sapiens
  CDR3 for alpha chain variable domain of TCR clone 217105 (TRAV1-2, TRAJ28)
CAVQYSGAGSYQLTF

SEQ ID NO: 434210 - protein, 16 aa, Homo sapiens
  CDR3 for beta chain variable domain of TCR clone 217105 (TRBV20-1, TRBJ1-4)
CSAPGQGLLTNEKLFF

SEQ ID NO: 434211 - protein, 13 aa, Homo sapiens
  CDR3 for alpha chain variable domain of TCR clone 217106 (TRAV12-3, TRAJ31)
CAMSANNNARLMF

SEQ ID NO: 434212 - protein, 16 aa, Homo sapiens
  CDR3 for beta chain variable domain of TCR clone 217106 (TRBV7-9, TRBJ1-2)
CASSLGFASGEDGYTF

SEQ ID NO: 434213 - protein, 14 aa, Homo sapiens
  CDR3 for alpha chain variable domain of TCR clone 217107 (TRAV1-2, TRAJ8)
CSVREDTGFQKLVF

SEQ ID NO: 434214 - protein, 13 aa, Homo sapiens
  CDR3 for beta chain variable domain of TCR clone 217107 (TRBV28, TRBJ2-2)
CASIRESTGELFF

SEQ ID NO: 434215 - protein, 14 aa, Homo sapiens
  CDR3 for alpha chain variable domain of TCR clone 217108 (TRAV27, TRAJ22)
CAGVVPGSAKQLTF

SEQ ID NO: 434216 - protein, 16 aa, Homo sapiens
  CDR3 for beta chain variable domain of TCR clone 217108 (TRBV9, TRBJ2-7)
CASSVGLGGGTYEQYF

SEQ ID NO: 434217 - protein, 14 aa, Homo sapiens
  CDR3 for alpha chain variable domain of TCR clone 217109 (TRAV12-1, TRAJ17)
CVVNYKAAGNKLTF

SEQ ID NO: 434218 - protein, 17 aa, Homo sapiens
  CDR3 for beta chain variable domain of TCR clone 217109 (TRBV20-1, TRBJ2-1)
GSASSSGRAGSYNEQFF

SEQ ID NO: 434219 - protein, 11 aa, Homo sapiens
  CDR3 for alpha chain variable domain of TCR clone 217110 (TRAV17, TRAJ9)
CATTGGFRTIF

SEQ ID NO: 434220 - protein, 17 aa, Homo sapiens
  CDR3 for beta chain variable domain of TCR clone 217110 (TRBV20-1, TRBJ2-2)
CSASGSGQGGLTGELFF

SEQ ID NO: 434221 - protein, 13 aa, Homo sapiens
  CDR3 for alpha chain variable domain of TCR clone 217111 (TRAV13-1, TRAJ21)
CAASIYNFNKFYF

SEQ ID NO: 434222 - protein, 12 aa, Homo sapiens
  CDR3 for beta chain variable domain of TCR clone 217111 (TRBV2, TRBJ2-7)
CASTYRTDEQYF

SEQ ID NO: 434223 - protein, 15 aa, Homo sapiens
  CDR3 for alpha chain variable domain of TCR clone 217112 (TRAV20, TRAJ43)
CAVQAGKSSNNDMRF

SEQ ID NO: 434224 - protein, 20 aa, Homo sapiens
  CDR3 for beta chain variable domain of TCR clone 217112 (TRBV7-8, TRBJ2-2)
CASSHLFPGPTIHITGELFF

SEQ ID NO: 434225 - protein, 14 aa, Homo sapiens
  CDR3 for alpha chain variable domain of TCR clone 217113 (TRAV12-3, TRAJ42)
CAMNYGGSQGNHIF

SEQ ID NO: 434226 - protein, 15 aa, Homo sapiens
  CDR3 for beta chain variable domain of TCR clone 217113 (TRBV20-1, TRBJ2-7)
CSARDRVSGMDEQYF

SEQ ID NO: 434227 - protein, 15 aa, Homo sapiens
  CDR3 for alpha chain variable domain of TCR clone 217114 (TRAV2, TRAJ15)
CAVEDRGQAGSALIF

SEQ ID NO: 434228 - protein, 15 aa, Homo sapiens
  CDR3 for beta chain variable domain of TCR clone 217114 (TRBV20-1, TRBJ1-5)
CSATSDRGLGQPQHF

SEQ ID NO: 434229 - protein, 16 aa, Homo sapiens
  CDR3 for alpha chain variable domain of TCR clone 217115 (TRAV3, TRAJ37)
CAVRPHGSGNTRKLLF

SEQ ID NO: 434230 - protein, 17 aa, Homo sapiens
  CDR3 for beta chain variable domain of TCR clone 217115 (TRBV5-1, TRBJ2-5)
CASSPVALGQNQETQYF

SEQ ID NO: 434231 - protein, 14 aa, Homo sapiens
  CDR3 for alpha chain variable domain of TCR clone 217116 (TRAV12-2, TRAJ13)
CAVKKTGGYQKVTF

SEQ ID NO: 434232 - protein, 16 aa, Homo sapiens
  CDR3 for beta chain variable domain of TCR clone 217116 (TRBV2, TRBJ1-5)
CASSESPQGLNQPQHF

SEQ ID NO: 434233 - protein, 14 aa, Homo sapiens
  CDR3 for alpha chain variable domain of TCR clone 217117 (TRAV1-2, TRAJ16)
CAVNRFSDGQKLLF

SEQ ID NO: 434234 - protein, 16 aa, Homo sapiens
  CDR3 for beta chain variable domain of TCR clone 217117 (TRBV12-4, TRBJ2-5)
CASSVFVRGRQEAQYF

SEQ ID NO: 434235 - protein, 14 aa, Homo sapiens
  CDR3 for alpha chain variable domain of TCR clone 217118 (TRAV26-1, TRAJ38)
CIADNAGNNRKLIW

SEQ ID NO: 434236 - protein, 11 aa, Homo sapiens
  CDR3 for beta chain variable domain of TCR clone 217118 (TRBV2, TRBJ1-1)
CASREGTQAFF

SEQ ID NO: 434237 - protein, 13 aa, Homo sapiens
  CDR3 for alpha chain variable domain of TCR clone 217119 (TRAV12-3, TRAJ33)
CAMSVNSNYQLIW

SEQ ID NO: 434238 - protein, 12 aa, Homo sapiens
  CDR3 for beta chain variable domain of TCR clone 217119 (TRBV12-4, TRBJ2-7)
CASNPGGGEQYF

SEQ ID NO: 434239 - protein, 15 aa, Homo sapiens
  CDR3 for alpha chain variable domain of TCR clone 217120 (TRAV17, TRAJ40)
CATVSSTSGTYKYIF

SEQ ID NO: 434240 - protein, 17 aa, Homo sapiens
  CDR3 for beta chain variable domain of TCR clone 217120 (TRBV11-2, TRBJ2-1)
CASSLYPPGVEYNEQFF

SEQ ID NO: 434241 - protein, 16 aa, Homo sapiens
  CDR3 for alpha chain variable domain of TCR clone 217121 (TRAV23/DV6, TRAJ9)
CAASIGGNTGGFKTIF

SEQ ID NO: 434242 - protein, 13 aa, Homo sapiens
  CDR3 for beta chain variable domain of TCR clone 217121 (TRBV7-9, TRBJ2-7)
CASSFAGAYEQYF

SEQ ID NO: 434243 - protein, 15 aa, Homo sapiens
  CDR3 for alpha chain variable domain of TCR clone 217122 (TRAV3, TRAJ5)
CAVRDRKTGRRALTF

SEQ ID NO: 434244 - protein, 13 aa, Homo sapiens
  CDR3 for beta chain variable domain of TCR clone 217122 (TRBV4-3, TRBJ2-3)
CASSQGTGDTQYF

SEQ ID NO: 434245 - protein, 12 aa, Homo sapiens
  CDR3 for alpha chain variable domain of TCR clone 217123 (TRAV26-1, TRAJ13)
CIVSRGYRKVTF

SEQ ID NO: 434246 - protein, 16 aa, Homo sapiens
  CDR3 for beta chain variable domain of TCR clone 217123 (TRBV27, TRBJ2-1)
CASSLSKGFGLDEQFF

SEQ ID NO: 434247 - protein, 15 aa, Homo sapiens
  CDR3 for alpha chain variable domain of TCR clone 217124 (TRAV12-2, TRAJ43)
CSFDMRLGAGTRLTV

SEQ ID NO: 434248 - protein, 18 aa, Homo sapiens
  CDR3 for beta chain variable domain of TCR clone 217124 (TRBV20-1, TRBJ2-3)
CSASGLAGGPGTTDTQYF

SEQ ID NO: 434249 - protein, 16 aa, Homo sapiens
  CDR3 for alpha chain variable domain of TCR clone 217125 (TRAV12-1, TRAJ21)
WVVLSGYFGSGTKLNV

SEQ ID NO: 434250 - protein, 13 aa, Homo sapiens
  CDR3 for beta chain variable domain of TCR clone 217125 (TRBV7-3, TRBJ1-1)
CASSQDWGAEAFF

SEQ ID NO: 434251 - protein, 15 aa, Homo sapiens
  CDR3 for alpha chain variable domain of TCR clone 217126 (TRAV2, TRAJ15)
CAVEDRGQAGTALIF

SEQ ID NO: 434252 - protein, 11 aa, Homo sapiens
  CDR3 for beta chain variable domain of TCR clone 217126 (TRBV23-1, TRBJ2-1)
KTSANYNEQFF

SEQ ID NO: 434253 - protein, 11 aa, Homo sapiens
  CDR3 for alpha chain variable domain of TCR clone 217127 (TRAV35, TRAJ30)
CAGPGDDKIIF

SEQ ID NO: 434254 - protein, 18 aa, Homo sapiens
  CDR3 for beta chain variable domain of TCR clone 217127 (TRBV7-6, TRBJ2-1)
CASSPRTSRMSSYNEQFF

SEQ ID NO: 434255 - protein, 18 aa, Homo sapiens
  CDR3 for alpha chain variable domain of TCR clone 217128 (TRAV21, TRAJ52)
CAVRPSPAGGTSYGQLTF

SEQ ID NO: 434256 - protein, 16 aa, Homo sapiens
  CDR3 for beta chain variable domain of TCR clone 217128 (TRBV19, TRBJ2-1)
CASSKAGPSSYNEQFF

SEQ ID NO: 434257 - protein, 16 aa, Homo sapiens
  CDR3 for alpha chain variable domain of TCR clone 217129 (TRAV3, TRAJ10)
CAVRDMRAGGGNKLTF

SEQ ID NO: 434258 - protein, 13 aa, Homo sapiens
  CDR3 for beta chain variable domain of TCR clone 217129 (TRBV2, TRBJ2-7)
CASSGGQANEQYF

SEQ ID NO: 434259 - protein, 13 aa, Homo sapiens
  CDR3 for alpha chain variable domain of TCR clone 217130 (TRAV20, TRAJ20)
CAVQAGSGYNLSF

SEQ ID NO: 434260 - protein, 13 aa, Homo sapiens
  CDR3 for beta chain variable domain of TCR clone 217130 (TRBV3-1, TRBJ2-3)
CASSQGGGDTQYF

SEQ ID NO: 434261 - protein, 12 aa, Homo sapiens
  CDR3 for alpha chain variable domain of TCR clone 217131 (TRAV13-1, TRAJ15)
CAASQTGTALIF

SEQ ID NO: 434262 - protein, 18 aa, Homo sapiens
  CDR3 for beta chain variable domain of TCR clone 217131 (TRBV7-9, TRBJ2-3)
CASSLPINGQISTDTQYF

SEQ ID NO: 434263 - protein, 16 aa, Homo sapiens
  CDR3 for alpha chain variable domain of TCR clone 217132 (TRAV3, TRAJ37)
CDGRGKGSGNTGKLIF

SEQ ID NO: 434264 - protein, 20 aa, Homo sapiens
  CDR3 for beta chain variable domain of TCR clone 217132 (TRBV7-8, TRBJ2-2)
CASSHLFPGPTIHITGELFF

SEQ ID NO: 434265 - protein, 18 aa, Homo sapiens
  CDR3 for alpha chain variable domain of TCR clone 217133 (TRAV26-2, TRAJ45)
CILRLWGYSGGGADGLTF

SEQ ID NO: 434266 - protein, 17 aa, Homo sapiens
  CDR3 for beta chain variable domain of TCR clone 217133 (TRBV28, TRBJ2-3)
CASSPTPAGWRVDTQYF

SEQ ID NO: 434267 - protein, 15 aa, Homo sapiens
  CDR3 for alpha chain variable domain of TCR clone 217134 (TRAV8-4, TRAJ3)
CAVTGENLEQQCFQD

SEQ ID NO: 434268 - protein, 16 aa, Homo sapiens
  CDR3 for beta chain variable domain of TCR clone 217134 (TRBV4-2, TRBJ1-1)
CASSQAGFGMNTEAFF

SEQ ID NO: 434269 - protein, 15 aa, Homo sapiens
  CDR3 for alpha chain variable domain of TCR clone 217135 (TRAV13-1, TRAJ50)
CAAKGSETSYDRVIV

SEQ ID NO: 434270 - protein, 13 aa, Homo sapiens
  CDR3 for beta chain variable domain of TCR clone 217135 (TRBV20-1, TRBJ2-3)
CSARAGGRDTQYF

SEQ ID NO: 434271 - protein, 15 aa, Homo sapiens
  CDR3 for alpha chain variable domain of TCR clone 217136 (TRAV23/DV6, TRAJ18)
CAAGYRGSTLGRLYF

SEQ ID NO: 434272 - protein, 13 aa, Homo sapiens
  CDR3 for beta chain variable domain of TCR clone 217136 (TRBV7-9, TRBJ1-2)
CASSLKQNYGYTF

SEQ ID NO: 434273 - protein, 11 aa, Homo sapiens
  CDR3 for alpha chain variable domain of TCR clone 217137 (TRAV12-3, TRAJ17)
CNDAYRNKLTF

SEQ ID NO: 434274 - protein, 14 aa, Homo sapiens
  CDR3 for beta chain variable domain of TCR clone 217137 (TRBV19, TRBJ2-1)
CASPTFVLSGEQFF

SEQ ID NO: 434275 - protein, 15 aa, Homo sapiens
  CDR3 for alpha chain variable domain of TCR clone 217138 (TRAV20, TRAJ4)
SVLRRASGGYNKLIF

SEQ ID NO: 434276 - protein, 18 aa, Homo sapiens
  CDR3 for beta chain variable domain of TCR clone 217138 (TRBV19, TRBJ1-5)
CASSKGQVSIHSNQPQHF

SEQ ID NO: 434277 - protein, 13 aa, Homo sapiens
  CDR3 for alpha chain variable domain of TCR clone 217139 (TRAV36/DV7, TRAJ38)
CVANDGNNRKLIW

SEQ ID NO: 434278 - protein, 14 aa, Homo sapiens
  CDR3 for beta chain variable domain of TCR clone 217139 (TRBV7-2, TRBJ2-7)
CASSLRWEVNEQYF

SEQ ID NO: 434279 - protein, 12 aa, Homo sapiens
  CDR3 for alpha chain variable domain of TCR clone 217140 (TRAV21, TRAJ23)
CAVMLQGGKLIF

SEQ ID NO: 434280 - protein, 15 aa, Homo sapiens
  CDR3 for beta chain variable domain of TCR clone 217140 (TRBV7-3, TRBJ2-1)
CASSPTGGGEVEQFF

SEQ ID NO: 434281 - protein, 18 aa, Homo sapiens
  CDR3 for alpha chain variable domain of TCR clone 217141 (TRAV13-1, TRAJ52)
CAAKKPNAGGTSYGKLTF

SEQ ID NO: 434282 - protein, 14 aa, Homo sapiens
  CDR3 for beta chain variable domain of TCR clone 217141 (TRBV6-5, TRBJ1-1)
CASSFGQGLTEAFF

SEQ ID NO: 434283 - protein, 15 aa, Homo sapiens
  CDR3 for alpha chain variable domain of TCR clone 217142 (TRAV17, TRAJ57)
CATGPSQGGSEKLVF

SEQ ID NO: 434284 - protein, 17 aa, Homo sapiens
  CDR3 for beta chain variable domain of TCR clone 217142 (TRBV4-1, TRBJ2-1)
CASSQGRGGGLYNEQFF

SEQ ID NO: 434285 - protein, 15 aa, Homo sapiens
  CDR3 for alpha chain variable domain of TCR clone 217143 (TRAV17, TRAJ23)
CATDAEDNQGGKLIF

SEQ ID NO: 434286 - protein, 15 aa, Homo sapiens
  CDR3 for beta chain variable domain of TCR clone 217143 (TRBV2, TRBJ2-1)
CATLPSGLPYNEQFF

SEQ ID NO: 434287 - protein, 14 aa, Homo sapiens
  CDR3 for alpha chain variable domain of TCR clone 217144 (TRAV12-1, TRAJ43)
CVANGRSNNNDMRF

SEQ ID NO: 434288 - protein, 10 aa, Homo sapiens
  CDR3 for beta chain variable domain of TCR clone 217144 (TRBV28, TRBJ2-5)
CQKSSWTQYF

SEQ ID NO: 434289 - protein, 14 aa, Homo sapiens
  CDR3 for alpha chain variable domain of TCR clone 217145 (TRAV14/DV4, TRAJ11)
CAMRETSGYSTLTF

SEQ ID NO: 434290 - protein, 15 aa, Homo sapiens
  CDR3 for beta chain variable domain of TCR clone 217145 (TRBV20-1, TRBJ2-7)
CSARDRVSGMDEQYF

SEQ ID NO: 434291 - protein, 12 aa, Homo sapiens
  CDR3 for alpha chain variable domain of TCR clone 217146 (TRAV13-2, TRAJ23)
CAERHRGGKLIF

SEQ ID NO: 434292 - protein, 16 aa, Homo sapiens
  CDR3 for beta chain variable domain of TCR clone 217146 (TRBV4-1, TRBJ2-5)
CASSHADRAGWETQYF

SEQ ID NO: 434293 - protein, 14 aa, Homo sapiens
  CDR3 for alpha chain variable domain of TCR clone 217147 (TRAV12-1, TRAJ9)
CVVTGSTGGFKTIF

SEQ ID NO: 434294 - protein, 12 aa, Homo sapiens
  CDR3 for beta chain variable domain of TCR clone 217147 (TRBV7-8, TRBJ2-1)
CASSLGHNEQFF

SEQ ID NO: 434295 - protein, 11 aa, Homo sapiens
  CDR3 for alpha chain variable domain of TCR clone 217148 (TRAV12-1, TRAJ34)
CVVNKGRELIF

SEQ ID NO: 434296 - protein, 19 aa, Homo sapiens
  CDR3 for beta chain variable domain of TCR clone 217148 (TRBV7-2, TRBJ2-3)
CASSPGLAGGGLTTDTQYF

SEQ ID NO: 434297 - protein, 15 aa, Homo sapiens
  CDR3 for alpha chain variable domain of TCR clone 217149 (TRAV25, TRAJ53)
CAATGGGGSNYRLKF

SEQ ID NO: 434298 - protein, 19 aa, Homo sapiens
  CDR3 for beta chain variable domain of TCR clone 217149 (TRBV7-2, TRBJ2-3)
CASSFLSRNWGGGTDTQYF

SEQ ID NO: 434299 - protein, 16 aa, Homo sapiens
  CDR3 for alpha chain variable domain of TCR clone 217150 (TRAV30, TRAJ24)
CGTEIVDADSWGKFQF

SEQ ID NO: 434300 - protein, 16 aa, Homo sapiens
  CDR3 for beta chain variable domain of TCR clone 217150 (TRBV2, TRBJ1-3)
CASSGGAGRSGNTIYV

SEQ ID NO: 434301 - protein, 13 aa, Homo sapiens
  CDR3 for alpha chain variable domain of TCR clone 217151 (TRAV21, TRAJ26)
CAVLDNDGQNFVF

SEQ ID NO: 434302 - protein, 16 aa, Homo sapiens
  CDR3 for beta chain variable domain of TCR clone 217151 (TRBV29-1, TRBJ2-2)
CSVETRASGNTGELFF

SEQ ID NO: 434303 - protein, 14 aa, Homo sapiens
  CDR3 for alpha chain variable domain of TCR clone 217152 (TRAV16, TRAJ17)
CAPRIKAAGNKLTF

SEQ ID NO: 434304 - protein, 14 aa, Homo sapiens
  CDR3 for beta chain variable domain of TCR clone 217152 (TRBV2, TRBJ2-1)
CASSEALIYNEQFF

SEQ ID NO: 434305 - protein, 14 aa, Homo sapiens
  CDR3 for alpha chain variable domain of TCR clone 217153 (TRAV1-2, TRAJ8)
CAVREDTGFQKLVF

SEQ ID NO: 434306 - protein, 14 aa, Homo sapiens
  CDR3 for beta chain variable domain of TCR clone 217153 (TRBV7-2, TRBJ2-7)
CASRSQGAAYEQDF

SEQ ID NO: 434307 - protein, 16 aa, Homo sapiens
  CDR3 for alpha chain variable domain of TCR clone 217154 (TRAV30, TRAJ24)
CGTEIVDADSWGKFQC

SEQ ID NO: 434308 - protein, 15 aa, Homo sapiens
  CDR3 for beta chain variable domain of TCR clone 217154 (TRBV20-1, TRBJ2-7)
CSARDRVSGMDEQYF

SEQ ID NO: 434309 - protein, 11 aa, Homo sapiens
  CDR3 for alpha chain variable domain of TCR clone 217155 (TRAV21, TRAJ34)
CAPDNTDKLIF

SEQ ID NO: 434310 - protein, 14 aa, Homo sapiens
  CDR3 for beta chain variable domain of TCR clone 217155 (TRBV7-3, TRBJ2-1)
CASSLGTSANEQFF

SEQ ID NO: 434311 - protein, 23 aa, Homo sapiens
  CDR3 for alpha chain variable domain of TCR clone 217156 (TRAV8-3, )
CAVGASNACNNDIQNPDPAVYQL

SEQ ID NO: 434312 - protein, 15 aa, Homo sapiens
  CDR3 for beta chain variable domain of TCR clone 217156 (TRBV11-3, TRBJ1-3)
CASSLFGPSGNTIYF

SEQ ID NO: 434313 - protein, 14 aa, Homo sapiens
  CDR3 for alpha chain variable domain of TCR clone 217157 (TRAV12-2, TRAJ45)
CAVNIGGGADGLTF

SEQ ID NO: 434314 - protein, 14 aa, Homo sapiens
  CDR3 for beta chain variable domain of TCR clone 217157 (TRBV9, TRBJ1-3)
CASSVVGDGNTIYF

SEQ ID NO: 434315 - protein, 14 aa, Homo sapiens
  CDR3 for alpha chain variable domain of TCR clone 217158 (TRAV2, TRAJ39)
CSVEGDNAGNMLTF

SEQ ID NO: 434316 - protein, 14 aa, Homo sapiens
  CDR3 for beta chain variable domain of TCR clone 217158 (TRBV28, TRBJ2-7)
CASSLRARGNEQYF

SEQ ID NO: 434317 - protein, 14 aa, Homo sapiens
  CDR3 for alpha chain variable domain of TCR clone 217159 (TRAV1-2, TRAJ16)
CAVNRFSDGQKLFF

SEQ ID NO: 434318 - protein, 16 aa, Homo sapiens
  CDR3 for beta chain variable domain of TCR clone 217159 (TRBV20-1, TRBJ1-4)
CSAPGQGLLTNEKLFF

SEQ ID NO: 434319 - protein, 13 aa, Homo sapiens
  CDR3 for alpha chain variable domain of TCR clone 217160 (TRAV27, TRAJ3)
ASLRGSSASKIIF

SEQ ID NO: 434320 - protein, 13 aa, Homo sapiens
  CDR3 for beta chain variable domain of TCR clone 217160 (TRBV3-1, TRBJ2-2)
CASLARGSGELFF

SEQ ID NO: 434321 - protein, 12 aa, Homo sapiens
  CDR3 for alpha chain variable domain of TCR clone 217161 (TRAV27, TRAJ9)
CAGESGGFKAIF

SEQ ID NO: 434322 - protein, 14 aa, Homo sapiens
  CDR3 for beta chain variable domain of TCR clone 217161 (TRBV6-1, TRBJ2-1)
CASAKDGFYNEQFF

SEQ ID NO: 434323 - protein, 14 aa, Homo sapiens
  CDR3 for alpha chain variable domain of TCR clone 217162 (TRAV12-1, TRAJ9)
CVVTGDTGGLKTIF

SEQ ID NO: 434324 - protein, 16 aa, Homo sapiens
  CDR3 for beta chain variable domain of TCR clone 217162 (TRBV29-1, TRBJ1-2)
CSVEANRDIANYGYTF

SEQ ID NO: 434325 - protein, 16 aa, Homo sapiens
  CDR3 for alpha chain variable domain of TCR clone 217163 (TRAV14/DV4, TRAJ15)
CAMREGPAQAGTALIF

SEQ ID NO: 434326 - protein, 12 aa, Homo sapiens
  CDR3 for beta chain variable domain of TCR clone 217163 (TRBV28, TRBJ2-6)
CAIQAGANVLPF

SEQ ID NO: 434327 - protein, 13 aa, Homo sapiens
  CDR3 for alpha chain variable domain of TCR clone 217164 (TRAV12-1, TRAJ40)
CVVTTSGTYKYIF

SEQ ID NO: 434328 - protein, 18 aa, Homo sapiens
  CDR3 for beta chain variable domain of TCR clone 217164 (TRBV7-6, TRBJ2-1)
CASSPRTSGMSSYNEQFF

SEQ ID NO: 434329 - protein, 14 aa, Homo sapiens
  CDR3 for alpha chain variable domain of TCR clone 217165 (TRAV3, TRAJ21)
CAVESQASFNKFYF

SEQ ID NO: 434330 - protein, 18 aa, Homo sapiens
  CDR3 for beta chain variable domain of TCR clone 217165 (TRBV7-9, TRBJ2-1)
CASSLAVSGTSGRNEQFF

SEQ ID NO: 434331 - protein, 14 aa, Homo sapiens
  CDR3 for alpha chain variable domain of TCR clone 217166 (TRAV4, TRAJ9)
CLVGSGTGGFKTIF

SEQ ID NO: 434332 - protein, 14 aa, Homo sapiens
  CDR3 for beta chain variable domain of TCR clone 217166 (TRBV7-9, TRBJ2-4)
CASSLAMGGNNQYF

SEQ ID NO: 434333 - protein, 13 aa, Homo sapiens
  CDR3 for alpha chain variable domain of TCR clone 217167 (TRAV13-2, TRAJ13)
CAERPGGYQKVAF

SEQ ID NO: 434334 - protein, 17 aa, Homo sapiens
  CDR3 for beta chain variable domain of TCR clone 217167 (TRBV20-1, TRBJ2-2)
CSASGSGQGGLTGELFF

SEQ ID NO: 434335 - protein, 12 aa, Homo sapiens
  CDR3 for alpha chain variable domain of TCR clone 217168 (TRAV36/DV7, TRAJ26)
CAVDNYGQNFVF

SEQ ID NO: 434336 - protein, 11 aa, Homo sapiens
  CDR3 for beta chain variable domain of TCR clone 217168 (TRBV11-2, TRBJ2-2)
CASSLPGELFF

SEQ ID NO: 434337 - protein, 13 aa, Homo sapiens
  CDR3 for alpha chain variable domain of TCR clone 217169 (TRAV21, TRAJ27)
CAARPGNAGKSTF

SEQ ID NO: 434338 - protein, 15 aa, Homo sapiens
  CDR3 for beta chain variable domain of TCR clone 217169 (TRBV6-1, TRBJ2-2)
CASSAGQGYTGELFF

SEQ ID NO: 434339 - protein, 12 aa, Homo sapiens
  CDR3 for alpha chain variable domain of TCR clone 217170 (TRAV12-3, TRAJ3)
CAINSSASKIIF

SEQ ID NO: 434340 - protein, 17 aa, Homo sapiens
  CDR3 for beta chain variable domain of TCR clone 217170 (TRBV7-9, TRBJ2-3)
CASSLEEAGAYPDTQYF

SEQ ID NO: 434341 - protein, 13 aa, Homo sapiens
  CDR3 for alpha chain variable domain of TCR clone 217171 (TRAV29/DV5, TRAJ31)
CAASRNNDSRLMF

SEQ ID NO: 434342 - protein, 12 aa, Homo sapiens
  CDR3 for beta chain variable domain of TCR clone 217171 (TRBV14, TRBJ2-7)
CASSLYKDEQYF

SEQ ID NO: 434343 - protein, 13 aa, Homo sapiens
  CDR3 for alpha chain variable domain of TCR clone 217172 (TRAV35, TRAJ27)
CAGQEGDAGKSTF

SEQ ID NO: 434344 - protein, 16 aa, Homo sapiens
  CDR3 for beta chain variable domain of TCR clone 217172 (TRBV7-2, TRBJ2-5)
CAGSYMTGISLETQYF

SEQ ID NO: 434345 - protein, 17 aa, Homo sapiens
  CDR3 for alpha chain variable domain of TCR clone 217173 (TRAV9-2, TRAJ45)
CALSGYYSGGGADGLTF

SEQ ID NO: 434346 - protein, 13 aa, Homo sapiens
  CDR3 for beta chain variable domain of TCR clone 217173 (TRBV4-1, TRBJ2-2)
CASSQENTGELFF

SEQ ID NO: 434347 - protein, 12 aa, Homo sapiens
  CDR3 for alpha chain variable domain of TCR clone 217174 (TRAV25, TRAJ35)
CAGIGFGNVLHC

SEQ ID NO: 434348 - protein, 12 aa, Homo sapiens
  CDR3 for beta chain variable domain of TCR clone 217174 (TRBV6-3, TRBJ2-7)
CASSRQGYEQDF

SEQ ID NO: 434349 - protein, 13 aa, Homo sapiens
  CDR3 for alpha chain variable domain of TCR clone 217175 (TRAV13-2, TRAJ54)
CAESGSGAQKLVF

SEQ ID NO: 434350 - protein, 15 aa, Homo sapiens
  CDR3 for beta chain variable domain of TCR clone 217175 (TRBV20-1, TRBJ2-7)
CSAESGTSGAYEQYF

SEQ ID NO: 434351 - protein, 13 aa, Homo sapiens
  CDR3 for alpha chain variable domain of TCR clone 217176 (TRAV13-2, TRAJ40)
CAEFTSGTYKYIF

SEQ ID NO: 434352 - protein, 14 aa, Homo sapiens
  CDR3 for beta chain variable domain of TCR clone 217176 (TRBV10-2, TRBJ1-5)
CASSSTGRTQPQHF

SEQ ID NO: 434353 - protein, 15 aa, Homo sapiens
  CDR3 for alpha chain variable domain of TCR clone 217177 (TRAV3, TRAJ3)
CAVRDMSSSASKTIF

SEQ ID NO: 434354 - protein, 14 aa, Homo sapiens
  CDR3 for beta chain variable domain of TCR clone 217177 (TRBV19, TRBJ2-1)
CASPTFVLSGEQFF

SEQ ID NO: 434355 - protein, 16 aa, Homo sapiens
  CDR3 for alpha chain variable domain of TCR clone 217178 (TRAV8-6, TRAJ53)
CAVRENSGGSNYKLTF

SEQ ID NO: 434356 - protein, 11 aa, Homo sapiens
  CDR3 for beta chain variable domain of TCR clone 217178 (TRBV12-4, TRBJ2-3)
CASTATDTQYF

SEQ ID NO: 434357 - protein, 12 aa, Homo sapiens
  CDR3 for alpha chain variable domain of TCR clone 217179 (TRAV12-3, TRAJ17)
CAMTLTGNKLTF

SEQ ID NO: 434358 - protein, 15 aa, Homo sapiens
  CDR3 for beta chain variable domain of TCR clone 217179 (TRBV7-9, TRBJ1-6)
CARSSPGRGNSPLHF

SEQ ID NO: 434359 - protein, 12 aa, Homo sapiens
  CDR3 for alpha chain variable domain of TCR clone 217180 (TRAV12-3, TRAJ17)
CAMTLTGNKLTF

SEQ ID NO: 434360 - protein, 15 aa, Homo sapiens
  CDR3 for beta chain variable domain of TCR clone 217180 (TRBV20-1, TRBJ2-7)
SSARDRVSGMDERYF

SEQ ID NO: 434361 - protein, 17 aa, Homo sapiens
  CDR3 for alpha chain variable domain of TCR clone 217181 (TRAV3, TRAJ6)
CAVIDGPRAGGSHIPTF

SEQ ID NO: 434362 - protein, 14 aa, Homo sapiens
  CDR3 for beta chain variable domain of TCR clone 217181 (TRBV7-2, TRBJ2-7)
CASSPKTSFYEQYF

SEQ ID NO: 434363 - protein, 14 aa, Homo sapiens
  CDR3 for alpha chain variable domain of TCR clone 217182 (TRAV17, TRAJ37)
CATDGSSNTGKLIF

SEQ ID NO: 434364 - protein, 12 aa, Homo sapiens
  CDR3 for beta chain variable domain of TCR clone 217182 (TRBV12-4, TRBJ2-1)
CASSLVRVEQFF

SEQ ID NO: 434365 - protein, 15 aa, Homo sapiens
  CDR3 for alpha chain variable domain of TCR clone 217183 (TRAV36/DV7, TRAJ42)
CAVEWYGGSQGNLIF

SEQ ID NO: 434366 - protein, 15 aa, Homo sapiens
  CDR3 for beta chain variable domain of TCR clone 217183 (TRBV2, TRBJ2-1)
CASSELAGSYNEQFF

SEQ ID NO: 434367 - protein, 14 aa, Homo sapiens
  CDR3 for alpha chain variable domain of TCR clone 217184 (TRAV35, TRAJ13)
CAGRSPGGYQKVTF

SEQ ID NO: 434368 - protein, 14 aa, Homo sapiens
  CDR3 for beta chain variable domain of TCR clone 217184 (TRBV19, TRBJ2-2)
CASRMVGLSGELFF

SEQ ID NO: 434369 - protein, 14 aa, Homo sapiens
  CDR3 for alpha chain variable domain of TCR clone 217185 (TRAV12-1, TRAJ30)
CVVNIGGRDDKIIF

SEQ ID NO: 434370 - protein, 15 aa, Homo sapiens
  CDR3 for beta chain variable domain of TCR clone 217185 (TRBV2, TRBJ2-7)
CASTLLGSGATEQYF

SEQ ID NO: 434371 - protein, 12 aa, Homo sapiens
  CDR3 for alpha chain variable domain of TCR clone 217186 (TRAV13-1, TRAJ49)
CAASIRSNQFYF

SEQ ID NO: 434372 - protein, 14 aa, Homo sapiens
  CDR3 for beta chain variable domain of TCR clone 217186 (TRBV7-2, TRBJ2-1)
CASSPGLAGNEQCF

SEQ ID NO: 434373 - protein, 14 aa, Homo sapiens
  CDR3 for alpha chain variable domain of TCR clone 217187 (TRAV1-1, TRAJ23)
CAVSIYNQGGKLIF

SEQ ID NO: 434374 - protein, 20 aa, Homo sapiens
  CDR3 for beta chain variable domain of TCR clone 217187 (TRBV6-4, TRBJ2-7)
CASRDSSVSGQVPTSYEQYF

SEQ ID NO: 434375 - protein, 19 aa, Homo sapiens
  CDR3 for alpha chain variable domain of TCR clone 217188 (TRAV4, TRAJ29)
CVLLPRGCVPFSGNTPLVF

SEQ ID NO: 434376 - protein, 12 aa, Homo sapiens
  CDR3 for beta chain variable domain of TCR clone 217188 (TRBV6-1, TRBJ2-7)
CASSDYSYEQYF

SEQ ID NO: 434377 - protein, 13 aa, Homo sapiens
  CDR3 for alpha chain variable domain of TCR clone 217189 (TRAV3, TRAJ27)
CAVRPLGAGKSTF

SEQ ID NO: 434378 - protein, 14 aa, Homo sapiens
  CDR3 for beta chain variable domain of TCR clone 217189 (TRBV11-2, TRBJ1-2)
CASSLGTANYGDTF

SEQ ID NO: 434379 - protein, 15 aa, Homo sapiens
  CDR3 for alpha chain variable domain of TCR clone 217190 (TRAV17, TRAJ57)
CATGPSQGGSEKLVF

SEQ ID NO: 434380 - protein, 14 aa, Homo sapiens
  CDR3 for beta chain variable domain of TCR clone 217190 (TRBV7-3, TRBJ2-3)
CASSPSARTDTQYF

SEQ ID NO: 434381 - protein, 13 aa, Homo sapiens
  CDR3 for alpha chain variable domain of TCR clone 217191 (TRAV1-2, TRAJ9)
CAVLNTGGFKTIF

SEQ ID NO: 434382 - protein, 17 aa, Homo sapiens
  CDR3 for beta chain variable domain of TCR clone 217191 (TRBV5-6, TRBJ2-1)
CASSSCWGLAGRNEQFF

SEQ ID NO: 434383 - protein, 15 aa, Homo sapiens
  CDR3 for alpha chain variable domain of TCR clone 217192 (TRAV13-1, TRAJ17)
CAASIERAAGNKLTF

SEQ ID NO: 434384 - protein, 16 aa, Homo sapiens
  CDR3 for beta chain variable domain of TCR clone 217192 (TRBV19, TRBJ2-2)
CASRSPGTGATGELFF

SEQ ID NO: 434385 - protein, 13 aa, Homo sapiens
  CDR3 for alpha chain variable domain of TCR clone 217193 (TRAV36/DV7, TRAJ53)
CALSGGSHYKLTF

SEQ ID NO: 434386 - protein, 13 aa, Homo sapiens
  CDR3 for beta chain variable domain of TCR clone 217193 (TRBV28, TRBJ2-4)
CASSQSSKNIQYF

SEQ ID NO: 434387 - protein, 14 aa, Homo sapiens
  CDR3 for alpha chain variable domain of TCR clone 217194 (TRAV12-3, TRAJ29)
CAMSPYSGNTPLVF

SEQ ID NO: 434388 - protein, 15 aa, Homo sapiens
  CDR3 for beta chain variable domain of TCR clone 217194 (TRBV5-1, TRBJ2-2)
CASSLFGQNTGELFF

SEQ ID NO: 434389 - protein, 14 aa, Homo sapiens
  CDR3 for alpha chain variable domain of TCR clone 217195 (TRAV8-3, TRAJ13)
CAVVAQEGYQKVTF

SEQ ID NO: 434390 - protein, 15 aa, Homo sapiens
  CDR3 for beta chain variable domain of TCR clone 217195 (TRBV3-1, TRBJ1-1)
CASKMRATMNTEAFF

SEQ ID NO: 434391 - protein, 13 aa, Homo sapiens
  CDR3 for alpha chain variable domain of TCR clone 217196 (TRAV12-3, TRAJ9)
CAMSAAGGFKTIF

SEQ ID NO: 434392 - protein, 14 aa, Homo sapiens
  CDR3 for beta chain variable domain of TCR clone 217196 (TRBV19, TRBJ1-2)
CASSVLGYNYGYTF

SEQ ID NO: 434393 - protein, 17 aa, Homo sapiens
  CDR3 for alpha chain variable domain of TCR clone 217197 (TRAV3, TRAJ6)
CAVSDGSRAGGSYIPTF

SEQ ID NO: 434394 - protein, 12 aa, Homo sapiens
  CDR3 for beta chain variable domain of TCR clone 217197 (TRBV11-2, TRBJ2-2)
CASSLGGGELFF

SEQ ID NO: 434395 - protein, 16 aa, Homo sapiens
  CDR3 for alpha chain variable domain of TCR clone 217198 (TRAV8-4, TRAJ52)
CAAANAGGTSYGKLTF

SEQ ID NO: 434396 - protein, 15 aa, Homo sapiens
  CDR3 for beta chain variable domain of TCR clone 217198 (TRBV7-3, TRBJ2-2)
CASSLTGQGTGELFF

SEQ ID NO: 434397 - protein, 15 aa, Homo sapiens
  CDR3 for alpha chain variable domain of TCR clone 217199 (TRAV3, TRAJ20)
CAVRDIKLSDYKLSF

SEQ ID NO: 434398 - protein, 14 aa, Homo sapiens
  CDR3 for beta chain variable domain of TCR clone 217199 (TRBV19, TRBJ2-7)
CASNFRDTFTGMYF

SEQ ID NO: 434399 - protein, 14 aa, Homo sapiens
  CDR3 for alpha chain variable domain of TCR clone 217200 (TRAV1-2, TRAJ8)
CAVREDTGFQKLVL

SEQ ID NO: 434400 - protein, 16 aa, Homo sapiens
  CDR3 for beta chain variable domain of TCR clone 217200 (TRBV19, TRBJ2-1)
CASSKAGPGSYNEQFF

SEQ ID NO: 434401 - protein, 15 aa, Homo sapiens
  CDR3 for alpha chain variable domain of TCR clone 217201 (TRAV27, TRAJ45)
CAPVDPGGGADGLTF

SEQ ID NO: 434402 - protein, 15 aa, Homo sapiens
  CDR3 for beta chain variable domain of TCR clone 217201 (TRBV23-1, TRBJ1-5)
CASSQSRGQGWGAYI

SEQ ID NO: 434403 - protein, 14 aa, Homo sapiens
  CDR3 for alpha chain variable domain of TCR clone 217202 (TRAV8-4, TRAJ17)
CAVSDQAAGNKLTF

SEQ ID NO: 434404 - protein, 13 aa, Homo sapiens
  CDR3 for beta chain variable domain of TCR clone 217202 (TRBV19, TRBJ1-2)
CASSQGQVYGYTF

SEQ ID NO: 434405 - protein, 12 aa, Homo sapiens
  CDR3 for alpha chain variable domain of TCR clone 217203 (TRAV12-3, TRAJ17)
CAMTLTGNKLTF

SEQ ID NO: 434406 - protein, 13 aa, Homo sapiens
  CDR3 for beta chain variable domain of TCR clone 217203 (TRBV7-9, TRBJ1-2)
CASSLKQNYGYTF

SEQ ID NO: 434407 - protein, 15 aa, Homo sapiens
  CDR3 for alpha chain variable domain of TCR clone 217204 (TRAV8-3, TRAJ11)
CAVGLLNSGYSTLTF

SEQ ID NO: 434408 - protein, 16 aa, Homo sapiens
  CDR3 for beta chain variable domain of TCR clone 217204 (TRBV20-1, TRBJ1-4)
CSAPGQGLLTNEKLFF

SEQ ID NO: 434409 - protein, 13 aa, Homo sapiens
  CDR3 for alpha chain variable domain of TCR clone 217205 (TRAV12-2, TRAJ50)
CAVLVTSYDKVIF

SEQ ID NO: 434410 - protein, 17 aa, Homo sapiens
  CDR3 for beta chain variable domain of TCR clone 217205 (TRBV6-5, TRBJ2-7)
CASSYSFWGQGSYEQYF

SEQ ID NO: 434411 - protein, 12 aa, Homo sapiens
  CDR3 for alpha chain variable domain of TCR clone 217206 (TRAV12-3, TRAJ17)
CAMTLTGNKLTF

SEQ ID NO: 434412 - protein, 16 aa, Homo sapiens
  CDR3 for beta chain variable domain of TCR clone 217206 (TRBV4-2, TRBJ1-5)
CASSHGTGDSNQPQHF

SEQ ID NO: 434413 - protein, 14 aa, Homo sapiens
  CDR3 for alpha chain variable domain of TCR clone 217207 (TRAV1-2, TRAJ8)
CAVREDTGCQKLVF

SEQ ID NO: 434414 - protein, 16 aa, Homo sapiens
  CDR3 for beta chain variable domain of TCR clone 217207 (TRBV12-4, TRBJ1-5)
CASSRPVGGSNQPQHF

SEQ ID NO: 434415 - protein, 16 aa, Homo sapiens
  CDR3 for alpha chain variable domain of TCR clone 217208 (TRAV26-1, TRAJ48)
CIVREPPNFGNEKLTF

SEQ ID NO: 434416 - protein, 12 aa, Homo sapiens
  CDR3 for beta chain variable domain of TCR clone 217208 (TRBV7-8, TRBJ2-7)
CASEGGPHGQYF

SEQ ID NO: 434417 - protein, 14 aa, Homo sapiens
  CDR3 for alpha chain variable domain of TCR clone 217209 (TRAV1-1, TRAJ30)
CAVRSLSRDDKIIF

SEQ ID NO: 434418 - protein, 14 aa, Homo sapiens
  CDR3 for beta chain variable domain of TCR clone 217209 (TRBV7-8, TRBJ2-3)
CASSLEAGTDTQYF

SEQ ID NO: 434419 - protein, 17 aa, Homo sapiens
  CDR3 for alpha chain variable domain of TCR clone 217210 (TRAV3, TRAJ6)
CAVRDGPRAVGSYIPTF

SEQ ID NO: 434420 - protein, 18 aa, Homo sapiens
  CDR3 for beta chain variable domain of TCR clone 217210 (TRBV25-1, TRBJ1-2)
CASSGLQNGQGLIFGYTF

SEQ ID NO: 434421 - protein, 14 aa, Homo sapiens
  CDR3 for alpha chain variable domain of TCR clone 217211 (TRAV16, TRAJ31)
CSKWRRGDNARLMV

SEQ ID NO: 434422 - protein, 16 aa, Homo sapiens
  CDR3 for beta chain variable domain of TCR clone 217211 (TRBV28, TRBJ2-7)
CASSLFFETGGPEQYF

SEQ ID NO: 434423 - protein, 16 aa, Homo sapiens
  CDR3 for alpha chain variable domain of TCR clone 217212 (TRAV3, TRAJ27)
CAVRDPQGTNAGKSTF

SEQ ID NO: 434424 - protein, 17 aa, Homo sapiens
  CDR3 for beta chain variable domain of TCR clone 217212 (TRBV4-1, TRBJ2-7)
CASSQGRGLQTSCEQYF

SEQ ID NO: 434425 - protein, 15 aa, Homo sapiens
  CDR3 for alpha chain variable domain of TCR clone 217213 (TRAV8-3, TRAJ6)
CAVGPLGGGSYIPTF

SEQ ID NO: 434426 - protein, 14 aa, Homo sapiens
  CDR3 for beta chain variable domain of TCR clone 217213 (TRBV4-1, TRBJ2-7)
CASSPVAGGDEQYF

SEQ ID NO: 434427 - protein, 14 aa, Homo sapiens
  CDR3 for alpha chain variable domain of TCR clone 217214 (TRAV9-2, TRAJ39)
CALHIYNAGNMLTF

SEQ ID NO: 434428 - protein, 14 aa, Homo sapiens
  CDR3 for beta chain variable domain of TCR clone 217214 (TRBV12-5, TRBJ2-5)
CASGSRKHQETQYF

SEQ ID NO: 434429 - protein, 11 aa, Homo sapiens
  CDR3 for alpha chain variable domain of TCR clone 217215 (TRAV12-2, TRAJ33)
CAVGSNYQLIW

SEQ ID NO: 434430 - protein, 14 aa, Homo sapiens
  CDR3 for beta chain variable domain of TCR clone 217215 (TRBV7-6, TRBJ2-3)
CASSLGTVTDTQYF

SEQ ID NO: 434431 - protein, 14 aa, Homo sapiens
  CDR3 for alpha chain variable domain of TCR clone 217216 (TRAV8-4, TRAJ13)
CAMTLSGGYQKVTF

SEQ ID NO: 434432 - protein, 17 aa, Homo sapiens
  CDR3 for beta chain variable domain of TCR clone 217216 (TRBV24-1, TRBJ2-4)
CATSDAEARGVRNIQYF

SEQ ID NO: 434433 - protein, 17 aa, Homo sapiens
  CDR3 for alpha chain variable domain of TCR clone 217217 (TRAV13-1, )
CAANIQNPDPAVYQLRD

SEQ ID NO: 434434 - protein, 16 aa, Homo sapiens
  CDR3 for beta chain variable domain of TCR clone 217217 (TRBV4-2, TRBJ2-3)
CASSQDGARGGGEAVF

SEQ ID NO: 434435 - protein, 13 aa, Homo sapiens
  CDR3 for alpha chain variable domain of TCR clone 217218 (TRAV12-3, TRAJ33)
CAMSVNSNYQLIW

SEQ ID NO: 434436 - protein, 14 aa, Homo sapiens
  CDR3 for beta chain variable domain of TCR clone 217218 (TRBV23-1, TRBJ2-5)
CASSFLRSQETQYF

SEQ ID NO: 434437 - protein, 15 aa, Homo sapiens
  CDR3 for alpha chain variable domain of TCR clone 217219 (TRAV23/DV6, TRAJ30)
CAASSQESRDDKIIF

SEQ ID NO: 434438 - protein, 13 aa, Homo sapiens
  CDR3 for beta chain variable domain of TCR clone 217219 (TRBV7-9, TRBJ1-2)
CASSLKQNYGYTF

SEQ ID NO: 434439 - protein, 16 aa, Homo sapiens
  CDR3 for alpha chain variable domain of TCR clone 217220 (TRAV35, TRAJ28)
CAGQKYSVAGSYQLTF

SEQ ID NO: 434440 - protein, 16 aa, Homo sapiens
  CDR3 for beta chain variable domain of TCR clone 217220 (TRBV7-3, TRBJ2-2)
CASSLKRGTLSGELFF

SEQ ID NO: 434441 - protein, 15 aa, Homo sapiens
  CDR3 for alpha chain variable domain of TCR clone 217221 (TRAV38-2/DV8, TRAJ57)
CASARAQGGSEKLVF

SEQ ID NO: 434442 - protein, 17 aa, Homo sapiens
  CDR3 for beta chain variable domain of TCR clone 217221 (TRBV18, TRBJ1-5)
CASSPTMGQGTNQPRHF

SEQ ID NO: 434443 - protein, 17 aa, Homo sapiens
  CDR3 for alpha chain variable domain of TCR clone 217222 (TRAV3, TRAJ6)
CAVRDGPRAGGSYIPTF

SEQ ID NO: 434444 - protein, 16 aa, Homo sapiens
  CDR3 for beta chain variable domain of TCR clone 217222 (TRBV7-8, TRBJ2-3)
CASSTEGQRETGTQYF

SEQ ID NO: 434445 - protein, 15 aa, Homo sapiens
  CDR3 for alpha chain variable domain of TCR clone 217223 (TRAV17, TRAJ16)
CATALRFSDGQKLLF

SEQ ID NO: 434446 - protein, 14 aa, Homo sapiens
  CDR3 for beta chain variable domain of TCR clone 217223 (TRBV25-1, TRBJ1-1)
CASTHLGGNTEAFF

SEQ ID NO: 434447 - protein, 16 aa, Homo sapiens
  CDR3 for alpha chain variable domain of TCR clone 217224 (TRAV20, TRAJ22)
CAVQASSSGSARQLTF

SEQ ID NO: 434448 - protein, 19 aa, Homo sapiens
  CDR3 for beta chain variable domain of TCR clone 217224 (TRBV12-4, TRBJ2-1)
CASTLAFDPRDKEANEQFF

SEQ ID NO: 434449 - protein, 14 aa, Homo sapiens
  CDR3 for alpha chain variable domain of TCR clone 217225 (TRAV1-2, TRAJ16)
CAVNRFSDGQKLLF

SEQ ID NO: 434450 - protein, 16 aa, Homo sapiens
  CDR3 for beta chain variable domain of TCR clone 217225 (TRBV7-3, TRBJ2-2)
CDSSLKRGTLSGELFF

SEQ ID NO: 434451 - protein, 14 aa, Homo sapiens
  CDR3 for alpha chain variable domain of TCR clone 217226 (TRAV1-2, TRAJ8)
CAVREDTGFQKLVF

SEQ ID NO: 434452 - protein, 17 aa, Homo sapiens
  CDR3 for beta chain variable domain of TCR clone 217226 (TRBV6-5, TRBJ2-7)
YASRPSVGEVQHYEQYF

SEQ ID NO: 434453 - protein, 16 aa, Homo sapiens
  CDR3 for alpha chain variable domain of TCR clone 217227 (TRAV3, TRAJ37)
CAARGKGSGNKGKLIF

SEQ ID NO: 434454 - protein, 13 aa, Homo sapiens
  CDR3 for beta chain variable domain of TCR clone 217227 (TRBV14, TRBJ2-7)
CASSQDRRYEQYF

SEQ ID NO: 434455 - protein, 12 aa, Homo sapiens
  CDR3 for alpha chain variable domain of TCR clone 217228 (TRAV12-1, TRAJ8)
CVVNKGFQKLVF

SEQ ID NO: 434456 - protein, 15 aa, Homo sapiens
  CDR3 for beta chain variable domain of TCR clone 217228 (TRBV28, TRBJ2-1)
CASSIIAGGRSEQFF

SEQ ID NO: 434457 - protein, 16 aa, Homo sapiens
  CDR3 for alpha chain variable domain of TCR clone 217229 (TRAV20, TRAJ28)
CAVRDPSGAGSYQLTF

SEQ ID NO: 434458 - protein, 15 aa, Homo sapiens
  CDR3 for beta chain variable domain of TCR clone 217229 (TRBV4-1, TRBJ1-4)
CASSDTGGTNEKLFF

SEQ ID NO: 434459 - protein, 13 aa, Homo sapiens
  CDR3 for alpha chain variable domain of TCR clone 217230 (TRAV36/DV7, TRAJ53)
CALSGGSNYKLTF

SEQ ID NO: 434460 - protein, 13 aa, Homo sapiens
  CDR3 for beta chain variable domain of TCR clone 217230 (TRBV28, TRBJ2-4)
CASSQSSKNKQYF

SEQ ID NO: 434461 - protein, 18 aa, Homo sapiens
  CDR3 for alpha chain variable domain of TCR clone 217231 (TRAV9-2, TRAJ52)
CALSRHNAGGTSYGKPTF

SEQ ID NO: 434462 - protein, 13 aa, Homo sapiens
  CDR3 for beta chain variable domain of TCR clone 217231 (TRBV7-9, TRBJ1-2)
CASSLKQNYGYTF

SEQ ID NO: 434463 - protein, 17 aa, Homo sapiens
  CDR3 for alpha chain variable domain of TCR clone 217232 (TRAV24, TRAJ42)
CAFRVKNYGGSQGNPIF

SEQ ID NO: 434464 - protein, 14 aa, Homo sapiens
  CDR3 for beta chain variable domain of TCR clone 217232 (TRBV2, TRBJ2-3)
CASSEGQNTNTQYF

SEQ ID NO: 434465 - protein, 14 aa, Homo sapiens
  CDR3 for alpha chain variable domain of TCR clone 217233 (TRAV12-3, TRAJ10)
SHLPLTGGGNKLTF

SEQ ID NO: 434466 - protein, 15 aa, Homo sapiens
  CDR3 for beta chain variable domain of TCR clone 217233 (TRBV2, TRBJ1-1)
CASSEAQTMNTEAFF

SEQ ID NO: 434467 - protein, 13 aa, Homo sapiens
  CDR3 for alpha chain variable domain of TCR clone 217234 (TRAV25, TRAJ44)
CAGGTGTASKLTF

SEQ ID NO: 434468 - protein, 16 aa, Homo sapiens
  CDR3 for beta chain variable domain of TCR clone 217234 (TRBV6-5, TRBJ2-6)
CASSQQGGAGANFLTF

SEQ ID NO: 434469 - protein, 15 aa, Homo sapiens
  CDR3 for alpha chain variable domain of TCR clone 217235 (TRAV8-4, TRAJ37)
CAVSTRSGNTGKLIF

SEQ ID NO: 434470 - protein, 13 aa, Homo sapiens
  CDR3 for beta chain variable domain of TCR clone 217235 (TRBV4-2, TRBJ1-1)
CASSQAGNTEAFF

SEQ ID NO: 434471 - protein, 14 aa, Homo sapiens
  CDR3 for alpha chain variable domain of TCR clone 217236 (TRAV27, TRAJ44)
CAASFTGTASKLTF

SEQ ID NO: 434472 - protein, 14 aa, Homo sapiens
  CDR3 for beta chain variable domain of TCR clone 217236 (TRBV11-2, TRBJ2-5)
CASSRTGGIETQYF

SEQ ID NO: 434473 - protein, 12 aa, Homo sapiens
  CDR3 for alpha chain variable domain of TCR clone 217237 (TRAV12-2, TRAJ9)
CAVNTGGFKTIF

SEQ ID NO: 434474 - protein, 14 aa, Homo sapiens
  CDR3 for beta chain variable domain of TCR clone 217237 (TRBV25-1, TRBJ1-1)
CASTHLGGNTEAFF

SEQ ID NO: 434475 - protein, 12 aa, Homo sapiens
  CDR3 for alpha chain variable domain of TCR clone 217238 (TRAV1-1, TRAJ43)
CAPRVSSKDMRF

SEQ ID NO: 434476 - protein, 14 aa, Homo sapiens
  CDR3 for beta chain variable domain of TCR clone 217238 (TRBV5-1, TRBJ2-7)
CASSRGESLYEQYF

SEQ ID NO: 434477 - protein, 17 aa, Homo sapiens
  CDR3 for alpha chain variable domain of TCR clone 217239 (TRAV3, TRAJ6)
CAVRDGPRAGGSHIPTF

SEQ ID NO: 434478 - protein, 15 aa, Homo sapiens
  CDR3 for beta chain variable domain of TCR clone 217239 (TRBV11-2, TRBJ2-1)
CASSKNRGLIYEQFF

SEQ ID NO: 434479 - protein, 12 aa, Homo sapiens
  CDR3 for alpha chain variable domain of TCR clone 217240 (TRAV8-3, TRAJ26)
CADDNYGQNFVF

SEQ ID NO: 434480 - protein, 14 aa, Homo sapiens
  CDR3 for beta chain variable domain of TCR clone 217240 (TRBV7-2, TRBJ2-7)
CASRSQGAAYEQYF

SEQ ID NO: 434481 - protein, 17 aa, Homo sapiens
  CDR3 for alpha chain variable domain of TCR clone 217241 (TRAV8-6, TRAJ58)
CAVSSWVGETSGSRLTF

SEQ ID NO: 434482 - protein, 16 aa, Homo sapiens
  CDR3 for beta chain variable domain of TCR clone 217241 (TRBV4-3, TRBJ2-1)
CASSPALDRGVNEQFF

SEQ ID NO: 434483 - protein, 16 aa, Homo sapiens
  CDR3 for alpha chain variable domain of TCR clone 217242 (TRAV12-2, TRAJ43)
CAGDDMRFGPGTRLTV

SEQ ID NO: 434484 - protein, 16 aa, Homo sapiens
  CDR3 for beta chain variable domain of TCR clone 217242 (TRBV2, TRBJ2-4)
CASSEAPGGEQNIQYF

SEQ ID NO: 434485 - protein, 14 aa, Homo sapiens
  CDR3 for alpha chain variable domain of TCR clone 217243 (TRAV12-2, TRAJ17)
CAVNIKAAGNKLTF

SEQ ID NO: 434486 - protein, 16 aa, Homo sapiens
  CDR3 for beta chain variable domain of TCR clone 217243 (TRBV20-1, TRBJ2-6)
CSASSQGYEGANDLTF

SEQ ID NO: 434487 - protein, 12 aa, Homo sapiens
  CDR3 for alpha chain variable domain of TCR clone 217244 (TRAV16, TRAJ10)
CSRTGGGNKLTF

SEQ ID NO: 434488 - protein, 15 aa, Homo sapiens
  CDR3 for beta chain variable domain of TCR clone 217244 (TRBV11-2, TRBJ2-1)
CASSLTSGGYNEQFF

SEQ ID NO: 434489 - protein, 14 aa, Homo sapiens
  CDR3 for alpha chain variable domain of TCR clone 217245 (TRAV1-2, TRAJ16)
CAVNRFSDGQKLHF

SEQ ID NO: 434490 - protein, 15 aa, Homo sapiens
  CDR3 for beta chain variable domain of TCR clone 217245 (TRBV6-6, TRBJ2-7)
CASSYSYGGSYEQYF

SEQ ID NO: 434491 - protein, 17 aa, Homo sapiens
  CDR3 for alpha chain variable domain of TCR clone 217246 (TRAV19, TRAJ18)
CALSEEWRGSTLGRLYF

SEQ ID NO: 434492 - protein, 17 aa, Homo sapiens
  CDR3 for beta chain variable domain of TCR clone 217246 (TRBV28, TRBJ2-1)
CASTGPGLAVSEDEQFF

SEQ ID NO: 434493 - protein, 13 aa, Homo sapiens
  CDR3 for alpha chain variable domain of TCR clone 217247 (TRAV13-1, TRAJ21)
CAASIYNFNKFYF

SEQ ID NO: 434494 - protein, 13 aa, Homo sapiens
  CDR3 for beta chain variable domain of TCR clone 217247 (TRBV27, TRBJ1-4)
CASSLTGDEKLFF

SEQ ID NO: 434495 - protein, 16 aa, Homo sapiens
  CDR3 for alpha chain variable domain of TCR clone 217248 (TRAV30, TRAJ24)
CGTEIVDADSWGKFQV

SEQ ID NO: 434496 - protein, 14 aa, Homo sapiens
  CDR3 for beta chain variable domain of TCR clone 217248 (TRBV12-5, TRBJ2-5)
YASGSRTHQETQYF

SEQ ID NO: 434497 - protein, 15 aa, Homo sapiens
  CDR3 for alpha chain variable domain of TCR clone 217249 (TRAV8-3, TRAJ23)
CAVGDRYNQGGKLIF

SEQ ID NO: 434498 - protein, 17 aa, Homo sapiens
  CDR3 for beta chain variable domain of TCR clone 217249 (TRBV4-1, TRBJ1-4)
CASSQEGPRGVEENLFF

SEQ ID NO: 434499 - protein, 14 aa, Homo sapiens
  CDR3 for alpha chain variable domain of TCR clone 217250 (TRAV1-2, TRAJ28)
CAVPSGAGGYQLTF

SEQ ID NO: 434500 - protein, 12 aa, Homo sapiens
  CDR3 for beta chain variable domain of TCR clone 217250 (TRBV20-1, TRBJ1-2)
CSAPPRQGPDTF

SEQ ID NO: 434501 - protein, 21 aa, Homo sapiens
  CDR3 for alpha chain variable domain of TCR clone 217251 (TRAV8-3, TRAJ10)
CAVGHTHGRSKQTHLWDRHSA

SEQ ID NO: 434502 - protein, 10 aa, Homo sapiens
  CDR3 for beta chain variable domain of TCR clone 217251 (TRBV20-1, TRBJ2-5)
CSARFETQYF

SEQ ID NO: 434503 - protein, 13 aa, Homo sapiens
  CDR3 for alpha chain variable domain of TCR clone 217252 (TRAV21, TRAJ20)
CAVGLRVDYKLSF

SEQ ID NO: 434504 - protein, 13 aa, Homo sapiens
  CDR3 for beta chain variable domain of TCR clone 217252 (TRBV6-1, TRBJ1-1)
CASSRQGTTEAFF

SEQ ID NO: 434505 - protein, 16 aa, Homo sapiens
  CDR3 for alpha chain variable domain of TCR clone 217253 (TRAV30, TRAJ24)
CGTEIVDADSWGKSQF

SEQ ID NO: 434506 - protein, 13 aa, Homo sapiens
  CDR3 for beta chain variable domain of TCR clone 217253 (TRBV7-2, TRBJ2-4)
CASSREHANIQYF

SEQ ID NO: 434507 - protein, 12 aa, Homo sapiens
  CDR3 for alpha chain variable domain of TCR clone 217254 (TRAV3, TRAJ26)
CAVRDYVQNFVF

SEQ ID NO: 434508 - protein, 16 aa, Homo sapiens
  CDR3 for beta chain variable domain of TCR clone 217254 (TRBV11-2, TRBJ1-2)
CASSPSGREANYGYTF

SEQ ID NO: 434509 - protein, 14 aa, Homo sapiens
  CDR3 for alpha chain variable domain of TCR clone 217255 (TRAV13-2, TRAJ16)
CAENNWEDGQKMLF

SEQ ID NO: 434510 - protein, 14 aa, Homo sapiens
  CDR3 for beta chain variable domain of TCR clone 217255 (TRBV7-9, TRBJ1-1)
CASSLGGLKTEAFF

SEQ ID NO: 434511 - protein, 13 aa, Homo sapiens
  CDR3 for alpha chain variable domain of TCR clone 217256 (TRAV16, TRAJ27)
CALRRTNAGKSTF

SEQ ID NO: 434512 - protein, 14 aa, Homo sapiens
  CDR3 for beta chain variable domain of TCR clone 217256 (TRBV7-2, TRBJ1-3)
CASSRLRSGNTIYF

SEQ ID NO: 434513 - protein, 14 aa, Homo sapiens
  CDR3 for alpha chain variable domain of TCR clone 217257 (TRAV12-1, TRAJ29)
CVVNEGSGNAPLVF

SEQ ID NO: 434514 - protein, 13 aa, Homo sapiens
  CDR3 for beta chain variable domain of TCR clone 217257 (TRBV7-9, TRBJ2-3)
CASSPGSTDTQYF

SEQ ID NO: 434515 - protein, 11 aa, Homo sapiens
  CDR3 for alpha chain variable domain of TCR clone 217258 (TRAV23/DV6, TRAJ17)
CKWAAGNKLTF

SEQ ID NO: 434516 - protein, 14 aa, Homo sapiens
  CDR3 for beta chain variable domain of TCR clone 217258 (TRBV6-1, TRBJ2-7)
CACSGGSYLYEQYF

SEQ ID NO: 434517 - protein, 15 aa, Homo sapiens
  CDR3 for alpha chain variable domain of TCR clone 217259 (TRAV21, TRAJ24)
CAARSSTDSWGKLQF

SEQ ID NO: 434518 - protein, 14 aa, Homo sapiens
  CDR3 for beta chain variable domain of TCR clone 217259 (TRBV11-2, TRBJ2-5)
CASSWTGGIETQYF

SEQ ID NO: 434519 - protein, 15 aa, Homo sapiens
  CDR3 for alpha chain variable domain of TCR clone 217260 (TRAV3, TRAJ32)
CAVSSYGSATNKLIF

SEQ ID NO: 434520 - protein, 13 aa, Homo sapiens
  CDR3 for beta chain variable domain of TCR clone 217260 (TRBV20-1, TRBJ2-7)
CSARPSTNYEQYF

SEQ ID NO: 434521 - protein, 15 aa, Homo sapiens
  CDR3 for alpha chain variable domain of TCR clone 217261 (TRAV3, TRAJ22)
CAVRDRGGSARKLTF

SEQ ID NO: 434522 - protein, 16 aa, Homo sapiens
  CDR3 for beta chain variable domain of TCR clone 217261 (TRBV4-1, TRBJ2-7)
CASRPSGGGADNEQYF

SEQ ID NO: 434523 - protein, 13 aa, Homo sapiens
  CDR3 for alpha chain variable domain of TCR clone 217262 (TRAV13-1, TRAJ21)
CAASIYNLNKFYF

SEQ ID NO: 434524 - protein, 20 aa, Homo sapiens
  CDR3 for beta chain variable domain of TCR clone 217262 (TRBV7-8, TRBJ2-2)
CASSHLFPGPTIHITGELFF

SEQ ID NO: 434525 - protein, 18 aa, Homo sapiens
  CDR3 for alpha chain variable domain of TCR clone 217263 (TRAV21, TRAJ52)
CAVRPSPAGGTSYGKLTF

SEQ ID NO: 434526 - protein, 16 aa, Homo sapiens
  CDR3 for beta chain variable domain of TCR clone 217263 (TRBV11-2, TRBJ2-6)
CASILGRGTGANVLTF

SEQ ID NO: 434527 - protein, 15 aa, Homo sapiens
  CDR3 for alpha chain variable domain of TCR clone 217264 (TRAV12-3, TRAJ10)
CASYILTGGGNKLTF

SEQ ID NO: 434528 - protein, 15 aa, Homo sapiens
  CDR3 for beta chain variable domain of TCR clone 217264 (TRBV7-2, TRBJ1-6)
CASSLGPDRGTPLHF

SEQ ID NO: 434529 - protein, 16 aa, Homo sapiens
  CDR3 for alpha chain variable domain of TCR clone 217265 (TRAV12-3, TRAJ53)
CAMSPGSGGGNYKLTL

SEQ ID NO: 434530 - protein, 17 aa, Homo sapiens
  CDR3 for beta chain variable domain of TCR clone 217265 (TRBV11-2, TRBJ2-1)
CASSLYPPGVEYNEQFF

SEQ ID NO: 434531 - protein, 13 aa, Homo sapiens
  CDR3 for alpha chain variable domain of TCR clone 217266 (TRAV16, TRAJ37)
CALGSGHTGKLIF

SEQ ID NO: 434532 - protein, 14 aa, Homo sapiens
  CDR3 for beta chain variable domain of TCR clone 217266 (TRBV27, TRBJ2-5)
CASSSLKGWETQYF

SEQ ID NO: 434533 - protein, 23 aa, Homo sapiens
  CDR3 for alpha chain variable domain of TCR clone 217267 (TRAV26-1, TRAJ38)
CIADNAGNNHIQNPDPAVYQLRD

SEQ ID NO: 434534 - protein, 17 aa, Homo sapiens
  CDR3 for beta chain variable domain of TCR clone 217267 (TRBV4-2, TRBJ1-1)
CASTQFGGGSGNTEAFF

SEQ ID NO: 434535 - protein, 15 aa, Homo sapiens
  CDR3 for alpha chain variable domain of TCR clone 217268 (TRAV26-1, TRAJ29)
CIVRVEGSGNTPLVF

SEQ ID NO: 434536 - protein, 15 aa, Homo sapiens
  CDR3 for beta chain variable domain of TCR clone 217268 (TRBV6-5, TRBJ2-1)
CASRGDFDSYNEQFF

SEQ ID NO: 434537 - protein, 15 aa, Homo sapiens
  CDR3 for alpha chain variable domain of TCR clone 217269 (TRAV8-3, TRAJ45)
CASSYSGGGADGLTF

SEQ ID NO: 434538 - protein, 14 aa, Homo sapiens
  CDR3 for beta chain variable domain of TCR clone 217269 (TRBV7-2, TRBJ1-2)
CASSQTGSTYGYTF

SEQ ID NO: 434539 - protein, 14 aa, Homo sapiens
  CDR3 for alpha chain variable domain of TCR clone 217270 (TRAV26-1, TRAJ6)
CIVSPVGGSYIPTF

SEQ ID NO: 434540 - protein, 16 aa, Homo sapiens
  CDR3 for beta chain variable domain of TCR clone 217270 (TRBV4-1, TRBJ2-5)
CASSSGLAGVLGTQCF

SEQ ID NO: 434541 - protein, 13 aa, Homo sapiens
  CDR3 for alpha chain variable domain of TCR clone 217271 (TRAV1-2, TRAJ9)
CAALNTGGFKTIF

SEQ ID NO: 434542 - protein, 15 aa, Homo sapiens
  CDR3 for beta chain variable domain of TCR clone 217271 (TRBV6-3, TRBJ2-7)
CASSSPETVFYEQYF

SEQ ID NO: 434543 - protein, 12 aa, Homo sapiens
  CDR3 for alpha chain variable domain of TCR clone 217272 (TRAV25, TRAJ11)
CAGASGYSTLTF

SEQ ID NO: 434544 - protein, 14 aa, Homo sapiens
  CDR3 for beta chain variable domain of TCR clone 217272 (TRBV5-8, TRBJ2-3)
CASSLGQGTDTQCF

SEQ ID NO: 434545 - protein, 13 aa, Homo sapiens
  CDR3 for alpha chain variable domain of TCR clone 217273 (TRAV17, TRAJ40)
CAGALGGTYKYIF

SEQ ID NO: 434546 - protein, 16 aa, Homo sapiens
  CDR3 for beta chain variable domain of TCR clone 217273 (TRBV11-2, TRBJ1-2)
CASSLDTGGADYGYSL

SEQ ID NO: 434547 - protein, 23 aa, Homo sapiens
  CDR3 for alpha chain variable domain of TCR clone 217274 (TRAV26-1, TRAJ38)
CIADNAGNNHIQNPNPAVYQLRD

SEQ ID NO: 434548 - protein, 15 aa, Homo sapiens
  CDR3 for beta chain variable domain of TCR clone 217274 (TRBV27, TRBJ2-1)
CASSNGGGSSNEQFF

SEQ ID NO: 434549 - protein, 10 aa, Homo sapiens
  CDR3 for alpha chain variable domain of TCR clone 217275 (TRAV1-2, TRAJ34)
CAVTTDKLIF

SEQ ID NO: 434550 - protein, 13 aa, Homo sapiens
  CDR3 for beta chain variable domain of TCR clone 217275 (TRBV10-1, TRBJ2-1)
CASSAGPDNEQFF

SEQ ID NO: 434551 - protein, 14 aa, Homo sapiens
  CDR3 for alpha chain variable domain of TCR clone 217276 (TRAV3, TRAJ33)
CAVRDMDSNYQLIW

SEQ ID NO: 434552 - protein, 19 aa, Homo sapiens
  CDR3 for beta chain variable domain of TCR clone 217276 (TRBV7-3, TRBJ1-2)
RASSFPQGNDGELWLHLRF

SEQ ID NO: 434553 - protein, 14 aa, Homo sapiens
  CDR3 for alpha chain variable domain of TCR clone 217277 (TRAV1-2, TRAJ16)
CAVNRFLDGQKLLF

SEQ ID NO: 434554 - protein, 13 aa, Homo sapiens
  CDR3 for beta chain variable domain of TCR clone 217277 (TRBV29-1, TRBJ1-1)
CSVGDSRNTEAFF

SEQ ID NO: 434555 - protein, 15 aa, Homo sapiens
  CDR3 for alpha chain variable domain of TCR clone 217278 (TRAV35, TRAJ34)
CAGTSIVRNTDKLIF

SEQ ID NO: 434556 - protein, 14 aa, Homo sapiens
  CDR3 for beta chain variable domain of TCR clone 217278 (TRBV12-4, TRBJ2-3)
CASTIAGWGDTQYF

SEQ ID NO: 434557 - protein, 13 aa, Homo sapiens
  CDR3 for alpha chain variable domain of TCR clone 217279 (TRAV36/DV7, TRAJ40)
CAVEASGTYKYIF

SEQ ID NO: 434558 - protein, 14 aa, Homo sapiens
  CDR3 for beta chain variable domain of TCR clone 217279 (TRBV13, TRBJ2-5)
CASSLERVGETQYF

SEQ ID NO: 434559 - protein, 15 aa, Homo sapiens
  CDR3 for alpha chain variable domain of TCR clone 217280 (TRAV8-4, TRAJ3)
FAVTGENLVQQCFQD

SEQ ID NO: 434560 - protein, 16 aa, Homo sapiens
  CDR3 for beta chain variable domain of TCR clone 217280 (TRBV4-2, TRBJ1-1)
CASSQAGFGMNTEAFF

SEQ ID NO: 434561 - protein, 14 aa, Homo sapiens
  CDR3 for alpha chain variable domain of TCR clone 217281 (TRAV35, TRAJ24)
CAGPRRDSWGKLQF

SEQ ID NO: 434562 - protein, 12 aa, Homo sapiens
  CDR3 for beta chain variable domain of TCR clone 217281 (TRBV12-4, TRBJ2-3)
CASSFGQDTQYF

SEQ ID NO: 434563 - protein, 16 aa, Homo sapiens
  CDR3 for alpha chain variable domain of TCR clone 217282 (TRAV26-1, TRAJ52)
CIVSNAGGTSYGKLTF

SEQ ID NO: 434564 - protein, 15 aa, Homo sapiens
  CDR3 for beta chain variable domain of TCR clone 217282 (TRBV7-3, TRBJ2-1)
CASIPTGGGEVEQFF

SEQ ID NO: 434565 - protein, 11 aa, Homo sapiens
  CDR3 for alpha chain variable domain of TCR clone 217283 (TRAV27, TRAJ20)
CAGADDYKLSF

SEQ ID NO: 434566 - protein, 14 aa, Homo sapiens
  CDR3 for beta chain variable domain of TCR clone 217283 (TRBV2, TRBJ1-1)
CATPSRGTEAFLDK

SEQ ID NO: 434567 - protein, 23 aa, Homo sapiens
  CDR3 for alpha chain variable domain of TCR clone 217284 (TRAV1-1, TRAJ29)
LLQELQMKDSASYFLGGNTPHVF

SEQ ID NO: 434568 - protein, 13 aa, Homo sapiens
  CDR3 for beta chain variable domain of TCR clone 217284 (TRBV25-1, TRBJ2-7)
CASSEDGDYEQYF

SEQ ID NO: 434569 - protein, 13 aa, Homo sapiens
  CDR3 for alpha chain variable domain of TCR clone 217285 (TRAV2, TRAJ15)
CAVASQVGTALIF

SEQ ID NO: 434570 - protein, 16 aa, Homo sapiens
  CDR3 for beta chain variable domain of TCR clone 217285 (TRBV5-1, TRBJ1-1)
CASSSGGNSLNTEAFF

SEQ ID NO: 434571 - protein, 12 aa, Homo sapiens
  CDR3 for alpha chain variable domain of TCR clone 217286 (TRAV3, TRAJ27)
CAVRDKAGKSTF

SEQ ID NO: 434572 - protein, 15 aa, Homo sapiens
  CDR3 for beta chain variable domain of TCR clone 217286 (TRBV19, TRBJ1-1)
CASTSGQIQNTEAFF

SEQ ID NO: 434573 - protein, 15 aa, Homo sapiens
  CDR3 for alpha chain variable domain of TCR clone 217287 (TRAV17, TRAJ6)
CATDLPSGGSYIPTF

SEQ ID NO: 434574 - protein, 13 aa, Homo sapiens
  CDR3 for beta chain variable domain of TCR clone 217287 (TRBV7-3, TRBJ1-1)
CASSQDWGAEAFF

SEQ ID NO: 434575 - protein, 13 aa, Homo sapiens
  CDR3 for alpha chain variable domain of TCR clone 217288 (TRAV12-2, TRAJ20)
CAVTRFDDYKLSF

SEQ ID NO: 434576 - protein, 12 aa, Homo sapiens
  CDR3 for beta chain variable domain of TCR clone 217288 (TRBV19, TRBJ2-1)
CASSQISNEQFF

SEQ ID NO: 434577 - protein, 13 aa, Homo sapiens
  CDR3 for alpha chain variable domain of TCR clone 217289 (TRAV17, TRAJ9)
CATAYTGGFKTIF

SEQ ID NO: 434578 - protein, 12 aa, Homo sapiens
  CDR3 for beta chain variable domain of TCR clone 217289 (TRBV7-9, TRBJ2-7)
CASRTGFDEQYF

SEQ ID NO: 434579 - protein, 11 aa, Homo sapiens
  CDR3 for alpha chain variable domain of TCR clone 217290 (TRAV16, TRAJ49)
CSLNTGNQFYF

SEQ ID NO: 434580 - protein, 13 aa, Homo sapiens
  CDR3 for beta chain variable domain of TCR clone 217290 (TRBV24-1, TRBJ1-4)
CATNNGRSEKLFF

SEQ ID NO: 434581 - protein, 13 aa, Homo sapiens
  CDR3 for alpha chain variable domain of TCR clone 217291 (TRAV36/DV7, TRAJ53)
CALSGGSYYKLTF

SEQ ID NO: 434582 - protein, 12 aa, Homo sapiens
  CDR3 for beta chain variable domain of TCR clone 217291 (TRBV7-9, TRBJ1-4)
CASSTDREKLFF

SEQ ID NO: 434583 - protein, 15 aa, Homo sapiens
  CDR3 for alpha chain variable domain of TCR clone 217292 (TRAV8-2, TRAJ15)
CVVTMGNQAGTALIF

SEQ ID NO: 434584 - protein, 12 aa, Homo sapiens
  CDR3 for beta chain variable domain of TCR clone 217292 (TRBV6-1, TRBJ2-7)
CAGSDYSYGQYF

SEQ ID NO: 434585 - protein, 17 aa, Homo sapiens
  CDR3 for alpha chain variable domain of TCR clone 217293 (TRAV17, TRAJ52)
CATERPSGGTSYGKLTF

SEQ ID NO: 434586 - protein, 13 aa, Homo sapiens
  CDR3 for beta chain variable domain of TCR clone 217293 (TRBV6-4, TRBJ1-5)
CASGADLNQPQHF

SEQ ID NO: 434587 - protein, 12 aa, Homo sapiens
  CDR3 for alpha chain variable domain of TCR clone 217294 (TRAV3, TRAJ20)
CAVRDHAYKLSF

SEQ ID NO: 434588 - protein, 13 aa, Homo sapiens
  CDR3 for beta chain variable domain of TCR clone 217294 (TRBV9, TRBJ2-7)
CASSVGQGGEQYF

SEQ ID NO: 434589 - protein, 16 aa, Homo sapiens
  CDR3 for alpha chain variable domain of TCR clone 217295 (TRAV1-2, TRAJ10)
CAVRGVLTGGGNKLTF

SEQ ID NO: 434590 - protein, 16 aa, Homo sapiens
  CDR3 for beta chain variable domain of TCR clone 217295 (TRBV12-5, TRBJ2-5)
CASGPRTIGNQETQYF

SEQ ID NO: 434591 - protein, 12 aa, Homo sapiens
  CDR3 for alpha chain variable domain of TCR clone 217296 (TRAV12-3, TRAJ17)
CAMTLTGNKLTF

SEQ ID NO: 434592 - protein, 11 aa, Homo sapiens
  CDR3 for beta chain variable domain of TCR clone 217296 (TRBV29-1, TRBJ2-5)
GSEDRTGTQYF

SEQ ID NO: 434593 - protein, 15 aa, Homo sapiens
  CDR3 for alpha chain variable domain of TCR clone 217297 (TRAV12-3, TRAJ11)
CAMSEENSGYSTLTF

SEQ ID NO: 434594 - protein, 14 aa, Homo sapiens
  CDR3 for beta chain variable domain of TCR clone 217297 (TRBV7-2, TRBJ2-7)
CASSLRWEVNEQYF

SEQ ID NO: 434595 - protein, 15 aa, Homo sapiens
  CDR3 for alpha chain variable domain of TCR clone 217298 (TRAV2, TRAJ9)
CAVEDRGTGGFRTIF

SEQ ID NO: 434596 - protein, 14 aa, Homo sapiens
  CDR3 for beta chain variable domain of TCR clone 217298 (TRBV12-5, TRBJ2-5)
CASGSRTHQETQYF

SEQ ID NO: 434597 - protein, 14 aa, Homo sapiens
  CDR3 for alpha chain variable domain of TCR clone 217299 (TRAV12-1, TRAJ12)
CVVTRMDSSYKLIF

SEQ ID NO: 434598 - protein, 15 aa, Homo sapiens
  CDR3 for beta chain variable domain of TCR clone 217299 (TRBV19, TRBJ1-6)
CASSTQGAVGSPLHF

SEQ ID NO: 434599 - protein, 13 aa, Homo sapiens
  CDR3 for alpha chain variable domain of TCR clone 217300 (TRAV21, TRAJ27)
CAALNTNAGKSTF

SEQ ID NO: 434600 - protein, 15 aa, Homo sapiens
  CDR3 for beta chain variable domain of TCR clone 217300 (TRBV11-2, TRBJ2-2)
CASSSDRVNAGELFF

SEQ ID NO: 434601 - protein, 14 aa, Homo sapiens
  CDR3 for alpha chain variable domain of TCR clone 217301 (TRAV12-2, TRAJ40)
CAVKIPSGTYKYIF

SEQ ID NO: 434602 - protein, 14 aa, Homo sapiens
  CDR3 for beta chain variable domain of TCR clone 217301 (TRBV7-2, TRBJ2-5)
CASSPRGSSETQYF

SEQ ID NO: 434603 - protein, 12 aa, Homo sapiens
  CDR3 for alpha chain variable domain of TCR clone 217302 (TRAV12-1, TRAJ40)
CVFYSGTYKYIF

SEQ ID NO: 434604 - protein, 14 aa, Homo sapiens
  CDR3 for beta chain variable domain of TCR clone 217302 (TRBV7-8, TRBJ2-3)
CASSSRDSTDTQYF

SEQ ID NO: 434605 - protein, 12 aa, Homo sapiens
  CDR3 for alpha chain variable domain of TCR clone 217303 (TRAV2, TRAJ24)
CAATDGWGKFQF

SEQ ID NO: 434606 - protein, 15 aa, Homo sapiens
  CDR3 for beta chain variable domain of TCR clone 217303 (TRBV10-3, TRBJ2-2)
CAIYTGGTGTGELFF

SEQ ID NO: 434607 - protein, 13 aa, Homo sapiens
  CDR3 for alpha chain variable domain of TCR clone 217304 (TRAV12-3, TRAJ7)
SAMSASGNNRLAF

SEQ ID NO: 434608 - protein, 14 aa, Homo sapiens
  CDR3 for beta chain variable domain of TCR clone 217304 (TRBV13, TRBJ2-5)
CASSLGPRGETQYF

SEQ ID NO: 434609 - protein, 21 aa, Homo sapiens
  CDR3 for alpha chain variable domain of TCR clone 217305 (TRAV1-1, TRAJ6)
CAVRREEATYIHLEEEPALLF

SEQ ID NO: 434610 - protein, 15 aa, Homo sapiens
  CDR3 for beta chain variable domain of TCR clone 217305 (TRBV6-6, TRBJ2-1)
CATRQGVSSYNEQFF

SEQ ID NO: 434611 - protein, 14 aa, Homo sapiens
  CDR3 for alpha chain variable domain of TCR clone 217306 (TRAV12-2, TRAJ40)
CAVKIPSGTYKYIF

SEQ ID NO: 434612 - protein, 15 aa, Homo sapiens
  CDR3 for beta chain variable domain of TCR clone 217306 (TRBV7-2, TRBJ2-1)
CASSFRESSYNEQFF

SEQ ID NO: 434613 - protein, 12 aa, Homo sapiens
  CDR3 for alpha chain variable domain of TCR clone 217307 (TRAV21, TRAJ11)
CAATSGYSTLTF

SEQ ID NO: 434614 - protein, 13 aa, Homo sapiens
  CDR3 for beta chain variable domain of TCR clone 217307 (TRBV20-1, TRBJ1-1)
CSARGGGNTEAFC

SEQ ID NO: 434615 - protein, 14 aa, Homo sapiens
  CDR3 for alpha chain variable domain of TCR clone 217308 (TRAV29/DV5, TRAJ34)
CAASASGNTAKLIF

SEQ ID NO: 434616 - protein, 14 aa, Homo sapiens
  CDR3 for beta chain variable domain of TCR clone 217308 (TRBV9, TRBJ2-3)
CASSVGLSTDTQYF

SEQ ID NO: 434617 - protein, 15 aa, Homo sapiens
  CDR3 for alpha chain variable domain of TCR clone 217309 (TRAV3, TRAJ47)
CAVRDIGEYGNKLVF

SEQ ID NO: 434618 - protein, 14 aa, Homo sapiens
  CDR3 for beta chain variable domain of TCR clone 217309 (TRBV13, TRBJ2-5)
SASSLERVGETQYF

SEQ ID NO: 434619 - protein, 15 aa, Homo sapiens
  CDR3 for alpha chain variable domain of TCR clone 217310 (TRAV12-3, TRAJ27)
CAMRAYNTNAGKSTF

SEQ ID NO: 434620 - protein, 13 aa, Homo sapiens
  CDR3 for beta chain variable domain of TCR clone 217310 (TRBV11-2, TRBJ2-5)
CASSRGPTETQYF

SEQ ID NO: 434621 - protein, 13 aa, Homo sapiens
  CDR3 for alpha chain variable domain of TCR clone 217311 (TRAV8-6, TRAJ49)
CAVITNTGNQFYF

SEQ ID NO: 434622 - protein, 15 aa, Homo sapiens
  CDR3 for beta chain variable domain of TCR clone 217311 (TRBV10-2, TRBJ2-6)
CASSEQGTGANVLTF

SEQ ID NO: 434623 - protein, 11 aa, Homo sapiens
  CDR3 for alpha chain variable domain of TCR clone 217312 (TRAV2, TRAJ13)
CASVGYQKVTF

SEQ ID NO: 434624 - protein, 13 aa, Homo sapiens
  CDR3 for beta chain variable domain of TCR clone 217312 (TRBV20-1, TRBJ2-7)
CSATHTSGYEQYF

SEQ ID NO: 434625 - protein, 13 aa, Homo sapiens
  CDR3 for alpha chain variable domain of TCR clone 217313 (TRAV3, TRAJ15)
CAVRDQAGTALIF

SEQ ID NO: 434626 - protein, 16 aa, Homo sapiens
  CDR3 for beta chain variable domain of TCR clone 217313 (TRBV5-7, TRBJ2-3)
CASSSLGGAITDTQYF

SEQ ID NO: 434627 - protein, 11 aa, Homo sapiens
  CDR3 for alpha chain variable domain of TCR clone 217314 (TRAV2, TRAJ13)
CASGGYQKVTF

SEQ ID NO: 434628 - protein, 15 aa, Homo sapiens
  CDR3 for beta chain variable domain of TCR clone 217314 (TRBV20-1, TRBJ2-7)
RSARVPAAYFYEQYF

SEQ ID NO: 434629 - protein, 18 aa, Homo sapiens
  CDR3 for alpha chain variable domain of TCR clone 217315 (TRAV13-1, TRAJ52)
CAASKRSAGGTSYGKLTF

SEQ ID NO: 434630 - protein, 16 aa, Homo sapiens
  CDR3 for beta chain variable domain of TCR clone 217315 (TRBV28, TRBJ2-2)
CASSLEGGSNTGELFF

SEQ ID NO: 434631 - protein, 14 aa, Homo sapiens
  CDR3 for alpha chain variable domain of TCR clone 217316 (TRAV21, TRAJ35)
CAVMPIGFGNVLHC

SEQ ID NO: 434632 - protein, 16 aa, Homo sapiens
  CDR3 for beta chain variable domain of TCR clone 217316 (TRBV20-1, TRBJ2-6)
CSASSQGYDGANVLTF

SEQ ID NO: 434633 - protein, 14 aa, Homo sapiens
  CDR3 for alpha chain variable domain of TCR clone 217317 (TRAV23/DV6, TRAJ8)
CAANKNTGFQKLVF

SEQ ID NO: 434634 - protein, 16 aa, Homo sapiens
  CDR3 for beta chain variable domain of TCR clone 217317 (TRBV4-1, TRBJ2-6)
CASSQVGDPGANVLTF

SEQ ID NO: 434635 - protein, 14 aa, Homo sapiens
  CDR3 for alpha chain variable domain of TCR clone 217318 (TRAV1-2, TRAJ8)
CAVREDTGFHKLVF

SEQ ID NO: 434636 - protein, 16 aa, Homo sapiens
  CDR3 for beta chain variable domain of TCR clone 217318 (TRBV5-1, TRBJ2-2)
CASSLWDTTNTGELFF

SEQ ID NO: 434637 - protein, 12 aa, Homo sapiens
  CDR3 for alpha chain variable domain of TCR clone 217319 (TRAV13-2, TRAJ23)
CAERHRGGKLIF

SEQ ID NO: 434638 - protein, 15 aa, Homo sapiens
  CDR3 for beta chain variable domain of TCR clone 217319 (TRBV6-1, TRBJ2-1)
CASSELRGQYNEQFF

SEQ ID NO: 434639 - protein, 14 aa, Homo sapiens
  CDR3 for alpha chain variable domain of TCR clone 217320 (TRAV12-2, TRAJ13)
CAVKKTGGYQKVTF

SEQ ID NO: 434640 - protein, 11 aa, Homo sapiens
  CDR3 for beta chain variable domain of TCR clone 217320 (TRBV29-1, TRBJ2-5)
CSEGRTGTQYF

SEQ ID NO: 434641 - protein, 17 aa, Homo sapiens
  CDR3 for alpha chain variable domain of TCR clone 217321 (TRAV12-2, TRAJ4)
CAVNVRPVSGGYNKLIC

SEQ ID NO: 434642 - protein, 17 aa, Homo sapiens
  CDR3 for beta chain variable domain of TCR clone 217321 (TRBV6-3, TRBJ2-1)
CASSYSSGTRGLDEQFF

SEQ ID NO: 434643 - protein, 14 aa, Homo sapiens
  CDR3 for alpha chain variable domain of TCR clone 217322 (TRAV12-3, TRAJ10)
SHLPLTGGGNKLTF

SEQ ID NO: 434644 - protein, 15 aa, Homo sapiens
  CDR3 for beta chain variable domain of TCR clone 217322 (TRBV19, TRBJ1-1)
CAITSGQIQNTEAFF

SEQ ID NO: 434645 - protein, 13 aa, Homo sapiens
  CDR3 for alpha chain variable domain of TCR clone 217323 (TRAV14/DV4, TRAJ49)
CAMVENTGNQFYF

SEQ ID NO: 434646 - protein, 13 aa, Homo sapiens
  CDR3 for beta chain variable domain of TCR clone 217323 (TRBV11-3, TRBJ2-1)
CASSSLRVDEQFF

SEQ ID NO: 434647 - protein, 12 aa, Homo sapiens
  CDR3 for alpha chain variable domain of TCR clone 217324 (TRAV21, TRAJ49)
CAVNDGGNQFYF

SEQ ID NO: 434648 - protein, 13 aa, Homo sapiens
  CDR3 for beta chain variable domain of TCR clone 217324 (TRBV2, TRBJ1-1)
CASSVLMNTEAFV

SEQ ID NO: 434649 - protein, 14 aa, Homo sapiens
  CDR3 for alpha chain variable domain of TCR clone 217325 (TRAV12-2, TRAJ17)
CAVNIKAAGNKLTF

SEQ ID NO: 434650 - protein, 13 aa, Homo sapiens
  CDR3 for beta chain variable domain of TCR clone 217325 (TRBV7-8, TRBJ2-7)
CASSLTGSREQYF

SEQ ID NO: 434651 - protein, 13 aa, Homo sapiens
  CDR3 for alpha chain variable domain of TCR clone 217326 (TRAV38-1, TRAJ42)
CARWGGSQGNLIF

SEQ ID NO: 434652 - protein, 21 aa, Homo sapiens
  CDR3 for beta chain variable domain of TCR clone 217326 (TRBV12-4, TRBJ2-1)
CASSLGQGASAVLRARDTAHR

SEQ ID NO: 434653 - protein, 15 aa, Homo sapiens
  CDR3 for alpha chain variable domain of TCR clone 217327 (TRAV23/DV6, TRAJ42)
CAARGYGGSQGNPIF

SEQ ID NO: 434654 - protein, 13 aa, Homo sapiens
  CDR3 for beta chain variable domain of TCR clone 217327 (TRBV7-2, TRBJ1-5)
CASSTQGSQPQHF

SEQ ID NO: 434655 - protein, 11 aa, Homo sapiens
  CDR3 for alpha chain variable domain of TCR clone 217328 (TRAV12-3, TRAJ17)
CNYAHRQQANF

SEQ ID NO: 434656 - protein, 15 aa, Homo sapiens
  CDR3 for beta chain variable domain of TCR clone 217328 (TRBV20-1, TRBJ2-7)
CSARDRVSGMDEQYF

SEQ ID NO: 434657 - protein, 15 aa, Homo sapiens
  CDR3 for alpha chain variable domain of TCR clone 217329 (TRAV20, TRAJ53)
CAVQASGGNNYKLTF

SEQ ID NO: 434658 - protein, 12 aa, Homo sapiens
  CDR3 for beta chain variable domain of TCR clone 217329 (TRBV7-8, TRBJ2-7)
CASSLGDREQYF

SEQ ID NO: 434659 - protein, 13 aa, Homo sapiens
  CDR3 for alpha chain variable domain of TCR clone 217330 (TRAV12-2, TRAJ9)
CAVKWAGGFKTIF

SEQ ID NO: 434660 - protein, 14 aa, Homo sapiens
  CDR3 for beta chain variable domain of TCR clone 217330 (TRBV18, TRBJ2-1)
CASSPQGRFNEQFF

SEQ ID NO: 434661 - protein, 14 aa, Homo sapiens
  CDR3 for alpha chain variable domain of TCR clone 217331 (TRAV26-1, TRAJ38)
CIADNAGNNHIQNL

SEQ ID NO: 434662 - protein, 13 aa, Homo sapiens
  CDR3 for beta chain variable domain of TCR clone 217331 (TRBV20-1, TRBJ1-1)
CSARGGGNTEAFF

SEQ ID NO: 434663 - protein, 19 aa, Homo sapiens
  CDR3 for alpha chain variable domain of TCR clone 217332 (TRAV25, )
CAGTGNNHIQNPDPAVYQL

SEQ ID NO: 434664 - protein, 14 aa, Homo sapiens
  CDR3 for beta chain variable domain of TCR clone 217332 (TRBV7-2, TRBJ1-2)
CASSQTGSTYGYTF

SEQ ID NO: 434665 - protein, 14 aa, Homo sapiens
  CDR3 for alpha chain variable domain of TCR clone 217333 (TRAV12-2, TRAJ13)
CAVKKTGGYQKVTF

SEQ ID NO: 434666 - protein, 13 aa, Homo sapiens
  CDR3 for beta chain variable domain of TCR clone 217333 (TRBV19, TRBJ2-7)
CASRKAGGSEQYV

SEQ ID NO: 434667 - protein, 13 aa, Homo sapiens
  CDR3 for alpha chain variable domain of TCR clone 217334 (TRAV26-2, TRAJ43)
CILRAVNNNDMRF

SEQ ID NO: 434668 - protein, 11 aa, Homo sapiens
  CDR3 for beta chain variable domain of TCR clone 217334 (TRBV29-1, TRBJ2-5)
CNEDRTGTQYF

SEQ ID NO: 434669 - protein, 14 aa, Homo sapiens
  CDR3 for alpha chain variable domain of TCR clone 217335 (TRAV12-2, TRAJ17)
RAVLFKAAGNKLTF

SEQ ID NO: 434670 - protein, 14 aa, Homo sapiens
  CDR3 for beta chain variable domain of TCR clone 217335 (TRBV15, TRBJ1-2)
CATSRDFDRVGYTF

SEQ ID NO: 434671 - protein, 16 aa, Homo sapiens
  CDR3 for alpha chain variable domain of TCR clone 217336 (TRAV23/DV6, TRAJ57)
CAASSTLSQGGSDKLF

SEQ ID NO: 434672 - protein, 14 aa, Homo sapiens
  CDR3 for beta chain variable domain of TCR clone 217336 (TRBV25-1, TRBJ1-1)
CASTHLGGNTEAFF

SEQ ID NO: 434673 - protein, 14 aa, Homo sapiens
  CDR3 for alpha chain variable domain of TCR clone 217337 (TRAV12-3, TRAJ33)
CAMSVPGSDYQLIW

SEQ ID NO: 434674 - protein, 12 aa, Homo sapiens
  CDR3 for beta chain variable domain of TCR clone 217337 (TRBV7-8, TRBJ2-7)
CASSLGDREQYF

SEQ ID NO: 434675 - protein, 14 aa, Homo sapiens
  CDR3 for alpha chain variable domain of TCR clone 217338 (TRAV1-2, TRAJ8)
CAVREDTGCQELVF

SEQ ID NO: 434676 - protein, 16 aa, Homo sapiens
  CDR3 for beta chain variable domain of TCR clone 217338 (TRBV7-3, TRBJ2-2)
CASSLKRGTLSGELFF

SEQ ID NO: 434677 - protein, 12 aa, Homo sapiens
  CDR3 for alpha chain variable domain of TCR clone 217339 (TRAV13-1, TRAJ21)
CAAKEGFNKFYF

SEQ ID NO: 434678 - protein, 19 aa, Homo sapiens
  CDR3 for beta chain variable domain of TCR clone 217339 (TRBV7-9, TRBJ2-1)
CASSPTRGALLRSYNEQFF

SEQ ID NO: 434679 - protein, 14 aa, Homo sapiens
  CDR3 for alpha chain variable domain of TCR clone 217340 (TRAV1-2, TRAJ8)
CAVREATGFQKLVF

SEQ ID NO: 434680 - protein, 13 aa, Homo sapiens
  CDR3 for beta chain variable domain of TCR clone 217340 (TRBV29-1, TRBJ1-1)
CSVGDSRNTEAFF

SEQ ID NO: 434681 - protein, 14 aa, Homo sapiens
  CDR3 for alpha chain variable domain of TCR clone 217341 (TRAV1-2, TRAJ16)
CAVNRFSDGQKLLF

SEQ ID NO: 434682 - protein, 14 aa, Homo sapiens
  CDR3 for beta chain variable domain of TCR clone 217341 (TRBV12-4, TRBJ1-1)
CASRQTGLNTEAFF

SEQ ID NO: 434683 - protein, 14 aa, Homo sapiens
  CDR3 for alpha chain variable domain of TCR clone 217342 (TRAV26-1, TRAJ11)
CIVPFYSGYSTLTF

SEQ ID NO: 434684 - protein, 21 aa, Homo sapiens
  CDR3 for beta chain variable domain of TCR clone 217342 (TRBV5-1, TRBJ1-6)
CASSPRGGADSTGGVRSPLHF

SEQ ID NO: 434685 - protein, 14 aa, Homo sapiens
  CDR3 for alpha chain variable domain of TCR clone 217343 (TRAV38-2/DV8, TRAJ57)
CARNTQGGSEKLVF

SEQ ID NO: 434686 - protein, 18 aa, Homo sapiens
  CDR3 for beta chain variable domain of TCR clone 217343 (TRBV11-2, TRBJ2-3)
CASSLGGASRGAPNTQYF

SEQ ID NO: 434687 - protein, 15 aa, Homo sapiens
  CDR3 for alpha chain variable domain of TCR clone 217344 (TRAV2, TRAJ37)
CAVEDGSSNTGKLIS

SEQ ID NO: 434688 - protein, 13 aa, Homo sapiens
  CDR3 for beta chain variable domain of TCR clone 217344 (TRBV20-1, TRBJ1-6)
CSTFREGNSPLHF

SEQ ID NO: 434689 - protein, 14 aa, Homo sapiens
  CDR3 for alpha chain variable domain of TCR clone 217345 (TRAV3, TRAJ37)
CTVKESGNTGKLIF

SEQ ID NO: 434690 - protein, 14 aa, Homo sapiens
  CDR3 for beta chain variable domain of TCR clone 217345 (TRBV2, TRBJ1-5)
CASSENRGGQPQHF

SEQ ID NO: 434691 - protein, 16 aa, Homo sapiens
  CDR3 for alpha chain variable domain of TCR clone 217346 (TRAV1-2, TRAJ10)
CAVRGVLTGGGNKLTF

SEQ ID NO: 434692 - protein, 13 aa, Homo sapiens
  CDR3 for beta chain variable domain of TCR clone 217346 (TRBV20-1, TRBJ1-6)
CSAPLGVGSTLHF

SEQ ID NO: 434693 - protein, 15 aa, Homo sapiens
  CDR3 for alpha chain variable domain of TCR clone 217347 (TRAV13-1, TRAJ44)
CAASRNTGTASKLTF

SEQ ID NO: 434694 - protein, 14 aa, Homo sapiens
  CDR3 for beta chain variable domain of TCR clone 217347 (TRBV2, TRBJ2-7)
RASSLTSGGYEQYF

SEQ ID NO: 434695 - protein, 16 aa, Homo sapiens
  CDR3 for alpha chain variable domain of TCR clone 217348 (TRAV30, TRAJ24)
CGTEIVDADSWGKFQF

SEQ ID NO: 434696 - protein, 13 aa, Homo sapiens
  CDR3 for beta chain variable domain of TCR clone 217348 (TRBV10-3, TRBJ2-7)
CASKLAVNYERYF

SEQ ID NO: 434697 - protein, 11 aa, Homo sapiens
  CDR3 for alpha chain variable domain of TCR clone 217349 (TRAV12-1, TRAJ30)
CVVNGQDKIIF

SEQ ID NO: 434698 - protein, 14 aa, Homo sapiens
  CDR3 for beta chain variable domain of TCR clone 217349 (TRBV7-9, TRBJ2-2)
CANSLGHRTGELFF

SEQ ID NO: 434699 - protein, 15 aa, Homo sapiens
  CDR3 for alpha chain variable domain of TCR clone 217350 (TRAV4, TRAJ39)
CLVGPNNNAVNMLTF

SEQ ID NO: 434700 - protein, 14 aa, Homo sapiens
  CDR3 for beta chain variable domain of TCR clone 217350 (TRBV19, TRBJ2-7)
CASNFRDTFTGMYV

SEQ ID NO: 434701 - protein, 14 aa, Homo sapiens
  CDR3 for alpha chain variable domain of TCR clone 217351 (TRAV35, TRAJ24)
CAGPRRDSWGKLQF

SEQ ID NO: 434702 - protein, 12 aa, Homo sapiens
  CDR3 for beta chain variable domain of TCR clone 217351 (TRBV12-4, TRBJ2-3)
CTSSLGQDTQYF

SEQ ID NO: 434703 - protein, 12 aa, Homo sapiens
  CDR3 for alpha chain variable domain of TCR clone 217352 (TRAV12-3, TRAJ17)
CAMTLTGNKLTF

SEQ ID NO: 434704 - protein, 15 aa, Homo sapiens
  CDR3 for beta chain variable domain of TCR clone 217352 (TRBV20-1, TRBJ2-7)
CSTRDRVSGRDEQYF

SEQ ID NO: 434705 - protein, 15 aa, Homo sapiens
  CDR3 for alpha chain variable domain of TCR clone 217353 (TRAV27, TRAJ38)
CAARRNAGNNRQLIW

SEQ ID NO: 434706 - protein, 13 aa, Homo sapiens
  CDR3 for beta chain variable domain of TCR clone 217353 (TRBV12-5, TRBJ2-3)
CASGDRRSDTQYF

SEQ ID NO: 434707 - protein, 14 aa, Homo sapiens
  CDR3 for alpha chain variable domain of TCR clone 217354 (TRAV12-2, TRAJ45)
CAVYSGGGADGLTF

SEQ ID NO: 434708 - protein, 16 aa, Homo sapiens
  CDR3 for beta chain variable domain of TCR clone 217354 (TRBV5-1, TRBJ1-1)
CASSSGGNSLNTEAFF

SEQ ID NO: 434709 - protein, 12 aa, Homo sapiens
  CDR3 for alpha chain variable domain of TCR clone 217355 (TRAV2, TRAJ9)
CAVGAGGFKTIF

SEQ ID NO: 434710 - protein, 13 aa, Homo sapiens
  CDR3 for beta chain variable domain of TCR clone 217355 (TRBV7-2, TRBJ2-7)
CASSSPSGSEQYF

SEQ ID NO: 434711 - protein, 14 aa, Homo sapiens
  CDR3 for alpha chain variable domain of TCR clone 217356 (TRAV27, TRAJ23)
CAGVSYNQGGKLIF

SEQ ID NO: 434712 - protein, 15 aa, Homo sapiens
  CDR3 for beta chain variable domain of TCR clone 217356 (TRBV20-1, TRBJ2-7)
CSARDRVSGMDEQYL

SEQ ID NO: 434713 - protein, 12 aa, Homo sapiens
  CDR3 for alpha chain variable domain of TCR clone 217357 (TRAV12-3, TRAJ17)
CAMTLTGNKLTF

SEQ ID NO: 434714 - protein, 15 aa, Homo sapiens
  CDR3 for beta chain variable domain of TCR clone 217357 (TRBV20-1, TRBJ2-7)
CSARDWVSGMDEQSF

SEQ ID NO: 434715 - protein, 13 aa, Homo sapiens
  CDR3 for alpha chain variable domain of TCR clone 217358 (TRAV21, TRAJ17)
CAPVKAAANKLTF

SEQ ID NO: 434716 - protein, 11 aa, Homo sapiens
  CDR3 for beta chain variable domain of TCR clone 217358 (TRBV20-1, TRBJ1-2)
CSIWASYGYTF

SEQ ID NO: 434717 - protein, 16 aa, Homo sapiens
  CDR3 for alpha chain variable domain of TCR clone 217359 (TRAV30, TRAJ24)
CGTEIVDADSWGKFQF

SEQ ID NO: 434718 - protein, 18 aa, Homo sapiens
  CDR3 for beta chain variable domain of TCR clone 217359 (TRBV11-2, TRBJ2-6)
CASSLNPFLGTGDNVLTF

SEQ ID NO: 434719 - protein, 15 aa, Homo sapiens
  CDR3 for alpha chain variable domain of TCR clone 217360 (TRAV26-1, TRAJ37)
CIVENGSGNTGKLIF

SEQ ID NO: 434720 - protein, 14 aa, Homo sapiens
  CDR3 for beta chain variable domain of TCR clone 217360 (TRBV6-1, TRBJ1-3)
CASVQGGGGNTIYF

SEQ ID NO: 434721 - protein, 14 aa, Homo sapiens
  CDR3 for alpha chain variable domain of TCR clone 217361 (TRAV12-2, TRAJ13)
CAVKKTGCYQKVTF

SEQ ID NO: 434722 - protein, 14 aa, Homo sapiens
  CDR3 for beta chain variable domain of TCR clone 217361 (TRBV2, TRBJ1-5)
CASKKTDSNQPQHF

SEQ ID NO: 434723 - protein, 18 aa, Homo sapiens
  CDR3 for alpha chain variable domain of TCR clone 217362 (TRAV26-1, TRAJ52)
CIVRVAGAGGTSYGKLTC

SEQ ID NO: 434724 - protein, 13 aa, Homo sapiens
  CDR3 for beta chain variable domain of TCR clone 217362 (TRBV7-3, TRBJ1-2)
CASSLKRGYGYTF

SEQ ID NO: 434725 - protein, 13 aa, Homo sapiens
  CDR3 for alpha chain variable domain of TCR clone 217363 (TRAV16, TRAJ28)
CALTGPGSYQLTF

SEQ ID NO: 434726 - protein, 16 aa, Homo sapiens
  CDR3 for beta chain variable domain of TCR clone 217363 (TRBV28, TRBJ1-5)
CASSLTGQGWNQPQHF

SEQ ID NO: 434727 - protein, 15 aa, Homo sapiens
  CDR3 for alpha chain variable domain of TCR clone 217364 (TRAV1-2, TRAJ16)
VLDGLEEKDGQKLLF

SEQ ID NO: 434728 - protein, 16 aa, Homo sapiens
  CDR3 for beta chain variable domain of TCR clone 217364 (TRBV19, TRBJ1-1)
CASRVDVTGAAWGAFF

SEQ ID NO: 434729 - protein, 16 aa, Homo sapiens
  CDR3 for alpha chain variable domain of TCR clone 217365 (TRAV17, TRAJ22)
WATDAISSGSARQRTF

SEQ ID NO: 434730 - protein, 15 aa, Homo sapiens
  CDR3 for beta chain variable domain of TCR clone 217365 (TRBV5-1, TRBJ2-1)
CASSPPRAPYNEQFF

SEQ ID NO: 434731 - protein, 15 aa, Homo sapiens
  CDR3 for alpha chain variable domain of TCR clone 217366 (TRAV17, TRAJ16)
CATALRFSDGQKLLF

SEQ ID NO: 434732 - protein, 15 aa, Homo sapiens
  CDR3 for beta chain variable domain of TCR clone 217366 (TRBV13, TRBJ1-5)
CASSFGQGGVQPQHV

SEQ ID NO: 434733 - protein, 15 aa, Homo sapiens
  CDR3 for alpha chain variable domain of TCR clone 217367 (TRAV8-3, TRAJ45)
CASSYSGGGADGLTF

SEQ ID NO: 434734 - protein, 15 aa, Homo sapiens
  CDR3 for beta chain variable domain of TCR clone 217367 (TRBV18, TRBJ2-7)
CASSPRSGTAYEQYF

SEQ ID NO: 434735 - protein, 13 aa, Homo sapiens
  CDR3 for alpha chain variable domain of TCR clone 217368 (TRAV12-2, TRAJ9)
CAVLETGGFKTIF

SEQ ID NO: 434736 - protein, 13 aa, Homo sapiens
  CDR3 for beta chain variable domain of TCR clone 217368 (TRBV6-1, TRBJ1-1)
CASSRQGNTEAFF

SEQ ID NO: 434737 - protein, 13 aa, Homo sapiens
  CDR3 for alpha chain variable domain of TCR clone 217369 (TRAV25, TRAJ10)
CAGRTGGGNKLTF

SEQ ID NO: 434738 - protein, 15 aa, Homo sapiens
  CDR3 for beta chain variable domain of TCR clone 217369 (TRBV19, TRBJ2-1)
CASSSPRVPLDEQFF

SEQ ID NO: 434739 - protein, 15 aa, Homo sapiens
  CDR3 for alpha chain variable domain of TCR clone 217370 (TRAV35, TRAJ21)
CAGQLSNFNKFTLDL

SEQ ID NO: 434740 - protein, 11 aa, Homo sapiens
  CDR3 for beta chain variable domain of TCR clone 217370 (TRBV7-6, TRBJ2-5)
CASSSQETQYF

SEQ ID NO: 434741 - protein, 15 aa, Homo sapiens
  CDR3 for alpha chain variable domain of TCR clone 217371 (TRAV4, TRAJ39)
CLVGPNNNAGNMLTF

SEQ ID NO: 434742 - protein, 13 aa, Homo sapiens
  CDR3 for beta chain variable domain of TCR clone 217371 (TRBV6-6, TRBJ2-1)
CASSLHQGDEQFF

SEQ ID NO: 434743 - protein, 16 aa, Homo sapiens
  CDR3 for alpha chain variable domain of TCR clone 217372 (TRAV1-1, TRAJ29)
CAVRSTRNSGNTPLVF

SEQ ID NO: 434744 - protein, 13 aa, Homo sapiens
  CDR3 for beta chain variable domain of TCR clone 217372 (TRBV18, TRBJ1-1)
CASSGGRNTEAFF

SEQ ID NO: 434745 - protein, 10 aa, Homo sapiens
  CDR3 for alpha chain variable domain of TCR clone 217373 (TRAV12-3, TRAJ34)
CAMSADKLIF

SEQ ID NO: 434746 - protein, 14 aa, Homo sapiens
  CDR3 for beta chain variable domain of TCR clone 217373 (TRBV7-6, TRBJ2-3)
CASSLGTVTDTQYF

SEQ ID NO: 434747 - protein, 16 aa, Homo sapiens
  CDR3 for alpha chain variable domain of TCR clone 217374 (TRAV3, TRAJ37)
CAVRPHVSGNTGKLIF

SEQ ID NO: 434748 - protein, 11 aa, Homo sapiens
  CDR3 for beta chain variable domain of TCR clone 217374 (TRBV10-3, TRBJ2-7)
CAISEGLEQYF

SEQ ID NO: 434749 - protein, 10 aa, Homo sapiens
  CDR3 for alpha chain variable domain of TCR clone 217375 (TRAV38-2/DV8, TRAJ40)
CASGTYKYIF

SEQ ID NO: 434750 - protein, 14 aa, Homo sapiens
  CDR3 for beta chain variable domain of TCR clone 217375 (TRBV7-9, TRBJ2-1)
CASSTRDSLYEQFF

SEQ ID NO: 434751 - protein, 17 aa, Homo sapiens
  CDR3 for alpha chain variable domain of TCR clone 217376 (TRAV23/DV6, TRAJ57)
CAASSTLSQGGSEKLVF

SEQ ID NO: 434752 - protein, 14 aa, Homo sapiens
  CDR3 for beta chain variable domain of TCR clone 217376 (TRBV25-1, TRBJ1-1)
GASTHLGGNTEAFF

SEQ ID NO: 434753 - protein, 14 aa, Homo sapiens
  CDR3 for alpha chain variable domain of TCR clone 217377 (TRAV12-2, TRAJ13)
CAVKKTWGYQKVTF

SEQ ID NO: 434754 - protein, 18 aa, Homo sapiens
  CDR3 for beta chain variable domain of TCR clone 217377 (TRBV24-1, TRBJ2-2)
CATSDSGQGTANTGELFF

SEQ ID NO: 434755 - protein, 16 aa, Homo sapiens
  CDR3 for alpha chain variable domain of TCR clone 217378 (TRAV12-2, TRAJ18)
CSVTTDRGSTLGRLYF

SEQ ID NO: 434756 - protein, 14 aa, Homo sapiens
  CDR3 for beta chain variable domain of TCR clone 217378 (TRBV4-2, TRBJ1-5)
CASSQDSINQPQHF

SEQ ID NO: 434757 - protein, 14 aa, Homo sapiens
  CDR3 for alpha chain variable domain of TCR clone 217379 (TRAV17, TRAJ31)
CATVLRNNNARLMF

SEQ ID NO: 434758 - protein, 16 aa, Homo sapiens
  CDR3 for beta chain variable domain of TCR clone 217379 (TRBV7-3, TRBJ2-2)
CASSLKRGTLSGELFF

SEQ ID NO: 434759 - protein, 12 aa, Homo sapiens
  CDR3 for alpha chain variable domain of TCR clone 217380 (TRAV13-2, TRAJ23)
CAERHRGGKLIF

SEQ ID NO: 434760 - protein, 16 aa, Homo sapiens
  CDR3 for beta chain variable domain of TCR clone 217380 (TRBV13, TRBJ2-3)
CASTTLDREDTDTQYF

SEQ ID NO: 434761 - protein, 12 aa, Homo sapiens
  CDR3 for alpha chain variable domain of TCR clone 217381 (TRAV21, TRAJ11)
CALRGGNSTLTF

SEQ ID NO: 434762 - protein, 15 aa, Homo sapiens
  CDR3 for beta chain variable domain of TCR clone 217381 (TRBV6-1, TRBJ2-7)
CASSEPIAATTEQYF

SEQ ID NO: 434763 - protein, 11 aa, Homo sapiens
  CDR3 for alpha chain variable domain of TCR clone 217382 (TRAV2, TRAJ33)
CAVESNYQLIW

SEQ ID NO: 434764 - protein, 15 aa, Homo sapiens
  CDR3 for beta chain variable domain of TCR clone 217382 (TRBV18, TRBJ2-1)
CASSPPSASYNEQFF

SEQ ID NO: 434765 - protein, 13 aa, Homo sapiens
  CDR3 for alpha chain variable domain of TCR clone 217383 (TRAV29/DV5, TRAJ48)
CAASSFGNEKLTF

SEQ ID NO: 434766 - protein, 14 aa, Homo sapiens
  CDR3 for beta chain variable domain of TCR clone 217383 (TRBV12-5, TRBJ2-5)
CASGSRTHQETQYF

SEQ ID NO: 434767 - protein, 14 aa, Homo sapiens
  CDR3 for alpha chain variable domain of TCR clone 217384 (TRAV12-2, TRAJ24)
CAVTPADSWGKLQF

SEQ ID NO: 434768 - protein, 12 aa, Homo sapiens
  CDR3 for beta chain variable domain of TCR clone 217384 (TRBV3-1, TRBJ2-1)
CASSQGSSGQYF

SEQ ID NO: 434769 - protein, 16 aa, Homo sapiens
  CDR3 for alpha chain variable domain of TCR clone 217385 (TRAV21, TRAJ37)
CAVRTAGSSNTGKLIF

SEQ ID NO: 434770 - protein, 14 aa, Homo sapiens
  CDR3 for beta chain variable domain of TCR clone 217385 (TRBV7-9, TRBJ1-2)
CASSLDPYNYGYTF

SEQ ID NO: 434771 - protein, 14 aa, Homo sapiens
  CDR3 for alpha chain variable domain of TCR clone 217386 (TRAV35, TRAJ22)
CAGLRPGSARQLTF

SEQ ID NO: 434772 - protein, 15 aa, Homo sapiens
  CDR3 for beta chain variable domain of TCR clone 217386 (TRBV7-2, TRBJ2-2)
CASRRPGQNTGELFF

SEQ ID NO: 434773 - protein, 11 aa, Homo sapiens
  CDR3 for alpha chain variable domain of TCR clone 217387 (TRAV2, TRAJ33)
CAVDSIYQLIW

SEQ ID NO: 434774 - protein, 14 aa, Homo sapiens
  CDR3 for beta chain variable domain of TCR clone 217387 (TRBV11-2, TRBJ2-3)
CASSRLARTDTQYF

SEQ ID NO: 434775 - protein, 11 aa, Homo sapiens
  CDR3 for alpha chain variable domain of TCR clone 217388 (TRAV1-1, TRAJ23)
CAVRQGGKLIF

SEQ ID NO: 434776 - protein, 15 aa, Homo sapiens
  CDR3 for beta chain variable domain of TCR clone 217388 (TRBV7-7, TRBJ2-2)
CATSKLAKNTGELFF

SEQ ID NO: 434777 - protein, 17 aa, Homo sapiens
  CDR3 for alpha chain variable domain of TCR clone 217389 (TRAV3, TRAJ6)
FPVRDGPRAGGSYIPTF

SEQ ID NO: 434778 - protein, 14 aa, Homo sapiens
  CDR3 for beta chain variable domain of TCR clone 217389 (TRBV7-2, TRBJ2-7)
CASSPKTSFYEQYF

SEQ ID NO: 434779 - protein, 15 aa, Homo sapiens
  CDR3 for alpha chain variable domain of TCR clone 217390 (TRAV12-3, TRAJ6)
CAMSPASGGSYIPTF

SEQ ID NO: 434780 - protein, 15 aa, Homo sapiens
  CDR3 for beta chain variable domain of TCR clone 217390 (TRBV3-1, TRBJ2-2)
CASSQDLAGTGELFF

SEQ ID NO: 434781 - protein, 13 aa, Homo sapiens
  CDR3 for alpha chain variable domain of TCR clone 217391 (TRAV17, TRAJ54)
CATVIQGAQKLVF

SEQ ID NO: 434782 - protein, 15 aa, Homo sapiens
  CDR3 for beta chain variable domain of TCR clone 217391 (TRBV13, TRBJ2-1)
CASSLLYGLNNEQFF

SEQ ID NO: 434783 - protein, 15 aa, Homo sapiens
  CDR3 for alpha chain variable domain of TCR clone 217392 (TRAV21, TRAJ53)
CATLNSGGSNYKLTF

SEQ ID NO: 434784 - protein, 16 aa, Homo sapiens
  CDR3 for beta chain variable domain of TCR clone 217392 (TRBV13, TRBJ2-3)
CASSLSRVAGGEYAVF

SEQ ID NO: 434785 - protein, 11 aa, Homo sapiens
  CDR3 for alpha chain variable domain of TCR clone 217393 (TRAV1-2, TRAJ20)
CAVSNDYKLSF

SEQ ID NO: 434786 - protein, 16 aa, Homo sapiens
  CDR3 for beta chain variable domain of TCR clone 217393 (TRBV4-3, TRBJ1-6)
CASSQDPGVYNSPLHF

SEQ ID NO: 434787 - protein, 14 aa, Homo sapiens
  CDR3 for alpha chain variable domain of TCR clone 217394 (TRAV21, TRAJ48)
CAVIAHFGNEKLTF

SEQ ID NO: 434788 - protein, 14 aa, Homo sapiens
  CDR3 for beta chain variable domain of TCR clone 217394 (TRBV19, TRBJ2-1)
CARGARSFQWEQFF

SEQ ID NO: 434789 - protein, 14 aa, Homo sapiens
  CDR3 for alpha chain variable domain of TCR clone 217395 (TRAV1-2, TRAJ16)
RAVNRFSDGQKLLF

SEQ ID NO: 434790 - protein, 14 aa, Homo sapiens
  CDR3 for beta chain variable domain of TCR clone 217395 (TRBV12-5, TRBJ2-5)
CASGSRTHQETQYF

SEQ ID NO: 434791 - protein, 11 aa, Homo sapiens
  CDR3 for alpha chain variable domain of TCR clone 217396 (TRAV1-1, TRAJ30)
CAVSRDDKIIF

SEQ ID NO: 434792 - protein, 17 aa, Homo sapiens
  CDR3 for beta chain variable domain of TCR clone 217396 (TRBV13, TRBJ2-3)
CASSLSRVAGGRNTQYF

SEQ ID NO: 434793 - protein, 13 aa, Homo sapiens
  CDR3 for alpha chain variable domain of TCR clone 217397 (TRAV35, TRAJ43)
CAGYPYYNNDMRF

SEQ ID NO: 434794 - protein, 15 aa, Homo sapiens
  CDR3 for beta chain variable domain of TCR clone 217397 (TRBV25-1, TRBJ1-4)
CASSKRIATNEKLFF

SEQ ID NO: 434795 - protein, 16 aa, Homo sapiens
  CDR3 for alpha chain variable domain of TCR clone 217398 (TRAV26-1, TRAJ37)
CIVRGDCSGNTGKLIF

SEQ ID NO: 434796 - protein, 13 aa, Homo sapiens
  CDR3 for beta chain variable domain of TCR clone 217398 (TRBV7-6, TRBJ1-2)
CASSLVADYGYTF

SEQ ID NO: 434797 - protein, 14 aa, Homo sapiens
  CDR3 for alpha chain variable domain of TCR clone 217399 (TRAV13-1, TRAJ10)
CAAKEPGGGNKLTF

SEQ ID NO: 434798 - protein, 14 aa, Homo sapiens
  CDR3 for beta chain variable domain of TCR clone 217399 (TRBV7-3, TRBJ2-1)
CASSLAGGTNEQFF

SEQ ID NO: 434799 - protein, 13 aa, Homo sapiens
  CDR3 for alpha chain variable domain of TCR clone 217400 (TRAV9-2, TRAJ53)
CALSGGSNYTLTF

SEQ ID NO: 434800 - protein, 15 aa, Homo sapiens
  CDR3 for beta chain variable domain of TCR clone 217400 (TRBV9, TRBJ1-6)
CASSVAGTGDSPLHF

SEQ ID NO: 434801 - protein, 12 aa, Homo sapiens
  CDR3 for alpha chain variable domain of TCR clone 217401 (TRAV12-2, TRAJ28)
CAVRAGSYQLTF

SEQ ID NO: 434802 - protein, 17 aa, Homo sapiens
  CDR3 for beta chain variable domain of TCR clone 217401 (TRBV13, TRBJ2-3)
CASSLSRVAGGRNTQYF

SEQ ID NO: 434803 - protein, 13 aa, Homo sapiens
  CDR3 for alpha chain variable domain of TCR clone 217402 (TRAV1-2, TRAJ31)
CAVRGYNNARLMF

SEQ ID NO: 434804 - protein, 14 aa, Homo sapiens
  CDR3 for beta chain variable domain of TCR clone 217402 (TRBV12-4, TRBJ1-3)
CASTLTGAGNTIYL

SEQ ID NO: 434805 - protein, 13 aa, Homo sapiens
  CDR3 for alpha chain variable domain of TCR clone 217403 (TRAV22, TRAJ29)
CAVGGSGNTPLVF

SEQ ID NO: 434806 - protein, 16 aa, Homo sapiens
  CDR3 for beta chain variable domain of TCR clone 217403 (TRBV4-2, TRBJ1-1)
CASRPLDGGGDTEAFF

SEQ ID NO: 434807 - protein, 16 aa, Homo sapiens
  CDR3 for alpha chain variable domain of TCR clone 217404 (TRAV38-1, TRAJ56)
CAFMKRQTGANSKLTF

SEQ ID NO: 434808 - protein, 16 aa, Homo sapiens
  CDR3 for beta chain variable domain of TCR clone 217404 (TRBV7-2, TRBJ2-1)
CASSLGRTSGDNEQFF

SEQ ID NO: 434809 - protein, 13 aa, Homo sapiens
  CDR3 for alpha chain variable domain of TCR clone 217405 (TRAV24, TRAJ42)
CAFSTGSQGNLIF

SEQ ID NO: 434810 - protein, 14 aa, Homo sapiens
  CDR3 for beta chain variable domain of TCR clone 217405 (TRBV5-1, TRBJ2-3)
VASGGITTTDTQYF

SEQ ID NO: 434811 - protein, 12 aa, Homo sapiens
  CDR3 for alpha chain variable domain of TCR clone 217406 (TRAV1-1, TRAJ43)
CAPRVSSNDMRF

SEQ ID NO: 434812 - protein, 13 aa, Homo sapiens
  CDR3 for beta chain variable domain of TCR clone 217406 (TRBV28, TRBJ2-4)
CASSQSSKNIQYF

SEQ ID NO: 434813 - protein, 11 aa, Homo sapiens
  CDR3 for alpha chain variable domain of TCR clone 217407 (TRAV16, TRAJ33)
CALHSNYQLIW

SEQ ID NO: 434814 - protein, 15 aa, Homo sapiens
  CDR3 for beta chain variable domain of TCR clone 217407 (TRBV28, TRBJ2-7)
CASSLLAGARSEQYF

SEQ ID NO: 434815 - protein, 16 aa, Homo sapiens
  CDR3 for alpha chain variable domain of TCR clone 217408 (TRAV30, TRAJ57)
FGTGWAPQGGSEKLVF

SEQ ID NO: 434816 - protein, 14 aa, Homo sapiens
  CDR3 for beta chain variable domain of TCR clone 217408 (TRBV18, TRBJ1-1)
CASSPGFQGVEAFF

SEQ ID NO: 434817 - protein, 11 aa, Homo sapiens
  CDR3 for alpha chain variable domain of TCR clone 217409 (TRAV21, TRAJ34)
CAHYNTDKLIF

SEQ ID NO: 434818 - protein, 15 aa, Homo sapiens
  CDR3 for beta chain variable domain of TCR clone 217409 (TRBV7-2, TRBJ1-2)
CASSPRAGWNYGYTF

SEQ ID NO: 434819 - protein, 19 aa, Homo sapiens
  CDR3 for alpha chain variable domain of TCR clone 217410 (TRAV3, TRAJ37)
CAVRDIVGGYPSNTGKLIS

SEQ ID NO: 434820 - protein, 14 aa, Homo sapiens
  CDR3 for beta chain variable domain of TCR clone 217410 (TRBV7-8, TRBJ2-3)
CASSLEAGTDTQYF

SEQ ID NO: 434821 - protein, 19 aa, Homo sapiens
  CDR3 for alpha chain variable domain of TCR clone 217411 (TRAV3, TRAJ6)
CAVRDRNPSRSGGSYIPTF

SEQ ID NO: 434822 - protein, 17 aa, Homo sapiens
  CDR3 for beta chain variable domain of TCR clone 217411 (TRBV11-2, TRBJ2-1)
CASSLYPPGVEYNEQFF

SEQ ID NO: 434823 - protein, 12 aa, Homo sapiens
  CDR3 for alpha chain variable domain of TCR clone 217412 (TRAV21, TRAJ31)
SAVSPARGRLMF

SEQ ID NO: 434824 - protein, 14 aa, Homo sapiens
  CDR3 for beta chain variable domain of TCR clone 217412 (TRBV28, TRBJ2-7)
CASSLLRISYEQYF

SEQ ID NO: 434825 - protein, 16 aa, Homo sapiens
  CDR3 for alpha chain variable domain of TCR clone 217413 (TRAV12-2, TRAJ18)
CAVTTYRGSTLGRLYF

SEQ ID NO: 434826 - protein, 13 aa, Homo sapiens
  CDR3 for beta chain variable domain of TCR clone 217413 (TRBV19, TRBJ2-3)
CATWDKITDTQYF

SEQ ID NO: 434827 - protein, 13 aa, Homo sapiens
  CDR3 for alpha chain variable domain of TCR clone 217414 (TRAV2, TRAJ40)
CAVVTSGTYKYIF

SEQ ID NO: 434828 - protein, 14 aa, Homo sapiens
  CDR3 for beta chain variable domain of TCR clone 217414 (TRBV11-3, TRBJ2-1)
CASPTFVLSGEQFF

SEQ ID NO: 434829 - protein, 14 aa, Homo sapiens
  CDR3 for alpha chain variable domain of TCR clone 217415 (TRAV20, TRAJ42)
CAVQAGGSQGNLIF

SEQ ID NO: 434830 - protein, 14 aa, Homo sapiens
  CDR3 for beta chain variable domain of TCR clone 217415 (TRBV27, TRBJ2-1)
CASRHLGGGKEQFF

SEQ ID NO: 434831 - protein, 14 aa, Homo sapiens
  CDR3 for alpha chain variable domain of TCR clone 217416 (TRAV8-4, TRAJ15)
CAVTIREAGTALSF

SEQ ID NO: 434832 - protein, 13 aa, Homo sapiens
  CDR3 for beta chain variable domain of TCR clone 217416 (TRBV10-3, TRBJ2-7)
CAISEKGGYEQYF

SEQ ID NO: 434833 - protein, 13 aa, Homo sapiens
  CDR3 for alpha chain variable domain of TCR clone 217417 (TRAV3, TRAJ3)
CAVRDMGKQCFQD

SEQ ID NO: 434834 - protein, 15 aa, Homo sapiens
  CDR3 for beta chain variable domain of TCR clone 217417 (TRBV7-2, TRBJ2-1)
CASSSGLAGGNEQFF

SEQ ID NO: 434835 - protein, 12 aa, Homo sapiens
  CDR3 for alpha chain variable domain of TCR clone 217418 (TRAV30, TRAJ39)
CGRGNAGNMLTF

SEQ ID NO: 434836 - protein, 13 aa, Homo sapiens
  CDR3 for beta chain variable domain of TCR clone 217418 (TRBV7-2, TRBJ2-7)
CASSSPSGSEQYF

SEQ ID NO: 434837 - protein, 14 aa, Homo sapiens
  CDR3 for alpha chain variable domain of TCR clone 217419 (TRAV1-2, TRAJ16)
CAVNRFSDGPNMLF

SEQ ID NO: 434838 - protein, 14 aa, Homo sapiens
  CDR3 for beta chain variable domain of TCR clone 217419 (TRBV13, TRBJ2-5)
CASSLGRGQETQYF

SEQ ID NO: 434839 - protein, 14 aa, Homo sapiens
  CDR3 for alpha chain variable domain of TCR clone 217420 (TRAV8-4, TRAJ39)
CAVSLNNAGNMLTF

SEQ ID NO: 434840 - protein, 16 aa, Homo sapiens
  CDR3 for beta chain variable domain of TCR clone 217420 (TRBV19, TRBJ2-3)
CASSPGAASRTDTQYF

SEQ ID NO: 434841 - protein, 14 aa, Homo sapiens
  CDR3 for alpha chain variable domain of TCR clone 217421 (TRAV2, TRAJ37)
CAVDFTSNTGKLIF

SEQ ID NO: 434842 - protein, 15 aa, Homo sapiens
  CDR3 for beta chain variable domain of TCR clone 217421 (TRBV5-1, TRBJ2-2)
CASSWTSPNTGELFF

SEQ ID NO: 434843 - protein, 13 aa, Homo sapiens
  CDR3 for alpha chain variable domain of TCR clone 217422 (TRAV1-2, TRAJ12)
CAVSMASSYKLIF

SEQ ID NO: 434844 - protein, 14 aa, Homo sapiens
  CDR3 for beta chain variable domain of TCR clone 217422 (TRBV7-2, TRBJ2-7)
CASSPKTSFYEQYF

SEQ ID NO: 434845 - protein, 13 aa, Homo sapiens
  CDR3 for alpha chain variable domain of TCR clone 217423 (TRAV1-2, TRAJ9)
CAALNTGGFKTIF

SEQ ID NO: 434846 - protein, 13 aa, Homo sapiens
  CDR3 for beta chain variable domain of TCR clone 217423 (TRBV7-2, TRBJ2-2)
CASSSVRAGELFF

SEQ ID NO: 434847 - protein, 16 aa, Homo sapiens
  CDR3 for alpha chain variable domain of TCR clone 217424 (TRAV1-2, TRAJ10)
CAVRGVLTGGGNKLTF

SEQ ID NO: 434848 - protein, 22 aa, Homo sapiens
  CDR3 for beta chain variable domain of TCR clone 217424 (TRBV4-2, TRBJ2-2)
CASSQEGATSGRVGAGTGELFF

SEQ ID NO: 434849 - protein, 15 aa, Homo sapiens
  CDR3 for alpha chain variable domain of TCR clone 217425 (TRAV2, TRAJ24)
CAVVRLKNSWGKLRF

SEQ ID NO: 434850 - protein, 16 aa, Homo sapiens
  CDR3 for beta chain variable domain of TCR clone 217425 (TRBV7-7, TRBJ2-3)
CASSPGTSGSTDTQYF

SEQ ID NO: 434851 - protein, 11 aa, Homo sapiens
  CDR3 for alpha chain variable domain of TCR clone 217426 (TRAV8-6, TRAJ13)
CALGIYQQVTF

SEQ ID NO: 434852 - protein, 15 aa, Homo sapiens
  CDR3 for beta chain variable domain of TCR clone 217426 (TRBV5-1, TRBJ2-7)
CASSLNGGPAREQYF

SEQ ID NO: 434853 - protein, 10 aa, Homo sapiens
  CDR3 for alpha chain variable domain of TCR clone 217427 (TRAV21, TRAJ31)
CCEKQCRLMF

SEQ ID NO: 434854 - protein, 15 aa, Homo sapiens
  CDR3 for beta chain variable domain of TCR clone 217427 (TRBV20-1, TRBJ2-7)
CSARDRVSGMDEQYF

SEQ ID NO: 434855 - protein, 15 aa, Homo sapiens
  CDR3 for alpha chain variable domain of TCR clone 217428 (TRAV21, TRAJ24)
CAARSSTDSWGKLQF

SEQ ID NO: 434856 - protein, 20 aa, Homo sapiens
  CDR3 for beta chain variable domain of TCR clone 217428 (TRBV11-2, TRBJ2-5)
LRTRPCISVRSSTGEETQYF

SEQ ID NO: 434857 - protein, 15 aa, Homo sapiens
  CDR3 for alpha chain variable domain of TCR clone 217429 (TRAV8-6, TRAJ45)
CAVSEQGGGADGLTF

SEQ ID NO: 434858 - protein, 14 aa, Homo sapiens
  CDR3 for beta chain variable domain of TCR clone 217429 (TRBV28, TRBJ2-5)
CASSGSSFWETQYF

SEQ ID NO: 434859 - protein, 10 aa, Homo sapiens
  CDR3 for alpha chain variable domain of TCR clone 217430 (TRAV21, TRAJ31)
CAVDNARLMF

SEQ ID NO: 434860 - protein, 15 aa, Homo sapiens
  CDR3 for beta chain variable domain of TCR clone 217430 (TRBV11-3, TRBJ2-3)
CASLKDGREGDTQYF

SEQ ID NO: 434861 - protein, 14 aa, Homo sapiens
  CDR3 for alpha chain variable domain of TCR clone 217431 (TRAV2, TRAJ37)
CAVAFTSNTGKLIF

SEQ ID NO: 434862 - protein, 14 aa, Homo sapiens
  CDR3 for beta chain variable domain of TCR clone 217431 (TRBV5-1, TRBJ2-5)
CASSFGGSQETQYF

SEQ ID NO: 434863 - protein, 13 aa, Homo sapiens
  CDR3 for alpha chain variable domain of TCR clone 217432 (TRAV12-1, TRAJ40)
CVAPTSGTYKYIF

SEQ ID NO: 434864 - protein, 16 aa, Homo sapiens
  CDR3 for beta chain variable domain of TCR clone 217432 (TRBV7-9, TRBJ1-2)
CASSLGFSSGEDGNTF

SEQ ID NO: 434865 - protein, 14 aa, Homo sapiens
  CDR3 for alpha chain variable domain of TCR clone 217433 (TRAV1-2, TRAJ8)
CAVREDTGFQKLVF

SEQ ID NO: 434866 - protein, 18 aa, Homo sapiens
  CDR3 for beta chain variable domain of TCR clone 217433 (TRBV5-4, TRBJ2-3)
CASSPTAGFLPSTDTQYF

SEQ ID NO: 434867 - protein, 13 aa, Homo sapiens
  CDR3 for alpha chain variable domain of TCR clone 217434 (TRAV29/DV5, TRAJ31)
CAASRNNNAILMF

SEQ ID NO: 434868 - protein, 14 aa, Homo sapiens
  CDR3 for beta chain variable domain of TCR clone 217434 (TRBV7-2, TRBJ2-5)
CASSPRGSLETQYF

SEQ ID NO: 434869 - protein, 11 aa, Homo sapiens
  CDR3 for alpha chain variable domain of TCR clone 217435 (TRAV1-2, TRAJ20)
CAVANDYKLSF

SEQ ID NO: 434870 - protein, 15 aa, Homo sapiens
  CDR3 for beta chain variable domain of TCR clone 217435 (TRBV5-1, TRBJ2-1)
CASSPPRAPYNEQFF

SEQ ID NO: 434871 - protein, 14 aa, Homo sapiens
  CDR3 for alpha chain variable domain of TCR clone 217436 (TRAV13-1, TRAJ44)
CAAKATGTASKRTC

SEQ ID NO: 434872 - protein, 14 aa, Homo sapiens
  CDR3 for beta chain variable domain of TCR clone 217436 (TRBV19, TRBJ2-2)
CASSTLHRSGELFF

SEQ ID NO: 434873 - protein, 14 aa, Homo sapiens
  CDR3 for alpha chain variable domain of TCR clone 217437 (TRAV1-2, TRAJ16)
CAVNRFSDGQKLLF

SEQ ID NO: 434874 - protein, 12 aa, Homo sapiens
  CDR3 for beta chain variable domain of TCR clone 217437 (TRBV20-1, TRBJ2-1)
CSARLGTDEQFF

SEQ ID NO: 434875 - protein, 15 aa, Homo sapiens
  CDR3 for alpha chain variable domain of TCR clone 217438 (TRAV3, TRAJ45)
CAVRTPWGGADGLTF

SEQ ID NO: 434876 - protein, 16 aa, Homo sapiens
  CDR3 for beta chain variable domain of TCR clone 217438 (TRBV6-1, TRBJ2-2)
CASSFGQGANTGELFI

SEQ ID NO: 434877 - protein, 12 aa, Homo sapiens
  CDR3 for alpha chain variable domain of TCR clone 217439 (TRAV12-3, TRAJ17)
CAMTLTGNKLTF

SEQ ID NO: 434878 - protein, 11 aa, Homo sapiens
  CDR3 for beta chain variable domain of TCR clone 217439 (TRBV12-4, TRBJ2-2)
CASSSAGELFC

SEQ ID NO: 434879 - protein, 15 aa, Homo sapiens
  CDR3 for alpha chain variable domain of TCR clone 217440 (TRAV26-1, TRAJ29)
CIVRVEGSGNTPLVF

SEQ ID NO: 434880 - protein, 16 aa, Homo sapiens
  CDR3 for beta chain variable domain of TCR clone 217440 (TRBV20-1, TRBJ1-4)
CSAPGQGLLANEKLFF

SEQ ID NO: 434881 - protein, 16 aa, Homo sapiens
  CDR3 for alpha chain variable domain of TCR clone 217441 (TRAV3, TRAJ10)
CAVRDMRAGGGNKPTF

SEQ ID NO: 434882 - protein, 16 aa, Homo sapiens
  CDR3 for beta chain variable domain of TCR clone 217441 (TRBV19, TRBJ2-2)
CASSFPGQGLAGELFF

SEQ ID NO: 434883 - protein, 11 aa, Homo sapiens
  CDR3 for alpha chain variable domain of TCR clone 217442 (TRAV2, TRAJ13)
CASGGYQKVTF

SEQ ID NO: 434884 - protein, 16 aa, Homo sapiens
  CDR3 for beta chain variable domain of TCR clone 217442 (TRBV9, TRBJ2-5)
CASSPRTGYDEETQYF

SEQ ID NO: 434885 - protein, 13 aa, Homo sapiens
  CDR3 for alpha chain variable domain of TCR clone 217443 (TRAV1-2, TRAJ12)
CAVSMDSSYKLIF

SEQ ID NO: 434886 - protein, 15 aa, Homo sapiens
  CDR3 for beta chain variable domain of TCR clone 217443 (TRBV27, TRBJ2-5)
CASSLIPSGGETQYC

SEQ ID NO: 434887 - protein, 13 aa, Homo sapiens
  CDR3 for alpha chain variable domain of TCR clone 217444 (TRAV8-3, TRAJ43)
CAVGPDNNNDMSF

SEQ ID NO: 434888 - protein, 12 aa, Homo sapiens
  CDR3 for beta chain variable domain of TCR clone 217444 (TRBV7-2, TRBJ1-6)
CASSLSSSHLHF

SEQ ID NO: 434889 - protein, 14 aa, Homo sapiens
  CDR3 for alpha chain variable domain of TCR clone 217445 (TRAV12-2, TRAJ3)
CAVSLYSSASKIIF

SEQ ID NO: 434890 - protein, 14 aa, Homo sapiens
  CDR3 for beta chain variable domain of TCR clone 217445 (TRBV27, TRBJ2-1)
CVGSIAETYNEQFF

SEQ ID NO: 434891 - protein, 13 aa, Homo sapiens
  CDR3 for alpha chain variable domain of TCR clone 217446 (TRAV12-2, TRAJ12)
CAARMDSSYKLIF

SEQ ID NO: 434892 - protein, 11 aa, Homo sapiens
  CDR3 for beta chain variable domain of TCR clone 217446 (TRBV7-8, TRBJ2-7)
CASSLSLEQYF

SEQ ID NO: 434893 - protein, 14 aa, Homo sapiens
  CDR3 for alpha chain variable domain of TCR clone 217447 (TRAV1-2, TRAJ16)
CAVNRFSDGQKLHF

SEQ ID NO: 434894 - protein, 17 aa, Homo sapiens
  CDR3 for beta chain variable domain of TCR clone 217447 (TRBV28, TRBJ2-5)
CASSTPEGDALQETQYF

SEQ ID NO: 434895 - protein, 15 aa, Homo sapiens
  CDR3 for alpha chain variable domain of TCR clone 217448 (TRAV8-1, TRAJ6)
CAVNAGAGGSYIHTF

SEQ ID NO: 434896 - protein, 14 aa, Homo sapiens
  CDR3 for beta chain variable domain of TCR clone 217448 (TRBV25-1, TRBJ1-6)
CASSLSADISPLHF

SEQ ID NO: 434897 - protein, 16 aa, Homo sapiens
  CDR3 for alpha chain variable domain of TCR clone 217449 (TRAV12-2, TRAJ6)
CAAPLAGSGGSYIPTF

SEQ ID NO: 434898 - protein, 14 aa, Homo sapiens
  CDR3 for beta chain variable domain of TCR clone 217449 (TRBV7-2, TRBJ2-7)
CASSPKTSFYEQYF

SEQ ID NO: 434899 - protein, 13 aa, Homo sapiens
  CDR3 for alpha chain variable domain of TCR clone 217450 (TRAV12-2, TRAJ10)
CAVPTGGGNKLTF

SEQ ID NO: 434900 - protein, 15 aa, Homo sapiens
  CDR3 for beta chain variable domain of TCR clone 217450 (TRBV4-2, TRBJ1-1)
CASSQRSSGRTEAFF

SEQ ID NO: 434901 - protein, 18 aa, Homo sapiens
  CDR3 for alpha chain variable domain of TCR clone 217451 (TRAV21, TRAJ52)
CAVRPSPAGGTSYGKLTF

SEQ ID NO: 434902 - protein, 17 aa, Homo sapiens
  CDR3 for beta chain variable domain of TCR clone 217451 (TRBV13, TRBJ2-3)
CASSLSRVAGGKNTQYV

SEQ ID NO: 434903 - protein, 12 aa, Homo sapiens
  CDR3 for alpha chain variable domain of TCR clone 217452 (TRAV13-1, TRAJ49)
CAAPNTGNQFYF

SEQ ID NO: 434904 - protein, 15 aa, Homo sapiens
  CDR3 for beta chain variable domain of TCR clone 217452 (TRBV2, TRBJ2-1)
CASSELAGSYNEQFF

SEQ ID NO: 434905 - protein, 13 aa, Homo sapiens
  CDR3 for alpha chain variable domain of TCR clone 217453 (TRAV13-2, TRAJ48)
CAEMDFGNEKLTF

SEQ ID NO: 434906 - protein, 13 aa, Homo sapiens
  CDR3 for beta chain variable domain of TCR clone 217453 (TRBV12-4, TRBJ2-7)
CASSFVPTAEQYF

SEQ ID NO: 434907 - protein, 15 aa, Homo sapiens
  CDR3 for alpha chain variable domain of TCR clone 217454 (TRAV12-3, TRAJ6)
CAMSATTGGSYIPTL

SEQ ID NO: 434908 - protein, 16 aa, Homo sapiens
  CDR3 for beta chain variable domain of TCR clone 217454 (TRBV20-1, TRBJ1-2)
VSASMGQGVANYGYTF

SEQ ID NO: 434909 - protein, 15 aa, Homo sapiens
  CDR3 for alpha chain variable domain of TCR clone 217455 (TRAV25, TRAJ41)
CAGPWNSNSGYALNF

SEQ ID NO: 434910 - protein, 13 aa, Homo sapiens
  CDR3 for beta chain variable domain of TCR clone 217455 (TRBV15, TRBJ1-1)
CATSRGIHARAFF

SEQ ID NO: 434911 - protein, 12 aa, Homo sapiens
  CDR3 for alpha chain variable domain of TCR clone 217456 (TRAV3, TRAJ43)
CAVRDPNNDMRF

SEQ ID NO: 434912 - protein, 12 aa, Homo sapiens
  CDR3 for beta chain variable domain of TCR clone 217456 (TRBV7-3, TRBJ2-1)
CASSFINNEQFF

SEQ ID NO: 434913 - protein, 13 aa, Homo sapiens
  CDR3 for alpha chain variable domain of TCR clone 217457 (TRAV21, TRAJ27)
CAARPGNAGKSTF

SEQ ID NO: 434914 - protein, 16 aa, Homo sapiens
  CDR3 for beta chain variable domain of TCR clone 217457 (TRBV7-3, TRBJ2-1)
CASSSIRRAPTMSSSS

SEQ ID NO: 434915 - protein, 13 aa, Homo sapiens
  CDR3 for alpha chain variable domain of TCR clone 217458 (TRAV13-1, TRAJ22)
CAASRGSASQLTF

SEQ ID NO: 434916 - protein, 13 aa, Homo sapiens
  CDR3 for beta chain variable domain of TCR clone 217458 (TRBV11-3, TRBJ2-3)
CASSHDTKDTQYF

SEQ ID NO: 434917 - protein, 13 aa, Homo sapiens
  CDR3 for alpha chain variable domain of TCR clone 217459 (TRAV12-1, TRAJ40)
SVVHTSGTYKYIF

SEQ ID NO: 434918 - protein, 18 aa, Homo sapiens
  CDR3 for beta chain variable domain of TCR clone 217459 (TRBV7-6, TRBJ2-1)
CASSPRTSGMSSYNEQFF

SEQ ID NO: 434919 - protein, 14 aa, Homo sapiens
  CDR3 for alpha chain variable domain of TCR clone 217460 (TRAV12-1, TRAJ17)
CEVNYKAAGNKLTF

SEQ ID NO: 434920 - protein, 14 aa, Homo sapiens
  CDR3 for beta chain variable domain of TCR clone 217460 (TRBV7-2, TRBJ2-7)
CASRSQGAAYEQYF

SEQ ID NO: 434921 - protein, 12 aa, Homo sapiens
  CDR3 for alpha chain variable domain of TCR clone 217461 (TRAV12-3, TRAJ17)
CAMTRTVNKLTF

SEQ ID NO: 434922 - protein, 15 aa, Homo sapiens
  CDR3 for beta chain variable domain of TCR clone 217461 (TRBV20-1, TRBJ2-7)
CSARDRVSGMDEQYF

SEQ ID NO: 434923 - protein, 13 aa, Homo sapiens
  CDR3 for alpha chain variable domain of TCR clone 217462 (TRAV12-2, TRAJ42)
CAVKRGSQGNLIF

SEQ ID NO: 434924 - protein, 16 aa, Homo sapiens
  CDR3 for beta chain variable domain of TCR clone 217462 (TRBV18, TRBJ1-1)
CASSPGVGGRGGEAFF

SEQ ID NO: 434925 - protein, 12 aa, Homo sapiens
  CDR3 for alpha chain variable domain of TCR clone 217463 (TRAV2, TRAJ10)
CASTGGGNKLTF

SEQ ID NO: 434926 - protein, 14 aa, Homo sapiens
  CDR3 for beta chain variable domain of TCR clone 217463 (TRBV19, TRBJ2-5)
CASSMTGQQETQCF

SEQ ID NO: 434927 - protein, 23 aa, Homo sapiens
  CDR3 for alpha chain variable domain of TCR clone 217464 (TRAV8-6, TRAJ8)
CAVKEGIENTGFRNLYLELAPDF

SEQ ID NO: 434928 - protein, 12 aa, Homo sapiens
  CDR3 for beta chain variable domain of TCR clone 217464 (TRBV19, TRBJ1-4)
CASKDWPGGLFF

SEQ ID NO: 434929 - protein, 12 aa, Homo sapiens
  CDR3 for alpha chain variable domain of TCR clone 217465 (TRAV2, TRAJ9)
CAVVAGGFKTIF

SEQ ID NO: 434930 - protein, 16 aa, Homo sapiens
  CDR3 for beta chain variable domain of TCR clone 217465 (TRBV13, TRBJ2-2)
CASSPRTGEHTGELFL

SEQ ID NO: 434931 - protein, 18 aa, Homo sapiens
  CDR3 for alpha chain variable domain of TCR clone 217466 (TRAV9-2, TRAJ52)
CALSQHNAGGTSYGKLTF

SEQ ID NO: 434932 - protein, 13 aa, Homo sapiens
  CDR3 for beta chain variable domain of TCR clone 217466 (TRBV7-9, TRBJ1-2)
CASSLKQNYGYSF

SEQ ID NO: 434933 - protein, 14 aa, Homo sapiens
  CDR3 for alpha chain variable domain of TCR clone 217467 (TRAV22, TRAJ28)
CAVYSGAGSYQLNF

SEQ ID NO: 434934 - protein, 16 aa, Homo sapiens
  CDR3 for beta chain variable domain of TCR clone 217467 (TRBV24-1, TRBJ2-3)
CATSDPGTGATDTQYF

SEQ ID NO: 434935 - protein, 14 aa, Homo sapiens
  CDR3 for alpha chain variable domain of TCR clone 217468 (TRAV12-3, TRAJ12)
CAMSWMDSSYKLIF

SEQ ID NO: 434936 - protein, 14 aa, Homo sapiens
  CDR3 for beta chain variable domain of TCR clone 217468 (TRBV20-1, TRBJ1-4)
CSARSGQSNEKLFF

SEQ ID NO: 434937 - protein, 16 aa, Homo sapiens
  CDR3 for alpha chain variable domain of TCR clone 217469 (TRAV8-2, TRAJ7)
CVVSEGPYYGNNRRAF

SEQ ID NO: 434938 - protein, 15 aa, Homo sapiens
  CDR3 for beta chain variable domain of TCR clone 217469 (TRBV27, TRBJ2-3)
CASSLGLAATDTQYF

SEQ ID NO: 434939 - protein, 14 aa, Homo sapiens
  CDR3 for alpha chain variable domain of TCR clone 217470 (TRAV1-2, TRAJ8)
CAVREDTGFQKLVF

SEQ ID NO: 434940 - protein, 13 aa, Homo sapiens
  CDR3 for beta chain variable domain of TCR clone 217470 (TRBV12-4, TRBJ1-5)
CASGPDRAQPQHF

SEQ ID NO: 434941 - protein, 15 aa, Homo sapiens
  CDR3 for alpha chain variable domain of TCR clone 217471 (TRAV1-1, TRAJ23)
CAVREGDNQGGKLIF

SEQ ID NO: 434942 - protein, 18 aa, Homo sapiens
  CDR3 for beta chain variable domain of TCR clone 217471 (TRBV10-1, TRBJ2-1)
CASSWVGGALFSTMSSSS

SEQ ID NO: 434943 - protein, 16 aa, Homo sapiens
  CDR3 for alpha chain variable domain of TCR clone 217472 (TRAV30, TRAJ24)
CGTEIVNADSWGKFQF

SEQ ID NO: 434944 - protein, 15 aa, Homo sapiens
  CDR3 for beta chain variable domain of TCR clone 217472 (TRBV20-1, TRBJ2-7)
CSARDRVSGMDEQYF

SEQ ID NO: 434945 - protein, 13 aa, Homo sapiens
  CDR3 for alpha chain variable domain of TCR clone 217473 (TRAV8-6, TRAJ43)
CAVPGSRNNDMRF

SEQ ID NO: 434946 - protein, 15 aa, Homo sapiens
  CDR3 for beta chain variable domain of TCR clone 217473 (TRBV6-6, TRBJ2-4)
CASSHMGSGKNTQYF

SEQ ID NO: 434947 - protein, 15 aa, Homo sapiens
  CDR3 for alpha chain variable domain of TCR clone 217474 (TRAV26-1, TRAJ22)
CIVKVSFWFCKATDL

SEQ ID NO: 434948 - protein, 13 aa, Homo sapiens
  CDR3 for beta chain variable domain of TCR clone 217474 (TRBV7-9, TRBJ1-2)
CASSLKQNYGYTF

SEQ ID NO: 434949 - protein, 15 aa, Homo sapiens
  CDR3 for alpha chain variable domain of TCR clone 217475 (TRAV8-3, TRAJ45)
CASSYSGGGADGLTF

SEQ ID NO: 434950 - protein, 13 aa, Homo sapiens
  CDR3 for beta chain variable domain of TCR clone 217475 (TRBV20-1, TRBJ1-1)
CSAFDTEHTEAFF

SEQ ID NO: 434951 - protein, 15 aa, Homo sapiens
  CDR3 for alpha chain variable domain of TCR clone 217476 (TRAV12-2, TRAJ37)
CAVRGGSSNTGKLIF

SEQ ID NO: 434952 - protein, 15 aa, Homo sapiens
  CDR3 for beta chain variable domain of TCR clone 217476 (TRBV6-1, TRBJ2-3)
CASSERGGITDTQYF

SEQ ID NO: 434953 - protein, 12 aa, Homo sapiens
  CDR3 for alpha chain variable domain of TCR clone 217477 (TRAV26-1, TRAJ36)
CIVRVRPDNLFF

SEQ ID NO: 434954 - protein, 13 aa, Homo sapiens
  CDR3 for beta chain variable domain of TCR clone 217477 (TRBV11-2, TRBJ2-5)
CASSRGPSETQYF

SEQ ID NO: 434955 - protein, 11 aa, Homo sapiens
  CDR3 for alpha chain variable domain of TCR clone 217478 (TRAV29/DV5, TRAJ49)
CAAVPGNQFYF

SEQ ID NO: 434956 - protein, 13 aa, Homo sapiens
  CDR3 for beta chain variable domain of TCR clone 217478 (TRBV7-2, TRBJ2-4)
CASSREHANIQYF

SEQ ID NO: 434957 - protein, 16 aa, Homo sapiens
  CDR3 for alpha chain variable domain of TCR clone 217479 (TRAV30, TRAJ24)
CGTEIVDADSWGKFQF

SEQ ID NO: 434958 - protein, 15 aa, Homo sapiens
  CDR3 for beta chain variable domain of TCR clone 217479 (TRBV7-6, TRBJ2-3)
CASSPIIYSTDTQYF

SEQ ID NO: 434959 - protein, 15 aa, Homo sapiens
  CDR3 for alpha chain variable domain of TCR clone 217480 (TRAV8-4, TRAJ47)
CAVSDPKEYGNKLVF

SEQ ID NO: 434960 - protein, 15 aa, Homo sapiens
  CDR3 for beta chain variable domain of TCR clone 217480 (TRBV11-2, TRBJ2-1)
CASSLGPDSYNEQFF

SEQ ID NO: 434961 - protein, 11 aa, Homo sapiens
  CDR3 for alpha chain variable domain of TCR clone 217481 (TRAV21, TRAJ34)
CAVTNTDKLIF

SEQ ID NO: 434962 - protein, 13 aa, Homo sapiens
  CDR3 for beta chain variable domain of TCR clone 217481 (TRBV15, TRBJ1-2)
CATSMTANYGYTF

SEQ ID NO: 434963 - protein, 13 aa, Homo sapiens
  CDR3 for alpha chain variable domain of TCR clone 217482 (TRAV27, TRAJ57)
CRSAQGGSEKLVF

SEQ ID NO: 434964 - protein, 12 aa, Homo sapiens
  CDR3 for beta chain variable domain of TCR clone 217482 (TRBV11-2, TRBJ2-1)
CASSPGNNEQFF

SEQ ID NO: 434965 - protein, 12 aa, Homo sapiens
  CDR3 for alpha chain variable domain of TCR clone 217483 (TRAV13-1, TRAJ49)
CAASIGGNQFYF

SEQ ID NO: 434966 - protein, 14 aa, Homo sapiens
  CDR3 for beta chain variable domain of TCR clone 217483 (TRBV12-4, TRBJ1-1)
CASSLDGLNTEAFF

SEQ ID NO: 434967 - protein, 16 aa, Homo sapiens
  CDR3 for alpha chain variable domain of TCR clone 217484 (TRAV12-2, TRAJ37)
FAVKEKGSSNTGKLIF

SEQ ID NO: 434968 - protein, 12 aa, Homo sapiens
  CDR3 for beta chain variable domain of TCR clone 217484 (TRBV10-1, TRBJ1-5)
CASSDSNQPQHF

SEQ ID NO: 434969 - protein, 15 aa, Homo sapiens
  CDR3 for alpha chain variable domain of TCR clone 217485 (TRAV2, TRAJ24)
CAVVRLKNSWGKLQF

SEQ ID NO: 434970 - protein, 12 aa, Homo sapiens
  CDR3 for beta chain variable domain of TCR clone 217485 (TRBV11-2, TRBJ2-2)
CASSLPTGELFF

SEQ ID NO: 434971 - protein, 14 aa, Homo sapiens
  CDR3 for alpha chain variable domain of TCR clone 217486 (TRAV9-2, TRAJ39)
CALYIYNAGNMLTF

SEQ ID NO: 434972 - protein, 13 aa, Homo sapiens
  CDR3 for beta chain variable domain of TCR clone 217486 (TRBV19, TRBJ1-2)
CASSVPGQDRYTF

SEQ ID NO: 434973 - protein, 14 aa, Homo sapiens
  CDR3 for alpha chain variable domain of TCR clone 217487 (TRAV8-6, TRAJ40)
CAVSVSSGTYKYIF

SEQ ID NO: 434974 - protein, 15 aa, Homo sapiens
  CDR3 for beta chain variable domain of TCR clone 217487 (TRBV20-1, TRBJ2-7)
CSASSPGLAGDEQYF

SEQ ID NO: 434975 - protein, 13 aa, Homo sapiens
  CDR3 for alpha chain variable domain of TCR clone 217488 (TRAV8-6, TRAJ21)
CAVSPSSLNKFYF

SEQ ID NO: 434976 - protein, 18 aa, Homo sapiens
  CDR3 for beta chain variable domain of TCR clone 217488 (TRBV11-2, TRBJ2-3)
CASSVGGASRGAPNTQYF

SEQ ID NO: 434977 - protein, 15 aa, Homo sapiens
  CDR3 for alpha chain variable domain of TCR clone 217489 (TRAV26-2, TRAJ54)
CILRDVGQGAKKLVF

SEQ ID NO: 434978 - protein, 13 aa, Homo sapiens
  CDR3 for beta chain variable domain of TCR clone 217489 (TRBV7-9, TRBJ1-1)
CASSLAGVTEAFF

SEQ ID NO: 434979 - protein, 11 aa, Homo sapiens
  CDR3 for alpha chain variable domain of TCR clone 217490 (TRAV12-1, TRAJ15)
CVVNAGTALIL

SEQ ID NO: 434980 - protein, 16 aa, Homo sapiens
  CDR3 for beta chain variable domain of TCR clone 217490 (TRBV28, TRBJ2-1)
CASSSRVRESYNEQFF

SEQ ID NO: 434981 - protein, 15 aa, Homo sapiens
  CDR3 for alpha chain variable domain of TCR clone 217491 (TRAV8-4, TRAJ37)
CAVTYGPSHTGKLIF

SEQ ID NO: 434982 - protein, 13 aa, Homo sapiens
  CDR3 for beta chain variable domain of TCR clone 217491 (TRBV12-4, TRBJ2-5)
CASSLGGSRTQYF

SEQ ID NO: 434983 - protein, 12 aa, Homo sapiens
  CDR3 for alpha chain variable domain of TCR clone 217492 (TRAV20, TRAJ56)
CAVTGANSKLTI

SEQ ID NO: 434984 - protein, 14 aa, Homo sapiens
  CDR3 for beta chain variable domain of TCR clone 217492 (TRBV20-1, TRBJ2-5)
CSALVPGYQETQYF

SEQ ID NO: 434985 - protein, 12 aa, Homo sapiens
  CDR3 for alpha chain variable domain of TCR clone 217493 (TRAV20, TRAJ37)
CALPSNTGKLIF

SEQ ID NO: 434986 - protein, 14 aa, Homo sapiens
  CDR3 for beta chain variable domain of TCR clone 217493 (TRBV20-1, TRBJ1-1)
CSARAVNGYTEAFF

SEQ ID NO: 434987 - protein, 19 aa, Homo sapiens
  CDR3 for alpha chain variable domain of TCR clone 217494 (TRAV25, TRAJ20)
TATQTTDVGILPHDYKLSF

SEQ ID NO: 434988 - protein, 17 aa, Homo sapiens
  CDR3 for beta chain variable domain of TCR clone 217494 (TRBV4-3, TRBJ2-1)
CASSQCSSGRASGEQFF

SEQ ID NO: 434989 - protein, 15 aa, Homo sapiens
  CDR3 for alpha chain variable domain of TCR clone 217495 (TRAV8-3, TRAJ15)
CAVGAPNQAGTALFF

SEQ ID NO: 434990 - protein, 14 aa, Homo sapiens
  CDR3 for beta chain variable domain of TCR clone 217495 (TRBV20-1, TRBJ2-1)
CSPNDEASYNEQFF

SEQ ID NO: 434991 - protein, 13 aa, Homo sapiens
  CDR3 for alpha chain variable domain of TCR clone 217496 (TRAV8-3, TRAJ48)
CAVVPFGNDKLTF

SEQ ID NO: 434992 - protein, 15 aa, Homo sapiens
  CDR3 for beta chain variable domain of TCR clone 217496 (TRBV11-2, TRBJ2-1)
CASSSPSTRYNEQFL

SEQ ID NO: 434993 - protein, 19 aa, Homo sapiens
  CDR3 for alpha chain variable domain of TCR clone 217497 (TRAV8-3, TRAJ34)
LSTSVLWVWGLRNTDKLIF

SEQ ID NO: 434994 - protein, 15 aa, Homo sapiens
  CDR3 for beta chain variable domain of TCR clone 217497 (TRBV9, TRBJ1-6)
CASSVAGTGDSPLHF

SEQ ID NO: 434995 - protein, 11 aa, Homo sapiens
  CDR3 for alpha chain variable domain of TCR clone 217498 (TRAV17, TRAJ43)
CATPRSNDKRF

SEQ ID NO: 434996 - protein, 14 aa, Homo sapiens
  CDR3 for beta chain variable domain of TCR clone 217498 (TRBV7-2, TRBJ2-7)
CASSPKTSFYEQYF

SEQ ID NO: 434997 - protein, 14 aa, Homo sapiens
  CDR3 for alpha chain variable domain of TCR clone 217499 (TRAV23/DV6, TRAJ24)
CAASLSASWGKLQF

SEQ ID NO: 434998 - protein, 16 aa, Homo sapiens
  CDR3 for beta chain variable domain of TCR clone 217499 (TRBV7-9, TRBJ2-6)
CASSLKGPLRANVLTF

SEQ ID NO: 434999 - protein, 17 aa, Homo sapiens
  CDR3 for alpha chain variable domain of TCR clone 217500 (TRAV23/DV6, TRAJ57)
CSASSTLSQGGSDKLVF

SEQ ID NO: 435000 - protein, 14 aa, Homo sapiens
  CDR3 for beta chain variable domain of TCR clone 217500 (TRBV25-1, TRBJ1-1)
CASTHLGGNTEAFF

SEQ ID NO: 435001 - protein, 14 aa, Homo sapiens
  CDR3 for alpha chain variable domain of TCR clone 217501 (TRAV13-1, TRAJ35)
CAASKGGFGNVLHC

SEQ ID NO: 435002 - protein, 14 aa, Homo sapiens
  CDR3 for beta chain variable domain of TCR clone 217501 (TRBV15, TRBJ2-5)
CATSGDRGQETQYF

SEQ ID NO: 435003 - protein, 18 aa, Homo sapiens
  CDR3 for alpha chain variable domain of TCR clone 217502 (TRAV13-1, TRAJ52)
CAAKSPNAGGTSNGKLTF

SEQ ID NO: 435004 - protein, 17 aa, Homo sapiens
  CDR3 for beta chain variable domain of TCR clone 217502 (TRBV20-1, TRBJ2-1)
CSASSSGLAGSYNEQFF

SEQ ID NO: 435005 - protein, 16 aa, Homo sapiens
  CDR3 for alpha chain variable domain of TCR clone 217503 (TRAV8-3, TRAJ13)
CAVGAYPSGGYQKVTF

SEQ ID NO: 435006 - protein, 15 aa, Homo sapiens
  CDR3 for beta chain variable domain of TCR clone 217503 (TRBV19, TRBJ1-5)
CASSIVWADKQTQHF

SEQ ID NO: 435007 - protein, 14 aa, Homo sapiens
  CDR3 for alpha chain variable domain of TCR clone 217504 (TRAV1-2, TRAJ8)
CAVREDTGFQKLVF

SEQ ID NO: 435008 - protein, 17 aa, Homo sapiens
  CDR3 for beta chain variable domain of TCR clone 217504 (TRBV11-3, TRBJ2-6)
CASKWGQGLSGANVLTF

SEQ ID NO: 435009 - protein, 13 aa, Homo sapiens
  CDR3 for alpha chain variable domain of TCR clone 217505 (TRAV12-2, TRAJ10)
CAVPTGGGNKLTF

SEQ ID NO: 435010 - protein, 16 aa, Homo sapiens
  CDR3 for beta chain variable domain of TCR clone 217505 (TRBV28, TRBJ2-1)
CASSSPEYPRDNEQFF

SEQ ID NO: 435011 - protein, 17 aa, Homo sapiens
  CDR3 for alpha chain variable domain of TCR clone 217506 (TRAV20, TRAJ28)
CAVQGGYSGAGSYQLTF

SEQ ID NO: 435012 - protein, 15 aa, Homo sapiens
  CDR3 for beta chain variable domain of TCR clone 217506 (TRBV7-2, TRBJ2-7)
CSSSLSSGRTYEQYF

SEQ ID NO: 435013 - protein, 14 aa, Homo sapiens
  CDR3 for alpha chain variable domain of TCR clone 217507 (TRAV35, TRAJ33)
CAGSSQDSNYQFIW

SEQ ID NO: 435014 - protein, 23 aa, Homo sapiens
  CDR3 for beta chain variable domain of TCR clone 217507 (TRBV5-1, TRBJ1-4)
CASSLEGRKGKTVFWQWNPALCL

SEQ ID NO: 435015 - protein, 13 aa, Homo sapiens
  CDR3 for alpha chain variable domain of TCR clone 217508 (TRAV1-1, TRAJ38)
CAVGAGNNRKLIW

SEQ ID NO: 435016 - protein, 15 aa, Homo sapiens
  CDR3 for beta chain variable domain of TCR clone 217508 (TRBV11-3, TRBJ1-3)
CASSLSGTSGNTIYF

SEQ ID NO: 435017 - protein, 15 aa, Homo sapiens
  CDR3 for alpha chain variable domain of TCR clone 217509 (TRAV2, TRAJ38)
CAVEDRIGNNRKLIW

SEQ ID NO: 435018 - protein, 13 aa, Homo sapiens
  CDR3 for beta chain variable domain of TCR clone 217509 (TRBV7-9, TRBJ1-2)
CASSLKQNYGYTF

SEQ ID NO: 435019 - protein, 15 aa, Homo sapiens
  CDR3 for alpha chain variable domain of TCR clone 217510 (TRAV3, TRAJ5)
CAVRDLDTGRRALTF

SEQ ID NO: 435020 - protein, 17 aa, Homo sapiens
  CDR3 for beta chain variable domain of TCR clone 217510 (TRBV5-1, TRBJ2-3)
CASSLGASTSGTDTQYF

SEQ ID NO: 435021 - protein, 17 aa, Homo sapiens
  CDR3 for alpha chain variable domain of TCR clone 217511 (TRAV3, TRAJ6)
CAVRDGPRAGGSYIPTF

SEQ ID NO: 435022 - protein, 20 aa, Homo sapiens
  CDR3 for beta chain variable domain of TCR clone 217511 (TRBV7-3, TRBJ2-3)
CISVPAAPPGLIGSTDTQYF

SEQ ID NO: 435023 - protein, 14 aa, Homo sapiens
  CDR3 for alpha chain variable domain of TCR clone 217512 (TRAV1-1, TRAJ23)
CAVSIYNQGGKLIC

SEQ ID NO: 435024 - protein, 15 aa, Homo sapiens
  CDR3 for beta chain variable domain of TCR clone 217512 (TRBV5-8, TRBJ2-2)
CASSLDRGATGELFF

SEQ ID NO: 435025 - protein, 21 aa, Homo sapiens
  CDR3 for alpha chain variable domain of TCR clone 217513 (TRAV1-1, TRAJ6)
CLLLLRCERLERTGESYIPTF

SEQ ID NO: 435026 - protein, 15 aa, Homo sapiens
  CDR3 for beta chain variable domain of TCR clone 217513 (TRBV10-2, TRBJ2-7)
CASGASGATSSTSGR

SEQ ID NO: 435027 - protein, 17 aa, Homo sapiens
  CDR3 for alpha chain variable domain of TCR clone 217514 (TRAV3, TRAJ42)
CAVRDRDYGGSQGNLIF

SEQ ID NO: 435028 - protein, 14 aa, Homo sapiens
  CDR3 for beta chain variable domain of TCR clone 217514 (TRBV15, TRBJ2-3)
CATRSGTSTDTQYF

SEQ ID NO: 435029 - protein, 16 aa, Homo sapiens
  CDR3 for alpha chain variable domain of TCR clone 217515 (TRAV3, TRAJ10)
CAVRDMRAVGGNKLTL

SEQ ID NO: 435030 - protein, 16 aa, Homo sapiens
  CDR3 for beta chain variable domain of TCR clone 217515 (TRBV5-7, TRBJ1-5)
CASSLQQDREYQPQHF

SEQ ID NO: 435031 - protein, 11 aa, Homo sapiens
  CDR3 for alpha chain variable domain of TCR clone 217516 (TRAV12-3, TRAJ27)
CAMANAGKSTF

SEQ ID NO: 435032 - protein, 13 aa, Homo sapiens
  CDR3 for beta chain variable domain of TCR clone 217516 (TRBV20-1, TRBJ1-1)
CIARVGGNTEAFF

SEQ ID NO: 435033 - protein, 19 aa, Homo sapiens
  CDR3 for alpha chain variable domain of TCR clone 217517 (TRAV38-1, TRAJ53)
CAFMKHGLESGVSNYKLPF

SEQ ID NO: 435034 - protein, 13 aa, Homo sapiens
  CDR3 for beta chain variable domain of TCR clone 217517 (TRBV19, TRBJ2-7)
CASSPRQSYEQYF

SEQ ID NO: 435035 - protein, 11 aa, Homo sapiens
  CDR3 for alpha chain variable domain of TCR clone 217518 (TRAV12-2, TRAJ39)
CAANNMLTFGG

SEQ ID NO: 435036 - protein, 16 aa, Homo sapiens
  CDR3 for beta chain variable domain of TCR clone 217518 (TRBV5-3, TRBJ2-2)
CARSFGTGTNTGELFF

SEQ ID NO: 435037 - protein, 13 aa, Homo sapiens
  CDR3 for alpha chain variable domain of TCR clone 217519 (TRAV2, TRAJ10)
CAVETGGGNKITF

SEQ ID NO: 435038 - protein, 16 aa, Homo sapiens
  CDR3 for beta chain variable domain of TCR clone 217519 (TRBV27, TRBJ2-1)
CASSSTGQEMNNEQFF

SEQ ID NO: 435039 - protein, 18 aa, Homo sapiens
  CDR3 for alpha chain variable domain of TCR clone 217520 (TRAV12-1, TRAJ26)
SSVIQPPTSLPYGQNFVF

SEQ ID NO: 435040 - protein, 14 aa, Homo sapiens
  CDR3 for beta chain variable domain of TCR clone 217520 (TRBV5-4, TRBJ2-1)
CASSLDQGLNEQFF

SEQ ID NO: 435041 - protein, 12 aa, Homo sapiens
  CDR3 for alpha chain variable domain of TCR clone 217521 (TRAV13-1, TRAJ15)
CTASQAGTALIF

SEQ ID NO: 435042 - protein, 14 aa, Homo sapiens
  CDR3 for beta chain variable domain of TCR clone 217521 (TRBV19, TRBJ2-2)
CASSTLHRSGELFF

SEQ ID NO: 435043 - protein, 12 aa, Homo sapiens
  CDR3 for alpha chain variable domain of TCR clone 217522 (TRAV1-2, TRAJ29)
CAVPSGNTPLVF

SEQ ID NO: 435044 - protein, 18 aa, Homo sapiens
  CDR3 for beta chain variable domain of TCR clone 217522 (TRBV11-2, TRBJ2-3)
CASSLGGASRGAPNTQYF

SEQ ID NO: 435045 - protein, 15 aa, Homo sapiens
  CDR3 for alpha chain variable domain of TCR clone 217523 (TRAV35, TRAJ53)
CAGLTQAGRNYKLTF

SEQ ID NO: 435046 - protein, 11 aa, Homo sapiens
  CDR3 for beta chain variable domain of TCR clone 217523 (TRBV20-1, TRBJ1-2)
CSIWASYGYAV

SEQ ID NO: 435047 - protein, 13 aa, Homo sapiens
  CDR3 for alpha chain variable domain of TCR clone 217524 (TRAV21, TRAJ27)
CAALNTNAGKSTF

SEQ ID NO: 435048 - protein, 14 aa, Homo sapiens
  CDR3 for beta chain variable domain of TCR clone 217524 (TRBV27, TRBJ1-1)
CASSLLSGLSETFF

SEQ ID NO: 435049 - protein, 14 aa, Homo sapiens
  CDR3 for alpha chain variable domain of TCR clone 217525 (TRAV8-4, TRAJ37)
CAVSESSNTGKLIF

SEQ ID NO: 435050 - protein, 13 aa, Homo sapiens
  CDR3 for beta chain variable domain of TCR clone 217525 (TRBV27, TRBJ1-1)
CASSLSIGAEAFF

SEQ ID NO: 435051 - protein, 14 aa, Homo sapiens
  CDR3 for alpha chain variable domain of TCR clone 217526 (TRAV12-3, TRAJ30)
CAMSLLNRDDKIIF

SEQ ID NO: 435052 - protein, 14 aa, Homo sapiens
  CDR3 for beta chain variable domain of TCR clone 217526 (TRBV19, TRBJ2-1)
CASPTFVLSGEQFF

SEQ ID NO: 435053 - protein, 14 aa, Homo sapiens
  CDR3 for alpha chain variable domain of TCR clone 217527 (TRAV12-1, TRAJ6)
CVVARIRRKLHTYL

SEQ ID NO: 435054 - protein, 15 aa, Homo sapiens
  CDR3 for beta chain variable domain of TCR clone 217527 (TRBV7-3, TRBJ2-1)
CASSLRASEYNERFF

SEQ ID NO: 435055 - protein, 16 aa, Homo sapiens
  CDR3 for alpha chain variable domain of TCR clone 217528 (TRAV17, TRAJ52)
CATGIIGGTSYGKLTF

SEQ ID NO: 435056 - protein, 12 aa, Homo sapiens
  CDR3 for beta chain variable domain of TCR clone 217528 (TRBV7-2, TRBJ2-5)
CASSQYQETQYF

SEQ ID NO: 435057 - protein, 11 aa, Homo sapiens
  CDR3 for alpha chain variable domain of TCR clone 217529 (TRAV17, TRAJ43)
CATPRSNDMRF

SEQ ID NO: 435058 - protein, 15 aa, Homo sapiens
  CDR3 for beta chain variable domain of TCR clone 217529 (TRBV11-3, TRBJ2-3)
CASLKDGREGDTQYF

SEQ ID NO: 435059 - protein, 12 aa, Homo sapiens
  CDR3 for alpha chain variable domain of TCR clone 217530 (TRAV8-3, TRAJ26)
CAGDNYGQNFVF

SEQ ID NO: 435060 - protein, 12 aa, Homo sapiens
  CDR3 for beta chain variable domain of TCR clone 217530 (TRBV11-2, TRBJ2-1)
CASSPGKNEQFV

SEQ ID NO: 435061 - protein, 14 aa, Homo sapiens
  CDR3 for alpha chain variable domain of TCR clone 217531 (TRAV9-2, TRAJ39)
CALYIYNAGNMLTF

SEQ ID NO: 435062 - protein, 15 aa, Homo sapiens
  CDR3 for beta chain variable domain of TCR clone 217531 (TRBV4-3, TRBJ2-7)
CASSQGGRGIYEQYF

SEQ ID NO: 435063 - protein, 14 aa, Homo sapiens
  CDR3 for alpha chain variable domain of TCR clone 217532 (TRAV1-2, TRAJ16)
CAVNRFSDGHKLLF

SEQ ID NO: 435064 - protein, 14 aa, Homo sapiens
  CDR3 for beta chain variable domain of TCR clone 217532 (TRBV12-4, TRBJ2-5)
CASSLWQKQETQYF

SEQ ID NO: 435065 - protein, 14 aa, Homo sapiens
  CDR3 for alpha chain variable domain of TCR clone 217533 (TRAV12-3, TRAJ10)
SHLPLTGGGNKLTF

SEQ ID NO: 435066 - protein, 14 aa, Homo sapiens
  CDR3 for beta chain variable domain of TCR clone 217533 (TRBV7-2, TRBJ2-7)
CASSPKTSFYEQYV

SEQ ID NO: 435067 - protein, 11 aa, Homo sapiens
  CDR3 for alpha chain variable domain of TCR clone 217534 (TRAV20, TRAJ23)
YACNQGGKLIF

SEQ ID NO: 435068 - protein, 16 aa, Homo sapiens
  CDR3 for beta chain variable domain of TCR clone 217534 (TRBV7-8, TRBJ2-5)
CASSFGGQPAQETQYF

SEQ ID NO: 435069 - protein, 18 aa, Homo sapiens
  CDR3 for alpha chain variable domain of TCR clone 217535 (TRAV29/DV5, TRAJ3)
QCTSVQQPLNSSASKIIF

SEQ ID NO: 435070 - protein, 15 aa, Homo sapiens
  CDR3 for beta chain variable domain of TCR clone 217535 (TRBV29-1, TRBJ2-1)
CSVGRHALFYNEQFF

SEQ ID NO: 435071 - protein, 11 aa, Homo sapiens
  CDR3 for alpha chain variable domain of TCR clone 217536 (TRAV1-2, TRAJ20)
CAVANDYKLSF

SEQ ID NO: 435072 - protein, 17 aa, Homo sapiens
  CDR3 for beta chain variable domain of TCR clone 217536 (TRBV20-1, TRBJ2-1)
CSASSSGLAGAYNEQFF

SEQ ID NO: 435073 - protein, 10 aa, Homo sapiens
  CDR3 for alpha chain variable domain of TCR clone 217537 (TRAV1-2, TRAJ20)
CAVNDYKLSF

SEQ ID NO: 435074 - protein, 16 aa, Homo sapiens
  CDR3 for beta chain variable domain of TCR clone 217537 (TRBV20-1, TRBJ1-1)
CSARALTQGMNTEAFF

SEQ ID NO: 435075 - protein, 12 aa, Homo sapiens
  CDR3 for alpha chain variable domain of TCR clone 217538 (TRAV17, TRAJ20)
CATDSNDYKLSF

SEQ ID NO: 435076 - protein, 18 aa, Homo sapiens
  CDR3 for beta chain variable domain of TCR clone 217538 (TRBV27, TRBJ2-1)
CASRRSGRGESSGNEQFF

SEQ ID NO: 435077 - protein, 17 aa, Homo sapiens
  CDR3 for alpha chain variable domain of TCR clone 217539 (TRAV13-2, TRAJ42)
CAETGKNYGGSQGNLIT

SEQ ID NO: 435078 - protein, 16 aa, Homo sapiens
  CDR3 for beta chain variable domain of TCR clone 217539 (TRBV7-9, TRBJ2-1)
CASSLGTGWDYNEQFF

SEQ ID NO: 435079 - protein, 15 aa, Homo sapiens
  CDR3 for alpha chain variable domain of TCR clone 217540 (TRAV21, TRAJ52)
CAVRGGGTSYGKLTF

SEQ ID NO: 435080 - protein, 15 aa, Homo sapiens
  CDR3 for beta chain variable domain of TCR clone 217540 (TRBV18, TRBJ1-5)
CASSPSDRSNHPQHF

SEQ ID NO: 435081 - protein, 15 aa, Homo sapiens
  CDR3 for alpha chain variable domain of TCR clone 217541 (TRAV21, TRAJ52)
CAVRGGGTSYGKLTF

SEQ ID NO: 435082 - protein, 15 aa, Homo sapiens
  CDR3 for beta chain variable domain of TCR clone 217541 (TRBV18, TRBJ1-5)
CASLPSDRSNQPQHF

SEQ ID NO: 435083 - protein, 14 aa, Homo sapiens
  CDR3 for alpha chain variable domain of TCR clone 217542 (TRAV26-1, TRAJ45)
CFEVTGGGADGLTF

SEQ ID NO: 435084 - protein, 15 aa, Homo sapiens
  CDR3 for beta chain variable domain of TCR clone 217542 (TRBV5-1, TRBJ1-1)
CASSSTTGTNTEAFF

SEQ ID NO: 435085 - protein, 14 aa, Homo sapiens
  CDR3 for alpha chain variable domain of TCR clone 217543 (TRAV40, TRAJ41)
CLLGPPNSGYALNF

SEQ ID NO: 435086 - protein, 17 aa, Homo sapiens
  CDR3 for beta chain variable domain of TCR clone 217543 (TRBV7-8, TRBJ2-6)
CASSAGTGGAGANVLTF

SEQ ID NO: 435087 - protein, 16 aa, Homo sapiens
  CDR3 for alpha chain variable domain of TCR clone 217544 (TRAV13-1, TRAJ48)
CAASIFGNFGNEKLTF

SEQ ID NO: 435088 - protein, 16 aa, Homo sapiens
  CDR3 for beta chain variable domain of TCR clone 217544 (TRBV7-2, TRBJ2-6)
CAISERRASGANVLTF

SEQ ID NO: 435089 - protein, 14 aa, Homo sapiens
  CDR3 for alpha chain variable domain of TCR clone 217545 (TRAV17, TRAJ16)
CATADFSDGQKLLF

SEQ ID NO: 435090 - protein, 13 aa, Homo sapiens
  CDR3 for beta chain variable domain of TCR clone 217545 (TRBV7-3, TRBJ2-2)
CDSSLNVLGELFF

SEQ ID NO: 435091 - protein, 12 aa, Homo sapiens
  CDR3 for alpha chain variable domain of TCR clone 217546 (TRAV17, TRAJ57)
CATDGESEKLVF

SEQ ID NO: 435092 - protein, 12 aa, Homo sapiens
  CDR3 for beta chain variable domain of TCR clone 217546 (TRBV12-4, TRBJ1-2)
CASSFIWLHLWF

SEQ ID NO: 435093 - protein, 14 aa, Homo sapiens
  CDR3 for alpha chain variable domain of TCR clone 217547 (TRAV8-4, TRAJ54)
CAVSEVLGAQKLVF

SEQ ID NO: 435094 - protein, 17 aa, Homo sapiens
  CDR3 for beta chain variable domain of TCR clone 217547 (TRBV20-1, TRBJ2-1)
CSASSSGLAGSYNEQFF

SEQ ID NO: 435095 - protein, 14 aa, Homo sapiens
  CDR3 for alpha chain variable domain of TCR clone 217548 (TRAV16, TRAJ39)
CALSKNNAGNMPTF

SEQ ID NO: 435096 - protein, 17 aa, Homo sapiens
  CDR3 for beta chain variable domain of TCR clone 217548 (TRBV23-1, TRBJ1-2)
CASSNTGGGLLWLHLRF

SEQ ID NO: 435097 - protein, 13 aa, Homo sapiens
  CDR3 for alpha chain variable domain of TCR clone 217549 (TRAV3, TRAJ3)
CAVADSSASKIIF

SEQ ID NO: 435098 - protein, 12 aa, Homo sapiens
  CDR3 for beta chain variable domain of TCR clone 217549 (TRBV7-8, TRBJ2-7)
CASGGGPHGQYF

SEQ ID NO: 435099 - protein, 15 aa, Homo sapiens
  CDR3 for alpha chain variable domain of TCR clone 217550 (TRAV26-1, TRAJ22)
CIVRVSFWFCKVTDL

SEQ ID NO: 435100 - protein, 13 aa, Homo sapiens
  CDR3 for beta chain variable domain of TCR clone 217550 (TRBV7-9, TRBJ1-2)
CASSLKRNYGYTF

SEQ ID NO: 435101 - protein, 18 aa, Homo sapiens
  CDR3 for alpha chain variable domain of TCR clone 217551 (TRAV21, TRAJ52)
CAVRPSPAGGTSYGKLTF

SEQ ID NO: 435102 - protein, 14 aa, Homo sapiens
  CDR3 for beta chain variable domain of TCR clone 217551 (TRBV20-1, TRBJ2-3)
CSANRGSSTDTQYF

SEQ ID NO: 435103 - protein, 15 aa, Homo sapiens
  CDR3 for alpha chain variable domain of TCR clone 217552 (TRAV13-1, TRAJ44)
CAASRGGATASKLTF

SEQ ID NO: 435104 - protein, 14 aa, Homo sapiens
  CDR3 for beta chain variable domain of TCR clone 217552 (TRBV7-2, TRBJ2-5)
CASSPRGSSETQYF

SEQ ID NO: 435105 - protein, 11 aa, Homo sapiens
  CDR3 for alpha chain variable domain of TCR clone 217553 (TRAV1-1, TRAJ23)
CAVRRGGKLIL

SEQ ID NO: 435106 - protein, 20 aa, Homo sapiens
  CDR3 for beta chain variable domain of TCR clone 217553 (TRBV7-8, TRBJ2-2)
CASSHLFPGPTIHITGELFF

SEQ ID NO: 435107 - protein, 12 aa, Homo sapiens
  CDR3 for alpha chain variable domain of TCR clone 217554 (TRAV25, TRAJ5)
CAGGGARRALTF

SEQ ID NO: 435108 - protein, 15 aa, Homo sapiens
  CDR3 for beta chain variable domain of TCR clone 217554 (TRBV19, TRBJ2-4)
CASRGPRRGENIQYF

SEQ ID NO: 435109 - protein, 16 aa, Homo sapiens
  CDR3 for alpha chain variable domain of TCR clone 217555 (TRAV21, TRAJ21)
CAVKVLGTSTNFTLDL

SEQ ID NO: 435110 - protein, 13 aa, Homo sapiens
  CDR3 for beta chain variable domain of TCR clone 217555 (TRBV18, TRBJ1-1)
CASSPETKPEAFF

SEQ ID NO: 435111 - protein, 18 aa, Homo sapiens
  CDR3 for alpha chain variable domain of TCR clone 217556 (TRAV14/DV4, TRAJ52)
CAMKGTFVGGTSYGKLTF

SEQ ID NO: 435112 - protein, 17 aa, Homo sapiens
  CDR3 for beta chain variable domain of TCR clone 217556 (TRBV7-8, TRBJ2-6)
CASSAGTGGAGANVLTF

SEQ ID NO: 435113 - protein, 11 aa, Homo sapiens
  CDR3 for alpha chain variable domain of TCR clone 217557 (TRAV1-2, TRAJ40)
CAVPGTYKFIF

SEQ ID NO: 435114 - protein, 16 aa, Homo sapiens
  CDR3 for beta chain variable domain of TCR clone 217557 (TRBV29-1, TRBJ2-7)
CSVEVVGTSGSYEQYF

SEQ ID NO: 435115 - protein, 13 aa, Homo sapiens
  CDR3 for alpha chain variable domain of TCR clone 217558 (TRAV8-3, TRAJ28)
CAVGAVGSYQLTF

SEQ ID NO: 435116 - protein, 14 aa, Homo sapiens
  CDR3 for beta chain variable domain of TCR clone 217558 (TRBV7-2, TRBJ2-7)
CASRSQAAAYEQYF

SEQ ID NO: 435117 - protein, 15 aa, Homo sapiens
  CDR3 for alpha chain variable domain of TCR clone 217559 (TRAV12-1, TRAJ4)
CVVNPFSGGYNKLIF

SEQ ID NO: 435118 - protein, 15 aa, Homo sapiens
  CDR3 for beta chain variable domain of TCR clone 217559 (TRBV20-1, TRBJ2-7)
CSARDRVSGMDEQYF

SEQ ID NO: 435119 - protein, 15 aa, Homo sapiens
  CDR3 for alpha chain variable domain of TCR clone 217560 (TRAV3, TRAJ3)
CCERPRYSSASKIIF

SEQ ID NO: 435120 - protein, 16 aa, Homo sapiens
  CDR3 for beta chain variable domain of TCR clone 217560 (TRBV19, TRBJ1-5)
CASSIARGGPRQPQHF

SEQ ID NO: 435121 - protein, 17 aa, Homo sapiens
  CDR3 for alpha chain variable domain of TCR clone 217561 (TRAV36/DV7, TRAJ52)
CAVAQRAGGTSYGKLTF

SEQ ID NO: 435122 - protein, 17 aa, Homo sapiens
  CDR3 for beta chain variable domain of TCR clone 217561 (TRBV25-1, TRBJ2-1)
CASSGGWGQVRYNEQFF

SEQ ID NO: 435123 - protein, 12 aa, Homo sapiens
  CDR3 for alpha chain variable domain of TCR clone 217562 (TRAV12-3, TRAJ17)
CAMTLTGNNLTF

SEQ ID NO: 435124 - protein, 15 aa, Homo sapiens
  CDR3 for beta chain variable domain of TCR clone 217562 (TRBV4-1, TRBJ1-4)
CASSDTGGTNEKLFF

SEQ ID NO: 435125 - protein, 16 aa, Homo sapiens
  CDR3 for alpha chain variable domain of TCR clone 217563 (TRAV1-2, TRAJ10)
CAVRGVLTGGGNKLTF

SEQ ID NO: 435126 - protein, 16 aa, Homo sapiens
  CDR3 for beta chain variable domain of TCR clone 217563 (TRBV6-5, TRBJ2-1)
CASSETLAGHYNEQFF

SEQ ID NO: 435127 - protein, 11 aa, Homo sapiens
  CDR3 for alpha chain variable domain of TCR clone 217564 (TRAV1-1, TRAJ23)
CAVRQGGELIF

SEQ ID NO: 435128 - protein, 15 aa, Homo sapiens
  CDR3 for beta chain variable domain of TCR clone 217564 (TRBV20-1, TRBJ2-7)
CSARVPAAYFYEQYF

SEQ ID NO: 435129 - protein, 16 aa, Homo sapiens
  CDR3 for alpha chain variable domain of TCR clone 217565 (TRAV26-2, TRAJ22)
CILRDGASGSARQLTF

SEQ ID NO: 435130 - protein, 15 aa, Homo sapiens
  CDR3 for beta chain variable domain of TCR clone 217565 (TRBV5-1, TRBJ2-1)
CASSLETSGSNEQFF

SEQ ID NO: 435131 - protein, 16 aa, Homo sapiens
  CDR3 for alpha chain variable domain of TCR clone 217566 (TRAV20, TRAJ52)
CAVLPDGGTSYGMLTF

SEQ ID NO: 435132 - protein, 12 aa, Homo sapiens
  CDR3 for beta chain variable domain of TCR clone 217566 (TRBV19, TRBJ2-1)
CASSQISNEQFF

SEQ ID NO: 435133 - protein, 15 aa, Homo sapiens
  CDR3 for alpha chain variable domain of TCR clone 217567 (TRAV3, TRAJ22)
CAVRDRGGSARQLTF

SEQ ID NO: 435134 - protein, 14 aa, Homo sapiens
  CDR3 for beta chain variable domain of TCR clone 217567 (TRBV11-2, TRBJ1-5)
CASSLDRGRQPQHF

SEQ ID NO: 435135 - protein, 11 aa, Homo sapiens
  CDR3 for alpha chain variable domain of TCR clone 217568 (TRAV9-2, TRAJ49)
CALSAGNQFYF

SEQ ID NO: 435136 - protein, 16 aa, Homo sapiens
  CDR3 for beta chain variable domain of TCR clone 217568 (TRBV7-3, TRBJ2-1)
CASSLEGYRSYNEQFF

SEQ ID NO: 435137 - protein, 12 aa, Homo sapiens
  CDR3 for alpha chain variable domain of TCR clone 217569 (TRAV12-2, TRAJ10)
WGVTGGGNKLTF

SEQ ID NO: 435138 - protein, 16 aa, Homo sapiens
  CDR3 for beta chain variable domain of TCR clone 217569 (TRBV6-4, TRBJ1-2)
CASSEAVGDPNYGYTY

SEQ ID NO: 435139 - protein, 12 aa, Homo sapiens
  CDR3 for alpha chain variable domain of TCR clone 217570 (TRAV12-3, TRAJ29)
CAAAKGNTPLVF

SEQ ID NO: 435140 - protein, 15 aa, Homo sapiens
  CDR3 for beta chain variable domain of TCR clone 217570 (TRBV28, TRBJ1-5)
CASSFPSGRNQPQHF

SEQ ID NO: 435141 - protein, 16 aa, Homo sapiens
  CDR3 for alpha chain variable domain of TCR clone 217571 (TRAV23/DV6, TRAJ9)
CAASIGGNTGGFKTIF

SEQ ID NO: 435142 - protein, 16 aa, Homo sapiens
  CDR3 for beta chain variable domain of TCR clone 217571 (TRBV7-2, TRBJ2-1)
CASSLVAGAGYNEQFF

SEQ ID NO: 435143 - protein, 16 aa, Homo sapiens
  CDR3 for alpha chain variable domain of TCR clone 217572 (TRAV26-1, TRAJ36)
CIVRVPDQTGANNLFF

SEQ ID NO: 435144 - protein, 15 aa, Homo sapiens
  CDR3 for beta chain variable domain of TCR clone 217572 (TRBV20-1, TRBJ2-1)
CSASSAGSSYSEQFF

SEQ ID NO: 435145 - protein, 14 aa, Homo sapiens
  CDR3 for alpha chain variable domain of TCR clone 217573 (TRAV12-2, TRAJ13)
CAVKKTGGYQKVTF

SEQ ID NO: 435146 - protein, 15 aa, Homo sapiens
  CDR3 for beta chain variable domain of TCR clone 217573 (TRBV20-1, TRBJ2-1)
CSARGIGGTHNEQFF

SEQ ID NO: 435147 - protein, 12 aa, Homo sapiens
  CDR3 for alpha chain variable domain of TCR clone 217574 (TRAV35, TRAJ23)
CCAHNQGGKLIF

SEQ ID NO: 435148 - protein, 12 aa, Homo sapiens
  CDR3 for beta chain variable domain of TCR clone 217574 (TRBV11-2, TRBJ2-2)
CASSLGGGELFF

SEQ ID NO: 435149 - protein, 11 aa, Homo sapiens
  CDR3 for alpha chain variable domain of TCR clone 217575 (TRAV17, TRAJ9)
CGFTGGFKTIF

SEQ ID NO: 435150 - protein, 14 aa, Homo sapiens
  CDR3 for beta chain variable domain of TCR clone 217575 (TRBV7-9, TRBJ2-2)
CASSLVQYTGELFF

SEQ ID NO: 435151 - protein, 11 aa, Homo sapiens
  CDR3 for alpha chain variable domain of TCR clone 217576 (TRAV3, TRAJ21)
CAVGNFNTCYF

SEQ ID NO: 435152 - protein, 16 aa, Homo sapiens
  CDR3 for beta chain variable domain of TCR clone 217576 (TRBV19, TRBJ2-1)
CASSKAGPSSYNEQFF

SEQ ID NO: 435153 - protein, 14 aa, Homo sapiens
  CDR3 for alpha chain variable domain of TCR clone 217577 (TRAV38-2/DV8, TRAJ54)
AAMYQIQGAPKLVF

SEQ ID NO: 435154 - protein, 17 aa, Homo sapiens
  CDR3 for beta chain variable domain of TCR clone 217577 (TRBV6-1, TRBJ2-3)
CASSEALRLISTDTQYF

SEQ ID NO: 435155 - protein, 15 aa, Homo sapiens
  CDR3 for alpha chain variable domain of TCR clone 217578 (TRAV8-3, TRAJ11)
CAVGLLNSGYSTLTF

SEQ ID NO: 435156 - protein, 16 aa, Homo sapiens
  CDR3 for beta chain variable domain of TCR clone 217578 (TRBV7-9, TRBJ2-1)
CASSDVAGGSYNEQFF

SEQ ID NO: 435157 - protein, 12 aa, Homo sapiens
  CDR3 for alpha chain variable domain of TCR clone 217579 (TRAV12-3, TRAJ17)
CAMTLTGNKLTF

SEQ ID NO: 435158 - protein, 17 aa, Homo sapiens
  CDR3 for beta chain variable domain of TCR clone 217579 (TRBV27, TRBJ2-6)
CASSLTGFASGANVLTF

SEQ ID NO: 435159 - protein, 12 aa, Homo sapiens
  CDR3 for alpha chain variable domain of TCR clone 217580 (TRAV27, TRAJ33)
CAGEDSNYQLIW

SEQ ID NO: 435160 - protein, 15 aa, Homo sapiens
  CDR3 for beta chain variable domain of TCR clone 217580 (TRBV27, TRBJ2-1)
CASSNGGGSSNEQFF

SEQ ID NO: 435161 - protein, 14 aa, Homo sapiens
  CDR3 for alpha chain variable domain of TCR clone 217581 (TRAV12-1, TRAJ23)
CVVIVYNQVGKLIF

SEQ ID NO: 435162 - protein, 15 aa, Homo sapiens
  CDR3 for beta chain variable domain of TCR clone 217581 (TRBV20-1, TRBJ1-5)
CSAKPPGQGPQPQHF

SEQ ID NO: 435163 - protein, 18 aa, Homo sapiens
  CDR3 for alpha chain variable domain of TCR clone 217582 (TRAV29/DV5, TRAJ52)
CAAGFRGAGGTSDGKLTF

SEQ ID NO: 435164 - protein, 16 aa, Homo sapiens
  CDR3 for beta chain variable domain of TCR clone 217582 (TRBV7-3, TRBJ2-2)
CASSLTRGTLSGELFF

SEQ ID NO: 435165 - protein, 17 aa, Homo sapiens
  CDR3 for alpha chain variable domain of TCR clone 217583 (TRAV27, TRAJ42)
CAERVIYYGGSQGNLTF

SEQ ID NO: 435166 - protein, 14 aa, Homo sapiens
  CDR3 for beta chain variable domain of TCR clone 217583 (TRBV20-1, TRBJ2-1)
CSAQVGGSANEQFF

SEQ ID NO: 435167 - protein, 14 aa, Homo sapiens
  CDR3 for alpha chain variable domain of TCR clone 217584 (TRAV8-6, TRAJ53)
CAALVLGSNYTLTF

SEQ ID NO: 435168 - protein, 15 aa, Homo sapiens
  CDR3 for beta chain variable domain of TCR clone 217584 (TRBV20-1, TRBJ2-3)
CSAEPLAGHGDTQYF

SEQ ID NO: 435169 - protein, 12 aa, Homo sapiens
  CDR3 for alpha chain variable domain of TCR clone 217585 (TRAV35, TRAJ54)
CADLQGAQKLVF

SEQ ID NO: 435170 - protein, 12 aa, Homo sapiens
  CDR3 for beta chain variable domain of TCR clone 217585 (TRBV12-4, TRBJ2-7)
CASSLGGYEQYF

SEQ ID NO: 435171 - protein, 14 aa, Homo sapiens
  CDR3 for alpha chain variable domain of TCR clone 217586 (TRAV3, TRAJ9)
CAVRLNTGGFKTIF

SEQ ID NO: 435172 - protein, 16 aa, Homo sapiens
  CDR3 for beta chain variable domain of TCR clone 217586 (TRBV12-5, TRBJ2-5)
CASGARTSGNQETQYF

SEQ ID NO: 435173 - protein, 13 aa, Homo sapiens
  CDR3 for alpha chain variable domain of TCR clone 217587 (TRAV1-1, TRAJ9)
CAAKNTGGFKTIF

SEQ ID NO: 435174 - protein, 16 aa, Homo sapiens
  CDR3 for beta chain variable domain of TCR clone 217587 (TRBV19, TRBJ2-3)
CASSPGAASRTDTQYF

SEQ ID NO: 435175 - protein, 17 aa, Homo sapiens
  CDR3 for alpha chain variable domain of TCR clone 217588 (TRAV3, TRAJ42)
CAVRDRDYGGSQGNLIF

SEQ ID NO: 435176 - protein, 15 aa, Homo sapiens
  CDR3 for beta chain variable domain of TCR clone 217588 (TRBV6-6, TRBJ2-7)
YASSYSYGGSYEQYF

SEQ ID NO: 435177 - protein, 12 aa, Homo sapiens
  CDR3 for alpha chain variable domain of TCR clone 217589 (TRAV21, TRAJ20)
CAVRRNDYKLSF

SEQ ID NO: 435178 - protein, 16 aa, Homo sapiens
  CDR3 for beta chain variable domain of TCR clone 217589 (TRBV10-3, TRBJ1-6)
CAISERRGQGNSPLHF

SEQ ID NO: 435179 - protein, 12 aa, Homo sapiens
  CDR3 for alpha chain variable domain of TCR clone 217590 (TRAV2, TRAJ29)
CSVDSGNTPLVF

SEQ ID NO: 435180 - protein, 14 aa, Homo sapiens
  CDR3 for beta chain variable domain of TCR clone 217590 (TRBV7-8, TRBJ2-7)
CASSLRGSSYEQYF

SEQ ID NO: 435181 - protein, 14 aa, Homo sapiens
  CDR3 for alpha chain variable domain of TCR clone 217591 (TRAV12-3, TRAJ10)
SHLPLTGGGNKLTF

SEQ ID NO: 435182 - protein, 14 aa, Homo sapiens
  CDR3 for beta chain variable domain of TCR clone 217591 (TRBV18, TRBJ2-3)
CASSPRTSTDTQCF

SEQ ID NO: 435183 - protein, 10 aa, Homo sapiens
  CDR3 for alpha chain variable domain of TCR clone 217592 (TRAV13-1, TRAJ8)
CAAPFQTLVF

SEQ ID NO: 435184 - protein, 20 aa, Homo sapiens
  CDR3 for beta chain variable domain of TCR clone 217592 (TRBV3-1, TRBJ2-6)
CASSPRPGLEGGAGANVLTF

SEQ ID NO: 435185 - protein, 15 aa, Homo sapiens
  CDR3 for alpha chain variable domain of TCR clone 217593 (TRAV2, TRAJ9)
CAVAAFTTGGFKTTF

SEQ ID NO: 435186 - protein, 14 aa, Homo sapiens
  CDR3 for beta chain variable domain of TCR clone 217593 (TRBV7-8, TRBJ2-5)
CASSATGGQETQYF

SEQ ID NO: 435187 - protein, 13 aa, Homo sapiens
  CDR3 for alpha chain variable domain of TCR clone 217594 (TRAV1-2, TRAJ11)
CAVRREGYSTLTF

SEQ ID NO: 435188 - protein, 13 aa, Homo sapiens
  CDR3 for beta chain variable domain of TCR clone 217594 (TRBV7-7, TRBJ2-3)
CASSLSRADTQYF

SEQ ID NO: 435189 - protein, 16 aa, Homo sapiens
  CDR3 for alpha chain variable domain of TCR clone 217595 (TRAV30, TRAJ24)
CGTEIVDADSWGKFQF

SEQ ID NO: 435190 - protein, 11 aa, Homo sapiens
  CDR3 for beta chain variable domain of TCR clone 217595 (TRBV12-4, TRBJ2-7)
CATPEKGEQYF

SEQ ID NO: 435191 - protein, 12 aa, Homo sapiens
  CDR3 for alpha chain variable domain of TCR clone 217596 (TRAV3, TRAJ26)
CAVRDYGQNFVF

SEQ ID NO: 435192 - protein, 12 aa, Homo sapiens
  CDR3 for beta chain variable domain of TCR clone 217596 (TRBV11-2, TRBJ2-1)
CASSPGNNEQFF

SEQ ID NO: 435193 - protein, 16 aa, Homo sapiens
  CDR3 for alpha chain variable domain of TCR clone 217597 (TRAV13-1, TRAJ18)
CAASRMRGSTLGRLYF

SEQ ID NO: 435194 - protein, 14 aa, Homo sapiens
  CDR3 for beta chain variable domain of TCR clone 217597 (TRBV29-1, TRBJ2-1)
CSVGRHALFYEQFF

SEQ ID NO: 435195 - protein, 13 aa, Homo sapiens
  CDR3 for alpha chain variable domain of TCR clone 217598 (TRAV12-1, TRAJ26)
SATYLYYGQNFVF

SEQ ID NO: 435196 - protein, 16 aa, Homo sapiens
  CDR3 for beta chain variable domain of TCR clone 217598 (TRBV12-4, TRBJ2-7)
CASRSTGTGPSYEQYF

SEQ ID NO: 435197 - protein, 17 aa, Homo sapiens
  CDR3 for alpha chain variable domain of TCR clone 217599 (TRAV3, TRAJ6)
CAVRDGPRAGGSYIPTC

SEQ ID NO: 435198 - protein, 16 aa, Homo sapiens
  CDR3 for beta chain variable domain of TCR clone 217599 (TRBV12-4, TRBJ2-7)
CASSLIGGTGTYEQYF

SEQ ID NO: 435199 - protein, 12 aa, Homo sapiens
  CDR3 for alpha chain variable domain of TCR clone 217600 (TRAV12-1, TRAJ31)
CMSWNNNARLMF

SEQ ID NO: 435200 - protein, 15 aa, Homo sapiens
  CDR3 for beta chain variable domain of TCR clone 217600 (TRBV7-2, TRBJ1-5)
CASSLDRGQDQPQHF

SEQ ID NO: 435201 - protein, 12 aa, Homo sapiens
  CDR3 for alpha chain variable domain of TCR clone 217601 (TRAV38-1, TRAJ43)
CAFMTRLADMRF

SEQ ID NO: 435202 - protein, 14 aa, Homo sapiens
  CDR3 for beta chain variable domain of TCR clone 217601 (TRBV27, TRBJ2-2)
CARSLSVVDGRMFF

SEQ ID NO: 435203 - protein, 16 aa, Homo sapiens
  CDR3 for alpha chain variable domain of TCR clone 217602 (TRAV1-1, TRAJ29)
CAVRSTRNSGNTPLVF

SEQ ID NO: 435204 - protein, 15 aa, Homo sapiens
  CDR3 for beta chain variable domain of TCR clone 217602 (TRBV4-1, TRBJ2-7)
CASSQNTGRLYEQYF

SEQ ID NO: 435205 - protein, 13 aa, Homo sapiens
  CDR3 for alpha chain variable domain of TCR clone 217603 (TRAV8-1, TRAJ36)
CAVNSPTGANNLF

SEQ ID NO: 435206 - protein, 14 aa, Homo sapiens
  CDR3 for beta chain variable domain of TCR clone 217603 (TRBV11-2, TRBJ2-7)
CASSSTGEGYEQYF

SEQ ID NO: 435207 - protein, 18 aa, Homo sapiens
  CDR3 for alpha chain variable domain of TCR clone 217604 (TRAV12-3, TRAJ52)
CAMSVGGAGGTSYGKLTF

SEQ ID NO: 435208 - protein, 13 aa, Homo sapiens
  CDR3 for beta chain variable domain of TCR clone 217604 (TRBV12-4, TRBJ1-3)
CASSLASGNTIYF

SEQ ID NO: 435209 - protein, 16 aa, Homo sapiens
  CDR3 for alpha chain variable domain of TCR clone 217605 (TRAV26-1, TRAJ52)
CIVSNAGGTSDGKLTF

SEQ ID NO: 435210 - protein, 15 aa, Homo sapiens
  CDR3 for beta chain variable domain of TCR clone 217605 (TRBV7-3, TRBJ2-1)
CASSPTGGGEVEQFF

SEQ ID NO: 435211 - protein, 14 aa, Homo sapiens
  CDR3 for alpha chain variable domain of TCR clone 217606 (TRAV14/DV4, TRAJ15)
CAMRRDQAGNALLF

SEQ ID NO: 435212 - protein, 16 aa, Homo sapiens
  CDR3 for beta chain variable domain of TCR clone 217606 (TRBV15, TRBJ2-3)
CATSRDLGIVTDTQYF

SEQ ID NO: 435213 - protein, 15 aa, Homo sapiens
  CDR3 for alpha chain variable domain of TCR clone 217607 (TRAV26-1, TRAJ22)
CIVRVSFWFCKATDL

SEQ ID NO: 435214 - protein, 13 aa, Homo sapiens
  CDR3 for beta chain variable domain of TCR clone 217607 (TRBV7-9, TRBJ1-2)
CACSVKQNYGYTF

SEQ ID NO: 435215 - protein, 17 aa, Homo sapiens
  CDR3 for alpha chain variable domain of TCR clone 217608 (TRAV3, TRAJ6)
CAVRDGPRVGGRYIPTF

SEQ ID NO: 435216 - protein, 12 aa, Homo sapiens
  CDR3 for beta chain variable domain of TCR clone 217608 (TRBV11-2, TRBJ2-2)
CASSLGGGELFF

SEQ ID NO: 435217 - protein, 14 aa, Homo sapiens
  CDR3 for alpha chain variable domain of TCR clone 217609 (TRAV12-2, TRAJ13)
CTVKKTGGYQKVTF

SEQ ID NO: 435218 - protein, 17 aa, Homo sapiens
  CDR3 for beta chain variable domain of TCR clone 217609 (TRBV20-1, TRBJ2-2)
CSASGSGQGGLTGELFF

SEQ ID NO: 435219 - protein, 13 aa, Homo sapiens
  CDR3 for alpha chain variable domain of TCR clone 217610 (TRAV30, TRAJ34)
CGTVGYNTDKFIF

SEQ ID NO: 435220 - protein, 16 aa, Homo sapiens
  CDR3 for beta chain variable domain of TCR clone 217610 (TRBV7-9, TRBJ1-2)
CASSLGFSSGEDGYTF

SEQ ID NO: 435221 - protein, 23 aa, Homo sapiens
  CDR3 for alpha chain variable domain of TCR clone 217611 (TRAV26-1, )
CIADNAGNNHIQNPDPAVYQLRD

SEQ ID NO: 435222 - protein, 16 aa, Homo sapiens
  CDR3 for beta chain variable domain of TCR clone 217611 (TRBV7-9, TRBJ1-2)
CASSLGFSSGEDGYTF

SEQ ID NO: 435223 - protein, 13 aa, Homo sapiens
  CDR3 for alpha chain variable domain of TCR clone 217612 (TRAV3, TRAJ20)
CAVRDTGDYKLSF

SEQ ID NO: 435224 - protein, 16 aa, Homo sapiens
  CDR3 for beta chain variable domain of TCR clone 217612 (TRBV2, TRBJ1-3)
CASSGGAGRSGNTIYF

SEQ ID NO: 435225 - protein, 13 aa, Homo sapiens
  CDR3 for alpha chain variable domain of TCR clone 217613 (TRAV8-3, TRAJ40)
CAVGAQYLRNLQI

SEQ ID NO: 435226 - protein, 12 aa, Homo sapiens
  CDR3 for beta chain variable domain of TCR clone 217613 (TRBV12-5, TRBJ2-5)
CASGQGVETQYF

SEQ ID NO: 435227 - protein, 13 aa, Homo sapiens
  CDR3 for alpha chain variable domain of TCR clone 217614 (TRAV23/DV6, TRAJ27)
CAASKPMQANQTF

SEQ ID NO: 435228 - protein, 14 aa, Homo sapiens
  CDR3 for beta chain variable domain of TCR clone 217614 (TRBV5-4, TRBJ1-1)
CASSLDSRRDEAFF

SEQ ID NO: 435229 - protein, 15 aa, Homo sapiens
  CDR3 for alpha chain variable domain of TCR clone 217615 (TRAV8-6, TRAJ10)
CAVSDQAGGGNKLTF

SEQ ID NO: 435230 - protein, 14 aa, Homo sapiens
  CDR3 for beta chain variable domain of TCR clone 217615 (TRBV18, TRBJ2-7)
CASSPRGGAYEQYF

SEQ ID NO: 435231 - protein, 12 aa, Homo sapiens
  CDR3 for alpha chain variable domain of TCR clone 217616 (TRAV38-2/DV8, TRAJ48)
CALLSGNEKLTF

SEQ ID NO: 435232 - protein, 14 aa, Homo sapiens
  CDR3 for beta chain variable domain of TCR clone 217616 (TRBV12-5, TRBJ2-5)
CASGSRTHQETQYF

SEQ ID NO: 435233 - protein, 17 aa, Homo sapiens
  CDR3 for alpha chain variable domain of TCR clone 217617 (TRAV38-2/DV8, TRAJ38)
CAYRSARGAGNNRKLIW

SEQ ID NO: 435234 - protein, 15 aa, Homo sapiens
  CDR3 for beta chain variable domain of TCR clone 217617 (TRBV7-9, TRBJ1-6)
CASSSPGRGNSHLHF

SEQ ID NO: 435235 - protein, 11 aa, Homo sapiens
  CDR3 for alpha chain variable domain of TCR clone 217618 (TRAV12-2, TRAJ39)
CAVNNMLTFGG

SEQ ID NO: 435236 - protein, 16 aa, Homo sapiens
  CDR3 for beta chain variable domain of TCR clone 217618 (TRBV5-1, TRBJ2-1)
CASSFGVSGSYNEQFF

SEQ ID NO: 435237 - protein, 12 aa, Homo sapiens
  CDR3 for alpha chain variable domain of TCR clone 217619 (TRAV12-3, TRAJ17)
CAMTLTGNKLTF

SEQ ID NO: 435238 - protein, 15 aa, Homo sapiens
  CDR3 for beta chain variable domain of TCR clone 217619 (TRBV9, TRBJ1-6)
CASSVAGTGDSHLHF

SEQ ID NO: 435239 - protein, 11 aa, Homo sapiens
  CDR3 for alpha chain variable domain of TCR clone 217620 (TRAV17, TRAJ31)
CATSHNARLMF

SEQ ID NO: 435240 - protein, 14 aa, Homo sapiens
  CDR3 for beta chain variable domain of TCR clone 217620 (TRBV18, TRBJ2-7)
CASSPRGGAYEQYF

SEQ ID NO: 435241 - protein, 13 aa, Homo sapiens
  CDR3 for alpha chain variable domain of TCR clone 217621 (TRAV2, TRAJ40)
CAVVTSGTYKYIF

SEQ ID NO: 435242 - protein, 16 aa, Homo sapiens
  CDR3 for beta chain variable domain of TCR clone 217621 (TRBV19, TRBJ2-2)
CASRSPGTEATGELFF

SEQ ID NO: 435243 - protein, 16 aa, Homo sapiens
  CDR3 for alpha chain variable domain of TCR clone 217622 (TRAV3, TRAJ10)
CAVRDMRAGGGNKLTF

SEQ ID NO: 435244 - protein, 20 aa, Homo sapiens
  CDR3 for beta chain variable domain of TCR clone 217622 (TRBV11-3, TRBJ2-7)
CASSQRTSGSLRAVRRAGHQ

SEQ ID NO: 435245 - protein, 13 aa, Homo sapiens
  CDR3 for alpha chain variable domain of TCR clone 217623 (TRAV27, TRAJ6)
CAGGTRGSYIPTF

SEQ ID NO: 435246 - protein, 12 aa, Homo sapiens
  CDR3 for beta chain variable domain of TCR clone 217623 (TRBV28, TRBJ2-6)
CAIQAGANVLTF

SEQ ID NO: 435247 - protein, 15 aa, Homo sapiens
  CDR3 for alpha chain variable domain of TCR clone 217624 (TRAV17, TRAJ52)
CTTEAGGTSDGKLTF

SEQ ID NO: 435248 - protein, 14 aa, Homo sapiens
  CDR3 for beta chain variable domain of TCR clone 217624 (TRBV28, TRBJ1-5)
CASSLGVLVKPQHF

SEQ ID NO: 435249 - protein, 17 aa, Homo sapiens
  CDR3 for alpha chain variable domain of TCR clone 217625 (TRAV13-1, TRAJ52)
CAASSGAGGTSYGKLTF

SEQ ID NO: 435250 - protein, 15 aa, Homo sapiens
  CDR3 for beta chain variable domain of TCR clone 217625 (TRBV12-4, TRBJ1-5)
CGNTRGSGFGQPQHF

SEQ ID NO: 435251 - protein, 11 aa, Homo sapiens
  CDR3 for alpha chain variable domain of TCR clone 217626 (TRAV12-3, TRAJ11)
CNATGYSTLTF

SEQ ID NO: 435252 - protein, 18 aa, Homo sapiens
  CDR3 for beta chain variable domain of TCR clone 217626 (TRBV7-8, TRBJ2-3)
CASSLKREGSGITDTQYF

SEQ ID NO: 435253 - protein, 18 aa, Homo sapiens
  CDR3 for alpha chain variable domain of TCR clone 217627 (TRAV29/DV5, TRAJ26)
CSVLLCSRRKPEGQNFVF

SEQ ID NO: 435254 - protein, 17 aa, Homo sapiens
  CDR3 for beta chain variable domain of TCR clone 217627 (TRBV20-1, TRBJ2-2)
CSASGSGQGGLTGELFF

SEQ ID NO: 435255 - protein, 13 aa, Homo sapiens
  CDR3 for alpha chain variable domain of TCR clone 217628 (TRAV8-3, TRAJ20)
CAVGAQDDYKLSF

SEQ ID NO: 435256 - protein, 11 aa, Homo sapiens
  CDR3 for beta chain variable domain of TCR clone 217628 (TRBV12-4, TRBJ2-3)
CASTATDTQYF

SEQ ID NO: 435257 - protein, 15 aa, Homo sapiens
  CDR3 for alpha chain variable domain of TCR clone 217629 (TRAV21, TRAJ53)
CATLNSGGSNYKLTF

SEQ ID NO: 435258 - protein, 14 aa, Homo sapiens
  CDR3 for beta chain variable domain of TCR clone 217629 (TRBV11-2, TRBJ2-3)
CSSSLGRGTDTQYF

SEQ ID NO: 435259 - protein, 11 aa, Homo sapiens
  CDR3 for alpha chain variable domain of TCR clone 217630 (TRAV3, TRAJ21)
RAVGNFNKFYF

SEQ ID NO: 435260 - protein, 16 aa, Homo sapiens
  CDR3 for beta chain variable domain of TCR clone 217630 (TRBV19, TRBJ2-1)
WASSKAGPSSYNEQFF

SEQ ID NO: 435261 - protein, 14 aa, Homo sapiens
  CDR3 for alpha chain variable domain of TCR clone 217631 (TRAV1-2, TRAJ16)
CAVNRFSDGQKLLF

SEQ ID NO: 435262 - protein, 13 aa, Homo sapiens
  CDR3 for beta chain variable domain of TCR clone 217631 (TRBV7-9, TRBJ1-2)
CASSLKQNYGYTY

SEQ ID NO: 435263 - protein, 16 aa, Homo sapiens
  CDR3 for alpha chain variable domain of TCR clone 217632 (TRAV3, TRAJ32)
CAVRDVEGGATNKLIF

SEQ ID NO: 435264 - protein, 14 aa, Homo sapiens
  CDR3 for beta chain variable domain of TCR clone 217632 (TRBV7-8, TRBJ1-2)
CASSPDSLSYGYTF

SEQ ID NO: 435265 - protein, 15 aa, Homo sapiens
  CDR3 for alpha chain variable domain of TCR clone 217633 (TRAV8-6, TRAJ26)
CAVSDQSPGGQNFVF

SEQ ID NO: 435266 - protein, 14 aa, Homo sapiens
  CDR3 for beta chain variable domain of TCR clone 217633 (TRBV7-2, TRBJ2-7)
CASSPKTSFYEQYF

SEQ ID NO: 435267 - protein, 13 aa, Homo sapiens
  CDR3 for alpha chain variable domain of TCR clone 217634 (TRAV2, TRAJ40)
CAAVTSGTYKYIF

SEQ ID NO: 435268 - protein, 14 aa, Homo sapiens
  CDR3 for beta chain variable domain of TCR clone 217634 (TRBV19, TRBJ2-1)
CASPTFVLGGEQFF

SEQ ID NO: 435269 - protein, 23 aa, Homo sapiens
  CDR3 for alpha chain variable domain of TCR clone 217635 (TRAV21, TRAJ9)
CAVEAVAMGASKLSLEQEQDYLL

SEQ ID NO: 435270 - protein, 13 aa, Homo sapiens
  CDR3 for beta chain variable domain of TCR clone 217635 (TRBV12-4, TRBJ1-2)
CASSSGLTVISTF

SEQ ID NO: 435271 - protein, 15 aa, Homo sapiens
  CDR3 for alpha chain variable domain of TCR clone 217636 (TRAV26-1, TRAJ37)
CIVRVATGNTGKLTF

SEQ ID NO: 435272 - protein, 12 aa, Homo sapiens
  CDR3 for beta chain variable domain of TCR clone 217636 (TRBV12-4, TRBJ1-1)
CASSLVDTEAFF

SEQ ID NO: 435273 - protein, 14 aa, Homo sapiens
  CDR3 for alpha chain variable domain of TCR clone 217637 (TRAV29/DV5, TRAJ45)
CAASFRGGADGLTF

SEQ ID NO: 435274 - protein, 11 aa, Homo sapiens
  CDR3 for beta chain variable domain of TCR clone 217637 (TRBV11-2, TRBJ2-2)
FASSLPGELFF

SEQ ID NO: 435275 - protein, 15 aa, Homo sapiens
  CDR3 for alpha chain variable domain of TCR clone 217638 (TRAV3, TRAJ5)
CAVRDLDTSRRAPTF

SEQ ID NO: 435276 - protein, 13 aa, Homo sapiens
  CDR3 for beta chain variable domain of TCR clone 217638 (TRBV12-4, TRBJ2-7)
CASSPTETYEQYF

SEQ ID NO: 435277 - protein, 12 aa, Homo sapiens
  CDR3 for alpha chain variable domain of TCR clone 217639 (TRAV20, TRAJ39)
CAVGNAGNMITF

SEQ ID NO: 435278 - protein, 17 aa, Homo sapiens
  CDR3 for beta chain variable domain of TCR clone 217639 (TRBV4-1, TRBJ2-3)
CASSQGYVSGGTDTQYF

SEQ ID NO: 435279 - protein, 17 aa, Homo sapiens
  CDR3 for alpha chain variable domain of TCR clone 217640 (TRAV35, TRAJ28)
CAGLQVYSGAGSYQLIF

SEQ ID NO: 435280 - protein, 15 aa, Homo sapiens
  CDR3 for beta chain variable domain of TCR clone 217640 (TRBV2, TRBJ1-2)
CASSEIGGANYGYTF

SEQ ID NO: 435281 - protein, 14 aa, Homo sapiens
  CDR3 for alpha chain variable domain of TCR clone 217641 (TRAV38-1, TRAJ29)
CAFITPSGNTPLVF

SEQ ID NO: 435282 - protein, 14 aa, Homo sapiens
  CDR3 for beta chain variable domain of TCR clone 217641 (TRBV18, TRBJ2-7)
CGSSPRGGAYEQYF

SEQ ID NO: 435283 - protein, 14 aa, Homo sapiens
  CDR3 for alpha chain variable domain of TCR clone 217642 (TRAV8-2, TRAJ44)
CVVSLTGTASKLTF

SEQ ID NO: 435284 - protein, 15 aa, Homo sapiens
  CDR3 for beta chain variable domain of TCR clone 217642 (TRBV7-2, TRBJ2-1)
CASSFSGGFTMSSSS

SEQ ID NO: 435285 - protein, 14 aa, Homo sapiens
  CDR3 for alpha chain variable domain of TCR clone 217643 (TRAV21, TRAJ24)
CCSVLTDSWGKLQF

SEQ ID NO: 435286 - protein, 20 aa, Homo sapiens
  CDR3 for beta chain variable domain of TCR clone 217643 (TRBV7-8, TRBJ2-2)
CASSHLFPGPTIHITGELFF

SEQ ID NO: 435287 - protein, 17 aa, Homo sapiens
  CDR3 for alpha chain variable domain of TCR clone 217644 (TRAV8-1, TRAJ42)
CAVRWGNYGGSQGNPIF

SEQ ID NO: 435288 - protein, 15 aa, Homo sapiens
  CDR3 for beta chain variable domain of TCR clone 217644 (TRBV9, TRBJ1-6)
CASSVAGTGDSPLHF

SEQ ID NO: 435289 - protein, 12 aa, Homo sapiens
  CDR3 for alpha chain variable domain of TCR clone 217645 (TRAV9-2, TRAJ26)
CALRGYGQNFVF

SEQ ID NO: 435290 - protein, 12 aa, Homo sapiens
  CDR3 for beta chain variable domain of TCR clone 217645 (TRBV29-1, TRBJ2-3)
CSVTGWADTQYF

SEQ ID NO: 435291 - protein, 22 aa, Homo sapiens
  CDR3 for alpha chain variable domain of TCR clone 217646 (TRAV3, )
CAVRDHTGNNHIKNPDPAVYQL

SEQ ID NO: 435292 - protein, 14 aa, Homo sapiens
  CDR3 for beta chain variable domain of TCR clone 217646 (TRBV7-2, TRBJ2-7)
CASSSTVGGYEQYF

SEQ ID NO: 435293 - protein, 14 aa, Homo sapiens
  CDR3 for alpha chain variable domain of TCR clone 217647 (TRAV12-3, TRAJ58)
CAMSTETSGSRLTF

SEQ ID NO: 435294 - protein, 17 aa, Homo sapiens
  CDR3 for beta chain variable domain of TCR clone 217647 (TRBV11-2, TRBJ2-1)
CASSLYPPGVEYNEQFF

SEQ ID NO: 435295 - protein, 18 aa, Homo sapiens
  CDR3 for alpha chain variable domain of TCR clone 217648 (TRAV17, TRAJ45)
CATSLDLYSGGGADGLTF

SEQ ID NO: 435296 - protein, 13 aa, Homo sapiens
  CDR3 for beta chain variable domain of TCR clone 217648 (TRBV15, TRBJ1-6)
CATSGGLNSPLHF

SEQ ID NO: 435297 - protein, 16 aa, Homo sapiens
  CDR3 for alpha chain variable domain of TCR clone 217649 (TRAV1-1, TRAJ29)
CAVRSTRNSGDTPLVF

SEQ ID NO: 435298 - protein, 15 aa, Homo sapiens
  CDR3 for beta chain variable domain of TCR clone 217649 (TRBV29-1, TRBJ2-1)
CSVGRHALFYNEQFF

SEQ ID NO: 435299 - protein, 13 aa, Homo sapiens
  CDR3 for alpha chain variable domain of TCR clone 217650 (TRAV3, TRAJ27)
CAARPLGAGKSTF

SEQ ID NO: 435300 - protein, 15 aa, Homo sapiens
  CDR3 for beta chain variable domain of TCR clone 217650 (TRBV7-8, TRBJ2-7)
CASSLRHFEAYEQYF

SEQ ID NO: 435301 - protein, 11 aa, Homo sapiens
  CDR3 for alpha chain variable domain of TCR clone 217651 (TRAV1-2, TRAJ20)
CAVSNDYKLSF

SEQ ID NO: 435302 - protein, 12 aa, Homo sapiens
  CDR3 for beta chain variable domain of TCR clone 217651 (TRBV5-1, TRBJ2-7)
CASSFRGYEQYF

SEQ ID NO: 435303 - protein, 16 aa, Homo sapiens
  CDR3 for alpha chain variable domain of TCR clone 217652 (TRAV12-2, TRAJ32)
CAVNLGQGCATNKLIF

SEQ ID NO: 435304 - protein, 12 aa, Homo sapiens
  CDR3 for beta chain variable domain of TCR clone 217652 (TRBV29-1, TRBJ2-3)
CSVTGGADTQYF

SEQ ID NO: 435305 - protein, 12 aa, Homo sapiens
  CDR3 for alpha chain variable domain of TCR clone 217653 (TRAV12-2, TRAJ10)
WGVTGGGNKRTF

SEQ ID NO: 435306 - protein, 16 aa, Homo sapiens
  CDR3 for beta chain variable domain of TCR clone 217653 (TRBV6-4, TRBJ1-2)
CASSEAVGDPNYGYIF

SEQ ID NO: 435307 - protein, 13 aa, Homo sapiens
  CDR3 for alpha chain variable domain of TCR clone 217654 (TRAV1-1, TRAJ40)
CAVRTSGTYKYIF

SEQ ID NO: 435308 - protein, 13 aa, Homo sapiens
  CDR3 for beta chain variable domain of TCR clone 217654 (TRBV19, TRBJ2-7)
CASSIRSSYEQYF

SEQ ID NO: 435309 - protein, 14 aa, Homo sapiens
  CDR3 for alpha chain variable domain of TCR clone 217655 (TRAV8-3, TRAJ4)
CAVGAAGGYNKLIF

SEQ ID NO: 435310 - protein, 12 aa, Homo sapiens
  CDR3 for beta chain variable domain of TCR clone 217655 (TRBV12-4, TRBJ2-5)
CASSSAQETQYF

SEQ ID NO: 435311 - protein, 15 aa, Homo sapiens
  CDR3 for alpha chain variable domain of TCR clone 217656 (TRAV12-3, TRAJ6)
CAMSATTGGSYIPTF

SEQ ID NO: 435312 - protein, 15 aa, Homo sapiens
  CDR3 for beta chain variable domain of TCR clone 217656 (TRBV7-9, TRBJ2-2)
CASGPLDTFPGELFF

SEQ ID NO: 435313 - protein, 12 aa, Homo sapiens
  CDR3 for alpha chain variable domain of TCR clone 217657 (TRAV27, TRAJ9)
CAGESGGFKSIF

SEQ ID NO: 435314 - protein, 18 aa, Homo sapiens
  CDR3 for beta chain variable domain of TCR clone 217657 (TRBV10-2, TRBJ2-2)
CISAPAVHRQADAGELFF

SEQ ID NO: 435315 - protein, 14 aa, Homo sapiens
  CDR3 for alpha chain variable domain of TCR clone 217658 (TRAV20, TRAJ56)
CAVQFGGANSKLTF

SEQ ID NO: 435316 - protein, 14 aa, Homo sapiens
  CDR3 for beta chain variable domain of TCR clone 217658 (TRBV12-4, TRBJ2-5)
CASSLWQKQETQYF

SEQ ID NO: 435317 - protein, 14 aa, Homo sapiens
  CDR3 for alpha chain variable domain of TCR clone 217659 (TRAV9-2, TRAJ39)
CALYIYNAGNMLTF

SEQ ID NO: 435318 - protein, 14 aa, Homo sapiens
  CDR3 for beta chain variable domain of TCR clone 217659 (TRBV28, TRBJ1-2)
CASRIHGANYGYTF

SEQ ID NO: 435319 - protein, 13 aa, Homo sapiens
  CDR3 for alpha chain variable domain of TCR clone 217660 (TRAV12-2, TRAJ24)
CAGPGTYWEKLQF

SEQ ID NO: 435320 - protein, 14 aa, Homo sapiens
  CDR3 for beta chain variable domain of TCR clone 217660 (TRBV7-2, TRBJ2-7)
CASSPKTSFYEQYF

SEQ ID NO: 435321 - protein, 14 aa, Homo sapiens
  CDR3 for alpha chain variable domain of TCR clone 217661 (TRAV12-3, TRAJ29)
WSMILLLGNPPLVF

SEQ ID NO: 435322 - protein, 16 aa, Homo sapiens
  CDR3 for beta chain variable domain of TCR clone 217661 (TRBV28, TRBJ2-7)
CASSSGTSGRGYEQYF

SEQ ID NO: 435323 - protein, 14 aa, Homo sapiens
  CDR3 for alpha chain variable domain of TCR clone 217662 (TRAV23/DV6, TRAJ57)
CAAALKGGSEKLVF

SEQ ID NO: 435324 - protein, 15 aa, Homo sapiens
  CDR3 for beta chain variable domain of TCR clone 217662 (TRBV7-9, TRBJ1-4)
CASSRTGGFNEKLFF

SEQ ID NO: 435325 - protein, 15 aa, Homo sapiens
  CDR3 for alpha chain variable domain of TCR clone 217663 (TRAV12-1, TRAJ45)
CVVLSGGGGADGLTF

SEQ ID NO: 435326 - protein, 13 aa, Homo sapiens
  CDR3 for beta chain variable domain of TCR clone 217663 (TRBV5-1, TRBJ1-5)
CASSLGAGQPQHF

SEQ ID NO: 435327 - protein, 15 aa, Homo sapiens
  CDR3 for alpha chain variable domain of TCR clone 217664 (TRAV26-1, TRAJ29)
CIVRVEGPGNTPLVF

SEQ ID NO: 435328 - protein, 15 aa, Homo sapiens
  CDR3 for beta chain variable domain of TCR clone 217664 (TRBV28, TRBJ1-3)
CASSMGWASGNTMYF

SEQ ID NO: 435329 - protein, 15 aa, Homo sapiens
  CDR3 for alpha chain variable domain of TCR clone 217665 (TRAV8-3, TRAJ45)
CASSYSGRGADGLTF

SEQ ID NO: 435330 - protein, 12 aa, Homo sapiens
  CDR3 for beta chain variable domain of TCR clone 217665 (TRBV12-4, TRBJ2-7)
CASSLGGYEQYF

SEQ ID NO: 435331 - protein, 12 aa, Homo sapiens
  CDR3 for alpha chain variable domain of TCR clone 217666 (TRAV1-1, TRAJ39)
CAVPVVGNMRTF

SEQ ID NO: 435332 - protein, 17 aa, Homo sapiens
  CDR3 for beta chain variable domain of TCR clone 217666 (TRBV28, TRBJ2-5)
CASSTPEGDALQETQYF

SEQ ID NO: 435333 - protein, 11 aa, Homo sapiens
  CDR3 for alpha chain variable domain of TCR clone 217667 (TRAV8-6, TRAJ42)
CAVRGRKPRKS

SEQ ID NO: 435334 - protein, 17 aa, Homo sapiens
  CDR3 for beta chain variable domain of TCR clone 217667 (TRBV13, TRBJ2-3)
CASSLSRVAGGRNTQYF

SEQ ID NO: 435335 - protein, 19 aa, Homo sapiens
  CDR3 for alpha chain variable domain of TCR clone 217668 (TRAV13-1, TRAJ52)
CAASSSPNAGGTSYGKLTF

SEQ ID NO: 435336 - protein, 14 aa, Homo sapiens
  CDR3 for beta chain variable domain of TCR clone 217668 (TRBV7-2, TRBJ2-7)
CASSPKTSFYEQYF

SEQ ID NO: 435337 - protein, 15 aa, Homo sapiens
  CDR3 for alpha chain variable domain of TCR clone 217669 (TRAV3, TRAJ5)
CSVRDLNTGRRALTF

SEQ ID NO: 435338 - protein, 14 aa, Homo sapiens
  CDR3 for beta chain variable domain of TCR clone 217669 (TRBV6-1, TRBJ1-3)
CASVQGGGGNTIYF

SEQ ID NO: 435339 - protein, 14 aa, Homo sapiens
  CDR3 for alpha chain variable domain of TCR clone 217670 (TRAV12-1, TRAJ17)
CVVNPKAAGNKLPL

SEQ ID NO: 435340 - protein, 12 aa, Homo sapiens
  CDR3 for beta chain variable domain of TCR clone 217670 (TRBV25-1, TRBJ2-7)
CASSDGFDEQYF

SEQ ID NO: 435341 - protein, 17 aa, Homo sapiens
  CDR3 for alpha chain variable domain of TCR clone 217671 (TRAV3, TRAJ6)
CAVRDGPRAGGSYIPTF

SEQ ID NO: 435342 - protein, 20 aa, Homo sapiens
  CDR3 for beta chain variable domain of TCR clone 217671 (TRBV28, TRBJ2-1)
CASTPIGRSPGLAGGNAQFF

SEQ ID NO: 435343 - protein, 14 aa, Homo sapiens
  CDR3 for alpha chain variable domain of TCR clone 217672 (TRAV23/DV6, TRAJ27)
CAASRDTNAGKSTF

SEQ ID NO: 435344 - protein, 13 aa, Homo sapiens
  CDR3 for beta chain variable domain of TCR clone 217672 (TRBV20-1, TRBJ1-5)
CSASGRGNQTQHF

SEQ ID NO: 435345 - protein, 14 aa, Homo sapiens
  CDR3 for alpha chain variable domain of TCR clone 217673 (TRAV1-2, TRAJ8)
CAVRDDTGLQKLVF

SEQ ID NO: 435346 - protein, 17 aa, Homo sapiens
  CDR3 for beta chain variable domain of TCR clone 217673 (TRBV13, TRBJ2-3)
CASSLSRVAGGRNTQYF

SEQ ID NO: 435347 - protein, 15 aa, Homo sapiens
  CDR3 for alpha chain variable domain of TCR clone 217674 (TRAV8-4, TRAJ37)
CAVSRGSGNTGKLIF

SEQ ID NO: 435348 - protein, 14 aa, Homo sapiens
  CDR3 for beta chain variable domain of TCR clone 217674 (TRBV28, TRBJ2-7)
CASSLRARGNEQYF

SEQ ID NO: 435349 - protein, 11 aa, Homo sapiens
  CDR3 for alpha chain variable domain of TCR clone 217675 (TRAV2, TRAJ13)
CASGGYKKVTF

SEQ ID NO: 435350 - protein, 16 aa, Homo sapiens
  CDR3 for beta chain variable domain of TCR clone 217675 (TRBV2, TRBJ2-7)
CASSEPWTGPSYEQYF

SEQ ID NO: 435351 - protein, 14 aa, Homo sapiens
  CDR3 for alpha chain variable domain of TCR clone 217676 (TRAV29/DV5, TRAJ49)
CAASLSNTGTQFYF

SEQ ID NO: 435352 - protein, 15 aa, Homo sapiens
  CDR3 for beta chain variable domain of TCR clone 217676 (TRBV20-1, TRBJ2-1)
CSARGIGGTYNEQFF

SEQ ID NO: 435353 - protein, 13 aa, Homo sapiens
  CDR3 for alpha chain variable domain of TCR clone 217677 (TRAV27, TRAJ57)
CWSAQGGSEKLVF

SEQ ID NO: 435354 - protein, 11 aa, Homo sapiens
  CDR3 for beta chain variable domain of TCR clone 217677 (TRBV11-2, TRBJ1-1)
CASSINTEAFF

SEQ ID NO: 435355 - protein, 11 aa, Homo sapiens
  CDR3 for alpha chain variable domain of TCR clone 217678 (TRAV27, TRAJ57)
SAQGGAEKLVF

SEQ ID NO: 435356 - protein, 11 aa, Homo sapiens
  CDR3 for beta chain variable domain of TCR clone 217678 (TRBV11-2, TRBJ1-1)
CASSINTEAFF

SEQ ID NO: 435357 - protein, 14 aa, Homo sapiens
  CDR3 for alpha chain variable domain of TCR clone 217679 (TRAV13-1, TRAJ35)
CAASKGGFGNVLHC

SEQ ID NO: 435358 - protein, 16 aa, Homo sapiens
  CDR3 for beta chain variable domain of TCR clone 217679 (TRBV24-1, TRBJ2-3)
CATSDAISGIADTQYF

SEQ ID NO: 435359 - protein, 11 aa, Homo sapiens
  CDR3 for alpha chain variable domain of TCR clone 217680 (TRAV3, TRAJ21)
CAVGNFNKFYF

SEQ ID NO: 435360 - protein, 17 aa, Homo sapiens
  CDR3 for beta chain variable domain of TCR clone 217680 (TRBV7-3, TRBJ2-3)
CASSLTKRMRGADTQYF

SEQ ID NO: 435361 - protein, 14 aa, Homo sapiens
  CDR3 for alpha chain variable domain of TCR clone 217681 (TRAV12-2, TRAJ45)
CAVNIGGGADGLTF

SEQ ID NO: 435362 - protein, 17 aa, Homo sapiens
  CDR3 for beta chain variable domain of TCR clone 217681 (TRBV19, TRBJ2-2)
CASSISPSGQGTGELFF

SEQ ID NO: 435363 - protein, 17 aa, Homo sapiens
  CDR3 for alpha chain variable domain of TCR clone 217682 (TRAV3, TRAJ6)
CAVRYGPRAGGSYIPIF

SEQ ID NO: 435364 - protein, 14 aa, Homo sapiens
  CDR3 for beta chain variable domain of TCR clone 217682 (TRBV7-2, TRBJ2-7)
CASSPKTSFYEQYF

SEQ ID NO: 435365 - protein, 15 aa, Homo sapiens
  CDR3 for alpha chain variable domain of TCR clone 217683 (TRAV1-2, TRAJ28)
CAVKYSGAGSYQLTF

SEQ ID NO: 435366 - protein, 13 aa, Homo sapiens
  CDR3 for beta chain variable domain of TCR clone 217683 (TRBV4-2, TRBJ1-1)
CASSQAGNTEAFF

SEQ ID NO: 435367 - protein, 15 aa, Homo sapiens
  CDR3 for alpha chain variable domain of TCR clone 217684 (TRAV16, TRAJ17)
CALSGQEAAGNKLTV

SEQ ID NO: 435368 - protein, 15 aa, Homo sapiens
  CDR3 for beta chain variable domain of TCR clone 217684 (TRBV5-1, TRBJ2-3)
CASSVTSGSTDTQYF

SEQ ID NO: 435369 - protein, 11 aa, Homo sapiens
  CDR3 for alpha chain variable domain of TCR clone 217685 (TRAV35, TRAJ22)
CAGPGVGQLTF

SEQ ID NO: 435370 - protein, 17 aa, Homo sapiens
  CDR3 for beta chain variable domain of TCR clone 217685 (TRBV7-2, TRBJ2-3)
CASSARSSGSPTDTQYF

SEQ ID NO: 435371 - protein, 13 aa, Homo sapiens
  CDR3 for alpha chain variable domain of TCR clone 217686 (TRAV12-1, TRAJ6)
CVVYPGGSYIPTF

SEQ ID NO: 435372 - protein, 17 aa, Homo sapiens
  CDR3 for beta chain variable domain of TCR clone 217686 (TRBV7-8, TRBJ2-6)
CASSAGTGGAGANVLTF

SEQ ID NO: 435373 - protein, 14 aa, Homo sapiens
  CDR3 for alpha chain variable domain of TCR clone 217687 (TRAV38-2/DV8, TRAJ54)
AAMYQIQGAQKLVL

SEQ ID NO: 435374 - protein, 13 aa, Homo sapiens
  CDR3 for beta chain variable domain of TCR clone 217687 (TRBV27, TRBJ2-1)
CASRTLGVGEQFF

SEQ ID NO: 435375 - protein, 14 aa, Homo sapiens
  CDR3 for alpha chain variable domain of TCR clone 217688 (TRAV8-3, TRAJ4)
CAVGASGGYNKLIF

SEQ ID NO: 435376 - protein, 16 aa, Homo sapiens
  CDR3 for beta chain variable domain of TCR clone 217688 (TRBV15, TRBJ2-3)
CATSRDLGIVTDTQYF

SEQ ID NO: 435377 - protein, 13 aa, Homo sapiens
  CDR3 for alpha chain variable domain of TCR clone 217689 (TRAV21, TRAJ8)
CAAPNTGVQKLVF

SEQ ID NO: 435378 - protein, 13 aa, Homo sapiens
  CDR3 for beta chain variable domain of TCR clone 217689 (TRBV6-3, TRBJ2-3)
CASTLQGIDTQYF

SEQ ID NO: 435379 - protein, 13 aa, Homo sapiens
  CDR3 for alpha chain variable domain of TCR clone 217690 (TRAV8-4, TRAJ49)
CAVSDPGGNQFYF

SEQ ID NO: 435380 - protein, 15 aa, Homo sapiens
  CDR3 for beta chain variable domain of TCR clone 217690 (TRBV12-4, TRBJ1-3)
CASSLGLQKANTIYF

SEQ ID NO: 435381 - protein, 13 aa, Homo sapiens
  CDR3 for alpha chain variable domain of TCR clone 217691 (TRAV2, TRAJ15)
CAVAPQAGTALIF

SEQ ID NO: 435382 - protein, 17 aa, Homo sapiens
  CDR3 for beta chain variable domain of TCR clone 217691 (TRBV7-3, TRBJ2-5)
CASSLGSGRSGSETQYV

SEQ ID NO: 435383 - protein, 16 aa, Homo sapiens
  CDR3 for alpha chain variable domain of TCR clone 217692 (TRAV27, TRAJ52)
CAGAVAGGTSYGKLTF

SEQ ID NO: 435384 - protein, 17 aa, Homo sapiens
  CDR3 for beta chain variable domain of TCR clone 217692 (TRBV24-1, TRBJ2-3)
CATSDLPSGEDTDTQYF

SEQ ID NO: 435385 - protein, 10 aa, Homo sapiens
  CDR3 for alpha chain variable domain of TCR clone 217693 (TRAV1-2, TRAJ4)
TLGGYNKLIF

SEQ ID NO: 435386 - protein, 15 aa, Homo sapiens
  CDR3 for beta chain variable domain of TCR clone 217693 (TRBV20-1, TRBJ1-1)
CNASRGVTGNTEAFF

SEQ ID NO: 435387 - protein, 14 aa, Homo sapiens
  CDR3 for alpha chain variable domain of TCR clone 217694 (TRAV35, TRAJ33)
CAGSSQGSNYQLIW

SEQ ID NO: 435388 - protein, 15 aa, Homo sapiens
  CDR3 for beta chain variable domain of TCR clone 217694 (TRBV20-1, TRBJ2-7)
CSADSGTSGAYEQYF

SEQ ID NO: 435389 - protein, 15 aa, Homo sapiens
  CDR3 for alpha chain variable domain of TCR clone 217695 (TRAV21, TRAJ53)
CATLNSGGSNYKLTF

SEQ ID NO: 435390 - protein, 12 aa, Homo sapiens
  CDR3 for beta chain variable domain of TCR clone 217695 (TRBV5-7, TRBJ2-7)
CASSVQGGEQYF

SEQ ID NO: 435391 - protein, 15 aa, Homo sapiens
  CDR3 for alpha chain variable domain of TCR clone 217696 (TRAV20, TRAJ53)
CAVQASGGSNFKLTF

SEQ ID NO: 435392 - protein, 12 aa, Homo sapiens
  CDR3 for beta chain variable domain of TCR clone 217696 (TRBV7-8, TRBJ2-7)
CASSLGDREQYF

SEQ ID NO: 435393 - protein, 15 aa, Homo sapiens
  CDR3 for alpha chain variable domain of TCR clone 217697 (TRAV23/DV6, TRAJ18)
CAARYRGSTLGRLYF

SEQ ID NO: 435394 - protein, 15 aa, Homo sapiens
  CDR3 for beta chain variable domain of TCR clone 217697 (TRBV5-1, TRBJ2-1)
CASSPPRAPYNEQFF

SEQ ID NO: 435395 - protein, 12 aa, Homo sapiens
  CDR3 for alpha chain variable domain of TCR clone 217698 (TRAV8-3, TRAJ15)
CAVGAPLSALIF

SEQ ID NO: 435396 - protein, 13 aa, Homo sapiens
  CDR3 for beta chain variable domain of TCR clone 217698 (TRBV19, TRBJ2-2)
CASSIWSTGELFF

SEQ ID NO: 435397 - protein, 15 aa, Homo sapiens
  CDR3 for alpha chain variable domain of TCR clone 217699 (TRAV12-1, TRAJ44)
CVVDTPQGTASKLTS

SEQ ID NO: 435398 - protein, 13 aa, Homo sapiens
  CDR3 for beta chain variable domain of TCR clone 217699 (TRBV27, TRBJ2-1)
CASSSGSYNEQFF

SEQ ID NO: 435399 - protein, 12 aa, Homo sapiens
  CDR3 for alpha chain variable domain of TCR clone 217700 (TRAV12-2, TRAJ21)
CAPSDNFNKFYF

SEQ ID NO: 435400 - protein, 14 aa, Homo sapiens
  CDR3 for beta chain variable domain of TCR clone 217700 (TRBV12-4, TRBJ1-1)
CASSLRSTGTEAFF

SEQ ID NO: 435401 - protein, 12 aa, Homo sapiens
  CDR3 for alpha chain variable domain of TCR clone 217701 (TRAV30, TRAJ43)
CGTEERGNDMRF

SEQ ID NO: 435402 - protein, 14 aa, Homo sapiens
  CDR3 for beta chain variable domain of TCR clone 217701 (TRBV7-8, TRBJ2-5)
CASSATGGQETQYF

SEQ ID NO: 435403 - protein, 16 aa, Homo sapiens
  CDR3 for alpha chain variable domain of TCR clone 217702 (TRAV16, TRAJ52)
CALSAAVGTSYGKLTF

SEQ ID NO: 435404 - protein, 12 aa, Homo sapiens
  CDR3 for beta chain variable domain of TCR clone 217702 (TRBV12-4, TRBJ1-3)
CGSSFSGNTIYF

SEQ ID NO: 435405 - protein, 10 aa, Homo sapiens
  CDR3 for alpha chain variable domain of TCR clone 217703 (TRAV25, TRAJ20)
CAVNDYKLSF

SEQ ID NO: 435406 - protein, 15 aa, Homo sapiens
  CDR3 for beta chain variable domain of TCR clone 217703 (TRBV28, TRBJ2-1)
CASSIIAGGRSEQFF

SEQ ID NO: 435407 - protein, 15 aa, Homo sapiens
  CDR3 for alpha chain variable domain of TCR clone 217704 (TRAV21, TRAJ24)
CAARASTGSWGKLQF

SEQ ID NO: 435408 - protein, 13 aa, Homo sapiens
  CDR3 for beta chain variable domain of TCR clone 217704 (TRBV10-3, TRBJ2-7)
CASKLAVNYEQYF

SEQ ID NO: 435409 - protein, 13 aa, Homo sapiens
  CDR3 for alpha chain variable domain of TCR clone 217705 (TRAV16, TRAJ37)
CALRGSNTGKLIF

SEQ ID NO: 435410 - protein, 15 aa, Homo sapiens
  CDR3 for beta chain variable domain of TCR clone 217705 (TRBV20-1, TRBJ2-1)
GSARGRGLSYNEQFF

SEQ ID NO: 435411 - protein, 14 aa, Homo sapiens
  CDR3 for alpha chain variable domain of TCR clone 217706 (TRAV1-2, TRAJ16)
CAVNRFSDVQKLLF

SEQ ID NO: 435412 - protein, 13 aa, Homo sapiens
  CDR3 for beta chain variable domain of TCR clone 217706 (TRBV19, TRBJ2-7)
CASSTSGSYEQYF

SEQ ID NO: 435413 - protein, 12 aa, Homo sapiens
  CDR3 for alpha chain variable domain of TCR clone 217707 (TRAV3, TRAJ20)
CAVRDPDYKLSF

SEQ ID NO: 435414 - protein, 14 aa, Homo sapiens
  CDR3 for beta chain variable domain of TCR clone 217707 (TRBV19, TRBJ2-3)
CASSVGRGSDTQYF

SEQ ID NO: 435415 - protein, 14 aa, Homo sapiens
  CDR3 for alpha chain variable domain of TCR clone 217708 (TRAV2, TRAJ42)
CAVVGGGSQGNLIF

SEQ ID NO: 435416 - protein, 13 aa, Homo sapiens
  CDR3 for beta chain variable domain of TCR clone 217708 (TRBV7-9, TRBJ1-2)
CASSLKQNYGYTF

SEQ ID NO: 435417 - protein, 14 aa, Homo sapiens
  CDR3 for alpha chain variable domain of TCR clone 217709 (TRAV29/DV5, TRAJ32)
CAAAYGDATNKLIF

SEQ ID NO: 435418 - protein, 15 aa, Homo sapiens
  CDR3 for beta chain variable domain of TCR clone 217709 (TRBV27, TRBJ2-7)
CASSTAGTGSYEQYF

SEQ ID NO: 435419 - protein, 15 aa, Homo sapiens
  CDR3 for alpha chain variable domain of TCR clone 217710 (TRAV8-3, TRAJ21)
CAVGALPPRGYKFYF

SEQ ID NO: 435420 - protein, 18 aa, Homo sapiens
  CDR3 for beta chain variable domain of TCR clone 217710 (TRBV11-2, TRBJ2-3)
CASSLGGASRGAPNTQYF

SEQ ID NO: 435421 - protein, 13 aa, Homo sapiens
  CDR3 for alpha chain variable domain of TCR clone 217711 (TRAV12-3, TRAJ21)
CAPGPHNFNKFYF

SEQ ID NO: 435422 - protein, 15 aa, Homo sapiens
  CDR3 for beta chain variable domain of TCR clone 217711 (TRBV10-3, TRBJ2-3)
CAISLTSGGTDTQCF

SEQ ID NO: 435423 - protein, 12 aa, Homo sapiens
  CDR3 for alpha chain variable domain of TCR clone 217712 (TRAV17, TRAJ20)
CATQVNDYKLSF

SEQ ID NO: 435424 - protein, 12 aa, Homo sapiens
  CDR3 for beta chain variable domain of TCR clone 217712 (TRBV6-1, TRBJ1-1)
CASNSPTAEAFF

SEQ ID NO: 435425 - protein, 16 aa, Homo sapiens
  CDR3 for alpha chain variable domain of TCR clone 217713 (TRAV1-2, TRAJ16)
CAVNRFQMARSCSLQG

SEQ ID NO: 435426 - protein, 13 aa, Homo sapiens
  CDR3 for beta chain variable domain of TCR clone 217713 (TRBV18, TRBJ2-7)
CASQSGGGYEQYF

SEQ ID NO: 435427 - protein, 15 aa, Homo sapiens
  CDR3 for alpha chain variable domain of TCR clone 217714 (TRAV3, TRAJ47)
CAVRDIGEYGNKLVF

SEQ ID NO: 435428 - protein, 14 aa, Homo sapiens
  CDR3 for beta chain variable domain of TCR clone 217714 (TRBV13, TRBJ2-5)
GASSLERVGETQYF

SEQ ID NO: 435429 - protein, 17 aa, Homo sapiens
  CDR3 for alpha chain variable domain of TCR clone 217715 (TRAV8-6, TRAJ8)
CAMKEGIENTGFQKLVF

SEQ ID NO: 435430 - protein, 12 aa, Homo sapiens
  CDR3 for beta chain variable domain of TCR clone 217715 (TRBV19, TRBJ1-4)
CASKDWPGGLFF

SEQ ID NO: 435431 - protein, 14 aa, Homo sapiens
  CDR3 for alpha chain variable domain of TCR clone 217716 (TRAV1-2, TRAJ16)
CAVNRFSDGQKLLF

SEQ ID NO: 435432 - protein, 14 aa, Homo sapiens
  CDR3 for beta chain variable domain of TCR clone 217716 (TRBV7-9, TRBJ2-1)
CASSSMVGFGEQFF

SEQ ID NO: 435433 - protein, 16 aa, Homo sapiens
  CDR3 for alpha chain variable domain of TCR clone 217717 (TRAV1-2, TRAJ10)
CAVRGVLTGGGNKLTF

SEQ ID NO: 435434 - protein, 12 aa, Homo sapiens
  CDR3 for beta chain variable domain of TCR clone 217717 (TRBV11-2, TRBJ2-7)
CASSPGNNEQYF

SEQ ID NO: 435435 - protein, 14 aa, Homo sapiens
  CDR3 for alpha chain variable domain of TCR clone 217718 (TRAV2, TRAJ37)
CAVDFTSNTGKLIF

SEQ ID NO: 435436 - protein, 15 aa, Homo sapiens
  CDR3 for beta chain variable domain of TCR clone 217718 (TRBV11-1, TRBJ2-6)
CASSTGSSGANVLTF

SEQ ID NO: 435437 - protein, 11 aa, Homo sapiens
  CDR3 for alpha chain variable domain of TCR clone 217719 (TRAV12-3, TRAJ43)
CAMSVPNDMRS

SEQ ID NO: 435438 - protein, 13 aa, Homo sapiens
  CDR3 for beta chain variable domain of TCR clone 217719 (TRBV20-1, TRBJ1-1)
CSAPLGGGTEAFF

SEQ ID NO: 435439 - protein, 14 aa, Homo sapiens
  CDR3 for alpha chain variable domain of TCR clone 217720 (TRAV12-1, TRAJ43)
CVVNGRSNNNDMRF

SEQ ID NO: 435440 - protein, 13 aa, Homo sapiens
  CDR3 for beta chain variable domain of TCR clone 217720 (TRBV10-3, TRBJ2-7)
CACKLAVNYEQYF

SEQ ID NO: 435441 - protein, 22 aa, Homo sapiens
  CDR3 for alpha chain variable domain of TCR clone 217721 (TRAV12-2, TRAJ32)
CSSETPSPVIQPPKSATNKLIF

SEQ ID NO: 435442 - protein, 15 aa, Homo sapiens
  CDR3 for beta chain variable domain of TCR clone 217721 (TRBV28, TRBJ2-5)
CASSSDRGRGETQYF

SEQ ID NO: 435443 - protein, 14 aa, Homo sapiens
  CDR3 for alpha chain variable domain of TCR clone 217722 (TRAV29/DV5, TRAJ44)
CAAYLVGTASKLTF

SEQ ID NO: 435444 - protein, 15 aa, Homo sapiens
  CDR3 for beta chain variable domain of TCR clone 217722 (TRBV7-3, TRBJ2-2)
CASSETGQGTGELFF

SEQ ID NO: 435445 - protein, 14 aa, Homo sapiens
  CDR3 for alpha chain variable domain of TCR clone 217723 (TRAV26-1, TRAJ45)
CIVGVVGGADGLTF

SEQ ID NO: 435446 - protein, 16 aa, Homo sapiens
  CDR3 for beta chain variable domain of TCR clone 217723 (TRBV7-9, TRBJ1-1)
CASSLTQVRSNTEAFF

SEQ ID NO: 435447 - protein, 18 aa, Homo sapiens
  CDR3 for alpha chain variable domain of TCR clone 217724 (TRAV29/DV5, TRAJ3)
QCTSVQQPLNSSASKIIF

SEQ ID NO: 435448 - protein, 15 aa, Homo sapiens
  CDR3 for beta chain variable domain of TCR clone 217724 (TRBV25-1, TRBJ1-4)
CASSPGDSTNEKLFF

SEQ ID NO: 435449 - protein, 13 aa, Homo sapiens
  CDR3 for alpha chain variable domain of TCR clone 217725 (TRAV29/DV5, TRAJ29)
CAASAAGKTPLVF

SEQ ID NO: 435450 - protein, 15 aa, Homo sapiens
  CDR3 for beta chain variable domain of TCR clone 217725 (TRBV28, TRBJ2-1)
CASSIIAGGRSEQFF

SEQ ID NO: 435451 - protein, 12 aa, Homo sapiens
  CDR3 for alpha chain variable domain of TCR clone 217726 (TRAV17, TRAJ53)
CATEGSNYKLTF

SEQ ID NO: 435452 - protein, 12 aa, Homo sapiens
  CDR3 for beta chain variable domain of TCR clone 217726 (TRBV28, TRBJ2-6)
CAIQAGANVLTF

SEQ ID NO: 435453 - protein, 11 aa, Homo sapiens
  CDR3 for alpha chain variable domain of TCR clone 217727 (TRAV3, TRAJ21)
CAMGNYNKFYF

SEQ ID NO: 435454 - protein, 16 aa, Homo sapiens
  CDR3 for beta chain variable domain of TCR clone 217727 (TRBV19, TRBJ2-1)
CASSKAGPSSYNEQFF

SEQ ID NO: 435455 - protein, 12 aa, Homo sapiens
  CDR3 for alpha chain variable domain of TCR clone 217728 (TRAV1-1, TRAJ30)
CAVRGRDDKIIF

SEQ ID NO: 435456 - protein, 14 aa, Homo sapiens
  CDR3 for beta chain variable domain of TCR clone 217728 (TRBV6-1, TRBJ1-3)
CASVQWGGGNTIYF

SEQ ID NO: 435457 - protein, 17 aa, Homo sapiens
  CDR3 for alpha chain variable domain of TCR clone 217729 (TRAV26-1, TRAJ46)
IASSESEKKSSGDKLTF

SEQ ID NO: 435458 - protein, 16 aa, Homo sapiens
  CDR3 for beta chain variable domain of TCR clone 217729 (TRBV7-3, TRBJ2-2)
CASSLKRGTLSGELFF

SEQ ID NO: 435459 - protein, 15 aa, Homo sapiens
  CDR3 for alpha chain variable domain of TCR clone 217730 (TRAV3, TRAJ22)
CAVRDRGGSASQLTF

SEQ ID NO: 435460 - protein, 16 aa, Homo sapiens
  CDR3 for beta chain variable domain of TCR clone 217730 (TRBV5-4, TRBJ2-3)
CASQQPGAGGADTQYV

SEQ ID NO: 435461 - protein, 12 aa, Homo sapiens
  CDR3 for alpha chain variable domain of TCR clone 217731 (TRAV26-2, TRAJ21)
CILKGNFNKFYF

SEQ ID NO: 435462 - protein, 14 aa, Homo sapiens
  CDR3 for beta chain variable domain of TCR clone 217731 (TRBV7-9, TRBJ1-1)
CASTPRQSYTEAFF

SEQ ID NO: 435463 - protein, 16 aa, Homo sapiens
  CDR3 for alpha chain variable domain of TCR clone 217732 (TRAV1-1, TRAJ29)
CAVRSTRNSGNTPLVF

SEQ ID NO: 435464 - protein, 15 aa, Homo sapiens
  CDR3 for beta chain variable domain of TCR clone 217732 (TRBV5-5, TRBJ2-2)
CASSRQASGAGELFF

SEQ ID NO: 435465 - protein, 15 aa, Homo sapiens
  CDR3 for alpha chain variable domain of TCR clone 217733 (TRAV25, TRAJ52)
CAGTSGGTSYGKLTF

SEQ ID NO: 435466 - protein, 16 aa, Homo sapiens
  CDR3 for beta chain variable domain of TCR clone 217733 (TRBV7-8, TRBJ2-6)
CASRVGDSSGANVLTF

SEQ ID NO: 435467 - protein, 13 aa, Homo sapiens
  CDR3 for alpha chain variable domain of TCR clone 217734 (TRAV27, TRAJ6)
CAGGTRGSYIPTF

SEQ ID NO: 435468 - protein, 14 aa, Homo sapiens
  CDR3 for beta chain variable domain of TCR clone 217734 (TRBV7-3, TRBJ2-3)
CASSPSARTDTQYF

SEQ ID NO: 435469 - protein, 14 aa, Homo sapiens
  CDR3 for alpha chain variable domain of TCR clone 217735 (TRAV13-1, TRAJ40)
CAAHPTSGTHKYIF

SEQ ID NO: 435470 - protein, 16 aa, Homo sapiens
  CDR3 for beta chain variable domain of TCR clone 217735 (TRBV7-9, TRBJ2-6)
CASSLKGPLRANVLTS

SEQ ID NO: 435471 - protein, 17 aa, Homo sapiens
  CDR3 for alpha chain variable domain of TCR clone 217736 (TRAV3, TRAJ6)
CAVIDGPRAGGSYIPTF

SEQ ID NO: 435472 - protein, 14 aa, Homo sapiens
  CDR3 for beta chain variable domain of TCR clone 217736 (TRBV7-2, TRBJ2-7)
CASSPKTSFYEQYV

SEQ ID NO: 435473 - protein, 14 aa, Homo sapiens
  CDR3 for alpha chain variable domain of TCR clone 217737 (TRAV12-1, TRAJ17)
CVVNYKAAGNKLTF

SEQ ID NO: 435474 - protein, 16 aa, Homo sapiens
  CDR3 for beta chain variable domain of TCR clone 217737 (TRBV11-2, TRBJ1-2)
CASSLDTGGADYGYTF

SEQ ID NO: 435475 - protein, 14 aa, Homo sapiens
  CDR3 for alpha chain variable domain of TCR clone 217738 (TRAV12-3, TRAJ10)
SHLPLTGRGNKLTF

SEQ ID NO: 435476 - protein, 15 aa, Homo sapiens
  CDR3 for beta chain variable domain of TCR clone 217738 (TRBV13, TRBJ2-1)
CASSLLSGLNNEQFF

SEQ ID NO: 435477 - protein, 16 aa, Homo sapiens
  CDR3 for alpha chain variable domain of TCR clone 217739 (TRAV17, TRAJ52)
CATSNAGGTSYGKLTF

SEQ ID NO: 435478 - protein, 14 aa, Homo sapiens
  CDR3 for beta chain variable domain of TCR clone 217739 (TRBV20-1, TRBJ2-7)
CSAKRGRSSYEQYF

SEQ ID NO: 435479 - protein, 13 aa, Homo sapiens
  CDR3 for alpha chain variable domain of TCR clone 217740 (TRAV3, TRAJ21)
CAVRETDFNKFYF

SEQ ID NO: 435480 - protein, 17 aa, Homo sapiens
  CDR3 for beta chain variable domain of TCR clone 217740 (TRBV7-8, TRBJ2-6)
CASSAGTGGAGANVLTF

SEQ ID NO: 435481 - protein, 14 aa, Homo sapiens
  CDR3 for alpha chain variable domain of TCR clone 217741 (TRAV29/DV5, TRAJ36)
CAARRKTGANNLFF

SEQ ID NO: 435482 - protein, 15 aa, Homo sapiens
  CDR3 for beta chain variable domain of TCR clone 217741 (TRBV7-2, TRBJ2-3)
CASSARGSGTDTQYF

SEQ ID NO: 435483 - protein, 15 aa, Homo sapiens
  CDR3 for alpha chain variable domain of TCR clone 217742 (TRAV12-1, TRAJ4)
CVVNPFSGDYNKLSF

SEQ ID NO: 435484 - protein, 16 aa, Homo sapiens
  CDR3 for beta chain variable domain of TCR clone 217742 (TRBV5-1, TRBJ1-1)
CASSKTGTEVGTEAFF

SEQ ID NO: 435485 - protein, 16 aa, Homo sapiens
  CDR3 for alpha chain variable domain of TCR clone 217743 (TRAV23/DV6, TRAJ9)
CAASIGGNTRGFKTIF

SEQ ID NO: 435486 - protein, 13 aa, Homo sapiens
  CDR3 for beta chain variable domain of TCR clone 217743 (TRBV10-3, TRBJ2-7)
CASKLAVNYEQYF

SEQ ID NO: 435487 - protein, 11 aa, Homo sapiens
  CDR3 for alpha chain variable domain of TCR clone 217744 (TRAV3, TRAJ21)
CAVGNFNKFYF

SEQ ID NO: 435488 - protein, 13 aa, Homo sapiens
  CDR3 for beta chain variable domain of TCR clone 217744 (TRBV7-2, TRBJ2-5)
CASSRGGLETQYF

SEQ ID NO: 435489 - protein, 12 aa, Homo sapiens
  CDR3 for alpha chain variable domain of TCR clone 217745 (TRAV1-1, TRAJ8)
CAGGTGFQNLVF

SEQ ID NO: 435490 - protein, 13 aa, Homo sapiens
  CDR3 for beta chain variable domain of TCR clone 217745 (TRBV7-9, TRBJ1-2)
CASSLKQNYGYTF

SEQ ID NO: 435491 - protein, 13 aa, Homo sapiens
  CDR3 for alpha chain variable domain of TCR clone 217746 (TRAV29/DV5, TRAJ31)
CAASRNNNASLMF

SEQ ID NO: 435492 - protein, 18 aa, Homo sapiens
  CDR3 for beta chain variable domain of TCR clone 217746 (TRBV12-4, TRBJ2-2)
CASSLVAGTRGRTGELFF

SEQ ID NO: 435493 - protein, 14 aa, Homo sapiens
  CDR3 for alpha chain variable domain of TCR clone 217747 (TRAV8-1, TRAJ24)
CAVNAADSWGRWQF

SEQ ID NO: 435494 - protein, 16 aa, Homo sapiens
  CDR3 for beta chain variable domain of TCR clone 217747 (TRBV4-3, TRBJ2-1)
CASSPALDRGVNEQFF

SEQ ID NO: 435495 - protein, 14 aa, Homo sapiens
  CDR3 for alpha chain variable domain of TCR clone 217748 (TRAV1-1, TRAJ27)
CAVIYSTNAGKSTF

SEQ ID NO: 435496 - protein, 15 aa, Homo sapiens
  CDR3 for beta chain variable domain of TCR clone 217748 (TRBV9, TRBJ1-6)
CASSVAGTGDSPLHF

SEQ ID NO: 435497 - protein, 14 aa, Homo sapiens
  CDR3 for alpha chain variable domain of TCR clone 217749 (TRAV1-2, TRAJ16)
CAVNRFSDGQKLLF

SEQ ID NO: 435498 - protein, 16 aa, Homo sapiens
  CDR3 for beta chain variable domain of TCR clone 217749 (TRBV5-1, TRBJ2-5)
CASSLRRTSGEETQYF

SEQ ID NO: 435499 - protein, 13 aa, Homo sapiens
  CDR3 for alpha chain variable domain of TCR clone 217750 (TRAV2, TRAJ15)
CAVSSQAGTALIF

SEQ ID NO: 435500 - protein, 16 aa, Homo sapiens
  CDR3 for beta chain variable domain of TCR clone 217750 (TRBV5-1, TRBJ1-1)
CASSSGGNSLNTEAFL

SEQ ID NO: 435501 - protein, 12 aa, Homo sapiens
  CDR3 for alpha chain variable domain of TCR clone 217751 (TRAV13-1, TRAJ54)
CAASKGAQKLVF

SEQ ID NO: 435502 - protein, 13 aa, Homo sapiens
  CDR3 for beta chain variable domain of TCR clone 217751 (TRBV20-1, TRBJ1-1)
CSARGGGNTEAFF

SEQ ID NO: 435503 - protein, 12 aa, Homo sapiens
  CDR3 for alpha chain variable domain of TCR clone 217752 (TRAV9-2, TRAJ26)
CALRGYGQNFVF

SEQ ID NO: 435504 - protein, 14 aa, Homo sapiens
  CDR3 for beta chain variable domain of TCR clone 217752 (TRBV7-9, TRBJ2-3)
CASSLEDGTDTQYF

SEQ ID NO: 435505 - protein, 12 aa, Homo sapiens
  CDR3 for alpha chain variable domain of TCR clone 217753 (TRAV1-1, TRAJ24)
CAATDSWGKLQF

SEQ ID NO: 435506 - protein, 16 aa, Homo sapiens
  CDR3 for beta chain variable domain of TCR clone 217753 (TRBV13, TRBJ2-2)
CASSPRTGEHTGELFF

SEQ ID NO: 435507 - protein, 15 aa, Homo sapiens
  CDR3 for alpha chain variable domain of TCR clone 217754 (TRAV21, TRAJ24)
CAARSSTDSWGKLQF

SEQ ID NO: 435508 - protein, 13 aa, Homo sapiens
  CDR3 for beta chain variable domain of TCR clone 217754 (TRBV11-2, TRBJ2-5)
CASSSTGEETQYS

SEQ ID NO: 435509 - protein, 15 aa, Homo sapiens
  CDR3 for alpha chain variable domain of TCR clone 217755 (TRAV1-2, TRAJ35)
CAVRGPGGFGNVLHC

SEQ ID NO: 435510 - protein, 14 aa, Homo sapiens
  CDR3 for beta chain variable domain of TCR clone 217755 (TRBV5-1, TRBJ2-1)
CASSLDDRFDEQFF

SEQ ID NO: 435511 - protein, 15 aa, Homo sapiens
  CDR3 for alpha chain variable domain of TCR clone 217756 (TRAV8-3, TRAJ45)
CASSYSGGGAYGLTF

SEQ ID NO: 435512 - protein, 13 aa, Homo sapiens
  CDR3 for beta chain variable domain of TCR clone 217756 (TRBV10-3, TRBJ2-7)
CASELAVNYEQYF

SEQ ID NO: 435513 - protein, 16 aa, Homo sapiens
  CDR3 for alpha chain variable domain of TCR clone 217757 (TRAV30, TRAJ44)
CGTEDKRTGTASKLTF

SEQ ID NO: 435514 - protein, 15 aa, Homo sapiens
  CDR3 for beta chain variable domain of TCR clone 217757 (TRBV7-8, TRBJ1-5)
CASSLERRGLEPQHS

SEQ ID NO: 435515 - protein, 10 aa, Homo sapiens
  CDR3 for alpha chain variable domain of TCR clone 217758 (TRAV21, TRAJ31)
CAVDNARLMF

SEQ ID NO: 435516 - protein, 15 aa, Homo sapiens
  CDR3 for beta chain variable domain of TCR clone 217758 (TRBV5-7, TRBJ1-5)
CAGSYGKLWDQPQHF

SEQ ID NO: 435517 - protein, 15 aa, Homo sapiens
  CDR3 for alpha chain variable domain of TCR clone 217759 (TRAV13-1, TRAJ17)
CAASIERAAGNKLTF

SEQ ID NO: 435518 - protein, 17 aa, Homo sapiens
  CDR3 for beta chain variable domain of TCR clone 217759 (TRBV13, TRBJ2-3)
CASSLARVAGGRNTQYY

SEQ ID NO: 435519 - protein, 16 aa, Homo sapiens
  CDR3 for alpha chain variable domain of TCR clone 217760 (TRAV23/DV6, TRAJ7)
CAASRVASMGTTDSLL

SEQ ID NO: 435520 - protein, 13 aa, Homo sapiens
  CDR3 for beta chain variable domain of TCR clone 217760 (TRBV7-2, TRBJ1-1)
CASNLKGAKVAFF

SEQ ID NO: 435521 - protein, 16 aa, Homo sapiens
  CDR3 for alpha chain variable domain of TCR clone 217761 (TRAV13-2, TRAJ32)
CAEDMNYGGATNKLIF

SEQ ID NO: 435522 - protein, 14 aa, Homo sapiens
  CDR3 for beta chain variable domain of TCR clone 217761 (TRBV15, TRBJ2-5)
CATSSTGYQETQYF

SEQ ID NO: 435523 - protein, 16 aa, Homo sapiens
  CDR3 for alpha chain variable domain of TCR clone 217762 (TRAV13-2, TRAJ28)
FAEKSYSGAGSYQLTF

SEQ ID NO: 435524 - protein, 16 aa, Homo sapiens
  CDR3 for beta chain variable domain of TCR clone 217762 (TRBV19, TRBJ2-1)
CASSKAGPSSYNEQFF

SEQ ID NO: 435525 - protein, 13 aa, Homo sapiens
  CDR3 for alpha chain variable domain of TCR clone 217763 (TRAV13-1, TRAJ13)
CADSKGGYQKVTF

SEQ ID NO: 435526 - protein, 16 aa, Homo sapiens
  CDR3 for beta chain variable domain of TCR clone 217763 (TRBV18, TRBJ1-2)
CASSPPERVTIYGYTF

SEQ ID NO: 435527 - protein, 18 aa, Homo sapiens
  CDR3 for alpha chain variable domain of TCR clone 217764 (TRAV26-1, TRAJ21)
CCVLLHRQSRINFNKFYF

SEQ ID NO: 435528 - protein, 17 aa, Homo sapiens
  CDR3 for beta chain variable domain of TCR clone 217764 (TRBV11-2, TRBJ2-1)
CASSLYPPGVEYNEQFF

SEQ ID NO: 435529 - protein, 17 aa, Homo sapiens
  CDR3 for alpha chain variable domain of TCR clone 217765 (TRAV3, TRAJ6)
CAVRDGPRAGGSYIPTF

SEQ ID NO: 435530 - protein, 18 aa, Homo sapiens
  CDR3 for beta chain variable domain of TCR clone 217765 (TRBV7-9, TRBJ2-7)
GASSLTTSGSRTWYEQYF

SEQ ID NO: 435531 - protein, 12 aa, Homo sapiens
  CDR3 for alpha chain variable domain of TCR clone 217766 (TRAV21, TRAJ33)
CAKMDSNYQLIW

SEQ ID NO: 435532 - protein, 13 aa, Homo sapiens
  CDR3 for beta chain variable domain of TCR clone 217766 (TRBV7-9, TRBJ1-2)
CASSLKQNYGYAF

SEQ ID NO: 435533 - protein, 15 aa, Homo sapiens
  CDR3 for alpha chain variable domain of TCR clone 217767 (TRAV26-1, TRAJ22)
CIVRVSFWFCKATDL

SEQ ID NO: 435534 - protein, 15 aa, Homo sapiens
  CDR3 for beta chain variable domain of TCR clone 217767 (TRBV11-2, TRBJ1-6)
CASSLDPWAVSPLHF

SEQ ID NO: 435535 - protein, 13 aa, Homo sapiens
  CDR3 for alpha chain variable domain of TCR clone 217768 (TRAV21, TRAJ27)
CAARPGSAGQSTF

SEQ ID NO: 435536 - protein, 14 aa, Homo sapiens
  CDR3 for beta chain variable domain of TCR clone 217768 (TRBV7-6, TRBJ2-3)
CASSLGTVTDTQYF

SEQ ID NO: 435537 - protein, 15 aa, Homo sapiens
  CDR3 for alpha chain variable domain of TCR clone 217769 (TRAV26-1, TRAJ29)
CTVRVEGSGNTPLVF

SEQ ID NO: 435538 - protein, 15 aa, Homo sapiens
  CDR3 for beta chain variable domain of TCR clone 217769 (TRBV7-9, TRBJ1-5)
CASSQGPQPNQPQHF

SEQ ID NO: 435539 - protein, 15 aa, Homo sapiens
  CDR3 for alpha chain variable domain of TCR clone 217770 (TRAV27, TRAJ38)
CAARRNAGNNRKLIW

SEQ ID NO: 435540 - protein, 13 aa, Homo sapiens
  CDR3 for beta chain variable domain of TCR clone 217770 (TRBV7-3, TRBJ2-1)
CASSLDSDNEQFF

SEQ ID NO: 435541 - protein, 14 aa, Homo sapiens
  CDR3 for alpha chain variable domain of TCR clone 217771 (TRAV26-1, TRAJ38)
CIADNAGTNRKLIW

SEQ ID NO: 435542 - protein, 13 aa, Homo sapiens
  CDR3 for beta chain variable domain of TCR clone 217771 (TRBV15, TRBJ1-6)
CATSGGLNSPLHF

SEQ ID NO: 435543 - protein, 13 aa, Homo sapiens
  CDR3 for alpha chain variable domain of TCR clone 217772 (TRAV8-3, TRAJ36)
CAVGATGANNLFF

SEQ ID NO: 435544 - protein, 14 aa, Homo sapiens
  CDR3 for beta chain variable domain of TCR clone 217772 (TRBV7-9, TRBJ2-1)
CASSSDRGLDEQFF

SEQ ID NO: 435545 - protein, 10 aa, Homo sapiens
  CDR3 for alpha chain variable domain of TCR clone 217773 (TRAV12-2, TRAJ43)
CAVKVLSMRF

SEQ ID NO: 435546 - protein, 14 aa, Homo sapiens
  CDR3 for beta chain variable domain of TCR clone 217773 (TRBV11-2, TRBJ2-7)
CASSLGNSIYEQYF

SEQ ID NO: 435547 - protein, 15 aa, Homo sapiens
  CDR3 for alpha chain variable domain of TCR clone 217774 (TRAV16, TRAJ17)
CTLSGNKAAGNKLTF

SEQ ID NO: 435548 - protein, 16 aa, Homo sapiens
  CDR3 for beta chain variable domain of TCR clone 217774 (TRBV7-6, TRBJ1-6)
CASSSLPAGEYSPLHF

SEQ ID NO: 435549 - protein, 16 aa, Homo sapiens
  CDR3 for alpha chain variable domain of TCR clone 217775 (TRAV3, TRAJ21)
CAVRDIERGNFNKFYF

SEQ ID NO: 435550 - protein, 16 aa, Homo sapiens
  CDR3 for beta chain variable domain of TCR clone 217775 (TRBV20-1, TRBJ2-5)
CSPGGTSGGYMETQYF

SEQ ID NO: 435551 - protein, 15 aa, Homo sapiens
  CDR3 for alpha chain variable domain of TCR clone 217776 (TRAV13-2, TRAJ22)
CAENSRPGSARQLTF

SEQ ID NO: 435552 - protein, 17 aa, Homo sapiens
  CDR3 for beta chain variable domain of TCR clone 217776 (TRBV20-1, TRBJ2-6)
CSATRDRGPSGANLLTF

SEQ ID NO: 435553 - protein, 11 aa, Homo sapiens
  CDR3 for alpha chain variable domain of TCR clone 217777 (TRAV2, TRAJ13)
CASGGYQKVTF

SEQ ID NO: 435554 - protein, 12 aa, Homo sapiens
  CDR3 for beta chain variable domain of TCR clone 217777 (TRBV7-8, TRBJ2-7)
CASEGGPHGQYF

SEQ ID NO: 435555 - protein, 13 aa, Homo sapiens
  CDR3 for alpha chain variable domain of TCR clone 217778 (TRAV2, TRAJ40)
CAVVTSGTYKYIF

SEQ ID NO: 435556 - protein, 13 aa, Homo sapiens
  CDR3 for beta chain variable domain of TCR clone 217778 (TRBV7-9, TRBJ2-5)
CGSLPSGRETQYF

SEQ ID NO: 435557 - protein, 16 aa, Homo sapiens
  CDR3 for alpha chain variable domain of TCR clone 217779 (TRAV12-3, TRAJ53)
CAMSPGSGGSNYKLTF

SEQ ID NO: 435558 - protein, 16 aa, Homo sapiens
  CDR3 for beta chain variable domain of TCR clone 217779 (TRBV5-1, TRBJ2-3)
CASSLGLETSTDTQYF

SEQ ID NO: 435559 - protein, 17 aa, Homo sapiens
  CDR3 for alpha chain variable domain of TCR clone 217780 (TRAV8-6, TRAJ58)
CAVSSWVGETSGSSLTF

SEQ ID NO: 435560 - protein, 15 aa, Homo sapiens
  CDR3 for beta chain variable domain of TCR clone 217780 (TRBV6-5, TRBJ2-1)
CASSYDAGAGNEQFF

SEQ ID NO: 435561 - protein, 17 aa, Homo sapiens
  CDR3 for alpha chain variable domain of TCR clone 217781 (TRAV3, TRAJ42)
CAVRDRDYGRSQGNLIF

SEQ ID NO: 435562 - protein, 15 aa, Homo sapiens
  CDR3 for beta chain variable domain of TCR clone 217781 (TRBV3-1, TRBJ2-1)
CASSQVVDDGEEQFF

SEQ ID NO: 435563 - protein, 20 aa, Homo sapiens
  CDR3 for alpha chain variable domain of TCR clone 217782 (TRAV26-2, TRAJ39)
CCVLLHPESAFYNAGNMLTF

SEQ ID NO: 435564 - protein, 12 aa, Homo sapiens
  CDR3 for beta chain variable domain of TCR clone 217782 (TRBV11-2, TRBJ2-2)
CASSLGGGELFF

SEQ ID NO: 435565 - protein, 14 aa, Homo sapiens
  CDR3 for alpha chain variable domain of TCR clone 217783 (TRAV4, TRAJ17)
CLVGDMAAGNKLTF

SEQ ID NO: 435566 - protein, 14 aa, Homo sapiens
  CDR3 for beta chain variable domain of TCR clone 217783 (TRBV4-1, TRBJ2-2)
CASSQAVNTGELFF

SEQ ID NO: 435567 - protein, 13 aa, Homo sapiens
  CDR3 for alpha chain variable domain of TCR clone 217784 (TRAV8-1, TRAJ32)
CAADGGATNKLIF

SEQ ID NO: 435568 - protein, 17 aa, Homo sapiens
  CDR3 for beta chain variable domain of TCR clone 217784 (TRBV20-1, TRBJ2-2)
CSASGSGQGGLTGELFF

SEQ ID NO: 435569 - protein, 16 aa, Homo sapiens
  CDR3 for alpha chain variable domain of TCR clone 217785 (TRAV16, TRAJ4)
CSLSRMCSGGYNKLIF

SEQ ID NO: 435570 - protein, 16 aa, Homo sapiens
  CDR3 for beta chain variable domain of TCR clone 217785 (TRBV24-1, TRBJ2-3)
CATSDPGTGATDTQYF

SEQ ID NO: 435571 - protein, 19 aa, Homo sapiens
  CDR3 for alpha chain variable domain of TCR clone 217786 (TRAV17, TRAJ40)
TASRAADTASYFCASKYIF

SEQ ID NO: 435572 - protein, 11 aa, Homo sapiens
  CDR3 for beta chain variable domain of TCR clone 217786 (TRBV19, TRBJ1-1)
CASSIGSEAFF

SEQ ID NO: 435573 - protein, 13 aa, Homo sapiens
  CDR3 for alpha chain variable domain of TCR clone 217787 (TRAV12-1, TRAJ53)
CVVNAASNYKLTF

SEQ ID NO: 435574 - protein, 15 aa, Homo sapiens
  CDR3 for beta chain variable domain of TCR clone 217787 (TRBV2, TRBJ2-5)
CASSGTVAAGETQYF

SEQ ID NO: 435575 - protein, 15 aa, Homo sapiens
  CDR3 for alpha chain variable domain of TCR clone 217788 (TRAV35, TRAJ23)
CAGQRGYNQGGKPIF

SEQ ID NO: 435576 - protein, 16 aa, Homo sapiens
  CDR3 for beta chain variable domain of TCR clone 217788 (TRBV27, TRBJ2-1)
CACSSRLAGNYNEQFF

SEQ ID NO: 435577 - protein, 13 aa, Homo sapiens
  CDR3 for alpha chain variable domain of TCR clone 217789 (TRAV17, TRAJ34)
CDKDLYNTDKLIF

SEQ ID NO: 435578 - protein, 15 aa, Homo sapiens
  CDR3 for beta chain variable domain of TCR clone 217789 (TRBV20-1, TRBJ2-3)
CSATGTSGFTDTQYF

SEQ ID NO: 435579 - protein, 14 aa, Homo sapiens
  CDR3 for alpha chain variable domain of TCR clone 217790 (TRAV16, TRAJ32)
CALKSGGATNKLIF

SEQ ID NO: 435580 - protein, 14 aa, Homo sapiens
  CDR3 for beta chain variable domain of TCR clone 217790 (TRBV12-4, TRBJ1-2)
CASTHGTSNYGYTF

SEQ ID NO: 435581 - protein, 17 aa, Homo sapiens
  CDR3 for alpha chain variable domain of TCR clone 217791 (TRAV3, TRAJ6)
CAVRDGPRAGGNYIPTF

SEQ ID NO: 435582 - protein, 20 aa, Homo sapiens
  CDR3 for beta chain variable domain of TCR clone 217791 (TRBV28, TRBJ2-1)
CASTPIGRSPGLAGGNEQFF

SEQ ID NO: 435583 - protein, 13 aa, Homo sapiens
  CDR3 for alpha chain variable domain of TCR clone 217792 (TRAV13-2, TRAJ10)
CAENTGGGNKLTL

SEQ ID NO: 435584 - protein, 15 aa, Homo sapiens
  CDR3 for beta chain variable domain of TCR clone 217792 (TRBV12-4, TRBJ2-2)
CASSRQGANTGELFF

SEQ ID NO: 435585 - protein, 13 aa, Homo sapiens
  CDR3 for alpha chain variable domain of TCR clone 217793 (TRAV16, TRAJ34)
CITVLSHTDKLIF

SEQ ID NO: 435586 - protein, 15 aa, Homo sapiens
  CDR3 for beta chain variable domain of TCR clone 217793 (TRBV11-3, TRBJ2-3)
CASLKDGREGDTQYF

SEQ ID NO: 435587 - protein, 14 aa, Homo sapiens
  CDR3 for alpha chain variable domain of TCR clone 217794 (TRAV17, TRAJ57)
CATDPQGGSEKLFF

SEQ ID NO: 435588 - protein, 13 aa, Homo sapiens
  CDR3 for beta chain variable domain of TCR clone 217794 (TRBV10-3, TRBJ2-7)
CASKLAVNYEQYF

SEQ ID NO: 435589 - protein, 13 aa, Homo sapiens
  CDR3 for alpha chain variable domain of TCR clone 217795 (TRAV16, TRAJ34)
CALSPYNTDKLIL

SEQ ID NO: 435590 - protein, 17 aa, Homo sapiens
  CDR3 for beta chain variable domain of TCR clone 217795 (TRBV5-1, TRBJ2-1)
CASSTGTSGYSYNEQFF

SEQ ID NO: 435591 - protein, 14 aa, Homo sapiens
  CDR3 for alpha chain variable domain of TCR clone 217796 (TRAV13-2, TRAJ10)
CAETLPGGGNKLTF

SEQ ID NO: 435592 - protein, 12 aa, Homo sapiens
  CDR3 for beta chain variable domain of TCR clone 217796 (TRBV5-4, TRBJ2-1)
CASSSTRETQYF

SEQ ID NO: 435593 - protein, 14 aa, Homo sapiens
  CDR3 for alpha chain variable domain of TCR clone 217797 (TRAV13-2, TRAJ10)
CAETLPGGGNKLTF

SEQ ID NO: 435594 - protein, 12 aa, Homo sapiens
  CDR3 for beta chain variable domain of TCR clone 217797 (TRBV5-4, TRBJ2-5)
CASSSTRETQYF

SEQ ID NO: 435595 - protein, 17 aa, Homo sapiens
  CDR3 for alpha chain variable domain of TCR clone 217798 (TRAV3, TRAJ42)
CAVRDRDYGGSQGNLIF

SEQ ID NO: 435596 - protein, 14 aa, Homo sapiens
  CDR3 for beta chain variable domain of TCR clone 217798 (TRBV5-1, TRBJ2-1)
CASSFQDRVDEQFF

SEQ ID NO: 435597 - protein, 14 aa, Homo sapiens
  CDR3 for alpha chain variable domain of TCR clone 217799 (TRAV1-2, TRAJ16)
CAVNRFSDVQKLLF

SEQ ID NO: 435598 - protein, 14 aa, Homo sapiens
  CDR3 for beta chain variable domain of TCR clone 217799 (TRBV7-3, TRBJ2-1)
CASSLAGGTNEQFF

SEQ ID NO: 435599 - protein, 12 aa, Homo sapiens
  CDR3 for alpha chain variable domain of TCR clone 217800 (TRAV12-2, TRAJ42)
CAVGGSQGNLIF

SEQ ID NO: 435600 - protein, 13 aa, Homo sapiens
  CDR3 for beta chain variable domain of TCR clone 217800 (TRBV10-2, TRBJ2-7)
CASGASGGYEQYF

SEQ ID NO: 435601 - protein, 19 aa, Homo sapiens
  CDR3 for alpha chain variable domain of TCR clone 217801 (TRAV26-1, TRAJ22)
CCVLLHRWVFSGSARQLTF

SEQ ID NO: 435602 - protein, 19 aa, Homo sapiens
  CDR3 for beta chain variable domain of TCR clone 217801 (TRBV19, TRBJ2-5)
CASSIGQVTDFFLGENQYF

SEQ ID NO: 435603 - protein, 16 aa, Homo sapiens
  CDR3 for alpha chain variable domain of TCR clone 217802 (TRAV3, TRAJ37)
CAVRGKGSGNTGKLIF

SEQ ID NO: 435604 - protein, 16 aa, Homo sapiens
  CDR3 for beta chain variable domain of TCR clone 217802 (TRBV6-6, TRBJ2-5)
CASSETLDRGAETQYF

SEQ ID NO: 435605 - protein, 18 aa, Homo sapiens
  CDR3 for alpha chain variable domain of TCR clone 217803 (TRAV38-1, TRAJ40)
CDVFLCFRPTSGTYKYIF

SEQ ID NO: 435606 - protein, 14 aa, Homo sapiens
  CDR3 for beta chain variable domain of TCR clone 217803 (TRBV25-1, TRBJ1-1)
CASTHLGGNTEAFF

SEQ ID NO: 435607 - protein, 15 aa, Homo sapiens
  CDR3 for alpha chain variable domain of TCR clone 217804 (TRAV14/DV4, TRAJ33)
CAMREGRDSNFQLIW

SEQ ID NO: 435608 - protein, 16 aa, Homo sapiens
  CDR3 for beta chain variable domain of TCR clone 217804 (TRBV12-5, TRBJ2-5)
CASGPRTSGNQETQYF

SEQ ID NO: 435609 - protein, 14 aa, Homo sapiens
  CDR3 for alpha chain variable domain of TCR clone 217805 (TRAV29/DV5, TRAJ45)
CAASSGGGADGLPF

SEQ ID NO: 435610 - protein, 11 aa, Homo sapiens
  CDR3 for beta chain variable domain of TCR clone 217805 (TRBV11-2, TRBJ2-2)
CASSLPGELFF

SEQ ID NO: 435611 - protein, 11 aa, Homo sapiens
  CDR3 for alpha chain variable domain of TCR clone 217806 (TRAV12-1, TRAJ37)
CVVNNPGKLIF

SEQ ID NO: 435612 - protein, 13 aa, Homo sapiens
  CDR3 for beta chain variable domain of TCR clone 217806 (TRBV12-4, TRBJ1-5)
CASSPDRAQPQHF

SEQ ID NO: 435613 - protein, 16 aa, Homo sapiens
  CDR3 for alpha chain variable domain of TCR clone 217807 (TRAV30, TRAJ24)
CGTEIVDADSWGKFQF

SEQ ID NO: 435614 - protein, 13 aa, Homo sapiens
  CDR3 for beta chain variable domain of TCR clone 217807 (TRBV7-9, TRBJ2-3)
CASSAAGSDTQYF

SEQ ID NO: 435615 - protein, 13 aa, Homo sapiens
  CDR3 for alpha chain variable domain of TCR clone 217808 (TRAV17, TRAJ31)
CATDENNNARLMV

SEQ ID NO: 435616 - protein, 14 aa, Homo sapiens
  CDR3 for beta chain variable domain of TCR clone 217808 (TRBV11-2, TRBJ2-1)
CASSPSRQGGGQFF

SEQ ID NO: 435617 - protein, 16 aa, Homo sapiens
  CDR3 for alpha chain variable domain of TCR clone 217809 (TRAV8-3, TRAJ13)
CAVGAYPSGGYQKVTF

SEQ ID NO: 435618 - protein, 13 aa, Homo sapiens
  CDR3 for beta chain variable domain of TCR clone 217809 (TRBV18, TRBJ2-5)
CQLTRASSETQYF

SEQ ID NO: 435619 - protein, 12 aa, Homo sapiens
  CDR3 for alpha chain variable domain of TCR clone 217810 (TRAV3, TRAJ20)
CAVRDGDYKLSF

SEQ ID NO: 435620 - protein, 14 aa, Homo sapiens
  CDR3 for beta chain variable domain of TCR clone 217810 (TRBV20-1, TRBJ2-5)
CSARYRGLQETQYF

SEQ ID NO: 435621 - protein, 16 aa, Homo sapiens
  CDR3 for alpha chain variable domain of TCR clone 217811 (TRAV30, TRAJ24)
CGTEIVAADSWGKFQF

SEQ ID NO: 435622 - protein, 17 aa, Homo sapiens
  CDR3 for beta chain variable domain of TCR clone 217811 (TRBV20-1, TRBJ2-1)
CSAPPRLAGTRYNEQFF

SEQ ID NO: 435623 - protein, 16 aa, Homo sapiens
  CDR3 for alpha chain variable domain of TCR clone 217812 (TRAV12-2, TRAJ13)
CAVKKTVVTRKLPLEL

SEQ ID NO: 435624 - protein, 15 aa, Homo sapiens
  CDR3 for beta chain variable domain of TCR clone 217812 (TRBV27, TRBJ2-1)
CASSNGGGSSNEQVF

SEQ ID NO: 435625 - protein, 14 aa, Homo sapiens
  CDR3 for alpha chain variable domain of TCR clone 217813 (TRAV4, TRAJ10)
CLVGDTGGGNKLIF

SEQ ID NO: 435626 - protein, 13 aa, Homo sapiens
  CDR3 for beta chain variable domain of TCR clone 217813 (TRBV10-3, TRBJ2-7)
CASKLAVNYEQYF

SEQ ID NO: 435627 - protein, 13 aa, Homo sapiens
  CDR3 for alpha chain variable domain of TCR clone 217814 (TRAV20, TRAJ48)
CAVQGVGNEKLPF

SEQ ID NO: 435628 - protein, 19 aa, Homo sapiens
  CDR3 for beta chain variable domain of TCR clone 217814 (TRBV2, TRBJ2-2)
CASSQPGLAGGGNTGELFF

SEQ ID NO: 435629 - protein, 16 aa, Homo sapiens
  CDR3 for alpha chain variable domain of TCR clone 217815 (TRAV23/DV6, TRAJ44)
CAALIPALPVNSPLGL

SEQ ID NO: 435630 - protein, 14 aa, Homo sapiens
  CDR3 for beta chain variable domain of TCR clone 217815 (TRBV2, TRBJ2-1)
CASSEALDGNEQFF

SEQ ID NO: 435631 - protein, 15 aa, Homo sapiens
  CDR3 for alpha chain variable domain of TCR clone 217816 (TRAV3, TRAJ22)
CAVRDRGGSARQLTF

SEQ ID NO: 435632 - protein, 15 aa, Homo sapiens
  CDR3 for beta chain variable domain of TCR clone 217816 (TRBV7-8, TRBJ2-3)
CASSPRTGSTDTQYF

SEQ ID NO: 435633 - protein, 13 aa, Homo sapiens
  CDR3 for alpha chain variable domain of TCR clone 217817 (TRAV2, TRAJ40)
CAVVTSGTYKYIS

SEQ ID NO: 435634 - protein, 14 aa, Homo sapiens
  CDR3 for beta chain variable domain of TCR clone 217817 (TRBV19, TRBJ2-1)
CASPTLVLSGEQFF

SEQ ID NO: 435635 - protein, 15 aa, Homo sapiens
  CDR3 for alpha chain variable domain of TCR clone 217818 (TRAV20, TRAJ28)
CAVQYSGAGSYQLTF

SEQ ID NO: 435636 - protein, 16 aa, Homo sapiens
  CDR3 for beta chain variable domain of TCR clone 217818 (TRBV7-9, TRBJ2-1)
CASSDVAGGSYNEQFF

SEQ ID NO: 435637 - protein, 12 aa, Homo sapiens
  CDR3 for alpha chain variable domain of TCR clone 217819 (TRAV13-1, TRAJ48)
CAANFVNEKLTF

SEQ ID NO: 435638 - protein, 12 aa, Homo sapiens
  CDR3 for beta chain variable domain of TCR clone 217819 (TRBV11-2, TRBJ2-1)
CASSPGNNEQFF

SEQ ID NO: 435639 - protein, 12 aa, Homo sapiens
  CDR3 for alpha chain variable domain of TCR clone 217820 (TRAV21, TRAJ33)
CAVQDSNYQLIW

SEQ ID NO: 435640 - protein, 14 aa, Homo sapiens
  CDR3 for beta chain variable domain of TCR clone 217820 (TRBV28, TRBJ2-1)
CASSPWEGGNEQFF

SEQ ID NO: 435641 - protein, 12 aa, Homo sapiens
  CDR3 for alpha chain variable domain of TCR clone 217821 (TRAV12-3, TRAJ17)
CAMTLTGNKLTF

SEQ ID NO: 435642 - protein, 15 aa, Homo sapiens
  CDR3 for beta chain variable domain of TCR clone 217821 (TRBV20-1, TRBJ2-7)
CSARCRVSGMDEQYF

SEQ ID NO: 435643 - protein, 13 aa, Homo sapiens
  CDR3 for alpha chain variable domain of TCR clone 217822 (TRAV12-1, TRAJ47)
CVVNMEYGNKLVF

SEQ ID NO: 435644 - protein, 16 aa, Homo sapiens
  CDR3 for beta chain variable domain of TCR clone 217822 (TRBV13, TRBJ2-2)
CASSPRTGEHTGELFF

SEQ ID NO: 435645 - protein, 13 aa, Homo sapiens
  CDR3 for alpha chain variable domain of TCR clone 217823 (TRAV3, TRAJ8)
CAVRFAGFQKLVF

SEQ ID NO: 435646 - protein, 15 aa, Homo sapiens
  CDR3 for beta chain variable domain of TCR clone 217823 (TRBV20-1, TRBJ2-7)
CSARDRVSGMDEQYF

SEQ ID NO: 435647 - protein, 12 aa, Homo sapiens
  CDR3 for alpha chain variable domain of TCR clone 217824 (TRAV1-1, TRAJ24)
CAVRGSWGKFQS

SEQ ID NO: 435648 - protein, 16 aa, Homo sapiens
  CDR3 for beta chain variable domain of TCR clone 217824 (TRBV2, TRBJ2-4)
CASSEAPGGEQNIQYF

SEQ ID NO: 435649 - protein, 14 aa, Homo sapiens
  CDR3 for alpha chain variable domain of TCR clone 217825 (TRAV29/DV5, TRAJ44)
CAAFLVGTASKLTF

SEQ ID NO: 435650 - protein, 15 aa, Homo sapiens
  CDR3 for beta chain variable domain of TCR clone 217825 (TRBV7-3, TRBJ2-2)
RASSETGQGTGELFF

SEQ ID NO: 435651 - protein, 15 aa, Homo sapiens
  CDR3 for alpha chain variable domain of TCR clone 217826 (TRAV17, TRAJ57)
CATGPSQGGSEKLVF

SEQ ID NO: 435652 - protein, 13 aa, Homo sapiens
  CDR3 for beta chain variable domain of TCR clone 217826 (TRBV27, TRBJ2-1)
RASRTLGVGEQFF

SEQ ID NO: 435653 - protein, 12 aa, Homo sapiens
  CDR3 for alpha chain variable domain of TCR clone 217827 (TRAV21, TRAJ11)
CAATSGYTILTF

SEQ ID NO: 435654 - protein, 14 aa, Homo sapiens
  CDR3 for beta chain variable domain of TCR clone 217827 (TRBV20-1, TRBJ2-7)
CSAPELAGVGEQYF

SEQ ID NO: 435655 - protein, 14 aa, Homo sapiens
  CDR3 for alpha chain variable domain of TCR clone 217828 (TRAV6, TRAJ37)
CALGSQGYTGKLLF

SEQ ID NO: 435656 - protein, 15 aa, Homo sapiens
  CDR3 for beta chain variable domain of TCR clone 217828 (TRBV2, TRBJ2-1)
CASSEEREGDNEQFF

SEQ ID NO: 435657 - protein, 21 aa, Homo sapiens
  CDR3 for alpha chain variable domain of TCR clone 217829 (TRAV12-1, TRAJ32)
SSVIQPPTSMNYGGAANKLIF

SEQ ID NO: 435658 - protein, 18 aa, Homo sapiens
  CDR3 for beta chain variable domain of TCR clone 217829 (TRBV20-1, TRBJ2-3)
CSVSGLAGGPGTTDTQYF

SEQ ID NO: 435659 - protein, 15 aa, Homo sapiens
  CDR3 for alpha chain variable domain of TCR clone 217830 (TRAV21, TRAJ13)
CAVRPTSGGYQKVTF

SEQ ID NO: 435660 - protein, 15 aa, Homo sapiens
  CDR3 for beta chain variable domain of TCR clone 217830 (TRBV28, TRBJ2-7)
CASSTGGRGFYEQYF

SEQ ID NO: 435661 - protein, 15 aa, Homo sapiens
  CDR3 for alpha chain variable domain of TCR clone 217831 (TRAV3, TRAJ20)
CAVRDIKLSDYKLSF

SEQ ID NO: 435662 - protein, 13 aa, Homo sapiens
  CDR3 for beta chain variable domain of TCR clone 217831 (TRBV10-3, TRBJ2-5)
CAMTSGAGETQYF

SEQ ID NO: 435663 - protein, 13 aa, Homo sapiens
  CDR3 for alpha chain variable domain of TCR clone 217832 (TRAV13-1, TRAJ20)
CAARVSNDYKLSF

SEQ ID NO: 435664 - protein, 16 aa, Homo sapiens
  CDR3 for beta chain variable domain of TCR clone 217832 (TRBV11-1, TRBJ1-1)
CATNPRDRAFNSEAFF

SEQ ID NO: 435665 - protein, 19 aa, Homo sapiens
  CDR3 for alpha chain variable domain of TCR clone 217833 (TRAV2, TRAJ20)
ILQLREADAAVYRDCKLSF

SEQ ID NO: 435666 - protein, 12 aa, Homo sapiens
  CDR3 for beta chain variable domain of TCR clone 217833 (TRBV11-2, TRBJ2-2)
CASSLGGGELFF

SEQ ID NO: 435667 - protein, 16 aa, Homo sapiens
  CDR3 for alpha chain variable domain of TCR clone 217834 (TRAV23/DV6, TRAJ9)
CAASIGGNTGGFKTIF

SEQ ID NO: 435668 - protein, 13 aa, Homo sapiens
  CDR3 for beta chain variable domain of TCR clone 217834 (TRBV12-4, TRBJ1-1)
CASSPGTGCEAFF

SEQ ID NO: 435669 - protein, 16 aa, Homo sapiens
  CDR3 for alpha chain variable domain of TCR clone 217835 (TRAV23/DV6, TRAJ9)
CAASIGGNTGGFKTIF

SEQ ID NO: 435670 - protein, 15 aa, Homo sapiens
  CDR3 for beta chain variable domain of TCR clone 217835 (TRBV7-8, TRBJ1-5)
CASSLERRGLEPQHF

SEQ ID NO: 435671 - protein, 15 aa, Homo sapiens
  CDR3 for alpha chain variable domain of TCR clone 217836 (TRAV17, TRAJ45)
TSVLRTGEGADGLTF

SEQ ID NO: 435672 - protein, 14 aa, Homo sapiens
  CDR3 for beta chain variable domain of TCR clone 217836 (TRBV7-2, TRBJ2-5)
CASSFTQGQETQYF

SEQ ID NO: 435673 - protein, 13 aa, Homo sapiens
  CDR3 for alpha chain variable domain of TCR clone 217837 (TRAV8-4, TRAJ30)
CATYKNRDDKIIF

SEQ ID NO: 435674 - protein, 13 aa, Homo sapiens
  CDR3 for beta chain variable domain of TCR clone 217837 (TRBV2, TRBJ2-3)
CASGRGRTDTQYF

SEQ ID NO: 435675 - protein, 12 aa, Homo sapiens
  CDR3 for alpha chain variable domain of TCR clone 217838 (TRAV2, TRAJ9)
CAVGAGGFITIF

SEQ ID NO: 435676 - protein, 16 aa, Homo sapiens
  CDR3 for beta chain variable domain of TCR clone 217838 (TRBV13, TRBJ2-2)
CASSPRTGKHTGELFF

SEQ ID NO: 435677 - protein, 15 aa, Homo sapiens
  CDR3 for alpha chain variable domain of TCR clone 217839 (TRAV3, TRAJ22)
CAVRNRGGSARQLTF

SEQ ID NO: 435678 - protein, 15 aa, Homo sapiens
  CDR3 for beta chain variable domain of TCR clone 217839 (TRBV20-1, TRBJ1-1)
CSASRGVTGNTEAFF

SEQ ID NO: 435679 - protein, 13 aa, Homo sapiens
  CDR3 for alpha chain variable domain of TCR clone 217840 (TRAV12-3, TRAJ49)
CAMIPTGWAQFYF

SEQ ID NO: 435680 - protein, 14 aa, Homo sapiens
  CDR3 for beta chain variable domain of TCR clone 217840 (TRBV5-1, TRBJ1-5)
CASSLAGGHQSQHF

SEQ ID NO: 435681 - protein, 15 aa, Homo sapiens
  CDR3 for alpha chain variable domain of TCR clone 217841 (TRAV3, TRAJ3)
CAVRDGDSSASKIIF

SEQ ID NO: 435682 - protein, 17 aa, Homo sapiens
  CDR3 for beta chain variable domain of TCR clone 217841 (TRBV25-1, TRBJ2-7)
CASSDARVVFSSYEQYF

SEQ ID NO: 435683 - protein, 19 aa, Homo sapiens
  CDR3 for alpha chain variable domain of TCR clone 217842 (TRAV17, TRAJ42)
CFLLLCYGPGGGSQGNLIF

SEQ ID NO: 435684 - protein, 14 aa, Homo sapiens
  CDR3 for beta chain variable domain of TCR clone 217842 (TRBV28, TRBJ2-5)
CASSLGDRAETQYF

SEQ ID NO: 435685 - protein, 12 aa, Homo sapiens
  CDR3 for alpha chain variable domain of TCR clone 217843 (TRAV27, TRAJ35)
CAGADFGNVLHC

SEQ ID NO: 435686 - protein, 15 aa, Homo sapiens
  CDR3 for beta chain variable domain of TCR clone 217843 (TRBV5-1, TRBJ2-3)
CASSYTSGSTDTQYF

SEQ ID NO: 435687 - protein, 15 aa, Homo sapiens
  CDR3 for alpha chain variable domain of TCR clone 217844 (TRAV3, TRAJ22)
CAVRDRGGSARQLIF

SEQ ID NO: 435688 - protein, 13 aa, Homo sapiens
  CDR3 for beta chain variable domain of TCR clone 217844 (TRBV7-3, TRBJ2-1)
CASSPVAYNEQFF

SEQ ID NO: 435689 - protein, 14 aa, Homo sapiens
  CDR3 for alpha chain variable domain of TCR clone 217845 (TRAV26-1, TRAJ38)
CIADNAGNNRKLIW

SEQ ID NO: 435690 - protein, 14 aa, Homo sapiens
  CDR3 for beta chain variable domain of TCR clone 217845 (TRBV20-1, TRBJ2-7)
CSAKTGTGGYEQYF

SEQ ID NO: 435691 - protein, 14 aa, Homo sapiens
  CDR3 for alpha chain variable domain of TCR clone 217846 (TRAV12-2, TRAJ13)
CAVKKTGGYQKVTF

SEQ ID NO: 435692 - protein, 15 aa, Homo sapiens
  CDR3 for beta chain variable domain of TCR clone 217846 (TRBV27, TRBJ2-1)
CARRNGGGSSHEQFF

SEQ ID NO: 435693 - protein, 13 aa, Homo sapiens
  CDR3 for alpha chain variable domain of TCR clone 217847 (TRAV12-2, TRAJ17)
SATSGAAGNKLTF

SEQ ID NO: 435694 - protein, 17 aa, Homo sapiens
  CDR3 for beta chain variable domain of TCR clone 217847 (TRBV11-2, TRBJ2-1)
CASSLYPPGVEYNEQFF

SEQ ID NO: 435695 - protein, 16 aa, Homo sapiens
  CDR3 for alpha chain variable domain of TCR clone 217848 (TRAV13-1, TRAJ48)
CAASIFGNFGNEKLNF

SEQ ID NO: 435696 - protein, 14 aa, Homo sapiens
  CDR3 for beta chain variable domain of TCR clone 217848 (TRBV7-3, TRBJ1-1)
CASSLKGGNTEAFF

SEQ ID NO: 435697 - protein, 13 aa, Homo sapiens
  CDR3 for alpha chain variable domain of TCR clone 217849 (TRAV12-3, TRAJ7)
CAMTAYGNNRLAF

SEQ ID NO: 435698 - protein, 16 aa, Homo sapiens
  CDR3 for beta chain variable domain of TCR clone 217849 (TRBV20-1, TRBJ1-4)
CSARPYGGELNEKLFF

SEQ ID NO: 435699 - protein, 11 aa, Homo sapiens
  CDR3 for alpha chain variable domain of TCR clone 217850 (TRAV23/DV6, TRAJ11)
CAVGGYSTLTF

SEQ ID NO: 435700 - protein, 15 aa, Homo sapiens
  CDR3 for beta chain variable domain of TCR clone 217850 (TRBV7-8, TRBJ2-5)
CASSFQSSGEENQYF

SEQ ID NO: 435701 - protein, 12 aa, Homo sapiens
  CDR3 for alpha chain variable domain of TCR clone 217851 (TRAV8-3, TRAJ26)
CAGDNYGQNFVF

SEQ ID NO: 435702 - protein, 13 aa, Homo sapiens
  CDR3 for beta chain variable domain of TCR clone 217851 (TRBV20-1, TRBJ1-1)
CSAPLGGGTEAFL

SEQ ID NO: 435703 - protein, 12 aa, Homo sapiens
  CDR3 for alpha chain variable domain of TCR clone 217852 (TRAV8-3, TRAJ26)
CAGDNYGQNLFF

SEQ ID NO: 435704 - protein, 11 aa, Homo sapiens
  CDR3 for beta chain variable domain of TCR clone 217852 (TRBV29-1, TRBJ2-5)
CSEDRTGTQYF

SEQ ID NO: 435705 - protein, 14 aa, Homo sapiens
  CDR3 for alpha chain variable domain of TCR clone 217853 (TRAV1-2, TRAJ8)
CAVREDTGFQKLVV

SEQ ID NO: 435706 - protein, 14 aa, Homo sapiens
  CDR3 for beta chain variable domain of TCR clone 217853 (TRBV19, TRBJ2-1)
CASPTFVLSGEQFF

SEQ ID NO: 435707 - protein, 13 aa, Homo sapiens
  CDR3 for alpha chain variable domain of TCR clone 217854 (TRAV16, TRAJ28)
CALTGAGSYQLTF

SEQ ID NO: 435708 - protein, 16 aa, Homo sapiens
  CDR3 for beta chain variable domain of TCR clone 217854 (TRBV12-5, TRBJ2-5)
CASGPRTSGNQETQYF

SEQ ID NO: 435709 - protein, 14 aa, Homo sapiens
  CDR3 for alpha chain variable domain of TCR clone 217855 (TRAV26-1, TRAJ49)
CIVRLTNTGNQFYL

SEQ ID NO: 435710 - protein, 13 aa, Homo sapiens
  CDR3 for beta chain variable domain of TCR clone 217855 (TRBV4-1, TRBJ2-7)
CASSQGQAYEQYF

SEQ ID NO: 435711 - protein, 14 aa, Homo sapiens
  CDR3 for alpha chain variable domain of TCR clone 217856 (TRAV26-1, TRAJ45)
CIEVTGGGADGLAF

SEQ ID NO: 435712 - protein, 19 aa, Homo sapiens
  CDR3 for beta chain variable domain of TCR clone 217856 (TRBV19, TRBJ2-2)
CASTRPGLAGGRVTGELFF

SEQ ID NO: 435713 - protein, 11 aa, Homo sapiens
  CDR3 for alpha chain variable domain of TCR clone 217857 (TRAV3, TRAJ21)
CAVGNFNKFYF

SEQ ID NO: 435714 - protein, 16 aa, Homo sapiens
  CDR3 for beta chain variable domain of TCR clone 217857 (TRBV19, TRBJ2-1)
CASSKAGPSADNEQFF

SEQ ID NO: 435715 - protein, 14 aa, Homo sapiens
  CDR3 for alpha chain variable domain of TCR clone 217858 (TRAV1-2, TRAJ16)
CAVNRFSDGQKLLF

SEQ ID NO: 435716 - protein, 15 aa, Homo sapiens
  CDR3 for beta chain variable domain of TCR clone 217858 (TRBV28, TRBJ2-3)
CASSQELGGTDTQYF

SEQ ID NO: 435717 - protein, 11 aa, Homo sapiens
  CDR3 for alpha chain variable domain of TCR clone 217859 (TRAV2, TRAJ21)
CAVFNFNKFYF

SEQ ID NO: 435718 - protein, 17 aa, Homo sapiens
  CDR3 for beta chain variable domain of TCR clone 217859 (TRBV20-1, TRBJ2-2)
CSASGSGQGGLTGELFF

SEQ ID NO: 435719 - protein, 14 aa, Homo sapiens
  CDR3 for alpha chain variable domain of TCR clone 217860 (TRAV12-2, TRAJ45)
CAVNIQGKADGLTF

SEQ ID NO: 435720 - protein, 15 aa, Homo sapiens
  CDR3 for beta chain variable domain of TCR clone 217860 (TRBV20-1, TRBJ2-7)
CSARDRVSGMDEQYF

SEQ ID NO: 435721 - protein, 14 aa, Homo sapiens
  CDR3 for alpha chain variable domain of TCR clone 217861 (TRAV8-3, TRAJ44)
CAVGLTGTASKLTF

SEQ ID NO: 435722 - protein, 15 aa, Homo sapiens
  CDR3 for beta chain variable domain of TCR clone 217861 (TRBV5-1, TRBJ2-1)
CASSPPRAPYNEQFF

SEQ ID NO: 435723 - protein, 14 aa, Homo sapiens
  CDR3 for alpha chain variable domain of TCR clone 217862 (TRAV21, TRAJ35)
CAVMPIGFGNVLHC

SEQ ID NO: 435724 - protein, 16 aa, Homo sapiens
  CDR3 for beta chain variable domain of TCR clone 217862 (TRBV7-9, TRBJ1-2)
CASSLGFSSGEDGYAF

SEQ ID NO: 435725 - protein, 17 aa, Homo sapiens
  CDR3 for alpha chain variable domain of TCR clone 217863 (TRAV26-1, TRAJ37)
CIVTVITVSSNTGKLIF

SEQ ID NO: 435726 - protein, 11 aa, Homo sapiens
  CDR3 for beta chain variable domain of TCR clone 217863 (TRBV29-1, TRBJ2-5)
CSEDRTGTQYF

SEQ ID NO: 435727 - protein, 15 aa, Homo sapiens
  CDR3 for alpha chain variable domain of TCR clone 217864 (TRAV13-1, TRAJ10)
CAATILTGGGNKLTF

SEQ ID NO: 435728 - protein, 14 aa, Homo sapiens
  CDR3 for beta chain variable domain of TCR clone 217864 (TRBV4-1, TRBJ2-2)
CASSQAVNTGELFF

SEQ ID NO: 435729 - protein, 14 aa, Homo sapiens
  CDR3 for alpha chain variable domain of TCR clone 217865 (TRAV20, TRAJ10)
CAVRVEGGGNKLTF

SEQ ID NO: 435730 - protein, 13 aa, Homo sapiens
  CDR3 for beta chain variable domain of TCR clone 217865 (TRBV7-3, TRBJ1-1)
CASSQDWGAEAFF

SEQ ID NO: 435731 - protein, 16 aa, Homo sapiens
  CDR3 for alpha chain variable domain of TCR clone 217866 (TRAV12-3, TRAJ53)
CAMSACSGGSNYKLTF

SEQ ID NO: 435732 - protein, 13 aa, Homo sapiens
  CDR3 for beta chain variable domain of TCR clone 217866 (TRBV29-1, TRBJ2-3)
CSVGPRGTDTQYF

SEQ ID NO: 435733 - protein, 15 aa, Homo sapiens
  CDR3 for alpha chain variable domain of TCR clone 217867 (TRAV3, TRAJ22)
CAVRDRGGSARQLIF

SEQ ID NO: 435734 - protein, 15 aa, Homo sapiens
  CDR3 for beta chain variable domain of TCR clone 217867 (TRBV7-3, TRBJ2-1)
CASSPTGGGEVEQFF

SEQ ID NO: 435735 - protein, 13 aa, Homo sapiens
  CDR3 for alpha chain variable domain of TCR clone 217868 (TRAV12-2, TRAJ37)
CAGGSGNTGKLIL

SEQ ID NO: 435736 - protein, 14 aa, Homo sapiens
  CDR3 for beta chain variable domain of TCR clone 217868 (TRBV6-1, TRBJ2-6)
CASQQGAGANVLNF

SEQ ID NO: 435737 - protein, 17 aa, Homo sapiens
  CDR3 for alpha chain variable domain of TCR clone 217869 (TRAV26-1, TRAJ53)
CIVRVDDSGGSNYKLTF

SEQ ID NO: 435738 - protein, 15 aa, Homo sapiens
  CDR3 for beta chain variable domain of TCR clone 217869 (TRBV20-1, TRBJ2-7)
CSARVPAEYFYEQYF

SEQ ID NO: 435739 - protein, 15 aa, Homo sapiens
  CDR3 for alpha chain variable domain of TCR clone 217870 (TRAV20, TRAJ48)
CAVQARNFGNEKLTF

SEQ ID NO: 435740 - protein, 14 aa, Homo sapiens
  CDR3 for beta chain variable domain of TCR clone 217870 (TRBV7-3, TRBJ2-7)
CASSLSGVSYEQYF

SEQ ID NO: 435741 - protein, 12 aa, Homo sapiens
  CDR3 for alpha chain variable domain of TCR clone 217871 (TRAV22, TRAJ29)
FAPPSGNTPLVF

SEQ ID NO: 435742 - protein, 15 aa, Homo sapiens
  CDR3 for beta chain variable domain of TCR clone 217871 (TRBV5-1, TRBJ2-1)
CASSPPRAPYNEQFF

SEQ ID NO: 435743 - protein, 12 aa, Homo sapiens
  CDR3 for alpha chain variable domain of TCR clone 217872 (TRAV17, TRAJ39)
CATGAAGNMLTF

SEQ ID NO: 435744 - protein, 13 aa, Homo sapiens
  CDR3 for beta chain variable domain of TCR clone 217872 (TRBV7-9, TRBJ1-2)
CASRTGPNYGYTF

SEQ ID NO: 435745 - protein, 10 aa, Homo sapiens
  CDR3 for alpha chain variable domain of TCR clone 217873 (TRAV21, TRAJ34)
CAADTDKLIF

SEQ ID NO: 435746 - protein, 16 aa, Homo sapiens
  CDR3 for beta chain variable domain of TCR clone 217873 (TRBV6-5, TRBJ2-2)
CASSHVSRAQLGELFF

SEQ ID NO: 435747 - protein, 15 aa, Homo sapiens
  CDR3 for alpha chain variable domain of TCR clone 217874 (TRAV8-4, TRAJ3)
CAVTGENLVQQCFQD

SEQ ID NO: 435748 - protein, 16 aa, Homo sapiens
  CDR3 for beta chain variable domain of TCR clone 217874 (TRBV4-2, TRBJ1-1)
CASSQAGFGMNTEACF

SEQ ID NO: 435749 - protein, 18 aa, Homo sapiens
  CDR3 for alpha chain variable domain of TCR clone 217875 (TRAV21, TRAJ52)
CAVRPSPAGGTSYGKPTF

SEQ ID NO: 435750 - protein, 15 aa, Homo sapiens
  CDR3 for beta chain variable domain of TCR clone 217875 (TRBV27, TRBJ2-1)
CASSNGGGSSNEQFF

SEQ ID NO: 435751 - protein, 13 aa, Homo sapiens
  CDR3 for alpha chain variable domain of TCR clone 217876 (TRAV13-2, TRAJ13)
CARGLPESYLWNW

SEQ ID NO: 435752 - protein, 16 aa, Homo sapiens
  CDR3 for beta chain variable domain of TCR clone 217876 (TRBV5-1, TRBJ2-3)
CASSSIGAGSTDTQYF

SEQ ID NO: 435753 - protein, 13 aa, Homo sapiens
  CDR3 for alpha chain variable domain of TCR clone 217877 (TRAV13-2, TRAJ48)
CAEMDFGNEKLTF

SEQ ID NO: 435754 - protein, 13 aa, Homo sapiens
  CDR3 for beta chain variable domain of TCR clone 217877 (TRBV13, TRBJ2-5)
CASSPEVGETKYF

SEQ ID NO: 435755 - protein, 15 aa, Homo sapiens
  CDR3 for alpha chain variable domain of TCR clone 217878 (TRAV3, TRAJ5)
CAVRDLDTGRRAFTF

SEQ ID NO: 435756 - protein, 13 aa, Homo sapiens
  CDR3 for beta chain variable domain of TCR clone 217878 (TRBV12-4, TRBJ2-7)
CASSPTETHEQYF

SEQ ID NO: 435757 - protein, 14 aa, Homo sapiens
  CDR3 for alpha chain variable domain of TCR clone 217879 (TRAV21, TRAJ45)
CAVSSGGGADGLTF

SEQ ID NO: 435758 - protein, 17 aa, Homo sapiens
  CDR3 for beta chain variable domain of TCR clone 217879 (TRBV19, TRBJ2-7)
CASSISFYDSYPYEQYF

SEQ ID NO: 435759 - protein, 13 aa, Homo sapiens
  CDR3 for alpha chain variable domain of TCR clone 217880 (TRAV19, TRAJ54)
CALSDGEPRSLYL

SEQ ID NO: 435760 - protein, 13 aa, Homo sapiens
  CDR3 for beta chain variable domain of TCR clone 217880 (TRBV10-3, TRBJ2-5)
CAMTSGAGETQYF

SEQ ID NO: 435761 - protein, 13 aa, Homo sapiens
  CDR3 for alpha chain variable domain of TCR clone 217881 (TRAV8-1, TRAJ34)
CAVRPYNTDKLIF

SEQ ID NO: 435762 - protein, 12 aa, Homo sapiens
  CDR3 for beta chain variable domain of TCR clone 217881 (TRBV7-9, TRBJ2-7)
CASSIKREEQYF

SEQ ID NO: 435763 - protein, 14 aa, Homo sapiens
  CDR3 for alpha chain variable domain of TCR clone 217882 (TRAV16, TRAJ42)
FALLAGGSQGNLIF

SEQ ID NO: 435764 - protein, 15 aa, Homo sapiens
  CDR3 for beta chain variable domain of TCR clone 217882 (TRBV2, TRBJ2-7)
CASSEGLARSYEQYF

SEQ ID NO: 435765 - protein, 13 aa, Homo sapiens
  CDR3 for alpha chain variable domain of TCR clone 217883 (TRAV23/DV6, TRAJ15)
CSALPAGRNCSDL

SEQ ID NO: 435766 - protein, 11 aa, Homo sapiens
  CDR3 for beta chain variable domain of TCR clone 217883 (TRBV7-9, TRBJ1-2)
CASSHRVLTMA

SEQ ID NO: 435767 - protein, 16 aa, Homo sapiens
  CDR3 for alpha chain variable domain of TCR clone 217884 (TRAV9-2, TRAJ53)
CALIKNSGGSNYKLTF

SEQ ID NO: 435768 - protein, 14 aa, Homo sapiens
  CDR3 for beta chain variable domain of TCR clone 217884 (TRBV28, TRBJ2-1)
CASSLNGRNNEQFF

SEQ ID NO: 435769 - protein, 14 aa, Homo sapiens
  CDR3 for alpha chain variable domain of TCR clone 217885 (TRAV38-1, TRAJ35)
CAFLTIGFGNVLHG

SEQ ID NO: 435770 - protein, 17 aa, Homo sapiens
  CDR3 for beta chain variable domain of TCR clone 217885 (TRBV28, TRBJ1-1)
CASSGDLRTESNTEAFF

SEQ ID NO: 435771 - protein, 12 aa, Homo sapiens
  CDR3 for alpha chain variable domain of TCR clone 217886 (TRAV12-3, TRAJ17)
CAMTLTGNKLTF

SEQ ID NO: 435772 - protein, 13 aa, Homo sapiens
  CDR3 for beta chain variable domain of TCR clone 217886 (TRBV5-1, TRBJ1-2)
CASSFQDGYGYTF

SEQ ID NO: 435773 - protein, 12 aa, Homo sapiens
  CDR3 for alpha chain variable domain of TCR clone 217887 (TRAV2, TRAJ33)
CAFMDSNYQLIW

SEQ ID NO: 435774 - protein, 15 aa, Homo sapiens
  CDR3 for beta chain variable domain of TCR clone 217887 (TRBV12-4, TRBJ2-5)
CASSPPTGLQETQYF

SEQ ID NO: 435775 - protein, 15 aa, Homo sapiens
  CDR3 for alpha chain variable domain of TCR clone 217888 (TRAV13-2, TRAJ40)
CAENRSRQGNYKYIF

SEQ ID NO: 435776 - protein, 16 aa, Homo sapiens
  CDR3 for beta chain variable domain of TCR clone 217888 (TRBV7-2, TRBJ2-1)
CASSLGRTSGDNEQFL

SEQ ID NO: 435777 - protein, 16 aa, Homo sapiens
  CDR3 for alpha chain variable domain of TCR clone 217889 (TRAV26-1, TRAJ52)
CIVSNAGGTSYGKLTF

SEQ ID NO: 435778 - protein, 17 aa, Homo sapiens
  CDR3 for beta chain variable domain of TCR clone 217889 (TRBV7-8, TRBJ2-6)
CASSAGTGGAGANVLTF

SEQ ID NO: 435779 - protein, 13 aa, Homo sapiens
  CDR3 for alpha chain variable domain of TCR clone 217890 (TRAV8-4, TRAJ10)
CAAFTGGGNKLTF

SEQ ID NO: 435780 - protein, 15 aa, Homo sapiens
  CDR3 for beta chain variable domain of TCR clone 217890 (TRBV2, TRBJ2-3)
CASSVFEKATDTQYF

SEQ ID NO: 435781 - protein, 18 aa, Homo sapiens
  CDR3 for alpha chain variable domain of TCR clone 217891 (TRAV26-1, TRAJ23)
CIVRVGLEVWNQGGKLIF

SEQ ID NO: 435782 - protein, 12 aa, Homo sapiens
  CDR3 for beta chain variable domain of TCR clone 217891 (TRBV11-2, TRBJ2-5)
CASSLGQETQYF

SEQ ID NO: 435783 - protein, 14 aa, Homo sapiens
  CDR3 for alpha chain variable domain of TCR clone 217892 (TRAV13-1, TRAJ35)
CAASKGGFGNVLHC

SEQ ID NO: 435784 - protein, 13 aa, Homo sapiens
  CDR3 for beta chain variable domain of TCR clone 217892 (TRBV2, TRBJ1-1)
CASSVLMNTEAFF

SEQ ID NO: 435785 - protein, 13 aa, Homo sapiens
  CDR3 for alpha chain variable domain of TCR clone 217893 (TRAV12-3, TRAJ7)
CTMSASGNNRLAF

SEQ ID NO: 435786 - protein, 14 aa, Homo sapiens
  CDR3 for beta chain variable domain of TCR clone 217893 (TRBV13, TRBJ2-5)
CASSLGPRGETQYF

SEQ ID NO: 435787 - protein, 15 aa, Homo sapiens
  CDR3 for alpha chain variable domain of TCR clone 217894 (TRAV12-2, TRAJ43)
CAFDMRFGAGTRLTV

SEQ ID NO: 435788 - protein, 13 aa, Homo sapiens
  CDR3 for beta chain variable domain of TCR clone 217894 (TRBV4-2, TRBJ1-1)
CASSQAGNTETFF

SEQ ID NO: 435789 - protein, 13 aa, Homo sapiens
  CDR3 for alpha chain variable domain of TCR clone 217895 (TRAV36/DV7, TRAJ37)
CAVFSSNTGKLIF

SEQ ID NO: 435790 - protein, 17 aa, Homo sapiens
  CDR3 for beta chain variable domain of TCR clone 217895 (TRBV11-2, TRBJ2-3)
CQSLGGASRGAPNTQYF

SEQ ID NO: 435791 - protein, 16 aa, Homo sapiens
  CDR3 for alpha chain variable domain of TCR clone 217896 (TRAV30, TRAJ24)
CGTEIVDADSWGKFQF

SEQ ID NO: 435792 - protein, 15 aa, Homo sapiens
  CDR3 for beta chain variable domain of TCR clone 217896 (TRBV20-1, TRBJ1-5)
CSATSDRGLGQPQHF

SEQ ID NO: 435793 - protein, 13 aa, Homo sapiens
  CDR3 for alpha chain variable domain of TCR clone 217897 (TRAV3, TRAJ20)
CAVRSLNDYKLCF

SEQ ID NO: 435794 - protein, 13 aa, Homo sapiens
  CDR3 for beta chain variable domain of TCR clone 217897 (TRBV7-3, TRBJ1-1)
CASSQDWGAEAFF

SEQ ID NO: 435795 - protein, 14 aa, Homo sapiens
  CDR3 for alpha chain variable domain of TCR clone 217898 (TRAV3, TRAJ34)
CAVRDIYNTDKLIF

SEQ ID NO: 435796 - protein, 14 aa, Homo sapiens
  CDR3 for beta chain variable domain of TCR clone 217898 (TRBV7-2, TRBJ2-2)
CASSLGQNTGELFF

SEQ ID NO: 435797 - protein, 15 aa, Homo sapiens
  CDR3 for alpha chain variable domain of TCR clone 217899 (TRAV3, TRAJ4)
CAVSDGTGGYNKLIF

SEQ ID NO: 435798 - protein, 15 aa, Homo sapiens
  CDR3 for beta chain variable domain of TCR clone 217899 (TRBV27, TRBJ2-7)
CASSPDQGRLYEQYF

SEQ ID NO: 435799 - protein, 17 aa, Homo sapiens
  CDR3 for alpha chain variable domain of TCR clone 217900 (TRAV14/DV4, TRAJ28)
CAMREVSSGAGSYQLTF

SEQ ID NO: 435800 - protein, 15 aa, Homo sapiens
  CDR3 for beta chain variable domain of TCR clone 217900 (TRBV11-2, TRBJ1-6)
CASTLRETGDSPLHF

SEQ ID NO: 435801 - protein, 23 aa, Homo sapiens
  CDR3 for alpha chain variable domain of TCR clone 217901 (TRAV26-1, )
CIADNAGINHIQNPDPAVYQLRD

SEQ ID NO: 435802 - protein, 13 aa, Homo sapiens
  CDR3 for beta chain variable domain of TCR clone 217901 (TRBV20-1, TRBJ1-1)
CSARGGGNTEDFF

SEQ ID NO: 435803 - protein, 13 aa, Homo sapiens
  CDR3 for alpha chain variable domain of TCR clone 217902 (TRAV21, TRAJ27)
CAARPGNAGKSTF

SEQ ID NO: 435804 - protein, 13 aa, Homo sapiens
  CDR3 for beta chain variable domain of TCR clone 217902 (TRBV12-4, TRBJ1-2)
CASSSGSKDGYTF

SEQ ID NO: 435805 - protein, 14 aa, Homo sapiens
  CDR3 for alpha chain variable domain of TCR clone 217903 (TRAV21, TRAJ58)
CAVRRGRSGSRLTF

SEQ ID NO: 435806 - protein, 14 aa, Homo sapiens
  CDR3 for beta chain variable domain of TCR clone 217903 (TRBV7-2, TRBJ2-7)
CASSLDPGPYEQYF

SEQ ID NO: 435807 - protein, 17 aa, Homo sapiens
  CDR3 for alpha chain variable domain of TCR clone 217904 (TRAV26-1, TRAJ53)
CIVRVDDSGGSNYKLTF

SEQ ID NO: 435808 - protein, 11 aa, Homo sapiens
  CDR3 for beta chain variable domain of TCR clone 217904 (TRBV19, TRBJ1-1)
CASSIGSEAFF

SEQ ID NO: 435809 - protein, 15 aa, Homo sapiens
  CDR3 for alpha chain variable domain of TCR clone 217905 (TRAV8-3, TRAJ23)
SAVGDRYNQGGKLIF

SEQ ID NO: 435810 - protein, 22 aa, Homo sapiens
  CDR3 for beta chain variable domain of TCR clone 217905 (TRBV29-1, TRBJ2-5)
TVSNMSPEDSSIYLCSAGTQYF

SEQ ID NO: 435811 - protein, 13 aa, Homo sapiens
  CDR3 for alpha chain variable domain of TCR clone 217906 (TRAV21, TRAJ27)
CAARPANAGKSTF

SEQ ID NO: 435812 - protein, 13 aa, Homo sapiens
  CDR3 for beta chain variable domain of TCR clone 217906 (TRBV7-3, TRBJ2-7)
CASSQAGGYEQYF

SEQ ID NO: 435813 - protein, 16 aa, Homo sapiens
  CDR3 for alpha chain variable domain of TCR clone 217907 (TRAV12-3, TRAJ53)
CAMSPGSGGGKYKLTF

SEQ ID NO: 435814 - protein, 11 aa, Homo sapiens
  CDR3 for beta chain variable domain of TCR clone 217907 (TRBV29-1, TRBJ2-5)
CSEDRTGTQYF

SEQ ID NO: 435815 - protein, 23 aa, Homo sapiens
  CDR3 for alpha chain variable domain of TCR clone 217908 (TRAV8-6, )
CAVRNAGNNYIQNPDPAVYQLRD

SEQ ID NO: 435816 - protein, 15 aa, Homo sapiens
  CDR3 for beta chain variable domain of TCR clone 217908 (TRBV4-1, TRBJ2-2)
CASSEGQGITGELFF

SEQ ID NO: 435817 - protein, 16 aa, Homo sapiens
  CDR3 for alpha chain variable domain of TCR clone 217909 (TRAV3, TRAJ23)
CAVKIGIYNQGGKLFF

SEQ ID NO: 435818 - protein, 17 aa, Homo sapiens
  CDR3 for beta chain variable domain of TCR clone 217909 (TRBV10-3, TRBJ2-6)
CAISESTAPSGANVLTF

SEQ ID NO: 435819 - protein, 17 aa, Homo sapiens
  CDR3 for alpha chain variable domain of TCR clone 217910 (TRAV4, TRAJ18)
CLVGERSMGSTLGRLYF

SEQ ID NO: 435820 - protein, 16 aa, Homo sapiens
  CDR3 for beta chain variable domain of TCR clone 217910 (TRBV19, TRBJ2-1)
CASSKAGPSSYNEQFF

SEQ ID NO: 435821 - protein, 17 aa, Homo sapiens
  CDR3 for alpha chain variable domain of TCR clone 217911 (TRAV12-2, TRAJ39)
CAVNNMLTFGGGTRLRV

SEQ ID NO: 435822 - protein, 16 aa, Homo sapiens
  CDR3 for beta chain variable domain of TCR clone 217911 (TRBV9, TRBJ2-7)
CASSAGPDRSPYEQYF

SEQ ID NO: 435823 - protein, 15 aa, Homo sapiens
  CDR3 for alpha chain variable domain of TCR clone 217912 (TRAV23/DV6, TRAJ13)
CAAWLGGGGYQKVTF

SEQ ID NO: 435824 - protein, 16 aa, Homo sapiens
  CDR3 for beta chain variable domain of TCR clone 217912 (TRBV3-1, TRBJ2-5)
CASSPGQFNGFGTQYF

SEQ ID NO: 435825 - protein, 14 aa, Homo sapiens
  CDR3 for alpha chain variable domain of TCR clone 217913 (TRAV2, TRAJ21)
CAVEDLNNFNKFYF

SEQ ID NO: 435826 - protein, 16 aa, Homo sapiens
  CDR3 for beta chain variable domain of TCR clone 217913 (TRBV4-1, TRBJ2-3)
CASSQRAGGLTDTQYF

SEQ ID NO: 435827 - protein, 12 aa, Homo sapiens
  CDR3 for alpha chain variable domain of TCR clone 217914 (TRAV13-1, TRAJ48)
CAANFGNEKLTF

SEQ ID NO: 435828 - protein, 14 aa, Homo sapiens
  CDR3 for beta chain variable domain of TCR clone 217914 (TRBV7-2, TRBJ1-1)
CASSFLTGTTEAFF

SEQ ID NO: 435829 - protein, 12 aa, Homo sapiens
  CDR3 for alpha chain variable domain of TCR clone 217915 (TRAV12-3, TRAJ17)
CAMTLTGNKLTF

SEQ ID NO: 435830 - protein, 16 aa, Homo sapiens
  CDR3 for beta chain variable domain of TCR clone 217915 (TRBV7-3, TRBJ2-1)
CASSLEGYRSYDEQFF

SEQ ID NO: 435831 - protein, 13 aa, Homo sapiens
  CDR3 for alpha chain variable domain of TCR clone 217916 (TRAV12-1, TRAJ47)
CVVNMEYGNKLVF

SEQ ID NO: 435832 - protein, 17 aa, Homo sapiens
  CDR3 for beta chain variable domain of TCR clone 217916 (TRBV13, TRBJ2-3)
CASSLSRVAGGRNTQYF

SEQ ID NO: 435833 - protein, 14 aa, Homo sapiens
  CDR3 for alpha chain variable domain of TCR clone 217917 (TRAV12-2, )
CAVKGGPPPHHPPP

SEQ ID NO: 435834 - protein, 15 aa, Homo sapiens
  CDR3 for beta chain variable domain of TCR clone 217917 (TRBV11-2, TRBJ2-2)
CASSSDRVNAGELFF

SEQ ID NO: 435835 - protein, 10 aa, Homo sapiens
  CDR3 for alpha chain variable domain of TCR clone 217918 (TRAV12-3, TRAJ34)
CAMSADKLIF

SEQ ID NO: 435836 - protein, 15 aa, Homo sapiens
  CDR3 for beta chain variable domain of TCR clone 217918 (TRBV20-1, TRBJ2-3)
WSARRGEAITDTQYF

SEQ ID NO: 435837 - protein, 10 aa, Homo sapiens
  CDR3 for alpha chain variable domain of TCR clone 217919 (TRAV1-2, TRAJ31)
CAFFDARLMF

SEQ ID NO: 435838 - protein, 12 aa, Homo sapiens
  CDR3 for beta chain variable domain of TCR clone 217919 (TRBV7-9, TRBJ1-1)
CASSLVRGEAFF

SEQ ID NO: 435839 - protein, 14 aa, Homo sapiens
  CDR3 for alpha chain variable domain of TCR clone 217920 (TRAV23/DV6, TRAJ37)
CAASTSSNTGKLIF

SEQ ID NO: 435840 - protein, 14 aa, Homo sapiens
  CDR3 for beta chain variable domain of TCR clone 217920 (TRBV7-2, TRBJ2-7)
CASSPKTSFYEQYF

SEQ ID NO: 435841 - protein, 17 aa, Homo sapiens
  CDR3 for alpha chain variable domain of TCR clone 217921 (TRAV3, TRAJ28)
CAVRDQNSGAGSYQLTF

SEQ ID NO: 435842 - protein, 16 aa, Homo sapiens
  CDR3 for beta chain variable domain of TCR clone 217921 (TRBV5-1, TRBJ1-1)
CASSSGGNSLNTEAFF

SEQ ID NO: 435843 - protein, 15 aa, Homo sapiens
  CDR3 for alpha chain variable domain of TCR clone 217922 (TRAV1-2, TRAJ30)
CAVRPHGNRDDRIIF

SEQ ID NO: 435844 - protein, 14 aa, Homo sapiens
  CDR3 for beta chain variable domain of TCR clone 217922 (TRBV25-1, TRBJ1-1)
CASTHLGGNTEAFF

SEQ ID NO: 435845 - protein, 14 aa, Homo sapiens
  CDR3 for alpha chain variable domain of TCR clone 217923 (TRAV17, TRAJ56)
CATVPAGANSKLTF

SEQ ID NO: 435846 - protein, 16 aa, Homo sapiens
  CDR3 for beta chain variable domain of TCR clone 217923 (TRBV12-4, TRBJ2-5)
CASSFFVRGRQETQYF

SEQ ID NO: 435847 - protein, 14 aa, Homo sapiens
  CDR3 for alpha chain variable domain of TCR clone 217924 (TRAV30, TRAJ26)
CGTEIVSYGQNFVF

SEQ ID NO: 435848 - protein, 13 aa, Homo sapiens
  CDR3 for beta chain variable domain of TCR clone 217924 (TRBV19, TRBJ1-3)
CASRLSLGNTIYV

SEQ ID NO: 435849 - protein, 12 aa, Homo sapiens
  CDR3 for alpha chain variable domain of TCR clone 217925 (TRAV13-1, TRAJ3)
CAATGVQQCFQD

SEQ ID NO: 435850 - protein, 16 aa, Homo sapiens
  CDR3 for beta chain variable domain of TCR clone 217925 (TRBV7-3, TRBJ2-2)
CASSLKRGTLSRELFF

SEQ ID NO: 435851 - protein, 16 aa, Homo sapiens
  CDR3 for alpha chain variable domain of TCR clone 217926 (TRAV8-3, TRAJ13)
CAVGAYPSGGYQKVTF

SEQ ID NO: 435852 - protein, 15 aa, Homo sapiens
  CDR3 for beta chain variable domain of TCR clone 217926 (TRBV19, TRBJ1-5)
CASSVVWEDNQPQHF

SEQ ID NO: 435853 - protein, 23 aa, Homo sapiens
  CDR3 for alpha chain variable domain of TCR clone 217927 (TRAV8-3, TRAJ38)
CAVGASNAGNNHIQNPDPAVYHL

SEQ ID NO: 435854 - protein, 15 aa, Homo sapiens
  CDR3 for beta chain variable domain of TCR clone 217927 (TRBV11-3, TRBJ1-3)
CASSLFGPSGNTIYF

SEQ ID NO: 435855 - protein, 16 aa, Homo sapiens
  CDR3 for alpha chain variable domain of TCR clone 217928 (TRAV20, TRAJ53)
CAVQDQPRGSNYKLTF

SEQ ID NO: 435856 - protein, 17 aa, Homo sapiens
  CDR3 for beta chain variable domain of TCR clone 217928 (TRBV20-1, TRBJ2-1)
CSASSSGLAGSYNEQFF

SEQ ID NO: 435857 - protein, 16 aa, Homo sapiens
  CDR3 for alpha chain variable domain of TCR clone 217929 (TRAV3, TRAJ37)
CAVRPHGSGNTGKLIC

SEQ ID NO: 435858 - protein, 14 aa, Homo sapiens
  CDR3 for beta chain variable domain of TCR clone 217929 (TRBV2, TRBJ2-1)
CASSDRAYYNEQFF

SEQ ID NO: 435859 - protein, 13 aa, Homo sapiens
  CDR3 for alpha chain variable domain of TCR clone 217930 (TRAV21, TRAJ27)
CAALNTNAGQSTF

SEQ ID NO: 435860 - protein, 12 aa, Homo sapiens
  CDR3 for beta chain variable domain of TCR clone 217930 (TRBV11-2, TRBJ2-2)
CASSLGGGELFF

SEQ ID NO: 435861 - protein, 23 aa, Homo sapiens
  CDR3 for alpha chain variable domain of TCR clone 217931 (TRAV30, TRAJ43)
CTLRPPSSVTQEPTSAALSDMRF

SEQ ID NO: 435862 - protein, 13 aa, Homo sapiens
  CDR3 for beta chain variable domain of TCR clone 217931 (TRBV12-4, TRBJ2-2)
CASSTTGSGELFF

SEQ ID NO: 435863 - protein, 16 aa, Homo sapiens
  CDR3 for alpha chain variable domain of TCR clone 217932 (TRAV30, TRAJ24)
CGTEIVDADSWGKFQF

SEQ ID NO: 435864 - protein, 17 aa, Homo sapiens
  CDR3 for beta chain variable domain of TCR clone 217932 (TRBV7-2, TRBJ2-7)
CASSPIGSSGPSPEQYF

SEQ ID NO: 435865 - protein, 13 aa, Homo sapiens
  CDR3 for alpha chain variable domain of TCR clone 217933 (TRAV3, TRAJ27)
CALRPLGAGKSTF

SEQ ID NO: 435866 - protein, 13 aa, Homo sapiens
  CDR3 for beta chain variable domain of TCR clone 217933 (TRBV7-9, TRBJ2-3)
CAGSPGSTDTQYF

SEQ ID NO: 435867 - protein, 14 aa, Homo sapiens
  CDR3 for alpha chain variable domain of TCR clone 217934 (TRAV13-2, TRAJ11)
CTETGNSGYSTLTF

SEQ ID NO: 435868 - protein, 11 aa, Homo sapiens
  CDR3 for beta chain variable domain of TCR clone 217934 (TRBV10-3, TRBJ2-7)
CAISEGLEQYF

SEQ ID NO: 435869 - protein, 14 aa, Homo sapiens
  CDR3 for alpha chain variable domain of TCR clone 217935 (TRAV38-1, TRAJ29)
CAFITPSGNTPLVF

SEQ ID NO: 435870 - protein, 12 aa, Homo sapiens
  CDR3 for beta chain variable domain of TCR clone 217935 (TRBV14, TRBJ2-5)
CASSQLKETQYF

SEQ ID NO: 435871 - protein, 13 aa, Homo sapiens
  CDR3 for alpha chain variable domain of TCR clone 217936 (TRAV12-1, TRAJ29)
CVVGTSGNTPLVF

SEQ ID NO: 435872 - protein, 14 aa, Homo sapiens
  CDR3 for beta chain variable domain of TCR clone 217936 (TRBV12-4, TRBJ2-3)
CASSLVPSTDTQYF

SEQ ID NO: 435873 - protein, 20 aa, Homo sapiens
  CDR3 for alpha chain variable domain of TCR clone 217937 (TRAV21, TRAJ4)
AASQPGDSTTLAGGYNKLIF

SEQ ID NO: 435874 - protein, 19 aa, Homo sapiens
  CDR3 for beta chain variable domain of TCR clone 217937 (TRBV18, TRBJ1-3)
CASSPLSRTGMSSGDTIYF

SEQ ID NO: 435875 - protein, 12 aa, Homo sapiens
  CDR3 for alpha chain variable domain of TCR clone 217938 (TRAV21, TRAJ3)
CCFYSSASEIIF

SEQ ID NO: 435876 - protein, 12 aa, Homo sapiens
  CDR3 for beta chain variable domain of TCR clone 217938 (TRBV19, TRBJ2-1)
KAGPSSYNEQFF

SEQ ID NO: 435877 - protein, 15 aa, Homo sapiens
  CDR3 for alpha chain variable domain of TCR clone 217939 (TRAV3, TRAJ13)
CAVRDIGGGYQKVTF

SEQ ID NO: 435878 - protein, 13 aa, Homo sapiens
  CDR3 for beta chain variable domain of TCR clone 217939 (TRBV2, TRBJ2-2)
CASSKKNTGELFF

SEQ ID NO: 435879 - protein, 13 aa, Homo sapiens
  CDR3 for alpha chain variable domain of TCR clone 217940 (TRAV26-1, TRAJ30)
YIVNMNRDDKIIF

SEQ ID NO: 435880 - protein, 16 aa, Homo sapiens
  CDR3 for beta chain variable domain of TCR clone 217940 (TRBV16, TRBJ2-7)
CASSRPAGESSYEQYF

SEQ ID NO: 435881 - protein, 12 aa, Homo sapiens
  CDR3 for alpha chain variable domain of TCR clone 217941 (TRAV26-1, TRAJ36)
CIVRVRADNLFF

SEQ ID NO: 435882 - protein, 15 aa, Homo sapiens
  CDR3 for beta chain variable domain of TCR clone 217941 (TRBV6-3, TRBJ2-7)
CASSCPGTVFYEQYF

SEQ ID NO: 435883 - protein, 18 aa, Homo sapiens
  CDR3 for alpha chain variable domain of TCR clone 217942 (TRAV26-1, TRAJ23)
CIVRVGLEVWNQGGKLIF

SEQ ID NO: 435884 - protein, 16 aa, Homo sapiens
  CDR3 for beta chain variable domain of TCR clone 217942 (TRBV13, TRBJ2-2)
CASSPRKGEHTGELFF

SEQ ID NO: 435885 - protein, 14 aa, Homo sapiens
  CDR3 for alpha chain variable domain of TCR clone 217943 (TRAV1-2, TRAJ16)
CAVNRFSDGQKLLF

SEQ ID NO: 435886 - protein, 16 aa, Homo sapiens
  CDR3 for beta chain variable domain of TCR clone 217943 (TRBV7-3, TRBJ2-2)
CASSLKRGTLSGALFF

SEQ ID NO: 435887 - protein, 13 aa, Homo sapiens
  CDR3 for alpha chain variable domain of TCR clone 217944 (TRAV8-4, TRAJ48)
CAVSLFGNEKLTF

SEQ ID NO: 435888 - protein, 15 aa, Homo sapiens
  CDR3 for beta chain variable domain of TCR clone 217944 (TRBV20-1, TRBJ2-7)
CSARKGLAESYEQYS

SEQ ID NO: 435889 - protein, 15 aa, Homo sapiens
  CDR3 for alpha chain variable domain of TCR clone 217945 (TRAV14/DV4, TRAJ12)
CAMREERDSSYKLIF

SEQ ID NO: 435890 - protein, 14 aa, Homo sapiens
  CDR3 for beta chain variable domain of TCR clone 217945 (TRBV4-2, TRBJ2-1)
CASGLDRAYNEQFF

SEQ ID NO: 435891 - protein, 15 aa, Homo sapiens
  CDR3 for alpha chain variable domain of TCR clone 217946 (TRAV26-1, TRAJ37)
CIVKPGSSNTGKLIF

SEQ ID NO: 435892 - protein, 12 aa, Homo sapiens
  CDR3 for beta chain variable domain of TCR clone 217946 (TRBV7-8, TRBJ2-7)
CASSLGDREQYF

SEQ ID NO: 435893 - protein, 15 aa, Homo sapiens
  CDR3 for alpha chain variable domain of TCR clone 217947 (TRAV21, TRAJ53)
CATLNSGGRNYKLTF

SEQ ID NO: 435894 - protein, 14 aa, Homo sapiens
  CDR3 for beta chain variable domain of TCR clone 217947 (TRBV20-1, TRBJ2-1)
CSAQIGGSANEQFF

SEQ ID NO: 435895 - protein, 15 aa, Homo sapiens
  CDR3 for alpha chain variable domain of TCR clone 217948 (TRAV26-1, TRAJ29)
CIVRVEGSGNTPLFF

SEQ ID NO: 435896 - protein, 14 aa, Homo sapiens
  CDR3 for beta chain variable domain of TCR clone 217948 (TRBV25-1, TRBJ1-1)
CASTHLGGNTEAFF

SEQ ID NO: 435897 - protein, 11 aa, Homo sapiens
  CDR3 for alpha chain variable domain of TCR clone 217949 (TRAV21, TRAJ34)
CAVTNTDKLIF

SEQ ID NO: 435898 - protein, 15 aa, Homo sapiens
  CDR3 for beta chain variable domain of TCR clone 217949 (TRBV28, TRBJ1-3)
CASSMGWASGNTIYF

SEQ ID NO: 435899 - protein, 13 aa, Homo sapiens
  CDR3 for alpha chain variable domain of TCR clone 217950 (TRAV21, TRAJ27)
CASRPGNAGKSTF

SEQ ID NO: 435900 - protein, 16 aa, Homo sapiens
  CDR3 for beta chain variable domain of TCR clone 217950 (TRBV7-3, TRBJ2-2)
CASSLKRGTLSGELFF

SEQ ID NO: 435901 - protein, 14 aa, Homo sapiens
  CDR3 for alpha chain variable domain of TCR clone 217951 (TRAV17, TRAJ57)
CATDPQGGSEKLLF

SEQ ID NO: 435902 - protein, 18 aa, Homo sapiens
  CDR3 for beta chain variable domain of TCR clone 217951 (TRBV6-6, TRBJ1-3)
CASSYSKWDSISGNTIYF

SEQ ID NO: 435903 - protein, 15 aa, Homo sapiens
  CDR3 for alpha chain variable domain of TCR clone 217952 (TRAV3, TRAJ22)
CAVRDRGGFARQLTF

SEQ ID NO: 435904 - protein, 15 aa, Homo sapiens
  CDR3 for beta chain variable domain of TCR clone 217952 (TRBV10-3, TRBJ2-3)
CAISLTSGGTDTQYF

SEQ ID NO: 435905 - protein, 12 aa, Homo sapiens
  CDR3 for alpha chain variable domain of TCR clone 217953 (TRAV2, TRAJ31)
CAVEDNNARLMF

SEQ ID NO: 435906 - protein, 14 aa, Homo sapiens
  CDR3 for beta chain variable domain of TCR clone 217953 (TRBV28, TRBJ1-5)
CASSRTGLNQPQHY

SEQ ID NO: 435907 - protein, 13 aa, Homo sapiens
  CDR3 for alpha chain variable domain of TCR clone 217954 (TRAV1-2, TRAJ9)
CAALNTGGFKTIF

SEQ ID NO: 435908 - protein, 13 aa, Homo sapiens
  CDR3 for beta chain variable domain of TCR clone 217954 (TRBV7-9, TRBJ1-2)
CASSLKQNDGYTF

SEQ ID NO: 435909 - protein, 12 aa, Homo sapiens
  CDR3 for alpha chain variable domain of TCR clone 217955 (TRAV3, TRAJ20)
CAVRDGDYKLSF

SEQ ID NO: 435910 - protein, 17 aa, Homo sapiens
  CDR3 for beta chain variable domain of TCR clone 217955 (TRBV28, TRBJ2-5)
CASSTPEGDALQETQYF

SEQ ID NO: 435911 - protein, 13 aa, Homo sapiens
  CDR3 for alpha chain variable domain of TCR clone 217956 (TRAV21, TRAJ36)
CAVTKTGANNLFF

SEQ ID NO: 435912 - protein, 13 aa, Homo sapiens
  CDR3 for beta chain variable domain of TCR clone 217956 (TRBV29-1, TRBJ2-3)
CSATRGGRDTQYF

SEQ ID NO: 435913 - protein, 14 aa, Homo sapiens
  CDR3 for alpha chain variable domain of TCR clone 217957 (TRAV8-3, TRAJ4)
CAVGASGGCNKLIF

SEQ ID NO: 435914 - protein, 13 aa, Homo sapiens
  CDR3 for beta chain variable domain of TCR clone 217957 (TRBV18, TRBJ2-5)
CASSLQVQETQYF

SEQ ID NO: 435915 - protein, 13 aa, Homo sapiens
  CDR3 for alpha chain variable domain of TCR clone 217958 (TRAV23/DV6, TRAJ16)
CVASISDGQKLLF

SEQ ID NO: 435916 - protein, 15 aa, Homo sapiens
  CDR3 for beta chain variable domain of TCR clone 217958 (TRBV2, TRBJ2-2)
CASSRETVGTGELFF

SEQ ID NO: 435917 - protein, 13 aa, Homo sapiens
  CDR3 for alpha chain variable domain of TCR clone 217959 (TRAV12-2, TRAJ42)
FAVKRGSQGNLIF

SEQ ID NO: 435918 - protein, 15 aa, Homo sapiens
  CDR3 for beta chain variable domain of TCR clone 217959 (TRBV12-4, TRBJ2-5)
CASSPPTGLQETQYF

SEQ ID NO: 435919 - protein, 13 aa, Homo sapiens
  CDR3 for alpha chain variable domain of TCR clone 217960 (TRAV22, TRAJ49)
CAVGMYTGNQFYF

SEQ ID NO: 435920 - protein, 15 aa, Homo sapiens
  CDR3 for beta chain variable domain of TCR clone 217960 (TRBV7-9, TRBJ2-7)
CASSLALAEAYEQYF

SEQ ID NO: 435921 - protein, 12 aa, Homo sapiens
  CDR3 for alpha chain variable domain of TCR clone 217961 (TRAV8-3, TRAJ41)
CAVALSGYALNF

SEQ ID NO: 435922 - protein, 18 aa, Homo sapiens
  CDR3 for beta chain variable domain of TCR clone 217961 (TRBV20-1, TRBJ2-6)
CSAETTPTHGAGANGLTF

SEQ ID NO: 435923 - protein, 11 aa, Homo sapiens
  CDR3 for alpha chain variable domain of TCR clone 217962 (TRAV16, TRAJ20)
CALSEGFKAAL

SEQ ID NO: 435924 - protein, 13 aa, Homo sapiens
  CDR3 for beta chain variable domain of TCR clone 217962 (TRBV7-3, TRBJ2-1)
CASRLDSYNEQFF

SEQ ID NO: 435925 - protein, 14 aa, Homo sapiens
  CDR3 for alpha chain variable domain of TCR clone 217963 (TRAV1-2, TRAJ16)
CAVSRFSDGQKLLF

SEQ ID NO: 435926 - protein, 17 aa, Homo sapiens
  CDR3 for beta chain variable domain of TCR clone 217963 (TRBV6-5, TRBJ2-1)
CASRLSGRFESYNEQFF

SEQ ID NO: 435927 - protein, 10 aa, Homo sapiens
  CDR3 for alpha chain variable domain of TCR clone 217964 (TRAV30, TRAJ32)
CGTEKDMVVL

SEQ ID NO: 435928 - protein, 13 aa, Homo sapiens
  CDR3 for beta chain variable domain of TCR clone 217964 (TRBV10-3, TRBJ2-7)
CASKLAVNYEQYV

SEQ ID NO: 435929 - protein, 12 aa, Homo sapiens
  CDR3 for alpha chain variable domain of TCR clone 217965 (TRAV12-3, TRAJ3)
CAIDSRASKIIF

SEQ ID NO: 435930 - protein, 17 aa, Homo sapiens
  CDR3 for beta chain variable domain of TCR clone 217965 (TRBV7-9, TRBJ2-3)
CASSREEAGAYPDTQYF

SEQ ID NO: 435931 - protein, 14 aa, Homo sapiens
  CDR3 for alpha chain variable domain of TCR clone 217966 (TRAV1-2, TRAJ8)
CAVREDTGFQKLVF

SEQ ID NO: 435932 - protein, 16 aa, Homo sapiens
  CDR3 for beta chain variable domain of TCR clone 217966 (TRBV3-1, TRBJ2-1)
CASSQVGGTSYNEQFF

SEQ ID NO: 435933 - protein, 21 aa, Homo sapiens
  CDR3 for alpha chain variable domain of TCR clone 217967 (TRAV36/DV7, TRAJ39)
TATQTGDSAIYLPNAGNMLTF

SEQ ID NO: 435934 - protein, 13 aa, Homo sapiens
  CDR3 for beta chain variable domain of TCR clone 217967 (TRBV11-3, TRBJ2-7)
CASSLDKLYEQYF

SEQ ID NO: 435935 - protein, 16 aa, Homo sapiens
  CDR3 for alpha chain variable domain of TCR clone 217968 (TRAV12-2, TRAJ10)
CAVNRVPTGGGNKLTF

SEQ ID NO: 435936 - protein, 12 aa, Homo sapiens
  CDR3 for beta chain variable domain of TCR clone 217968 (TRBV28, TRBJ2-7)
CASRFSSYEQYF

SEQ ID NO: 435937 - protein, 12 aa, Homo sapiens
  CDR3 for alpha chain variable domain of TCR clone 217969 (TRAV12-3, TRAJ20)
CAMVRGDYKLSF

SEQ ID NO: 435938 - protein, 14 aa, Homo sapiens
  CDR3 for beta chain variable domain of TCR clone 217969 (TRBV20-1, TRBJ2-7)
CRAISREASYEQYF

SEQ ID NO: 435939 - protein, 15 aa, Homo sapiens
  CDR3 for alpha chain variable domain of TCR clone 217970 (TRAV12-2, TRAJ53)
CAVHGGGGSNYKLTF

SEQ ID NO: 435940 - protein, 17 aa, Homo sapiens
  CDR3 for beta chain variable domain of TCR clone 217970 (TRBV7-3, TRBJ2-3)
RASSLMKRMRGADTQYF

SEQ ID NO: 435941 - protein, 14 aa, Homo sapiens
  CDR3 for alpha chain variable domain of TCR clone 217971 (TRAV17, TRAJ31)
CATDAEDNNARLMF

SEQ ID NO: 435942 - protein, 15 aa, Homo sapiens
  CDR3 for beta chain variable domain of TCR clone 217971 (TRBV2, TRBJ2-7)
CASSEGLARSYEQYF

SEQ ID NO: 435943 - protein, 15 aa, Homo sapiens
  CDR3 for alpha chain variable domain of TCR clone 217972 (TRAV3, TRAJ13)
CAVRVYYGGYHKVTF

SEQ ID NO: 435944 - protein, 15 aa, Homo sapiens
  CDR3 for beta chain variable domain of TCR clone 217972 (TRBV5-7, TRBJ1-2)
CASSLGVAANYGYTF

SEQ ID NO: 435945 - protein, 14 aa, Homo sapiens
  CDR3 for alpha chain variable domain of TCR clone 217973 (TRAV12-2, TRAJ13)
CAVKKTGGYQKVTF

SEQ ID NO: 435946 - protein, 15 aa, Homo sapiens
  CDR3 for beta chain variable domain of TCR clone 217973 (TRBV20-1, TRBJ2-3)
CSATGTSGFTDTQYF

SEQ ID NO: 435947 - protein, 14 aa, Homo sapiens
  CDR3 for alpha chain variable domain of TCR clone 217974 (TRAV17, TRAJ34)
CATDSLQGTDKLIF

SEQ ID NO: 435948 - protein, 13 aa, Homo sapiens
  CDR3 for beta chain variable domain of TCR clone 217974 (TRBV11-2, TRBJ2-7)
CASSGTRPYEQYF

SEQ ID NO: 435949 - protein, 13 aa, Homo sapiens
  CDR3 for alpha chain variable domain of TCR clone 217975 (TRAV21, TRAJ20)
CAVGLRVDYKFSF

SEQ ID NO: 435950 - protein, 13 aa, Homo sapiens
  CDR3 for beta chain variable domain of TCR clone 217975 (TRBV6-1, TRBJ1-1)
CASSRQGNTEALF

SEQ ID NO: 435951 - protein, 14 aa, Homo sapiens
  CDR3 for alpha chain variable domain of TCR clone 217976 (TRAV16, TRAJ33)
CALSAMDSNYQLIW

SEQ ID NO: 435952 - protein, 16 aa, Homo sapiens
  CDR3 for beta chain variable domain of TCR clone 217976 (TRBV5-1, TRBJ2-5)
CASSLALLRAGETQYF

SEQ ID NO: 435953 - protein, 14 aa, Homo sapiens
  CDR3 for alpha chain variable domain of TCR clone 217977 (TRAV27, TRAJ42)
CAGASGGSQGNRIF

SEQ ID NO: 435954 - protein, 14 aa, Homo sapiens
  CDR3 for beta chain variable domain of TCR clone 217977 (TRBV19, TRBJ2-1)
CASPTFVLSGEQFF

SEQ ID NO: 435955 - protein, 16 aa, Homo sapiens
  CDR3 for alpha chain variable domain of TCR clone 217978 (TRAV26-1, TRAJ36)
CIVRVPDQTGANNLFF

SEQ ID NO: 435956 - protein, 14 aa, Homo sapiens
  CDR3 for beta chain variable domain of TCR clone 217978 (TRBV11-2, TRBJ2-3)
CASSRLARTDTQYF

SEQ ID NO: 435957 - protein, 19 aa, Homo sapiens
  CDR3 for alpha chain variable domain of TCR clone 217979 (TRAV2, TRAJ20)
ILQVREADAAVYRDCKLSL

SEQ ID NO: 435958 - protein, 16 aa, Homo sapiens
  CDR3 for beta chain variable domain of TCR clone 217979 (TRBV20-1, TRBJ1-4)
CSAPGQGLLTNEKLFF

SEQ ID NO: 435959 - protein, 14 aa, Homo sapiens
  CDR3 for alpha chain variable domain of TCR clone 217980 (TRAV16, TRAJ33)
CALSAMDSNYQLIW

SEQ ID NO: 435960 - protein, 13 aa, Homo sapiens
  CDR3 for beta chain variable domain of TCR clone 217980 (TRBV25-1, TRBJ2-7)
CASSEDGDYEQYF

SEQ ID NO: 435961 - protein, 14 aa, Homo sapiens
  CDR3 for alpha chain variable domain of TCR clone 217981 (TRAV12-3, TRAJ9)
CAMSTNTGGFKTIF

SEQ ID NO: 435962 - protein, 14 aa, Homo sapiens
  CDR3 for beta chain variable domain of TCR clone 217981 (TRBV19, TRBJ2-1)
CASPTFVLSGEQFF

SEQ ID NO: 435963 - protein, 17 aa, Homo sapiens
  CDR3 for alpha chain variable domain of TCR clone 217982 (TRAV3, TRAJ6)
CAVRDGPREGGSYIPTF

SEQ ID NO: 435964 - protein, 15 aa, Homo sapiens
  CDR3 for beta chain variable domain of TCR clone 217982 (TRBV7-6, TRBJ2-3)
CAISPIIYSTDTQYF

SEQ ID NO: 435965 - protein, 15 aa, Homo sapiens
  CDR3 for alpha chain variable domain of TCR clone 217983 (TRAV21, TRAJ52)
CAVRGGGTSYGKLTF

SEQ ID NO: 435966 - protein, 12 aa, Homo sapiens
  CDR3 for beta chain variable domain of TCR clone 217983 (TRBV6-5, TRBJ2-5)
CHRPSPQETQYF

SEQ ID NO: 435967 - protein, 14 aa, Homo sapiens
  CDR3 for alpha chain variable domain of TCR clone 217984 (TRAV23/DV6, TRAJ4)
CAANLSGGYHKLIF

SEQ ID NO: 435968 - protein, 11 aa, Homo sapiens
  CDR3 for beta chain variable domain of TCR clone 217984 (TRBV7-9, TRBJ2-3)
CASSPTDTQYF

SEQ ID NO: 435969 - protein, 16 aa, Homo sapiens
  CDR3 for alpha chain variable domain of TCR clone 217985 (TRAV20, TRAJ10)
CAVLRGLTGGGNKLTF

SEQ ID NO: 435970 - protein, 13 aa, Homo sapiens
  CDR3 for beta chain variable domain of TCR clone 217985 (TRBV27, TRBJ1-1)
CASSLSIGAEAFF

SEQ ID NO: 435971 - protein, 14 aa, Homo sapiens
  CDR3 for alpha chain variable domain of TCR clone 217986 (TRAV3, TRAJ33)
CAVRDMDSNYQLIW

SEQ ID NO: 435972 - protein, 19 aa, Homo sapiens
  CDR3 for beta chain variable domain of TCR clone 217986 (TRBV7-3, TRBJ1-2)
CASSFPQGNDGELWPHLRF

SEQ ID NO: 435973 - protein, 17 aa, Homo sapiens
  CDR3 for alpha chain variable domain of TCR clone 217987 (TRAV26-1, TRAJ27)
CIVSTPWINTNAGKPTF

SEQ ID NO: 435974 - protein, 16 aa, Homo sapiens
  CDR3 for beta chain variable domain of TCR clone 217987 (TRBV7-9, TRBJ2-1)
CASSLDPGLAIDKQFF

SEQ ID NO: 435975 - protein, 13 aa, Homo sapiens
  CDR3 for alpha chain variable domain of TCR clone 217988 (TRAV24, TRAJ42)
CAFSTGSQGNLIF

SEQ ID NO: 435976 - protein, 12 aa, Homo sapiens
  CDR3 for beta chain variable domain of TCR clone 217988 (TRBV5-4, TRBJ2-5)
CASSSTRETQYF

SEQ ID NO: 435977 - protein, 14 aa, Homo sapiens
  CDR3 for alpha chain variable domain of TCR clone 217989 (TRAV20, TRAJ20)
CAVRRGYNDYKLSF

SEQ ID NO: 435978 - protein, 13 aa, Homo sapiens
  CDR3 for beta chain variable domain of TCR clone 217989 (TRBV19, TRBJ2-5)
CTSSETAPETQYF

SEQ ID NO: 435979 - protein, 11 aa, Homo sapiens
  CDR3 for alpha chain variable domain of TCR clone 217990 (TRAV3, TRAJ21)
CAVGNFNKFYF

SEQ ID NO: 435980 - protein, 15 aa, Homo sapiens
  CDR3 for beta chain variable domain of TCR clone 217990 (TRBV29-1, TRBJ2-1)
CSVGGGAASYNEQIF

SEQ ID NO: 435981 - protein, 12 aa, Homo sapiens
  CDR3 for alpha chain variable domain of TCR clone 217991 (TRAV12-3, TRAJ17)
CAMTLTGNKLTF

SEQ ID NO: 435982 - protein, 10 aa, Homo sapiens
  CDR3 for beta chain variable domain of TCR clone 217991 (TRBV7-9, TRBJ1-2)
CASSLKQNYG

SEQ ID NO: 435983 - protein, 13 aa, Homo sapiens
  CDR3 for alpha chain variable domain of TCR clone 217992 (TRAV12-2, TRAJ20)
CAVYPSNDYKLSF

SEQ ID NO: 435984 - protein, 13 aa, Homo sapiens
  CDR3 for beta chain variable domain of TCR clone 217992 (TRBV7-9, TRBJ1-5)
CASSLRNDQPQHF

SEQ ID NO: 435985 - protein, 15 aa, Homo sapiens
  CDR3 for alpha chain variable domain of TCR clone 217993 (TRAV8-3, TRAJ45)
CASSYSGGGADGLTF

SEQ ID NO: 435986 - protein, 14 aa, Homo sapiens
  CDR3 for beta chain variable domain of TCR clone 217993 (TRBV19, TRBJ2-1)
CATSQGDTYNEQFF

SEQ ID NO: 435987 - protein, 13 aa, Homo sapiens
  CDR3 for alpha chain variable domain of TCR clone 217994 (TRAV1-1, TRAJ9)
CAAKTTGGFNTIF

SEQ ID NO: 435988 - protein, 14 aa, Homo sapiens
  CDR3 for beta chain variable domain of TCR clone 217994 (TRBV20-1, TRBJ2-1)
CSAQIGGSANEQFF

SEQ ID NO: 435989 - protein, 12 aa, Homo sapiens
  CDR3 for alpha chain variable domain of TCR clone 217995 (TRAV30, TRAJ43)
CGTEERGNDIRF

SEQ ID NO: 435990 - protein, 13 aa, Homo sapiens
  CDR3 for beta chain variable domain of TCR clone 217995 (TRBV4-2, TRBJ1-1)
CASSQAGNTEAFF

SEQ ID NO: 435991 - protein, 14 aa, Homo sapiens
  CDR3 for alpha chain variable domain of TCR clone 217996 (TRAV8-3, TRAJ12)
CAVGARDSSYKLIF

SEQ ID NO: 435992 - protein, 17 aa, Homo sapiens
  CDR3 for beta chain variable domain of TCR clone 217996 (TRBV11-2, TRBJ2-1)
CASSLYPPGVEYNEQFF

SEQ ID NO: 435993 - protein, 11 aa, Homo sapiens
  CDR3 for alpha chain variable domain of TCR clone 217997 (TRAV2, TRAJ13)
CASGGYQKVTF

SEQ ID NO: 435994 - protein, 14 aa, Homo sapiens
  CDR3 for beta chain variable domain of TCR clone 217997 (TRBV7-8, TRBJ1-2)
CASSAGTAIYGYTF

SEQ ID NO: 435995 - protein, 11 aa, Homo sapiens
  CDR3 for alpha chain variable domain of TCR clone 217998 (TRAV2, TRAJ13)
CASGGYQKVTF

SEQ ID NO: 435996 - protein, 15 aa, Homo sapiens
  CDR3 for beta chain variable domain of TCR clone 217998 (TRBV11-2, TRBJ2-2)
CASRGLAANTGELFF

SEQ ID NO: 435997 - protein, 15 aa, Homo sapiens
  CDR3 for alpha chain variable domain of TCR clone 217999 (TRAV13-1, TRAJ48)
CAASTGGFGNEKLTF

SEQ ID NO: 435998 - protein, 13 aa, Homo sapiens
  CDR3 for beta chain variable domain of TCR clone 217999 (TRBV7-9, TRBJ2-1)
CASSLDVGNEQFF

SEQ ID NO: 435999 - protein, 13 aa, Homo sapiens
  CDR3 for alpha chain variable domain of TCR clone 218000 (TRAV21, TRAJ27)
CAARPGNAGKSTF

SEQ ID NO: 436000 - protein, 17 aa, Homo sapiens
  CDR3 for beta chain variable domain of TCR clone 218000 (TRBV4-1, TRBJ1-3)
CASSPQRGIRFGNTIYF

SEQ ID NO: 436001 - protein, 13 aa, Homo sapiens
  CDR3 for alpha chain variable domain of TCR clone 218001 (TRAV26-1, TRAJ33)
CIVRVDSNYQLIW

SEQ ID NO: 436002 - protein, 14 aa, Homo sapiens
  CDR3 for beta chain variable domain of TCR clone 218001 (TRBV20-1, TRBJ2-1)
CSALDRGTYNEQFF

SEQ ID NO: 436003 - protein, 14 aa, Homo sapiens
  CDR3 for alpha chain variable domain of TCR clone 218002 (TRAV1-2, TRAJ8)
CAVREDTGFQKLVF

SEQ ID NO: 436004 - protein, 15 aa, Homo sapiens
  CDR3 for beta chain variable domain of TCR clone 218002 (TRBV2, TRBJ2-7)
CASSENRQGKGEQYF

SEQ ID NO: 436005 - protein, 14 aa, Homo sapiens
  CDR3 for alpha chain variable domain of TCR clone 218003 (TRAV8-1, TRAJ5)
CAVRTDTGRRALTF

SEQ ID NO: 436006 - protein, 14 aa, Homo sapiens
  CDR3 for beta chain variable domain of TCR clone 218003 (TRBV20-1, TRBJ2-7)
CSAPELAGVGEQYF

SEQ ID NO: 436007 - protein, 16 aa, Homo sapiens
  CDR3 for alpha chain variable domain of TCR clone 218004 (TRAV30, TRAJ24)
CGTEIVDADSWGKFQF

SEQ ID NO: 436008 - protein, 20 aa, Homo sapiens
  CDR3 for beta chain variable domain of TCR clone 218004 (TRBV7-2, TRBJ2-2)
CTSSHLFPGPTIHITGELFF

SEQ ID NO: 436009 - protein, 13 aa, Homo sapiens
  CDR3 for alpha chain variable domain of TCR clone 218005 (TRAV8-3, TRAJ48)
CAVVPFGTEQLTF

SEQ ID NO: 436010 - protein, 15 aa, Homo sapiens
  CDR3 for beta chain variable domain of TCR clone 218005 (TRBV11-2, TRBJ2-1)
CASSSPSTRYNEQFF

SEQ ID NO: 436011 - protein, 14 aa, Homo sapiens
  CDR3 for alpha chain variable domain of TCR clone 218006 (TRAV35, TRAJ50)
CAGHQKTSYDKVIF

SEQ ID NO: 436012 - protein, 13 aa, Homo sapiens
  CDR3 for beta chain variable domain of TCR clone 218006 (TRBV14, TRBJ1-2)
CASSEDRRYGYTF

SEQ ID NO: 436013 - protein, 16 aa, Homo sapiens
  CDR3 for alpha chain variable domain of TCR clone 218007 (TRAV3, TRAJ10)
CAVRDMSAGGGNKLTF

SEQ ID NO: 436014 - protein, 14 aa, Homo sapiens
  CDR3 for beta chain variable domain of TCR clone 218007 (TRBV5-1, TRBJ2-1)
CASSPGGQANEQFF

SEQ ID NO: 436015 - protein, 14 aa, Homo sapiens
  CDR3 for alpha chain variable domain of TCR clone 218008 (TRAV9-2, TRAJ39)
CALYIYNAGNMLTF

SEQ ID NO: 436016 - protein, 15 aa, Homo sapiens
  CDR3 for beta chain variable domain of TCR clone 218008 (TRBV3-1, TRBJ2-7)
CASSQVRQGAYEQYL

SEQ ID NO: 436017 - protein, 14 aa, Homo sapiens
  CDR3 for alpha chain variable domain of TCR clone 218009 (TRAV1-2, TRAJ16)
CAVNRFSVGQKLLF

SEQ ID NO: 436018 - protein, 16 aa, Homo sapiens
  CDR3 for beta chain variable domain of TCR clone 218009 (TRBV11-2, TRBJ1-2)
CTSSLDTGGADYGYTF

SEQ ID NO: 436019 - protein, 13 aa, Homo sapiens
  CDR3 for alpha chain variable domain of TCR clone 218010 (TRAV12-2, TRAJ6)
CAVNVSRKLHTYI

SEQ ID NO: 436020 - protein, 13 aa, Homo sapiens
  CDR3 for beta chain variable domain of TCR clone 218010 (TRBV24-1, TRBJ2-7)
CRQPWDSSYEQYF

SEQ ID NO: 436021 - protein, 14 aa, Homo sapiens
  CDR3 for alpha chain variable domain of TCR clone 218011 (TRAV34, TRAJ44)
CGADGSGTASKLTF

SEQ ID NO: 436022 - protein, 15 aa, Homo sapiens
  CDR3 for beta chain variable domain of TCR clone 218011 (TRBV5-1, TRBJ2-1)
CASSPPRAPYNEQFF

SEQ ID NO: 436023 - protein, 17 aa, Homo sapiens
  CDR3 for alpha chain variable domain of TCR clone 218012 (TRAV3, TRAJ6)
CAVRDGPRAGGSYIPTF

SEQ ID NO: 436024 - protein, 16 aa, Homo sapiens
  CDR3 for beta chain variable domain of TCR clone 218012 (TRBV7-8, TRBJ2-3)
CASSTEGQQETDTQYF

SEQ ID NO: 436025 - protein, 12 aa, Homo sapiens
  CDR3 for alpha chain variable domain of TCR clone 218013 (TRAV20, TRAJ36)
CAVLTGANNLFF

SEQ ID NO: 436026 - protein, 14 aa, Homo sapiens
  CDR3 for beta chain variable domain of TCR clone 218013 (TRBV7-9, TRBJ2-1)
CASSPRDSLYEQFF

SEQ ID NO: 436027 - protein, 16 aa, Homo sapiens
  CDR3 for alpha chain variable domain of TCR clone 218014 (TRAV12-3, TRAJ53)
CAMSPGSGGSNYKLTF

SEQ ID NO: 436028 - protein, 11 aa, Homo sapiens
  CDR3 for beta chain variable domain of TCR clone 218014 (TRBV29-1, TRBJ2-5)
CREARTGTQYF

SEQ ID NO: 436029 - protein, 15 aa, Homo sapiens
  CDR3 for alpha chain variable domain of TCR clone 218015 (TRAV12-3, TRAJ6)
CAMSATTGGSYIPTF

SEQ ID NO: 436030 - protein, 19 aa, Homo sapiens
  CDR3 for beta chain variable domain of TCR clone 218015 (TRBV25-1, TRBJ2-2)
CAIPVYRVDRGRKTGELFF

SEQ ID NO: 436031 - protein, 18 aa, Homo sapiens
  CDR3 for alpha chain variable domain of TCR clone 218016 (TRAV26-1, TRAJ23)
CIVRVGLEVWNHGGKLIF

SEQ ID NO: 436032 - protein, 16 aa, Homo sapiens
  CDR3 for beta chain variable domain of TCR clone 218016 (TRBV12-4, TRBJ2-5)
CASSFFVRGRQGTQYF

SEQ ID NO: 436033 - protein, 13 aa, Homo sapiens
  CDR3 for alpha chain variable domain of TCR clone 218017 (TRAV35, TRAJ42)
CAGFPGIQGNRIF

SEQ ID NO: 436034 - protein, 13 aa, Homo sapiens
  CDR3 for beta chain variable domain of TCR clone 218017 (TRBV29-1, TRBJ2-1)
CSVEGGRVNEQFF

SEQ ID NO: 436035 - protein, 12 aa, Homo sapiens
  CDR3 for alpha chain variable domain of TCR clone 218018 (TRAV12-1, TRAJ40)
CVVYSGTYKYIF

SEQ ID NO: 436036 - protein, 18 aa, Homo sapiens
  CDR3 for beta chain variable domain of TCR clone 218018 (TRBV11-2, TRBJ2-3)
CASSLGGAVRGAPNTQYF

SEQ ID NO: 436037 - protein, 12 aa, Homo sapiens
  CDR3 for alpha chain variable domain of TCR clone 218019 (TRAV12-2, TRAJ17)
CAMTLTGNKLTF

SEQ ID NO: 436038 - protein, 14 aa, Homo sapiens
  CDR3 for beta chain variable domain of TCR clone 218019 (TRBV18, TRBJ2-7)
CASSPRGGAYEQYF

SEQ ID NO: 436039 - protein, 14 aa, Homo sapiens
  CDR3 for alpha chain variable domain of TCR clone 218020 (TRAV13-1, TRAJ20)
CAARPGSNDYKLSF

SEQ ID NO: 436040 - protein, 17 aa, Homo sapiens
  CDR3 for beta chain variable domain of TCR clone 218020 (TRBV10-3, TRBJ2-2)
CAISARTGGSNTGELFF

SEQ ID NO: 436041 - protein, 14 aa, Homo sapiens
  CDR3 for alpha chain variable domain of TCR clone 218021 (TRAV35, TRAJ33)
CAGSSQDSNYPLIW

SEQ ID NO: 436042 - protein, 15 aa, Homo sapiens
  CDR3 for beta chain variable domain of TCR clone 218021 (TRBV28, TRBJ2-5)
CASSPGQGSIETQYF

SEQ ID NO: 436043 - protein, 14 aa, Homo sapiens
  CDR3 for alpha chain variable domain of TCR clone 218022 (TRAV8-4, TRAJ16)
CAVSPVGRWPEAAL

SEQ ID NO: 436044 - protein, 16 aa, Homo sapiens
  CDR3 for beta chain variable domain of TCR clone 218022 (TRBV24-1, TRBJ2-3)
CATSDRRQDLTDTQYF

SEQ ID NO: 436045 - protein, 18 aa, Homo sapiens
  CDR3 for alpha chain variable domain of TCR clone 218023 (TRAV21, TRAJ52)
CAVRPSPAGGTSYGKLTF

SEQ ID NO: 436046 - protein, 17 aa, Homo sapiens
  CDR3 for beta chain variable domain of TCR clone 218023 (TRBV13, TRBJ2-3)
RASSLSRVSGGRNTQYF

SEQ ID NO: 436047 - protein, 12 aa, Homo sapiens
  CDR3 for alpha chain variable domain of TCR clone 218024 (TRAV12-1, TRAJ40)
CVVYSGTYKYIF

SEQ ID NO: 436048 - protein, 18 aa, Homo sapiens
  CDR3 for beta chain variable domain of TCR clone 218024 (TRBV7-6, TRBJ2-1)
GHVSLGQQLGGGADEQFF

SEQ ID NO: 436049 - protein, 17 aa, Homo sapiens
  CDR3 for alpha chain variable domain of TCR clone 218025 (TRAV23/DV6, TRAJ58)
CAARLLRGETSGARLTF

SEQ ID NO: 436050 - protein, 15 aa, Homo sapiens
  CDR3 for beta chain variable domain of TCR clone 218025 (TRBV9, TRBJ1-6)
CASSVAGTGDSPLHF

SEQ ID NO: 436051 - protein, 11 aa, Homo sapiens
  CDR3 for alpha chain variable domain of TCR clone 218026 (TRAV1-1, TRAJ30)
CAQNRDDKIIF

SEQ ID NO: 436052 - protein, 14 aa, Homo sapiens
  CDR3 for beta chain variable domain of TCR clone 218026 (TRBV7-8, TRBJ2-7)
FASSPGLADYEQYF

SEQ ID NO: 436053 - protein, 18 aa, Homo sapiens
  CDR3 for alpha chain variable domain of TCR clone 218027 (TRAV12-3, TRAJ52)
CAMSVGGAGGTSYGKQTF

SEQ ID NO: 436054 - protein, 15 aa, Homo sapiens
  CDR3 for beta chain variable domain of TCR clone 218027 (TRBV27, TRBJ1-6)
CASSFDRGLGSPLHF

SEQ ID NO: 436055 - protein, 12 aa, Homo sapiens
  CDR3 for alpha chain variable domain of TCR clone 218028 (TRAV17, TRAJ53)
CATEGSNYKLTF

SEQ ID NO: 436056 - protein, 19 aa, Homo sapiens
  CDR3 for beta chain variable domain of TCR clone 218028 (TRBV5-1, TRBJ2-3)
CASSLWTSGGITTPDKQYF

SEQ ID NO: 436057 - protein, 16 aa, Homo sapiens
  CDR3 for alpha chain variable domain of TCR clone 218029 (TRAV30, TRAJ24)
CGTAIVDADSWGQFQF

SEQ ID NO: 436058 - protein, 14 aa, Homo sapiens
  CDR3 for beta chain variable domain of TCR clone 218029 (TRBV12-5, TRBJ2-5)
CASGSRTHQETQYF

SEQ ID NO: 436059 - protein, 13 aa, Homo sapiens
  CDR3 for alpha chain variable domain of TCR clone 218030 (TRAV26-2, TRAJ43)
CTLRAVNNNDMRF

SEQ ID NO: 436060 - protein, 11 aa, Homo sapiens
  CDR3 for beta chain variable domain of TCR clone 218030 (TRBV29-1, TRBJ2-5)
CSEDRMGTQYF

SEQ ID NO: 436061 - protein, 14 aa, Homo sapiens
  CDR3 for alpha chain variable domain of TCR clone 218031 (TRAV14/DV4, TRAJ41)
CARGGPDSGYALNF

SEQ ID NO: 436062 - protein, 15 aa, Homo sapiens
  CDR3 for beta chain variable domain of TCR clone 218031 (TRBV19, TRBJ2-1)
CASSIQATSYSEQFF

SEQ ID NO: 436063 - protein, 12 aa, Homo sapiens
  CDR3 for alpha chain variable domain of TCR clone 218032 (TRAV20, TRAJ39)
CAVGNAGNMLTF

SEQ ID NO: 436064 - protein, 13 aa, Homo sapiens
  CDR3 for beta chain variable domain of TCR clone 218032 (TRBV7-3, TRBJ2-5)
CASSSDREETQYF

SEQ ID NO: 436065 - protein, 17 aa, Homo sapiens
  CDR3 for alpha chain variable domain of TCR clone 218033 (TRAV3, TRAJ6)
CAVGDGPRAGGSYIPTF

SEQ ID NO: 436066 - protein, 15 aa, Homo sapiens
  CDR3 for beta chain variable domain of TCR clone 218033 (TRBV28, TRBJ2-1)
CASSIIAGGRSEQFF

SEQ ID NO: 436067 - protein, 13 aa, Homo sapiens
  CDR3 for alpha chain variable domain of TCR clone 218034 (TRAV13-1, TRAJ11)
CAASIRGYSTLTF

SEQ ID NO: 436068 - protein, 12 aa, Homo sapiens
  CDR3 for beta chain variable domain of TCR clone 218034 (TRBV11-2, TRBJ2-2)
CASSLGGGELFF

SEQ ID NO: 436069 - protein, 15 aa, Homo sapiens
  CDR3 for alpha chain variable domain of TCR clone 218035 (TRAV21, TRAJ53)
CATVNSGGSNYKLTF

SEQ ID NO: 436070 - protein, 15 aa, Homo sapiens
  CDR3 for beta chain variable domain of TCR clone 218035 (TRBV6-3, TRBJ2-7)
CASSSPGTVFYEQYF

SEQ ID NO: 436071 - protein, 18 aa, Homo sapiens
  CDR3 for alpha chain variable domain of TCR clone 218036 (TRAV3, TRAJ17)
CAVRARRRGRSCRQQAKF

SEQ ID NO: 436072 - protein, 14 aa, Homo sapiens
  CDR3 for beta chain variable domain of TCR clone 218036 (TRBV4-1, TRBJ2-2)
CASSQAVNTGELFF

SEQ ID NO: 436073 - protein, 12 aa, Homo sapiens
  CDR3 for alpha chain variable domain of TCR clone 218037 (TRAV24, TRAJ17)
CASKAAGNKLTF

SEQ ID NO: 436074 - protein, 13 aa, Homo sapiens
  CDR3 for beta chain variable domain of TCR clone 218037 (TRBV11-2, TRBJ2-1)
CASSLGLAGGRFF

SEQ ID NO: 436075 - protein, 14 aa, Homo sapiens
  CDR3 for alpha chain variable domain of TCR clone 218038 (TRAV13-1, TRAJ26)
CAARRGNYGQNFVF

SEQ ID NO: 436076 - protein, 13 aa, Homo sapiens
  CDR3 for beta chain variable domain of TCR clone 218038 (TRBV19, TRBJ1-2)
CASSPGTGVGYTF

SEQ ID NO: 436077 - protein, 12 aa, Homo sapiens
  CDR3 for alpha chain variable domain of TCR clone 218039 (TRAV13-2, TRAJ23)
CAERHRGGRLIF

SEQ ID NO: 436078 - protein, 13 aa, Homo sapiens
  CDR3 for beta chain variable domain of TCR clone 218039 (TRBV20-1, TRBJ2-2)
CSALSGGAGELFF

SEQ ID NO: 436079 - protein, 14 aa, Homo sapiens
  CDR3 for alpha chain variable domain of TCR clone 218040 (TRAV2, TRAJ12)
CAVDAMDSSSKLIF

SEQ ID NO: 436080 - protein, 13 aa, Homo sapiens
  CDR3 for beta chain variable domain of TCR clone 218040 (TRBV19, TRBJ2-1)
CASKVGAGGEQFF

SEQ ID NO: 436081 - protein, 15 aa, Homo sapiens
  CDR3 for alpha chain variable domain of TCR clone 218041 (TRAV8-2, TRAJ24)
CVVSDRTDSWGKLQC

SEQ ID NO: 436082 - protein, 13 aa, Homo sapiens
  CDR3 for beta chain variable domain of TCR clone 218041 (TRBV7-9, TRBJ1-2)
CASNLKQNYGYTF

SEQ ID NO: 436083 - protein, 11 aa, Homo sapiens
  CDR3 for alpha chain variable domain of TCR clone 218042 (TRAV8-3, TRAJ15)
CVVGPGTALIF

SEQ ID NO: 436084 - protein, 18 aa, Homo sapiens
  CDR3 for beta chain variable domain of TCR clone 218042 (TRBV18, TRBJ2-3)
CASSYTSGAAGGTDTQYF

SEQ ID NO: 436085 - protein, 13 aa, Homo sapiens
  CDR3 for alpha chain variable domain of TCR clone 218043 (TRAV25, TRAJ40)
CAGSASGTYKYIF

SEQ ID NO: 436086 - protein, 14 aa, Homo sapiens
  CDR3 for beta chain variable domain of TCR clone 218043 (TRBV7-2, TRBJ2-7)
RASRSQGAAYEQYF

SEQ ID NO: 436087 - protein, 23 aa, Homo sapiens
  CDR3 for alpha chain variable domain of TCR clone 218044 (TRAV26-1, )
CIADNVGNNHIQNPDPAVYQLRD

SEQ ID NO: 436088 - protein, 13 aa, Homo sapiens
  CDR3 for beta chain variable domain of TCR clone 218044 (TRBV20-1, TRBJ1-1)
CSARGGGNTEAFF

SEQ ID NO: 436089 - protein, 13 aa, Homo sapiens
  CDR3 for alpha chain variable domain of TCR clone 218045 (TRAV16, TRAJ52)
CALRGTSYGKLTF

SEQ ID NO: 436090 - protein, 13 aa, Homo sapiens
  CDR3 for beta chain variable domain of TCR clone 218045 (TRBV7-9, TRBJ1-2)
CASSLKQNYGYTF

SEQ ID NO: 436091 - protein, 16 aa, Homo sapiens
  CDR3 for alpha chain variable domain of TCR clone 218046 (TRAV12-2, TRAJ40)
CAVISGGTSGTYKYIF

SEQ ID NO: 436092 - protein, 14 aa, Homo sapiens
  CDR3 for beta chain variable domain of TCR clone 218046 (TRBV20-1, TRBJ2-5)
CSARDGRAGETQYF

SEQ ID NO: 436093 - protein, 13 aa, Homo sapiens
  CDR3 for alpha chain variable domain of TCR clone 218047 (TRAV38-1, TRAJ42)
CARWGGSQGNLIF

SEQ ID NO: 436094 - protein, 13 aa, Homo sapiens
  CDR3 for beta chain variable domain of TCR clone 218047 (TRBV24-1, TRBJ2-2)
CATSDWSTGELFF

SEQ ID NO: 436095 - protein, 12 aa, Homo sapiens
  CDR3 for alpha chain variable domain of TCR clone 218048 (TRAV13-1, TRAJ21)
CAAKEGFNKFYF

SEQ ID NO: 436096 - protein, 17 aa, Homo sapiens
  CDR3 for beta chain variable domain of TCR clone 218048 (TRBV20-1, TRBJ2-7)
CSATRAGGVAGVEEQFF

SEQ ID NO: 436097 - protein, 12 aa, Homo sapiens
  CDR3 for alpha chain variable domain of TCR clone 218049 (TRAV21, TRAJ29)
CAVTSGNTPLVF

SEQ ID NO: 436098 - protein, 15 aa, Homo sapiens
  CDR3 for beta chain variable domain of TCR clone 218049 (TRBV11-3, TRBJ2-1)
CASSLAGQTYNEQFF

SEQ ID NO: 436099 - protein, 13 aa, Homo sapiens
  CDR3 for alpha chain variable domain of TCR clone 218050 (TRAV22, TRAJ29)
CAVGGSGNTPLVF

SEQ ID NO: 436100 - protein, 15 aa, Homo sapiens
  CDR3 for beta chain variable domain of TCR clone 218050 (TRBV28, TRBJ2-1)
CASSIIAGGRSEQFF

SEQ ID NO: 436101 - protein, 16 aa, Homo sapiens
  CDR3 for alpha chain variable domain of TCR clone 218051 (TRAV21, TRAJ37)
CAVRRRGSSNTGKLIF

SEQ ID NO: 436102 - protein, 13 aa, Homo sapiens
  CDR3 for beta chain variable domain of TCR clone 218051 (TRBV7-9, TRBJ2-5)
CASLSPGQETQYF

SEQ ID NO: 436103 - protein, 13 aa, Homo sapiens
  CDR3 for alpha chain variable domain of TCR clone 218052 (TRAV13-2, TRAJ40)
CAENGSGTYKYIF

SEQ ID NO: 436104 - protein, 15 aa, Homo sapiens
  CDR3 for beta chain variable domain of TCR clone 218052 (TRBV5-4, TRBJ2-7)
CASSLEWGPSYEQYF

SEQ ID NO: 436105 - protein, 13 aa, Homo sapiens
  CDR3 for alpha chain variable domain of TCR clone 218053 (TRAV12-2, TRAJ6)
CAVNVSRKLHTYI

SEQ ID NO: 436106 - protein, 18 aa, Homo sapiens
  CDR3 for beta chain variable domain of TCR clone 218053 (TRBV4-1, TRBJ1-5)
CASSQDPRGQGLNKPQHF

SEQ ID NO: 436107 - protein, 16 aa, Homo sapiens
  CDR3 for alpha chain variable domain of TCR clone 218054 (TRAV21, TRAJ17)
CAVRPGEEAAGNKLTF

SEQ ID NO: 436108 - protein, 16 aa, Homo sapiens
  CDR3 for beta chain variable domain of TCR clone 218054 (TRBV2, TRBJ2-7)
CASSEPGTGPSYEQYF

SEQ ID NO: 436109 - protein, 13 aa, Homo sapiens
  CDR3 for alpha chain variable domain of TCR clone 218055 (TRAV23/DV6, TRAJ22)
CAHYSGSARQLTF

SEQ ID NO: 436110 - protein, 15 aa, Homo sapiens
  CDR3 for beta chain variable domain of TCR clone 218055 (TRBV11-2, TRBJ1-6)
CASSLDPWAVSPLHF

SEQ ID NO: 436111 - protein, 19 aa, Homo sapiens
  CDR3 for alpha chain variable domain of TCR clone 218056 (TRAV26-1, TRAJ52)
CIVRAHRNAGGTSHGKLTF

SEQ ID NO: 436112 - protein, 14 aa, Homo sapiens
  CDR3 for beta chain variable domain of TCR clone 218056 (TRBV4-1, TRBJ2-2)
CASSQAVNTGELFF

SEQ ID NO: 436113 - protein, 12 aa, Homo sapiens
  CDR3 for alpha chain variable domain of TCR clone 218057 (TRAV35, TRAJ39)
LAPNNAGNMLTF

SEQ ID NO: 436114 - protein, 16 aa, Homo sapiens
  CDR3 for beta chain variable domain of TCR clone 218057 (TRBV2, TRBJ2-3)
CASSTSVDGVTDTQYF

SEQ ID NO: 436115 - protein, 15 aa, Homo sapiens
  CDR3 for alpha chain variable domain of TCR clone 218058 (TRAV26-1, TRAJ23)
CIVRVAGYQGGKLIF

SEQ ID NO: 436116 - protein, 18 aa, Homo sapiens
  CDR3 for beta chain variable domain of TCR clone 218058 (TRBV28, TRBJ2-1)
CASSSTSGRANSYNEHFF

SEQ ID NO: 436117 - protein, 16 aa, Homo sapiens
  CDR3 for alpha chain variable domain of TCR clone 218059 (TRAV30, TRAJ24)
CGTEIVDADSWGKFQF

SEQ ID NO: 436118 - protein, 15 aa, Homo sapiens
  CDR3 for beta chain variable domain of TCR clone 218059 (TRBV27, TRBJ2-1)
CASSNGGGSSNEQFF

SEQ ID NO: 436119 - protein, 15 aa, Homo sapiens
  CDR3 for alpha chain variable domain of TCR clone 218060 (TRAV12-3, TRAJ6)
YAMSATTGGSYIPTF

SEQ ID NO: 436120 - protein, 16 aa, Homo sapiens
  CDR3 for beta chain variable domain of TCR clone 218060 (TRBV28, TRBJ2-7)
CASSPWVATGDLSQYF

SEQ ID NO: 436121 - protein, 14 aa, Homo sapiens
  CDR3 for alpha chain variable domain of TCR clone 218061 (TRAV21, TRAJ45)
CAVSSGGGADGLTL

SEQ ID NO: 436122 - protein, 18 aa, Homo sapiens
  CDR3 for beta chain variable domain of TCR clone 218061 (TRBV18, TRBJ1-3)
CASSPRGGAGPSGNTIYF

SEQ ID NO: 436123 - protein, 15 aa, Homo sapiens
  CDR3 for alpha chain variable domain of TCR clone 218062 (TRAV3, TRAJ27)
CAVRDPLTNAGKSTF

SEQ ID NO: 436124 - protein, 15 aa, Homo sapiens
  CDR3 for beta chain variable domain of TCR clone 218062 (TRBV28, TRBJ2-1)
CASSIIAGGRSQQFF

SEQ ID NO: 436125 - protein, 13 aa, Homo sapiens
  CDR3 for alpha chain variable domain of TCR clone 218063 (TRAV12-1, TRAJ16)
CVVNGPDGQKLLF

SEQ ID NO: 436126 - protein, 12 aa, Homo sapiens
  CDR3 for beta chain variable domain of TCR clone 218063 (TRBV24-1, TRBJ2-2)
CATSDPVLTGLQ

SEQ ID NO: 436127 - protein, 13 aa, Homo sapiens
  CDR3 for alpha chain variable domain of TCR clone 218064 (TRAV30, TRAJ24)
CGTVTDSWGKLQF

SEQ ID NO: 436128 - protein, 16 aa, Homo sapiens
  CDR3 for beta chain variable domain of TCR clone 218064 (TRBV7-3, TRBJ2-2)
CGSSLKRGTLSGELFF

SEQ ID NO: 436129 - protein, 14 aa, Homo sapiens
  CDR3 for alpha chain variable domain of TCR clone 218065 (TRAV12-1, TRAJ10)
CVVDLAGGGNKLTF

SEQ ID NO: 436130 - protein, 14 aa, Homo sapiens
  CDR3 for beta chain variable domain of TCR clone 218065 (TRBV12-4, TRBJ1-1)
CASSLGTGGTEAFF

SEQ ID NO: 436131 - protein, 10 aa, Homo sapiens
  CDR3 for alpha chain variable domain of TCR clone 218066 (TRAV12-1, TRAJ49)
CVVNPNQFYF

SEQ ID NO: 436132 - protein, 14 aa, Homo sapiens
  CDR3 for beta chain variable domain of TCR clone 218066 (TRBV7-6, TRBJ2-3)
CASSLGTVTDTQYF

SEQ ID NO: 436133 - protein, 12 aa, Homo sapiens
  CDR3 for alpha chain variable domain of TCR clone 218067 (TRAV38-1, TRAJ57)
CAFMKLPPTLFF

SEQ ID NO: 436134 - protein, 14 aa, Homo sapiens
  CDR3 for beta chain variable domain of TCR clone 218067 (TRBV7-8, TRBJ2-3)
CASSLEAGTDTQYF

SEQ ID NO: 436135 - protein, 16 aa, Homo sapiens
  CDR3 for alpha chain variable domain of TCR clone 218068 (TRAV3, TRAJ23)
CAVKIGIYNQGGKLIF

SEQ ID NO: 436136 - protein, 14 aa, Homo sapiens
  CDR3 for beta chain variable domain of TCR clone 218068 (TRBV7-6, TRBJ2-3)
CASSLGTVTDTQYF

SEQ ID NO: 436137 - protein, 15 aa, Homo sapiens
  CDR3 for alpha chain variable domain of TCR clone 218069 (TRAV21, TRAJ53)
CATLNSGGSNYKLTL

SEQ ID NO: 436138 - protein, 15 aa, Homo sapiens
  CDR3 for beta chain variable domain of TCR clone 218069 (TRBV7-6, TRBJ1-5)
CASSQSSGINQPQHF

SEQ ID NO: 436139 - protein, 16 aa, Homo sapiens
  CDR3 for alpha chain variable domain of TCR clone 218070 (TRAV26-1, TRAJ37)
CIVRWDGSGNTGKLIF

SEQ ID NO: 436140 - protein, 17 aa, Homo sapiens
  CDR3 for beta chain variable domain of TCR clone 218070 (TRBV4-1, TRBJ2-7)
CASSRDPLGVRGVEQYF

SEQ ID NO: 436141 - protein, 15 aa, Homo sapiens
  CDR3 for alpha chain variable domain of TCR clone 218071 (TRAV17, TRAJ57)
CATGPSQGGSEKLVF

SEQ ID NO: 436142 - protein, 14 aa, Homo sapiens
  CDR3 for beta chain variable domain of TCR clone 218071 (TRBV20-1, TRBJ2-2)
CSAASGGNTGELFF

SEQ ID NO: 436143 - protein, 13 aa, Homo sapiens
  CDR3 for alpha chain variable domain of TCR clone 218072 (TRAV21, TRAJ57)
CAVTQGGSEKLVF

SEQ ID NO: 436144 - protein, 14 aa, Homo sapiens
  CDR3 for beta chain variable domain of TCR clone 218072 (TRBV5-1, TRBJ2-1)
CASSALWAGNEQFY

SEQ ID NO: 436145 - protein, 16 aa, Homo sapiens
  CDR3 for alpha chain variable domain of TCR clone 218073 (TRAV12-2, TRAJ45)
CAVNMYSGGGADGLTF

SEQ ID NO: 436146 - protein, 16 aa, Homo sapiens
  CDR3 for beta chain variable domain of TCR clone 218073 (TRBV4-3, TRBJ2-1)
CASSPALDRGVNEQCF

SEQ ID NO: 436147 - protein, 17 aa, Homo sapiens
  CDR3 for alpha chain variable domain of TCR clone 218074 (TRAV26-2, TRAJ42)
CILRDVGYGGSQGNLIF

SEQ ID NO: 436148 - protein, 12 aa, Homo sapiens
  CDR3 for beta chain variable domain of TCR clone 218074 (TRBV19, TRBJ2-1)
CASSRQGAEQFF

SEQ ID NO: 436149 - protein, 17 aa, Homo sapiens
  CDR3 for alpha chain variable domain of TCR clone 218075 (TRAV4, TRAJ18)
CLVGERSVGSTLGRLYF

SEQ ID NO: 436150 - protein, 15 aa, Homo sapiens
  CDR3 for beta chain variable domain of TCR clone 218075 (TRBV5-1, TRBJ2-1)
CASSPPRAPYNEQFF

SEQ ID NO: 436151 - protein, 12 aa, Homo sapiens
  CDR3 for alpha chain variable domain of TCR clone 218076 (TRAV21, TRAJ13)
PGPSGGYQKVTF

SEQ ID NO: 436152 - protein, 16 aa, Homo sapiens
  CDR3 for beta chain variable domain of TCR clone 218076 (TRBV12-5, TRBJ2-5)
CASGPRTSGNQETQYF

SEQ ID NO: 436153 - protein, 15 aa, Homo sapiens
  CDR3 for alpha chain variable domain of TCR clone 218077 (TRAV6, TRAJ52)
CALTAGGISYGKLTF

SEQ ID NO: 436154 - protein, 14 aa, Homo sapiens
  CDR3 for beta chain variable domain of TCR clone 218077 (TRBV11-2, TRBJ2-1)
CASTTGQGNNEQFF

SEQ ID NO: 436155 - protein, 13 aa, Homo sapiens
  CDR3 for alpha chain variable domain of TCR clone 218078 (TRAV12-3, TRAJ13)
CAMSSGGYKKVTF

SEQ ID NO: 436156 - protein, 17 aa, Homo sapiens
  CDR3 for beta chain variable domain of TCR clone 218078 (TRBV4-1, TRBJ1-4)
CASSQEGPRGVEEKLFF

SEQ ID NO: 436157 - protein, 14 aa, Homo sapiens
  CDR3 for alpha chain variable domain of TCR clone 218079 (TRAV9-2, TRAJ20)
CALRDPLNDYNLSF

SEQ ID NO: 436158 - protein, 14 aa, Homo sapiens
  CDR3 for beta chain variable domain of TCR clone 218079 (TRBV11-2, TRBJ1-2)
CASSLYRGNYGYTF

SEQ ID NO: 436159 - protein, 14 aa, Homo sapiens
  CDR3 for alpha chain variable domain of TCR clone 218080 (TRAV13-2, TRAJ40)
CAELPTSGTYKYIF

SEQ ID NO: 436160 - protein, 13 aa, Homo sapiens
  CDR3 for beta chain variable domain of TCR clone 218080 (TRBV19, TRBJ1-2)
CASSQGQVYGYTF

SEQ ID NO: 436161 - protein, 12 aa, Homo sapiens
  CDR3 for alpha chain variable domain of TCR clone 218081 (TRAV13-1, TRAJ20)
CAARQNDYKLSF

SEQ ID NO: 436162 - protein, 14 aa, Homo sapiens
  CDR3 for beta chain variable domain of TCR clone 218081 (TRBV7-9, TRBJ2-1)
CASSPRDSLYEQFF

SEQ ID NO: 436163 - protein, 11 aa, Homo sapiens
  CDR3 for alpha chain variable domain of TCR clone 218082 (TRAV1-2, TRAJ20)
CAVANDYKLSF

SEQ ID NO: 436164 - protein, 14 aa, Homo sapiens
  CDR3 for beta chain variable domain of TCR clone 218082 (TRBV7-9, TRBJ2-2)
CASGLAINTGELFF

SEQ ID NO: 436165 - protein, 13 aa, Homo sapiens
  CDR3 for alpha chain variable domain of TCR clone 218083 (TRAV21, TRAJ57)
CAVTQCGSEKLVF

SEQ ID NO: 436166 - protein, 14 aa, Homo sapiens
  CDR3 for beta chain variable domain of TCR clone 218083 (TRBV5-1, TRBJ2-1)
CASSALWAGNEQFF

SEQ ID NO: 436167 - protein, 10 aa, Homo sapiens
  CDR3 for alpha chain variable domain of TCR clone 218084 (TRAV23/DV6, TRAJ57)
CAASSTLSQG

SEQ ID NO: 436168 - protein, 15 aa, Homo sapiens
  CDR3 for beta chain variable domain of TCR clone 218084 (TRBV7-9, TRBJ2-3)
CASSSSGGATDTQYF

SEQ ID NO: 436169 - protein, 16 aa, Homo sapiens
  CDR3 for alpha chain variable domain of TCR clone 218085 (TRAV23/DV6, TRAJ9)
CAASIGGNTGGLKTIF

SEQ ID NO: 436170 - protein, 15 aa, Homo sapiens
  CDR3 for beta chain variable domain of TCR clone 218085 (TRBV14, TRBJ1-1)
CASSQDGMGRREAFF

SEQ ID NO: 436171 - protein, 11 aa, Homo sapiens
  CDR3 for alpha chain variable domain of TCR clone 218086 (TRAV21, TRAJ34)
CAHFNTDKLIF

SEQ ID NO: 436172 - protein, 11 aa, Homo sapiens
  CDR3 for beta chain variable domain of TCR clone 218086 (TRBV29-1, TRBJ2-5)
CSEDRTGTQYF

SEQ ID NO: 436173 - protein, 12 aa, Homo sapiens
  CDR3 for alpha chain variable domain of TCR clone 218087 (TRAV29/DV5, TRAJ49)
CAATDTGNQFYV

SEQ ID NO: 436174 - protein, 19 aa, Homo sapiens
  CDR3 for beta chain variable domain of TCR clone 218087 (TRBV25-1, TRBJ2-2)
CAILVYRVDRGRKTGELFF

SEQ ID NO: 436175 - protein, 11 aa, Homo sapiens
  CDR3 for alpha chain variable domain of TCR clone 218088 (TRAV12-1, TRAJ26)
CVVAYGQNFVF

SEQ ID NO: 436176 - protein, 15 aa, Homo sapiens
  CDR3 for beta chain variable domain of TCR clone 218088 (TRBV12-4, TRBJ2-5)
CASSGTGQAQETHYF

SEQ ID NO: 436177 - protein, 12 aa, Homo sapiens
  CDR3 for alpha chain variable domain of TCR clone 218089 (TRAV13-1, TRAJ15)
CPASQAGTALIF

SEQ ID NO: 436178 - protein, 14 aa, Homo sapiens
  CDR3 for beta chain variable domain of TCR clone 218089 (TRBV19, TRBJ2-2)
CASSTLHRSGELFF

SEQ ID NO: 436179 - protein, 13 aa, Homo sapiens
  CDR3 for alpha chain variable domain of TCR clone 218090 (TRAV13-1, TRAJ20)
CAARVSNDYKLSF

SEQ ID NO: 436180 - protein, 12 aa, Homo sapiens
  CDR3 for beta chain variable domain of TCR clone 218090 (TRBV20-1, TRBJ2-1)
CSARLGTDEPFF

SEQ ID NO: 436181 - protein, 14 aa, Homo sapiens
  CDR3 for alpha chain variable domain of TCR clone 218091 (TRAV12-2, TRAJ5)
CAVNIRVRGRALTF

SEQ ID NO: 436182 - protein, 16 aa, Homo sapiens
  CDR3 for beta chain variable domain of TCR clone 218091 (TRBV5-1, TRBJ1-6)
CASSCTGTGGDSPLHF

SEQ ID NO: 436183 - protein, 14 aa, Homo sapiens
  CDR3 for alpha chain variable domain of TCR clone 218092 (TRAV1-2, TRAJ8)
CAVREDTGYQKLVF

SEQ ID NO: 436184 - protein, 14 aa, Homo sapiens
  CDR3 for beta chain variable domain of TCR clone 218092 (TRBV11-3, TRBJ2-3)
CASSRLARTDTQYF

SEQ ID NO: 436185 - protein, 14 aa, Homo sapiens
  CDR3 for alpha chain variable domain of TCR clone 218093 (TRAV12-2, TRAJ17)
CAVLFKAAGNQLTF

SEQ ID NO: 436186 - protein, 17 aa, Homo sapiens
  CDR3 for beta chain variable domain of TCR clone 218093 (TRBV20-1, TRBJ2-2)
CSASGWGQGGLTGELFF

SEQ ID NO: 436187 - protein, 16 aa, Homo sapiens
  CDR3 for alpha chain variable domain of TCR clone 218094 (TRAV3, TRAJ10)
CAVRDMRAGGGNKLTF

SEQ ID NO: 436188 - protein, 15 aa, Homo sapiens
  CDR3 for beta chain variable domain of TCR clone 218094 (TRBV7-3, TRBJ2-1)
CQQLQTSGRYNEQFF

SEQ ID NO: 436189 - protein, 14 aa, Homo sapiens
  CDR3 for alpha chain variable domain of TCR clone 218095 (TRAV3, TRAJ7)
CAVREEEREQQTRF

SEQ ID NO: 436190 - protein, 15 aa, Homo sapiens
  CDR3 for beta chain variable domain of TCR clone 218095 (TRBV29-1, TRBJ2-1)
CSVEGGPASYNEQFF

SEQ ID NO: 436191 - protein, 15 aa, Homo sapiens
  CDR3 for alpha chain variable domain of TCR clone 218096 (TRAV23/DV6, TRAJ10)
CAAGGLTGGGNKLTF

SEQ ID NO: 436192 - protein, 13 aa, Homo sapiens
  CDR3 for beta chain variable domain of TCR clone 218096 (TRBV4-2, TRBJ1-1)
CASSQAGNTEAFF

SEQ ID NO: 436193 - protein, 18 aa, Homo sapiens
  CDR3 for alpha chain variable domain of TCR clone 218097 (TRAV13-1, TRAJ52)
CAAKNPNAGGTSYGKLTF

SEQ ID NO: 436194 - protein, 16 aa, Homo sapiens
  CDR3 for beta chain variable domain of TCR clone 218097 (TRBV2, TRBJ2-3)
CASSTSVEGVTDTQYF

SEQ ID NO: 436195 - protein, 16 aa, Homo sapiens
  CDR3 for alpha chain variable domain of TCR clone 218098 (TRAV13-1, TRAJ22)
CTAKGGRSGSARQLTF

SEQ ID NO: 436196 - protein, 15 aa, Homo sapiens
  CDR3 for beta chain variable domain of TCR clone 218098 (TRBV9, TRBJ1-6)
CASSVAGTGDSPLHF

SEQ ID NO: 436197 - protein, 17 aa, Homo sapiens
  CDR3 for alpha chain variable domain of TCR clone 218099 (TRAV23/DV6, TRAJ53)
CAASKLGSGGSNHKLTF

SEQ ID NO: 436198 - protein, 15 aa, Homo sapiens
  CDR3 for beta chain variable domain of TCR clone 218099 (TRBV5-7, TRBJ1-5)
CASSYGKLWDQPQHF

SEQ ID NO: 436199 - protein, 14 aa, Homo sapiens
  CDR3 for alpha chain variable domain of TCR clone 218100 (TRAV12-2, TRAJ40)
CAVKIPSGTYKYIF

SEQ ID NO: 436200 - protein, 13 aa, Homo sapiens
  CDR3 for beta chain variable domain of TCR clone 218100 (TRBV12-4, TRBJ2-7)
CASSLSGVYEQYF

SEQ ID NO: 436201 - protein, 18 aa, Homo sapiens
  CDR3 for alpha chain variable domain of TCR clone 218101 (TRAV26-1, TRAJ52)
CIVRVEGAGGNSYGKLTF

SEQ ID NO: 436202 - protein, 13 aa, Homo sapiens
  CDR3 for beta chain variable domain of TCR clone 218101 (TRBV7-3, TRBJ1-2)
CASSLKRGYGYTF

SEQ ID NO: 436203 - protein, 13 aa, Homo sapiens
  CDR3 for alpha chain variable domain of TCR clone 218102 (TRAV12-3, TRAJ53)
CAMRGGSNYKLTF

SEQ ID NO: 436204 - protein, 15 aa, Homo sapiens
  CDR3 for beta chain variable domain of TCR clone 218102 (TRBV7-9, TRBJ1-6)
CASSSPGRGNSPLHF

SEQ ID NO: 436205 - protein, 16 aa, Homo sapiens
  CDR3 for alpha chain variable domain of TCR clone 218103 (TRAV30, TRAJ24)
CGTEIVDADSWGKFQF

SEQ ID NO: 436206 - protein, 12 aa, Homo sapiens
  CDR3 for beta chain variable domain of TCR clone 218103 (TRBV11-2, TRBJ2-2)
CASSLGGWELFF

SEQ ID NO: 436207 - protein, 11 aa, Homo sapiens
  CDR3 for alpha chain variable domain of TCR clone 218104 (TRAV21, TRAJ34)
CAVTNTDKLIF

SEQ ID NO: 436208 - protein, 11 aa, Homo sapiens
  CDR3 for beta chain variable domain of TCR clone 218104 (TRBV7-2, TRBJ2-1)
CSSPGNNEQFF

SEQ ID NO: 436209 - protein, 14 aa, Homo sapiens
  CDR3 for alpha chain variable domain of TCR clone 218105 (TRAV4, TRAJ20)
CLVSRRSNDYQLSF

SEQ ID NO: 436210 - protein, 18 aa, Homo sapiens
  CDR3 for beta chain variable domain of TCR clone 218105 (TRBV2, TRBJ2-5)
CASSGDPQGRGAQETQYF

SEQ ID NO: 436211 - protein, 13 aa, Homo sapiens
  CDR3 for alpha chain variable domain of TCR clone 218106 (TRAV30, TRAJ24)
CGTVTASWGKLQF

SEQ ID NO: 436212 - protein, 15 aa, Homo sapiens
  CDR3 for beta chain variable domain of TCR clone 218106 (TRBV25-1, TRBJ1-4)
CASSPGDSTNEKRFV

SEQ ID NO: 436213 - protein, 14 aa, Homo sapiens
  CDR3 for alpha chain variable domain of TCR clone 218107 (TRAV8-1, TRAJ5)
CAVRTDTGRRALTF

SEQ ID NO: 436214 - protein, 15 aa, Homo sapiens
  CDR3 for beta chain variable domain of TCR clone 218107 (TRBV7-3, TRBJ2-1)
CAISPTGGGEVEQFF

SEQ ID NO: 436215 - protein, 18 aa, Homo sapiens
  CDR3 for alpha chain variable domain of TCR clone 218108 (TRAV20, TRAJ4)
CAVQPYYMSSGGYNKLIF

SEQ ID NO: 436216 - protein, 13 aa, Homo sapiens
  CDR3 for beta chain variable domain of TCR clone 218108 (TRBV19, TRBJ2-3)
CATWDKITDTQYF

SEQ ID NO: 436217 - protein, 13 aa, Homo sapiens
  CDR3 for alpha chain variable domain of TCR clone 218109 (TRAV3, TRAJ27)
CSVRPLGAGKSTF

SEQ ID NO: 436218 - protein, 16 aa, Homo sapiens
  CDR3 for beta chain variable domain of TCR clone 218109 (TRBV12-5, TRBJ2-5)
CASGPRTSGNQETQYF

SEQ ID NO: 436219 - protein, 15 aa, Homo sapiens
  CDR3 for alpha chain variable domain of TCR clone 218110 (TRAV3, TRAJ17)
CAVRDTGAAGNKLTF

SEQ ID NO: 436220 - protein, 16 aa, Homo sapiens
  CDR3 for beta chain variable domain of TCR clone 218110 (TRBV7-3, TRBJ2-2)
CASSLTRGTLSGELFF

SEQ ID NO: 436221 - protein, 12 aa, Homo sapiens
  CDR3 for alpha chain variable domain of TCR clone 218111 (TRAV12-3, TRAJ29)
CAAREGNTTLVF

SEQ ID NO: 436222 - protein, 17 aa, Homo sapiens
  CDR3 for beta chain variable domain of TCR clone 218111 (TRBV18, TRBJ2-1)
CASSPLAAGAGDNEQFF

SEQ ID NO: 436223 - protein, 14 aa, Homo sapiens
  CDR3 for alpha chain variable domain of TCR clone 218112 (TRAV1-2, TRAJ8)
CAVREDTGFQKLVL

SEQ ID NO: 436224 - protein, 15 aa, Homo sapiens
  CDR3 for beta chain variable domain of TCR clone 218112 (TRBV19, TRBJ2-1)
CASSTGTSSYNEQFF

SEQ ID NO: 436225 - protein, 12 aa, Homo sapiens
  CDR3 for alpha chain variable domain of TCR clone 218113 (TRAV16, TRAJ12)
CSHRDSSYKLIF

SEQ ID NO: 436226 - protein, 12 aa, Homo sapiens
  CDR3 for beta chain variable domain of TCR clone 218113 (TRBV28, TRBJ2-1)
CASSRLVGEQFF

SEQ ID NO: 436227 - protein, 13 aa, Homo sapiens
  CDR3 for alpha chain variable domain of TCR clone 218114 (TRAV12-2, TRAJ20)
CAVYPSNDYKLSF

SEQ ID NO: 436228 - protein, 16 aa, Homo sapiens
  CDR3 for beta chain variable domain of TCR clone 218114 (TRBV11-2, TRBJ1-2)
CASSLDTGGADYGYTF

SEQ ID NO: 436229 - protein, 13 aa, Homo sapiens
  CDR3 for alpha chain variable domain of TCR clone 218115 (TRAV2, TRAJ29)
CAVRNSGNTPLVF

SEQ ID NO: 436230 - protein, 11 aa, Homo sapiens
  CDR3 for beta chain variable domain of TCR clone 218115 (TRBV12-4, TRBJ2-2)
CASSSAGELFF

SEQ ID NO: 436231 - protein, 16 aa, Homo sapiens
  CDR3 for alpha chain variable domain of TCR clone 218116 (TRAV8-1, TRAJ39)
CAVNVHSYNAGNMLTF

SEQ ID NO: 436232 - protein, 15 aa, Homo sapiens
  CDR3 for beta chain variable domain of TCR clone 218116 (TRBV4-1, TRBJ2-3)
CASRSTRAGTDTQYF

SEQ ID NO: 436233 - protein, 14 aa, Homo sapiens
  CDR3 for alpha chain variable domain of TCR clone 218117 (TRAV12-2, TRAJ17)
YAVLFKAAGNKLTF

SEQ ID NO: 436234 - protein, 16 aa, Homo sapiens
  CDR3 for beta chain variable domain of TCR clone 218117 (TRBV12-5, TRBJ2-5)
CASGPRTSGNQETQYF

SEQ ID NO: 436235 - protein, 10 aa, Homo sapiens
  CDR3 for alpha chain variable domain of TCR clone 218118 (TRAV21, TRAJ43)
CAVSANDMRF

SEQ ID NO: 436236 - protein, 13 aa, Homo sapiens
  CDR3 for beta chain variable domain of TCR clone 218118 (TRBV7-2, TRBJ1-2)
CAGSLDGIYGYTF

SEQ ID NO: 436237 - protein, 12 aa, Homo sapiens
  CDR3 for alpha chain variable domain of TCR clone 218119 (TRAV12-1, TRAJ6)
CVVSERSYIPTF

SEQ ID NO: 436238 - protein, 13 aa, Homo sapiens
  CDR3 for beta chain variable domain of TCR clone 218119 (TRBV14, TRBJ1-2)
CASGQQGYYGYTF

SEQ ID NO: 436239 - protein, 15 aa, Homo sapiens
  CDR3 for alpha chain variable domain of TCR clone 218120 (TRAV17, TRAJ23)
CATDAEDNQGGKLLF

SEQ ID NO: 436240 - protein, 12 aa, Homo sapiens
  CDR3 for beta chain variable domain of TCR clone 218120 (TRBV2, TRBJ2-1)
CAKREGYNEQFF

SEQ ID NO: 436241 - protein, 14 aa, Homo sapiens
  CDR3 for alpha chain variable domain of TCR clone 218121 (TRAV1-2, TRAJ16)
CAVNRFSDGQKLLF

SEQ ID NO: 436242 - protein, 13 aa, Homo sapiens
  CDR3 for beta chain variable domain of TCR clone 218121 (TRBV11-2, TRBJ1-1)
CASSAVVGTEAFF

SEQ ID NO: 436243 - protein, 15 aa, Homo sapiens
  CDR3 for alpha chain variable domain of TCR clone 218122 (TRAV1-1, TRAJ23)
CAVSEGPGRKAYLRT

SEQ ID NO: 436244 - protein, 14 aa, Homo sapiens
  CDR3 for beta chain variable domain of TCR clone 218122 (TRBV10-2, TRBJ2-1)
CAISEGTSEDERFF

SEQ ID NO: 436245 - protein, 15 aa, Homo sapiens
  CDR3 for alpha chain variable domain of TCR clone 218123 (TRAV2, TRAJ32)
CAVANYGGATNKLIF

SEQ ID NO: 436246 - protein, 15 aa, Homo sapiens
  CDR3 for beta chain variable domain of TCR clone 218123 (TRBV7-7, TRBJ2-5)
CASSELERAEETQYF

SEQ ID NO: 436247 - protein, 15 aa, Homo sapiens
  CDR3 for alpha chain variable domain of TCR clone 218124 (TRAV12-2, TRAJ6)
CAVNSLSGGSYIPTF

SEQ ID NO: 436248 - protein, 17 aa, Homo sapiens
  CDR3 for beta chain variable domain of TCR clone 218124 (TRBV11-2, TRBJ2-1)
CASSLSPPGVEYNEQFF

SEQ ID NO: 436249 - protein, 16 aa, Homo sapiens
  CDR3 for alpha chain variable domain of TCR clone 218125 (TRAV16, TRAJ4)
CALSRMFSGGYNKLIF

SEQ ID NO: 436250 - protein, 16 aa, Homo sapiens
  CDR3 for beta chain variable domain of TCR clone 218125 (TRBV7-8, TRBJ2-3)
CASSTEGQRETDTQYF

SEQ ID NO: 436251 - protein, 13 aa, Homo sapiens
  CDR3 for alpha chain variable domain of TCR clone 218126 (TRAV16, TRAJ26)
CINVLCLGQNFVF

SEQ ID NO: 436252 - protein, 12 aa, Homo sapiens
  CDR3 for beta chain variable domain of TCR clone 218126 (TRBV11-2, TRBJ2-1)
CASSPGNNEQFF

SEQ ID NO: 436253 - protein, 14 aa, Homo sapiens
  CDR3 for alpha chain variable domain of TCR clone 218127 (TRAV29/DV5, TRAJ32)
CAAADGGATNKLIF

SEQ ID NO: 436254 - protein, 15 aa, Homo sapiens
  CDR3 for beta chain variable domain of TCR clone 218127 (TRBV27, TRBJ2-7)
CASSTAGTGSYEQYF

SEQ ID NO: 436255 - protein, 15 aa, Homo sapiens
  CDR3 for alpha chain variable domain of TCR clone 218128 (TRAV2, TRAJ9)
CSVAALNTGGFKTIF

SEQ ID NO: 436256 - protein, 13 aa, Homo sapiens
  CDR3 for beta chain variable domain of TCR clone 218128 (TRBV10-3, TRBJ2-7)
CASKLAVNYEQYF

SEQ ID NO: 436257 - protein, 14 aa, Homo sapiens
  CDR3 for alpha chain variable domain of TCR clone 218129 (TRAV13-1, TRAJ16)
CAAAYFFRWPEAAL

SEQ ID NO: 436258 - protein, 16 aa, Homo sapiens
  CDR3 for beta chain variable domain of TCR clone 218129 (TRBV7-9, TRBJ2-2)
CASSGFGGANTGELFF

SEQ ID NO: 436259 - protein, 12 aa, Homo sapiens
  CDR3 for alpha chain variable domain of TCR clone 218130 (TRAV12-1, TRAJ40)
CVVYSGTYKYIF

SEQ ID NO: 436260 - protein, 14 aa, Homo sapiens
  CDR3 for beta chain variable domain of TCR clone 218130 (TRBV7-6, TRBJ2-1)
CDSSLGGGADEQFF

SEQ ID NO: 436261 - protein, 13 aa, Homo sapiens
  CDR3 for alpha chain variable domain of TCR clone 218131 (TRAV12-2, TRAJ20)
CAVYPSNDYKLSF

SEQ ID NO: 436262 - protein, 15 aa, Homo sapiens
  CDR3 for beta chain variable domain of TCR clone 218131 (TRBV27, TRBJ2-5)
CASSVYPRGGETQYV

SEQ ID NO: 436263 - protein, 15 aa, Homo sapiens
  CDR3 for alpha chain variable domain of TCR clone 218132 (TRAV13-1, TRAJ44)
CAASRGGGTASKLTF

SEQ ID NO: 436264 - protein, 13 aa, Homo sapiens
  CDR3 for beta chain variable domain of TCR clone 218132 (TRBV4-2, TRBJ2-3)
CASSLTTTDTQYF

SEQ ID NO: 436265 - protein, 14 aa, Homo sapiens
  CDR3 for alpha chain variable domain of TCR clone 218133 (TRAV35, TRAJ22)
CAWLRPGSARQLTF

SEQ ID NO: 436266 - protein, 17 aa, Homo sapiens
  CDR3 for beta chain variable domain of TCR clone 218133 (TRBV15, TRBJ1-4)
CATSRYGTGDPNEKLFF

SEQ ID NO: 436267 - protein, 17 aa, Homo sapiens
  CDR3 for alpha chain variable domain of TCR clone 218134 (TRAV26-1, TRAJ46)
IASSESEKKSSGDRLTF

SEQ ID NO: 436268 - protein, 16 aa, Homo sapiens
  CDR3 for beta chain variable domain of TCR clone 218134 (TRBV27, TRBJ2-2)
CASSFRGLVRTGELFF

SEQ ID NO: 436269 - protein, 15 aa, Homo sapiens
  CDR3 for alpha chain variable domain of TCR clone 218135 (TRAV12-3, TRAJ6)
CAMSATTGGSYIPTF

SEQ ID NO: 436270 - protein, 17 aa, Homo sapiens
  CDR3 for beta chain variable domain of TCR clone 218135 (TRBV13, TRBJ2-3)
CASSRSRVAGGRNTQYF

SEQ ID NO: 436271 - protein, 11 aa, Homo sapiens
  CDR3 for alpha chain variable domain of TCR clone 218136 (TRAV12-1, TRAJ21)
CVVNNFNKFYF

SEQ ID NO: 436272 - protein, 13 aa, Homo sapiens
  CDR3 for beta chain variable domain of TCR clone 218136 (TRBV10-2, TRBJ2-7)
CASGASGGYEQYF

SEQ ID NO: 436273 - protein, 20 aa, Homo sapiens
  CDR3 for alpha chain variable domain of TCR clone 218137 (TRAV3, TRAJ30)
CAVRTEMTRSSLEKGHDFIF

SEQ ID NO: 436274 - protein, 14 aa, Homo sapiens
  CDR3 for beta chain variable domain of TCR clone 218137 (TRBV11-2, TRBJ2-7)
CASSLGAGAYEQYF

SEQ ID NO: 436275 - protein, 12 aa, Homo sapiens
  CDR3 for alpha chain variable domain of TCR clone 218138 (TRAV1-1, TRAJ20)
CAVREDDYKLSF

SEQ ID NO: 436276 - protein, 15 aa, Homo sapiens
  CDR3 for beta chain variable domain of TCR clone 218138 (TRBV12-4, TRBJ2-5)
CASSPPTGLQETQYF

SEQ ID NO: 436277 - protein, 14 aa, Homo sapiens
  CDR3 for alpha chain variable domain of TCR clone 218139 (TRAV12-3, TRAJ10)
SHLPLTGGGNKLTF

SEQ ID NO: 436278 - protein, 12 aa, Homo sapiens
  CDR3 for beta chain variable domain of TCR clone 218139 (TRBV12-4, TRBJ2-4)
CASSSSGNIQYF

SEQ ID NO: 436279 - protein, 13 aa, Homo sapiens
  CDR3 for alpha chain variable domain of TCR clone 218140 (TRAV16, TRAJ10)
CAPAREEETNPPL

SEQ ID NO: 436280 - protein, 13 aa, Homo sapiens
  CDR3 for beta chain variable domain of TCR clone 218140 (TRBV10-3, TRBJ2-7)
CASKLAVNYEQYF

SEQ ID NO: 436281 - protein, 14 aa, Homo sapiens
  CDR3 for alpha chain variable domain of TCR clone 218141 (TRAV26-1, TRAJ45)
CIVRVVGGADGLTF

SEQ ID NO: 436282 - protein, 16 aa, Homo sapiens
  CDR3 for beta chain variable domain of TCR clone 218141 (TRBV7-9, TRBJ1-1)
CASSLTQVRSNTVAFF

SEQ ID NO: 436283 - protein, 13 aa, Homo sapiens
  CDR3 for alpha chain variable domain of TCR clone 218142 (TRAV8-6, TRAJ43)
CAVPGSRNNDMRF

SEQ ID NO: 436284 - protein, 14 aa, Homo sapiens
  CDR3 for beta chain variable domain of TCR clone 218142 (TRBV12-5, TRBJ2-5)
CASGSRTHQETQYF

SEQ ID NO: 436285 - protein, 19 aa, Homo sapiens
  CDR3 for alpha chain variable domain of TCR clone 218143 (TRAV40, )
CLPIPDIQNPDPAVYQLRD

SEQ ID NO: 436286 - protein, 15 aa, Homo sapiens
  CDR3 for beta chain variable domain of TCR clone 218143 (TRBV2, TRBJ1-2)
CASSESGGANYGYTF

SEQ ID NO: 436287 - protein, 15 aa, Homo sapiens
  CDR3 for alpha chain variable domain of TCR clone 218144 (TRAV3, TRAJ22)
CAVRDRGGSARQLTF

SEQ ID NO: 436288 - protein, 15 aa, Homo sapiens
  CDR3 for beta chain variable domain of TCR clone 218144 (TRBV19, TRBJ2-1)
CASSRPGQNYNEQFF

SEQ ID NO: 436289 - protein, 15 aa, Homo sapiens
  CDR3 for alpha chain variable domain of TCR clone 218145 (TRAV8-6, TRAJ6)
CAVSGESGGSYIPTF

SEQ ID NO: 436290 - protein, 14 aa, Homo sapiens
  CDR3 for beta chain variable domain of TCR clone 218145 (TRBV9, TRBJ2-4)
CASSPSGTSGCQYF

SEQ ID NO: 436291 - protein, 16 aa, Homo sapiens
  CDR3 for alpha chain variable domain of TCR clone 218146 (TRAV16, TRAJ52)
YALSAAGGTSYGKLTF

SEQ ID NO: 436292 - protein, 17 aa, Homo sapiens
  CDR3 for beta chain variable domain of TCR clone 218146 (TRBV11-2, TRBJ2-1)
CASSLYPPGVEYNEQFF

SEQ ID NO: 436293 - protein, 14 aa, Homo sapiens
  CDR3 for alpha chain variable domain of TCR clone 218147 (TRAV38-1, TRAJ45)
CAYYSGGGADGLTF

SEQ ID NO: 436294 - protein, 20 aa, Homo sapiens
  CDR3 for beta chain variable domain of TCR clone 218147 (TRBV28, TRBJ2-1)
CARTPIGRSPGLAGGNAQFF

SEQ ID NO: 436295 - protein, 14 aa, Homo sapiens
  CDR3 for alpha chain variable domain of TCR clone 218148 (TRAV9-2, TRAJ39)
CALYIYNAGNMLTF

SEQ ID NO: 436296 - protein, 13 aa, Homo sapiens
  CDR3 for beta chain variable domain of TCR clone 218148 (TRBV7-2, TRBJ2-2)
CASSVAVTGELLF

SEQ ID NO: 436297 - protein, 11 aa, Homo sapiens
  CDR3 for alpha chain variable domain of TCR clone 218149 (TRAV12-2, TRAJ33)
CAVGSNYQIIC

SEQ ID NO: 436298 - protein, 14 aa, Homo sapiens
  CDR3 for beta chain variable domain of TCR clone 218149 (TRBV6-1, TRBJ2-2)
CASVEHIESGELFF

SEQ ID NO: 436299 - protein, 16 aa, Homo sapiens
  CDR3 for alpha chain variable domain of TCR clone 218150 (TRAV12-2, TRAJ28)
CAVIRGSGAGSYQLTF

SEQ ID NO: 436300 - protein, 13 aa, Homo sapiens
  CDR3 for beta chain variable domain of TCR clone 218150 (TRBV7-9, TRBJ1-2)
CASSLKQNYGYTF

SEQ ID NO: 436301 - protein, 13 aa, Homo sapiens
  CDR3 for alpha chain variable domain of TCR clone 218151 (TRAV30, TRAJ6)
CGTEAGGSYIPTF

SEQ ID NO: 436302 - protein, 11 aa, Homo sapiens
  CDR3 for beta chain variable domain of TCR clone 218151 (TRBV29-1, TRBJ2-5)
CSEDRTGTQYF

SEQ ID NO: 436303 - protein, 14 aa, Homo sapiens
  CDR3 for alpha chain variable domain of TCR clone 218152 (TRAV20, TRAJ56)
CAVQFGGANSKLTF

SEQ ID NO: 436304 - protein, 16 aa, Homo sapiens
  CDR3 for beta chain variable domain of TCR clone 218152 (TRBV19, TRBJ2-1)
CASSTAGPSSYNEQFF

SEQ ID NO: 436305 - protein, 15 aa, Homo sapiens
  CDR3 for alpha chain variable domain of TCR clone 218153 (TRAV25, TRAJ53)
CAATGGGGSNYKLTF

SEQ ID NO: 436306 - protein, 13 aa, Homo sapiens
  CDR3 for beta chain variable domain of TCR clone 218153 (TRBV7-9, TRBJ1-2)
CVSSLKQNYGYTF

SEQ ID NO: 436307 - protein, 13 aa, Homo sapiens
  CDR3 for alpha chain variable domain of TCR clone 218154 (TRAV3, TRAJ21)
CAVREPDFNKFYF

SEQ ID NO: 436308 - protein, 12 aa, Homo sapiens
  CDR3 for beta chain variable domain of TCR clone 218154 (TRBV7-9, TRBJ2-7)
CASSFGSYEQYF

SEQ ID NO: 436309 - protein, 16 aa, Homo sapiens
  CDR3 for alpha chain variable domain of TCR clone 218155 (TRAV21, TRAJ49)
CAVNRGLMNTGNQFYF

SEQ ID NO: 436310 - protein, 17 aa, Homo sapiens
  CDR3 for beta chain variable domain of TCR clone 218155 (TRBV27, TRBJ1-6)
CASSLDQLSSYNSPLHF

SEQ ID NO: 436311 - protein, 15 aa, Homo sapiens
  CDR3 for alpha chain variable domain of TCR clone 218156 (TRAV25, TRAJ52)
CAGRPGGTSYGKLTF

SEQ ID NO: 436312 - protein, 15 aa, Homo sapiens
  CDR3 for beta chain variable domain of TCR clone 218156 (TRBV7-8, TRBJ2-1)
CASTHGTGIYNEQFF

SEQ ID NO: 436313 - protein, 12 aa, Homo sapiens
  CDR3 for alpha chain variable domain of TCR clone 218157 (TRAV21, TRAJ33)
CAKMDSNYQLIW

SEQ ID NO: 436314 - protein, 14 aa, Homo sapiens
  CDR3 for beta chain variable domain of TCR clone 218157 (TRBV2, TRBJ2-7)
CASILTSGGYEQFS

SEQ ID NO: 436315 - protein, 11 aa, Homo sapiens
  CDR3 for alpha chain variable domain of TCR clone 218158 (TRAV3, TRAJ21)
CAVGNFTKFYF

SEQ ID NO: 436316 - protein, 16 aa, Homo sapiens
  CDR3 for beta chain variable domain of TCR clone 218158 (TRBV19, TRBJ2-1)
CASSKAGPSAYNEQFF

SEQ ID NO: 436317 - protein, 11 aa, Homo sapiens
  CDR3 for alpha chain variable domain of TCR clone 218159 (TRAV2, TRAJ13)
CASGGYQKVTF

SEQ ID NO: 436318 - protein, 15 aa, Homo sapiens
  CDR3 for beta chain variable domain of TCR clone 218159 (TRBV6-5, TRBJ1-6)
CASSLGQGFRSPLHF

SEQ ID NO: 436319 - protein, 16 aa, Homo sapiens
  CDR3 for alpha chain variable domain of TCR clone 218160 (TRAV26-1, TRAJ33)
CIVTFWGEDSNYQLIW

SEQ ID NO: 436320 - protein, 14 aa, Homo sapiens
  CDR3 for beta chain variable domain of TCR clone 218160 (TRBV6-3, TRBJ1-1)
CASSYHSKNTEAFF

SEQ ID NO: 436321 - protein, 15 aa, Homo sapiens
  CDR3 for alpha chain variable domain of TCR clone 218161 (TRAV26-1, TRAJ44)
CIVRIGTGTASKLTF

SEQ ID NO: 436322 - protein, 13 aa, Homo sapiens
  CDR3 for beta chain variable domain of TCR clone 218161 (TRBV19, TRBJ1-2)
CASSVPGQDGYTF

SEQ ID NO: 436323 - protein, 12 aa, Homo sapiens
  CDR3 for alpha chain variable domain of TCR clone 218162 (TRAV17, TRAJ20)
CATYSNDYKLSF

SEQ ID NO: 436324 - protein, 11 aa, Homo sapiens
  CDR3 for beta chain variable domain of TCR clone 218162 (TRBV4-1, TRBJ2-2)
CASENTGELFF

SEQ ID NO: 436325 - protein, 15 aa, Homo sapiens
  CDR3 for alpha chain variable domain of TCR clone 218163 (TRAV12-2, TRAJ53)
CAVNGGGGSNYKLTF

SEQ ID NO: 436326 - protein, 20 aa, Homo sapiens
  CDR3 for beta chain variable domain of TCR clone 218163 (TRBV28, TRBJ2-1)
RASTPIGRSPGLAGGNEQFF

SEQ ID NO: 436327 - protein, 13 aa, Homo sapiens
  CDR3 for alpha chain variable domain of TCR clone 218164 (TRAV12-2, TRAJ7)
CAVNLYGNNRLAF

SEQ ID NO: 436328 - protein, 14 aa, Homo sapiens
  CDR3 for beta chain variable domain of TCR clone 218164 (TRBV25-1, TRBJ1-2)
CASSEATGPYGYTV

SEQ ID NO: 436329 - protein, 14 aa, Homo sapiens
  CDR3 for alpha chain variable domain of TCR clone 218165 (TRAV1-2, TRAJ8)
CAVRGDTGFQKLVF

SEQ ID NO: 436330 - protein, 15 aa, Homo sapiens
  CDR3 for beta chain variable domain of TCR clone 218165 (TRBV6-3, TRBJ2-7)
CASGSPGTVFYEQYF

SEQ ID NO: 436331 - protein, 13 aa, Homo sapiens
  CDR3 for alpha chain variable domain of TCR clone 218166 (TRAV12-1, TRAJ43)
CVVSHHNNNDMRC

SEQ ID NO: 436332 - protein, 14 aa, Homo sapiens
  CDR3 for beta chain variable domain of TCR clone 218166 (TRBV5-5, TRBJ2-2)
CASSLLGDTGELFF

SEQ ID NO: 436333 - protein, 16 aa, Homo sapiens
  CDR3 for alpha chain variable domain of TCR clone 218167 (TRAV3, TRAJ40)
CAVRDRIASGTSKYIF

SEQ ID NO: 436334 - protein, 16 aa, Homo sapiens
  CDR3 for beta chain variable domain of TCR clone 218167 (TRBV2, TRBJ2-1)
CASRSPAGGKYNEQFF

SEQ ID NO: 436335 - protein, 14 aa, Homo sapiens
  CDR3 for alpha chain variable domain of TCR clone 218168 (TRAV12-2, TRAJ15)
CAPHTGQAGTALIF

SEQ ID NO: 436336 - protein, 14 aa, Homo sapiens
  CDR3 for beta chain variable domain of TCR clone 218168 (TRBV7-2, TRBJ2-7)
CASSLPPGQGPQYF

SEQ ID NO: 436337 - protein, 14 aa, Homo sapiens
  CDR3 for alpha chain variable domain of TCR clone 218169 (TRAV1-2, TRAJ16)
CAVNRFSDSQKLLF

SEQ ID NO: 436338 - protein, 10 aa, Homo sapiens
  CDR3 for beta chain variable domain of TCR clone 218169 (TRBV20-1, TRBJ1-4)
PQGANEKLFF

SEQ ID NO: 436339 - protein, 15 aa, Homo sapiens
  CDR3 for alpha chain variable domain of TCR clone 218170 (TRAV29/DV5, TRAJ24)
CAASGATDSWGKFQF

SEQ ID NO: 436340 - protein, 13 aa, Homo sapiens
  CDR3 for beta chain variable domain of TCR clone 218170 (TRBV11-2, TRBJ2-7)
CASSGTRPYEQYF

SEQ ID NO: 436341 - protein, 13 aa, Homo sapiens
  CDR3 for alpha chain variable domain of TCR clone 218171 (TRAV20, TRAJ37)
FAGCSSNTGKLIF

SEQ ID NO: 436342 - protein, 15 aa, Homo sapiens
  CDR3 for beta chain variable domain of TCR clone 218171 (TRBV2, TRBJ2-7)
CASSEGLARSYEQYF

SEQ ID NO: 436343 - protein, 18 aa, Homo sapiens
  CDR3 for alpha chain variable domain of TCR clone 218172 (TRAV26-2, TRAJ54)
CILRDVEVGIQGAQKLVF

SEQ ID NO: 436344 - protein, 18 aa, Homo sapiens
  CDR3 for beta chain variable domain of TCR clone 218172 (TRBV4-1, TRBJ2-7)
CASSQDTGAGSGLNEQYF

SEQ ID NO: 436345 - protein, 14 aa, Homo sapiens
  CDR3 for alpha chain variable domain of TCR clone 218173 (TRAV13-1, TRAJ35)
CAASKGGFGNVLHW

SEQ ID NO: 436346 - protein, 13 aa, Homo sapiens
  CDR3 for beta chain variable domain of TCR clone 218173 (TRBV7-3, TRBJ1-1)
YASSQDWGAEAFF

SEQ ID NO: 436347 - protein, 15 aa, Homo sapiens
  CDR3 for alpha chain variable domain of TCR clone 218174 (TRAV3, TRAJ5)
CAVRDLYTVRRALTF

SEQ ID NO: 436348 - protein, 16 aa, Homo sapiens
  CDR3 for beta chain variable domain of TCR clone 218174 (TRBV20-1, TRBJ1-4)
CSAPGQGLLTNEKLFF

SEQ ID NO: 436349 - protein, 17 aa, Homo sapiens
  CDR3 for alpha chain variable domain of TCR clone 218175 (TRAV3, TRAJ28)
CAVREAYSGAGSYQLTF

SEQ ID NO: 436350 - protein, 11 aa, Homo sapiens
  CDR3 for beta chain variable domain of TCR clone 218175 (TRBV19, TRBJ2-7)
CASSILGEQYF

SEQ ID NO: 436351 - protein, 15 aa, Homo sapiens
  CDR3 for alpha chain variable domain of TCR clone 218176 (TRAV25, TRAJ53)
CPTINRGGSKYKLTF

SEQ ID NO: 436352 - protein, 14 aa, Homo sapiens
  CDR3 for beta chain variable domain of TCR clone 218176 (TRBV11-2, TRBJ2-3)
CASSRLARTDTQYF

SEQ ID NO: 436353 - protein, 17 aa, Homo sapiens
  CDR3 for alpha chain variable domain of TCR clone 218177 (TRAV3, TRAJ32)
CAVRDWRYGGATNKLIF

SEQ ID NO: 436354 - protein, 17 aa, Homo sapiens
  CDR3 for beta chain variable domain of TCR clone 218177 (TRBV24-1, TRBJ2-7)
CATSESGQGTTSSTSGR

SEQ ID NO: 436355 - protein, 14 aa, Homo sapiens
  CDR3 for alpha chain variable domain of TCR clone 218178 (TRAV16, TRAJ37)
CASDISGNTGKLIF

SEQ ID NO: 436356 - protein, 14 aa, Homo sapiens
  CDR3 for beta chain variable domain of TCR clone 218178 (TRBV7-6, TRBJ2-7)
CASSFRQGADEQYF

SEQ ID NO: 436357 - protein, 10 aa, Homo sapiens
  CDR3 for alpha chain variable domain of TCR clone 218179 (TRAV1-2, TRAJ20)
CALNDYKLSF

SEQ ID NO: 436358 - protein, 15 aa, Homo sapiens
  CDR3 for beta chain variable domain of TCR clone 218179 (TRBV9, TRBJ2-7)
CASSPTGTSGYEQYF

SEQ ID NO: 436359 - protein, 14 aa, Homo sapiens
  CDR3 for alpha chain variable domain of TCR clone 218180 (TRAV1-2, TRAJ16)
CAVNRLSDGQKLLF

SEQ ID NO: 436360 - protein, 15 aa, Homo sapiens
  CDR3 for beta chain variable domain of TCR clone 218180 (TRBV7-9, TRBJ2-2)
CASGPLDTFPGELFF

SEQ ID NO: 436361 - protein, 15 aa, Homo sapiens
  CDR3 for alpha chain variable domain of TCR clone 218181 (TRAV21, TRAJ40)
CAVRPQTSGTYKYIF

SEQ ID NO: 436362 - protein, 13 aa, Homo sapiens
  CDR3 for beta chain variable domain of TCR clone 218181 (TRBV7-2, TRBJ2-2)
CASSSVRAGEMFF

SEQ ID NO: 436363 - protein, 11 aa, Homo sapiens
  CDR3 for alpha chain variable domain of TCR clone 218182 (TRAV8-3, TRAJ49)
CAVNTGNQFYF

SEQ ID NO: 436364 - protein, 17 aa, Homo sapiens
  CDR3 for beta chain variable domain of TCR clone 218182 (TRBV13, TRBJ2-3)
CASSLSRVAGGRNTQYF

SEQ ID NO: 436365 - protein, 12 aa, Homo sapiens
  CDR3 for alpha chain variable domain of TCR clone 218183 (TRAV41, TRAJ45)
CAVGRGADGLTF

SEQ ID NO: 436366 - protein, 16 aa, Homo sapiens
  CDR3 for beta chain variable domain of TCR clone 218183 (TRBV10-3, TRBJ2-1)
CAISGVGDGGGGEQFF

SEQ ID NO: 436367 - protein, 15 aa, Homo sapiens
  CDR3 for alpha chain variable domain of TCR clone 218184 (TRAV3, TRAJ17)
CAVSPEEAAGNKLTF

SEQ ID NO: 436368 - protein, 12 aa, Homo sapiens
  CDR3 for beta chain variable domain of TCR clone 218184 (TRBV7-9, TRBJ1-6)
CASSLMTSPLHF

SEQ ID NO: 436369 - protein, 15 aa, Homo sapiens
  CDR3 for alpha chain variable domain of TCR clone 218185 (TRAV26-1, TRAJ29)
CIVRVEGSGNTPLFF

SEQ ID NO: 436370 - protein, 18 aa, Homo sapiens
  CDR3 for beta chain variable domain of TCR clone 218185 (TRBV5-5, TRBJ1-5)
CASSLRQVKGSSNQPQHF

SEQ ID NO: 436371 - protein, 14 aa, Homo sapiens
  CDR3 for alpha chain variable domain of TCR clone 218186 (TRAV12-2, TRAJ40)
CAVKIPSGTYKYIF

SEQ ID NO: 436372 - protein, 15 aa, Homo sapiens
  CDR3 for beta chain variable domain of TCR clone 218186 (TRBV28, TRBJ2-1)
CASRTASGFSRAQFF

SEQ ID NO: 436373 - protein, 16 aa, Homo sapiens
  CDR3 for alpha chain variable domain of TCR clone 218187 (TRAV21, TRAJ17)
CAVRPGEEAAGNKLTF

SEQ ID NO: 436374 - protein, 16 aa, Homo sapiens
  CDR3 for beta chain variable domain of TCR clone 218187 (TRBV2, TRBJ2-7)
CASGEPWTGPSYEQYF

SEQ ID NO: 436375 - protein, 13 aa, Homo sapiens
  CDR3 for alpha chain variable domain of TCR clone 218188 (TRAV2, TRAJ15)
CAVASQAGTALIF

SEQ ID NO: 436376 - protein, 15 aa, Homo sapiens
  CDR3 for beta chain variable domain of TCR clone 218188 (TRBV20-1, TRBJ2-7)
CSARDRVAGMDEQYF

SEQ ID NO: 436377 - protein, 12 aa, Homo sapiens
  CDR3 for alpha chain variable domain of TCR clone 218189 (TRAV21, TRAJ11)
CAATSGYSTPTF

SEQ ID NO: 436378 - protein, 14 aa, Homo sapiens
  CDR3 for beta chain variable domain of TCR clone 218189 (TRBV20-1, TRBJ2-7)
CSAPELAGVGEQYF

SEQ ID NO: 436379 - protein, 15 aa, Homo sapiens
  CDR3 for alpha chain variable domain of TCR clone 218190 (TRAV14/DV4, TRAJ9)
CAMREGNTGGFKTIF

SEQ ID NO: 436380 - protein, 14 aa, Homo sapiens
  CDR3 for beta chain variable domain of TCR clone 218190 (TRBV20-1, TRBJ2-1)
CSAQIGGSANEQFF

SEQ ID NO: 436381 - protein, 14 aa, Homo sapiens
  CDR3 for alpha chain variable domain of TCR clone 218191 (TRAV1-2, TRAJ16)
CAVNRFSDGQKLLF

SEQ ID NO: 436382 - protein, 12 aa, Homo sapiens
  CDR3 for beta chain variable domain of TCR clone 218191 (TRBV11-2, TRBJ2-2)
CASSLGVGELFF

SEQ ID NO: 436383 - protein, 14 aa, Homo sapiens
  CDR3 for alpha chain variable domain of TCR clone 218192 (TRAV26-1, TRAJ38)
CIADNAGNNRKLIW

SEQ ID NO: 436384 - protein, 13 aa, Homo sapiens
  CDR3 for beta chain variable domain of TCR clone 218192 (TRBV20-1, TRBJ2-7)
LTSGRLSSYEQYF

SEQ ID NO: 436385 - protein, 14 aa, Homo sapiens
  CDR3 for alpha chain variable domain of TCR clone 218193 (TRAV8-6, TRAJ5)
CAVSVDTGRRALTF

SEQ ID NO: 436386 - protein, 15 aa, Homo sapiens
  CDR3 for beta chain variable domain of TCR clone 218193 (TRBV18, TRBJ2-1)
CASSPQSASYNEQFF

SEQ ID NO: 436387 - protein, 13 aa, Homo sapiens
  CDR3 for alpha chain variable domain of TCR clone 218194 (TRAV29/DV5, TRAJ34)
CAARVDNTDKLIF

SEQ ID NO: 436388 - protein, 14 aa, Homo sapiens
  CDR3 for beta chain variable domain of TCR clone 218194 (TRBV7-2, TRBJ2-7)
CASSPKTSFYEQYF

SEQ ID NO: 436389 - protein, 11 aa, Homo sapiens
  CDR3 for alpha chain variable domain of TCR clone 218195 (TRAV2, TRAJ13)
CASGGYQKVTF

SEQ ID NO: 436390 - protein, 16 aa, Homo sapiens
  CDR3 for beta chain variable domain of TCR clone 218195 (TRBV28, TRBJ1-5)
CASSLTGQGWNQPQHF

SEQ ID NO: 436391 - protein, 18 aa, Homo sapiens
  CDR3 for alpha chain variable domain of TCR clone 218196 (TRAV26-2, TRAJ45)
CILRVDKYSGGGADALTF

SEQ ID NO: 436392 - protein, 16 aa, Homo sapiens
  CDR3 for beta chain variable domain of TCR clone 218196 (TRBV2, TRBJ1-4)
CASNLLQGATNEKLFF

SEQ ID NO: 436393 - protein, 14 aa, Homo sapiens
  CDR3 for alpha chain variable domain of TCR clone 218197 (TRAV17, TRAJ16)
CATADFSDGQKLLF

SEQ ID NO: 436394 - protein, 14 aa, Homo sapiens
  CDR3 for beta chain variable domain of TCR clone 218197 (TRBV5-1, TRBJ2-7)
CASSRGESLYEQYF

SEQ ID NO: 436395 - protein, 11 aa, Homo sapiens
  CDR3 for alpha chain variable domain of TCR clone 218198 (TRAV2, TRAJ33)
CAVESNYQLIW

SEQ ID NO: 436396 - protein, 15 aa, Homo sapiens
  CDR3 for beta chain variable domain of TCR clone 218198 (TRBV19, TRBJ1-1)
CGSTSGQIQNTEAFF

SEQ ID NO: 436397 - protein, 15 aa, Homo sapiens
  CDR3 for alpha chain variable domain of TCR clone 218199 (TRAV8-4, TRAJ36)
CAVRKSWTGANNLFF

SEQ ID NO: 436398 - protein, 17 aa, Homo sapiens
  CDR3 for beta chain variable domain of TCR clone 218199 (TRBV3-1, TRBJ2-2)
CASSHDSQGPNTGELFF

SEQ ID NO: 436399 - protein, 12 aa, Homo sapiens
  CDR3 for alpha chain variable domain of TCR clone 218200 (TRAV13-1, TRAJ5)
CAAKAGRRALTF

SEQ ID NO: 436400 - protein, 16 aa, Homo sapiens
  CDR3 for beta chain variable domain of TCR clone 218200 (TRBV7-9, TRBJ2-2)
CASSGFGGANTGELFF

SEQ ID NO: 436401 - protein, 12 aa, Homo sapiens
  CDR3 for alpha chain variable domain of TCR clone 218201 (TRAV2, TRAJ33)
CAVPDSNYQLIW

SEQ ID NO: 436402 - protein, 20 aa, Homo sapiens
  CDR3 for beta chain variable domain of TCR clone 218201 (TRBV19, TRBJ2-1)
CASSVSRTVTSTRLNNEQFF

SEQ ID NO: 436403 - protein, 11 aa, Homo sapiens
  CDR3 for alpha chain variable domain of TCR clone 218202 (TRAV17, TRAJ39)
CATNPYNMPTF

SEQ ID NO: 436404 - protein, 13 aa, Homo sapiens
  CDR3 for beta chain variable domain of TCR clone 218202 (TRBV7-8, TRBJ2-1)
CASTREAVDEQFF

SEQ ID NO: 436405 - protein, 10 aa, Homo sapiens
  CDR3 for alpha chain variable domain of TCR clone 218203 (TRAV1-2, TRAJ31)
CAFFDARLMF

SEQ ID NO: 436406 - protein, 16 aa, Homo sapiens
  CDR3 for beta chain variable domain of TCR clone 218203 (TRBV28, TRBJ2-5)
CASSFSPAGGWETQYF

SEQ ID NO: 436407 - protein, 14 aa, Homo sapiens
  CDR3 for alpha chain variable domain of TCR clone 218204 (TRAV12-2, TRAJ45)
CALPERGGADGLTF

SEQ ID NO: 436408 - protein, 14 aa, Homo sapiens
  CDR3 for beta chain variable domain of TCR clone 218204 (TRBV18, TRBJ1-5)
CASSPGNTNQPQHF

SEQ ID NO: 436409 - protein, 11 aa, Homo sapiens
  CDR3 for alpha chain variable domain of TCR clone 218205 (TRAV8-4, TRAJ26)
CAGGEGQNLFF

SEQ ID NO: 436410 - protein, 17 aa, Homo sapiens
  CDR3 for beta chain variable domain of TCR clone 218205 (TRBV7-9, TRBJ2-3)
CASSPTVAGDLTDTQYF

SEQ ID NO: 436411 - protein, 12 aa, Homo sapiens
  CDR3 for alpha chain variable domain of TCR clone 218206 (TRAV27, TRAJ47)
CAGMEYGSKLVF

SEQ ID NO: 436412 - protein, 14 aa, Homo sapiens
  CDR3 for beta chain variable domain of TCR clone 218206 (TRBV2, TRBJ2-2)
CASSLFGGNGELFF

SEQ ID NO: 436413 - protein, 15 aa, Homo sapiens
  CDR3 for alpha chain variable domain of TCR clone 218207 (TRAV8-3, TRAJ32)
CAVGTYGGATNKLIF

SEQ ID NO: 436414 - protein, 14 aa, Homo sapiens
  CDR3 for beta chain variable domain of TCR clone 218207 (TRBV29-1, TRBJ2-2)
CSVLAETNTGELFF

SEQ ID NO: 436415 - protein, 13 aa, Homo sapiens
  CDR3 for alpha chain variable domain of TCR clone 218208 (TRAV2, TRAJ40)
CAVVTSGTHKYIF

SEQ ID NO: 436416 - protein, 14 aa, Homo sapiens
  CDR3 for beta chain variable domain of TCR clone 218208 (TRBV19, TRBJ2-1)
CASLTFVLSGEQFF

SEQ ID NO: 436417 - protein, 14 aa, Homo sapiens
  CDR3 for alpha chain variable domain of TCR clone 218209 (TRAV29/DV5, TRAJ47)
CAASSIEYGNKLVF

SEQ ID NO: 436418 - protein, 15 aa, Homo sapiens
  CDR3 for beta chain variable domain of TCR clone 218209 (TRBV11-2, TRBJ1-2)
CASSLEGVQRNGYTF

SEQ ID NO: 436419 - protein, 14 aa, Homo sapiens
  CDR3 for alpha chain variable domain of TCR clone 218210 (TRAV17, TRAJ31)
CATVLRNNNARLMF

SEQ ID NO: 436420 - protein, 14 aa, Homo sapiens
  CDR3 for beta chain variable domain of TCR clone 218210 (TRBV12-4, TRBJ2-5)
CASRLWQKQETQYF

SEQ ID NO: 436421 - protein, 12 aa, Homo sapiens
  CDR3 for alpha chain variable domain of TCR clone 218211 (TRAV3, TRAJ31)
CAVRDGNARLMF

SEQ ID NO: 436422 - protein, 18 aa, Homo sapiens
  CDR3 for beta chain variable domain of TCR clone 218211 (TRBV7-2, TRBJ2-3)
CASSLKREGSGITDTQYL

SEQ ID NO: 436423 - protein, 12 aa, Homo sapiens
  CDR3 for alpha chain variable domain of TCR clone 218212 (TRAV12-3, TRAJ17)
RAMTLTGDKLTF

SEQ ID NO: 436424 - protein, 15 aa, Homo sapiens
  CDR3 for beta chain variable domain of TCR clone 218212 (TRBV10-2, TRBJ2-6)
CASSEQGTGANVLTF

SEQ ID NO: 436425 - protein, 12 aa, Homo sapiens
  CDR3 for alpha chain variable domain of TCR clone 218213 (TRAV36/DV7, TRAJ54)
CAVVRGAQTLVF

SEQ ID NO: 436426 - protein, 18 aa, Homo sapiens
  CDR3 for beta chain variable domain of TCR clone 218213 (TRBV20-1, TRBJ2-3)
CSASGLAGGPGTTDTQYF

SEQ ID NO: 436427 - protein, 12 aa, Homo sapiens
  CDR3 for alpha chain variable domain of TCR clone 218214 (TRAV26-1, TRAJ17)
CIVRSAGNKLTF

SEQ ID NO: 436428 - protein, 12 aa, Homo sapiens
  CDR3 for beta chain variable domain of TCR clone 218214 (TRBV7-9, TRBJ2-7)
CASSLEGDEQYF

SEQ ID NO: 436429 - protein, 14 aa, Homo sapiens
  CDR3 for alpha chain variable domain of TCR clone 218215 (TRAV27, TRAJ22)
CAGVSVLGKRQLTF

SEQ ID NO: 436430 - protein, 13 aa, Homo sapiens
  CDR3 for beta chain variable domain of TCR clone 218215 (TRBV7-9, TRBJ1-2)
CASSLKQNYGDNF

SEQ ID NO: 436431 - protein, 14 aa, Homo sapiens
  CDR3 for alpha chain variable domain of TCR clone 218216 (TRAV8-3, TRAJ39)
CAVGAWGAGNMLTF

SEQ ID NO: 436432 - protein, 16 aa, Homo sapiens
  CDR3 for beta chain variable domain of TCR clone 218216 (TRBV7-2, TRBJ1-3)
CASSAGRVLSGNTIYF

SEQ ID NO: 436433 - protein, 13 aa, Homo sapiens
  CDR3 for alpha chain variable domain of TCR clone 218217 (TRAV21, TRAJ20)
CAVGLRVDYKLSF

SEQ ID NO: 436434 - protein, 13 aa, Homo sapiens
  CDR3 for beta chain variable domain of TCR clone 218217 (TRBV19, TRBJ2-7)
CASSTTGNYEQYF

SEQ ID NO: 436435 - protein, 19 aa, Homo sapiens
  CDR3 for alpha chain variable domain of TCR clone 218218 (TRAV3, TRAJ6)
CAVRDRNPSRSGGSYIPTF

SEQ ID NO: 436436 - protein, 15 aa, Homo sapiens
  CDR3 for beta chain variable domain of TCR clone 218218 (TRBV18, TRBJ2-7)
CASSRTFVGSYEQYF

SEQ ID NO: 436437 - protein, 14 aa, Homo sapiens
  CDR3 for alpha chain variable domain of TCR clone 218219 (TRAV19, TRAJ5)
CALKKDTGRRELTF

SEQ ID NO: 436438 - protein, 15 aa, Homo sapiens
  CDR3 for beta chain variable domain of TCR clone 218219 (TRBV2, TRBJ2-5)
CASSEAGTRQETQYF

SEQ ID NO: 436439 - protein, 18 aa, Homo sapiens
  CDR3 for alpha chain variable domain of TCR clone 218220 (TRAV29/DV5, TRAJ52)
CAAGFRGAGGTSSGKLTF

SEQ ID NO: 436440 - protein, 16 aa, Homo sapiens
  CDR3 for beta chain variable domain of TCR clone 218220 (TRBV7-3, TRBJ2-2)
YASSLKRGTLSGELFF

SEQ ID NO: 436441 - protein, 13 aa, Homo sapiens
  CDR3 for alpha chain variable domain of TCR clone 218221 (TRAV2, TRAJ40)
CAVVTSGTYKYSF

SEQ ID NO: 436442 - protein, 14 aa, Homo sapiens
  CDR3 for beta chain variable domain of TCR clone 218221 (TRBV19, TRBJ2-1)
CASPTFVLSGEKFF

SEQ ID NO: 436443 - protein, 13 aa, Homo sapiens
  CDR3 for alpha chain variable domain of TCR clone 218222 (TRAV8-3, TRAJ36)
CAVGATGANNLFF

SEQ ID NO: 436444 - protein, 13 aa, Homo sapiens
  CDR3 for beta chain variable domain of TCR clone 218222 (TRBV12-4, TRBJ1-2)
CASSLRQGRGYTF

SEQ ID NO: 436445 - protein, 14 aa, Homo sapiens
  CDR3 for alpha chain variable domain of TCR clone 218223 (TRAV12-2, TRAJ24)
CAVTPADSWGKLQF

SEQ ID NO: 436446 - protein, 15 aa, Homo sapiens
  CDR3 for beta chain variable domain of TCR clone 218223 (TRBV6-5, TRBJ2-1)
CASSYDAGAGNEQFF

SEQ ID NO: 436447 - protein, 15 aa, Homo sapiens
  CDR3 for alpha chain variable domain of TCR clone 218224 (TRAV17, TRAJ22)
CSTVAPSGSARQLTF

SEQ ID NO: 436448 - protein, 16 aa, Homo sapiens
  CDR3 for beta chain variable domain of TCR clone 218224 (TRBV10-3, TRBJ2-7)
CAISADFADRPYEQYF

SEQ ID NO: 436449 - protein, 11 aa, Homo sapiens
  CDR3 for alpha chain variable domain of TCR clone 218225 (TRAV35, TRAJ30)
CAPGGDDKIIF

SEQ ID NO: 436450 - protein, 22 aa, Homo sapiens
  CDR3 for beta chain variable domain of TCR clone 218225 (TRBV7-6, TRBJ2-1)
RGTRPCIAVPAAWGGGADEQFF

SEQ ID NO: 436451 - protein, 13 aa, Homo sapiens
  CDR3 for alpha chain variable domain of TCR clone 218226 (TRAV36/DV7, TRAJ38)
CVANAGTNRKLIW

SEQ ID NO: 436452 - protein, 14 aa, Homo sapiens
  CDR3 for beta chain variable domain of TCR clone 218226 (TRBV7-2, TRBJ2-7)
CASSLRWEVNEQYF

SEQ ID NO: 436453 - protein, 16 aa, Homo sapiens
  CDR3 for alpha chain variable domain of TCR clone 218227 (TRAV3, TRAJ32)
CCERRNYGGATTKLIF

SEQ ID NO: 436454 - protein, 13 aa, Homo sapiens
  CDR3 for beta chain variable domain of TCR clone 218227 (TRBV2, TRBJ1-1)
CASSEGGNTEAFF

SEQ ID NO: 436455 - protein, 15 aa, Homo sapiens
  CDR3 for alpha chain variable domain of TCR clone 218228 (TRAV3, TRAJ47)
CAVRDIGEYGNKLVF

SEQ ID NO: 436456 - protein, 15 aa, Homo sapiens
  CDR3 for beta chain variable domain of TCR clone 218228 (TRBV3-1, TRBJ1-2)
CASSHPGTPGYGYTF

SEQ ID NO: 436457 - protein, 14 aa, Homo sapiens
  CDR3 for alpha chain variable domain of TCR clone 218229 (TRAV12-1, TRAJ17)
CVVNYKAAGNKLTV

SEQ ID NO: 436458 - protein, 17 aa, Homo sapiens
  CDR3 for beta chain variable domain of TCR clone 218229 (TRBV11-2, TRBJ2-1)
CASSLYPPGVEYNEQFF

SEQ ID NO: 436459 - protein, 12 aa, Homo sapiens
  CDR3 for alpha chain variable domain of TCR clone 218230 (TRAV26-1, TRAJ48)
CIAVFGNEKLTF

SEQ ID NO: 436460 - protein, 14 aa, Homo sapiens
  CDR3 for beta chain variable domain of TCR clone 218230 (TRBV7-3, TRBJ1-1)
CASSLKGGNTEAFF

SEQ ID NO: 436461 - protein, 16 aa, Homo sapiens
  CDR3 for alpha chain variable domain of TCR clone 218231 (TRAV3, TRAJ10)
CAVRDMRAGGGSKLTF

SEQ ID NO: 436462 - protein, 20 aa, Homo sapiens
  CDR3 for beta chain variable domain of TCR clone 218231 (TRBV28, TRBJ2-1)
CASTPIGRSPGLAGGNEQFF

SEQ ID NO: 436463 - protein, 12 aa, Homo sapiens
  CDR3 for alpha chain variable domain of TCR clone 218232 (TRAV30, TRAJ43)
CGTEERCNDMRF

SEQ ID NO: 436464 - protein, 13 aa, Homo sapiens
  CDR3 for beta chain variable domain of TCR clone 218232 (TRBV12-4, TRBJ1-2)
CASSSGSKDGYTF

SEQ ID NO: 436465 - protein, 12 aa, Homo sapiens
  CDR3 for alpha chain variable domain of TCR clone 218233 (TRAV35, TRAJ12)
CAGMDSSYKLIF

SEQ ID NO: 436466 - protein, 20 aa, Homo sapiens
  CDR3 for beta chain variable domain of TCR clone 218233 (TRBV28, TRBJ2-1)
CASTPIGRSPGLAGGNEQFF

SEQ ID NO: 436467 - protein, 13 aa, Homo sapiens
  CDR3 for alpha chain variable domain of TCR clone 218234 (TRAV16, TRAJ10)
CAPARDEETNSPL

SEQ ID NO: 436468 - protein, 15 aa, Homo sapiens
  CDR3 for beta chain variable domain of TCR clone 218234 (TRBV7-3, TRBJ2-1)
CASSQRGGALIEQFF

SEQ ID NO: 436469 - protein, 12 aa, Homo sapiens
  CDR3 for alpha chain variable domain of TCR clone 218235 (TRAV21, TRAJ27)
CAANTNAGKSTF

SEQ ID NO: 436470 - protein, 20 aa, Homo sapiens
  CDR3 for beta chain variable domain of TCR clone 218235 (TRBV28, TRBJ2-1)
CASTPIGRSPGLAGGNEQFF

SEQ ID NO: 436471 - protein, 13 aa, Homo sapiens
  CDR3 for alpha chain variable domain of TCR clone 218236 (TRAV27, TRAJ56)
FAGKPGANSKLTF

SEQ ID NO: 436472 - protein, 15 aa, Homo sapiens
  CDR3 for beta chain variable domain of TCR clone 218236 (TRBV6-1, TRBJ2-3)
CASSERWDSTDTQYF

SEQ ID NO: 436473 - protein, 17 aa, Homo sapiens
  CDR3 for alpha chain variable domain of TCR clone 218237 (TRAV8-3, TRAJ52)
CAVGAEAGGTSYGKLPF

SEQ ID NO: 436474 - protein, 15 aa, Homo sapiens
  CDR3 for beta chain variable domain of TCR clone 218237 (TRBV5-1, TRBJ2-5)
CASSRQGLGQETQYF

SEQ ID NO: 436475 - protein, 16 aa, Homo sapiens
  CDR3 for alpha chain variable domain of TCR clone 218238 (TRAV8-4, TRAJ45)
CAVSAGVGGGADGLTF

SEQ ID NO: 436476 - protein, 14 aa, Homo sapiens
  CDR3 for beta chain variable domain of TCR clone 218238 (TRBV19, TRBJ1-4)
CASAIEAEGEKLFF

SEQ ID NO: 436477 - protein, 11 aa, Homo sapiens
  CDR3 for alpha chain variable domain of TCR clone 218239 (TRAV1-1, TRAJ23)
CAVRQGGKPIF

SEQ ID NO: 436478 - protein, 13 aa, Homo sapiens
  CDR3 for beta chain variable domain of TCR clone 218239 (TRBV7-3, TRBJ1-1)
CASSQDWGAEAFF

SEQ ID NO: 436479 - protein, 13 aa, Homo sapiens
  CDR3 for alpha chain variable domain of TCR clone 218240 (TRAV12-3, TRAJ43)
CAMIRPNNNDMRF

SEQ ID NO: 436480 - protein, 12 aa, Homo sapiens
  CDR3 for beta chain variable domain of TCR clone 218240 (TRBV11-2, TRBJ2-5)
CASSLGQETHYF

SEQ ID NO: 436481 - protein, 14 aa, Homo sapiens
  CDR3 for alpha chain variable domain of TCR clone 218241 (TRAV1-2, TRAJ16)
CAVNRSSDGQKLLF

SEQ ID NO: 436482 - protein, 12 aa, Homo sapiens
  CDR3 for beta chain variable domain of TCR clone 218241 (TRBV11-2, TRBJ2-2)
CASSLPTGELFF

SEQ ID NO: 436483 - protein, 13 aa, Homo sapiens
  CDR3 for alpha chain variable domain of TCR clone 218242 (TRAV27, TRAJ45)
CRSSGGGADGLTF

SEQ ID NO: 436484 - protein, 13 aa, Homo sapiens
  CDR3 for beta chain variable domain of TCR clone 218242 (TRBV10-2, TRBJ2-7)
CASGASGGYEQYF

SEQ ID NO: 436485 - protein, 15 aa, Homo sapiens
  CDR3 for alpha chain variable domain of TCR clone 218243 (TRAV17, TRAJ57)
CATGPSQGGSEKLVF

SEQ ID NO: 436486 - protein, 13 aa, Homo sapiens
  CDR3 for beta chain variable domain of TCR clone 218243 (TRBV7-3, TRBJ1-1)
CASSQEWGAEAFF

SEQ ID NO: 436487 - protein, 13 aa, Homo sapiens
  CDR3 for alpha chain variable domain of TCR clone 218244 (TRAV1-1, TRAJ31)
CASYLNNNARLTF

SEQ ID NO: 436488 - protein, 14 aa, Homo sapiens
  CDR3 for beta chain variable domain of TCR clone 218244 (TRBV4-1, TRBJ2-5)
CASSRSGSGETQYF

SEQ ID NO: 436489 - protein, 12 aa, Homo sapiens
  CDR3 for alpha chain variable domain of TCR clone 218245 (TRAV21, TRAJ41)
CAVREFRVCTQL

SEQ ID NO: 436490 - protein, 15 aa, Homo sapiens
  CDR3 for beta chain variable domain of TCR clone 218245 (TRBV18, TRBJ1-5)
CASSPQARSNKPQHF

SEQ ID NO: 436491 - protein, 14 aa, Homo sapiens
  CDR3 for alpha chain variable domain of TCR clone 218246 (TRAV13-1, TRAJ52)
CAANGGTSYGKLTF

SEQ ID NO: 436492 - protein, 15 aa, Homo sapiens
  CDR3 for beta chain variable domain of TCR clone 218246 (TRBV7-2, TRBJ1-2)
CASSLATDRGLGYTF

SEQ ID NO: 436493 - protein, 16 aa, Homo sapiens
  CDR3 for alpha chain variable domain of TCR clone 218247 (TRAV8-3, TRAJ13)
CAVGAYPSGGYQNVTF

SEQ ID NO: 436494 - protein, 15 aa, Homo sapiens
  CDR3 for beta chain variable domain of TCR clone 218247 (TRBV19, TRBJ1-5)
CASSIVWADNQPQHS

SEQ ID NO: 436495 - protein, 18 aa, Homo sapiens
  CDR3 for alpha chain variable domain of TCR clone 218248 (TRAV12-3, TRAJ52)
CAMSVGGAGGTSYGKLTF

SEQ ID NO: 436496 - protein, 15 aa, Homo sapiens
  CDR3 for beta chain variable domain of TCR clone 218248 (TRBV7-2, TRBJ2-1)
CASRKTGSSYNEQFF

SEQ ID NO: 436497 - protein, 14 aa, Homo sapiens
  CDR3 for alpha chain variable domain of TCR clone 218249 (TRAV25, TRAJ35)
CVRRMEGFGNVLHC

SEQ ID NO: 436498 - protein, 13 aa, Homo sapiens
  CDR3 for beta chain variable domain of TCR clone 218249 (TRBV7-2, TRBJ1-4)
CASSLAGLEKLFF

SEQ ID NO: 436499 - protein, 18 aa, Homo sapiens
  CDR3 for alpha chain variable domain of TCR clone 218250 (TRAV21, TRAJ52)
CAVRPSPAGGTSYGKLAF

SEQ ID NO: 436500 - protein, 15 aa, Homo sapiens
  CDR3 for beta chain variable domain of TCR clone 218250 (TRBV20-1, TRBJ2-5)
CSATPLTGDQETQYF

SEQ ID NO: 436501 - protein, 19 aa, Homo sapiens
  CDR3 for alpha chain variable domain of TCR clone 218251 (TRAV8-3, TRAJ8)
LSTSVLWDPMNTGFQKLVF

SEQ ID NO: 436502 - protein, 14 aa, Homo sapiens
  CDR3 for beta chain variable domain of TCR clone 218251 (TRBV7-9, TRBJ1-1)
CASSSTKGNTEAFF

SEQ ID NO: 436503 - protein, 14 aa, Homo sapiens
  CDR3 for alpha chain variable domain of TCR clone 218252 (TRAV12-3, TRAJ10)
SHLPLTGGGNKLTF

SEQ ID NO: 436504 - protein, 12 aa, Homo sapiens
  CDR3 for beta chain variable domain of TCR clone 218252 (TRBV11-2, TRBJ2-2)
CASSLGVGELFF

SEQ ID NO: 436505 - protein, 15 aa, Homo sapiens
  CDR3 for alpha chain variable domain of TCR clone 218253 (TRAV3, TRAJ5)
CAVRDRKTGRRARTF

SEQ ID NO: 436506 - protein, 15 aa, Homo sapiens
  CDR3 for beta chain variable domain of TCR clone 218253 (TRBV7-9, TRBJ2-2)
CASGPLDTFPGELFF

SEQ ID NO: 436507 - protein, 19 aa, Homo sapiens
  CDR3 for alpha chain variable domain of TCR clone 218254 (TRAV1-2, TRAJ26)
CLLPLCCERPDNYGQNFVF

SEQ ID NO: 436508 - protein, 17 aa, Homo sapiens
  CDR3 for beta chain variable domain of TCR clone 218254 (TRBV28, TRBJ2-5)
CASSGEGGLAGAETQYF

SEQ ID NO: 436509 - protein, 16 aa, Homo sapiens
  CDR3 for alpha chain variable domain of TCR clone 218255 (TRAV30, TRAJ24)
CGTEIVDADSWGKFQF

SEQ ID NO: 436510 - protein, 13 aa, Homo sapiens
  CDR3 for beta chain variable domain of TCR clone 218255 (TRBV27, TRBJ2-7)
CASSSGDSYEQYF

SEQ ID NO: 436511 - protein, 17 aa, Homo sapiens
  CDR3 for alpha chain variable domain of TCR clone 218256 (TRAV3, TRAJ6)
CAVRDGPRAGGSYIPTF

SEQ ID NO: 436512 - protein, 14 aa, Homo sapiens
  CDR3 for beta chain variable domain of TCR clone 218256 (TRBV2, TRBJ1-2)
CASNPDRDNYGYTF

SEQ ID NO: 436513 - protein, 12 aa, Homo sapiens
  CDR3 for alpha chain variable domain of TCR clone 218257 (TRAV16, TRAJ9)
CALRAGCFKTIF

SEQ ID NO: 436514 - protein, 13 aa, Homo sapiens
  CDR3 for beta chain variable domain of TCR clone 218257 (TRBV4-3, TRBJ1-1)
CASSQVEGSMAFF

SEQ ID NO: 436515 - protein, 14 aa, Homo sapiens
  CDR3 for alpha chain variable domain of TCR clone 218258 (TRAV9-2, TRAJ39)
CALYIYNAGNMLTF

SEQ ID NO: 436516 - protein, 16 aa, Homo sapiens
  CDR3 for beta chain variable domain of TCR clone 218258 (TRBV5-1, TRBJ2-5)
CASSSSGLGGAETQYF

SEQ ID NO: 436517 - protein, 15 aa, Homo sapiens
  CDR3 for alpha chain variable domain of TCR clone 218259 (TRAV21, TRAJ53)
CATLNSGGSNYKLTF

SEQ ID NO: 436518 - protein, 15 aa, Homo sapiens
  CDR3 for beta chain variable domain of TCR clone 218259 (TRBV20-1, TRBJ2-1)
CSASSAGSSYNEQFF

SEQ ID NO: 436519 - protein, 12 aa, Homo sapiens
  CDR3 for alpha chain variable domain of TCR clone 218260 (TRAV38-1, TRAJ20)
CASIWNDYKLSF

SEQ ID NO: 436520 - protein, 14 aa, Homo sapiens
  CDR3 for beta chain variable domain of TCR clone 218260 (TRBV19, TRBJ2-1)
CASSMGSGATEQFF

SEQ ID NO: 436521 - protein, 14 aa, Homo sapiens
  CDR3 for alpha chain variable domain of TCR clone 218261 (TRAV12-3, TRAJ10)
SHLPLAGGGNKLTF

SEQ ID NO: 436522 - protein, 16 aa, Homo sapiens
  CDR3 for beta chain variable domain of TCR clone 218261 (TRBV19, TRBJ2-1)
CASSKAGPSSTMSSSS

SEQ ID NO: 436523 - protein, 15 aa, Homo sapiens
  CDR3 for alpha chain variable domain of TCR clone 218262 (TRAV36/DV7, TRAJ57)
CSVGATQGGSDKLVF

SEQ ID NO: 436524 - protein, 14 aa, Homo sapiens
  CDR3 for beta chain variable domain of TCR clone 218262 (TRBV19, TRBJ2-1)
CASPTFVLSGEQFF

SEQ ID NO: 436525 - protein, 13 aa, Homo sapiens
  CDR3 for alpha chain variable domain of TCR clone 218263 (TRAV16, TRAJ11)
CALTQSGYSTLTF

SEQ ID NO: 436526 - protein, 14 aa, Homo sapiens
  CDR3 for beta chain variable domain of TCR clone 218263 (TRBV19, TRBJ2-7)
CASGTTRSSYEQYF

SEQ ID NO: 436527 - protein, 14 aa, Homo sapiens
  CDR3 for alpha chain variable domain of TCR clone 218264 (TRAV29/DV5, TRAJ45)
CAASFRVGADGLTF

SEQ ID NO: 436528 - protein, 13 aa, Homo sapiens
  CDR3 for beta chain variable domain of TCR clone 218264 (TRBV12-5, TRBJ2-3)
CASGDRQSDTQYF

SEQ ID NO: 436529 - protein, 14 aa, Homo sapiens
  CDR3 for alpha chain variable domain of TCR clone 218265 (TRAV12-2, TRAJ13)
CAVKKTGGYQKVTF

SEQ ID NO: 436530 - protein, 16 aa, Homo sapiens
  CDR3 for beta chain variable domain of TCR clone 218265 (TRBV7-2, TRBJ1-5)
CASSPWGPEGNQPQHF

SEQ ID NO: 436531 - protein, 13 aa, Homo sapiens
  CDR3 for alpha chain variable domain of TCR clone 218266 (TRAV36/DV7, TRAJ54)
CAVDIQGAQKLVF

SEQ ID NO: 436532 - protein, 14 aa, Homo sapiens
  CDR3 for beta chain variable domain of TCR clone 218266 (TRBV7-2, TRBJ2-2)
CASRGQGAAGELFF

SEQ ID NO: 436533 - protein, 13 aa, Homo sapiens
  CDR3 for alpha chain variable domain of TCR clone 218267 (TRAV12-3, TRAJ16)
CAVQLSDGQKLLF

SEQ ID NO: 436534 - protein, 16 aa, Homo sapiens
  CDR3 for beta chain variable domain of TCR clone 218267 (TRBV7-9, TRBJ2-1)
CASSDVAGGSYNEQFF

SEQ ID NO: 436535 - protein, 16 aa, Homo sapiens
  CDR3 for alpha chain variable domain of TCR clone 218268 (TRAV3, TRAJ23)
CAVRDSSYNQGGKLIF

SEQ ID NO: 436536 - protein, 14 aa, Homo sapiens
  CDR3 for beta chain variable domain of TCR clone 218268 (TRBV19, TRBJ2-1)
CASPTFVLSGEQFF

SEQ ID NO: 436537 - protein, 14 aa, Homo sapiens
  CDR3 for alpha chain variable domain of TCR clone 218269 (TRAV35, TRAJ50)
CAGHRKTSYDKVIF

SEQ ID NO: 436538 - protein, 13 aa, Homo sapiens
  CDR3 for beta chain variable domain of TCR clone 218269 (TRBV27, TRBJ1-1)
CASSLSIGAEAFF

SEQ ID NO: 436539 - protein, 17 aa, Homo sapiens
  CDR3 for alpha chain variable domain of TCR clone 218270 (TRAV3, TRAJ6)
CAVRDGPRAGGSYIPTL

SEQ ID NO: 436540 - protein, 13 aa, Homo sapiens
  CDR3 for beta chain variable domain of TCR clone 218270 (TRBV15, TRBJ2-7)
CATSTTGHYEQYF

SEQ ID NO: 436541 - protein, 15 aa, Homo sapiens
  CDR3 for alpha chain variable domain of TCR clone 218271 (TRAV8-3, TRAJ6)
CAVGPLGGGSYIPTF

SEQ ID NO: 436542 - protein, 12 aa, Homo sapiens
  CDR3 for beta chain variable domain of TCR clone 218271 (TRBV7-8, TRBJ2-7)
CASSLGDREQYF

SEQ ID NO: 436543 - protein, 13 aa, Homo sapiens
  CDR3 for alpha chain variable domain of TCR clone 218272 (TRAV12-3, TRAJ7)
CAMTPYGNNRLAF

SEQ ID NO: 436544 - protein, 16 aa, Homo sapiens
  CDR3 for beta chain variable domain of TCR clone 218272 (TRBV20-1, TRBJ1-4)
CSARPYGGQLNEKLFF

SEQ ID NO: 436545 - protein, 17 aa, Homo sapiens
  CDR3 for alpha chain variable domain of TCR clone 218273 (TRAV3, TRAJ42)
CAVRDRDYGGSQGNLIF

SEQ ID NO: 436546 - protein, 14 aa, Homo sapiens
  CDR3 for beta chain variable domain of TCR clone 218273 (TRBV7-2, TRBJ2-5)
CASSPSGSSETQYF

SEQ ID NO: 436547 - protein, 14 aa, Homo sapiens
  CDR3 for alpha chain variable domain of TCR clone 218274 (TRAV12-2, TRAJ13)
CAVKTTGGYQKVPF

SEQ ID NO: 436548 - protein, 15 aa, Homo sapiens
  CDR3 for beta chain variable domain of TCR clone 218274 (TRBV27, TRBJ2-1)
CASSNGGGSSNEQFF

SEQ ID NO: 436549 - protein, 14 aa, Homo sapiens
  CDR3 for alpha chain variable domain of TCR clone 218275 (TRAV4, TRAJ30)
CLVGDMNRDEKIIF

SEQ ID NO: 436550 - protein, 15 aa, Homo sapiens
  CDR3 for beta chain variable domain of TCR clone 218275 (TRBV7-2, TRBJ2-7)
CASSLSSGRTYEQYF

SEQ ID NO: 436551 - protein, 11 aa, Homo sapiens
  CDR3 for alpha chain variable domain of TCR clone 218276 (TRAV26-1, TRAJ37)
CIVRVGRKLIF

SEQ ID NO: 436552 - protein, 20 aa, Homo sapiens
  CDR3 for beta chain variable domain of TCR clone 218276 (TRBV28, TRBJ2-1)
CASTPIGRSPGLAGGNEQFF

SEQ ID NO: 436553 - protein, 15 aa, Homo sapiens
  CDR3 for alpha chain variable domain of TCR clone 218277 (TRAV26-1, TRAJ22)
CIVRVSFWFCKATDL

SEQ ID NO: 436554 - protein, 13 aa, Homo sapiens
  CDR3 for beta chain variable domain of TCR clone 218277 (TRBV7-9, TRBJ1-2)
CASSLKENYGYTF

SEQ ID NO: 436555 - protein, 17 aa, Homo sapiens
  CDR3 for alpha chain variable domain of TCR clone 218278 (TRAV12-2, TRAJ6)
CAPQVPPRAGGSYIPTF

SEQ ID NO: 436556 - protein, 16 aa, Homo sapiens
  CDR3 for beta chain variable domain of TCR clone 218278 (TRBV19, TRBJ2-2)
CVSSTARASNTGELFF

SEQ ID NO: 436557 - protein, 16 aa, Homo sapiens
  CDR3 for alpha chain variable domain of TCR clone 218279 (TRAV30, TRAJ24)
CGTEIVDAYSWGKFQF

SEQ ID NO: 436558 - protein, 15 aa, Homo sapiens
  CDR3 for beta chain variable domain of TCR clone 218279 (TRBV6-1, TRBJ2-1)
CASSELRGQYNEQFF

SEQ ID NO: 436559 - protein, 15 aa, Homo sapiens
  CDR3 for alpha chain variable domain of TCR clone 218280 (TRAV3, TRAJ22)
CAVRDRGGSARQLTF

SEQ ID NO: 436560 - protein, 14 aa, Homo sapiens
  CDR3 for beta chain variable domain of TCR clone 218280 (TRBV2, TRBJ2-2)
CASRARGNTGELFF

SEQ ID NO: 436561 - protein, 12 aa, Homo sapiens
  CDR3 for alpha chain variable domain of TCR clone 218281 (TRAV17, TRAJ12)
CATLRSSYILIF

SEQ ID NO: 436562 - protein, 16 aa, Homo sapiens
  CDR3 for beta chain variable domain of TCR clone 218281 (TRBV28, TRBJ2-7)
CASSLFFETGGPEQYF

SEQ ID NO: 436563 - protein, 11 aa, Homo sapiens
  CDR3 for alpha chain variable domain of TCR clone 218282 (TRAV2, TRAJ13)
CASGGYQKVTF

SEQ ID NO: 436564 - protein, 12 aa, Homo sapiens
  CDR3 for beta chain variable domain of TCR clone 218282 (TRBV11-2, TRBJ2-2)
CASSLGGGEPLF

SEQ ID NO: 436565 - protein, 13 aa, Homo sapiens
  CDR3 for alpha chain variable domain of TCR clone 218283 (TRAV22, TRAJ29)
CAVGGSGDTPLVF

SEQ ID NO: 436566 - protein, 13 aa, Homo sapiens
  CDR3 for beta chain variable domain of TCR clone 218283 (TRBV4-2, TRBJ1-1)
CARSQAGNTEAFF

SEQ ID NO: 436567 - protein, 14 aa, Homo sapiens
  CDR3 for alpha chain variable domain of TCR clone 218284 (TRAV13-1, TRAJ35)
CAASKGGFGNVLHC

SEQ ID NO: 436568 - protein, 14 aa, Homo sapiens
  CDR3 for beta chain variable domain of TCR clone 218284 (TRBV7-3, TRBJ2-1)
CASSLGTSANEQFF

SEQ ID NO: 436569 - protein, 13 aa, Homo sapiens
  CDR3 for alpha chain variable domain of TCR clone 218285 (TRAV17, TRAJ5)
CALRGTGRRALTF

SEQ ID NO: 436570 - protein, 14 aa, Homo sapiens
  CDR3 for beta chain variable domain of TCR clone 218285 (TRBV10-2, TRBJ1-5)
CASSSTGRNQPQHF

SEQ ID NO: 436571 - protein, 13 aa, Homo sapiens
  CDR3 for alpha chain variable domain of TCR clone 218286 (TRAV1-1, TRAJ9)
CAAKNTVAFKTIF

SEQ ID NO: 436572 - protein, 14 aa, Homo sapiens
  CDR3 for beta chain variable domain of TCR clone 218286 (TRBV20-1, TRBJ2-1)
CSAQIGGSANEQFF

SEQ ID NO: 436573 - protein, 13 aa, Homo sapiens
  CDR3 for alpha chain variable domain of TCR clone 218287 (TRAV8-3, TRAJ43)
CAVGPDNNNDMRF

SEQ ID NO: 436574 - protein, 19 aa, Homo sapiens
  CDR3 for beta chain variable domain of TCR clone 218287 (TRBV7-2, TRBJ2-3)
CDSSVLSRNWGGGTDTQYF

SEQ ID NO: 436575 - protein, 13 aa, Homo sapiens
  CDR3 for alpha chain variable domain of TCR clone 218288 (TRAV29/DV5, TRAJ31)
CAASRNNNARLIC

SEQ ID NO: 436576 - protein, 20 aa, Homo sapiens
  CDR3 for beta chain variable domain of TCR clone 218288 (TRBV19, TRBJ2-1)
CASSISRTVTSTRLNNEQFF

SEQ ID NO: 436577 - protein, 10 aa, Homo sapiens
  CDR3 for alpha chain variable domain of TCR clone 218289 (TRAV25, TRAJ17)
CQAAGNKLTF

SEQ ID NO: 436578 - protein, 13 aa, Homo sapiens
  CDR3 for beta chain variable domain of TCR clone 218289 (TRBV6-5, TRBJ2-2)
CASSLPWVGELFF

SEQ ID NO: 436579 - protein, 16 aa, Homo sapiens
  CDR3 for alpha chain variable domain of TCR clone 218290 (TRAV4, TRAJ22)
CLVGDLYSGSARQLTF

SEQ ID NO: 436580 - protein, 16 aa, Homo sapiens
  CDR3 for beta chain variable domain of TCR clone 218290 (TRBV7-9, TRBJ2-3)
CASSPWREVGKDTQYF

SEQ ID NO: 436581 - protein, 12 aa, Homo sapiens
  CDR3 for alpha chain variable domain of TCR clone 218291 (TRAV20, TRAJ20)
CAVRFNEYKLSF

SEQ ID NO: 436582 - protein, 14 aa, Homo sapiens
  CDR3 for beta chain variable domain of TCR clone 218291 (TRBV20-1, TRBJ2-1)
CSAQIGGSANEQFF

SEQ ID NO: 436583 - protein, 15 aa, Homo sapiens
  CDR3 for alpha chain variable domain of TCR clone 218292 (TRAV8-3, TRAJ45)
CASSYSGGGADGLTF

SEQ ID NO: 436584 - protein, 15 aa, Homo sapiens
  CDR3 for beta chain variable domain of TCR clone 218292 (TRBV7-2, TRBJ2-1)
CASTHGTGIYNEQFF

SEQ ID NO: 436585 - protein, 14 aa, Homo sapiens
  CDR3 for alpha chain variable domain of TCR clone 218293 (TRAV1-2, TRAJ16)
CAVNRFSDGQKLLF

SEQ ID NO: 436586 - protein, 16 aa, Homo sapiens
  CDR3 for beta chain variable domain of TCR clone 218293 (TRBV7-3, TRBJ2-1)
CASSLSGGVHYNEQFF

SEQ ID NO: 436587 - protein, 13 aa, Homo sapiens
  CDR3 for alpha chain variable domain of TCR clone 218294 (TRAV25, TRAJ10)
CAGRTGGGNKLTF

SEQ ID NO: 436588 - protein, 17 aa, Homo sapiens
  CDR3 for beta chain variable domain of TCR clone 218294 (TRBV5-4, TRBJ2-1)
CASSSAGGRGPYNEQFF

SEQ ID NO: 436589 - protein, 10 aa, Homo sapiens
  CDR3 for alpha chain variable domain of TCR clone 218295 (TRAV1-2, TRAJ31)
CVSEDARLMF

SEQ ID NO: 436590 - protein, 16 aa, Homo sapiens
  CDR3 for beta chain variable domain of TCR clone 218295 (TRBV12-4, TRBJ2-5)
CASSWRPSGDLETQYF

SEQ ID NO: 436591 - protein, 17 aa, Homo sapiens
  CDR3 for alpha chain variable domain of TCR clone 218296 (TRAV3, TRAJ42)
CAVRDRAYGGSQGKLIF

SEQ ID NO: 436592 - protein, 15 aa, Homo sapiens
  CDR3 for beta chain variable domain of TCR clone 218296 (TRBV6-6, TRBJ2-7)
CASSYSYGGSYEQYF

SEQ ID NO: 436593 - protein, 13 aa, Homo sapiens
  CDR3 for alpha chain variable domain of TCR clone 218297 (TRAV17, TRAJ39)
CATEDNAANMLTF

SEQ ID NO: 436594 - protein, 14 aa, Homo sapiens
  CDR3 for beta chain variable domain of TCR clone 218297 (TRBV19, TRBJ1-2)
CASSPTGGAGGYTF

SEQ ID NO: 436595 - protein, 16 aa, Homo sapiens
  CDR3 for alpha chain variable domain of TCR clone 218298 (TRAV3, TRAJ37)
CAVRGKGSGNTGKRIF

SEQ ID NO: 436596 - protein, 20 aa, Homo sapiens
  CDR3 for beta chain variable domain of TCR clone 218298 (TRBV7-8, TRBJ2-2)
CASSHLFPGPTIHITGELFF

SEQ ID NO: 436597 - protein, 14 aa, Homo sapiens
  CDR3 for alpha chain variable domain of TCR clone 218299 (TRAV26-1, TRAJ38)
CIPDNAGNNRKLIC

SEQ ID NO: 436598 - protein, 13 aa, Homo sapiens
  CDR3 for beta chain variable domain of TCR clone 218299 (TRBV20-1, TRBJ1-1)
CSARGGGNTEAFF

SEQ ID NO: 436599 - protein, 13 aa, Homo sapiens
  CDR3 for alpha chain variable domain of TCR clone 218300 (TRAV13-2, TRAJ13)
CAERPGGYQNVTF

SEQ ID NO: 436600 - protein, 16 aa, Homo sapiens
  CDR3 for beta chain variable domain of TCR clone 218300 (TRBV18, TRBJ2-5)
CASSPPSSGGAKTQYF

SEQ ID NO: 436601 - protein, 15 aa, Homo sapiens
  CDR3 for alpha chain variable domain of TCR clone 218301 (TRAV26-1, TRAJ37)
CIVRLGSGNTGKLIF

SEQ ID NO: 436602 - protein, 13 aa, Homo sapiens
  CDR3 for beta chain variable domain of TCR clone 218301 (TRBV6-6, TRBJ2-7)
CASSSSGSYEQCF

SEQ ID NO: 436603 - protein, 16 aa, Homo sapiens
  CDR3 for alpha chain variable domain of TCR clone 218302 (TRAV3, TRAJ18)
CAVRDGRGTTLGRLYF

SEQ ID NO: 436604 - protein, 15 aa, Homo sapiens
  CDR3 for beta chain variable domain of TCR clone 218302 (TRBV7-9, TRBJ1-6)
CASSSPGRGNSPLHF

SEQ ID NO: 436605 - protein, 10 aa, Homo sapiens
  CDR3 for alpha chain variable domain of TCR clone 218303 (TRAV30, TRAJ48)
CGIGNEKLTF

SEQ ID NO: 436606 - protein, 16 aa, Homo sapiens
  CDR3 for beta chain variable domain of TCR clone 218303 (TRBV28, TRBJ2-7)
CASSLFFETGGPEQYF

SEQ ID NO: 436607 - protein, 13 aa, Homo sapiens
  CDR3 for alpha chain variable domain of TCR clone 218304 (TRAV21, TRAJ36)
CAVIKTGANNLFF

SEQ ID NO: 436608 - protein, 13 aa, Homo sapiens
  CDR3 for beta chain variable domain of TCR clone 218304 (TRBV29-1, TRBJ2-3)
SSATRGGRDTQYF

SEQ ID NO: 436609 - protein, 12 aa, Homo sapiens
  CDR3 for alpha chain variable domain of TCR clone 218305 (TRAV17, TRAJ45)
CAAGGGADGLTF

SEQ ID NO: 436610 - protein, 15 aa, Homo sapiens
  CDR3 for beta chain variable domain of TCR clone 218305 (TRBV20-1, TRBJ2-7)
CSARDRVSGMDDQYF

SEQ ID NO: 436611 - protein, 14 aa, Homo sapiens
  CDR3 for alpha chain variable domain of TCR clone 218306 (TRAV12-2, TRAJ9)
CAVNALEGGFKTIF

SEQ ID NO: 436612 - protein, 14 aa, Homo sapiens
  CDR3 for beta chain variable domain of TCR clone 218306 (TRBV7-6, TRBJ2-3)
CASSLGTVTDTQYF

SEQ ID NO: 436613 - protein, 12 aa, Homo sapiens
  CDR3 for alpha chain variable domain of TCR clone 218307 (TRAV3, TRAJ43)
CAVRDPNNDMRS

SEQ ID NO: 436614 - protein, 15 aa, Homo sapiens
  CDR3 for beta chain variable domain of TCR clone 218307 (TRBV19, TRBJ1-6)
CASSTQGAVGSPLHF

SEQ ID NO: 436615 - protein, 17 aa, Homo sapiens
  CDR3 for alpha chain variable domain of TCR clone 218308 (TRAV3, TRAJ6)
CAVRDGPRAGGSYIPTF

SEQ ID NO: 436616 - protein, 15 aa, Homo sapiens
  CDR3 for beta chain variable domain of TCR clone 218308 (TRBV20-1, TRBJ1-1)
CSASWVRFLNTEAFF

SEQ ID NO: 436617 - protein, 15 aa, Homo sapiens
  CDR3 for alpha chain variable domain of TCR clone 218309 (TRAV20, TRAJ40)
CAVQRGTSGTYKYIF

SEQ ID NO: 436618 - protein, 16 aa, Homo sapiens
  CDR3 for beta chain variable domain of TCR clone 218309 (TRBV28, TRBJ2-7)
CASSPLGLAGRDEQYF

SEQ ID NO: 436619 - protein, 14 aa, Homo sapiens
  CDR3 for alpha chain variable domain of TCR clone 218310 (TRAV22, TRAJ24)
CAVNSSNSWGKLQF

SEQ ID NO: 436620 - protein, 11 aa, Homo sapiens
  CDR3 for beta chain variable domain of TCR clone 218310 (TRBV29-1, TRBJ2-3)
CSVEIGDTQYF

SEQ ID NO: 436621 - protein, 16 aa, Homo sapiens
  CDR3 for alpha chain variable domain of TCR clone 218311 (TRAV3, TRAJ10)
CAVRDMRAGGGNKLTF

SEQ ID NO: 436622 - protein, 15 aa, Homo sapiens
  CDR3 for beta chain variable domain of TCR clone 218311 (TRBV6-1, TRBJ2-3)
CASTNPWTSLDTQYF

SEQ ID NO: 436623 - protein, 16 aa, Homo sapiens
  CDR3 for alpha chain variable domain of TCR clone 218312 (TRAV17, TRAJ35)
CATAEGGIGVGNVLHG

SEQ ID NO: 436624 - protein, 16 aa, Homo sapiens
  CDR3 for beta chain variable domain of TCR clone 218312 (TRBV6-5, TRBJ2-7)
CASSSDPTSGFYEQYF

SEQ ID NO: 436625 - protein, 12 aa, Homo sapiens
  CDR3 for alpha chain variable domain of TCR clone 218313 (TRAV13-1, TRAJ53)
AASGGSNYKLTF

SEQ ID NO: 436626 - protein, 15 aa, Homo sapiens
  CDR3 for beta chain variable domain of TCR clone 218313 (TRBV5-1, TRBJ2-1)
CASSPAGAPYNEQFF

SEQ ID NO: 436627 - protein, 19 aa, Homo sapiens
  CDR3 for alpha chain variable domain of TCR clone 218314 (TRAV13-1, TRAJ52)
CAASPYQNAGGTSYGKLTF

SEQ ID NO: 436628 - protein, 16 aa, Homo sapiens
  CDR3 for beta chain variable domain of TCR clone 218314 (TRBV18, TRBJ1-1)
CASSPGVGGRGGEAFF

SEQ ID NO: 436629 - protein, 11 aa, Homo sapiens
  CDR3 for alpha chain variable domain of TCR clone 218315 (TRAV12-3, TRAJ43)
CAMSVANDMRF

SEQ ID NO: 436630 - protein, 16 aa, Homo sapiens
  CDR3 for beta chain variable domain of TCR clone 218315 (TRBV2, TRBJ2-3)
CASSTSVEGVTDTQYF

SEQ ID NO: 436631 - protein, 14 aa, Homo sapiens
  CDR3 for alpha chain variable domain of TCR clone 218316 (TRAV26-1, TRAJ39)
CIVRCSRAGNMLPF

SEQ ID NO: 436632 - protein, 14 aa, Homo sapiens
  CDR3 for beta chain variable domain of TCR clone 218316 (TRBV25-1, TRBJ1-1)
CASTHLGGNTEAFF

SEQ ID NO: 436633 - protein, 15 aa, Homo sapiens
  CDR3 for alpha chain variable domain of TCR clone 218317 (TRAV13-1, TRAJ48)
CAATPANFGNEKLTF

SEQ ID NO: 436634 - protein, 15 aa, Homo sapiens
  CDR3 for beta chain variable domain of TCR clone 218317 (TRBV7-2, TRBJ2-1)
CASSLASGRVNEQFF

SEQ ID NO: 436635 - protein, 15 aa, Homo sapiens
  CDR3 for alpha chain variable domain of TCR clone 218318 (TRAV2, TRAJ15)
CAVEDREQAGTALIL

SEQ ID NO: 436636 - protein, 13 aa, Homo sapiens
  CDR3 for beta chain variable domain of TCR clone 218318 (TRBV10-2, TRBJ2-3)
CASSESGDHTQYF

SEQ ID NO: 436637 - protein, 18 aa, Homo sapiens
  CDR3 for alpha chain variable domain of TCR clone 218319 (TRAV1-2, TRAJ18)
CAVRDMGDRGSTLGRLYF

SEQ ID NO: 436638 - protein, 16 aa, Homo sapiens
  CDR3 for beta chain variable domain of TCR clone 218319 (TRBV27, TRBJ2-2)
CASSFRGLVRTGELFF

SEQ ID NO: 436639 - protein, 15 aa, Homo sapiens
  CDR3 for alpha chain variable domain of TCR clone 218320 (TRAV4, TRAJ10)
CLVGDGSGGGNKLTS

SEQ ID NO: 436640 - protein, 15 aa, Homo sapiens
  CDR3 for beta chain variable domain of TCR clone 218320 (TRBV27, TRBJ2-3)
CASSSLAGVIDTQYF

SEQ ID NO: 436641 - protein, 17 aa, Homo sapiens
  CDR3 for alpha chain variable domain of TCR clone 218321 (TRAV13-1, TRAJ52)
CAAGRNAGGTSYGKLTF

SEQ ID NO: 436642 - protein, 16 aa, Homo sapiens
  CDR3 for beta chain variable domain of TCR clone 218321 (TRBV15, TRBJ2-7)
CATSARQARSSYEQYF

SEQ ID NO: 436643 - protein, 13 aa, Homo sapiens
  CDR3 for alpha chain variable domain of TCR clone 218322 (TRAV12-1, TRAJ22)
CVVYSGSARQLTF

SEQ ID NO: 436644 - protein, 14 aa, Homo sapiens
  CDR3 for beta chain variable domain of TCR clone 218322 (TRBV12-4, TRBJ1-3)
CASTLTGAGNTIYF

SEQ ID NO: 436645 - protein, 16 aa, Homo sapiens
  CDR3 for alpha chain variable domain of TCR clone 218323 (TRAV3, TRAJ37)
CAVRDSGPGNTGKLIF

SEQ ID NO: 436646 - protein, 12 aa, Homo sapiens
  CDR3 for beta chain variable domain of TCR clone 218323 (TRBV7-2, TRBJ2-5)
CASSLYQETQYF

SEQ ID NO: 436647 - protein, 14 aa, Homo sapiens
  CDR3 for alpha chain variable domain of TCR clone 218324 (TRAV1-2, TRAJ16)
CAVNRFSDGQKLLF

SEQ ID NO: 436648 - protein, 13 aa, Homo sapiens
  CDR3 for beta chain variable domain of TCR clone 218324 (TRBV4-2, TRBJ2-1)
CQRPGQAYNEQFF

SEQ ID NO: 436649 - protein, 13 aa, Homo sapiens
  CDR3 for alpha chain variable domain of TCR clone 218325 (TRAV36/DV7, TRAJ54)
CAVDIQGAQKLVF

SEQ ID NO: 436650 - protein, 17 aa, Homo sapiens
  CDR3 for beta chain variable domain of TCR clone 218325 (TRBV20-1, TRBJ2-2)
CSASGSGQGGLTGELFF

SEQ ID NO: 436651 - protein, 12 aa, Homo sapiens
  CDR3 for alpha chain variable domain of TCR clone 218326 (TRAV12-1, TRAJ34)
CVVAGATDNLIF

SEQ ID NO: 436652 - protein, 12 aa, Homo sapiens
  CDR3 for beta chain variable domain of TCR clone 218326 (TRBV7-9, TRBJ1-1)
CASSLVRGEAFF

SEQ ID NO: 436653 - protein, 12 aa, Homo sapiens
  CDR3 for alpha chain variable domain of TCR clone 218327 (TRAV26-1, TRAJ35)
CIGLSLGNVLHC

SEQ ID NO: 436654 - protein, 17 aa, Homo sapiens
  CDR3 for beta chain variable domain of TCR clone 218327 (TRBV11-3, TRBJ2-5)
CASSLPGVRGGKETQYF

SEQ ID NO: 436655 - protein, 15 aa, Homo sapiens
  CDR3 for alpha chain variable domain of TCR clone 218328 (TRAV3, TRAJ30)
CAVRDRVDRGDKIIF

SEQ ID NO: 436656 - protein, 13 aa, Homo sapiens
  CDR3 for beta chain variable domain of TCR clone 218328 (TRBV29-1, TRBJ2-5)
CSACSSRRETQYF

SEQ ID NO: 436657 - protein, 11 aa, Homo sapiens
  CDR3 for alpha chain variable domain of TCR clone 218329 (TRAV26-1, TRAJ37)
YIVRVGRKLIF

SEQ ID NO: 436658 - protein, 13 aa, Homo sapiens
  CDR3 for beta chain variable domain of TCR clone 218329 (TRBV14, TRBJ1-2)
CASSEDRRYGYTF

SEQ ID NO: 436659 - protein, 15 aa, Homo sapiens
  CDR3 for alpha chain variable domain of TCR clone 218330 (TRAV21, TRAJ38)
CAVRRDAGNNLKLIW

SEQ ID NO: 436660 - protein, 16 aa, Homo sapiens
  CDR3 for beta chain variable domain of TCR clone 218330 (TRBV4-2, TRBJ1-1)
CASRPLDGGGDTEAFF

SEQ ID NO: 436661 - protein, 14 aa, Homo sapiens
  CDR3 for alpha chain variable domain of TCR clone 218331 (TRAV26-1, TRAJ39)
CIVRGSRAGNMLTF

SEQ ID NO: 436662 - protein, 14 aa, Homo sapiens
  CDR3 for beta chain variable domain of TCR clone 218331 (TRBV11-2, TRBJ2-5)
CASRPPAGRETQYF

SEQ ID NO: 436663 - protein, 15 aa, Homo sapiens
  CDR3 for alpha chain variable domain of TCR clone 218332 (TRAV36/DV7, TRAJ21)
CALKFYFGSGTKLNA

SEQ ID NO: 436664 - protein, 13 aa, Homo sapiens
  CDR3 for beta chain variable domain of TCR clone 218332 (TRBV11-3, TRBJ2-5)
CASSSGLQETQYF

SEQ ID NO: 436665 - protein, 15 aa, Homo sapiens
  CDR3 for alpha chain variable domain of TCR clone 218333 (TRAV26-1, TRAJ29)
CIVRVEGSGNSPLVF

SEQ ID NO: 436666 - protein, 14 aa, Homo sapiens
  CDR3 for beta chain variable domain of TCR clone 218333 (TRBV7-9, TRBJ2-3)
CASSLGTVTDTQYF

SEQ ID NO: 436667 - protein, 18 aa, Homo sapiens
  CDR3 for alpha chain variable domain of TCR clone 218334 (TRAV13-1, TRAJ52)
CAAKNPNAGGTSYGKLTF

SEQ ID NO: 436668 - protein, 15 aa, Homo sapiens
  CDR3 for beta chain variable domain of TCR clone 218334 (TRBV6-1, TRBJ2-3)
CASSERGGITDTKYF

SEQ ID NO: 436669 - protein, 18 aa, Homo sapiens
  CDR3 for alpha chain variable domain of TCR clone 218335 (TRAV26-2, TRAJ54)
CILRDVEVGIQGAQQLVF

SEQ ID NO: 436670 - protein, 16 aa, Homo sapiens
  CDR3 for beta chain variable domain of TCR clone 218335 (TRBV6-1, TRBJ2-5)
CASSETLDRGAETQYF

SEQ ID NO: 436671 - protein, 15 aa, Homo sapiens
  CDR3 for alpha chain variable domain of TCR clone 218336 (TRAV34, TRAJ38)
CGADFTPGNNRKLIW

SEQ ID NO: 436672 - protein, 15 aa, Homo sapiens
  CDR3 for beta chain variable domain of TCR clone 218336 (TRBV5-5, TRBJ1-5)
CASILKGGGEQPQHF

SEQ ID NO: 436673 - protein, 16 aa, Homo sapiens
  CDR3 for alpha chain variable domain of TCR clone 218337 (TRAV3, TRAJ10)
CALRDMRAGGGNKLTL

SEQ ID NO: 436674 - protein, 16 aa, Homo sapiens
  CDR3 for beta chain variable domain of TCR clone 218337 (TRBV12-4, TRBJ1-5)
CASSRPVGGSNQPQHF

SEQ ID NO: 436675 - protein, 11 aa, Homo sapiens
  CDR3 for alpha chain variable domain of TCR clone 218338 (TRAV1-2, TRAJ40)
CAVPGTYKYIF

SEQ ID NO: 436676 - protein, 16 aa, Homo sapiens
  CDR3 for beta chain variable domain of TCR clone 218338 (TRBV7-3, TRBJ2-2)
CTSSLKRGTLSGELFF

SEQ ID NO: 436677 - protein, 14 aa, Homo sapiens
  CDR3 for alpha chain variable domain of TCR clone 218339 (TRAV16, TRAJ15)
CALSFNQAGTALIF

SEQ ID NO: 436678 - protein, 13 aa, Homo sapiens
  CDR3 for beta chain variable domain of TCR clone 218339 (TRBV10-3, TRBJ1-2)
CAINADLNYGDTF

SEQ ID NO: 436679 - protein, 14 aa, Homo sapiens
  CDR3 for alpha chain variable domain of TCR clone 218340 (TRAV17, TRAJ57)
CATDPQGGSEKLVF

SEQ ID NO: 436680 - protein, 15 aa, Homo sapiens
  CDR3 for beta chain variable domain of TCR clone 218340 (TRBV7-9, TRBJ1-6)
CASSSAGRGNSPLHF

SEQ ID NO: 436681 - protein, 15 aa, Homo sapiens
  CDR3 for alpha chain variable domain of TCR clone 218341 (TRAV21, TRAJ32)
CAVNSYGGATNKLIF

SEQ ID NO: 436682 - protein, 14 aa, Homo sapiens
  CDR3 for beta chain variable domain of TCR clone 218341 (TRBV7-3, TRBJ2-1)
CASSLTGGANEQFF

SEQ ID NO: 436683 - protein, 13 aa, Homo sapiens
  CDR3 for alpha chain variable domain of TCR clone 218342 (TRAV12-3, TRAJ46)
CAVKKSSGDKLTF

SEQ ID NO: 436684 - protein, 13 aa, Homo sapiens
  CDR3 for beta chain variable domain of TCR clone 218342 (TRBV6-1, TRBJ2-1)
CASSHDRNNEQFL

SEQ ID NO: 436685 - protein, 13 aa, Homo sapiens
  CDR3 for alpha chain variable domain of TCR clone 218343 (TRAV21, TRAJ27)
CAARPGNAGKSTF

SEQ ID NO: 436686 - protein, 14 aa, Homo sapiens
  CDR3 for beta chain variable domain of TCR clone 218343 (TRBV20-1, TRBJ2-7)
CSAPELAGVGEQYF

SEQ ID NO: 436687 - protein, 16 aa, Homo sapiens
  CDR3 for alpha chain variable domain of TCR clone 218344 (TRAV12-3, TRAJ53)
CAMSPGSGGSNYKLTF

SEQ ID NO: 436688 - protein, 16 aa, Homo sapiens
  CDR3 for beta chain variable domain of TCR clone 218344 (TRBV7-2, TRBJ2-6)
CAILSGVSSGANDLSF

SEQ ID NO: 436689 - protein, 14 aa, Homo sapiens
  CDR3 for alpha chain variable domain of TCR clone 218345 (TRAV13-1, TRAJ6)
CAASITGGSYITTF

SEQ ID NO: 436690 - protein, 14 aa, Homo sapiens
  CDR3 for beta chain variable domain of TCR clone 218345 (TRBV6-3, TRBJ2-1)
CASLHSAYYNEQFF

SEQ ID NO: 436691 - protein, 11 aa, Homo sapiens
  CDR3 for alpha chain variable domain of TCR clone 218346 (TRAV1-1, TRAJ23)
CAVRQGGKLIF

SEQ ID NO: 436692 - protein, 20 aa, Homo sapiens
  CDR3 for beta chain variable domain of TCR clone 218346 (TRBV7-8, TRBJ2-2)
CASSHSFAGPTIHITGELFF

SEQ ID NO: 436693 - protein, 12 aa, Homo sapiens
  CDR3 for alpha chain variable domain of TCR clone 218347 (TRAV29/DV5, TRAJ53)
CAASGGNYKLTF

SEQ ID NO: 436694 - protein, 13 aa, Homo sapiens
  CDR3 for beta chain variable domain of TCR clone 218347 (TRBV29-1, TRBJ2-1)
CSVEGGRVNEQFF

SEQ ID NO: 436695 - protein, 15 aa, Homo sapiens
  CDR3 for alpha chain variable domain of TCR clone 218348 (TRAV3, TRAJ29)
FAVRDINSGNTPLVF

SEQ ID NO: 436696 - protein, 16 aa, Homo sapiens
  CDR3 for beta chain variable domain of TCR clone 218348 (TRBV4-1, TRBJ2-5)
CASSQTFYGDQETQYF

SEQ ID NO: 436697 - protein, 15 aa, Homo sapiens
  CDR3 for alpha chain variable domain of TCR clone 218349 (TRAV17, TRAJ57)
CATGPSQGGSEKLVF

SEQ ID NO: 436698 - protein, 13 aa, Homo sapiens
  CDR3 for beta chain variable domain of TCR clone 218349 (TRBV4-1, TRBJ2-1)
CASSQAGGDEQFF

SEQ ID NO: 436699 - protein, 13 aa, Homo sapiens
  CDR3 for alpha chain variable domain of TCR clone 218350 (TRAV2, TRAJ24)
CAVPTDSWGKLQF

SEQ ID NO: 436700 - protein, 17 aa, Homo sapiens
  CDR3 for beta chain variable domain of TCR clone 218350 (TRBV20-1, TRBJ2-1)
CSASSSGLAGSYNEQFF

SEQ ID NO: 436701 - protein, 15 aa, Homo sapiens
  CDR3 for alpha chain variable domain of TCR clone 218351 (TRAV3, TRAJ37)
CAVIRSSSNTGKLIF

SEQ ID NO: 436702 - protein, 13 aa, Homo sapiens
  CDR3 for beta chain variable domain of TCR clone 218351 (TRBV4-2, TRBJ1-1)
CASSQAGNTEAFF

SEQ ID NO: 436703 - protein, 16 aa, Homo sapiens
  CDR3 for alpha chain variable domain of TCR clone 218352 (TRAV17, TRAJ53)
CATDALSGGSNYKLTF

SEQ ID NO: 436704 - protein, 18 aa, Homo sapiens
  CDR3 for beta chain variable domain of TCR clone 218352 (TRBV25-1, TRBJ1-2)
CASSGLQNGQGLIFGYTV

SEQ ID NO: 436705 - protein, 14 aa, Homo sapiens
  CDR3 for alpha chain variable domain of TCR clone 218353 (TRAV8-4, TRAJ8)
CAVSGGTGFQKLVF

SEQ ID NO: 436706 - protein, 15 aa, Homo sapiens
  CDR3 for beta chain variable domain of TCR clone 218353 (TRBV2, TRBJ2-3)
CASSGEGTGTDTQYF

SEQ ID NO: 436707 - protein, 14 aa, Homo sapiens
  CDR3 for alpha chain variable domain of TCR clone 218354 (TRAV20, TRAJ44)
CAVQDTGTASKLTV

SEQ ID NO: 436708 - protein, 13 aa, Homo sapiens
  CDR3 for beta chain variable domain of TCR clone 218354 (TRBV29-1, TRBJ1-3)
CSAGTGRGNTIYF

SEQ ID NO: 436709 - protein, 13 aa, Homo sapiens
  CDR3 for alpha chain variable domain of TCR clone 218355 (TRAV35, TRAJ57)
CAGSQGGSEKLVF

SEQ ID NO: 436710 - protein, 16 aa, Homo sapiens
  CDR3 for beta chain variable domain of TCR clone 218355 (TRBV7-3, TRBJ2-2)
CASSLKRGTLSGELFF

SEQ ID NO: 436711 - protein, 12 aa, Homo sapiens
  CDR3 for alpha chain variable domain of TCR clone 218356 (TRAV1-2, TRAJ33)
CAALDSNYQLIW

SEQ ID NO: 436712 - protein, 13 aa, Homo sapiens
  CDR3 for beta chain variable domain of TCR clone 218356 (TRBV19, TRBJ2-7)
CASRKAGGSEQYF

SEQ ID NO: 436713 - protein, 13 aa, Homo sapiens
  CDR3 for alpha chain variable domain of TCR clone 218357 (TRAV35, TRAJ43)
CAGYPYNNNDMRF

SEQ ID NO: 436714 - protein, 14 aa, Homo sapiens
  CDR3 for beta chain variable domain of TCR clone 218357 (TRBV19, TRBJ2-2)
CASSTLHRSGELFF

SEQ ID NO: 436715 - protein, 14 aa, Homo sapiens
  CDR3 for alpha chain variable domain of TCR clone 218358 (TRAV12-2, TRAJ9)
CAVNPNTGGFKTIF

SEQ ID NO: 436716 - protein, 17 aa, Homo sapiens
  CDR3 for beta chain variable domain of TCR clone 218358 (TRBV20-1, TRBJ2-2)
CSASRQVGQGYTGELFF

SEQ ID NO: 436717 - protein, 14 aa, Homo sapiens
  CDR3 for alpha chain variable domain of TCR clone 218359 (TRAV13-2, TRAJ9)
CAENSFTGGFKTIF

SEQ ID NO: 436718 - protein, 16 aa, Homo sapiens
  CDR3 for beta chain variable domain of TCR clone 218359 (TRBV19, TRBJ2-7)
CASRSTGTGPSYEQYF

SEQ ID NO: 436719 - protein, 14 aa, Homo sapiens
  CDR3 for alpha chain variable domain of TCR clone 218360 (TRAV1-2, TRAJ16)
CAVNRFSDGQKLPF

SEQ ID NO: 436720 - protein, 14 aa, Homo sapiens
  CDR3 for beta chain variable domain of TCR clone 218360 (TRBV19, TRBJ2-7)
CASSVDSESYEQYF

SEQ ID NO: 436721 - protein, 14 aa, Homo sapiens
  CDR3 for alpha chain variable domain of TCR clone 218361 (TRAV29/DV5, TRAJ30)
CAARLMNRDDKIIF

SEQ ID NO: 436722 - protein, 17 aa, Homo sapiens
  CDR3 for beta chain variable domain of TCR clone 218361 (TRBV12-4, TRBJ2-3)
CANSGPGLAGGADTQYF

SEQ ID NO: 436723 - protein, 15 aa, Homo sapiens
  CDR3 for alpha chain variable domain of TCR clone 218362 (TRAV29/DV5, TRAJ24)
CAASGATDSWGKFTL

SEQ ID NO: 436724 - protein, 14 aa, Homo sapiens
  CDR3 for beta chain variable domain of TCR clone 218362 (TRBV12-5, TRBJ2-5)
CASGSRTHQETQYF

SEQ ID NO: 436725 - protein, 14 aa, Homo sapiens
  CDR3 for alpha chain variable domain of TCR clone 218363 (TRAV12-2, TRAJ40)
CAVKIPSGTYKYIF

SEQ ID NO: 436726 - protein, 20 aa, Homo sapiens
  CDR3 for beta chain variable domain of TCR clone 218363 (TRBV28, TRBJ2-1)
CASAPIGRSPGLAGGNEQFF

SEQ ID NO: 436727 - protein, 12 aa, Homo sapiens
  CDR3 for alpha chain variable domain of TCR clone 218364 (TRAV13-2, TRAJ8)
CAPWLGFQKLVF

SEQ ID NO: 436728 - protein, 16 aa, Homo sapiens
  CDR3 for beta chain variable domain of TCR clone 218364 (TRBV5-1, TRBJ2-7)
CASSLEGLAGLYAQYF

SEQ ID NO: 436729 - protein, 13 aa, Homo sapiens
  CDR3 for alpha chain variable domain of TCR clone 218365 (TRAV36/DV7, TRAJ38)
CVANAGNNRKLIW

SEQ ID NO: 436730 - protein, 13 aa, Homo sapiens
  CDR3 for beta chain variable domain of TCR clone 218365 (TRBV4-1, TRBJ2-2)
CASSQENTGELFF

SEQ ID NO: 436731 - protein, 19 aa, Homo sapiens
  CDR3 for alpha chain variable domain of TCR clone 218366 (TRAV13-1, TRAJ52)
CAASPYQNAGGTTYGKLTF

SEQ ID NO: 436732 - protein, 13 aa, Homo sapiens
  CDR3 for beta chain variable domain of TCR clone 218366 (TRBV15, TRBJ2-7)
CATSTTGHYEQYF

SEQ ID NO: 436733 - protein, 16 aa, Homo sapiens
  CDR3 for alpha chain variable domain of TCR clone 218367 (TRAV12-3, TRAJ53)
CAMSPGSGGSNYKLTF

SEQ ID NO: 436734 - protein, 14 aa, Homo sapiens
  CDR3 for beta chain variable domain of TCR clone 218367 (TRBV4-1, TRBJ2-7)
CASSPVAGGDEQYS

SEQ ID NO: 436735 - protein, 17 aa, Homo sapiens
  CDR3 for alpha chain variable domain of TCR clone 218368 (TRAV23/DV6, TRAJ57)
CAASPTLSQGGSEKLVF

SEQ ID NO: 436736 - protein, 14 aa, Homo sapiens
  CDR3 for beta chain variable domain of TCR clone 218368 (TRBV7-8, TRBJ2-5)
CASSATGGQETQYF

SEQ ID NO: 436737 - protein, 16 aa, Homo sapiens
  CDR3 for alpha chain variable domain of TCR clone 218369 (TRAV13-1, TRAJ45)
CEARGPRKGGADGLTF

SEQ ID NO: 436738 - protein, 13 aa, Homo sapiens
  CDR3 for beta chain variable domain of TCR clone 218369 (TRBV12-4, TRBJ2-5)
CASRKRGKETQYF

SEQ ID NO: 436739 - protein, 14 aa, Homo sapiens
  CDR3 for alpha chain variable domain of TCR clone 218370 (TRAV1-2, TRAJ8)
CAVREDTGFPKLVF

SEQ ID NO: 436740 - protein, 15 aa, Homo sapiens
  CDR3 for beta chain variable domain of TCR clone 218370 (TRBV7-3, TRBJ2-2)
CASSDTGQGTGELFF

SEQ ID NO: 436741 - protein, 13 aa, Homo sapiens
  CDR3 for alpha chain variable domain of TCR clone 218371 (TRAV13-2, TRAJ48)
CAEMDFGNEKLTF

SEQ ID NO: 436742 - protein, 13 aa, Homo sapiens
  CDR3 for beta chain variable domain of TCR clone 218371 (TRBV19, TRBJ2-1)
CASSIGTGNEQFF

SEQ ID NO: 436743 - protein, 11 aa, Homo sapiens
  CDR3 for alpha chain variable domain of TCR clone 218372 (TRAV13-1, TRAJ6)
CATLGSYIPTF

SEQ ID NO: 436744 - protein, 15 aa, Homo sapiens
  CDR3 for beta chain variable domain of TCR clone 218372 (TRBV7-2, TRBJ2-1)
CASSSGLAGGNEQFF

SEQ ID NO: 436745 - protein, 14 aa, Homo sapiens
  CDR3 for alpha chain variable domain of TCR clone 218373 (TRAV14/DV4, TRAJ48)
CAMRVNFGNEKLTF

SEQ ID NO: 436746 - protein, 15 aa, Homo sapiens
  CDR3 for beta chain variable domain of TCR clone 218373 (TRBV20-1, TRBJ2-7)
CSARDRVSGMDEQYF

SEQ ID NO: 436747 - protein, 14 aa, Homo sapiens
  CDR3 for alpha chain variable domain of TCR clone 218374 (TRAV8-2, TRAJ4)
CVVSPSSGYNKLIF

SEQ ID NO: 436748 - protein, 15 aa, Homo sapiens
  CDR3 for beta chain variable domain of TCR clone 218374 (TRBV5-5, TRBJ1-1)
CASSLVGKDNTEAFF

SEQ ID NO: 436749 - protein, 16 aa, Homo sapiens
  CDR3 for alpha chain variable domain of TCR clone 218375 (TRAV12-3, TRAJ4)
CAMTRLFSGGYNKLIF

SEQ ID NO: 436750 - protein, 16 aa, Homo sapiens
  CDR3 for beta chain variable domain of TCR clone 218375 (TRBV27, TRBJ2-1)
CASSALLAGVYNEQFF

SEQ ID NO: 436751 - protein, 12 aa, Homo sapiens
  CDR3 for alpha chain variable domain of TCR clone 218376 (TRAV13-1, TRAJ9)
CASYTGGFKTIF

SEQ ID NO: 436752 - protein, 18 aa, Homo sapiens
  CDR3 for beta chain variable domain of TCR clone 218376 (TRBV11-2, TRBJ2-3)
CASSLGGASRGAPNTQYF

SEQ ID NO: 436753 - protein, 15 aa, Homo sapiens
  CDR3 for alpha chain variable domain of TCR clone 218377 (TRAV8-6, TRAJ6)
CAVRGESGGSYIPTF

SEQ ID NO: 436754 - protein, 14 aa, Homo sapiens
  CDR3 for beta chain variable domain of TCR clone 218377 (TRBV7-9, TRBJ2-1)
CAGSSMVGFGEQFF

SEQ ID NO: 436755 - protein, 12 aa, Homo sapiens
  CDR3 for alpha chain variable domain of TCR clone 218378 (TRAV8-3, TRAJ26)
CAGDNYSQNFVF

SEQ ID NO: 436756 - protein, 12 aa, Homo sapiens
  CDR3 for beta chain variable domain of TCR clone 218378 (TRBV11-2, TRBJ2-2)
CASSLGGGELFF

SEQ ID NO: 436757 - protein, 14 aa, Homo sapiens
  CDR3 for alpha chain variable domain of TCR clone 218379 (TRAV12-3, TRAJ10)
SHLPLTGGGNKLTF

SEQ ID NO: 436758 - protein, 14 aa, Homo sapiens
  CDR3 for beta chain variable domain of TCR clone 218379 (TRBV5-7, TRBJ2-7)
CASSFKGATGEQYF

SEQ ID NO: 436759 - protein, 15 aa, Homo sapiens
  CDR3 for alpha chain variable domain of TCR clone 218380 (TRAV14/DV4, TRAJ10)
CAMRELTGGGNKLTF

SEQ ID NO: 436760 - protein, 18 aa, Homo sapiens
  CDR3 for beta chain variable domain of TCR clone 218380 (TRBV7-9, TRBJ2-7)
CASSLTTSVSRTWYEQYF

SEQ ID NO: 436761 - protein, 13 aa, Homo sapiens
  CDR3 for alpha chain variable domain of TCR clone 218381 (TRAV13-1, TRAJ40)
CAARTSGTYKYIF

SEQ ID NO: 436762 - protein, 14 aa, Homo sapiens
  CDR3 for beta chain variable domain of TCR clone 218381 (TRBV7-9, TRBJ1-2)
CASSRQGANYGYTF

SEQ ID NO: 436763 - protein, 14 aa, Homo sapiens
  CDR3 for alpha chain variable domain of TCR clone 218382 (TRAV12-3, TRAJ7)
CAMSEIGGNNRLSF

SEQ ID NO: 436764 - protein, 12 aa, Homo sapiens
  CDR3 for beta chain variable domain of TCR clone 218382 (TRBV5-4, TRBJ1-1)
CASSLDRREAFF

SEQ ID NO: 436765 - protein, 12 aa, Homo sapiens
  CDR3 for alpha chain variable domain of TCR clone 218383 (TRAV21, TRAJ33)
CAVQDSNYLLIW

SEQ ID NO: 436766 - protein, 14 aa, Homo sapiens
  CDR3 for beta chain variable domain of TCR clone 218383 (TRBV28, TRBJ2-1)
CASSPGEGGNEQFF

SEQ ID NO: 436767 - protein, 14 aa, Homo sapiens
  CDR3 for alpha chain variable domain of TCR clone 218384 (TRAV2, TRAJ9)
CAVEDRSGGFKTIF

SEQ ID NO: 436768 - protein, 14 aa, Homo sapiens
  CDR3 for beta chain variable domain of TCR clone 218384 (TRBV18, TRBJ1-1)
CASSQGQGNTEAFF

SEQ ID NO: 436769 - protein, 11 aa, Homo sapiens
  CDR3 for alpha chain variable domain of TCR clone 218385 (TRAV2, TRAJ13)
CASRGYQKVTF

SEQ ID NO: 436770 - protein, 16 aa, Homo sapiens
  CDR3 for beta chain variable domain of TCR clone 218385 (TRBV6-1, TRBJ2-5)
CASSEALDRGAETQYF

SEQ ID NO: 436771 - protein, 16 aa, Homo sapiens
  CDR3 for alpha chain variable domain of TCR clone 218386 (TRAV12-3, TRAJ52)
CAVSNAGGTSYGKLTF

SEQ ID NO: 436772 - protein, 13 aa, Homo sapiens
  CDR3 for beta chain variable domain of TCR clone 218386 (TRBV29-1, TRBJ1-1)
CSVGDSRNTEAFF

SEQ ID NO: 436773 - protein, 16 aa, Homo sapiens
  CDR3 for alpha chain variable domain of TCR clone 218387 (TRAV1-2, TRAJ10)
CAVRGVLTGGGNKLTF

SEQ ID NO: 436774 - protein, 12 aa, Homo sapiens
  CDR3 for beta chain variable domain of TCR clone 218387 (TRBV7-8, TRBJ2-7)
CATSLGDREQYF

SEQ ID NO: 436775 - protein, 11 aa, Homo sapiens
  CDR3 for alpha chain variable domain of TCR clone 218388 (TRAV12-3, TRAJ27)
CAMANAGKSTF

SEQ ID NO: 436776 - protein, 18 aa, Homo sapiens
  CDR3 for beta chain variable domain of TCR clone 218388 (TRBV12-4, TRBJ2-2)
CASSRSGGAIPNTGELFF

SEQ ID NO: 436777 - protein, 17 aa, Homo sapiens
  CDR3 for alpha chain variable domain of TCR clone 218389 (TRAV14/DV4, TRAJ28)
CAMREGYSGAGSYQLTF

SEQ ID NO: 436778 - protein, 13 aa, Homo sapiens
  CDR3 for beta chain variable domain of TCR clone 218389 (TRBV10-2, TRBJ2-7)
CASGASGGYEQYF

SEQ ID NO: 436779 - protein, 12 aa, Homo sapiens
  CDR3 for alpha chain variable domain of TCR clone 218390 (TRAV12-3, TRAJ17)
CAMALTGNKLTF

SEQ ID NO: 436780 - protein, 11 aa, Homo sapiens
  CDR3 for beta chain variable domain of TCR clone 218390 (TRBV28, TRBJ2-1)
CASRRVNEQFF

SEQ ID NO: 436781 - protein, 15 aa, Homo sapiens
  CDR3 for alpha chain variable domain of TCR clone 218391 (TRAV25, TRAJ53)
CAATGGGGSNYKLTF

SEQ ID NO: 436782 - protein, 12 aa, Homo sapiens
  CDR3 for beta chain variable domain of TCR clone 218391 (TRBV7-8, TRBJ2-7)
CASSQGDREQYF

SEQ ID NO: 436783 - protein, 15 aa, Homo sapiens
  CDR3 for alpha chain variable domain of TCR clone 218392 (TRAV8-3, TRAJ23)
CAVGDRYNQGGKIIF

SEQ ID NO: 436784 - protein, 22 aa, Homo sapiens
  CDR3 for beta chain variable domain of TCR clone 218392 (TRBV29-1, TRBJ2-5)
TVSNMSPEDSSIYLCSAGTQYF

SEQ ID NO: 436785 - protein, 13 aa, Homo sapiens
  CDR3 for alpha chain variable domain of TCR clone 218393 (TRAV17, TRAJ9)
CATDYTGGFKTIF

SEQ ID NO: 436786 - protein, 14 aa, Homo sapiens
  CDR3 for beta chain variable domain of TCR clone 218393 (TRBV19, TRBJ2-5)
CASSMTGQQETKYF

SEQ ID NO: 436787 - protein, 12 aa, Homo sapiens
  CDR3 for alpha chain variable domain of TCR clone 218394 (TRAV2, TRAJ33)
CADPDSNYQLIW

SEQ ID NO: 436788 - protein, 17 aa, Homo sapiens
  CDR3 for beta chain variable domain of TCR clone 218394 (TRBV6-5, TRBJ2-3)
CASSYGTSLYKSDTQYF

SEQ ID NO: 436789 - protein, 10 aa, Homo sapiens
  CDR3 for alpha chain variable domain of TCR clone 218395 (TRAV36/DV7, TRAJ48)
CAVGNEKLTF

SEQ ID NO: 436790 - protein, 14 aa, Homo sapiens
  CDR3 for beta chain variable domain of TCR clone 218395 (TRBV6-6, TRBJ2-1)
CASTVAGGPNEQFF

SEQ ID NO: 436791 - protein, 13 aa, Homo sapiens
  CDR3 for alpha chain variable domain of TCR clone 218396 (TRAV27, TRAJ8)
CAGGPTGFQKLVF

SEQ ID NO: 436792 - protein, 12 aa, Homo sapiens
  CDR3 for beta chain variable domain of TCR clone 218396 (TRBV12-5, TRBJ2-5)
CASGQGVETQYF

SEQ ID NO: 436793 - protein, 11 aa, Homo sapiens
  CDR3 for alpha chain variable domain of TCR clone 218397 (TRAV21, TRAJ11)
CAVNGYSTPTF

SEQ ID NO: 436794 - protein, 16 aa, Homo sapiens
  CDR3 for beta chain variable domain of TCR clone 218397 (TRBV19, TRBJ2-1)
CASSKAGPSSYNEQFF

SEQ ID NO: 436795 - protein, 11 aa, Homo sapiens
  CDR3 for alpha chain variable domain of TCR clone 218398 (TRAV1-2, TRAJ11)
CAVRGYSTLTF

SEQ ID NO: 436796 - protein, 13 aa, Homo sapiens
  CDR3 for beta chain variable domain of TCR clone 218398 (TRBV7-7, TRBJ2-2)
CASSLTSAGELFF

SEQ ID NO: 436797 - protein, 12 aa, Homo sapiens
  CDR3 for alpha chain variable domain of TCR clone 218399 (TRAV8-1, TRAJ6)
CASSVGSYIPTF

SEQ ID NO: 436798 - protein, 12 aa, Homo sapiens
  CDR3 for beta chain variable domain of TCR clone 218399 (TRBV19, TRBJ1-1)
CASMNRYTEAFF

SEQ ID NO: 436799 - protein, 14 aa, Homo sapiens
  CDR3 for alpha chain variable domain of TCR clone 218400 (TRAV21, TRAJ42)
CAVLGGGSQGNLIF

SEQ ID NO: 436800 - protein, 16 aa, Homo sapiens
  CDR3 for beta chain variable domain of TCR clone 218400 (TRBV19, TRBJ1-5)
CASSIDRGGPRQPQHF

SEQ ID NO: 436801 - protein, 14 aa, Homo sapiens
  CDR3 for alpha chain variable domain of TCR clone 218401 (TRAV27, TRAJ23)
CAGAFDKQGGKLIF

SEQ ID NO: 436802 - protein, 15 aa, Homo sapiens
  CDR3 for beta chain variable domain of TCR clone 218401 (TRBV7-3, TRBJ2-7)
CASSLTGQGKYEQYL

SEQ ID NO: 436803 - protein, 18 aa, Homo sapiens
  CDR3 for alpha chain variable domain of TCR clone 218402 (TRAV21, TRAJ52)
CAVRPSPAGGTSYGKLTF

SEQ ID NO: 436804 - protein, 18 aa, Homo sapiens
  CDR3 for beta chain variable domain of TCR clone 218402 (TRBV7-3, TRBJ2-5)
CASSFRGGGDPVLRARHA

SEQ ID NO: 436805 - protein, 14 aa, Homo sapiens
  CDR3 for alpha chain variable domain of TCR clone 218403 (TRAV36/DV7, TRAJ40)
CAVETTSGTYKYIF

SEQ ID NO: 436806 - protein, 14 aa, Homo sapiens
  CDR3 for beta chain variable domain of TCR clone 218403 (TRBV18, TRBJ2-7)
CASSPRGGAYEQYF

SEQ ID NO: 436807 - protein, 17 aa, Homo sapiens
  CDR3 for alpha chain variable domain of TCR clone 218404 (TRAV4, TRAJ20)
CTTASWVKGNNDYKLSF

SEQ ID NO: 436808 - protein, 17 aa, Homo sapiens
  CDR3 for beta chain variable domain of TCR clone 218404 (TRBV11-2, TRBJ2-1)
CASSVYPPGVEYNEQFF

SEQ ID NO: 436809 - protein, 16 aa, Homo sapiens
  CDR3 for alpha chain variable domain of TCR clone 218405 (TRAV27, TRAJ13)
CAGAKSYSGGYQKVTF

SEQ ID NO: 436810 - protein, 15 aa, Homo sapiens
  CDR3 for beta chain variable domain of TCR clone 218405 (TRBV29-1, TRBJ2-1)
CSEGRHALFYNEQFF

SEQ ID NO: 436811 - protein, 14 aa, Homo sapiens
  CDR3 for alpha chain variable domain of TCR clone 218406 (TRAV9-2, TRAJ39)
CALYIYNAGNMLTF

SEQ ID NO: 436812 - protein, 14 aa, Homo sapiens
  CDR3 for beta chain variable domain of TCR clone 218406 (TRBV7-2, TRBJ1-4)
CASSHSKTNEKLFF

SEQ ID NO: 436813 - protein, 15 aa, Homo sapiens
  CDR3 for alpha chain variable domain of TCR clone 218407 (TRAV26-1, TRAJ40)
CIVSFATSGTYKYIF

SEQ ID NO: 436814 - protein, 15 aa, Homo sapiens
  CDR3 for beta chain variable domain of TCR clone 218407 (TRBV5-7, TRBJ2-3)
CASSPGLASTDTQYF

SEQ ID NO: 436815 - protein, 13 aa, Homo sapiens
  CDR3 for alpha chain variable domain of TCR clone 218408 (TRAV29/DV5, TRAJ49)
CAASTNTGNQFYF

SEQ ID NO: 436816 - protein, 13 aa, Homo sapiens
  CDR3 for beta chain variable domain of TCR clone 218408 (TRBV18, TRBJ1-1)
CASSPETKPEAFF

SEQ ID NO: 436817 - protein, 14 aa, Homo sapiens
  CDR3 for alpha chain variable domain of TCR clone 218409 (TRAV1-2, TRAJ16)
CAVNRFSDGQKLLF

SEQ ID NO: 436818 - protein, 13 aa, Homo sapiens
  CDR3 for beta chain variable domain of TCR clone 218409 (TRBV19, TRBJ2-2)
CASSPLGIGELFF

SEQ ID NO: 436819 - protein, 14 aa, Homo sapiens
  CDR3 for alpha chain variable domain of TCR clone 218410 (TRAV9-2, TRAJ39)
CALYIYNAVNMLTF

SEQ ID NO: 436820 - protein, 13 aa, Homo sapiens
  CDR3 for beta chain variable domain of TCR clone 218410 (TRBV4-1, TRBJ2-2)
CASSQENTGELFF

SEQ ID NO: 436821 - protein, 14 aa, Homo sapiens
  CDR3 for alpha chain variable domain of TCR clone 218411 (TRAV27, TRAJ23)
CAGLSYHQGGKLIF

SEQ ID NO: 436822 - protein, 15 aa, Homo sapiens
  CDR3 for beta chain variable domain of TCR clone 218411 (TRBV19, TRBJ2-2)
CASSLNRGVTGELFF

SEQ ID NO: 436823 - protein, 21 aa, Homo sapiens
  CDR3 for alpha chain variable domain of TCR clone 218412 (TRAV12-1, TRAJ32)
SSVIQPPTSMHYGGATNKLIF

SEQ ID NO: 436824 - protein, 15 aa, Homo sapiens
  CDR3 for beta chain variable domain of TCR clone 218412 (TRBV7-9, TRBJ2-2)
CASGPLDTFPGELFF

SEQ ID NO: 436825 - protein, 15 aa, Homo sapiens
  CDR3 for alpha chain variable domain of TCR clone 218413 (TRAV35, TRAJ58)
CAGRRQETSGSRLTF

SEQ ID NO: 436826 - protein, 11 aa, Homo sapiens
  CDR3 for beta chain variable domain of TCR clone 218413 (TRBV11-2, TRBJ1-1)
CASSTNTEAFF

SEQ ID NO: 436827 - protein, 12 aa, Homo sapiens
  CDR3 for alpha chain variable domain of TCR clone 218414 (TRAV8-3, TRAJ41)
CAVGELGYALNF

SEQ ID NO: 436828 - protein, 16 aa, Homo sapiens
  CDR3 for beta chain variable domain of TCR clone 218414 (TRBV7-6, TRBJ2-3)
CASSGSRGEGTDTQYF

SEQ ID NO: 436829 - protein, 15 aa, Homo sapiens
  CDR3 for alpha chain variable domain of TCR clone 218415 (TRAV8-3, TRAJ11)
CAVGLLNSGYSTLTF

SEQ ID NO: 436830 - protein, 16 aa, Homo sapiens
  CDR3 for beta chain variable domain of TCR clone 218415 (TRBV4-3, TRBJ2-3)
CASSLGLAGEGDTQYF

SEQ ID NO: 436831 - protein, 13 aa, Homo sapiens
  CDR3 for alpha chain variable domain of TCR clone 218416 (TRAV20, TRAJ37)
CAGCSSNTGKLIF

SEQ ID NO: 436832 - protein, 11 aa, Homo sapiens
  CDR3 for beta chain variable domain of TCR clone 218416 (TRBV12-4, TRBJ2-3)
CASTATDTQYI

SEQ ID NO: 436833 - protein, 13 aa, Homo sapiens
  CDR3 for alpha chain variable domain of TCR clone 218417 (TRAV12-3, TRAJ7)
CAMSASGNNRLAF

SEQ ID NO: 436834 - protein, 16 aa, Homo sapiens
  CDR3 for beta chain variable domain of TCR clone 218417 (TRBV7-9, TRBJ1-2)
CASSLGFSSGEDGYTF

SEQ ID NO: 436835 - protein, 14 aa, Homo sapiens
  CDR3 for alpha chain variable domain of TCR clone 218418 (TRAV26-1, TRAJ38)
CIADNAGNNRKLSW

SEQ ID NO: 436836 - protein, 13 aa, Homo sapiens
  CDR3 for beta chain variable domain of TCR clone 218418 (TRBV20-1, TRBJ1-1)
CSARGGGNTEVFF

SEQ ID NO: 436837 - protein, 15 aa, Homo sapiens
  CDR3 for alpha chain variable domain of TCR clone 218419 (TRAV35, TRAJ40)
CAGQLGTSGTYKYIF

SEQ ID NO: 436838 - protein, 14 aa, Homo sapiens
  CDR3 for beta chain variable domain of TCR clone 218419 (TRBV7-3, TRBJ2-1)
CASSLARGTNEHFF

SEQ ID NO: 436839 - protein, 13 aa, Homo sapiens
  CDR3 for alpha chain variable domain of TCR clone 218420 (TRAV2, TRAJ15)
CAVASQAGTALIF

SEQ ID NO: 436840 - protein, 15 aa, Homo sapiens
  CDR3 for beta chain variable domain of TCR clone 218420 (TRBV2, TRBJ2-2)
CASSRETVGTRELFF

SEQ ID NO: 436841 - protein, 14 aa, Homo sapiens
  CDR3 for alpha chain variable domain of TCR clone 218421 (TRAV8-4, TRAJ45)
CASGGGGGADGLTF

SEQ ID NO: 436842 - protein, 20 aa, Homo sapiens
  CDR3 for beta chain variable domain of TCR clone 218421 (TRBV4-3, TRBJ2-3)
CASSPRVAMRASGRPDTQYF

SEQ ID NO: 436843 - protein, 13 aa, Homo sapiens
  CDR3 for alpha chain variable domain of TCR clone 218422 (TRAV17, TRAJ29)
CATGPSGNTPLVF

SEQ ID NO: 436844 - protein, 14 aa, Homo sapiens
  CDR3 for beta chain variable domain of TCR clone 218422 (TRBV11-2, TRBJ1-2)
CASSLGTANYGYTF

SEQ ID NO: 436845 - protein, 16 aa, Homo sapiens
  CDR3 for alpha chain variable domain of TCR clone 218423 (TRAV23/DV6, TRAJ48)
CAASGVVNFGNEKLTF

SEQ ID NO: 436846 - protein, 15 aa, Homo sapiens
  CDR3 for beta chain variable domain of TCR clone 218423 (TRBV20-1, TRBJ2-5)
CSAGLAGVSQETQCF

SEQ ID NO: 436847 - protein, 14 aa, Homo sapiens
  CDR3 for alpha chain variable domain of TCR clone 218424 (TRAV1-2, TRAJ16)
CAVNRLSDGQKLLF

SEQ ID NO: 436848 - protein, 15 aa, Homo sapiens
  CDR3 for beta chain variable domain of TCR clone 218424 (TRBV20-1, TRBJ2-7)
CSARDRVSGMDEQYF

SEQ ID NO: 436849 - protein, 12 aa, Homo sapiens
  CDR3 for alpha chain variable domain of TCR clone 218425 (TRAV13-1, TRAJ21)
CAAFFNFNKFYL

SEQ ID NO: 436850 - protein, 14 aa, Homo sapiens
  CDR3 for beta chain variable domain of TCR clone 218425 (TRBV4-1, TRBJ2-7)
CASRLTSGSYEQYF

SEQ ID NO: 436851 - protein, 15 aa, Homo sapiens
  CDR3 for alpha chain variable domain of TCR clone 218426 (TRAV4, TRAJ39)
CLVGPNDNAGNMLTS

SEQ ID NO: 436852 - protein, 13 aa, Homo sapiens
  CDR3 for beta chain variable domain of TCR clone 218426 (TRBV11-2, TRBJ2-5)
CASSSTGEETQYF

SEQ ID NO: 436853 - protein, 12 aa, Homo sapiens
  CDR3 for alpha chain variable domain of TCR clone 218427 (TRAV21, TRAJ49)
CAVNDGGNQFYF

SEQ ID NO: 436854 - protein, 14 aa, Homo sapiens
  CDR3 for beta chain variable domain of TCR clone 218427 (TRBV12-5, TRBJ2-5)
CASGSQTHQETQYF

SEQ ID NO: 436855 - protein, 14 aa, Homo sapiens
  CDR3 for alpha chain variable domain of TCR clone 218428 (TRAV1-2, TRAJ8)
CAVREDTGFQKLVF

SEQ ID NO: 436856 - protein, 15 aa, Homo sapiens
  CDR3 for beta chain variable domain of TCR clone 218428 (TRBV11-3, TRBJ2-3)
CASRKDGREGDTQYF

SEQ ID NO: 436857 - protein, 16 aa, Homo sapiens
  CDR3 for alpha chain variable domain of TCR clone 218429 (TRAV26-2, TRAJ48)
CILRPPFNFGNEKLTF

SEQ ID NO: 436858 - protein, 15 aa, Homo sapiens
  CDR3 for beta chain variable domain of TCR clone 218429 (TRBV20-1, TRBJ2-3)
CSARVGGTYTDTQYF

SEQ ID NO: 436859 - protein, 13 aa, Homo sapiens
  CDR3 for alpha chain variable domain of TCR clone 218430 (TRAV13-1, TRAJ21)
CAASIYHFNKFYF

SEQ ID NO: 436860 - protein, 15 aa, Homo sapiens
  CDR3 for beta chain variable domain of TCR clone 218430 (TRBV7-8, TRBJ1-5)
CASSLAGQPNQPQHF

SEQ ID NO: 436861 - protein, 14 aa, Homo sapiens
  CDR3 for alpha chain variable domain of TCR clone 218431 (TRAV12-3, TRAJ29)
CAMILLSGNTPLVF

SEQ ID NO: 436862 - protein, 16 aa, Homo sapiens
  CDR3 for beta chain variable domain of TCR clone 218431 (TRBV28, TRBJ2-7)
CASSCGTSGRGYEQYF

SEQ ID NO: 436863 - protein, 13 aa, Homo sapiens
  CDR3 for alpha chain variable domain of TCR clone 218432 (TRAV12-3, TRAJ13)
CAMTSGGYQKVTF

SEQ ID NO: 436864 - protein, 13 aa, Homo sapiens
  CDR3 for beta chain variable domain of TCR clone 218432 (TRBV20-1, TRBJ2-2)
CSALSGGTGELFF

SEQ ID NO: 436865 - protein, 16 aa, Homo sapiens
  CDR3 for alpha chain variable domain of TCR clone 218433 (TRAV27, TRAJ13)
CAGAKSDSGWYQKVNF

SEQ ID NO: 436866 - protein, 15 aa, Homo sapiens
  CDR3 for beta chain variable domain of TCR clone 218433 (TRBV29-1, TRBJ2-1)
CSVGRHALFYNEQFF

SEQ ID NO: 436867 - protein, 17 aa, Homo sapiens
  CDR3 for alpha chain variable domain of TCR clone 218434 (TRAV3, TRAJ6)
CAVREGPRSGGSYITTF

SEQ ID NO: 436868 - protein, 14 aa, Homo sapiens
  CDR3 for beta chain variable domain of TCR clone 218434 (TRBV7-2, TRBJ2-7)
CASSPKTSFYEQYF

SEQ ID NO: 436869 - protein, 14 aa, Homo sapiens
  CDR3 for alpha chain variable domain of TCR clone 218435 (TRAV36/DV7, TRAJ40)
CAVETTSGTYKYIF

SEQ ID NO: 436870 - protein, 15 aa, Homo sapiens
  CDR3 for beta chain variable domain of TCR clone 218435 (TRBV7-3, TRBJ1-1)
CASSPRADRNTEAFF

SEQ ID NO: 436871 - protein, 18 aa, Homo sapiens
  CDR3 for alpha chain variable domain of TCR clone 218436 (TRAV26-1, TRAJ23)
CIVRVGLEVWNQGGKLIF

SEQ ID NO: 436872 - protein, 15 aa, Homo sapiens
  CDR3 for beta chain variable domain of TCR clone 218436 (TRBV10-3, TRBJ2-3)
CAISDWDSDTDTQYF

SEQ ID NO: 436873 - protein, 16 aa, Homo sapiens
  CDR3 for alpha chain variable domain of TCR clone 218437 (TRAV3, TRAJ21)
CAVRDIERGNFNKFYF

SEQ ID NO: 436874 - protein, 12 aa, Homo sapiens
  CDR3 for beta chain variable domain of TCR clone 218437 (TRBV7-2, TRBJ1-5)
CASSLWSQPQHF

SEQ ID NO: 436875 - protein, 14 aa, Homo sapiens
  CDR3 for alpha chain variable domain of TCR clone 218438 (TRAV35, TRAJ22)
CAGLRPGSARQLTF

SEQ ID NO: 436876 - protein, 14 aa, Homo sapiens
  CDR3 for beta chain variable domain of TCR clone 218438 (TRBV12-4, TRBJ2-5)
CASGSRTHQETQYF

SEQ ID NO: 436877 - protein, 12 aa, Homo sapiens
  CDR3 for alpha chain variable domain of TCR clone 218439 (TRAV8-6, TRAJ31)
CAVSPNNARLMF

SEQ ID NO: 436878 - protein, 15 aa, Homo sapiens
  CDR3 for beta chain variable domain of TCR clone 218439 (TRBV19, TRBJ1-2)
CASNDGTGKDYGYIF

SEQ ID NO: 436879 - protein, 12 aa, Homo sapiens
  CDR3 for alpha chain variable domain of TCR clone 218440 (TRAV2, TRAJ26)
CAGSHGRLWSEF

SEQ ID NO: 436880 - protein, 16 aa, Homo sapiens
  CDR3 for beta chain variable domain of TCR clone 218440 (TRBV13, TRBJ2-2)
CASSPRTGEHTGELFF

SEQ ID NO: 436881 - protein, 13 aa, Homo sapiens
  CDR3 for alpha chain variable domain of TCR clone 218441 (TRAV12-2, TRAJ24)
CAVSTDSGGKLQF

SEQ ID NO: 436882 - protein, 12 aa, Homo sapiens
  CDR3 for beta chain variable domain of TCR clone 218441 (TRBV7-6, TRBJ2-7)
CASSLADSEQYF

SEQ ID NO: 436883 - protein, 18 aa, Homo sapiens
  CDR3 for alpha chain variable domain of TCR clone 218442 (TRAV12-3, TRAJ52)
CAMSVGGAGGTSYGKLTS

SEQ ID NO: 436884 - protein, 17 aa, Homo sapiens
  CDR3 for beta chain variable domain of TCR clone 218442 (TRBV13, TRBJ2-3)
CASSLSRVAGGRNTQYF

SEQ ID NO: 436885 - protein, 14 aa, Homo sapiens
  CDR3 for alpha chain variable domain of TCR clone 218443 (TRAV22, TRAJ6)
CAGVGPGGSYIPTF

SEQ ID NO: 436886 - protein, 11 aa, Homo sapiens
  CDR3 for beta chain variable domain of TCR clone 218443 (TRBV20-1, TRBJ2-1)
CSLSSGSEQFF

SEQ ID NO: 436887 - protein, 13 aa, Homo sapiens
  CDR3 for alpha chain variable domain of TCR clone 218444 (TRAV26-1, TRAJ34)
CIVTPWITDKLIF

SEQ ID NO: 436888 - protein, 14 aa, Homo sapiens
  CDR3 for beta chain variable domain of TCR clone 218444 (TRBV7-2, TRBJ2-7)
CASRSQGAAYEQYF

SEQ ID NO: 436889 - protein, 14 aa, Homo sapiens
  CDR3 for alpha chain variable domain of TCR clone 218445 (TRAV1-1, TRAJ12)
CAVRDQDSSYKLIF

SEQ ID NO: 436890 - protein, 15 aa, Homo sapiens
  CDR3 for beta chain variable domain of TCR clone 218445 (TRBV5-1, TRBJ2-5)
CTSSRTGTSGETQYF

SEQ ID NO: 436891 - protein, 15 aa, Homo sapiens
  CDR3 for alpha chain variable domain of TCR clone 218446 (TRAV9-2, TRAJ10)
CALSDLGGGGNKLTF

SEQ ID NO: 436892 - protein, 15 aa, Homo sapiens
  CDR3 for beta chain variable domain of TCR clone 218446 (TRBV6-6, TRBJ2-1)
CATRQGVSSYNEQCF

SEQ ID NO: 436893 - protein, 11 aa, Homo sapiens
  CDR3 for alpha chain variable domain of TCR clone 218447 (TRAV2, TRAJ13)
CASGGYPKVTF

SEQ ID NO: 436894 - protein, 17 aa, Homo sapiens
  CDR3 for beta chain variable domain of TCR clone 218447 (TRBV11-2, TRBJ2-1)
CASSLYPPGVEYNEQFF

SEQ ID NO: 436895 - protein, 13 aa, Homo sapiens
  CDR3 for alpha chain variable domain of TCR clone 218448 (TRAV2, TRAJ40)
CAVVTSGTYKYIF

SEQ ID NO: 436896 - protein, 17 aa, Homo sapiens
  CDR3 for beta chain variable domain of TCR clone 218448 (TRBV4-1, TRBJ2-7)
CASIRDPLGVRGGEQYF

SEQ ID NO: 436897 - protein, 15 aa, Homo sapiens
  CDR3 for alpha chain variable domain of TCR clone 218449 (TRAV8-6, TRAJ45)
CAVSEQGGGADGLTF

SEQ ID NO: 436898 - protein, 14 aa, Homo sapiens
  CDR3 for beta chain variable domain of TCR clone 218449 (TRBV28, TRBJ2-5)
CASRWSSFWETQYF

SEQ ID NO: 436899 - protein, 17 aa, Homo sapiens
  CDR3 for alpha chain variable domain of TCR clone 218450 (TRAV3, TRAJ6)
CAVRDGPRAGGSYTPTV

SEQ ID NO: 436900 - protein, 14 aa, Homo sapiens
  CDR3 for beta chain variable domain of TCR clone 218450 (TRBV7-2, TRBJ2-7)
CASSPKTSFYEQYF

SEQ ID NO: 436901 - protein, 14 aa, Homo sapiens
  CDR3 for alpha chain variable domain of TCR clone 218451 (TRAV8-4, TRAJ9)
CAVRINTGGLKTIF

SEQ ID NO: 436902 - protein, 15 aa, Homo sapiens
  CDR3 for beta chain variable domain of TCR clone 218451 (TRBV20-1, TRBJ2-7)
CSARDRVSGMDEQYF

SEQ ID NO: 436903 - protein, 16 aa, Homo sapiens
  CDR3 for alpha chain variable domain of TCR clone 218452 (TRAV8-3, TRAJ42)
CAVCEGNGGSQGNLIF

SEQ ID NO: 436904 - protein, 14 aa, Homo sapiens
  CDR3 for beta chain variable domain of TCR clone 218452 (TRBV7-2, TRBJ2-7)
CASSPKTSFYEQYF

SEQ ID NO: 436905 - protein, 16 aa, Homo sapiens
  CDR3 for alpha chain variable domain of TCR clone 218453 (TRAV30, TRAJ24)
CGTEIVDADSWGKFQF

SEQ ID NO: 436906 - protein, 19 aa, Homo sapiens
  CDR3 for beta chain variable domain of TCR clone 218453 (TRBV25-1, TRBJ2-2)
CAILVYRVDMGRKTGELFF

SEQ ID NO: 436907 - protein, 10 aa, Homo sapiens
  CDR3 for alpha chain variable domain of TCR clone 218454 (TRAV26-1, TRAJ22)
RSGFARQLTF

SEQ ID NO: 436908 - protein, 13 aa, Homo sapiens
  CDR3 for beta chain variable domain of TCR clone 218454 (TRBV7-9, TRBJ1-2)
CASSLKQNYGYTF

SEQ ID NO: 436909 - protein, 16 aa, Homo sapiens
  CDR3 for alpha chain variable domain of TCR clone 218455 (TRAV30, TRAJ24)
CGTEIVDADSWGKFQF

SEQ ID NO: 436910 - protein, 17 aa, Homo sapiens
  CDR3 for beta chain variable domain of TCR clone 218455 (TRBV20-1, TRBJ2-7)
CSARDRVSGMDEQYLGR

SEQ ID NO: 436911 - protein, 17 aa, Homo sapiens
  CDR3 for alpha chain variable domain of TCR clone 218456 (TRAV4, TRAJ18)
CLVGERSVGSTLGRLSF

SEQ ID NO: 436912 - protein, 16 aa, Homo sapiens
  CDR3 for beta chain variable domain of TCR clone 218456 (TRBV19, TRBJ2-1)
CASSKAGPSSYNEQFF

SEQ ID NO: 436913 - protein, 13 aa, Homo sapiens
  CDR3 for alpha chain variable domain of TCR clone 218457 (TRAV12-2, TRAJ37)
CAGGSGNTGKLIF

SEQ ID NO: 436914 - protein, 14 aa, Homo sapiens
  CDR3 for beta chain variable domain of TCR clone 218457 (TRBV25-1, TRBJ1-1)
CASTHLGGNTEAFF

SEQ ID NO: 436915 - protein, 21 aa, Homo sapiens
  CDR3 for alpha chain variable domain of TCR clone 218458 (TRAV1-1, TRAJ6)
CAVRREEATYLHLEEEPALLF

SEQ ID NO: 436916 - protein, 13 aa, Homo sapiens
  CDR3 for beta chain variable domain of TCR clone 218458 (TRBV7-7, TRBJ1-1)
CASSLGANTEAFF

SEQ ID NO: 436917 - protein, 17 aa, Homo sapiens
  CDR3 for alpha chain variable domain of TCR clone 218459 (TRAV3, TRAJ42)
FAVRDRDYGGSQGNLIF

SEQ ID NO: 436918 - protein, 16 aa, Homo sapiens
  CDR3 for beta chain variable domain of TCR clone 218459 (TRBV20-1, TRBJ2-1)
CSARDLKQGMNNEQFF

SEQ ID NO: 436919 - protein, 12 aa, Homo sapiens
  CDR3 for alpha chain variable domain of TCR clone 218460 (TRAV1-2, TRAJ11)
CAVRGGYSTLTF

SEQ ID NO: 436920 - protein, 11 aa, Homo sapiens
  CDR3 for beta chain variable domain of TCR clone 218460 (TRBV6-3, TRBJ2-3)
FATGQADTQYF

SEQ ID NO: 436921 - protein, 15 aa, Homo sapiens
  CDR3 for alpha chain variable domain of TCR clone 218461 (TRAV29/DV5, TRAJ29)
CAASERSSGHTPLDF

SEQ ID NO: 436922 - protein, 17 aa, Homo sapiens
  CDR3 for beta chain variable domain of TCR clone 218461 (TRBV4-1, TRBJ1-4)
CASSQEGPRGVEEKLFF

SEQ ID NO: 436923 - protein, 13 aa, Homo sapiens
  CDR3 for alpha chain variable domain of TCR clone 218462 (TRAV17, TRAJ21)
CATDGGHFNKFYF

SEQ ID NO: 436924 - protein, 13 aa, Homo sapiens
  CDR3 for beta chain variable domain of TCR clone 218462 (TRBV11-3, TRBJ1-1)
CASTGSLNTEAFF

SEQ ID NO: 436925 - protein, 15 aa, Homo sapiens
  CDR3 for alpha chain variable domain of TCR clone 218463 (TRAV21, TRAJ38)
CAVRQDAGNNRKLIW

SEQ ID NO: 436926 - protein, 11 aa, Homo sapiens
  CDR3 for beta chain variable domain of TCR clone 218463 (TRBV12-4, TRBJ2-3)
CASNATDTQYF

SEQ ID NO: 436927 - protein, 14 aa, Homo sapiens
  CDR3 for alpha chain variable domain of TCR clone 218464 (TRAV12-2, TRAJ17)
CAVLFRAAGNKLTF

SEQ ID NO: 436928 - protein, 17 aa, Homo sapiens
  CDR3 for beta chain variable domain of TCR clone 218464 (TRBV20-1, TRBJ2-2)
CSASGSVQGGLTGELFF

SEQ ID NO: 436929 - protein, 13 aa, Homo sapiens
  CDR3 for alpha chain variable domain of TCR clone 218465 (TRAV13-1, TRAJ48)
CAAASFGNEKLTF

SEQ ID NO: 436930 - protein, 14 aa, Homo sapiens
  CDR3 for beta chain variable domain of TCR clone 218465 (TRBV18, TRBJ2-1)
CASSPGTGETEQFF

SEQ ID NO: 436931 - protein, 14 aa, Homo sapiens
  CDR3 for alpha chain variable domain of TCR clone 218466 (TRAV8-3, TRAJ6)
CAVGASGGSYIPTF

SEQ ID NO: 436932 - protein, 17 aa, Homo sapiens
  CDR3 for beta chain variable domain of TCR clone 218466 (TRBV18, TRBJ2-2)
CASSPSDPWQNTEELFF

SEQ ID NO: 436933 - protein, 15 aa, Homo sapiens
  CDR3 for alpha chain variable domain of TCR clone 218467 (TRAV12-3, TRAJ48)
CVMNAKNFGNEKLTF

SEQ ID NO: 436934 - protein, 14 aa, Homo sapiens
  CDR3 for beta chain variable domain of TCR clone 218467 (TRBV2, TRBJ1-6)
CASSESRNNSPLHF

SEQ ID NO: 436935 - protein, 13 aa, Homo sapiens
  CDR3 for alpha chain variable domain of TCR clone 218468 (TRAV8-3, TRAJ28)
CAVGAVGSYQLTF

SEQ ID NO: 436936 - protein, 13 aa, Homo sapiens
  CDR3 for beta chain variable domain of TCR clone 218468 (TRBV10-1, TRBJ2-1)
CASSAGPDNEQFF

SEQ ID NO: 436937 - protein, 13 aa, Homo sapiens
  CDR3 for alpha chain variable domain of TCR clone 218469 (TRAV1-2, TRAJ9)
CAALNTGGFTTIF

SEQ ID NO: 436938 - protein, 14 aa, Homo sapiens
  CDR3 for beta chain variable domain of TCR clone 218469 (TRBV13, TRBJ2-3)
CASSSGSPTDTQYF

SEQ ID NO: 436939 - protein, 14 aa, Homo sapiens
  CDR3 for alpha chain variable domain of TCR clone 218470 (TRAV13-1, TRAJ52)
CAANGGTSYGKLTL

SEQ ID NO: 436940 - protein, 14 aa, Homo sapiens
  CDR3 for beta chain variable domain of TCR clone 218470 (TRBV10-3, TRBJ2-5)
CATSRDRDRETQYF

SEQ ID NO: 436941 - protein, 11 aa, Homo sapiens
  CDR3 for alpha chain variable domain of TCR clone 218471 (TRAV17, TRAJ49)
CATNTGSQFYF

SEQ ID NO: 436942 - protein, 12 aa, Homo sapiens
  CDR3 for beta chain variable domain of TCR clone 218471 (TRBV2, TRBJ2-7)
CASSGGSGIPYY

SEQ ID NO: 436943 - protein, 16 aa, Homo sapiens
  CDR3 for alpha chain variable domain of TCR clone 218472 (TRAV8-3, TRAJ44)
CAVGASNTGTASKLTF

SEQ ID NO: 436944 - protein, 15 aa, Homo sapiens
  CDR3 for beta chain variable domain of TCR clone 218472 (TRBV27, TRBJ1-5)
CASTFNRGSNQPQHC

SEQ ID NO: 436945 - protein, 13 aa, Homo sapiens
  CDR3 for alpha chain variable domain of TCR clone 218473 (TRAV20, TRAJ31)
CPVQAWNNARLMF

SEQ ID NO: 436946 - protein, 16 aa, Homo sapiens
  CDR3 for beta chain variable domain of TCR clone 218473 (TRBV6-6, TRBJ2-1)
CASSWGGQGPYNEQFF

SEQ ID NO: 436947 - protein, 12 aa, Homo sapiens
  CDR3 for alpha chain variable domain of TCR clone 218474 (TRAV36/DV7, TRAJ40)
CAVGTGTYIYIF

SEQ ID NO: 436948 - protein, 13 aa, Homo sapiens
  CDR3 for beta chain variable domain of TCR clone 218474 (TRBV7-7, TRBJ1-5)
CASSPGKNQPQHF

SEQ ID NO: 436949 - protein, 14 aa, Homo sapiens
  CDR3 for alpha chain variable domain of TCR clone 218475 (TRAV8-3, TRAJ15)
CAVGRPQAGTALIF

SEQ ID NO: 436950 - protein, 15 aa, Homo sapiens
  CDR3 for beta chain variable domain of TCR clone 218475 (TRBV27, TRBJ2-1)
CASSNGGGSPNEQFF

SEQ ID NO: 436951 - protein, 12 aa, Homo sapiens
  CDR3 for alpha chain variable domain of TCR clone 218476 (TRAV12-1, TRAJ34)
CVVAGATDKLIF

SEQ ID NO: 436952 - protein, 11 aa, Homo sapiens
  CDR3 for beta chain variable domain of TCR clone 218476 (TRBV28, TRBJ2-1)
CASRRVNEQFF

SEQ ID NO: 436953 - protein, 13 aa, Homo sapiens
  CDR3 for alpha chain variable domain of TCR clone 218477 (TRAV17, TRAJ54)
CATVIQGAQKLVF

SEQ ID NO: 436954 - protein, 15 aa, Homo sapiens
  CDR3 for beta chain variable domain of TCR clone 218477 (TRBV13, TRBJ2-1)
CASSLLPGLNNEQFF

SEQ ID NO: 436955 - protein, 14 aa, Homo sapiens
  CDR3 for alpha chain variable domain of TCR clone 218478 (TRAV12-1, TRAJ17)
CVVNYKAAGNKRTF

SEQ ID NO: 436956 - protein, 15 aa, Homo sapiens
  CDR3 for beta chain variable domain of TCR clone 218478 (TRBV12-4, TRBJ2-1)
CASSPLSGRNNEQFF

SEQ ID NO: 436957 - protein, 16 aa, Homo sapiens
  CDR3 for alpha chain variable domain of TCR clone 218479 (TRAV16, TRAJ42)
CARKMNYGGSQGNLSF

SEQ ID NO: 436958 - protein, 14 aa, Homo sapiens
  CDR3 for beta chain variable domain of TCR clone 218479 (TRBV14, TRBJ2-3)
CQQPDDRDTDTQYF

SEQ ID NO: 436959 - protein, 13 aa, Homo sapiens
  CDR3 for alpha chain variable domain of TCR clone 218480 (TRAV8-2, TRAJ43)
CVVSDQGDNDMRL

SEQ ID NO: 436960 - protein, 12 aa, Homo sapiens
  CDR3 for beta chain variable domain of TCR clone 218480 (TRBV7-9, TRBJ2-7)
CASRTGFDEQYF

SEQ ID NO: 436961 - protein, 11 aa, Homo sapiens
  CDR3 for alpha chain variable domain of TCR clone 218481 (TRAV12-3, TRAJ43)
CAMSVSNDMRF

SEQ ID NO: 436962 - protein, 14 aa, Homo sapiens
  CDR3 for beta chain variable domain of TCR clone 218481 (TRBV20-1, TRBJ1-1)
CSAQTRIGGTEAFF

SEQ ID NO: 436963 - protein, 14 aa, Homo sapiens
  CDR3 for alpha chain variable domain of TCR clone 218482 (TRAV23/DV6, TRAJ4)
CAANLSGGYNKLIF

SEQ ID NO: 436964 - protein, 17 aa, Homo sapiens
  CDR3 for beta chain variable domain of TCR clone 218482 (TRBV4-1, TRBJ1-3)
CASSPQRGIQFGNTMYF

SEQ ID NO: 436965 - protein, 12 aa, Homo sapiens
  CDR3 for alpha chain variable domain of TCR clone 218483 (TRAV12-3, TRAJ17)
CAMTLTGNKLTF

SEQ ID NO: 436966 - protein, 15 aa, Homo sapiens
  CDR3 for beta chain variable domain of TCR clone 218483 (TRBV11-3, TRBJ2-3)
WASLRDGREGDTQYF

SEQ ID NO: 436967 - protein, 12 aa, Homo sapiens
  CDR3 for alpha chain variable domain of TCR clone 218484 (TRAV3, TRAJ26)
CAVRDYGQNFVF

SEQ ID NO: 436968 - protein, 15 aa, Homo sapiens
  CDR3 for beta chain variable domain of TCR clone 218484 (TRBV7-8, TRBJ2-1)
CASSLAGGLYNEQFF

SEQ ID NO: 436969 - protein, 11 aa, Homo sapiens
  CDR3 for alpha chain variable domain of TCR clone 218485 (TRAV1-1, TRAJ23)
CAVRQGGKRIF

SEQ ID NO: 436970 - protein, 20 aa, Homo sapiens
  CDR3 for beta chain variable domain of TCR clone 218485 (TRBV7-8, TRBJ2-2)
CASSHFFPGPTIHITGELFF

SEQ ID NO: 436971 - protein, 14 aa, Homo sapiens
  CDR3 for alpha chain variable domain of TCR clone 218486 (TRAV16, TRAJ58)
CALFKETSGSRLTF

SEQ ID NO: 436972 - protein, 15 aa, Homo sapiens
  CDR3 for beta chain variable domain of TCR clone 218486 (TRBV9, TRBJ1-6)
CASSIAGTGDSPLHF

SEQ ID NO: 436973 - protein, 20 aa, Homo sapiens
  CDR3 for alpha chain variable domain of TCR clone 218487 (TRAV1-1, TRAJ4)
CLLLLCCEGFLSGGYNKLIF

SEQ ID NO: 436974 - protein, 13 aa, Homo sapiens
  CDR3 for beta chain variable domain of TCR clone 218487 (TRBV5-5, TRBJ1-2)
CASSFWRGEDYTF

SEQ ID NO: 436975 - protein, 13 aa, Homo sapiens
  CDR3 for alpha chain variable domain of TCR clone 218488 (TRAV8-3, TRAJ48)
CAVVPFGNEKLTF

SEQ ID NO: 436976 - protein, 14 aa, Homo sapiens
  CDR3 for beta chain variable domain of TCR clone 218488 (TRBV18, TRBJ2-7)
CASSPRGGAYEQCF

SEQ ID NO: 436977 - protein, 13 aa, Homo sapiens
  CDR3 for alpha chain variable domain of TCR clone 218489 (TRAV26-1, TRAJ33)
CIVRVDSNYQLIW

SEQ ID NO: 436978 - protein, 15 aa, Homo sapiens
  CDR3 for beta chain variable domain of TCR clone 218489 (TRBV4-1, TRBJ1-4)
CASSDTGRTNEKLFF

SEQ ID NO: 436979 - protein, 13 aa, Homo sapiens
  CDR3 for alpha chain variable domain of TCR clone 218490 (TRAV3, TRAJ27)
CAVRPLGAGKSTF

SEQ ID NO: 436980 - protein, 12 aa, Homo sapiens
  CDR3 for beta chain variable domain of TCR clone 218490 (TRBV11-3, TRBJ2-2)
CASSLGGGELFF

SEQ ID NO: 436981 - protein, 14 aa, Homo sapiens
  CDR3 for alpha chain variable domain of TCR clone 218491 (TRAV16, TRAJ10)
CSKKHTGGGNKLTV

SEQ ID NO: 436982 - protein, 13 aa, Homo sapiens
  CDR3 for beta chain variable domain of TCR clone 218491 (TRBV12-5, TRBJ2-3)
CASGDRQSDTQYF

SEQ ID NO: 436983 - protein, 19 aa, Homo sapiens
  CDR3 for alpha chain variable domain of TCR clone 218492 (TRAV12-3, TRAJ40)
SPVIQPPTSVQDRTYKYIF

SEQ ID NO: 436984 - protein, 13 aa, Homo sapiens
  CDR3 for beta chain variable domain of TCR clone 218492 (TRBV20-1, TRBJ2-5)
CSAREGGKETQYF

SEQ ID NO: 436985 - protein, 15 aa, Homo sapiens
  CDR3 for alpha chain variable domain of TCR clone 218493 (TRAV13-1, TRAJ44)
CAASLGAGTASKLTF

SEQ ID NO: 436986 - protein, 13 aa, Homo sapiens
  CDR3 for beta chain variable domain of TCR clone 218493 (TRBV10-2, TRBJ2-7)
CASGASGGYEQYF

SEQ ID NO: 436987 - protein, 15 aa, Homo sapiens
  CDR3 for alpha chain variable domain of TCR clone 218494 (TRAV12-3, TRAJ13)
CAMSARSGGYQKVTF

SEQ ID NO: 436988 - protein, 15 aa, Homo sapiens
  CDR3 for beta chain variable domain of TCR clone 218494 (TRBV3-1, TRBJ2-1)
CASSQDYTPRGEQFF

SEQ ID NO: 436989 - protein, 14 aa, Homo sapiens
  CDR3 for alpha chain variable domain of TCR clone 218495 (TRAV1-2, TRAJ8)
CAVREDTGSQTLVF

SEQ ID NO: 436990 - protein, 15 aa, Homo sapiens
  CDR3 for beta chain variable domain of TCR clone 218495 (TRBV6-3, TRBJ2-7)
CASSSPGTVFYEQYF

SEQ ID NO: 436991 - protein, 16 aa, Homo sapiens
  CDR3 for alpha chain variable domain of TCR clone 218496 (TRAV22, TRAJ45)
CAVERGKIGGADGLTF

SEQ ID NO: 436992 - protein, 13 aa, Homo sapiens
  CDR3 for beta chain variable domain of TCR clone 218496 (TRBV27, TRBJ1-1)
CASSLSIGAEAFF

SEQ ID NO: 436993 - protein, 14 aa, Homo sapiens
  CDR3 for alpha chain variable domain of TCR clone 218497 (TRAV8-3, TRAJ44)
CAVGNTGTASKLPF

SEQ ID NO: 436994 - protein, 15 aa, Homo sapiens
  CDR3 for beta chain variable domain of TCR clone 218497 (TRBV28, TRBJ2-7)
CASSFRGQGRYEQYF

SEQ ID NO: 436995 - protein, 17 aa, Homo sapiens
  CDR3 for alpha chain variable domain of TCR clone 218498 (TRAV38-2/DV8, TRAJ45)
CAYRSRYSGGGADGLTF

SEQ ID NO: 436996 - protein, 15 aa, Homo sapiens
  CDR3 for beta chain variable domain of TCR clone 218498 (TRBV19, TRBJ2-1)
CASIKGRGPYDEQFF

SEQ ID NO: 436997 - protein, 13 aa, Homo sapiens
  CDR3 for alpha chain variable domain of TCR clone 218499 (TRAV13-1, TRAJ39)
CSKYSNAGNMLTF

SEQ ID NO: 436998 - protein, 16 aa, Homo sapiens
  CDR3 for beta chain variable domain of TCR clone 218499 (TRBV2, TRBJ2-3)
CASSTSVEGVTDTQYF

SEQ ID NO: 436999 - protein, 16 aa, Homo sapiens
  CDR3 for alpha chain variable domain of TCR clone 218500 (TRAV3, TRAJ37)
CAMRPHGSGNTGKLIF

SEQ ID NO: 437000 - protein, 14 aa, Homo sapiens
  CDR3 for beta chain variable domain of TCR clone 218500 (TRBV7-2, TRBJ2-2)
CASSSDGHTGELFF

SEQ ID NO: 437001 - protein, 14 aa, Homo sapiens
  CDR3 for alpha chain variable domain of TCR clone 218501 (TRAV8-4, TRAJ27)
WAGSKGTNAGKSNF

SEQ ID NO: 437002 - protein, 16 aa, Homo sapiens
  CDR3 for beta chain variable domain of TCR clone 218501 (TRBV2, TRBJ2-7)
CASSSTRRGSSYEQYF

SEQ ID NO: 437003 - protein, 11 aa, Homo sapiens
  CDR3 for alpha chain variable domain of TCR clone 218502 (TRAV3, TRAJ21)
CAVGNFSKFYF

SEQ ID NO: 437004 - protein, 11 aa, Homo sapiens
  CDR3 for beta chain variable domain of TCR clone 218502 (TRBV29-1, TRBJ2-5)
CSEDRTGTQYF

SEQ ID NO: 437005 - protein, 14 aa, Homo sapiens
  CDR3 for alpha chain variable domain of TCR clone 218503 (TRAV16, TRAJ26)
CALSGCNYGQNFVF

SEQ ID NO: 437006 - protein, 16 aa, Homo sapiens
  CDR3 for beta chain variable domain of TCR clone 218503 (TRBV19, TRBJ2-1)
CASSKAGPSSYNEQFF

SEQ ID NO: 437007 - protein, 13 aa, Homo sapiens
  CDR3 for alpha chain variable domain of TCR clone 218504 (TRAV14/DV4, TRAJ20)
CAMREGRDYKLSF

SEQ ID NO: 437008 - protein, 14 aa, Homo sapiens
  CDR3 for beta chain variable domain of TCR clone 218504 (TRBV19, TRBJ2-5)
CASSMTGQQETQYC

SEQ ID NO: 437009 - protein, 15 aa, Homo sapiens
  CDR3 for alpha chain variable domain of TCR clone 218505 (TRAV38-2/DV8, TRAJ45)
CAYWDSGGGADGLTF

SEQ ID NO: 437010 - protein, 14 aa, Homo sapiens
  CDR3 for beta chain variable domain of TCR clone 218505 (TRBV6-1, TRBJ1-3)
CASVQGGGGNTIYF

SEQ ID NO: 437011 - protein, 14 aa, Homo sapiens
  CDR3 for alpha chain variable domain of TCR clone 218506 (TRAV13-1, TRAJ52)
CAALDGTSYGKLTF

SEQ ID NO: 437012 - protein, 15 aa, Homo sapiens
  CDR3 for beta chain variable domain of TCR clone 218506 (TRBV20-1, TRBJ2-7)
CSARDRVSGMDEQYF

SEQ ID NO: 437013 - protein, 14 aa, Homo sapiens
  CDR3 for alpha chain variable domain of TCR clone 218507 (TRAV38-1, TRAJ45)
CAYYSGGGADGLTF

SEQ ID NO: 437014 - protein, 20 aa, Homo sapiens
  CDR3 for beta chain variable domain of TCR clone 218507 (TRBV28, TRBJ2-1)
CASTPIGGSPGLAGGNEQFF

SEQ ID NO: 437015 - protein, 15 aa, Homo sapiens
  CDR3 for alpha chain variable domain of TCR clone 218508 (TRAV13-1, TRAJ27)
CAARELNTNAGKSTF

SEQ ID NO: 437016 - protein, 12 aa, Homo sapiens
  CDR3 for beta chain variable domain of TCR clone 218508 (TRBV7-8, TRBJ2-7)
CASSLGDREQYF

SEQ ID NO: 437017 - protein, 17 aa, Homo sapiens
  CDR3 for alpha chain variable domain of TCR clone 218509 (TRAV26-2, TRAJ32)
QRCCCVGYGGATNKLIF

SEQ ID NO: 437018 - protein, 15 aa, Homo sapiens
  CDR3 for beta chain variable domain of TCR clone 218509 (TRBV27, TRBJ2-5)
CASSLYPRGGETQYF

SEQ ID NO: 437019 - protein, 14 aa, Homo sapiens
  CDR3 for alpha chain variable domain of TCR clone 218510 (TRAV8-2, TRAJ45)
CVVSAGGGADGLTF

SEQ ID NO: 437020 - protein, 12 aa, Homo sapiens
  CDR3 for beta chain variable domain of TCR clone 218510 (TRBV12-4, TRBJ2-1)
CAGSLVRVEQFF

SEQ ID NO: 437021 - protein, 14 aa, Homo sapiens
  CDR3 for alpha chain variable domain of TCR clone 218511 (TRAV29/DV5, TRAJ28)
CAARAGAGRYQLTF

SEQ ID NO: 437022 - protein, 13 aa, Homo sapiens
  CDR3 for beta chain variable domain of TCR clone 218511 (TRBV7-2, TRBJ1-5)
CASSFARNQPQHF

SEQ ID NO: 437023 - protein, 17 aa, Homo sapiens
  CDR3 for alpha chain variable domain of TCR clone 218512 (TRAV3, TRAJ6)
CAVRDGTRAGGSYIPTF

SEQ ID NO: 437024 - protein, 13 aa, Homo sapiens
  CDR3 for beta chain variable domain of TCR clone 218512 (TRBV19, TRBJ2-7)
CASSIDRTYEQYF

SEQ ID NO: 437025 - protein, 14 aa, Homo sapiens
  CDR3 for alpha chain variable domain of TCR clone 218513 (TRAV12-1, TRAJ39)
CVVNFNNAGNMLTF

SEQ ID NO: 437026 - protein, 16 aa, Homo sapiens
  CDR3 for beta chain variable domain of TCR clone 218513 (TRBV19, TRBJ2-3)
CASSPGAASRTDTQYF

SEQ ID NO: 437027 - protein, 14 aa, Homo sapiens
  CDR3 for alpha chain variable domain of TCR clone 218514 (TRAV1-2, TRAJ16)
CAVNRFSDGQKLLF

SEQ ID NO: 437028 - protein, 18 aa, Homo sapiens
  CDR3 for beta chain variable domain of TCR clone 218514 (TRBV4-1, TRBJ1-5)
CASSQDSRGQGLNQPQHF

SEQ ID NO: 437029 - protein, 14 aa, Homo sapiens
  CDR3 for alpha chain variable domain of TCR clone 218515 (TRAV12-1, TRAJ37)
CVVTGSSNTGKLIF

SEQ ID NO: 437030 - protein, 20 aa, Homo sapiens
  CDR3 for beta chain variable domain of TCR clone 218515 (TRBV23-1, TRBJ2-5)
CISAPAVPERVLLMQETQYF

SEQ ID NO: 437031 - protein, 14 aa, Homo sapiens
  CDR3 for alpha chain variable domain of TCR clone 218516 (TRAV2, TRAJ37)
CAVDFTSKTGKLIF

SEQ ID NO: 437032 - protein, 12 aa, Homo sapiens
  CDR3 for beta chain variable domain of TCR clone 218516 (TRBV29-1, TRBJ2-3)
CSVTGGADTQYF

SEQ ID NO: 437033 - protein, 15 aa, Homo sapiens
  CDR3 for alpha chain variable domain of TCR clone 218517 (TRAV3, TRAJ22)
CAVRDRGGSARQLTF

SEQ ID NO: 437034 - protein, 16 aa, Homo sapiens
  CDR3 for beta chain variable domain of TCR clone 218517 (TRBV2, TRBJ1-3)
CASSRTGGSTGNTIYF

SEQ ID NO: 437035 - protein, 14 aa, Homo sapiens
  CDR3 for alpha chain variable domain of TCR clone 218518 (TRAV30, TRAJ33)
CGTVAPRSNYQLIW

SEQ ID NO: 437036 - protein, 15 aa, Homo sapiens
  CDR3 for beta chain variable domain of TCR clone 218518 (TRBV7-9, TRBJ1-2)
CASSLDREPNYGYTF

SEQ ID NO: 437037 - protein, 17 aa, Homo sapiens
  CDR3 for alpha chain variable domain of TCR clone 218519 (TRAV3, TRAJ28)
CAVRPLYSGAGSYQLTF

SEQ ID NO: 437038 - protein, 13 aa, Homo sapiens
  CDR3 for beta chain variable domain of TCR clone 218519 (TRBV19, TRBJ2-7)
CASSPRQSYEQYF

SEQ ID NO: 437039 - protein, 14 aa, Homo sapiens
  CDR3 for alpha chain variable domain of TCR clone 218520 (TRAV12-1, TRAJ23)
CVVMIYNQGGKTIF

SEQ ID NO: 437040 - protein, 23 aa, Homo sapiens
  CDR3 for beta chain variable domain of TCR clone 218520 (TRBV7-3, TRBJ1-6)
CASSLTSRDEASDPSSYNSPLLF

SEQ ID NO: 437041 - protein, 13 aa, Homo sapiens
  CDR3 for alpha chain variable domain of TCR clone 218521 (TRAV2, TRAJ9)
CAGGRRLQNYLWS

SEQ ID NO: 437042 - protein, 16 aa, Homo sapiens
  CDR3 for beta chain variable domain of TCR clone 218521 (TRBV13, TRBJ2-2)
CASSPRTWEHTGELFF

SEQ ID NO: 437043 - protein, 14 aa, Homo sapiens
  CDR3 for alpha chain variable domain of TCR clone 218522 (TRAV1-2, TRAJ16)
CAVNRFSDGQKLLF

SEQ ID NO: 437044 - protein, 15 aa, Homo sapiens
  CDR3 for beta chain variable domain of TCR clone 218522 (TRBV6-5, TRBJ2-1)
CASSKGLAGNNEQFF

SEQ ID NO: 437045 - protein, 16 aa, Homo sapiens
  CDR3 for alpha chain variable domain of TCR clone 218523 (TRAV30, TRAJ24)
CGREIVDADSWGKFQF

SEQ ID NO: 437046 - protein, 18 aa, Homo sapiens
  CDR3 for beta chain variable domain of TCR clone 218523 (TRBV11-2, TRBJ2-3)
CASSLGGASRGAPNTQYF

SEQ ID NO: 437047 - protein, 12 aa, Homo sapiens
  CDR3 for alpha chain variable domain of TCR clone 218524 (TRAV21, TRAJ23)
CAVMLQGGKLIF

SEQ ID NO: 437048 - protein, 15 aa, Homo sapiens
  CDR3 for beta chain variable domain of TCR clone 218524 (TRBV20-1, TRBJ2-7)
CSARDRVSGMDEQYF

SEQ ID NO: 437049 - protein, 13 aa, Homo sapiens
  CDR3 for alpha chain variable domain of TCR clone 218525 (TRAV27, TRAJ53)
CAGQGGSHYKLTF

SEQ ID NO: 437050 - protein, 13 aa, Homo sapiens
  CDR3 for beta chain variable domain of TCR clone 218525 (TRBV29-1, TRBJ1-1)
CSVESGFGTEAFF

SEQ ID NO: 437051 - protein, 15 aa, Homo sapiens
  CDR3 for alpha chain variable domain of TCR clone 218526 (TRAV21, TRAJ53)
CATLNSGGSHYKLTF

SEQ ID NO: 437052 - protein, 14 aa, Homo sapiens
  CDR3 for beta chain variable domain of TCR clone 218526 (TRBV15, TRBJ1-2)
CATSRASVNYGYTF

SEQ ID NO: 437053 - protein, 16 aa, Homo sapiens
  CDR3 for alpha chain variable domain of TCR clone 218527 (TRAV30, TRAJ24)
CGTEIVDAYSWGKFQF

SEQ ID NO: 437054 - protein, 18 aa, Homo sapiens
  CDR3 for beta chain variable domain of TCR clone 218527 (TRBV11-2, TRBJ2-3)
CASSLGGASRGAPNTQYF

SEQ ID NO: 437055 - protein, 14 aa, Homo sapiens
  CDR3 for alpha chain variable domain of TCR clone 218528 (TRAV13-1, TRAJ10)
CAAKEPGGGNKLTF

SEQ ID NO: 437056 - protein, 16 aa, Homo sapiens
  CDR3 for beta chain variable domain of TCR clone 218528 (TRBV12-4, TRBJ1-5)
CASSRPVGGSNQPQHF

SEQ ID NO: 437057 - protein, 15 aa, Homo sapiens
  CDR3 for alpha chain variable domain of TCR clone 218529 (TRAV13-1, TRAJ4)
CAASLISGGYNKMIF

SEQ ID NO: 437058 - protein, 15 aa, Homo sapiens
  CDR3 for beta chain variable domain of TCR clone 218529 (TRBV28, TRBJ2-3)
CASTPRGENTDTQYF

SEQ ID NO: 437059 - protein, 13 aa, Homo sapiens
  CDR3 for alpha chain variable domain of TCR clone 218530 (TRAV13-2, TRAJ48)
CAEMDFGNEKLTF

SEQ ID NO: 437060 - protein, 15 aa, Homo sapiens
  CDR3 for beta chain variable domain of TCR clone 218530 (TRBV27, TRBJ2-5)
CASSLCPRGGETQYF

SEQ ID NO: 437061 - protein, 12 aa, Homo sapiens
  CDR3 for alpha chain variable domain of TCR clone 218531 (TRAV2, TRAJ3)
CAVRSSASKIIF

SEQ ID NO: 437062 - protein, 14 aa, Homo sapiens
  CDR3 for beta chain variable domain of TCR clone 218531 (TRBV7-6, TRBJ2-3)
CASSVAGGTDTQYF

SEQ ID NO: 437063 - protein, 13 aa, Homo sapiens
  CDR3 for alpha chain variable domain of TCR clone 218532 (TRAV21, TRAJ27)
CAALNTNAGKSTF

SEQ ID NO: 437064 - protein, 16 aa, Homo sapiens
  CDR3 for beta chain variable domain of TCR clone 218532 (TRBV4-1, TRBJ2-5)
CASSQAIAASSATQYF

SEQ ID NO: 437065 - protein, 16 aa, Homo sapiens
  CDR3 for alpha chain variable domain of TCR clone 218533 (TRAV26-1, TRAJ37)
CIVIGDGSGNTGKLIF

SEQ ID NO: 437066 - protein, 17 aa, Homo sapiens
  CDR3 for beta chain variable domain of TCR clone 218533 (TRBV4-1, TRBJ2-7)
CASSRDPLGVRGGEQYF

SEQ ID NO: 437067 - protein, 14 aa, Homo sapiens
  CDR3 for alpha chain variable domain of TCR clone 218534 (TRAV30, TRAJ26)
CGTEIVSYGQNFVF

SEQ ID NO: 437068 - protein, 15 aa, Homo sapiens
  CDR3 for beta chain variable domain of TCR clone 218534 (TRBV7-9, TRBJ1-2)
CASSLDREPNYGYTF

SEQ ID NO: 437069 - protein, 14 aa, Homo sapiens
  CDR3 for alpha chain variable domain of TCR clone 218535 (TRAV13-1, TRAJ35)
CAASKGGFGNVLHC

SEQ ID NO: 437070 - protein, 13 aa, Homo sapiens
  CDR3 for beta chain variable domain of TCR clone 218535 (TRBV7-3, TRBJ1-1)
CASSQDWVAEASF

SEQ ID NO: 437071 - protein, 12 aa, Homo sapiens
  CDR3 for alpha chain variable domain of TCR clone 218536 (TRAV12-3, TRAJ17)
CAMTLTGNKLTF

SEQ ID NO: 437072 - protein, 15 aa, Homo sapiens
  CDR3 for beta chain variable domain of TCR clone 218536 (TRBV19, TRBJ2-1)
CASSGGGTLYNEQFF

SEQ ID NO: 437073 - protein, 16 aa, Homo sapiens
  CDR3 for alpha chain variable domain of TCR clone 218537 (TRAV14/DV4, TRAJ54)
CAMREGRIQGAQKLVF

SEQ ID NO: 437074 - protein, 13 aa, Homo sapiens
  CDR3 for beta chain variable domain of TCR clone 218537 (TRBV4-2, TRBJ1-1)
CASSQAGDTEAFF

SEQ ID NO: 437075 - protein, 12 aa, Homo sapiens
  CDR3 for alpha chain variable domain of TCR clone 218538 (TRAV16, TRAJ12)
CAHGDSSYKLIF

SEQ ID NO: 437076 - protein, 12 aa, Homo sapiens
  CDR3 for beta chain variable domain of TCR clone 218538 (TRBV28, TRBJ2-1)
CASSRVVGEQFF

SEQ ID NO: 437077 - protein, 15 aa, Homo sapiens
  CDR3 for alpha chain variable domain of TCR clone 218539 (TRAV8-3, TRAJ45)
CASSYSGGGADGITF

SEQ ID NO: 437078 - protein, 11 aa, Homo sapiens
  CDR3 for beta chain variable domain of TCR clone 218539 (TRBV19, TRBJ1-1)
CASSIGSEAFF

SEQ ID NO: 437079 - protein, 14 aa, Homo sapiens
  CDR3 for alpha chain variable domain of TCR clone 218540 (TRAV1-2, TRAJ8)
CAVSEDTGFQKLVF

SEQ ID NO: 437080 - protein, 16 aa, Homo sapiens
  CDR3 for beta chain variable domain of TCR clone 218540 (TRBV12-4, TRBJ1-5)
CASSRPVGGSNQPQHF

SEQ ID NO: 437081 - protein, 17 aa, Homo sapiens
  CDR3 for alpha chain variable domain of TCR clone 218541 (TRAV17, TRAJ7)
CATLGRLAFGKGNQVVV

SEQ ID NO: 437082 - protein, 12 aa, Homo sapiens
  CDR3 for beta chain variable domain of TCR clone 218541 (TRBV12-4, TRBJ2-7)
CSSLERVREQYF

SEQ ID NO: 437083 - protein, 18 aa, Homo sapiens
  CDR3 for alpha chain variable domain of TCR clone 218542 (TRAV12-3, TRAJ52)
CAMSVGGAGGTSDGKLKF

SEQ ID NO: 437084 - protein, 15 aa, Homo sapiens
  CDR3 for beta chain variable domain of TCR clone 218542 (TRBV27, TRBJ1-6)
CASSFDRGLGSPLHF

SEQ ID NO: 437085 - protein, 12 aa, Homo sapiens
  CDR3 for alpha chain variable domain of TCR clone 218543 (TRAV3, TRAJ27)
GAGRDKAGKSTF

SEQ ID NO: 437086 - protein, 14 aa, Homo sapiens
  CDR3 for beta chain variable domain of TCR clone 218543 (TRBV5-1, TRBJ1-2)
CASSVDSTNYGYTF

SEQ ID NO: 437087 - protein, 14 aa, Homo sapiens
  CDR3 for alpha chain variable domain of TCR clone 218544 (TRAV9-2, TRAJ9)
CALTLSTGGFKTIF

SEQ ID NO: 437088 - protein, 16 aa, Homo sapiens
  CDR3 for beta chain variable domain of TCR clone 218544 (TRBV7-6, TRBJ2-1)
CASSAPGPSSYNEQFF

SEQ ID NO: 437089 - protein, 14 aa, Homo sapiens
  CDR3 for alpha chain variable domain of TCR clone 218545 (TRAV27, TRAJ22)
CAGVSVLGKRQLTF

SEQ ID NO: 437090 - protein, 17 aa, Homo sapiens
  CDR3 for beta chain variable domain of TCR clone 218545 (TRBV14, TRBJ2-1)
CASSQDRRVASYNEQFF

SEQ ID NO: 437091 - protein, 15 aa, Homo sapiens
  CDR3 for alpha chain variable domain of TCR clone 218546 (TRAV8-4, TRAJ37)
CAVSRGSGNTGKLIF

SEQ ID NO: 437092 - protein, 16 aa, Homo sapiens
  CDR3 for beta chain variable domain of TCR clone 218546 (TRBV12-4, TRBJ1-5)
CASSSGPRGSNQPQHF

SEQ ID NO: 437093 - protein, 11 aa, Homo sapiens
  CDR3 for alpha chain variable domain of TCR clone 218547 (TRAV16, TRAJ33)
CALHSNYLLIW

SEQ ID NO: 437094 - protein, 19 aa, Homo sapiens
  CDR3 for beta chain variable domain of TCR clone 218547 (TRBV4-1, TRBJ2-7)
CASSQQGQGLTSSTSGRAP

SEQ ID NO: 437095 - protein, 12 aa, Homo sapiens
  CDR3 for alpha chain variable domain of TCR clone 218548 (TRAV12-2, TRAJ10)
WGVTGGGNKLTF
